United States Patent Application Publication US 2014/0004565 A1 - sequence listing, part 53

SEQ ID NO: 1254597 - RNA, 19 nt, Artificial Sequence
  Description of Artificial Sequence: Synthetic oligonucleotide
ggcucaccaauuucagaga

SEQ ID NO: 1254598 - RNA, 19 nt, Artificial Sequence
  Description of Artificial Sequence: Synthetic oligonucleotide
ugcguagccuuuggacaga

SEQ ID NO: 1254599 - RNA, 19 nt, Artificial Sequence
  Description of Artificial Sequence: Synthetic oligonucleotide
aaacuacaggguaccucua

SEQ ID NO: 1254600 - RNA, 19 nt, Artificial Sequence
  Description of Artificial Sequence: Synthetic oligonucleotide
acucucacuucuaccucga

SEQ ID NO: 1254601 - RNA, 19 nt, Artificial Sequence
  Description of Artificial Sequence: Synthetic oligonucleotide
ggggaacauaaguuacaga

SEQ ID NO: 1254602 - RNA, 19 nt, Artificial Sequence
  Description of Artificial Sequence: Synthetic oligonucleotide
ugugcaccuugguggguuu

SEQ ID NO: 1254603 - RNA, 19 nt, Artificial Sequence
  Description of Artificial Sequence: Synthetic oligonucleotide
cgcacaggagaccugcgcc

SEQ ID NO: 1254604 - RNA, 19 nt, Artificial Sequence
  Description of Artificial Sequence: Synthetic oligonucleotide
guuuggauuuggagcggga

SEQ ID NO: 1254605 - RNA, 19 nt, Artificial Sequence
  Description of Artificial Sequence: Synthetic oligonucleotide
ggagcgggaacgccgccug

SEQ ID NO: 1254606 - RNA, 19 nt, Artificial Sequence
  Description of Artificial Sequence: Synthetic oligonucleotide
cuucuaccucgagucugag

SEQ ID NO: 1254607 - RNA, 19 nt, Artificial Sequence
  Description of Artificial Sequence: Synthetic oligonucleotide
ccgccuguugucaugccug

SEQ ID NO: 1254608 - RNA, 19 nt, Artificial Sequence
  Description of Artificial Sequence: Synthetic oligonucleotide
cugcuuaucgggaggaguu

SEQ ID NO: 1254609 - RNA, 19 nt, Artificial Sequence
  Description of Artificial Sequence: Synthetic oligonucleotide
acuucucaucagagcgguc

SEQ ID NO: 1254610 - RNA, 19 nt, Artificial Sequence
  Description of Artificial Sequence: Synthetic oligonucleotide
auccuccugaagaggaaau

SEQ ID NO: 1254611 - RNA, 19 nt, Artificial Sequence
  Description of Artificial Sequence: Synthetic oligonucleotide
cccuuuaucuuuagagcga

SEQ ID NO: 1254612 - RNA, 19 nt, Artificial Sequence
  Description of Artificial Sequence: Synthetic oligonucleotide
cugagaaacgaucccuaau

SEQ ID NO: 1254613 - RNA, 19 nt, Artificial Sequence
  Description of Artificial Sequence: Synthetic oligonucleotide
uccucccgcucuucucaga

SEQ ID NO: 1254614 - RNA, 19 nt, Artificial Sequence
  Description of Artificial Sequence: Synthetic oligonucleotide
cucaccaauuucagagagu

SEQ ID NO: 1254615 - RNA, 19 nt, Artificial Sequence
  Description of Artificial Sequence: Synthetic oligonucleotide
uccuugcgcuugguaggag

SEQ ID NO: 1254616 - RNA, 19 nt, Artificial Sequence
  Description of Artificial Sequence: Synthetic oligonucleotide
gucaugccugcgccgagaa

SEQ ID NO: 1254617 - RNA, 19 nt, Artificial Sequence
  Description of Artificial Sequence: Synthetic oligonucleotide
gcaaugucggccucacuua

SEQ ID NO: 1254618 - RNA, 19 nt, Artificial Sequence
  Description of Artificial Sequence: Synthetic oligonucleotide
cuccuacgcacaggagacc

SEQ ID NO: 1254619 - RNA, 19 nt, Artificial Sequence
  Description of Artificial Sequence: Synthetic oligonucleotide
uuacgccaaagagcagcau

SEQ ID NO: 1254620 - RNA, 19 nt, Artificial Sequence
  Description of Artificial Sequence: Synthetic oligonucleotide
ggguagguuccaugaggac

SEQ ID NO: 1254621 - RNA, 19 nt, Artificial Sequence
  Description of Artificial Sequence: Synthetic oligonucleotide
caccaauuucagagaguaa

SEQ ID NO: 1254622 - RNA, 19 nt, Artificial Sequence
  Description of Artificial Sequence: Synthetic oligonucleotide
cucccacuugaagcacugc

SEQ ID NO: 1254623 - RNA, 19 nt, Artificial Sequence
  Description of Artificial Sequence: Synthetic oligonucleotide
ggccucacuuaaucugaac

SEQ ID NO: 1254624 - RNA, 19 nt, Artificial Sequence
  Description of Artificial Sequence: Synthetic oligonucleotide
caccuugguggguuuaggu

SEQ ID NO: 1254625 - RNA, 19 nt, Artificial Sequence
  Description of Artificial Sequence: Synthetic oligonucleotide
ccucccgcucuucucagac

SEQ ID NO: 1254626 - RNA, 19 nt, Artificial Sequence
  Description of Artificial Sequence: Synthetic oligonucleotide
gggaacgccgccuguuguc

SEQ ID NO: 1254627 - RNA, 19 nt, Artificial Sequence
  Description of Artificial Sequence: Synthetic oligonucleotide
ccacgauccuucucacuug

SEQ ID NO: 1254628 - RNA, 19 nt, Artificial Sequence
  Description of Artificial Sequence: Synthetic oligonucleotide
gguacgaaucaaugucccu

SEQ ID NO: 1254629 - RNA, 19 nt, Artificial Sequence
  Description of Artificial Sequence: Synthetic oligonucleotide
cuaccucgagucugagaaa

SEQ ID NO: 1254630 - RNA, 19 nt, Artificial Sequence
  Description of Artificial Sequence: Synthetic oligonucleotide
cucgagucugagaaacgau

SEQ ID NO: 1254631 - RNA, 19 nt, Artificial Sequence
  Description of Artificial Sequence: Synthetic oligonucleotide
gggcugaaucgccgugggg

SEQ ID NO: 1254632 - RNA, 19 nt, Artificial Sequence
  Description of Artificial Sequence: Synthetic oligonucleotide
ggcuucgccucuuccuuuc

SEQ ID NO: 1254633 - RNA, 19 nt, Artificial Sequence
  Description of Artificial Sequence: Synthetic oligonucleotide
guccuugcgcuugguagga

SEQ ID NO: 1254634 - RNA, 19 nt, Artificial Sequence
  Description of Artificial Sequence: Synthetic oligonucleotide
gguuuaggugaagggcuuc

SEQ ID NO: 1254635 - RNA, 19 nt, Artificial Sequence
  Description of Artificial Sequence: Synthetic oligonucleotide
ggaucgagaccuggugcug

SEQ ID NO: 1254636 - RNA, 19 nt, Artificial Sequence
  Description of Artificial Sequence: Synthetic oligonucleotide
aguggccccuuuaucuuua

SEQ ID NO: 1254637 - RNA, 19 nt, Artificial Sequence
  Description of Artificial Sequence: Synthetic oligonucleotide
agguuccaugaggacccug

SEQ ID NO: 1254638 - RNA, 19 nt, Artificial Sequence
  Description of Artificial Sequence: Synthetic oligonucleotide
ucccugccacgauccuucu

SEQ ID NO: 1254639 - RNA, 19 nt, Artificial Sequence
  Description of Artificial Sequence: Synthetic oligonucleotide
cuggaaggggugaacuuuu

SEQ ID NO: 1254640 - RNA, 19 nt, Artificial Sequence
  Description of Artificial Sequence: Synthetic oligonucleotide
gaggacccuguaguacuaa

SEQ ID NO: 1254641 - RNA, 19 nt, Artificial Sequence
  Description of Artificial Sequence: Synthetic oligonucleotide
gcagugaucucuuggccau

SEQ ID NO: 1254642 - RNA, 19 nt, Artificial Sequence
  Description of Artificial Sequence: Synthetic oligonucleotide
cuuugacuccuagcaagcu

SEQ ID NO: 1254643 - RNA, 19 nt, Artificial Sequence
  Description of Artificial Sequence: Synthetic oligonucleotide
ugccugcgccgagaagggc

SEQ ID NO: 1254644 - RNA, 19 nt, Artificial Sequence
  Description of Artificial Sequence: Synthetic oligonucleotide
uagguuccaugaggacccu

SEQ ID NO: 1254645 - RNA, 19 nt, Artificial Sequence
  Description of Artificial Sequence: Synthetic oligonucleotide
gagcgauccuuggacuucu

SEQ ID NO: 1254646 - RNA, 19 nt, Artificial Sequence
  Description of Artificial Sequence: Synthetic oligonucleotide
ccucgagucugagaaacga

SEQ ID NO: 1254647 - RNA, 19 nt, Artificial Sequence
  Description of Artificial Sequence: Synthetic oligonucleotide
cacugcgucucuuccgagu

SEQ ID NO: 1254648 - RNA, 19 nt, Artificial Sequence
  Description of Artificial Sequence: Synthetic oligonucleotide
gaggcgguggaagcauucu

SEQ ID NO: 1254649 - RNA, 19 nt, Artificial Sequence
  Description of Artificial Sequence: Synthetic oligonucleotide
ccuugcgcuugguaggaga

SEQ ID NO: 1254650 - RNA, 19 nt, Artificial Sequence
  Description of Artificial Sequence: Synthetic oligonucleotide
gcuucgccucuuccuuucc

SEQ ID NO: 1254651 - RNA, 19 nt, Artificial Sequence
  Description of Artificial Sequence: Synthetic oligonucleotide
gcgggaacgccgccuguug

SEQ ID NO: 1254652 - RNA, 19 nt, Artificial Sequence
  Description of Artificial Sequence: Synthetic oligonucleotide
ccuacgcacaggagaccug

SEQ ID NO: 1254653 - RNA, 19 nt, Artificial Sequence
  Description of Artificial Sequence: Synthetic oligonucleotide
ggacccuguaguacuaacu

SEQ ID NO: 1254654 - RNA, 19 nt, Artificial Sequence
  Description of Artificial Sequence: Synthetic oligonucleotide
ccucuaugggcacaguccu

SEQ ID NO: 1254655 - RNA, 19 nt, Artificial Sequence
  Description of Artificial Sequence: Synthetic oligonucleotide
agcgggaacgccgccuguu

SEQ ID NO: 1254656 - RNA, 19 nt, Artificial Sequence
  Description of Artificial Sequence: Synthetic oligonucleotide
caucuaauccuagguuuau

SEQ ID NO: 1254657 - RNA, 19 nt, Artificial Sequence
  Description of Artificial Sequence: Synthetic oligonucleotide
cugcgccacaugggaggcg

SEQ ID NO: 1254658 - RNA, 19 nt, Artificial Sequence
  Description of Artificial Sequence: Synthetic oligonucleotide
gcuucgggaugugcuggag

SEQ ID NO: 1254659 - RNA, 19 nt, Artificial Sequence
  Description of Artificial Sequence: Synthetic oligonucleotide
gcacugcgucucuuccgag

SEQ ID NO: 1254660 - RNA, 19 nt, Artificial Sequence
  Description of Artificial Sequence: Synthetic oligonucleotide
cagugaucucuuggccauc

SEQ ID NO: 1254661 - RNA, 19 nt, Artificial Sequence
  Description of Artificial Sequence: Synthetic oligonucleotide
ggaggcgguggaagcauuc

SEQ ID NO: 1254662 - RNA, 19 nt, Artificial Sequence
  Description of Artificial Sequence: Synthetic oligonucleotide
gccaucuauuuguccucca

SEQ ID NO: 1254663 - RNA, 19 nt, Artificial Sequence
  Description of Artificial Sequence: Synthetic oligonucleotide
ccuguaguacuaacuggcu

SEQ ID NO: 1254664 - RNA, 19 nt, Artificial Sequence
  Description of Artificial Sequence: Synthetic oligonucleotide
ccuaaucgauugcaauuua

SEQ ID NO: 1254665 - RNA, 19 nt, Artificial Sequence
  Description of Artificial Sequence: Synthetic oligonucleotide
ccuagcaagcucuucuuuu

SEQ ID NO: 1254666 - RNA, 19 nt, Artificial Sequence
  Description of Artificial Sequence: Synthetic oligonucleotide
cacuccugauaaauccauu

SEQ ID NO: 1254667 - RNA, 19 nt, Artificial Sequence
  Description of Artificial Sequence: Synthetic oligonucleotide
cuucccgaggccgccaccu

SEQ ID NO: 1254668 - RNA, 19 nt, Artificial Sequence
  Description of Artificial Sequence: Synthetic oligonucleotide
acgauccuucucacuugau

SEQ ID NO: 1254669 - RNA, 19 nt, Artificial Sequence
  Description of Artificial Sequence: Synthetic oligonucleotide
cgaucccuaaucgauugca

SEQ ID NO: 1254670 - RNA, 19 nt, Artificial Sequence
  Description of Artificial Sequence: Synthetic oligonucleotide
gucuuaucccugccacgau

SEQ ID NO: 1254671 - RNA, 19 nt, Artificial Sequence
  Description of Artificial Sequence: Synthetic oligonucleotide
gaacgccgccuguugucau

SEQ ID NO: 1254672 - RNA, 19 nt, Artificial Sequence
  Description of Artificial Sequence: Synthetic oligonucleotide
ccaugaggacccuguagua

SEQ ID NO: 1254673 - RNA, 19 nt, Artificial Sequence
  Description of Artificial Sequence: Synthetic oligonucleotide
gcggcuggaugcagaggag

SEQ ID NO: 1254674 - RNA, 19 nt, Artificial Sequence
  Description of Artificial Sequence: Synthetic oligonucleotide
guaccucugcagccagaau

SEQ ID NO: 1254675 - RNA, 19 nt, Artificial Sequence
  Description of Artificial Sequence: Synthetic oligonucleotide
cccuaaucgauugcaauuu

SEQ ID NO: 1254676 - RNA, 19 nt, Artificial Sequence
  Description of Artificial Sequence: Synthetic oligonucleotide
gaccugcgccuuggggauc

SEQ ID NO: 1254677 - RNA, 19 nt, Artificial Sequence
  Description of Artificial Sequence: Synthetic oligonucleotide
gggugaccugcgccacaug

SEQ ID NO: 1254678 - RNA, 19 nt, Artificial Sequence
  Description of Artificial Sequence: Synthetic oligonucleotide
ccaucuauuuguccuccau

SEQ ID NO: 1254679 - RNA, 19 nt, Artificial Sequence
  Description of Artificial Sequence: Synthetic oligonucleotide
cugcgucucuuccgagucu

SEQ ID NO: 1254680 - RNA, 19 nt, Artificial Sequence
  Description of Artificial Sequence: Synthetic oligonucleotide
gccugcgccgagaagggcu

SEQ ID NO: 1254681 - RNA, 19 nt, Artificial Sequence
  Description of Artificial Sequence: Synthetic oligonucleotide
gagcgggaacgccgccugu

SEQ ID NO: 1254682 - RNA, 19 nt, Artificial Sequence
  Description of Artificial Sequence: Synthetic oligonucleotide
ccacauaugcguagccuuu

SEQ ID NO: 1254683 - RNA, 19 nt, Artificial Sequence
  Description of Artificial Sequence: Synthetic oligonucleotide
ccuuggggaucgagaccuc

SEQ ID NO: 1254684 - RNA, 19 nt, Artificial Sequence
  Description of Artificial Sequence: Synthetic oligonucleotide
gguuaaccugcaacaucau

SEQ ID NO: 1254685 - RNA, 19 nt, Artificial Sequence
  Description of Artificial Sequence: Synthetic oligonucleotide
ccagguuaaccugcaacau

SEQ ID NO: 1254686 - RNA, 19 nt, Artificial Sequence
  Description of Artificial Sequence: Synthetic oligonucleotide
ggguuuaggugaagggcuu

SEQ ID NO: 1254687 - RNA, 19 nt, Artificial Sequence
  Description of Artificial Sequence: Synthetic oligonucleotide
guaccucuaugggcacagu

SEQ ID NO: 1254688 - RNA, 19 nt, Artificial Sequence
  Description of Artificial Sequence: Synthetic oligonucleotide
ggucuaggccagggugcca

SEQ ID NO: 1254689 - RNA, 19 nt, Artificial Sequence
  Description of Artificial Sequence: Synthetic oligonucleotide
cccuucugagguguucaaa

SEQ ID NO: 1254690 - RNA, 19 nt, Artificial Sequence
  Description of Artificial Sequence: Synthetic oligonucleotide
cccugccacgauccuucuc

SEQ ID NO: 1254691 - RNA, 19 nt, Artificial Sequence
  Description of Artificial Sequence: Synthetic oligonucleotide
cagagcgguccuugcgcuu

SEQ ID NO: 1254692 - RNA, 19 nt, Artificial Sequence
  Description of Artificial Sequence: Synthetic oligonucleotide
cagcaaugucggccucacu

SEQ ID NO: 1254693 - RNA, 19 nt, Artificial Sequence
  Description of Artificial Sequence: Synthetic oligonucleotide
gcgccgagaagggcuugga

SEQ ID NO: 1254694 - RNA, 19 nt, Artificial Sequence
  Description of Artificial Sequence: Synthetic oligonucleotide
gcggcggccaggagaucga

SEQ ID NO: 1254695 - RNA, 19 nt, Artificial Sequence
  Description of Artificial Sequence: Synthetic oligonucleotide
cggccucacuuaaucugaa

SEQ ID NO: 1254696 - RNA, 19 nt, Artificial Sequence
  Description of Artificial Sequence: Synthetic oligonucleotide
gcccuagugcuggacuuuu

SEQ ID NO: 1254697 - RNA, 19 nt, Artificial Sequence
  Description of Artificial Sequence: Synthetic oligonucleotide
gcguagccuuuggacagau

SEQ ID NO: 1254698 - RNA, 19 nt, Artificial Sequence
  Description of Artificial Sequence: Synthetic oligonucleotide
cgggaacgccgccuguugu

SEQ ID NO: 1254699 - RNA, 19 nt, Artificial Sequence
  Description of Artificial Sequence: Synthetic oligonucleotide
gcgccacaugggaggcggu

SEQ ID NO: 1254700 - RNA, 19 nt, Artificial Sequence
  Description of Artificial Sequence: Synthetic oligonucleotide
ccugcgccuuggggaucga

SEQ ID NO: 1254701 - RNA, 19 nt, Artificial Sequence
  Description of Artificial Sequence: Synthetic oligonucleotide
gccucccaaugugcaccuu

SEQ ID NO: 1254702 - RNA, 19 nt, Artificial Sequence
  Description of Artificial Sequence: Synthetic oligonucleotide
aagaauaagacacuuggac

SEQ ID NO: 1254703 - RNA, 19 nt, Artificial Sequence
  Description of Artificial Sequence: Synthetic oligonucleotide
aacauugauucauaguggc

SEQ ID NO: 1254704 - RNA, 19 nt, Artificial Sequence
  Description of Artificial Sequence: Synthetic oligonucleotide
agaagaauaagacacuugg

SEQ ID NO: 1254705 - RNA, 19 nt, Artificial Sequence
  Description of Artificial Sequence: Synthetic oligonucleotide
agcuuuguaacccuaaccc

SEQ ID NO: 1254706 - RNA, 19 nt, Artificial Sequence
  Description of Artificial Sequence: Synthetic oligonucleotide
aaauagaagauauaccacu

SEQ ID NO: 1254707 - RNA, 19 nt, Artificial Sequence
  Description of Artificial Sequence: Synthetic oligonucleotide
uuuauuuucugucagugga

SEQ ID NO: 1254708 - RNA, 19 nt, Artificial Sequence
  Description of Artificial Sequence: Synthetic oligonucleotide
agaaacauagcccagugag

SEQ ID NO: 1254709 - RNA, 19 nt, Artificial Sequence
  Description of Artificial Sequence: Synthetic oligonucleotide
gaagauauaccacuggaag

SEQ ID NO: 1254710 - RNA, 19 nt, Artificial Sequence
  Description of Artificial Sequence: Synthetic oligonucleotide
auuaggcccaauuaaaggg

SEQ ID NO: 1254711 - RNA, 19 nt, Artificial Sequence
  Description of Artificial Sequence: Synthetic oligonucleotide
auuaaagggaacaacaccg

SEQ ID NO: 1254712 - RNA, 19 nt, Artificial Sequence
  Description of Artificial Sequence: Synthetic oligonucleotide
  modified_base (9)..(9): a, c, u, g, unknown or other
aagugcuunucccagcagc

SEQ ID NO: 1254713 - RNA, 19 nt, Artificial Sequence
  Description of Artificial Sequence: Synthetic oligonucleotide
aaaccaauugcucuccagg

SEQ ID NO: 1254714 - RNA, 19 nt, Artificial Sequence
  Description of Artificial Sequence: Synthetic oligonucleotide
  modified_base (14)..(14): a, c, u, g, unknown or other
ucugagucuuguunaaagg

SEQ ID NO: 1254715 - RNA, 19 nt, Artificial Sequence
  Description of Artificial Sequence: Synthetic oligonucleotide
aacguuacagguugccugc

SEQ ID NO: 1254716 - RNA, 19 nt, Artificial Sequence
  Description of Artificial Sequence: Synthetic oligonucleotide
  modified_base (4)..(4): a, c, u, g, unknown or other
guunaaaggggucacacug

SEQ ID NO: 1254717 - RNA, 19 nt, Artificial Sequence
  Description of Artificial Sequence: Synthetic oligonucleotide
ugaguaaacaaugucggcg

SEQ ID NO: 1254718 - RNA, 19 nt, Artificial Sequence
  Description of Artificial Sequence: Synthetic oligonucleotide
ucagucuugucacucaacg

SEQ ID NO: 1254719 - RNA, 19 nt, Artificial Sequence
  Description of Artificial Sequence: Synthetic oligonucleotide
aacccuauuucauuguuag

SEQ ID NO: 1254720 - RNA, 19 nt, Artificial Sequence
  Description of Artificial Sequence: Synthetic oligonucleotide
  modified_base (12)..(12): a, c, u, g, unknown or other
ugagucuuguunaaagggg

SEQ ID NO: 1254721 - RNA, 19 nt, Artificial Sequence
  Description of Artificial Sequence: Synthetic oligonucleotide
aagaggggaauuucuaggg

SEQ ID NO: 1254722 - RNA, 19 nt, Artificial Sequence
  Description of Artificial Sequence: Synthetic oligonucleotide
auguaagugaagaagacac

SEQ ID NO: 1254723 - RNA, 19 nt, Artificial Sequence
  Description of Artificial Sequence: Synthetic oligonucleotide
uuugucagaaguuauccug

SEQ ID NO: 1254724 - RNA, 19 nt, Artificial Sequence
  Description of Artificial Sequence: Synthetic oligonucleotide
uagagucagaaacauagcc

SEQ ID NO: 1254725 - RNA, 19 nt, Artificial Sequence
  Description of Artificial Sequence: Synthetic oligonucleotide
cagugaguaaacaaugucg

SEQ ID NO: 1254726 - RNA, 19 nt, Artificial Sequence
  Description of Artificial Sequence: Synthetic oligonucleotide
gaagaugaauguaauaaag

SEQ ID NO: 1254727 - RNA, 19 nt, Artificial Sequence
  Description of Artificial Sequence: Synthetic oligonucleotide
uaaacaaugucggcgaagg

SEQ ID NO: 1254728 - RNA, 19 nt, Artificial Sequence
  Description of Artificial Sequence: Synthetic oligonucleotide
  modified_base (3)..(3): a, c, u, g, unknown or other
uunaaaggggucacacugg

SEQ ID NO: 1254729 - RNA, 19 nt, Artificial Sequence
  Description of Artificial Sequence: Synthetic oligonucleotide
ugaucaaugugcaugggga

SEQ ID NO: 1254730 - RNA, 19 nt, Artificial Sequence
  Description of Artificial Sequence: Synthetic oligonucleotide
agucauugaaggcugauug

SEQ ID NO: 1254731 - RNA, 19 nt, Artificial Sequence
  Description of Artificial Sequence: Synthetic oligonucleotide
agaugaauguaauaaagau

SEQ ID NO: 1254732 - RNA, 19 nt, Artificial Sequence
  Description of Artificial Sequence: Synthetic oligonucleotide
aagauauaccacuggaagu

SEQ ID NO: 1254733 - RNA, 19 nt, Artificial Sequence
  Description of Artificial Sequence: Synthetic oligonucleotide
  modified_base (13)..(13): a, c, u, g, unknown or other
cugagucuuguunaaaggg

SEQ ID NO: 1254734 - RNA, 19 nt, Artificial Sequence
  Description of Artificial Sequence: Synthetic oligonucleotide
uguaagugaagaagacacg

SEQ ID NO: 1254735 - RNA, 19 nt, Artificial Sequence
  Description of Artificial Sequence: Synthetic oligonucleotide
cuauuggugaagauaggcg

SEQ ID NO: 1254736 - RNA, 19 nt, Artificial Sequence
  Description of Artificial Sequence: Synthetic oligonucleotide
aguuaacaagcuuucguuc

SEQ ID NO: 1254737 - RNA, 19 nt, Artificial Sequence
  Description of Artificial Sequence: Synthetic oligonucleotide
uaagugaagaagacacggg

SEQ ID NO: 1254738 - RNA, 19 nt, Artificial Sequence
  Description of Artificial Sequence: Synthetic oligonucleotide
uuugaacauugauucauag

SEQ ID NO: 1254739 - RNA, 19 nt, Artificial Sequence
  Description of Artificial Sequence: Synthetic oligonucleotide
uuuuaucacugucacauuc

SEQ ID NO: 1254740 - RNA, 19 nt, Artificial Sequence
  Description of Artificial Sequence: Synthetic oligonucleotide
agagucagaaacauagccc

SEQ ID NO: 1254741 - RNA, 19 nt, Artificial Sequence
  Description of Artificial Sequence: Synthetic oligonucleotide
uauuggugaagauaggcgu

SEQ ID NO: 1254742 - RNA, 19 nt, Artificial Sequence
  Description of Artificial Sequence: Synthetic oligonucleotide
ugauuggugaacguuacag

SEQ ID NO: 1254743 - RNA, 19 nt, Artificial Sequence
  Description of Artificial Sequence: Synthetic oligonucleotide
gauucuaugcaugaaugcc

SEQ ID NO: 1254744 - RNA, 19 nt, Artificial Sequence
  Description of Artificial Sequence: Synthetic oligonucleotide
uagaagauauaccacugga

SEQ ID NO: 1254745 - RNA, 19 nt, Artificial Sequence
  Description of Artificial Sequence: Synthetic oligonucleotide
augguuguauggcaugugc

SEQ ID NO: 1254746 - RNA, 19 nt, Artificial Sequence
  Description of Artificial Sequence: Synthetic oligonucleotide
aagauaggcguccaaccag

SEQ ID NO: 1254747 - RNA, 19 nt, Artificial Sequence
  Description of Artificial Sequence: Synthetic oligonucleotide
  modified_base (6)..(6): a, c, u, g, unknown or other
uuuucngacuuuauuuucu

SEQ ID NO: 1254748 - RNA, 19 nt, Artificial Sequence
  Description of Artificial Sequence: Synthetic oligonucleotide
agugaguaaacaaugucgg

SEQ ID NO: 1254749 - RNA, 19 nt, Artificial Sequence
  Description of Artificial Sequence: Synthetic oligonucleotide
auagaagauauaccacugg

SEQ ID NO: 1254750 - RNA, 19 nt, Artificial Sequence
  Description of Artificial Sequence: Synthetic oligonucleotide
cauuaggcccaauuaaagg

SEQ ID NO: 1254751 - RNA, 19 nt, Artificial Sequence
  Description of Artificial Sequence: Synthetic oligonucleotide
ucaggaugugguaacagca

SEQ ID NO: 1254752 - RNA, 19 nt, Artificial Sequence
  Description of Artificial Sequence: Synthetic oligonucleotide
aauagaagauauaccacug

SEQ ID NO: 1254753 - RNA, 19 nt, Artificial Sequence
  Description of Artificial Sequence: Synthetic oligonucleotide
gaauguaauaaagaugaac

SEQ ID NO: 1254754 - RNA, 19 nt, Artificial Sequence
  Description of Artificial Sequence: Synthetic oligonucleotide
aaagccagaagauuacaaa

SEQ ID NO: 1254755 - RNA, 19 nt, Artificial Sequence
  Description of Artificial Sequence: Synthetic oligonucleotide
guuacaaccagcucuuggc

SEQ ID NO: 1254756 - RNA, 19 nt, Artificial Sequence
  Description of Artificial Sequence: Synthetic oligonucleotide
auucuaugcaugaaugccc

SEQ ID NO: 1254757 - RNA, 19 nt, Artificial Sequence
  Description of Artificial Sequence: Synthetic oligonucleotide
uuauuuucugucaguggag

SEQ ID NO: 1254758 - RNA, 19 nt, Artificial Sequence
  Description of Artificial Sequence: Synthetic oligonucleotide
ucuacaugagcagagguga

SEQ ID NO: 1254759 - RNA, 19 nt, Artificial Sequence
  Description of Artificial Sequence: Synthetic oligonucleotide
augaucaaugugcaugggg

SEQ ID NO: 1254760 - RNA, 19 nt, Artificial Sequence
  Description of Artificial Sequence: Synthetic oligonucleotide
  modified_base (3)..(3): a, c, u, g, unknown or other
ucngacuuuauuuucuguc

SEQ ID NO: 1254761 - RNA, 19 nt, Artificial Sequence
  Description of Artificial Sequence: Synthetic oligonucleotide
ugaagauaggcguccaacc

SEQ ID NO: 1254762 - RNA, 19 nt, Artificial Sequence
  Description of Artificial Sequence: Synthetic oligonucleotide
aagccagaagauuacaaaa

SEQ ID NO: 1254763 - RNA, 19 nt, Artificial Sequence
  Description of Artificial Sequence: Synthetic oligonucleotide
uggugaacguuacagguug

SEQ ID NO: 1254764 - RNA, 19 nt, Artificial Sequence
  Description of Artificial Sequence: Synthetic oligonucleotide
ugaugucugggucuuugcg

SEQ ID NO: 1254765 - RNA, 19 nt, Artificial Sequence
  Description of Artificial Sequence: Synthetic oligonucleotide
aacaaugucggcgaaggcu

SEQ ID NO: 1254766 - RNA, 19 nt, Artificial Sequence
  Description of Artificial Sequence: Synthetic oligonucleotide
aguagagaggcaacaaggc

SEQ ID NO: 1254767 - RNA, 19 nt, Artificial Sequence
  Description of Artificial Sequence: Synthetic oligonucleotide
  modified_base (2)..(2): a, c, u, g, unknown or other
unaaaggggucacacuggc

SEQ ID NO: 1254768 - RNA, 19 nt, Artificial Sequence
  Description of Artificial Sequence: Synthetic oligonucleotide
caauuaaagggaacaacac

SEQ ID NO: 1254769 - RNA, 19 nt, Artificial Sequence
  Description of Artificial Sequence: Synthetic oligonucleotide
uucuaugcaugaaugcccc

SEQ ID NO: 1254770 - RNA, 19 nt, Artificial Sequence
  Description of Artificial Sequence: Synthetic oligonucleotide
ugcuaaaguagaagaaaca

SEQ ID NO: 1254771 - RNA, 19 nt, Artificial Sequence
  Description of Artificial Sequence: Synthetic oligonucleotide
gaacguuacagguugccug

SEQ ID NO: 1254772 - RNA, 19 nt, Artificial Sequence
  Description of Artificial Sequence: Synthetic oligonucleotide
aagauuacaaaacccuauu

SEQ ID NO: 1254773 - RNA, 19 nt, Artificial Sequence
  Description of Artificial Sequence: Synthetic oligonucleotide
  modified_base (2)..(2): a, c, u, g, unknown or other
unucccagcagcuggagac

SEQ ID NO: 1254774 - RNA, 19 nt, Artificial Sequence
  Description of Artificial Sequence: Synthetic oligonucleotide
uuucguuccaauguucugc

SEQ ID NO: 1254775 - RNA, 19 nt, Artificial Sequence
  Description of Artificial Sequence: Synthetic oligonucleotide
aaacauagcccagugagau

SEQ ID NO: 1254776 - RNA, 19 nt, Artificial Sequence
  Description of Artificial Sequence: Synthetic oligonucleotide
aaagggaacaacaccguug

SEQ ID NO: 1254777 - RNA, 19 nt, Artificial Sequence
  Description of Artificial Sequence: Synthetic oligonucleotide
uuaggcccaauuaaaggga

SEQ ID NO: 1254778 - RNA, 19 nt, Artificial Sequence
  Description of Artificial Sequence: Synthetic oligonucleotide
auaugguucaucuguguca

SEQ ID NO: 1254779 - RNA, 19 nt, Artificial Sequence
  Description of Artificial Sequence: Synthetic oligonucleotide
  modified_base (7)..(7): a, c, u, g, unknown or other
cuuuucngacuuuauuuuc

SEQ ID NO: 1254780 - RNA, 19 nt, Artificial Sequence
  Description of Artificial Sequence: Synthetic oligonucleotide
aaccaauugcucuccagga

SEQ ID NO: 1254781 - RNA, 19 nt, Artificial Sequence
  Description of Artificial Sequence: Synthetic oligonucleotide
ucagugaguaaacaauguc

SEQ ID NO: 1254782 - RNA, 19 nt, Artificial Sequence
  Description of Artificial Sequence: Synthetic oligonucleotide
uguuagacugacaugcuuu

SEQ ID NO: 1254783 - RNA, 19 nt, Artificial Sequence
  Description of Artificial Sequence: Synthetic oligonucleotide
aaccugacaaugaagaaaa

SEQ ID NO: 1254784 - RNA, 19 nt, Artificial Sequence
  Description of Artificial Sequence: Synthetic oligonucleotide
guaacccuaaccccaacag

SEQ ID NO: 1254785 - RNA, 19 nt, Artificial Sequence
  Description of Artificial Sequence: Synthetic oligonucleotide
uuacaagaggggaauuucu

SEQ ID NO: 1254786 - RNA, 19 nt, Artificial Sequence
  Description of Artificial Sequence: Synthetic oligonucleotide
  modified_base (5)..(5): a, c, u, g, unknown or other
uuucngacuuuauuuucug

SEQ ID NO: 1254787 - RNA, 19 nt, Artificial Sequence
  Description of Artificial Sequence: Synthetic oligonucleotide
uuaaagggaacaacaccgu

SEQ ID NO: 1254788 - RNA, 19 nt, Artificial Sequence
  Description of Artificial Sequence: Synthetic oligonucleotide
uguaacccuaaccccaaca

SEQ ID NO: 1254789 - RNA, 19 nt, Artificial Sequence
  Description of Artificial Sequence: Synthetic oligonucleotide
  modified_base (15)..(15): a, c, u, g, unknown or other
uuggacaagugcuunuccc

SEQ ID NO: 1254790 - RNA, 19 nt, Artificial Sequence
  Description of Artificial Sequence: Synthetic oligonucleotide
acagcuuuguaacccuaac

SEQ ID NO: 1254791 - RNA, 19 nt, Artificial Sequence
  Description of Artificial Sequence: Synthetic oligonucleotide
acagguugccugcagcugg

SEQ ID NO: 1254792 - RNA, 19 nt, Artificial Sequence
  Description of Artificial Sequence: Synthetic oligonucleotide
  modified_base (16)..(16): a, c, u, g, unknown or other
cuuggacaagugcuunucc

SEQ ID NO: 1254793 - RNA, 19 nt, Artificial Sequence
  Description of Artificial Sequence: Synthetic oligonucleotide
uaagacacuuggacaagug

SEQ ID NO: 1254794 - RNA, 19 nt, Artificial Sequence
  Description of Artificial Sequence: Synthetic oligonucleotide
uagacugacaugcuuuguc

SEQ ID NO: 1254795 - RNA, 19 nt, Artificial Sequence
  Description of Artificial Sequence: Synthetic oligonucleotide
  modified_base (5)..(5): a, c, u, g, unknown or other
uguunaaaggggucacacu

SEQ ID NO: 1254796 - RNA, 19 nt, Artificial Sequence
  Description of Artificial Sequence: Synthetic oligonucleotide
agccagaagauuacaaaac

SEQ ID NO: 1254797 - RNA, 19 nt, Artificial Sequence
  Description of Artificial Sequence: Synthetic oligonucleotide
aacaacaccguuggccagg

SEQ ID NO: 1254798 - RNA, 19 nt, Artificial Sequence
  Description of Artificial Sequence: Synthetic oligonucleotide
aacaacagaacagcuuugu

SEQ ID NO: 1254799 - RNA, 19 nt, Artificial Sequence
  Description of Artificial Sequence: Synthetic oligonucleotide
aaccccaacaguucuuccu

SEQ ID NO: 1254800 - RNA, 19 nt, Artificial Sequence
  Description of Artificial Sequence: Synthetic oligonucleotide
gaagauaggcguccaacca

SEQ ID NO: 1254801 - RNA, 19 nt, Artificial Sequence
  Description of Artificial Sequence: Synthetic oligonucleotide
  modified_base (8)..(8): a, c, u, g, unknown or other
acuuuucngacuuuauuuu

SEQ ID NO: 1254802 - RNA, 19 nt, Artificial Sequence
  Description of Artificial Sequence: Synthetic oligonucleotide
ucauugaaggcugauuggu

SEQ ID NO: 1254803 - RNA, 19 nt, Artificial Sequence
  Description of Artificial Sequence: Synthetic oligonucleotide
ugugucggggcaucguggg

SEQ ID NO: 1254804 - RNA, 19 nt, Artificial Sequence
  Description of Artificial Sequence: Synthetic oligonucleotide
  modified_base (10)..(10): a, c, u, g, unknown or other
agucuuguunaaagggguc

SEQ ID NO: 1254805 - RNA, 19 nt, Artificial Sequence
  Description of Artificial Sequence: Synthetic oligonucleotide
  modified_base (6)..(6): a, c, u, g, unknown or other
uuguunaaaggggucacac

SEQ ID NO: 1254806 - RNA, 19 nt, Artificial Sequence
  Description of Artificial Sequence: Synthetic oligonucleotide
gaggaccuugcccaaggcg

SEQ ID NO: 1254807 - RNA, 19 nt, Artificial Sequence
  Description of Artificial Sequence: Synthetic oligonucleotide
uucguuccaauguucugcc

SEQ ID NO: 1254808 - RNA, 19 nt, Artificial Sequence
  Description of Artificial Sequence: Synthetic oligonucleotide
auuccuaucugaccuccag

SEQ ID NO: 1254809 - RNA, 19 nt, Artificial Sequence
  Description of Artificial Sequence: Synthetic oligonucleotide
ugagcauccaggccaaguc

SEQ ID NO: 1254810 - RNA, 19 nt, Artificial Sequence
  Description of Artificial Sequence: Synthetic oligonucleotide
uguccccuaacccuuuuga

SEQ ID NO: 1254811 - RNA, 19 nt, Artificial Sequence
  Description of Artificial Sequence: Synthetic oligonucleotide
aagcuaagcuccugagcag

SEQ ID NO: 1254812 - RNA, 19 nt, Artificial Sequence
  Description of Artificial Sequence: Synthetic oligonucleotide
aguaggaagaugaauguaa

SEQ ID NO: 1254813 - RNA, 19 nt, Artificial Sequence
  Description of Artificial Sequence: Synthetic oligonucleotide
gguaugagcacacacaucu

SEQ ID NO: 1254814 - RNA, 19 nt, Artificial Sequence
  Description of Artificial Sequence: Synthetic oligonucleotide
uugagauacccucacuuuu

SEQ ID NO: 1254815 - RNA, 19 nt, Artificial Sequence
  Description of Artificial Sequence: Synthetic oligonucleotide
uucuuuuguuucccaagcu

SEQ ID NO: 1254816 - RNA, 19 nt, Artificial Sequence
  Description of Artificial Sequence: Synthetic oligonucleotide
uugugucggggcaucgugg

SEQ ID NO: 1254817 - RNA, 19 nt, Artificial Sequence
  Description of Artificial Sequence: Synthetic oligonucleotide
agacugacaugcuuuguca

SEQ ID NO: 1254818 - RNA, 19 nt, Artificial Sequence
  Description of Artificial Sequence: Synthetic oligonucleotide
uccccuaacccuuuugaac

SEQ ID NO: 1254819 - RNA, 19 nt, Artificial Sequence
  Description of Artificial Sequence: Synthetic oligonucleotide
ugagauacccucacuuuua

SEQ ID NO: 1254820 - RNA, 19 nt, Artificial Sequence
  Description of Artificial Sequence: Synthetic oligonucleotide
  modified_base (9)..(9): a, c, u, g, unknown or other
gacuuuucngacuuuauuu

SEQ ID NO: 1254821 - RNA, 19 nt, Artificial Sequence
  Description of Artificial Sequence: Synthetic oligonucleotide
  modified_base (4)..(4): a, c, u, g, unknown or other
uucngacuuuauuuucugu

SEQ ID NO: 1254822 - RNA, 19 nt, Artificial Sequence
  Description of Artificial Sequence: Synthetic oligonucleotide
ugucggcgaaggcugagag

SEQ ID NO: 1254823 - RNA, 19 nt, Artificial Sequence
  Description of Artificial Sequence: Synthetic oligonucleotide
aguccacccauuucuuccg

SEQ ID NO: 1254824 - RNA, 19 nt, Artificial Sequence
  Description of Artificial Sequence: Synthetic oligonucleotide
ugcuauuggugaagauagg

SEQ ID NO: 1254825 - RNA, 19 nt, Artificial Sequence
  Description of Artificial Sequence: Synthetic oligonucleotide
ccggucaugaucaaugugc

SEQ ID NO: 1254826 - RNA, 19 nt, Artificial Sequence
  Description of Artificial Sequence: Synthetic oligonucleotide
auuccggucaugaucaaug

SEQ ID NO: 1254827 - RNA, 19 nt, Artificial Sequence
  Description of Artificial Sequence: Synthetic oligonucleotide
ugguuguauggcaugugcu

SEQ ID NO: 1254828 - RNA, 19 nt, Artificial Sequence
  Description of Artificial Sequence: Synthetic oligonucleotide
auggguucacacuuuacaa

SEQ ID NO: 1254829 - RNA, 19 nt, Artificial Sequence
  Description of Artificial Sequence: Synthetic oligonucleotide
  modified_base (18)..(18): a, c, u, g, unknown or other
agcagaggugacuuuucng

SEQ ID NO: 1254830 - RNA, 19 nt, Artificial Sequence
  Description of Artificial Sequence: Synthetic oligonucleotide
caacagaacagcuuuguaa

SEQ ID NO: 1254831 - RNA, 19 nt, Artificial Sequence
  Description of Artificial Sequence: Synthetic oligonucleotide
acauuaggcccaauuaaag

SEQ ID NO: 1254832 - RNA, 19 nt, Artificial Sequence
  Description of Artificial Sequence: Synthetic oligonucleotide
ucuacaaagccagaagauu

SEQ ID NO: 1254833 - RNA, 19 nt, Artificial Sequence
  Description of Artificial Sequence: Synthetic oligonucleotide
aguggcauugucccucaag

SEQ ID NO: 1254834 - RNA, 19 nt, Artificial Sequence
  Description of Artificial Sequence: Synthetic oligonucleotide
ccgcugaacaacaaaauag

SEQ ID NO: 1254835 - RNA, 19 nt, Artificial Sequence
  Description of Artificial Sequence: Synthetic oligonucleotide
ugugcauggggauaugguu

SEQ ID NO: 1254836 - RNA, 19 nt, Artificial Sequence
  Description of Artificial Sequence: Synthetic oligonucleotide
aacccuaaccccaacaguu

SEQ ID NO: 1254837 - RNA, 19 nt, Artificial Sequence
  Description of Artificial Sequence: Synthetic oligonucleotide
agacccaguccacauuccg

SEQ ID NO: 1254838 - RNA, 19 nt, Artificial Sequence
  Description of Artificial Sequence: Synthetic oligonucleotide
agauuacaaaacccuauuu

SEQ ID NO: 1254839 - RNA, 19 nt, Artificial Sequence
  Description of Artificial Sequence: Synthetic oligonucleotide
aggauucuaugcaugaaug

SEQ ID NO: 1254840 - RNA, 19 nt, Artificial Sequence
  Description of Artificial Sequence: Synthetic oligonucleotide
cagaagaauaagacacuug

SEQ ID NO: 1254841 - RNA, 19 nt, Artificial Sequence
  Description of Artificial Sequence: Synthetic oligonucleotide
aguuuggcaccaagaaggc

SEQ ID NO: 1254842 - RNA, 19 nt, Artificial Sequence
  Description of Artificial Sequence: Synthetic oligonucleotide
guggaguugagauacccuc

SEQ ID NO: 1254843 - RNA, 19 nt, Artificial Sequence
  Description of Artificial Sequence: Synthetic oligonucleotide
gaaguaggaagaugaaugu

SEQ ID NO: 1254844 - RNA, 19 nt, Artificial Sequence
  Description of Artificial Sequence: Synthetic oligonucleotide
uugauucauaguggcauug

SEQ ID NO: 1254845 - RNA, 19 nt, Artificial Sequence
  Description of Artificial Sequence: Synthetic oligonucleotide
  modified_base (2)..(2): a, c, u, g, unknown or other
cngacuuuauuuucuguca

SEQ ID NO: 1254846 - RNA, 19 nt, Artificial Sequence
  Description of Artificial Sequence: Synthetic oligonucleotide
gguuacaaccagcucuugg

SEQ ID NO: 1254847 - RNA, 19 nt, Artificial Sequence
  Description of Artificial Sequence: Synthetic oligonucleotide
ccaauuaaagggaacaaca

SEQ ID NO: 1254848 - RNA, 19 nt, Artificial Sequence
  Description of Artificial Sequence: Synthetic oligonucleotide
cagcuuuguaacccuaacc

SEQ ID NO: 1254849 - RNA, 19 nt, Artificial Sequence
  Description of Artificial Sequence: Synthetic oligonucleotide
agcaggggcauguaaguga

SEQ ID NO: 1254850 - RNA, 19 nt, Artificial Sequence
  Description of Artificial Sequence: Synthetic oligonucleotide
gagacuaacagggagggua

SEQ ID NO: 1254851 - RNA, 19 nt, Artificial Sequence
  Description of Artificial Sequence: Synthetic oligonucleotide
uggaguuaacaagcuuucg

SEQ ID NO: 1254852 - RNA, 19 nt, Artificial Sequence
  Description of Artificial Sequence: Synthetic oligonucleotide
cauugaaggcugauuggug

SEQ ID NO: 1254853 - RNA, 19 nt, Artificial Sequence
  Description of Artificial Sequence: Synthetic oligonucleotide
ucuuccgcugaacaacaaa

SEQ ID NO: 1254854 - RNA, 19 nt, Artificial Sequence
  Description of Artificial Sequence: Synthetic oligonucleotide
  modified_base (17)..(17): a, c, u, g, unknown or other
acuuggacaagugcuunuc

SEQ ID NO: 1254855 - RNA, 19 nt, Artificial Sequence
  Description of Artificial Sequence: Synthetic oligonucleotide
acugacaugcuuugucaga

SEQ ID NO: 1254856 - RNA, 19 nt, Artificial Sequence
  Description of Artificial Sequence: Synthetic oligonucleotide
cccaaggcgaagaacaggg

SEQ ID NO: 1254857 - RNA, 19 nt, Artificial Sequence
  Description of Artificial Sequence: Synthetic oligonucleotide
cagaagauuacaaaacccu

SEQ ID NO: 1254858 - RNA, 19 nt, Artificial Sequence
  Description of Artificial Sequence: Synthetic oligonucleotide
  modified_base (8)..(8): a, c, u, g, unknown or other
ucuuguunaaaggggucac

SEQ ID NO: 1254859 - RNA, 19 nt, Artificial Sequence
  Description of Artificial Sequence: Synthetic oligonucleotide
ucaaugugcauggggauau

SEQ ID NO: 1254860 - RNA, 19 nt, Artificial Sequence
  Description of Artificial Sequence: Synthetic oligonucleotide
aagcuuucguuccaauguu

SEQ ID NO: 1254861 - RNA, 19 nt, Artificial Sequence
  Description of Artificial Sequence: Synthetic oligonucleotide
  modified_base (12)..(12): a, c, u, g, unknown or other
gacaagugcuunucccagc

SEQ ID NO: 1254862 - RNA, 19 nt, Artificial Sequence
  Description of Artificial Sequence: Synthetic oligonucleotide
uggaagcuggaguuaacaa

SEQ ID NO: 1254863 - RNA, 19 nt, Artificial Sequence
  Description of Artificial Sequence: Synthetic oligonucleotide
gaagaauaagacacuugga

SEQ ID NO: 1254864 - RNA, 19 nt, Artificial Sequence
  Description of Artificial Sequence: Synthetic oligonucleotide
augcauguugaugucuggg

SEQ ID NO: 1254865 - RNA, 19 nt, Artificial Sequence
  Description of Artificial Sequence: Synthetic oligonucleotide
aguuauccugaauuccuau

SEQ ID NO: 1254866 - RNA, 19 nt, Artificial Sequence
  Description of Artificial Sequence: Synthetic oligonucleotide
gacacgggcauagaagcug

SEQ ID NO: 1254867 - RNA, 19 nt, Artificial Sequence
  Description of Artificial Sequence: Synthetic oligonucleotide
uaaagggaacaacaccguu

SEQ ID NO: 1254868 - RNA, 19 nt, Artificial Sequence
  Description of Artificial Sequence: Synthetic oligonucleotide
  modified_base (3)..(3): a, c, u, g, unknown or other
uunucccagcagcuggaga

SEQ ID NO: 1254869 - RNA, 19 nt, Artificial Sequence
  Description of Artificial Sequence: Synthetic oligonucleotide
  modified_base (16)..(16): a, c, u, g, unknown or other
uuucugagucuuguunaaa

SEQ ID NO: 1254870 - RNA, 19 nt, Artificial Sequence
  Description of Artificial Sequence: Synthetic oligonucleotide
cccuauuucauuguuagac

SEQ ID NO: 1254871 - RNA, 19 nt, Artificial Sequence
  Description of Artificial Sequence: Synthetic oligonucleotide
ucaagcucccucugcuuug

SEQ ID NO: 1254872 - RNA, 19 nt, Artificial Sequence
  Description of Artificial Sequence: Synthetic oligonucleotide
uccaaccagagcugccccg

SEQ ID NO: 1254873 - RNA, 19 nt, Artificial Sequence
  Description of Artificial Sequence: Synthetic oligonucleotide
cuuccgcugaacaacaaaa

SEQ ID NO: 1254874 - RNA, 19 nt, Artificial Sequence
  Description of Artificial Sequence: Synthetic oligonucleotide
aaggcugauuggugaacgu

SEQ ID NO: 1254875 - RNA, 19 nt, Artificial Sequence
  Description of Artificial Sequence: Synthetic oligonucleotide
ugccccgacuccuucagug

SEQ ID NO: 1254876 - RNA, 19 nt, Artificial Sequence
  Description of Artificial Sequence: Synthetic oligonucleotide
uuguuagacugacaugcuu

SEQ ID NO: 1254877 - RNA, 19 nt, Artificial Sequence
  Description of Artificial Sequence: Synthetic oligonucleotide
gggaacaacaccguuggcc

SEQ ID NO: 1254878 - RNA, 19 nt, Artificial Sequence
  Description of Artificial Sequence: Synthetic oligonucleotide
gcuauuggugaagauaggc

SEQ ID NO: 1254879 - RNA, 19 nt, Artificial Sequence
  Description of Artificial Sequence: Synthetic oligonucleotide
ugaauuccuaucugaccuc

SEQ ID NO: 1254880 - RNA, 19 nt, Artificial Sequence
  Description of Artificial Sequence: Synthetic oligonucleotide
uuccgcugaacaacaaaau

SEQ ID NO: 1254881 - RNA, 19 nt, Artificial Sequence
  Description of Artificial Sequence: Synthetic oligonucleotide
ugaacguuacagguugccu

SEQ ID NO: 1254882 - RNA, 19 nt, Artificial Sequence
  Description of Artificial Sequence: Synthetic oligonucleotide
gaaccagucauugaaggcu

SEQ ID NO: 1254883 - RNA, 19 nt, Artificial Sequence
  Description of Artificial Sequence: Synthetic oligonucleotide
cuuucguuccaauguucug

SEQ ID NO: 1254884 - RNA, 19 nt, Artificial Sequence
  Description of Artificial Sequence: Synthetic oligonucleotide
aggggcauguaagugaaga

SEQ ID NO: 1254885 - RNA, 19 nt, Artificial Sequence
  Description of Artificial Sequence: Synthetic oligonucleotide
guugugucggggcaucgug

SEQ ID NO: 1254886 - RNA, 19 nt, Artificial Sequence
  Description of Artificial Sequence: Synthetic oligonucleotide
uuggugaacguuacagguu

SEQ ID NO: 1254887 - RNA, 19 nt, Artificial Sequence
  Description of Artificial Sequence: Synthetic oligonucleotide
accacuggaaguagagagg

SEQ ID NO: 1254888 - RNA, 19 nt, Artificial Sequence
  Description of Artificial Sequence: Synthetic oligonucleotide
gcuuugucagaaguuaucc

SEQ ID NO: 1254889 - RNA, 19 nt, Artificial Sequence
  Description of Artificial Sequence: Synthetic oligonucleotide
gaugugguaacagcacuga

SEQ ID NO: 1254890 - RNA, 19 nt, Artificial Sequence
  Description of Artificial Sequence: Synthetic oligonucleotide
gcuuuguaacccuaacccc

SEQ ID NO: 1254891 - RNA, 19 nt, Artificial Sequence
  Description of Artificial Sequence: Synthetic oligonucleotide
auugauucauaguggcauu

SEQ ID NO: 1254892 - RNA, 19 nt, Artificial Sequence
  Description of Artificial Sequence: Synthetic oligonucleotide
aagaaguacuugugcugau

SEQ ID NO: 1254893 - RNA, 19 nt, Artificial Sequence
  Description of Artificial Sequence: Synthetic oligonucleotide
agaagauauaccacuggaa

SEQ ID NO: 1254894 - RNA, 19 nt, Artificial Sequence
  Description of Artificial Sequence: Synthetic oligonucleotide
gaguuaacaagcuuucguu

SEQ ID NO: 1254895 - RNA, 19 nt, Artificial Sequence
  Description of Artificial Sequence: Synthetic oligonucleotide
  modified_base (17)..(17): a, c, u, g, unknown or other
gcagaggugacuuuucnga

SEQ ID NO: 1254896 - RNA, 19 nt, Artificial Sequence
  Description of Artificial Sequence: Synthetic oligonucleotide
gacaugcuuugucagaagu

SEQ ID NO: 1254897 - RNA, 19 nt, Artificial Sequence
  Description of Artificial Sequence: Synthetic oligonucleotide
gugguaguugugucggggc

SEQ ID NO: 1254898 - RNA, 19 nt, Artificial Sequence
  Description of Artificial Sequence: Synthetic oligonucleotide
aauugcucuccaggaaccu

SEQ ID NO: 1254899 - RNA, 19 nt, Artificial Sequence
  Description of Artificial Sequence: Synthetic oligonucleotide
gaaacauagcccagugaga

SEQ ID NO: 1254900 - RNA, 19 nt, Artificial Sequence
  Description of Artificial Sequence: Synthetic oligonucleotide
gggcauguaagugaagaag

SEQ ID NO: 1254901 - RNA, 19 nt, Artificial Sequence
  Description of Artificial Sequence: Synthetic oligonucleotide
ggggaaaagguggugcucg

SEQ ID NO: 1254902 - RNA, 19 nt, Artificial Sequence
  Description of Artificial Sequence: Synthetic oligonucleotide
aggaccuugcccaaggcga

SEQ ID NO: 1254903 - RNA, 19 nt, Artificial Sequence
  Description of Artificial Sequence: Synthetic oligonucleotide
agaagauuacaaaacccua

SEQ ID NO: 1254904 - RNA, 19 nt, Artificial Sequence
  Description of Artificial Sequence: Synthetic oligonucleotide
uacaugagcagaggugacu

SEQ ID NO: 1254905 - RNA, 19 nt, Artificial Sequence
  Description of Artificial Sequence: Synthetic oligonucleotide
  modified_base (9)..(9): a, c, u, g, unknown or other
gucuuguunaaagggguca

SEQ ID NO: 1254906 - RNA, 19 nt, Artificial Sequence
  Description of Artificial Sequence: Synthetic oligonucleotide
agggauugcaccaggggug

SEQ ID NO: 1254907 - RNA, 19 nt, Artificial Sequence
  Description of Artificial Sequence: Synthetic oligonucleotide
ugcggaagcaguugggcuu

SEQ ID NO: 1254908 - RNA, 19 nt, Artificial Sequence
  Description of Artificial Sequence: Synthetic oligonucleotide
gaagauuacaaaacccuau

SEQ ID NO: 1254909 - RNA, 19 nt, Artificial Sequence
  Description of Artificial Sequence: Synthetic oligonucleotide
aaugucggcgaaggcugag

SEQ ID NO: 1254910 - RNA, 19 nt, Artificial Sequence
  Description of Artificial Sequence: Synthetic oligonucleotide
  modified_base (8)..(8): a, c, u, g, unknown or other
agugcuunucccagcagcu

SEQ ID NO: 1254911 - RNA, 19 nt, Artificial Sequence
  Description of Artificial Sequence: Synthetic oligonucleotide
uuccggucaugaucaaugu

SEQ ID NO: 1254912 - RNA, 19 nt, Artificial Sequence
  Description of Artificial Sequence: Synthetic oligonucleotide
  modified_base (14)..(14): a, c, u, g, unknown or other
gaggugacuuuucngacuu

SEQ ID NO: 1254913 - RNA, 19 nt, Artificial Sequence
  Description of Artificial Sequence: Synthetic oligonucleotide
ggcauugucccucaagcuc

SEQ ID NO: 1254914 - RNA, 19 nt, Artificial Sequence
  Description of Artificial Sequence: Synthetic oligonucleotide
cugacauuaggcccaauua

SEQ ID NO: 1254915 - RNA, 19 nt, Artificial Sequence
  Description of Artificial Sequence: Synthetic oligonucleotide
ggcauguaagugaagaaga

SEQ ID NO: 1254916 - RNA, 19 nt, Artificial Sequence
  Description of Artificial Sequence: Synthetic oligonucleotide
ugucggggcaucgugggga

SEQ ID NO: 1254917 - RNA, 19 nt, Artificial Sequence
  Description of Artificial Sequence: Synthetic oligonucleotide
cuugucacucaacgucccc

SEQ ID NO: 1254918 - RNA, 19 nt, Artificial Sequence
  Description of Artificial Sequence: Synthetic oligonucleotide
accaauugcucuccaggaa

SEQ ID NO: 1254919 - RNA, 19 nt, Artificial Sequence
  Description of Artificial Sequence: Synthetic oligonucleotide
ucauaguggcauugucccu

SEQ ID NO: 1254920 - RNA, 19 nt, Artificial Sequence
  Description of Artificial Sequence: Synthetic oligonucleotide
gaugguuguauggcaugug

SEQ ID NO: 1254921 - RNA, 19 nt, Artificial Sequence
  Description of Artificial Sequence: Synthetic oligonucleotide
ucaucaggaugugguaaca

SEQ ID NO: 1254922 - RNA, 19 nt, Artificial Sequence
  Description of Artificial Sequence: Synthetic oligonucleotide
ugagauggguucacacuuu

SEQ ID NO: 1254923 - RNA, 19 nt, Artificial Sequence
  Description of Artificial Sequence: Synthetic oligonucleotide
aaacccuauuucauuguua

SEQ ID NO: 1254924 - RNA, 19 nt, Artificial Sequence
  Description of Artificial Sequence: Synthetic oligonucleotide
ccaauugcucuccaggaac

SEQ ID NO: 1254925 - RNA, 19 nt, Artificial Sequence
  Description of Artificial Sequence: Synthetic oligonucleotide
caucaggaugugguaacag

SEQ ID NO: 1254926 - RNA, 19 nt, Artificial Sequence
  Description of Artificial Sequence: Synthetic oligonucleotide
uggccgcugaaccagucau

SEQ ID NO: 1254927 - RNA, 19 nt, Artificial Sequence
  Description of Artificial Sequence: Synthetic oligonucleotide
acaacagaacagcuuugua

SEQ ID NO: 1254928 - RNA, 19 nt, Artificial Sequence
  Description of Artificial Sequence: Synthetic oligonucleotide
cuacaugagcagaggugac

SEQ ID NO: 1254929 - RNA, 19 nt, Artificial Sequence
  Description of Artificial Sequence: Synthetic oligonucleotide
cuuucagccccagcagggg

SEQ ID NO: 1254930 - RNA, 19 nt, Artificial Sequence
  Description of Artificial Sequence: Synthetic oligonucleotide
ugccguacuuggcgcacag

SEQ ID NO: 1254931 - RNA, 19 nt, Artificial Sequence
  Description of Artificial Sequence: Synthetic oligonucleotide
auaguggcauugucccuca

SEQ ID NO: 1254932 - RNA, 19 nt, Artificial Sequence
  Description of Artificial Sequence: Synthetic oligonucleotide
  modified_base (7)..(7): a, c, u, g, unknown or other
cuuguunaaaggggucaca

SEQ ID NO: 1254933 - RNA, 19 nt, Artificial Sequence
  Description of Artificial Sequence: Synthetic oligonucleotide
uuccaauguucugccacug

SEQ ID NO: 1254934 - RNA, 19 nt, Artificial Sequence
  Description of Artificial Sequence: Synthetic oligonucleotide
guagagaggcaacaaggcu

SEQ ID NO: 1254935 - RNA, 19 nt, Artificial Sequence
  Description of Artificial Sequence: Synthetic oligonucleotide
gauaggcguccaaccagag

SEQ ID NO: 1254936 - RNA, 19 nt, Artificial Sequence
  Description of Artificial Sequence: Synthetic oligonucleotide
aaguuauccugaauuccua

SEQ ID NO: 1254937 - RNA, 19 nt, Artificial Sequence
  Description of Artificial Sequence: Synthetic oligonucleotide
gugcauggggauaugguuc

SEQ ID NO: 1254938 - RNA, 19 nt, Artificial Sequence
  Description of Artificial Sequence: Synthetic oligonucleotide
ggaguuaacaagcuuucgu

SEQ ID NO: 1254939 - RNA, 19 nt, Artificial Sequence
  Description of Artificial Sequence: Synthetic oligonucleotide
acauugauucauaguggca

SEQ ID NO: 1254940 - RNA, 19 nt, Artificial Sequence
  Description of Artificial Sequence: Synthetic oligonucleotide
cauugauucauaguggcau

SEQ ID NO: 1254941 - RNA, 19 nt, Artificial Sequence
  Description of Artificial Sequence: Synthetic oligonucleotide
cuuuugaacauugauucau

SEQ ID NO: 1254942 - RNA, 19 nt, Artificial Sequence
  Description of Artificial Sequence: Synthetic oligonucleotide
agauaggcguccaaccaga

SEQ ID NO: 1254943 - RNA, 19 nt, Artificial Sequence
  Description of Artificial Sequence: Synthetic oligonucleotide
cauugucccucaagcuccc

SEQ ID NO: 1254944 - RNA, 19 nt, Artificial Sequence
  Description of Artificial Sequence: Synthetic oligonucleotide
ccuuucagccccagcaggg

SEQ ID NO: 1254945 - RNA, 19 nt, Artificial Sequence
  Description of Artificial Sequence: Synthetic oligonucleotide
  modified_base (11)..(11): a, c, u, g, unknown or other
gagucuuguunaaaggggu

SEQ ID NO: 1254946 - RNA, 19 nt, Artificial Sequence
  Description of Artificial Sequence: Synthetic oligonucleotide
cauagcccagugagauggg

SEQ ID NO: 1254947 - RNA, 19 nt, Artificial Sequence
  Description of Artificial Sequence: Synthetic oligonucleotide
ggcagguaugagcacacac

SEQ ID NO: 1254948 - RNA, 19 nt, Artificial Sequence
  Description of Artificial Sequence: Synthetic oligonucleotide
  modified_base (4)..(4): a, c, u, g, unknown or other
cuunucccagcagcuggag

SEQ ID NO: 1254949 - RNA, 19 nt, Artificial Sequence
  Description of Artificial Sequence: Synthetic oligonucleotide
  modified_base (13)..(13): a, c, u, g, unknown or other
ggacaagugcuunucccag

SEQ ID NO: 1254950 - RNA, 19 nt, Artificial Sequence
  Description of Artificial Sequence: Synthetic oligonucleotide
aauuccuaucugaccucca

SEQ ID NO: 1254951 - RNA, 19 nt, Artificial Sequence
  Description of Artificial Sequence: Synthetic oligonucleotide
auauaccacuggaaguaga

SEQ ID NO: 1254952 - RNA, 19 nt, Artificial Sequence
  Description of Artificial Sequence: Synthetic oligonucleotide
uaguugugucggggcaucg

SEQ ID NO: 1254953 - RNA, 19 nt, Artificial Sequence
  Description of Artificial Sequence: Synthetic oligonucleotide
accguuggccaggaaguag

SEQ ID NO: 1254954 - RNA, 19 nt, Artificial Sequence
  Description of Artificial Sequence: Synthetic oligonucleotide
ugccucugcuaaaguagaa

SEQ ID NO: 1254955 - RNA, 19 nt, Artificial Sequence
  Description of Artificial Sequence: Synthetic oligonucleotide
ccucugcuaaaguagaaga

SEQ ID NO: 1254956 - RNA, 19 nt, Artificial Sequence
  Description of Artificial Sequence: Synthetic oligonucleotide
aucaaugugcauggggaua

SEQ ID NO: 1254957 - RNA, 19 nt, Artificial Sequence
  Description of Artificial Sequence: Synthetic oligonucleotide
acccuauuucauuguuaga

SEQ ID NO: 1254958 - RNA, 19 nt, Artificial Sequence
  Description of Artificial Sequence: Synthetic oligonucleotide
aggcgaagaacaggggaug

SEQ ID NO: 1254959 - RNA, 19 nt, Artificial Sequence
  Description of Artificial Sequence: Synthetic oligonucleotide
ccacauuccggucaugauc

SEQ ID NO: 1254960 - RNA, 19 nt, Artificial Sequence
  Description of Artificial Sequence: Synthetic oligonucleotide
guaacagcacugacacaug

SEQ ID NO: 1254961 - RNA, 19 nt, Artificial Sequence
  Description of Artificial Sequence: Synthetic oligonucleotide
aggcccaauuaaagggaac

SEQ ID NO: 1254962 - RNA, 19 nt, Artificial Sequence
  Description of Artificial Sequence: Synthetic oligonucleotide
cagaaacauagcccaguga

SEQ ID NO: 1254963 - RNA, 19 nt, Artificial Sequence
  Description of Artificial Sequence: Synthetic oligonucleotide
guugagauacccucacuuu

SEQ ID NO: 1254964 - RNA, 19 nt, Artificial Sequence
  Description of Artificial Sequence: Synthetic oligonucleotide
gccaaguccacccauuucu

SEQ ID NO: 1254965 - RNA, 19 nt, Artificial Sequence
  Description of Artificial Sequence: Synthetic oligonucleotide
gaugccguacuuggcgcac

SEQ ID NO: 1254966 - RNA, 19 nt, Artificial Sequence
  Description of Artificial Sequence: Synthetic oligonucleotide
uuggcgcacagggauugca

SEQ ID NO: 1254967 - RNA, 19 nt, Artificial Sequence
  Description of Artificial Sequence: Synthetic oligonucleotide
gcagguaugagcacacaca

SEQ ID NO: 1254968 - RNA, 19 nt, Artificial Sequence
  Description of Artificial Sequence: Synthetic oligonucleotide
ggcgcacagggauugcacc

SEQ ID NO: 1254969 - RNA, 19 nt, Artificial Sequence
  Description of Artificial Sequence: Synthetic oligonucleotide
gccucugcuaaaguagaag

SEQ ID NO: 1254970 - RNA, 19 nt, Artificial Sequence
  Description of Artificial Sequence: Synthetic oligonucleotide
cguuccaauguucugccac

SEQ ID NO: 1254971 - RNA, 19 nt, Artificial Sequence
  Description of Artificial Sequence: Synthetic oligonucleotide
cagguaugagcacacacau

SEQ ID NO: 1254972 - RNA, 19 nt, Artificial Sequence
  Description of Artificial Sequence: Synthetic oligonucleotide
uggugaagauaggcgucca

SEQ ID NO: 1254973 - RNA, 19 nt, Artificial Sequence
  Description of Artificial Sequence: Synthetic oligonucleotide
cgcugaacaacaaaauaga

SEQ ID NO: 1254974 - RNA, 19 nt, Artificial Sequence
  Description of Artificial Sequence: Synthetic oligonucleotide
aguugugucggggcaucgu

SEQ ID NO: 1254975 - RNA, 19 nt, Artificial Sequence
  Description of Artificial Sequence: Synthetic oligonucleotide
gugucggggcaucgugggg

SEQ ID NO: 1254976 - RNA, 19 nt, Artificial Sequence
  Description of Artificial Sequence: Synthetic oligonucleotide
gaugaacauggaagcugga

SEQ ID NO: 1254977 - RNA, 19 nt, Artificial Sequence
  Description of Artificial Sequence: Synthetic oligonucleotide
  modified_base (19)..(19): a, c, u, g, unknown or other
acacuuggacaagugcuun

SEQ ID NO: 1254978 - RNA, 19 nt, Artificial Sequence
  Description of Artificial Sequence: Synthetic oligonucleotide
ucguggggaaaagguggug

SEQ ID NO: 1254979 - RNA, 19 nt, Artificial Sequence
  Description of Artificial Sequence: Synthetic oligonucleotide
guaggaagaugaauguaau

SEQ ID NO: 1254980 - RNA, 19 nt, Artificial Sequence
  Description of Artificial Sequence: Synthetic oligonucleotide
gagauacccucacuuuuau

SEQ ID NO: 1254981 - RNA, 19 nt, Artificial Sequence
  Description of Artificial Sequence: Synthetic oligonucleotide
gcugaacaacaaaauagaa

SEQ ID NO: 1254982 - RNA, 19 nt, Artificial Sequence
  Description of Artificial Sequence: Synthetic oligonucleotide
ccucacuuuuaucacuguc

SEQ ID NO: 1254983 - RNA, 19 nt, Artificial Sequence
  Description of Artificial Sequence: Synthetic oligonucleotide
gcugauuggugaacguuac

SEQ ID NO: 1254984 - RNA, 19 nt, Artificial Sequence
  Description of Artificial Sequence: Synthetic oligonucleotide
guauggcaugugcuucuuc

SEQ ID NO: 1254985 - RNA, 19 nt, Artificial Sequence
  Description of Artificial Sequence: Synthetic oligonucleotide
guccccuaacccuuuugaa

SEQ ID NO: 1254986 - RNA, 19 nt, Artificial Sequence
  Description of Artificial Sequence: Synthetic oligonucleotide
ccaaggcgaagaacagggg

SEQ ID NO: 1254987 - RNA, 19 nt, Artificial Sequence
  Description of Artificial Sequence: Synthetic oligonucleotide
guaguugugucggggcauc

SEQ ID NO: 1254988 - RNA, 19 nt, Artificial Sequence
  Description of Artificial Sequence: Synthetic oligonucleotide
accugacaaugaagaaaag

SEQ ID NO: 1254989 - RNA, 19 nt, Artificial Sequence
  Description of Artificial Sequence: Synthetic oligonucleotide
uguauggcaugugcuucuu

SEQ ID NO: 1254990 - RNA, 19 nt, Artificial Sequence
  Description of Artificial Sequence: Synthetic oligonucleotide
agacacgggcauagaagcu

SEQ ID NO: 1254991 - RNA, 19 nt, Artificial Sequence
  Description of Artificial Sequence: Synthetic oligonucleotide
ugguuacaaccagcucuug

SEQ ID NO: 1254992 - RNA, 19 nt, Artificial Sequence
  Description of Artificial Sequence: Synthetic oligonucleotide
ggcgaagaacaggggaugc

SEQ ID NO: 1254993 - RNA, 19 nt, Artificial Sequence
  Description of Artificial Sequence: Synthetic oligonucleotide
aggcugauuggugaacguu

SEQ ID NO: 1254994 - RNA, 19 nt, Artificial Sequence
  Description of Artificial Sequence: Synthetic oligonucleotide
gggauugcaccaggggugc

SEQ ID NO: 1254995 - RNA, 19 nt, Artificial Sequence
  Description of Artificial Sequence: Synthetic oligonucleotide
  modified_base (12)..(12): a, c, u, g, unknown or other
ggugacuuuucngacuuua

SEQ ID NO: 1254996 - RNA, 19 nt, Artificial Sequence
  Description of Artificial Sequence: Synthetic oligonucleotide
ccucaaguuuggcaccaag

SEQ ID NO: 1254997 - RNA, 19 nt, Artificial Sequence
  Description of Artificial Sequence: Synthetic oligonucleotide
acaacaccguuggccagga

SEQ ID NO: 1254998 - RNA, 19 nt, Artificial Sequence
  Description of Artificial Sequence: Synthetic oligonucleotide
cacgggcauagaagcugag

SEQ ID NO: 1254999 - RNA, 19 nt, Artificial Sequence
  Description of Artificial Sequence: Synthetic oligonucleotide
ccuuuugaacauugauuca

SEQ ID NO: 1255000 - RNA, 19 nt, Artificial Sequence
  Description of Artificial Sequence: Synthetic oligonucleotide
cuaacagggaggguagagu

SEQ ID NO: 1255001 - RNA, 19 nt, Artificial Sequence
  Description of Artificial Sequence: Synthetic oligonucleotide
gguuguauggcaugugcuu

SEQ ID NO: 1255002 - RNA, 19 nt, Artificial Sequence
  Description of Artificial Sequence: Synthetic oligonucleotide
gcuggaguuaacaagcuuu

SEQ ID NO: 1255003 - RNA, 19 nt, Artificial Sequence
  Description of Artificial Sequence: Synthetic oligonucleotide
gacuaacagggaggguaga

SEQ ID NO: 1255004 - RNA, 19 nt, Artificial Sequence
  Description of Artificial Sequence: Synthetic oligonucleotide
ggggcauguaagugaagaa

SEQ ID NO: 1255005 - RNA, 19 nt, Artificial Sequence
  Description of Artificial Sequence: Synthetic oligonucleotide
augucggcgaaggcugaga

SEQ ID NO: 1255006 - RNA, 19 nt, Artificial Sequence
  Description of Artificial Sequence: Synthetic oligonucleotide
cagucuugucacucaacgu

SEQ ID NO: 1255007 - RNA, 19 nt, Artificial Sequence
  Description of Artificial Sequence: Synthetic oligonucleotide
cuaagcuccugagcaggga

SEQ ID NO: 1255008 - RNA, 19 nt, Artificial Sequence
  Description of Artificial Sequence: Synthetic oligonucleotide
ggcugauuggugaacguua

SEQ ID NO: 1255009 - RNA, 19 nt, Artificial Sequence
  Description of Artificial Sequence: Synthetic oligonucleotide
caaccagagcugccccgac

SEQ ID NO: 1255010 - RNA, 19 nt, Artificial Sequence
  Description of Artificial Sequence: Synthetic oligonucleotide
cuuggcgcacagggauugc

SEQ ID NO: 1255011 - RNA, 19 nt, Artificial Sequence
  Description of Artificial Sequence: Synthetic oligonucleotide
ggcaucguggggaaaaggu

SEQ ID NO: 1255012 - RNA, 19 nt, Artificial Sequence
  Description of Artificial Sequence: Synthetic oligonucleotide
cacuuuacaagaggggaau

SEQ ID NO: 1255013 - RNA, 19 nt, Artificial Sequence
  Description of Artificial Sequence: Synthetic oligonucleotide
ggugaacguuacagguugc

SEQ ID NO: 1255014 - RNA, 19 nt, Artificial Sequence
  Description of Artificial Sequence: Synthetic oligonucleotide
gggcaucguggggaaaagg

SEQ ID NO: 1255015 - RNA, 19 nt, Artificial Sequence
  Description of Artificial Sequence: Synthetic oligonucleotide
caaugugcauggggauaug

SEQ ID NO: 1255016 - RNA, 19 nt, Artificial Sequence
  Description of Artificial Sequence: Synthetic oligonucleotide
acauuccggucaugaucaa

SEQ ID NO: 1255017 - RNA, 19 nt, Artificial Sequence
  Description of Artificial Sequence: Synthetic oligonucleotide
ggugaagauaggcguccaa

SEQ ID NO: 1255018 - RNA, 19 nt, Artificial Sequence
  Description of Artificial Sequence: Synthetic oligonucleotide
ggcguccaaccagagcugc

SEQ ID NO: 1255019 - RNA, 19 nt, Artificial Sequence
  Description of Artificial Sequence: Synthetic oligonucleotide
acguuacagguugccugca

SEQ ID NO: 1255020 - RNA, 19 nt, Artificial Sequence
  Description of Artificial Sequence: Synthetic oligonucleotide
gggaaaagguggugcucga

SEQ ID NO: 1255021 - RNA, 19 nt, Artificial Sequence
  Description of Artificial Sequence: Synthetic oligonucleotide
ccccgacuccuucagugag

SEQ ID NO: 1255022 - RNA, 19 nt, Artificial Sequence
  Description of Artificial Sequence: Synthetic oligonucleotide
  modified_base (19)..(19): a, c, u, g, unknown or other
cccuuucugagucuuguun

SEQ ID NO: 1255023 - RNA, 19 nt, Artificial Sequence
  Description of Artificial Sequence: Synthetic oligonucleotide
cuugugcugaugguuguau

SEQ ID NO: 1255024 - RNA, 19 nt, Artificial Sequence
  Description of Artificial Sequence: Synthetic oligonucleotide
ggaauuucuagggcagggu

SEQ ID NO: 1255025 - RNA, 19 nt, Artificial Sequence
  Description of Artificial Sequence: Synthetic oligonucleotide
auugucccucaagcucccu

SEQ ID NO: 1255026 - RNA, 19 nt, Artificial Sequence
  Description of Artificial Sequence: Synthetic oligonucleotide
augccguacuuggcgcaca

SEQ ID NO: 1255027 - RNA, 19 nt, Artificial Sequence
  Description of Artificial Sequence: Synthetic oligonucleotide
aguccacauuccggucaug

SEQ ID NO: 1255028 - RNA, 19 nt, Artificial Sequence
  Description of Artificial Sequence: Synthetic oligonucleotide
cggucaugaucaaugugca

SEQ ID NO: 1255029 - RNA, 19 nt, Artificial Sequence
  Description of Artificial Sequence: Synthetic oligonucleotide
cguuacagguugccugcag

SEQ ID NO: 1255030 - RNA, 19 nt, Artificial Sequence
  Description of Artificial Sequence: Synthetic oligonucleotide
gcgaagaacaggggaugca

SEQ ID NO: 1255031 - RNA, 19 nt, Artificial Sequence
  Description of Artificial Sequence: Synthetic oligonucleotide
gccguacuuggcgcacagg

SEQ ID NO: 1255032 - RNA, 19 nt, Artificial Sequence
  Description of Artificial Sequence: Synthetic oligonucleotide
cccagugagauggguucac

SEQ ID NO: 1255033 - RNA, 19 nt, Artificial Sequence
  Description of Artificial Sequence: Synthetic oligonucleotide
caugagcagaggugacuuu

SEQ ID NO: 1255034 - RNA, 19 nt, Artificial Sequence
  Description of Artificial Sequence: Synthetic oligonucleotide
cuauguccccuaacccuuu

SEQ ID NO: 1255035 - RNA, 19 nt, Artificial Sequence
  Description of Artificial Sequence: Synthetic oligonucleotide
uacugacauuaggcccaau

SEQ ID NO: 1255036 - RNA, 19 nt, Artificial Sequence
  Description of Artificial Sequence: Synthetic oligonucleotide
agguggccgcugaaccagu

SEQ ID NO: 1255037 - RNA, 19 nt, Artificial Sequence
  Description of Artificial Sequence: Synthetic oligonucleotide
gcguccaaccagagcugcc

SEQ ID NO: 1255038 - RNA, 19 nt, Artificial Sequence
  Description of Artificial Sequence: Synthetic oligonucleotide
ggguagagucagaaacaua

SEQ ID NO: 1255039 - RNA, 19 nt, Artificial Sequence
  Description of Artificial Sequence: Synthetic oligonucleotide
ccaaccagagcugccccga

SEQ ID NO: 1255040 - RNA, 19 nt, Artificial Sequence
  Description of Artificial Sequence: Synthetic oligonucleotide
cccuaaccccaacaguucu

SEQ ID NO: 1255041 - RNA, 19 nt, Artificial Sequence
  Description of Artificial Sequence: Synthetic oligonucleotide
gguggccgcugaaccaguc

SEQ ID NO: 1255042 - RNA, 19 nt, Artificial Sequence
  Description of Artificial Sequence: Synthetic oligonucleotide
ucggggcaucguggggaaa

SEQ ID NO: 1255043 - RNA, 19 nt, Artificial Sequence
  Description of Artificial Sequence: Synthetic oligonucleotide
ggaaaagguggugcucgau

SEQ ID NO: 1255044 - RNA, 19 nt, Artificial Sequence
  Description of Artificial Sequence: Synthetic oligonucleotide
ccaaguccacccauuucuu

SEQ ID NO: 1255045 - RNA, 19 nt, Artificial Sequence
  Description of Artificial Sequence: Synthetic oligonucleotide
ccuaaccccaacaguucuu

SEQ ID NO: 1255046 - RNA, 19 nt, Artificial Sequence
  Description of Artificial Sequence: Synthetic oligonucleotide
gggguccaaucaggaagaa

SEQ ID NO: 1255047 - RNA, 19 nt, Artificial Sequence
  Description of Artificial Sequence: Synthetic oligonucleotide
cccuaacccuuuugaacau

SEQ ID NO: 1255048 - RNA, 19 nt, Artificial Sequence
  Description of Artificial Sequence: Synthetic oligonucleotide
cccgacuccuucagugagu

SEQ ID NO: 1255049 - RNA, 19 nt, Artificial Sequence
  Description of Artificial Sequence: Synthetic oligonucleotide
cccucacuuuuaucacugu

SEQ ID NO: 1255050 - RNA, 19 nt, Artificial Sequence
  Description of Artificial Sequence: Synthetic oligonucleotide
cggggcaucguggggaaaa

SEQ ID NO: 1255051 - RNA, 19 nt, Artificial Sequence
  Description of Artificial Sequence: Synthetic oligonucleotide
ccaggccaaguccacccau

SEQ ID NO: 1255052 - RNA, 19 nt, Artificial Sequence
  Description of Artificial Sequence: Synthetic oligonucleotide
ccuaacccuuuugaacauu

SEQ ID NO: 1255053 - RNA, 19 nt, Artificial Sequence
  Description of Artificial Sequence: Synthetic oligonucleotide
ggccgcugaaccagucauu

SEQ ID NO: 1255054 - RNA, 19 nt, Artificial Sequence
  Description of Artificial Sequence: Synthetic oligonucleotide
  modified_base (1)..(1): a, c, u, g, unknown or other
naaaggggucacacuggcc

SEQ ID NO: 1255055 - RNA, 19 nt, Artificial Sequence
  Description of Artificial Sequence: Synthetic oligonucleotide
uucacgacaaguuacagcg

SEQ ID NO: 1255056 - RNA, 19 nt, Artificial Sequence
  Description of Artificial Sequence: Synthetic oligonucleotide
guuuaaauccaucugaggg

SEQ ID NO: 1255057 - RNA, 19 nt, Artificial Sequence
  Description of Artificial Sequence: Synthetic oligonucleotide
uuuccuuaaacuaagaaaa

SEQ ID NO: 1255058 - RNA, 19 nt, Artificial Sequence
  Description of Artificial Sequence: Synthetic oligonucleotide
aauagguuccuccauggac

SEQ ID NO: 1255059 - RNA, 19 nt, Artificial Sequence
  Description of Artificial Sequence: Synthetic oligonucleotide
aacauggagaaacccaacc

SEQ ID NO: 1255060 - RNA, 19 nt, Artificial Sequence
  Description of Artificial Sequence: Synthetic oligonucleotide
aaaauagguuccuccaugg

SEQ ID NO: 1255061 - RNA, 19 nt, Artificial Sequence
  Description of Artificial Sequence: Synthetic oligonucleotide
aaauuuaacagaggcaguc

SEQ ID NO: 1255062 - RNA, 19 nt, Artificial Sequence
  Description of Artificial Sequence: Synthetic oligonucleotide
ugucuuaacaauaauuuaa

SEQ ID NO: 1255063 - RNA, 19 nt, Artificial Sequence
  Description of Artificial Sequence: Synthetic oligonucleotide
ucuuacaucgauuuauacc

SEQ ID NO: 1255064 - RNA, 19 nt, Artificial Sequence
  Description of Artificial Sequence: Synthetic oligonucleotide
aaaauauugagugagcuuu

SEQ ID NO: 1255065 - RNA, 19 nt, Artificial Sequence
  Description of Artificial Sequence: Synthetic oligonucleotide
aauuuaaccuggaacacuc

SEQ ID NO: 1255066 - RNA, 19 nt, Artificial Sequence
  Description of Artificial Sequence: Synthetic oligonucleotide
aaaagucuuacaucgauuu

SEQ ID NO: 1255067 - RNA, 19 nt, Artificial Sequence
  Description of Artificial Sequence: Synthetic oligonucleotide
uauugagugagcuuuguac

SEQ ID NO: 1255068 - RNA, 19 nt, Artificial Sequence
  Description of Artificial Sequence: Synthetic oligonucleotide
guuacagcgggacaggccg

SEQ ID NO: 1255069 - RNA, 19 nt, Artificial Sequence
  Description of Artificial Sequence: Synthetic oligonucleotide
uggguuuaaauccaucuga

SEQ ID NO: 1255070 - RNA, 19 nt, Artificial Sequence
  Description of Artificial Sequence: Synthetic oligonucleotide
uuuaacagaggcagucagg

SEQ ID NO: 1255071 - RNA, 19 nt, Artificial Sequence
  Description of Artificial Sequence: Synthetic oligonucleotide
gagaacgacucccagcucg

SEQ ID NO: 1255072 - RNA, 19 nt, Artificial Sequence
  Description of Artificial Sequence: Synthetic oligonucleotide
uacaaugccaguuaauguc

SEQ ID NO: 1255073 - RNA, 19 nt, Artificial Sequence
  Description of Artificial Sequence: Synthetic oligonucleotide
aguguauguacagacgccc

SEQ ID NO: 1255074 - RNA, 19 nt, Artificial Sequence
  Description of Artificial Sequence: Synthetic oligonucleotide
uuaaaagucuuacaucgau

SEQ ID NO: 1255075 - RNA, 19 nt, Artificial Sequence
  Description of Artificial Sequence: Synthetic oligonucleotide
auagguuccuccauggacc

SEQ ID NO: 1255076 - RNA, 19 nt, Artificial Sequence
  Description of Artificial Sequence: Synthetic oligonucleotide
uaaugucuuaacaauaauu

SEQ ID NO: 1255077 - RNA, 19 nt, Artificial Sequence
  Description of Artificial Sequence: Synthetic oligonucleotide
cuuacaucgauuuauaccu

SEQ ID NO: 1255078 - RNA, 19 nt, Artificial Sequence
  Description of Artificial Sequence: Synthetic oligonucleotide
ugcaaauuuaacagaggca

SEQ ID NO: 1255079 - RNA, 19 nt, Artificial Sequence
  Description of Artificial Sequence: Synthetic oligonucleotide
agaaccguacuuuggagag

SEQ ID NO: 1255080 - RNA, 19 nt, Artificial Sequence
  Description of Artificial Sequence: Synthetic oligonucleotide
uuuaaccuggaacacucug

SEQ ID NO: 1255081 - RNA, 19 nt, Artificial Sequence
  Description of Artificial Sequence: Synthetic oligonucleotide
gcaaauuuaacagaggcag

SEQ ID NO: 1255082 - RNA, 19 nt, Artificial Sequence
  Description of Artificial Sequence: Synthetic oligonucleotide
auuuaacagaggcagucag

SEQ ID NO: 1255083 - RNA, 19 nt, Artificial Sequence
  Description of Artificial Sequence: Synthetic oligonucleotide
uucgggaaggagaagacac

SEQ ID NO: 1255084 - RNA, 19 nt, Artificial Sequence
  Description of Artificial Sequence: Synthetic oligonucleotide
aaucccuuaagauguacau

SEQ ID NO: 1255085 - RNA, 19 nt, Artificial Sequence
  Description of Artificial Sequence: Synthetic oligonucleotide
auugagugagcuuuguaca

SEQ ID NO: 1255086 - RNA, 19 nt, Artificial Sequence
  Description of Artificial Sequence: Synthetic oligonucleotide
aguacacacacucuggccu

SEQ ID NO: 1255087 - RNA, 19 nt, Artificial Sequence
  Description of Artificial Sequence: Synthetic oligonucleotide
uguuuuggaaucccuuaag

SEQ ID NO: 1255088 - RNA, 19 nt, Artificial Sequence
  Description of Artificial Sequence: Synthetic oligonucleotide
ugcuuuuccuuaaacuaag

SEQ ID NO: 1255089 - RNA, 19 nt, Artificial Sequence
  Description of Artificial Sequence: Synthetic oligonucleotide
aguggguuuaaauccaucu

SEQ ID NO: 1255090 - RNA, 19 nt, Artificial Sequence
  Description of Artificial Sequence: Synthetic oligonucleotide
uaaggcuucgggaaggaga

SEQ ID NO: 1255091 - RNA, 19 nt, Artificial Sequence
  Description of Artificial Sequence: Synthetic oligonucleotide
ugacuuguggcuugguggg

SEQ ID NO: 1255092 - RNA, 19 nt, Artificial Sequence
  Description of Artificial Sequence: Synthetic oligonucleotide
aagggaacagugcaaauuu

SEQ ID NO: 1255093 - RNA, 19 nt, Artificial Sequence
  Description of Artificial Sequence: Synthetic oligonucleotide
ucucaauuuggcauccuca

SEQ ID NO: 1255094 - RNA, 19 nt, Artificial Sequence
  Description of Artificial Sequence: Synthetic oligonucleotide
uggugugagacacuuguug

SEQ ID NO: 1255095 - RNA, 19 nt, Artificial Sequence
  Description of Artificial Sequence: Synthetic oligonucleotide
uuuaaaagucuuacaucga

SEQ ID NO: 1255096 - RNA, 19 nt, Artificial Sequence
  Description of Artificial Sequence: Synthetic oligonucleotide
cagugcaaauuuaacagag

SEQ ID NO: 1255097 - RNA, 19 nt, Artificial Sequence
  Description of Artificial Sequence: Synthetic oligonucleotide
auagugcuuuuccuuaaac

SEQ ID NO: 1255098 - RNA, 19 nt, Artificial Sequence
  Description of Artificial Sequence: Synthetic oligonucleotide
uuugagaggggcuuucucu

SEQ ID NO: 1255099 - RNA, 19 nt, Artificial Sequence
  Description of Artificial Sequence: Synthetic oligonucleotide
ucgauuuauaccuuauuua

SEQ ID NO: 1255100 - RNA, 19 nt, Artificial Sequence
  Description of Artificial Sequence: Synthetic oligonucleotide
auuaacucuggacaaaaua

SEQ ID NO: 1255101 - RNA, 19 nt, Artificial Sequence
  Description of Artificial Sequence: Synthetic oligonucleotide
aucgauuuauaccuuauuu

SEQ ID NO: 1255102 - RNA, 19 nt, Artificial Sequence
  Description of Artificial Sequence: Synthetic oligonucleotide
aaauuuaaccuggaacacu

SEQ ID NO: 1255103 - RNA, 19 nt, Artificial Sequence
  Description of Artificial Sequence: Synthetic oligonucleotide
ugugagacacuuguugggg

SEQ ID NO: 1255104 - RNA, 19 nt, Artificial Sequence
  Description of Artificial Sequence: Synthetic oligonucleotide
uucaccgaaaugucgaccu

SEQ ID NO: 1255105 - RNA, 19 nt, Artificial Sequence
  Description of Artificial Sequence: Synthetic oligonucleotide
aagucuuacaucgauuuau

SEQ ID NO: 1255106 - RNA, 19 nt, Artificial Sequence
  Description of Artificial Sequence: Synthetic oligonucleotide
gagaccaucguugauggug

SEQ ID NO: 1255107 - RNA, 19 nt, Artificial Sequence
  Description of Artificial Sequence: Synthetic oligonucleotide
aaauuaacucuggacaaaa

SEQ ID NO: 1255108 - RNA, 19 nt, Artificial Sequence
  Description of Artificial Sequence: Synthetic oligonucleotide
agcgagaacgacucccagc

SEQ ID NO: 1255109 - RNA, 19 nt, Artificial Sequence
  Description of Artificial Sequence: Synthetic oligonucleotide
aaccacaagggaacagugc

SEQ ID NO: 1255110 - RNA, 19 nt, Artificial Sequence
  Description of Artificial Sequence: Synthetic oligonucleotide
aauuuaacagaggcaguca

SEQ ID NO: 1255111 - RNA, 19 nt, Artificial Sequence
  Description of Artificial Sequence: Synthetic oligonucleotide
cacgacaaguuacagcggg

SEQ ID NO: 1255112 - RNA, 19 nt, Artificial Sequence
  Description of Artificial Sequence: Synthetic oligonucleotide
uaccuucaccgaaaugucg

SEQ ID NO: 1255113 - RNA, 19 nt, Artificial Sequence
  Description of Artificial Sequence: Synthetic oligonucleotide
acgacucccagcucgcacc

SEQ ID NO: 1255114 - RNA, 19 nt, Artificial Sequence
  Description of Artificial Sequence: Synthetic oligonucleotide
aauccaucugaggggcucc

SEQ ID NO: 1255115 - RNA, 19 nt, Artificial Sequence
  Description of Artificial Sequence: Synthetic oligonucleotide
cuucacgacaaguuacagc

SEQ ID NO: 1255116 - RNA, 19 nt, Artificial Sequence
  Description of Artificial Sequence: Synthetic oligonucleotide
aaguuacagcgggacaggc

SEQ ID NO: 1255117 - RNA, 19 nt, Artificial Sequence
  Description of Artificial Sequence: Synthetic oligonucleotide
acccauuggucugacaggc

SEQ ID NO: 1255118 - RNA, 19 nt, Artificial Sequence
  Description of Artificial Sequence: Synthetic oligonucleotide
ugggagaaccguacuuugg

SEQ ID NO: 1255119 - RNA, 19 nt, Artificial Sequence
  Description of Artificial Sequence: Synthetic oligonucleotide
ugucucguugguacagggg

SEQ ID NO: 1255120 - RNA, 19 nt, Artificial Sequence
  Description of Artificial Sequence: Synthetic oligonucleotide
ucagcuuuugagaggggcu

SEQ ID NO: 1255121 - RNA, 19 nt, Artificial Sequence
  Description of Artificial Sequence: Synthetic oligonucleotide
aacggucacaguacaguac

SEQ ID NO: 1255122 - RNA, 19 nt, Artificial Sequence
  Description of Artificial Sequence: Synthetic oligonucleotide
uaaaagucuuacaucgauu

SEQ ID NO: 1255123 - RNA, 19 nt, Artificial Sequence
  Description of Artificial Sequence: Synthetic oligonucleotide
cagaguacacacacucugg

SEQ ID NO: 1255124 - RNA, 19 nt, Artificial Sequence
  Description of Artificial Sequence: Synthetic oligonucleotide
acaucuccgagcccauccc

SEQ ID NO: 1255125 - RNA, 19 nt, Artificial Sequence
  Description of Artificial Sequence: Synthetic oligonucleotide
ggagcgugcagccaggagg

SEQ ID NO: 1255126 - RNA, 19 nt, Artificial Sequence
  Description of Artificial Sequence: Synthetic oligonucleotide
uccgagcccaucccuaggg

SEQ ID NO: 1255127 - RNA, 19 nt, Artificial Sequence
  Description of Artificial Sequence: Synthetic oligonucleotide
aaccguacuuuggagagca

SEQ ID NO: 1255128 - RNA, 19 nt, Artificial Sequence
  Description of Artificial Sequence: Synthetic oligonucleotide
uugucucguugguacaggg

SEQ ID NO: 1255129 - RNA, 19 nt, Artificial Sequence
  Description of Artificial Sequence: Synthetic oligonucleotide
gucaggguugcgaacaagg

SEQ ID NO: 1255130 - RNA, 19 nt, Artificial Sequence
  Description of Artificial Sequence: Synthetic oligonucleotide
gugugagacacuuguuggg

SEQ ID NO: 1255131 - RNA, 19 nt, Artificial Sequence
  Description of Artificial Sequence: Synthetic oligonucleotide
gguuuaaauccaucugagg

SEQ ID NO: 1255132 - RNA, 19 nt, Artificial Sequence
  Description of Artificial Sequence: Synthetic oligonucleotide
aauauugagugagcuuugu

SEQ ID NO: 1255133 - RNA, 19 nt, Artificial Sequence
  Description of Artificial Sequence: Synthetic oligonucleotide
acggucacaguacaguaca

SEQ ID NO: 1255134 - RNA, 19 nt, Artificial Sequence
  Description of Artificial Sequence: Synthetic oligonucleotide
aagggguguuuuggaaucc

SEQ ID NO: 1255135 - RNA, 19 nt, Artificial Sequence
  Description of Artificial Sequence: Synthetic oligonucleotide
gaguacacacacucuggcc

SEQ ID NO: 1255136 - RNA, 19 nt, Artificial Sequence
  Description of Artificial Sequence: Synthetic oligonucleotide
ugcugagcgagaacgacuc

SEQ ID NO: 1255137 - RNA, 19 nt, Artificial Sequence
  Description of Artificial Sequence: Synthetic oligonucleotide
cuacuauuuggcuggucag

SEQ ID NO: 1255138 - RNA, 19 nt, Artificial Sequence
  Description of Artificial Sequence: Synthetic oligonucleotide
ucgcuggggagaccgaagg

SEQ ID NO: 1255139 - RNA, 19 nt, Artificial Sequence
  Description of Artificial Sequence: Synthetic oligonucleotide
gcaguguauguacagacgc

SEQ ID NO: 1255140 - RNA, 19 nt, Artificial Sequence
  Description of Artificial Sequence: Synthetic oligonucleotide
ugcuucuccggugugacug

SEQ ID NO: 1255141 - RNA, 19 nt, Artificial Sequence
  Description of Artificial Sequence: Synthetic oligonucleotide
cugaacucaacauggagaa

SEQ ID NO: 1255142 - RNA, 19 nt, Artificial Sequence
  Description of Artificial Sequence: Synthetic oligonucleotide
gagaaccguacuuuggaga

SEQ ID NO: 1255143 - RNA, 19 nt, Artificial Sequence
  Description of Artificial Sequence: Synthetic oligonucleotide
aagcuugggagaaccguac

SEQ ID NO: 1255144 - RNA, 19 nt, Artificial Sequence
  Description of Artificial Sequence: Synthetic oligonucleotide
aaugucgaccuccauccuu

SEQ ID NO: 1255145 - RNA, 19 nt, Artificial Sequence
  Description of Artificial Sequence: Synthetic oligonucleotide
cucugaacucaacauggag

SEQ ID NO: 1255146 - RNA, 19 nt, Artificial Sequence
  Description of Artificial Sequence: Synthetic oligonucleotide
aaagucuuacaucgauuua

SEQ ID NO: 1255147 - RNA, 19 nt, Artificial Sequence
  Description of Artificial Sequence: Synthetic oligonucleotide
guggguuuaaauccaucug

SEQ ID NO: 1255148 - RNA, 19 nt, Artificial Sequence
  Description of Artificial Sequence: Synthetic oligonucleotide
gacaggccgacgcacacgc

SEQ ID NO: 1255149 - RNA, 19 nt, Artificial Sequence
  Description of Artificial Sequence: Synthetic oligonucleotide
ugagacacuuguuggggcu

SEQ ID NO: 1255150 - RNA, 19 nt, Artificial Sequence
  Description of Artificial Sequence: Synthetic oligonucleotide
agugcaaauuuaacagagg

SEQ ID NO: 1255151 - RNA, 19 nt, Artificial Sequence
  Description of Artificial Sequence: Synthetic oligonucleotide
uugggagaaccguacuuug

SEQ ID NO: 1255152 - RNA, 19 nt, Artificial Sequence
  Description of Artificial Sequence: Synthetic oligonucleotide
ugagcgagaacgacuccca

SEQ ID NO: 1255153 - RNA, 19 nt, Artificial Sequence
  Description of Artificial Sequence: Synthetic oligonucleotide
cgauuuauaccuuauuuac

SEQ ID NO: 1255154 - RNA, 19 nt, Artificial Sequence
  Description of Artificial Sequence: Synthetic oligonucleotide
uccggugugacugucgcug

SEQ ID NO: 1255155 - RNA, 19 nt, Artificial Sequence
  Description of Artificial Sequence: Synthetic oligonucleotide
ucuccggugugacugucgc

SEQ ID NO: 1255156 - RNA, 19 nt, Artificial Sequence
  Description of Artificial Sequence: Synthetic oligonucleotide
ugcuccuaaggcuucggga

SEQ ID NO: 1255157 - RNA, 19 nt, Artificial Sequence
  Description of Artificial Sequence: Synthetic oligonucleotide
cacgguagggccucgaguc

SEQ ID NO: 1255158 - RNA, 19 nt, Artificial Sequence
  Description of Artificial Sequence: Synthetic oligonucleotide
ucacgacaaguuacagcgg

SEQ ID NO: 1255159 - RNA, 19 nt, Artificial Sequence
  Description of Artificial Sequence: Synthetic oligonucleotide
aaggaacuucacgacaagu

SEQ ID NO: 1255160 - RNA, 19 nt, Artificial Sequence
  Description of Artificial Sequence: Synthetic oligonucleotide
uugagugagcuuuguacaa

SEQ ID NO: 1255161 - RNA, 19 nt, Artificial Sequence
  Description of Artificial Sequence: Synthetic oligonucleotide
uuauagugcuuuuccuuaa

SEQ ID NO: 1255162 - RNA, 19 nt, Artificial Sequence
  Description of Artificial Sequence: Synthetic oligonucleotide
uacuauuuggcuggucagc

SEQ ID NO: 1255163 - RNA, 19 nt, Artificial Sequence
  Description of Artificial Sequence: Synthetic oligonucleotide
aguuacagcgggacaggcc

SEQ ID NO: 1255164 - RNA, 19 nt, Artificial Sequence
  Description of Artificial Sequence: Synthetic oligonucleotide
aacuucacgacaaguuaca

SEQ ID NO: 1255165 - RNA, 19 nt, Artificial Sequence
  Description of Artificial Sequence: Synthetic oligonucleotide
gaccgaaggggccaugggc

SEQ ID NO: 1255166 - RNA, 19 nt, Artificial Sequence
  Description of Artificial Sequence: Synthetic oligonucleotide
caguguauguacagacgcc

SEQ ID NO: 1255167 - RNA, 19 nt, Artificial Sequence
  Description of Artificial Sequence: Synthetic oligonucleotide
cacaucuccgagcccaucc

SEQ ID NO: 1255168 - RNA, 19 nt, Artificial Sequence
  Description of Artificial Sequence: Synthetic oligonucleotide
uucucagggagcgugcagc

SEQ ID NO: 1255169 - RNA, 19 nt, Artificial Sequence
  Description of Artificial Sequence: Synthetic oligonucleotide
aucgggcccaggcugacuc

SEQ ID NO: 1255170 - RNA, 19 nt, Artificial Sequence
  Description of Artificial Sequence: Synthetic oligonucleotide
aggcugacucgcugaaccc

SEQ ID NO: 1255171 - RNA, 19 nt, Artificial Sequence
  Description of Artificial Sequence: Synthetic oligonucleotide
ggugcguucgaacuuggcc

SEQ ID NO: 1255172 - RNA, 19 nt, Artificial Sequence
  Description of Artificial Sequence: Synthetic oligonucleotide
uccuaaggcuucgggaagg

SEQ ID NO: 1255173 - RNA, 19 nt, Artificial Sequence
  Description of Artificial Sequence: Synthetic oligonucleotide
cuuccucgggaacuggugc

SEQ ID NO: 1255174 - RNA, 19 nt, Artificial Sequence
  Description of Artificial Sequence: Synthetic oligonucleotide
acuauuuggcuggucagcu

SEQ ID NO: 1255175 - RNA, 19 nt, Artificial Sequence
  Description of Artificial Sequence: Synthetic oligonucleotide
acagucugugucccugccg

SEQ ID NO: 1255176 - RNA, 19 nt, Artificial Sequence
  Description of Artificial Sequence: Synthetic oligonucleotide
uacaucgauuuauaccuua

SEQ ID NO: 1255177 - RNA, 19 nt, Artificial Sequence
  Description of Artificial Sequence: Synthetic oligonucleotide
uucuccggugugacugucg

SEQ ID NO: 1255178 - RNA, 19 nt, Artificial Sequence
  Description of Artificial Sequence: Synthetic oligonucleotide
gugcaugggucacacagug

SEQ ID NO: 1255179 - RNA, 19 nt, Artificial Sequence
  Description of Artificial Sequence: Synthetic oligonucleotide
agcaguguauguacagacg

SEQ ID NO: 1255180 - RNA, 19 nt, Artificial Sequence
  Description of Artificial Sequence: Synthetic oligonucleotide
caaccacaagggaacagug

SEQ ID NO: 1255181 - RNA, 19 nt, Artificial Sequence
  Description of Artificial Sequence: Synthetic oligonucleotide
aaugccaguuaaugucuua

SEQ ID NO: 1255182 - RNA, 19 nt, Artificial Sequence
  Description of Artificial Sequence: Synthetic oligonucleotide
agauaaguccugucucacu

SEQ ID NO: 1255183 - RNA, 19 nt, Artificial Sequence
  Description of Artificial Sequence: Synthetic oligonucleotide
cugagcgagaacgacuccc

SEQ ID NO: 1255184 - RNA, 19 nt, Artificial Sequence
  Description of Artificial Sequence: Synthetic oligonucleotide
ucgggaaggagaagacaca

SEQ ID NO: 1255185 - RNA, 19 nt, Artificial Sequence
  Description of Artificial Sequence: Synthetic oligonucleotide
gucuuacaucgauuuauac

SEQ ID NO: 1255186 - RNA, 19 nt, Artificial Sequence
  Description of Artificial Sequence: Synthetic oligonucleotide
cucccuacacaucuccgag

SEQ ID NO: 1255187 - RNA, 19 nt, Artificial Sequence
  Description of Artificial Sequence: Synthetic oligonucleotide
ugcguucgaacuuggccug

SEQ ID NO: 1255188 - RNA, 19 nt, Artificial Sequence
  Description of Artificial Sequence: Synthetic oligonucleotide
acucuggacaaaauaaaau

SEQ ID NO: 1255189 - RNA, 19 nt, Artificial Sequence
  Description of Artificial Sequence: Synthetic oligonucleotide
aaaugucgaccuccauccu

SEQ ID NO: 1255190 - RNA, 19 nt, Artificial Sequence
  Description of Artificial Sequence: Synthetic oligonucleotide
ucucagggagcgugcagcc

SEQ ID NO: 1255191 - RNA, 19 nt, Artificial Sequence
  Description of Artificial Sequence: Synthetic oligonucleotide
aauuaacucuggacaaaau

SEQ ID NO: 1255192 - RNA, 19 nt, Artificial Sequence
  Description of Artificial Sequence: Synthetic oligonucleotide
agaacgacucccagcucgc

SEQ ID NO: 1255193 - RNA, 19 nt, Artificial Sequence
  Description of Artificial Sequence: Synthetic oligonucleotide
gaaucccuuaagauguaca

SEQ ID NO: 1255194 - RNA, 19 nt, Artificial Sequence
  Description of Artificial Sequence: Synthetic oligonucleotide
gaacaagggguguuuugga

SEQ ID NO: 1255195 - RNA, 19 nt, Artificial Sequence
  Description of Artificial Sequence: Synthetic oligonucleotide
agggguguuuuggaauccc

SEQ ID NO: 1255196 - RNA, 19 nt, Artificial Sequence
  Description of Artificial Sequence: Synthetic oligonucleotide
gucagcuuuugagaggggc

SEQ ID NO: 1255197 - RNA, 19 nt, Artificial Sequence
  Description of Artificial Sequence: Synthetic oligonucleotide
auguacagacgcccaagga

SEQ ID NO: 1255198 - RNA, 19 nt, Artificial Sequence
  Description of Artificial Sequence: Synthetic oligonucleotide
gagaccgaaggggccaugg

SEQ ID NO: 1255199 - RNA, 19 nt, Artificial Sequence
  Description of Artificial Sequence: Synthetic oligonucleotide
gugagacacuuguuggggc

SEQ ID NO: 1255200 - RNA, 19 nt, Artificial Sequence
  Description of Artificial Sequence: Synthetic oligonucleotide
agcgacagagcaguguaug

SEQ ID NO: 1255201 - RNA, 19 nt, Artificial Sequence
  Description of Artificial Sequence: Synthetic oligonucleotide
gacaccgcuggcacgguag

SEQ ID NO: 1255202 - RNA, 19 nt, Artificial Sequence
  Description of Artificial Sequence: Synthetic oligonucleotide
ggugacaccgcuggcacgg

SEQ ID NO: 1255203 - RNA, 19 nt, Artificial Sequence
  Description of Artificial Sequence: Synthetic oligonucleotide
auucucagggagcgugcag

SEQ ID NO: 1255204 - RNA, 19 nt, Artificial Sequence
  Description of Artificial Sequence: Synthetic oligonucleotide
agaccgaaggggccauggg

SEQ ID NO: 1255205 - RNA, 19 nt, Artificial Sequence
  Description of Artificial Sequence: Synthetic oligonucleotide
augugcgguaggcagcgug

SEQ ID NO: 1255206 - RNA, 19 nt, Artificial Sequence
  Description of Artificial Sequence: Synthetic oligonucleotide
caccgaaaugucgaccucc

SEQ ID NO: 1255207 - RNA, 19 nt, Artificial Sequence
  Description of Artificial Sequence: Synthetic oligonucleotide
acuucacgacaaguuacag

SEQ ID NO: 1255208 - RNA, 19 nt, Artificial Sequence
  Description of Artificial Sequence: Synthetic oligonucleotide
cuucaccgaaaugucgacc

SEQ ID NO: 1255209 - RNA, 19 nt, Artificial Sequence
  Description of Artificial Sequence: Synthetic oligonucleotide
caacauggagaaacccaac

SEQ ID NO: 1255210 - RNA, 19 nt, Artificial Sequence
  Description of Artificial Sequence: Synthetic oligonucleotide
ggagaaccguacuuuggag

SEQ ID NO: 1255211 - RNA, 19 nt, Artificial Sequence
  Description of Artificial Sequence: Synthetic oligonucleotide
gccaguuaaugucuuaaca

SEQ ID NO: 1255212 - RNA, 19 nt, Artificial Sequence
  Description of Artificial Sequence: Synthetic oligonucleotide
guacaaugccaguuaaugu

SEQ ID NO: 1255213 - RNA, 19 nt, Artificial Sequence
  Description of Artificial Sequence: Synthetic oligonucleotide
gucucaauuuggcauccuc

SEQ ID NO: 1255214 - RNA, 19 nt, Artificial Sequence
  Description of Artificial Sequence: Synthetic oligonucleotide
cuuguggcuuggugggacc

SEQ ID NO: 1255215 - RNA, 19 nt, Artificial Sequence
  Description of Artificial Sequence: Synthetic oligonucleotide
uuacaucgauuuauaccuu

SEQ ID NO: 1255216 - RNA, 19 nt, Artificial Sequence
  Description of Artificial Sequence: Synthetic oligonucleotide
aggaacuucacgacaaguu

SEQ ID NO: 1255217 - RNA, 19 nt, Artificial Sequence
  Description of Artificial Sequence: Synthetic oligonucleotide
uccuccauggacccugguu

SEQ ID NO: 1255218 - RNA, 19 nt, Artificial Sequence
  Description of Artificial Sequence: Synthetic oligonucleotide
gugcguucgaacuuggccu

SEQ ID NO: 1255219 - RNA, 19 nt, Artificial Sequence
  Description of Artificial Sequence: Synthetic oligonucleotide
gcugaacccuuucugggcc

SEQ ID NO: 1255220 - RNA, 19 nt, Artificial Sequence
  Description of Artificial Sequence: Synthetic oligonucleotide
cccuacacaucuccgagcc

SEQ ID NO: 1255221 - RNA, 19 nt, Artificial Sequence
  Description of Artificial Sequence: Synthetic oligonucleotide
ggcuuuuggugugagacac

SEQ ID NO: 1255222 - RNA, 19 nt, Artificial Sequence
  Description of Artificial Sequence: Synthetic oligonucleotide
acaccgcuggcacgguagg

SEQ ID NO: 1255223 - RNA, 19 nt, Artificial Sequence
  Description of Artificial Sequence: Synthetic oligonucleotide
gagcgagaacgacucccag

SEQ ID NO: 1255224 - RNA, 19 nt, Artificial Sequence
  Description of Artificial Sequence: Synthetic oligonucleotide
ucauggucucagacagacu

SEQ ID NO: 1255225 - RNA, 19 nt, Artificial Sequence
  Description of Artificial Sequence: Synthetic oligonucleotide
cagacgcccaaggaugugc

SEQ ID NO: 1255226 - RNA, 19 nt, Artificial Sequence
  Description of Artificial Sequence: Synthetic oligonucleotide
accgaaggggccaugggca

SEQ ID NO: 1255227 - RNA, 19 nt, Artificial Sequence
  Description of Artificial Sequence: Synthetic oligonucleotide
ggaacuggugcccguuucc

SEQ ID NO: 1255228 - RNA, 19 nt, Artificial Sequence
  Description of Artificial Sequence: Synthetic oligonucleotide
uggacagucugaagcgcua

SEQ ID NO: 1255229 - RNA, 19 nt, Artificial Sequence
  Description of Artificial Sequence: Synthetic oligonucleotide
gaagcuugggagaaccgua

SEQ ID NO: 1255230 - RNA, 19 nt, Artificial Sequence
  Description of Artificial Sequence: Synthetic oligonucleotide
ggaugugcgguaggcagcg

SEQ ID NO: 1255231 - RNA, 19 nt, Artificial Sequence
  Description of Artificial Sequence: Synthetic oligonucleotide
uccguaccuucaccgaaau

SEQ ID NO: 1255232 - RNA, 19 nt, Artificial Sequence
  Description of Artificial Sequence: Synthetic oligonucleotide
gggagaaccguacuuugga

SEQ ID NO: 1255233 - RNA, 19 nt, Artificial Sequence
  Description of Artificial Sequence: Synthetic oligonucleotide
gaccaacggucacaguaca

SEQ ID NO: 1255234 - RNA, 19 nt, Artificial Sequence
  Description of Artificial Sequence: Synthetic oligonucleotide
cacacgcagguaagggcag

SEQ ID NO: 1255235 - RNA, 19 nt, Artificial Sequence
  Description of Artificial Sequence: Synthetic oligonucleotide
agacgcccaaggaugugcg

SEQ ID NO: 1255236 - RNA, 19 nt, Artificial Sequence
  Description of Artificial Sequence: Synthetic oligonucleotide
gggcuccguaccuucaccg

SEQ ID NO: 1255237 - RNA, 19 nt, Artificial Sequence
  Description of Artificial Sequence: Synthetic oligonucleotide
cucacuggcgugcucucuc

SEQ ID NO: 1255238 - RNA, 19 nt, Artificial Sequence
  Description of Artificial Sequence: Synthetic oligonucleotide
acucugaggcaccaucauu

SEQ ID NO: 1255239 - RNA, 19 nt, Artificial Sequence
  Description of Artificial Sequence: Synthetic oligonucleotide
ucaccgaaaugucgaccuc

SEQ ID NO: 1255240 - RNA, 19 nt, Artificial Sequence
  Description of Artificial Sequence: Synthetic oligonucleotide
uuacagcgggacaggccga

SEQ ID NO: 1255241 - RNA, 19 nt, Artificial Sequence
  Description of Artificial Sequence: Synthetic oligonucleotide
gaaccguacuuuggagagc

SEQ ID NO: 1255242 - RNA, 19 nt, Artificial Sequence
  Description of Artificial Sequence: Synthetic oligonucleotide
acacgcagguaagggcagc

SEQ ID NO: 1255243 - RNA, 19 nt, Artificial Sequence
  Description of Artificial Sequence: Synthetic oligonucleotide
ugccguccuggacccauug

SEQ ID NO: 1255244 - RNA, 19 nt, Artificial Sequence
  Description of Artificial Sequence: Synthetic oligonucleotide
caucguugaugguggugug

SEQ ID NO: 1255245 - RNA, 19 nt, Artificial Sequence
  Description of Artificial Sequence: Synthetic oligonucleotide
cacgcagguaagggcagcg

SEQ ID NO: 1255246 - RNA, 19 nt, Artificial Sequence
  Description of Artificial Sequence: Synthetic oligonucleotide
ugucugcuccuaaggcuuc

SEQ ID NO: 1255247 - RNA, 19 nt, Artificial Sequence
  Description of Artificial Sequence: Synthetic oligonucleotide
acaucgauuuauaccuuau

SEQ ID NO: 1255248 - RNA, 19 nt, Artificial Sequence
  Description of Artificial Sequence: Synthetic oligonucleotide
gagcgugcagccaggagga

SEQ ID NO: 1255249 - RNA, 19 nt, Artificial Sequence
  Description of Artificial Sequence: Synthetic oligonucleotide
gcuccuaaggcuucgggaa

SEQ ID NO: 1255250 - RNA, 19 nt, Artificial Sequence
  Description of Artificial Sequence: Synthetic oligonucleotide
cagcgggacaggccgacgc

SEQ ID NO: 1255251 - RNA, 19 nt, Artificial Sequence
  Description of Artificial Sequence: Synthetic oligonucleotide
gccgaggcucugcugagcg

SEQ ID NO: 1255252 - RNA, 19 nt, Artificial Sequence
  Description of Artificial Sequence: Synthetic oligonucleotide
agcaggugcguucgaacuu

SEQ ID NO: 1255253 - RNA, 19 nt, Artificial Sequence
  Description of Artificial Sequence: Synthetic oligonucleotide
caaauuuaacagaggcagu

SEQ ID NO: 1255254 - RNA, 19 nt, Artificial Sequence
  Description of Artificial Sequence: Synthetic oligonucleotide
agucuuacaucgauuuaua

SEQ ID NO: 1255255 - RNA, 19 nt, Artificial Sequence
  Description of Artificial Sequence: Synthetic oligonucleotide
ucccugccguccuggaccc

SEQ ID NO: 1255256 - RNA, 19 nt, Artificial Sequence
  Description of Artificial Sequence: Synthetic oligonucleotide
aggagcagauaaguccugu

SEQ ID NO: 1255257 - RNA, 19 nt, Artificial Sequence
  Description of Artificial Sequence: Synthetic oligonucleotide
ccggcuuuuggugugagac

SEQ ID NO: 1255258 - RNA, 19 nt, Artificial Sequence
  Description of Artificial Sequence: Synthetic oligonucleotide
uaucccugacuuguggcuu

SEQ ID NO: 1255259 - RNA, 19 nt, Artificial Sequence
  Description of Artificial Sequence: Synthetic oligonucleotide
auuuaaccuggaacacucu

SEQ ID NO: 1255260 - RNA, 19 nt, Artificial Sequence
  Description of Artificial Sequence: Synthetic oligonucleotide
gaggcaccaucauuugucu

SEQ ID NO: 1255261 - RNA, 19 nt, Artificial Sequence
  Description of Artificial Sequence: Synthetic oligonucleotide
uggaaucccuuaagaugua

SEQ ID NO: 1255262 - RNA, 19 nt, Artificial Sequence
  Description of Artificial Sequence: Synthetic oligonucleotide
gacagucugaagcgcuaaa

SEQ ID NO: 1255263 - RNA, 19 nt, Artificial Sequence
  Description of Artificial Sequence: Synthetic oligonucleotide
accaucguugaugguggug

SEQ ID NO: 1255264 - RNA, 19 nt, Artificial Sequence
  Description of Artificial Sequence: Synthetic oligonucleotide
acgcccaaggaugugcggu

SEQ ID NO: 1255265 - RNA, 19 nt, Artificial Sequence
  Description of Artificial Sequence: Synthetic oligonucleotide
accaacggucacaguacag

SEQ ID NO: 1255266 - RNA, 19 nt, Artificial Sequence
  Description of Artificial Sequence: Synthetic oligonucleotide
uucuaucaucauggucuca

SEQ ID NO: 1255267 - RNA, 19 nt, Artificial Sequence
  Description of Artificial Sequence: Synthetic oligonucleotide
aggugcguucgaacuuggc

SEQ ID NO: 1255268 - RNA, 19 nt, Artificial Sequence
  Description of Artificial Sequence: Synthetic oligonucleotide
accgaaaugucgaccucca

SEQ ID NO: 1255269 - RNA, 19 nt, Artificial Sequence
  Description of Artificial Sequence: Synthetic oligonucleotide
gcgagaacgacucccagcu

SEQ ID NO: 1255270 - RNA, 19 nt, Artificial Sequence
  Description of Artificial Sequence: Synthetic oligonucleotide
gagguccuacuauuuggcu

SEQ ID NO: 1255271 - RNA, 19 nt, Artificial Sequence
  Description of Artificial Sequence: Synthetic oligonucleotide
ggaccaacggucacaguac

SEQ ID NO: 1255272 - RNA, 19 nt, Artificial Sequence
  Description of Artificial Sequence: Synthetic oligonucleotide
guucgaacuuggccugcac

SEQ ID NO: 1255273 - RNA, 19 nt, Artificial Sequence
  Description of Artificial Sequence: Synthetic oligonucleotide
acgguagggccucgagucu

SEQ ID NO: 1255274 - RNA, 19 nt, Artificial Sequence
  Description of Artificial Sequence: Synthetic oligonucleotide
cagggagcgugcagccagg

SEQ ID NO: 1255275 - RNA, 19 nt, Artificial Sequence
  Description of Artificial Sequence: Synthetic oligonucleotide
ugcccguuuccuggccugg

SEQ ID NO: 1255276 - RNA, 19 nt, Artificial Sequence
  Description of Artificial Sequence: Synthetic oligonucleotide
gggaacagugcaaauuuaa

SEQ ID NO: 1255277 - RNA, 19 nt, Artificial Sequence
  Description of Artificial Sequence: Synthetic oligonucleotide
ggcuucgggaaggagaaga

SEQ ID NO: 1255278 - RNA, 19 nt, Artificial Sequence
  Description of Artificial Sequence: Synthetic oligonucleotide
accagagcagauggcauuu

SEQ ID NO: 1255279 - RNA, 19 nt, Artificial Sequence
  Description of Artificial Sequence: Synthetic oligonucleotide
gcgaacaagggguguuuug

SEQ ID NO: 1255280 - RNA, 19 nt, Artificial Sequence
  Description of Artificial Sequence: Synthetic oligonucleotide
agagaccaucguugauggu

SEQ ID NO: 1255281 - RNA, 19 nt, Artificial Sequence
  Description of Artificial Sequence: Synthetic oligonucleotide
ccguacuuuggagagcagc

SEQ ID NO: 1255282 - RNA, 19 nt, Artificial Sequence
  Description of Artificial Sequence: Synthetic oligonucleotide
cucugcugagcgagaacga

SEQ ID NO: 1255283 - RNA, 19 nt, Artificial Sequence
  Description of Artificial Sequence: Synthetic oligonucleotide
agcucgcaccccgacagga

SEQ ID NO: 1255284 - RNA, 19 nt, Artificial Sequence
  Description of Artificial Sequence: Synthetic oligonucleotide
cuguugucucguugguaca

SEQ ID NO: 1255285 - RNA, 19 nt, Artificial Sequence
  Description of Artificial Sequence: Synthetic oligonucleotide
gcagcaggugcguucgaac

SEQ ID NO: 1255286 - RNA, 19 nt, Artificial Sequence
  Description of Artificial Sequence: Synthetic oligonucleotide
auuggucugacaggccaua

SEQ ID NO: 1255287 - RNA, 19 nt, Artificial Sequence
  Description of Artificial Sequence: Synthetic oligonucleotide
gcacacgcagguaagggca

SEQ ID NO: 1255288 - RNA, 19 nt, Artificial Sequence
  Description of Artificial Sequence: Synthetic oligonucleotide
acgacaaguuacagcggga

SEQ ID NO: 1255289 - RNA, 19 nt, Artificial Sequence
  Description of Artificial Sequence: Synthetic oligonucleotide
gcaggugcguucgaacuug

SEQ ID NO: 1255290 - RNA, 19 nt, Artificial Sequence
  Description of Artificial Sequence: Synthetic oligonucleotide
gucgcuggggagaccgaag

SEQ ID NO: 1255291 - RNA, 19 nt, Artificial Sequence
  Description of Artificial Sequence: Synthetic oligonucleotide
ugcgaacaagggguguuuu

SEQ ID NO: 1255292 - RNA, 19 nt, Artificial Sequence
  Description of Artificial Sequence: Synthetic oligonucleotide
gcagcgacagagcagugua

SEQ ID NO: 1255293 - RNA, 19 nt, Artificial Sequence
  Description of Artificial Sequence: Synthetic oligonucleotide
ucccagcucgcaccccgac

SEQ ID NO: 1255294 - RNA, 19 nt, Artificial Sequence
  Description of Artificial Sequence: Synthetic oligonucleotide
uugcgaacaagggguguuu

SEQ ID NO: 1255295 - RNA, 19 nt, Artificial Sequence
  Description of Artificial Sequence: Synthetic oligonucleotide
gugcccguuuccuggccug

SEQ ID NO: 1255296 - RNA, 19 nt, Artificial Sequence
  Description of Artificial Sequence: Synthetic oligonucleotide
cuccguaccuucaccgaaa

SEQ ID NO: 1255297 - RNA, 19 nt, Artificial Sequence
  Description of Artificial Sequence: Synthetic oligonucleotide
uggacccauuggucugaca

SEQ ID NO: 1255298 - RNA, 19 nt, Artificial Sequence
  Description of Artificial Sequence: Synthetic oligonucleotide
ccaccuccggcuuuuggug

SEQ ID NO: 1255299 - RNA, 19 nt, Artificial Sequence
  Description of Artificial Sequence: Synthetic oligonucleotide
ugaacccuuucugggccau

SEQ ID NO: 1255300 - RNA, 19 nt, Artificial Sequence
  Description of Artificial Sequence: Synthetic oligonucleotide
ccuucaccgaaaugucgac

SEQ ID NO: 1255301 - RNA, 19 nt, Artificial Sequence
  Description of Artificial Sequence: Synthetic oligonucleotide
cauggccuucucacuacaa

SEQ ID NO: 1255302 - RNA, 19 nt, Artificial Sequence
  Description of Artificial Sequence: Synthetic oligonucleotide
uccuccuuuaaggcauguu

SEQ ID NO: 1255303 - RNA, 19 nt, Artificial Sequence
  Description of Artificial Sequence: Synthetic oligonucleotide
aggcagcgugcauggguca

SEQ ID NO: 1255304 - RNA, 19 nt, Artificial Sequence
  Description of Artificial Sequence: Synthetic oligonucleotide
acagacgcccaaggaugug

SEQ ID NO: 1255305 - RNA, 19 nt, Artificial Sequence
  Description of Artificial Sequence: Synthetic oligonucleotide
ccguuuccuggccuggacc

SEQ ID NO: 1255306 - RNA, 19 nt, Artificial Sequence
  Description of Artificial Sequence: Synthetic oligonucleotide
cagcaggugcguucgaacu

SEQ ID NO: 1255307 - RNA, 19 nt, Artificial Sequence
  Description of Artificial Sequence: Synthetic oligonucleotide
ccugccgaggcucugcuga

SEQ ID NO: 1255308 - RNA, 19 nt, Artificial Sequence
  Description of Artificial Sequence: Synthetic oligonucleotide
cuugggagaaccguacuuu

SEQ ID NO: 1255309 - RNA, 19 nt, Artificial Sequence
  Description of Artificial Sequence: Synthetic oligonucleotide
aggggccaugggcagcuaa

SEQ ID NO: 1255310 - RNA, 19 nt, Artificial Sequence
  Description of Artificial Sequence: Synthetic oligonucleotide
agggaacagugcaaauuua

SEQ ID NO: 1255311 - RNA, 19 nt, Artificial Sequence
  Description of Artificial Sequence: Synthetic oligonucleotide
aggagaagacacaggcgua

SEQ ID NO: 1255312 - RNA, 19 nt, Artificial Sequence
  Description of Artificial Sequence: Synthetic oligonucleotide
ugccgaggcucugcugagc

SEQ ID NO: 1255313 - RNA, 19 nt, Artificial Sequence
  Description of Artificial Sequence: Synthetic oligonucleotide
aggcccacacugauugccu

SEQ ID NO: 1255314 - RNA, 19 nt, Artificial Sequence
  Description of Artificial Sequence: Synthetic oligonucleotide
cuuccagaguacacacacu

SEQ ID NO: 1255315 - RNA, 19 nt, Artificial Sequence
  Description of Artificial Sequence: Synthetic oligonucleotide
agcuuuugagaggggcuuu

SEQ ID NO: 1255316 - RNA, 19 nt, Artificial Sequence
  Description of Artificial Sequence: Synthetic oligonucleotide
cagaggcagucaggguugc

SEQ ID NO: 1255317 - RNA, 19 nt, Artificial Sequence
  Description of Artificial Sequence: Synthetic oligonucleotide
gggcagcuaacuucuucuc

SEQ ID NO: 1255318 - RNA, 19 nt, Artificial Sequence
  Description of Artificial Sequence: Synthetic oligonucleotide
cgacaaguuacagcgggac

SEQ ID NO: 1255319 - RNA, 19 nt, Artificial Sequence
  Description of Artificial Sequence: Synthetic oligonucleotide
auuuggcuggucagcuuuu

SEQ ID NO: 1255320 - RNA, 19 nt, Artificial Sequence
  Description of Artificial Sequence: Synthetic oligonucleotide
gcugagcgagaacgacucc

SEQ ID NO: 1255321 - RNA, 19 nt, Artificial Sequence
  Description of Artificial Sequence: Synthetic oligonucleotide
acgcagguaagggcagcga

SEQ ID NO: 1255322 - RNA, 19 nt, Artificial Sequence
  Description of Artificial Sequence: Synthetic oligonucleotide
gcuccguaccuucaccgaa

SEQ ID NO: 1255323 - RNA, 19 nt, Artificial Sequence
  Description of Artificial Sequence: Synthetic oligonucleotide
gaacgacucccagcucgca

SEQ ID NO: 1255324 - RNA, 19 nt, Artificial Sequence
  Description of Artificial Sequence: Synthetic oligonucleotide
agcgugcaugggucacaca

SEQ ID NO: 1255325 - RNA, 19 nt, Artificial Sequence
  Description of Artificial Sequence: Synthetic oligonucleotide
ccuacacaucuccgagccc

SEQ ID NO: 1255326 - RNA, 19 nt, Artificial Sequence
  Description of Artificial Sequence: Synthetic oligonucleotide
ccggugugacugucgcugg

SEQ ID NO: 1255327 - RNA, 19 nt, Artificial Sequence
  Description of Artificial Sequence: Synthetic oligonucleotide
ggcuccguaccuucaccga

SEQ ID NO: 1255328 - RNA, 19 nt, Artificial Sequence
  Description of Artificial Sequence: Synthetic oligonucleotide
ccucccuacacaucuccga

SEQ ID NO: 1255329 - RNA, 19 nt, Artificial Sequence
  Description of Artificial Sequence: Synthetic oligonucleotide
cauuggucugacaggccau

SEQ ID NO: 1255330 - RNA, 19 nt, Artificial Sequence
  Description of Artificial Sequence: Synthetic oligonucleotide
ccgaaggggccaugggcag

SEQ ID NO: 1255331 - RNA, 19 nt, Artificial Sequence
  Description of Artificial Sequence: Synthetic oligonucleotide
guugcgaacaagggguguu

SEQ ID NO: 1255332 - RNA, 19 nt, Artificial Sequence
  Description of Artificial Sequence: Synthetic oligonucleotide
ccgagcccaucccuagggg

SEQ ID NO: 1255333 - RNA, 19 nt, Artificial Sequence
  Description of Artificial Sequence: Synthetic oligonucleotide
gcgugcagccaggaggagc

SEQ ID NO: 1255334 - RNA, 19 nt, Artificial Sequence
  Description of Artificial Sequence: Synthetic oligonucleotide
gccauaucccugacuugug

SEQ ID NO: 1255335 - RNA, 19 nt, Artificial Sequence
  Description of Artificial Sequence: Synthetic oligonucleotide
gguggaucgggcccaggcu

SEQ ID NO: 1255336 - RNA, 19 nt, Artificial Sequence
  Description of Artificial Sequence: Synthetic oligonucleotide
gccaccuccggcuuuuggu

SEQ ID NO: 1255337 - RNA, 19 nt, Artificial Sequence
  Description of Artificial Sequence: Synthetic oligonucleotide
ccauggacccugguucagc

SEQ ID NO: 1255338 - RNA, 19 nt, Artificial Sequence
  Description of Artificial Sequence: Synthetic oligonucleotide
cuccggcuuuuggugugag

SEQ ID NO: 1255339 - RNA, 19 nt, Artificial Sequence
  Description of Artificial Sequence: Synthetic oligonucleotide
gacccugguucagcugguc

SEQ ID NO: 1255340 - RNA, 19 nt, Artificial Sequence
  Description of Artificial Sequence: Synthetic oligonucleotide
accguacuuuggagagcag

SEQ ID NO: 1255341 - RNA, 19 nt, Artificial Sequence
  Description of Artificial Sequence: Synthetic oligonucleotide
ccaucguugaugguggugu

SEQ ID NO: 1255342 - RNA, 19 nt, Artificial Sequence
  Description of Artificial Sequence: Synthetic oligonucleotide
cuggacccauuggucugac

SEQ ID NO: 1255343 - RNA, 19 nt, Artificial Sequence
  Description of Artificial Sequence: Synthetic oligonucleotide
ggggagaccgaaggggcca

SEQ ID NO: 1255344 - RNA, 19 nt, Artificial Sequence
  Description of Artificial Sequence: Synthetic oligonucleotide
gcccaaggaugugcgguag

SEQ ID NO: 1255345 - RNA, 19 nt, Artificial Sequence
  Description of Artificial Sequence: Synthetic oligonucleotide
ccgacgcacacgcagguaa

SEQ ID NO: 1255346 - RNA, 19 nt, Artificial Sequence
  Description of Artificial Sequence: Synthetic oligonucleotide
gacugucgcuggggagacc

SEQ ID NO: 1255347 - RNA, 19 nt, Artificial Sequence
  Description of Artificial Sequence: Synthetic oligonucleotide
cguagugccaccuccggcu

SEQ ID NO: 1255348 - RNA, 19 nt, Artificial Sequence
  Description of Artificial Sequence: Synthetic oligonucleotide
caucuccgagcccaucccu

SEQ ID NO: 1255349 - RNA, 19 nt, Artificial Sequence
  Description of Artificial Sequence: Synthetic oligonucleotide
ggggaccuuccucgggaac

SEQ ID NO: 1255350 - RNA, 19 nt, Artificial Sequence
  Description of Artificial Sequence: Synthetic oligonucleotide
agcgugcagccaggaggag

SEQ ID NO: 1255351 - RNA, 19 nt, Artificial Sequence
  Description of Artificial Sequence: Synthetic oligonucleotide
gcgacagagcaguguaugu

SEQ ID NO: 1255352 - RNA, 19 nt, Artificial Sequence
  Description of Artificial Sequence: Synthetic oligonucleotide
cuauuuggcuggucagcuu

SEQ ID NO: 1255353 - RNA, 19 nt, Artificial Sequence
  Description of Artificial Sequence: Synthetic oligonucleotide
gaccaucguugaugguggu

SEQ ID NO: 1255354 - RNA, 19 nt, Artificial Sequence
  Description of Artificial Sequence: Synthetic oligonucleotide
ccaacggucacaguacagu

SEQ ID NO: 1255355 - RNA, 19 nt, Artificial Sequence
  Description of Artificial Sequence: Synthetic oligonucleotide
gcuugggagaaccguacuu

SEQ ID NO: 1255356 - RNA, 19 nt, Artificial Sequence
  Description of Artificial Sequence: Synthetic oligonucleotide
cgacgcacacgcagguaag

SEQ ID NO: 1255357 - RNA, 19 nt, Artificial Sequence
  Description of Artificial Sequence: Synthetic oligonucleotide
ggcagcgugcaugggucac

SEQ ID NO: 1255358 - RNA, 19 nt, Artificial Sequence
  Description of Artificial Sequence: Synthetic oligonucleotide
ccaaccacaagggaacagu

SEQ ID NO: 1255359 - RNA, 19 nt, Artificial Sequence
  Description of Artificial Sequence: Synthetic oligonucleotide
ccguaccuucaccgaaaug

SEQ ID NO: 1255360 - RNA, 19 nt, Artificial Sequence
  Description of Artificial Sequence: Synthetic oligonucleotide
cagcuuuugagaggggcuu

SEQ ID NO: 1255361 - RNA, 19 nt, Artificial Sequence
  Description of Artificial Sequence: Synthetic oligonucleotide
guagugccaccuccggcuu

SEQ ID NO: 1255362 - RNA, 19 nt, Artificial Sequence
  Description of Artificial Sequence: Synthetic oligonucleotide
cguugaugguggugugcac

SEQ ID NO: 1255363 - RNA, 19 nt, Artificial Sequence
  Description of Artificial Sequence: Synthetic oligonucleotide
cacugauugccugcacagu

SEQ ID NO: 1255364 - RNA, 19 nt, Artificial Sequence
  Description of Artificial Sequence: Synthetic oligonucleotide
gcacgguagggccucgagu

SEQ ID NO: 1255365 - RNA, 19 nt, Artificial Sequence
  Description of Artificial Sequence: Synthetic oligonucleotide
ggugcccguuuccuggccu

SEQ ID NO: 1255366 - RNA, 19 nt, Artificial Sequence
  Description of Artificial Sequence: Synthetic oligonucleotide
ggcugacucgcugaacccu

SEQ ID NO: 1255367 - RNA, 19 nt, Artificial Sequence
  Description of Artificial Sequence: Synthetic oligonucleotide
gguugcgaacaaggggugu

SEQ ID NO: 1255368 - RNA, 19 nt, Artificial Sequence
  Description of Artificial Sequence: Synthetic oligonucleotide
cagcgacagagcaguguau

SEQ ID NO: 1255369 - RNA, 19 nt, Artificial Sequence
  Description of Artificial Sequence: Synthetic oligonucleotide
gaucgggcccaggcugacu

SEQ ID NO: 1255370 - RNA, 19 nt, Artificial Sequence
  Description of Artificial Sequence: Synthetic oligonucleotide
cuccggugugacugucgcu

SEQ ID NO: 1255371 - RNA, 19 nt, Artificial Sequence
  Description of Artificial Sequence: Synthetic oligonucleotide
cgaccuccauccuuccaga

SEQ ID NO: 1255372 - RNA, 19 nt, Artificial Sequence
  Description of Artificial Sequence: Synthetic oligonucleotide
ccgacaggacuguggucga

SEQ ID NO: 1255373 - RNA, 19 nt, Artificial Sequence
  Description of Artificial Sequence: Synthetic oligonucleotide
gaugugcgguaggcagcgu

SEQ ID NO: 1255374 - RNA, 19 nt, Artificial Sequence
  Description of Artificial Sequence: Synthetic oligonucleotide
cgacagagcaguguaugua

SEQ ID NO: 1255375 - RNA, 19 nt, Artificial Sequence
  Description of Artificial Sequence: Synthetic oligonucleotide
cccagcucgcaccccgaca

SEQ ID NO: 1255376 - RNA, 19 nt, Artificial Sequence
  Description of Artificial Sequence: Synthetic oligonucleotide
ggccgacgcacacgcaggu

SEQ ID NO: 1255377 - RNA, 19 nt, Artificial Sequence
  Description of Artificial Sequence: Synthetic oligonucleotide
cgagaacgacucccagcuc

SEQ ID NO: 1255378 - RNA, 19 nt, Artificial Sequence
  Description of Artificial Sequence: Synthetic oligonucleotide
gcugacucgcugaacccuu

SEQ ID NO: 1255379 - RNA, 19 nt, Artificial Sequence
  Description of Artificial Sequence: Synthetic oligonucleotide
gccgacgcacacgcaggua

SEQ ID NO: 1255380 - RNA, 19 nt, Artificial Sequence
  Description of Artificial Sequence: Synthetic oligonucleotide
cugccguccuggacccauu

SEQ ID NO: 1255381 - RNA, 19 nt, Artificial Sequence
  Description of Artificial Sequence: Synthetic oligonucleotide
ccgaaaugucgaccuccau

SEQ ID NO: 1255382 - RNA, 19 nt, Artificial Sequence
  Description of Artificial Sequence: Synthetic oligonucleotide
ccugccguccuggacccau

SEQ ID NO: 1255383 - RNA, 19 nt, Artificial Sequence
  Description of Artificial Sequence: Synthetic oligonucleotide
cccugccguccuggaccca

SEQ ID NO: 1255384 - RNA, 19 nt, Artificial Sequence
  Description of Artificial Sequence: Synthetic oligonucleotide
aauauaaacagggagaagc

SEQ ID NO: 1255385 - RNA, 19 nt, Artificial Sequence
  Description of Artificial Sequence: Synthetic oligonucleotide
aaauccauuguucaguugc

SEQ ID NO: 1255386 - RNA, 19 nt, Artificial Sequence
  Description of Artificial Sequence: Synthetic oligonucleotide
uauucuauaaauccuacgg

SEQ ID NO: 1255387 - RNA, 19 nt, Artificial Sequence
  Description of Artificial Sequence: Synthetic oligonucleotide
auuacuaacaggaagaacc

SEQ ID NO: 1255388 - RNA, 19 nt, Artificial Sequence
  Description of Artificial Sequence: Synthetic oligonucleotide
aauucaaacaauaagcuuc

SEQ ID NO: 1255389 - RNA, 19 nt, Artificial Sequence
  Description of Artificial Sequence: Synthetic oligonucleotide
aaagauuaauauuacuaac

SEQ ID NO: 1255390 - RNA, 19 nt, Artificial Sequence
  Description of Artificial Sequence: Synthetic oligonucleotide
uuauuuaaguauuacuacg

SEQ ID NO: 1255391 - RNA, 19 nt, Artificial Sequence
  Description of Artificial Sequence: Synthetic oligonucleotide
acagaauugccuuaaaugg

SEQ ID NO: 1255392 - RNA, 19 nt, Artificial Sequence
  Description of Artificial Sequence: Synthetic oligonucleotide
uaagcuauaauauggauac

SEQ ID NO: 1255393 - RNA, 19 nt, Artificial Sequence
  Description of Artificial Sequence: Synthetic oligonucleotide
aaauuuaguaaaccgauga

SEQ ID NO: 1255394 - RNA, 19 nt, Artificial Sequence
  Description of Artificial Sequence: Synthetic oligonucleotide
aaguagauaauacuaaacu

SEQ ID NO: 1255395 - RNA, 19 nt, Artificial Sequence
  Description of Artificial Sequence: Synthetic oligonucleotide
aauuucuugacuaauguag

SEQ ID NO: 1255396 - RNA, 19 nt, Artificial Sequence
  Description of Artificial Sequence: Synthetic oligonucleotide
uuuaugcuaacccugcugg

SEQ ID NO: 1255397 - RNA, 19 nt, Artificial Sequence
  Description of Artificial Sequence: Synthetic oligonucleotide
aguaugaccacucaucaac

SEQ ID NO: 1255398 - RNA, 19 nt, Artificial Sequence
  Description of Artificial Sequence: Synthetic oligonucleotide
caaacaauaagcuucuggg

SEQ ID NO: 1255399 - RNA, 19 nt, Artificial Sequence
  Description of Artificial Sequence: Synthetic oligonucleotide
uaauauuacuaacaggaag

SEQ ID NO: 1255400 - RNA, 19 nt, Artificial Sequence
  Description of Artificial Sequence: Synthetic oligonucleotide
aaaagauuaauauuacuaa

SEQ ID NO: 1255401 - RNA, 19 nt, Artificial Sequence
  Description of Artificial Sequence: Synthetic oligonucleotide
aguaguuacaacaauuucc

SEQ ID NO: 1255402 - RNA, 19 nt, Artificial Sequence
  Description of Artificial Sequence: Synthetic oligonucleotide
aauuuaguaaaccgaugac

SEQ ID NO: 1255403 - RNA, 19 nt, Artificial Sequence
  Description of Artificial Sequence: Synthetic oligonucleotide
uuuaguucaagacagaauu

SEQ ID NO: 1255404 - RNA, 19 nt, Artificial Sequence
  Description of Artificial Sequence: Synthetic oligonucleotide
ucaaacaauaagcuucugg

SEQ ID NO: 1255405 - RNA, 19 nt, Artificial Sequence
  Description of Artificial Sequence: Synthetic oligonucleotide
ugaauuacuguaaauaauc

SEQ ID NO: 1255406 - RNA, 19 nt, Artificial Sequence
  Description of Artificial Sequence: Synthetic oligonucleotide
uauuuaaguauuacuacgc

SEQ ID NO: 1255407 - RNA, 19 nt, Artificial Sequence
  Description of Artificial Sequence: Synthetic oligonucleotide
aguacacugaccuagaaga

SEQ ID NO: 1255408 - RNA, 19 nt, Artificial Sequence
  Description of Artificial Sequence: Synthetic oligonucleotide
auucuauaaauccuacggc

SEQ ID NO: 1255409 - RNA, 19 nt, Artificial Sequence
  Description of Artificial Sequence: Synthetic oligonucleotide
aauauuacuaacaggaaga

SEQ ID NO: 1255410 - RNA, 19 nt, Artificial Sequence
  Description of Artificial Sequence: Synthetic oligonucleotide
auuuaaguauuacuacgcc

SEQ ID NO: 1255411 - RNA, 19 nt, Artificial Sequence
  Description of Artificial Sequence: Synthetic oligonucleotide
agauuaauauuacuaacag

SEQ ID NO: 1255412 - RNA, 19 nt, Artificial Sequence
  Description of Artificial Sequence: Synthetic oligonucleotide
ugugccuuuaucaucauca

SEQ ID NO: 1255413 - RNA, 19 nt, Artificial Sequence
  Description of Artificial Sequence: Synthetic oligonucleotide
uacauaauuguuaauuaug

SEQ ID NO: 1255414 - RNA, 19 nt, Artificial Sequence
  Description of Artificial Sequence: Synthetic oligonucleotide
aaaaguaugaccacucauc

SEQ ID NO: 1255415 - RNA, 19 nt, Artificial Sequence
  Description of Artificial Sequence: Synthetic oligonucleotide
uuaaggacuauuuucuaag

SEQ ID NO: 1255416 - RNA, 19 nt, Artificial Sequence
  Description of Artificial Sequence: Synthetic oligonucleotide
acauaauuguuaauuaugc

SEQ ID NO: 1255417 - RNA, 19 nt, Artificial Sequence
  Description of Artificial Sequence: Synthetic oligonucleotide
uuuaauaauccacugucac

SEQ ID NO: 1255418 - RNA, 19 nt, Artificial Sequence
  Description of Artificial Sequence: Synthetic oligonucleotide
uuuccaaguacacugaccu

SEQ ID NO: 1255419 - RNA, 19 nt, Artificial Sequence
  Description of Artificial Sequence: Synthetic oligonucleotide
auaauuguuaauuaugcaa

SEQ ID NO: 1255420 - RNA, 19 nt, Artificial Sequence
  Description of Artificial Sequence: Synthetic oligonucleotide
uugaguacaacguaucugc

SEQ ID NO: 1255421 - RNA, 19 nt, Artificial Sequence
  Description of Artificial Sequence: Synthetic oligonucleotide
uuaaguauuacuacgccuc

SEQ ID NO: 1255422 - RNA, 19 nt, Artificial Sequence
  Description of Artificial Sequence: Synthetic oligonucleotide
uuuaguaaaccgaugacau

SEQ ID NO: 1255423 - RNA, 19 nt, Artificial Sequence
  Description of Artificial Sequence: Synthetic oligonucleotide
uuauauuucaucacaaauu

SEQ ID NO: 1255424 - RNA, 19 nt, Artificial Sequence
  Description of Artificial Sequence: Synthetic oligonucleotide
uuguuaauuaugcaaucag

SEQ ID NO: 1255425 - RNA, 19 nt, Artificial Sequence
  Description of Artificial Sequence: Synthetic oligonucleotide
aaaguaugaccacucauca

SEQ ID NO: 1255426 - RNA, 19 nt, Artificial Sequence
  Description of Artificial Sequence: Synthetic oligonucleotide
aaaggcaacacauagcaua

SEQ ID NO: 1255427 - RNA, 19 nt, Artificial Sequence
  Description of Artificial Sequence: Synthetic oligonucleotide
agugagauuauuuaaguau

SEQ ID NO: 1255428 - RNA, 19 nt, Artificial Sequence
  Description of Artificial Sequence: Synthetic oligonucleotide
aggacuauuuucuaaguag

SEQ ID NO: 1255429 - RNA, 19 nt, Artificial Sequence
  Description of Artificial Sequence: Synthetic oligonucleotide
aacuuaaaauguauuuccc

SEQ ID NO: 1255430 - RNA, 19 nt, Artificial Sequence
  Description of Artificial Sequence: Synthetic oligonucleotide
uuguauagucuauagcagg

SEQ ID NO: 1255431 - RNA, 19 nt, Artificial Sequence
  Description of Artificial Sequence: Synthetic oligonucleotide
gauugaugugucuaaaaug

SEQ ID NO: 1255432 - RNA, 19 nt, Artificial Sequence
  Description of Artificial Sequence: Synthetic oligonucleotide
aaaaguagauaauacuaaa

SEQ ID NO: 1255433 - RNA, 19 nt, Artificial Sequence
  Description of Artificial Sequence: Synthetic oligonucleotide
uucuauaaauccuacggca

SEQ ID NO: 1255434 - RNA, 19 nt, Artificial Sequence
  Description of Artificial Sequence: Synthetic oligonucleotide
uuaauuaugcaaucaguac

SEQ ID NO: 1255435 - RNA, 19 nt, Artificial Sequence
  Description of Artificial Sequence: Synthetic oligonucleotide
uauucagaagacaugcagc

SEQ ID NO: 1255436 - RNA, 19 nt, Artificial Sequence
  Description of Artificial Sequence: Synthetic oligonucleotide
uauaauauggauacaugau

SEQ ID NO: 1255437 - RNA, 19 nt, Artificial Sequence
  Description of Artificial Sequence: Synthetic oligonucleotide
uaagcaauuaauacaaaua

SEQ ID NO: 1255438 - RNA, 19 nt, Artificial Sequence
  Description of Artificial Sequence: Synthetic oligonucleotide
agcaaguccauuuaguuca

SEQ ID NO: 1255439 - RNA, 19 nt, Artificial Sequence
  Description of Artificial Sequence: Synthetic oligonucleotide
ugugaauuacuguaaauaa

SEQ ID NO: 1255440 - RNA, 19 nt, Artificial Sequence
  Description of Artificial Sequence: Synthetic oligonucleotide
aagauuaauauuacuaaca

SEQ ID NO: 1255441 - RNA, 19 nt, Artificial Sequence
  Description of Artificial Sequence: Synthetic oligonucleotide
ugugcauauaauucaaaca

SEQ ID NO: 1255442 - RNA, 19 nt, Artificial Sequence
  Description of Artificial Sequence: Synthetic oligonucleotide
auauguauuuaaugcugcc

SEQ ID NO: 1255443 - RNA, 19 nt, Artificial Sequence
  Description of Artificial Sequence: Synthetic oligonucleotide
aagugugugucuuguauag

SEQ ID NO: 1255444 - RNA, 19 nt, Artificial Sequence
  Description of Artificial Sequence: Synthetic oligonucleotide
auuacuacgccucauugca

SEQ ID NO: 1255445 - RNA, 19 nt, Artificial Sequence
  Description of Artificial Sequence: Synthetic oligonucleotide
uguuaauuaugcaaucagu

SEQ ID NO: 1255446 - RNA, 19 nt, Artificial Sequence
  Description of Artificial Sequence: Synthetic oligonucleotide
aacugaauucugaacuucc

SEQ ID NO: 1255447 - RNA, 19 nt, Artificial Sequence
  Description of Artificial Sequence: Synthetic oligonucleotide
uuauccuucgacaucaaau

SEQ ID NO: 1255448 - RNA, 19 nt, Artificial Sequence
  Description of Artificial Sequence: Synthetic oligonucleotide
ucuugacuaauguaguuug

SEQ ID NO: 1255449 - RNA, 19 nt, Artificial Sequence
  Description of Artificial Sequence: Synthetic oligonucleotide
agauuauuuaaguauuacu

SEQ ID NO: 1255450 - RNA, 19 nt, Artificial Sequence
  Description of Artificial Sequence: Synthetic oligonucleotide
uuuaaguauuacuacgccu

SEQ ID NO: 1255451 - RNA, 19 nt, Artificial Sequence
  Description of Artificial Sequence: Synthetic oligonucleotide
aaguacacugaccuagaag

SEQ ID NO: 1255452 - RNA, 19 nt, Artificial Sequence
  Description of Artificial Sequence: Synthetic oligonucleotide
aauuauauuucaucacaaa

SEQ ID NO: 1255453 - RNA, 19 nt, Artificial Sequence
  Description of Artificial Sequence: Synthetic oligonucleotide
aauauggauacaugauuga

SEQ ID NO: 1255454 - RNA, 19 nt, Artificial Sequence
  Description of Artificial Sequence: Synthetic oligonucleotide
accaaacuauauuaaggac

SEQ ID NO: 1255455 - RNA, 19 nt, Artificial Sequence
  Description of Artificial Sequence: Synthetic oligonucleotide
uauacauaauugguuaugc

SEQ ID NO: 1255456 - RNA, 19 nt, Artificial Sequence
  Description of Artificial Sequence: Synthetic oligonucleotide
auugaugugucuaaaauga

SEQ ID NO: 1255457 - RNA, 19 nt, Artificial Sequence
  Description of Artificial Sequence: Synthetic oligonucleotide
auauucuauaaauccuacg

SEQ ID NO: 1255458 - RNA, 19 nt, Artificial Sequence
  Description of Artificial Sequence: Synthetic oligonucleotide
aguacaacguaucugcugu

SEQ ID NO: 1255459 - RNA, 19 nt, Artificial Sequence
  Description of Artificial Sequence: Synthetic oligonucleotide
acaauaagcuucugggagg

SEQ ID NO: 1255460 - RNA, 19 nt, Artificial Sequence
  Description of Artificial Sequence: Synthetic oligonucleotide
aaaauaggcaugugaaaau

SEQ ID NO: 1255461 - RNA, 19 nt, Artificial Sequence
  Description of Artificial Sequence: Synthetic oligonucleotide
ucuuuuaugcuaacccugc

SEQ ID NO: 1255462 - RNA, 19 nt, Artificial Sequence
  Description of Artificial Sequence: Synthetic oligonucleotide
uuuuaugcuaacccugcug

SEQ ID NO: 1255463 - RNA, 19 nt, Artificial Sequence
  Description of Artificial Sequence: Synthetic oligonucleotide
aaaugguucauacuuccau

SEQ ID NO: 1255464 - RNA, 19 nt, Artificial Sequence
  Description of Artificial Sequence: Synthetic oligonucleotide
ucuauaaauccuacggcac

SEQ ID NO: 1255465 - RNA, 19 nt, Artificial Sequence
  Description of Artificial Sequence: Synthetic oligonucleotide
cuauaauauggauacauga

SEQ ID NO: 1255466 - RNA, 19 nt, Artificial Sequence
  Description of Artificial Sequence: Synthetic oligonucleotide
uuaauaauccacugucaca

SEQ ID NO: 1255467 - RNA, 19 nt, Artificial Sequence
  Description of Artificial Sequence: Synthetic oligonucleotide
uauagucuauagcaggaca

SEQ ID NO: 1255468 - RNA, 19 nt, Artificial Sequence
  Description of Artificial Sequence: Synthetic oligonucleotide
guaguuacaacaauuuccc

SEQ ID NO: 1255469 - RNA, 19 nt, Artificial Sequence
  Description of Artificial Sequence: Synthetic oligonucleotide
cauauguauuuaaugcugc

SEQ ID NO: 1255470 - RNA, 19 nt, Artificial Sequence
  Description of Artificial Sequence: Synthetic oligonucleotide
ugcuauucagaagacaugc

SEQ ID NO: 1255471 - RNA, 19 nt, Artificial Sequence
  Description of Artificial Sequence: Synthetic oligonucleotide
aaaccuauacuaaacaaau

SEQ ID NO: 1255472 - RNA, 19 nt, Artificial Sequence
  Description of Artificial Sequence: Synthetic oligonucleotide
uccauauguauuuaaugcu

SEQ ID NO: 1255473 - RNA, 19 nt, Artificial Sequence
  Description of Artificial Sequence: Synthetic oligonucleotide
acaaagguaggcaggagcc

SEQ ID NO: 1255474 - RNA, 19 nt, Artificial Sequence
  Description of Artificial Sequence: Synthetic oligonucleotide
ucuuauaugugcauauaau

SEQ ID NO: 1255475 - RNA, 19 nt, Artificial Sequence
  Description of Artificial Sequence: Synthetic oligonucleotide
agaacuaagggaaacaaga

SEQ ID NO: 1255476 - RNA, 19 nt, Artificial Sequence
  Description of Artificial Sequence: Synthetic oligonucleotide
cuuguauagucuauagcag

SEQ ID NO: 1255477 - RNA, 19 nt, Artificial Sequence
  Description of Artificial Sequence: Synthetic oligonucleotide
uuaugcaaucaguacacug

SEQ ID NO: 1255478 - RNA, 19 nt, Artificial Sequence
  Description of Artificial Sequence: Synthetic oligonucleotide
auacuaaacaaauaagcua

SEQ ID NO: 1255479 - RNA, 19 nt, Artificial Sequence
  Description of Artificial Sequence: Synthetic oligonucleotide
ugauugaugugucuaaaau

SEQ ID NO: 1255480 - RNA, 19 nt, Artificial Sequence
  Description of Artificial Sequence: Synthetic oligonucleotide
aauccuacggcacacugau

SEQ ID NO: 1255481 - RNA, 19 nt, Artificial Sequence
  Description of Artificial Sequence: Synthetic oligonucleotide
uucgacaugauucccuuca

SEQ ID NO: 1255482 - RNA, 19 nt, Artificial Sequence
  Description of Artificial Sequence: Synthetic oligonucleotide
gaagaaccaaacuauauua

SEQ ID NO: 1255483 - RNA, 19 nt, Artificial Sequence
  Description of Artificial Sequence: Synthetic oligonucleotide
uugacuaauguaguuuggg

SEQ ID NO: 1255484 - RNA, 19 nt, Artificial Sequence
  Description of Artificial Sequence: Synthetic oligonucleotide
auaauauggauacaugauu

SEQ ID NO: 1255485 - RNA, 19 nt, Artificial Sequence
  Description of Artificial Sequence: Synthetic oligonucleotide
uguauuuaaugcugccuag

SEQ ID NO: 1255486 - RNA, 19 nt, Artificial Sequence
  Description of Artificial Sequence: Synthetic oligonucleotide
uauuacuacgccucauugc

SEQ ID NO: 1255487 - RNA, 19 nt, Artificial Sequence
  Description of Artificial Sequence: Synthetic oligonucleotide
aaaaccuauacuaaacaaa

SEQ ID NO: 1255488 - RNA, 19 nt, Artificial Sequence
  Description of Artificial Sequence: Synthetic oligonucleotide
cacucuauguagcagagug

SEQ ID NO: 1255489 - RNA, 19 nt, Artificial Sequence
  Description of Artificial Sequence: Synthetic oligonucleotide
uaguaaaccgaugacauaa

SEQ ID NO: 1255490 - RNA, 19 nt, Artificial Sequence
  Description of Artificial Sequence: Synthetic oligonucleotide
aaggcaacacauagcauac

SEQ ID NO: 1255491 - RNA, 19 nt, Artificial Sequence
  Description of Artificial Sequence: Synthetic oligonucleotide
auuacuguaaauaaucuua

SEQ ID NO: 1255492 - RNA, 19 nt, Artificial Sequence
  Description of Artificial Sequence: Synthetic oligonucleotide
aaaccaugagugccacacc

SEQ ID NO: 1255493 - RNA, 19 nt, Artificial Sequence
  Description of Artificial Sequence: Synthetic oligonucleotide
uucuaaguaguuacaacaa

SEQ ID NO: 1255494 - RNA, 19 nt, Artificial Sequence
  Description of Artificial Sequence: Synthetic oligonucleotide
gaaaauaggcaugugaaaa

SEQ ID NO: 1255495 - RNA, 19 nt, Artificial Sequence
  Description of Artificial Sequence: Synthetic oligonucleotide
auuuaguaaaccgaugaca

SEQ ID NO: 1255496 - RNA, 19 nt, Artificial Sequence
  Description of Artificial Sequence: Synthetic oligonucleotide
aaccaugagugccacacca

SEQ ID NO: 1255497 - RNA, 19 nt, Artificial Sequence
  Description of Artificial Sequence: Synthetic oligonucleotide
gcaaucaguacacuguucg

SEQ ID NO: 1255498 - RNA, 19 nt, Artificial Sequence
  Description of Artificial Sequence: Synthetic oligonucleotide
aaauaucugccggugauga

SEQ ID NO: 1255499 - RNA, 19 nt, Artificial Sequence
  Description of Artificial Sequence: Synthetic oligonucleotide
ugcaguacagacuuccugu

SEQ ID NO: 1255500 - RNA, 19 nt, Artificial Sequence
  Description of Artificial Sequence: Synthetic oligonucleotide
uaggcaugugaaaauauuc

SEQ ID NO: 1255501 - RNA, 19 nt, Artificial Sequence
  Description of Artificial Sequence: Synthetic oligonucleotide
acaccagugaauauacagc

SEQ ID NO: 1255502 - RNA, 19 nt, Artificial Sequence
  Description of Artificial Sequence: Synthetic oligonucleotide
auagucuauagcaggacac

SEQ ID NO: 1255503 - RNA, 19 nt, Artificial Sequence
  Description of Artificial Sequence: Synthetic oligonucleotide
uuugaguacaacguaucug

SEQ ID NO: 1255504 - RNA, 19 nt, Artificial Sequence
  Description of Artificial Sequence: Synthetic oligonucleotide
gugaauauacagcucauga

SEQ ID NO: 1255505 - RNA, 19 nt, Artificial Sequence
  Description of Artificial Sequence: Synthetic oligonucleotide
agagugagauuauuuaagu

SEQ ID NO: 1255506 - RNA, 19 nt, Artificial Sequence
  Description of Artificial Sequence: Synthetic oligonucleotide
ucaaauaucugccggugau

SEQ ID NO: 1255507 - RNA, 19 nt, Artificial Sequence
  Description of Artificial Sequence: Synthetic oligonucleotide
uucaguugcugucauuuga

SEQ ID NO: 1255508 - RNA, 19 nt, Artificial Sequence
  Description of Artificial Sequence: Synthetic oligonucleotide
uucgacaucaaauuauauu

SEQ ID NO: 1255509 - RNA, 19 nt, Artificial Sequence
  Description of Artificial Sequence: Synthetic oligonucleotide
ugcucuguaagcaauuaau

SEQ ID NO: 1255510 - RNA, 19 nt, Artificial Sequence
  Description of Artificial Sequence: Synthetic oligonucleotide
acaaucagguuauccuucg

SEQ ID NO: 1255511 - RNA, 19 nt, Artificial Sequence
  Description of Artificial Sequence: Synthetic oligonucleotide
aguucaagacagaauugcc

SEQ ID NO: 1255512 - RNA, 19 nt, Artificial Sequence
  Description of Artificial Sequence: Synthetic oligonucleotide
aacauauacauaauugguu

SEQ ID NO: 1255513 - RNA, 19 nt, Artificial Sequence
  Description of Artificial Sequence: Synthetic oligonucleotide
uuuucuuuucuuuucuuuu

SEQ ID NO: 1255514 - RNA, 19 nt, Artificial Sequence
  Description of Artificial Sequence: Synthetic oligonucleotide
agcuugguaaauaaauuuc

SEQ ID NO: 1255515 - RNA, 19 nt, Artificial Sequence
  Description of Artificial Sequence: Synthetic oligonucleotide
aucaccagguauuuaauaa

SEQ ID NO: 1255516 - RNA, 19 nt, Artificial Sequence
  Description of Artificial Sequence: Synthetic oligonucleotide
auaaauuucuugacuaaug

SEQ ID NO: 1255517 - RNA, 19 nt, Artificial Sequence
  Description of Artificial Sequence: Synthetic oligonucleotide
auuaaggacuauuuucuaa

SEQ ID NO: 1255518 - RNA, 19 nt, Artificial Sequence
  Description of Artificial Sequence: Synthetic oligonucleotide
uaaacagggagaagccacc

SEQ ID NO: 1255519 - RNA, 19 nt, Artificial Sequence
  Description of Artificial Sequence: Synthetic oligonucleotide
uggggagagaacuaaggga

SEQ ID NO: 1255520 - RNA, 19 nt, Artificial Sequence
  Description of Artificial Sequence: Synthetic oligonucleotide
gguaaauaaauuucuugac

SEQ ID NO: 1255521 - RNA, 19 nt, Artificial Sequence
  Description of Artificial Sequence: Synthetic oligonucleotide
uucuaauauugguacaauc

SEQ ID NO: 1255522 - RNA, 19 nt, Artificial Sequence
  Description of Artificial Sequence: Synthetic oligonucleotide
uuuuaagagugcugggaga

SEQ ID NO: 1255523 - RNA, 19 nt, Artificial Sequence
  Description of Artificial Sequence: Synthetic oligonucleotide
uauguauuuaaugcugccu

SEQ ID NO: 1255524 - RNA, 19 nt, Artificial Sequence
  Description of Artificial Sequence: Synthetic oligonucleotide
gaaccugugaauuacugua

SEQ ID NO: 1255525 - RNA, 19 nt, Artificial Sequence
  Description of Artificial Sequence: Synthetic oligonucleotide
auuugaguacaacguaucu

SEQ ID NO: 1255526 - RNA, 19 nt, Artificial Sequence
  Description of Artificial Sequence: Synthetic oligonucleotide
ugcauauaauucaaacaau

SEQ ID NO: 1255527 - RNA, 19 nt, Artificial Sequence
  Description of Artificial Sequence: Synthetic oligonucleotide
cucuauguagcagagugag

SEQ ID NO: 1255528 - RNA, 19 nt, Artificial Sequence
  Description of Artificial Sequence: Synthetic oligonucleotide
ugccuuaaaugguucauac

SEQ ID NO: 1255529 - RNA, 19 nt, Artificial Sequence
  Description of Artificial Sequence: Synthetic oligonucleotide
auuguuaauuaugcaauca

SEQ ID NO: 1255530 - RNA, 19 nt, Artificial Sequence
  Description of Artificial Sequence: Synthetic oligonucleotide
aaaauccauuguucaguug

SEQ ID NO: 1255531 - RNA, 19 nt, Artificial Sequence
  Description of Artificial Sequence: Synthetic oligonucleotide
aaguaugagguaugcucug

SEQ ID NO: 1255532 - RNA, 19 nt, Artificial Sequence
  Description of Artificial Sequence: Synthetic oligonucleotide
caaauuuaguaaaccgaug

SEQ ID NO: 1255533 - RNA, 19 nt, Artificial Sequence
  Description of Artificial Sequence: Synthetic oligonucleotide
uuuaagagugcugggagaa

SEQ ID NO: 1255534 - RNA, 19 nt, Artificial Sequence
  Description of Artificial Sequence: Synthetic oligonucleotide
cuugacuaauguaguuugg

SEQ ID NO: 1255535 - RNA, 19 nt, Artificial Sequence
  Description of Artificial Sequence: Synthetic oligonucleotide
auguauuuaaugcugccua

SEQ ID NO: 1255536 - RNA, 19 nt, Artificial Sequence
  Description of Artificial Sequence: Synthetic oligonucleotide
gagauuauuuaaguauuac

SEQ ID NO: 1255537 - RNA, 19 nt, Artificial Sequence
  Description of Artificial Sequence: Synthetic oligonucleotide
agaccuuuuaaacacuuuu

SEQ ID NO: 1255538 - RNA, 19 nt, Artificial Sequence
  Description of Artificial Sequence: Synthetic oligonucleotide
aaggacuauuuucuaagua

SEQ ID NO: 1255539 - RNA, 19 nt, Artificial Sequence
  Description of Artificial Sequence: Synthetic oligonucleotide
uccuguaguguaaugucac

SEQ ID NO: 1255540 - RNA, 19 nt, Artificial Sequence
  Description of Artificial Sequence: Synthetic oligonucleotide
ugaccuagaagacacucua

SEQ ID NO: 1255541 - RNA, 19 nt, Artificial Sequence
  Description of Artificial Sequence: Synthetic oligonucleotide
uuccuguaguguaauguca

SEQ ID NO: 1255542 - RNA, 19 nt, Artificial Sequence
  Description of Artificial Sequence: Synthetic oligonucleotide
caaacuauauuaaggacua

SEQ ID NO: 1255543 - RNA, 19 nt, Artificial Sequence
  Description of Artificial Sequence: Synthetic oligonucleotide
auauacagcucaugaauaa

SEQ ID NO: 1255544 - RNA, 19 nt, Artificial Sequence
  Description of Artificial Sequence: Synthetic oligonucleotide
uuaugcuaacccugcuggg

SEQ ID NO: 1255545 - RNA, 19 nt, Artificial Sequence
  Description of Artificial Sequence: Synthetic oligonucleotide
guuaauuaugcaaucagua

SEQ ID NO: 1255546 - RNA, 19 nt, Artificial Sequence
  Description of Artificial Sequence: Synthetic oligonucleotide
agacacucuauguagcaga

SEQ ID NO: 1255547 - RNA, 19 nt, Artificial Sequence
  Description of Artificial Sequence: Synthetic oligonucleotide
ucccauuuuaaaaggcaac

SEQ ID NO: 1255548 - RNA, 19 nt, Artificial Sequence
  Description of Artificial Sequence: Synthetic oligonucleotide
uauaaauccuacggcacac

SEQ ID NO: 1255549 - RNA, 19 nt, Artificial Sequence
  Description of Artificial Sequence: Synthetic oligonucleotide
cugauccuaguuuugcuac

SEQ ID NO: 1255550 - RNA, 19 nt, Artificial Sequence
  Description of Artificial Sequence: Synthetic oligonucleotide
ucagguuauccuucgacau

SEQ ID NO: 1255551 - RNA, 19 nt, Artificial Sequence
  Description of Artificial Sequence: Synthetic oligonucleotide
ucuauagcaggacacucuu

SEQ ID NO: 1255552 - RNA, 19 nt, Artificial Sequence
  Description of Artificial Sequence: Synthetic oligonucleotide
gaguacaacguaucugcug

SEQ ID NO: 1255553 - RNA, 19 nt, Artificial Sequence
  Description of Artificial Sequence: Synthetic oligonucleotide
auaagcuucugggagggag

SEQ ID NO: 1255554 - RNA, 19 nt, Artificial Sequence
  Description of Artificial Sequence: Synthetic oligonucleotide
ugccuuuaucaucaucacc

SEQ ID NO: 1255555 - RNA, 19 nt, Artificial Sequence
  Description of Artificial Sequence: Synthetic oligonucleotide
agguauuuaauaauccacu

SEQ ID NO: 1255556 - RNA, 19 nt, Artificial Sequence
  Description of Artificial Sequence: Synthetic oligonucleotide
gcaaguaugagguaugcuc

SEQ ID NO: 1255557 - RNA, 19 nt, Artificial Sequence
  Description of Artificial Sequence: Synthetic oligonucleotide
cauuugaguacaacguauc

SEQ ID NO: 1255558 - RNA, 19 nt, Artificial Sequence
  Description of Artificial Sequence: Synthetic oligonucleotide
agcuauaauauggauacau

SEQ ID NO: 1255559 - RNA, 19 nt, Artificial Sequence
  Description of Artificial Sequence: Synthetic oligonucleotide
aaauaggcaugugaaaaua

SEQ ID NO: 1255560 - RNA, 19 nt, Artificial Sequence
  Description of Artificial Sequence: Synthetic oligonucleotide
aagacacucuauguagcag

SEQ ID NO: 1255561 - RNA, 19 nt, Artificial Sequence
  Description of Artificial Sequence: Synthetic oligonucleotide
cuuccuguaguguaauguc

SEQ ID NO: 1255562 - RNA, 19 nt, Artificial Sequence
  Description of Artificial Sequence: Synthetic oligonucleotide
auaauccacugucacaaaa

SEQ ID NO: 1255563 - RNA, 19 nt, Artificial Sequence
  Description of Artificial Sequence: Synthetic oligonucleotide
aguacacuguucgacauga

SEQ ID NO: 1255564 - RNA, 19 nt, Artificial Sequence
  Description of Artificial Sequence: Synthetic oligonucleotide
acaacguaucugcuguaag

SEQ ID NO: 1255565 - RNA, 19 nt, Artificial Sequence
  Description of Artificial Sequence: Synthetic oligonucleotide
gucuuguauagucuauagc

SEQ ID NO: 1255566 - RNA, 19 nt, Artificial Sequence
  Description of Artificial Sequence: Synthetic oligonucleotide
augagugccacaccaguga

SEQ ID NO: 1255567 - RNA, 19 nt, Artificial Sequence
  Description of Artificial Sequence: Synthetic oligonucleotide
uucaugagaacaucaugua

SEQ ID NO: 1255568 - RNA, 19 nt, Artificial Sequence
  Description of Artificial Sequence: Synthetic oligonucleotide
uaauguaguuuggggagag

SEQ ID NO: 1255569 - RNA, 19 nt, Artificial Sequence
  Description of Artificial Sequence: Synthetic oligonucleotide
auaagcuauaauauggaua

SEQ ID NO: 1255570 - RNA, 19 nt, Artificial Sequence
  Description of Artificial Sequence: Synthetic oligonucleotide
uauacagcucaugaauaac

SEQ ID NO: 1255571 - RNA, 19 nt, Artificial Sequence
  Description of Artificial Sequence: Synthetic oligonucleotide
aaugcugccuagaauuaga

SEQ ID NO: 1255572 - RNA, 19 nt, Artificial Sequence
  Description of Artificial Sequence: Synthetic oligonucleotide
caccagguauuuaauaauc

SEQ ID NO: 1255573 - RNA, 19 nt, Artificial Sequence
  Description of Artificial Sequence: Synthetic oligonucleotide
caauaagcuucugggaggg

SEQ ID NO: 1255574 - RNA, 19 nt, Artificial Sequence
  Description of Artificial Sequence: Synthetic oligonucleotide
ucaccagguauuuaauaau

SEQ ID NO: 1255575 - RNA, 19 nt, Artificial Sequence
  Description of Artificial Sequence: Synthetic oligonucleotide
aagaaccaaacuauauuaa

SEQ ID NO: 1255576 - RNA, 19 nt, Artificial Sequence
  Description of Artificial Sequence: Synthetic oligonucleotide
aauaggcaugugaaaauau

SEQ ID NO: 1255577 - RNA, 19 nt, Artificial Sequence
  Description of Artificial Sequence: Synthetic oligonucleotide
aacguaucugcuguaaguu

SEQ ID NO: 1255578 - RNA, 19 nt, Artificial Sequence
  Description of Artificial Sequence: Synthetic oligonucleotide
auuuaauaauccacuguca

SEQ ID NO: 1255579 - RNA, 19 nt, Artificial Sequence
  Description of Artificial Sequence: Synthetic oligonucleotide
aucaacaccaccggaaccu

SEQ ID NO: 1255580 - RNA, 19 nt, Artificial Sequence
  Description of Artificial Sequence: Synthetic oligonucleotide
uauuacuaacaggaagaac

SEQ ID NO: 1255581 - RNA, 19 nt, Artificial Sequence
  Description of Artificial Sequence: Synthetic oligonucleotide
uauuaaggacuauuuucua

SEQ ID NO: 1255582 - RNA, 19 nt, Artificial Sequence
  Description of Artificial Sequence: Synthetic oligonucleotide
uacggcacacugauccuag

SEQ ID NO: 1255583 - RNA, 19 nt, Artificial Sequence
  Description of Artificial Sequence: Synthetic oligonucleotide
uaugcuaacccugcuggga

SEQ ID NO: 1255584 - RNA, 19 nt, Artificial Sequence
  Description of Artificial Sequence: Synthetic oligonucleotide
ugguacaaucagguuaucc

SEQ ID NO: 1255585 - RNA, 19 nt, Artificial Sequence
  Description of Artificial Sequence: Synthetic oligonucleotide
uugacagcaaguccauuua

SEQ ID NO: 1255586 - RNA, 19 nt, Artificial Sequence
  Description of Artificial Sequence: Synthetic oligonucleotide
aguauuacuacgccucauu

SEQ ID NO: 1255587 - RNA, 19 nt, Artificial Sequence
  Description of Artificial Sequence: Synthetic oligonucleotide
aguugcugucauuugagua

SEQ ID NO: 1255588 - RNA, 19 nt, Artificial Sequence
  Description of Artificial Sequence: Synthetic oligonucleotide
auucaaacaauaagcuucu

SEQ ID NO: 1255589 - RNA, 19 nt, Artificial Sequence
  Description of Artificial Sequence: Synthetic oligonucleotide
caccacuaaccauagcuug

SEQ ID NO: 1255590 - RNA, 19 nt, Artificial Sequence
  Description of Artificial Sequence: Synthetic oligonucleotide
acuguucgacaugauuccc

SEQ ID NO: 1255591 - RNA, 19 nt, Artificial Sequence
  Description of Artificial Sequence: Synthetic oligonucleotide
accggaaccugugaauuac

SEQ ID NO: 1255592 - RNA, 19 nt, Artificial Sequence
  Description of Artificial Sequence: Synthetic oligonucleotide
agguuauccuucgacauca

SEQ ID NO: 1255593 - RNA, 19 nt, Artificial Sequence
  Description of Artificial Sequence: Synthetic oligonucleotide
cauagcuugguaaauaaau

SEQ ID NO: 1255594 - RNA, 19 nt, Artificial Sequence
  Description of Artificial Sequence: Synthetic oligonucleotide
aaguaugaccacucaucaa

SEQ ID NO: 1255595 - RNA, 19 nt, Artificial Sequence
  Description of Artificial Sequence: Synthetic oligonucleotide
aauugguuaugcauacaaa

SEQ ID NO: 1255596 - RNA, 19 nt, Artificial Sequence
  Description of Artificial Sequence: Synthetic oligonucleotide
gucacugcaaguaugaggu

SEQ ID NO: 1255597 - RNA, 19 nt, Artificial Sequence
  Description of Artificial Sequence: Synthetic oligonucleotide
uuggcugcacuuaaauuuu

SEQ ID NO: 1255598 - RNA, 19 nt, Artificial Sequence
  Description of Artificial Sequence: Synthetic oligonucleotide
augcaguacagacuuccug

SEQ ID NO: 1255599 - RNA, 19 nt, Artificial Sequence
  Description of Artificial Sequence: Synthetic oligonucleotide
uaucugccggugaugaaaa

SEQ ID NO: 1255600 - RNA, 19 nt, Artificial Sequence
  Description of Artificial Sequence: Synthetic oligonucleotide
uaugcaguacagacuuccu

SEQ ID NO: 1255601 - RNA, 19 nt, Artificial Sequence
  Description of Artificial Sequence: Synthetic oligonucleotide
augauugaugugucuaaaa

SEQ ID NO: 1255602 - RNA, 19 nt, Artificial Sequence
  Description of Artificial Sequence: Synthetic oligonucleotide
auaaucuuauaugugcaua

SEQ ID NO: 1255603 - RNA, 19 nt, Artificial Sequence
  Description of Artificial Sequence: Synthetic oligonucleotide
gacacucuauguagcagag

SEQ ID NO: 1255604 - RNA, 19 nt, Artificial Sequence
  Description of Artificial Sequence: Synthetic oligonucleotide
cuauaaauccuacggcaca

SEQ ID NO: 1255605 - RNA, 19 nt, Artificial Sequence
  Description of Artificial Sequence: Synthetic oligonucleotide
uucuugacuaauguaguuu

SEQ ID NO: 1255606 - RNA, 19 nt, Artificial Sequence
  Description of Artificial Sequence: Synthetic oligonucleotide
ugccggugaugaaaauagg

SEQ ID NO: 1255607 - RNA, 19 nt, Artificial Sequence
  Description of Artificial Sequence: Synthetic oligonucleotide
augauucccuucaugcuuc

SEQ ID NO: 1255608 - RNA, 19 nt, Artificial Sequence
  Description of Artificial Sequence: Synthetic oligonucleotide
cuguaguguaaugucacug

SEQ ID NO: 1255609 - RNA, 19 nt, Artificial Sequence
  Description of Artificial Sequence: Synthetic oligonucleotide
uacgccucauugcauuucu

SEQ ID NO: 1255610 - RNA, 19 nt, Artificial Sequence
  Description of Artificial Sequence: Synthetic oligonucleotide
uaagagugcugggagaaau

SEQ ID NO: 1255611 - RNA, 19 nt, Artificial Sequence
  Description of Artificial Sequence: Synthetic oligonucleotide
guaguguaaugucacugca

SEQ ID NO: 1255612 - RNA, 19 nt, Artificial Sequence
  Description of Artificial Sequence: Synthetic oligonucleotide
cuagaagacacucuaugua

SEQ ID NO: 1255613 - RNA, 19 nt, Artificial Sequence
  Description of Artificial Sequence: Synthetic oligonucleotide
uugaugugucuaaaaugau

SEQ ID NO: 1255614 - RNA, 19 nt, Artificial Sequence
  Description of Artificial Sequence: Synthetic oligonucleotide
aaauccuacggcacacuga

SEQ ID NO: 1255615 - RNA, 19 nt, Artificial Sequence
  Description of Artificial Sequence: Synthetic oligonucleotide
cagcaaguccauuuaguuc

SEQ ID NO: 1255616 - RNA, 19 nt, Artificial Sequence
  Description of Artificial Sequence: Synthetic oligonucleotide
aggcaugugaaaauauucu

SEQ ID NO: 1255617 - RNA, 19 nt, Artificial Sequence
  Description of Artificial Sequence: Synthetic oligonucleotide
ugauccuaguuuugcuaca

SEQ ID NO: 1255618 - RNA, 19 nt, Artificial Sequence
  Description of Artificial Sequence: Synthetic oligonucleotide
uuaguaaaccgaugacaua

SEQ ID NO: 1255619 - RNA, 19 nt, Artificial Sequence
  Description of Artificial Sequence: Synthetic oligonucleotide
auauggauacaugauugau

SEQ ID NO: 1255620 - RNA, 19 nt, Artificial Sequence
  Description of Artificial Sequence: Synthetic oligonucleotide
auacaugauugaugugucu

SEQ ID NO: 1255621 - RNA, 19 nt, Artificial Sequence
  Description of Artificial Sequence: Synthetic oligonucleotide
guuuccaaguacacugacc

SEQ ID NO: 1255622 - RNA, 19 nt, Artificial Sequence
  Description of Artificial Sequence: Synthetic oligonucleotide
gagugagauuauuuaagua

SEQ ID NO: 1255623 - RNA, 19 nt, Artificial Sequence
  Description of Artificial Sequence: Synthetic oligonucleotide
aacaccaccggaaccugug

SEQ ID NO: 1255624 - RNA, 19 nt, Artificial Sequence
  Description of Artificial Sequence: Synthetic oligonucleotide
uaguuacaacaauuuccca

SEQ ID NO: 1255625 - RNA, 19 nt, Artificial Sequence
  Description of Artificial Sequence: Synthetic oligonucleotide
ucaagacagaauugccuua

SEQ ID NO: 1255626 - RNA, 19 nt, Artificial Sequence
  Description of Artificial Sequence: Synthetic oligonucleotide
gagguaugcucuguaagca

SEQ ID NO: 1255627 - RNA, 19 nt, Artificial Sequence
  Description of Artificial Sequence: Synthetic oligonucleotide
aauaucugccggugaugaa

SEQ ID NO: 1255628 - RNA, 19 nt, Artificial Sequence
  Description of Artificial Sequence: Synthetic oligonucleotide
uacuguuuccaaguacacu

SEQ ID NO: 1255629 - RNA, 19 nt, Artificial Sequence
  Description of Artificial Sequence: Synthetic oligonucleotide
uguucgacaugauucccuu

SEQ ID NO: 1255630 - RNA, 19 nt, Artificial Sequence
  Description of Artificial Sequence: Synthetic oligonucleotide
uagucuauagcaggacacu

SEQ ID NO: 1255631 - RNA, 19 nt, Artificial Sequence
  Description of Artificial Sequence: Synthetic oligonucleotide
cugugaauuacuguaaaua

SEQ ID NO: 1255632 - RNA, 19 nt, Artificial Sequence
  Description of Artificial Sequence: Synthetic oligonucleotide
gaacuaagggaaacaagaa

SEQ ID NO: 1255633 - RNA, 19 nt, Artificial Sequence
  Description of Artificial Sequence: Synthetic oligonucleotide
auagcuugguaaauaaauu

SEQ ID NO: 1255634 - RNA, 19 nt, Artificial Sequence
  Description of Artificial Sequence: Synthetic oligonucleotide
caaguaugagguaugcucu

SEQ ID NO: 1255635 - RNA, 19 nt, Artificial Sequence
  Description of Artificial Sequence: Synthetic oligonucleotide
uugcugucauuugaguaca

SEQ ID NO: 1255636 - RNA, 19 nt, Artificial Sequence
  Description of Artificial Sequence: Synthetic oligonucleotide
auaugugcauauaauucaa

SEQ ID NO: 1255637 - RNA, 19 nt, Artificial Sequence
  Description of Artificial Sequence: Synthetic oligonucleotide
aacagaccuuuuaaacacu

SEQ ID NO: 1255638 - RNA, 19 nt, Artificial Sequence
  Description of Artificial Sequence: Synthetic oligonucleotide
gcuauaauauggauacaug

SEQ ID NO: 1255639 - RNA, 19 nt, Artificial Sequence
  Description of Artificial Sequence: Synthetic oligonucleotide
ugccuagaauuagauaaaa

SEQ ID NO: 1255640 - RNA, 19 nt, Artificial Sequence
  Description of Artificial Sequence: Synthetic oligonucleotide
caguacagacuuccuguag

SEQ ID NO: 1255641 - RNA, 19 nt, Artificial Sequence
  Description of Artificial Sequence: Synthetic oligonucleotide
auauugguacaaucagguu

SEQ ID NO: 1255642 - RNA, 19 nt, Artificial Sequence
  Description of Artificial Sequence: Synthetic oligonucleotide
guaaaccgaugacauaaaa

SEQ ID NO: 1255643 - RNA, 19 nt, Artificial Sequence
  Description of Artificial Sequence: Synthetic oligonucleotide
uggauacaugauugaugug

SEQ ID NO: 1255644 - RNA, 19 nt, Artificial Sequence
  Description of Artificial Sequence: Synthetic oligonucleotide
cuauguagcagagugagau

SEQ ID NO: 1255645 - RNA, 19 nt, Artificial Sequence
  Description of Artificial Sequence: Synthetic oligonucleotide
uacaacguaucugcuguaa

SEQ ID NO: 1255646 - RNA, 19 nt, Artificial Sequence
  Description of Artificial Sequence: Synthetic oligonucleotide
caccagugaauauacagcu

SEQ ID NO: 1255647 - RNA, 19 nt, Artificial Sequence
  Description of Artificial Sequence: Synthetic oligonucleotide
ccagugaauauacagcuca

SEQ ID NO: 1255648 - RNA, 19 nt, Artificial Sequence
  Description of Artificial Sequence: Synthetic oligonucleotide
guauagucuauagcaggac

SEQ ID NO: 1255649 - RNA, 19 nt, Artificial Sequence
  Description of Artificial Sequence: Synthetic oligonucleotide
aggaagaaccaaacuauau

SEQ ID NO: 1255650 - RNA, 19 nt, Artificial Sequence
  Description of Artificial Sequence: Synthetic oligonucleotide
uaugcucuguaagcaauua

SEQ ID NO: 1255651 - RNA, 19 nt, Artificial Sequence
  Description of Artificial Sequence: Synthetic oligonucleotide
augcuaacccugcugggaa

SEQ ID NO: 1255652 - RNA, 19 nt, Artificial Sequence
  Description of Artificial Sequence: Synthetic oligonucleotide
aauguaguuuggggagaga

SEQ ID NO: 1255653 - RNA, 19 nt, Artificial Sequence
  Description of Artificial Sequence: Synthetic oligonucleotide
agguaugcucuguaagcaa

SEQ ID NO: 1255654 - RNA, 19 nt, Artificial Sequence
  Description of Artificial Sequence: Synthetic oligonucleotide
gaaggggcagguguucaug

SEQ ID NO: 1255655 - RNA, 19 nt, Artificial Sequence
  Description of Artificial Sequence: Synthetic oligonucleotide
aguaugagguaugcucugu

SEQ ID NO: 1255656 - RNA, 19 nt, Artificial Sequence
  Description of Artificial Sequence: Synthetic oligonucleotide
uuacuacgccucauugcau

SEQ ID NO: 1255657 - RNA, 19 nt, Artificial Sequence
  Description of Artificial Sequence: Synthetic oligonucleotide
auuaugcaaucaguacacu

SEQ ID NO: 1255658 - RNA, 19 nt, Artificial Sequence
  Description of Artificial Sequence: Synthetic oligonucleotide
cagguuauccuucgacauc

SEQ ID NO: 1255659 - RNA, 19 nt, Artificial Sequence
  Description of Artificial Sequence: Synthetic oligonucleotide
ggcaacacauagcauacaa

SEQ ID NO: 1255660 - RNA, 19 nt, Artificial Sequence
  Description of Artificial Sequence: Synthetic oligonucleotide
cagaauugccuuaaauggu

SEQ ID NO: 1255661 - RNA, 19 nt, Artificial Sequence
  Description of Artificial Sequence: Synthetic oligonucleotide
acguaucugcuguaaguuu

SEQ ID NO: 1255662 - RNA, 19 nt, Artificial Sequence
  Description of Artificial Sequence: Synthetic oligonucleotide
aagcuauaauauggauaca

SEQ ID NO: 1255663 - RNA, 19 nt, Artificial Sequence
  Description of Artificial Sequence: Synthetic oligonucleotide
cucauugcauuucucugaa

SEQ ID NO: 1255664 - RNA, 19 nt, Artificial Sequence
  Description of Artificial Sequence: Synthetic oligonucleotide
guaugaccacucaucaaca

SEQ ID NO: 1255665 - RNA, 19 nt, Artificial Sequence
  Description of Artificial Sequence: Synthetic oligonucleotide
auaaauccuacggcacacu

SEQ ID NO: 1255666 - RNA, 19 nt, Artificial Sequence
  Description of Artificial Sequence: Synthetic oligonucleotide
ugcugccuagaauuagaua

SEQ ID NO: 1255667 - RNA, 19 nt, Artificial Sequence
  Description of Artificial Sequence: Synthetic oligonucleotide
aaacuauauuaaggacuau

SEQ ID NO: 1255668 - RNA, 19 nt, Artificial Sequence
  Description of Artificial Sequence: Synthetic oligonucleotide
gccggugaugaaaauaggc

SEQ ID NO: 1255669 - RNA, 19 nt, Artificial Sequence
  Description of Artificial Sequence: Synthetic oligonucleotide
uucaaacaauaagcuucug

SEQ ID NO: 1255670 - RNA, 19 nt, Artificial Sequence
  Description of Artificial Sequence: Synthetic oligonucleotide
caaucaguacacuguucga

SEQ ID NO: 1255671 - RNA, 19 nt, Artificial Sequence
  Description of Artificial Sequence: Synthetic oligonucleotide
augugucuaaaaugauaua

SEQ ID NO: 1255672 - RNA, 19 nt, Artificial Sequence
  Description of Artificial Sequence: Synthetic oligonucleotide
ggcaugugaaaauauucua

SEQ ID NO: 1255673 - RNA, 19 nt, Artificial Sequence
  Description of Artificial Sequence: Synthetic oligonucleotide
caacguaucugcuguaagu

SEQ ID NO: 1255674 - RNA, 19 nt, Artificial Sequence
  Description of Artificial Sequence: Synthetic oligonucleotide
guuauccuucgacaucaaa

SEQ ID NO: 1255675 - RNA, 19 nt, Artificial Sequence
  Description of Artificial Sequence: Synthetic oligonucleotide
ccggugaugaaaauaggca

SEQ ID NO: 1255676 - RNA, 19 nt, Artificial Sequence
  Description of Artificial Sequence: Synthetic oligonucleotide
ggaagaaccaaacuauauu

SEQ ID NO: 1255677 - RNA, 19 nt, Artificial Sequence
  Description of Artificial Sequence: Synthetic oligonucleotide
cuaauguaguuuggggaga

SEQ ID NO: 1255678 - RNA, 19 nt, Artificial Sequence
  Description of Artificial Sequence: Synthetic oligonucleotide
aauaagcuucugggaggga

SEQ ID NO: 1255679 - RNA, 19 nt, Artificial Sequence
  Description of Artificial Sequence: Synthetic oligonucleotide
acucuauguagcagaguga

SEQ ID NO: 1255680 - RNA, 19 nt, Artificial Sequence
  Description of Artificial Sequence: Synthetic oligonucleotide
uucugggagggagaauaaa

SEQ ID NO: 1255681 - RNA, 19 nt, Artificial Sequence
  Description of Artificial Sequence: Synthetic oligonucleotide
ccuuaaaugguucauacuu

SEQ ID NO: 1255682 - RNA, 19 nt, Artificial Sequence
  Description of Artificial Sequence: Synthetic oligonucleotide
gugaauuacuguaaauaau

SEQ ID NO: 1255683 - RNA, 19 nt, Artificial Sequence
  Description of Artificial Sequence: Synthetic oligonucleotide
uuccaaguacacugaccua

SEQ ID NO: 1255684 - RNA, 19 nt, Artificial Sequence
  Description of Artificial Sequence: Synthetic oligonucleotide
cugccuagaauuagauaaa

SEQ ID NO: 1255685 - RNA, 19 nt, Artificial Sequence
  Description of Artificial Sequence: Synthetic oligonucleotide
acuacgccucauugcauuu

SEQ ID NO: 1255686 - RNA, 19 nt, Artificial Sequence
  Description of Artificial Sequence: Synthetic oligonucleotide
gugagauuauuuaaguauu

SEQ ID NO: 1255687 - RNA, 19 nt, Artificial Sequence
  Description of Artificial Sequence: Synthetic oligonucleotide
caagacagaauugccuuaa

SEQ ID NO: 1255688 - RNA, 19 nt, Artificial Sequence
  Description of Artificial Sequence: Synthetic oligonucleotide
ccauuguucaguugcuguc

SEQ ID NO: 1255689 - RNA, 19 nt, Artificial Sequence
  Description of Artificial Sequence: Synthetic oligonucleotide
gguaggcaggagccuaugc

SEQ ID NO: 1255690 - RNA, 19 nt, Artificial Sequence
  Description of Artificial Sequence: Synthetic oligonucleotide
ugcuaacccugcugggaaa

SEQ ID NO: 1255691 - RNA, 19 nt, Artificial Sequence
  Description of Artificial Sequence: Synthetic oligonucleotide
caugauucccuucaugcuu

SEQ ID NO: 1255692 - RNA, 19 nt, Artificial Sequence
  Description of Artificial Sequence: Synthetic oligonucleotide
aguaaaccgaugacauaaa

SEQ ID NO: 1255693 - RNA, 19 nt, Artificial Sequence
  Description of Artificial Sequence: Synthetic oligonucleotide
guaugagguaugcucugua

SEQ ID NO: 1255694 - RNA, 19 nt, Artificial Sequence
  Description of Artificial Sequence: Synthetic oligonucleotide
agccuaugcaguacagacu

SEQ ID NO: 1255695 - RNA, 19 nt, Artificial Sequence
  Description of Artificial Sequence: Synthetic oligonucleotide
agcucaugaauaacuuaaa

SEQ ID NO: 1255696 - RNA, 19 nt, Artificial Sequence
  Description of Artificial Sequence: Synthetic oligonucleotide
cugggagggagaauaaaau

SEQ ID NO: 1255697 - RNA, 19 nt, Artificial Sequence
  Description of Artificial Sequence: Synthetic oligonucleotide
acaccaccggaaccuguga

SEQ ID NO: 1255698 - RNA, 19 nt, Artificial Sequence
  Description of Artificial Sequence: Synthetic oligonucleotide
acaagaaggggcagguguu

SEQ ID NO: 1255699 - RNA, 19 nt, Artificial Sequence
  Description of Artificial Sequence: Synthetic oligonucleotide
ugcugucauuugaguacaa

SEQ ID NO: 1255700 - RNA, 19 nt, Artificial Sequence
  Description of Artificial Sequence: Synthetic oligonucleotide
aagguaggcaggagccuau

SEQ ID NO: 1255701 - RNA, 19 nt, Artificial Sequence
  Description of Artificial Sequence: Synthetic oligonucleotide
guucgacaugauucccuuc

SEQ ID NO: 1255702 - RNA, 19 nt, Artificial Sequence
  Description of Artificial Sequence: Synthetic oligonucleotide
uaugugccuuuaucaucau

SEQ ID NO: 1255703 - RNA, 19 nt, Artificial Sequence
  Description of Artificial Sequence: Synthetic oligonucleotide
cugaccuagaagacacucu

SEQ ID NO: 1255704 - RNA, 19 nt, Artificial Sequence
  Description of Artificial Sequence: Synthetic oligonucleotide
aggagccuaugcaguacag

SEQ ID NO: 1255705 - RNA, 19 nt, Artificial Sequence
  Description of Artificial Sequence: Synthetic oligonucleotide
gcuacagaugauucuuuua

SEQ ID NO: 1255706 - RNA, 19 nt, Artificial Sequence
  Description of Artificial Sequence: Synthetic oligonucleotide
gucuauagcaggacacucu

SEQ ID NO: 1255707 - RNA, 19 nt, Artificial Sequence
  Description of Artificial Sequence: Synthetic oligonucleotide
cuguucgacaugauucccu

SEQ ID NO: 1255708 - RNA, 19 nt, Artificial Sequence
  Description of Artificial Sequence: Synthetic oligonucleotide
gccuaugcaguacagacuu

SEQ ID NO: 1255709 - RNA, 19 nt, Artificial Sequence
  Description of Artificial Sequence: Synthetic oligonucleotide
cuacgccucauugcauuuc

SEQ ID NO: 1255710 - RNA, 19 nt, Artificial Sequence
  Description of Artificial Sequence: Synthetic oligonucleotide
gcugucauuugaguacaac

SEQ ID NO: 1255711 - RNA, 19 nt, Artificial Sequence
  Description of Artificial Sequence: Synthetic oligonucleotide
acacucuauguagcagagu

SEQ ID NO: 1255712 - RNA, 19 nt, Artificial Sequence
  Description of Artificial Sequence: Synthetic oligonucleotide
ggggcagguguucaugaga

SEQ ID NO: 1255713 - RNA, 19 nt, Artificial Sequence
  Description of Artificial Sequence: Synthetic oligonucleotide
augcugccuagaauuagau

SEQ ID NO: 1255714 - RNA, 19 nt, Artificial Sequence
  Description of Artificial Sequence: Synthetic oligonucleotide
cuuuuaugcuaacccugcu

SEQ ID NO: 1255715 - RNA, 19 nt, Artificial Sequence
  Description of Artificial Sequence: Synthetic oligonucleotide
gcucuguaagcaauuaaua

SEQ ID NO: 1255716 - RNA, 19 nt, Artificial Sequence
  Description of Artificial Sequence: Synthetic oligonucleotide
ccaucaagugugugucuug

SEQ ID NO: 1255717 - RNA, 19 nt, Artificial Sequence
  Description of Artificial Sequence: Synthetic oligonucleotide
gggaaacaagaaggggcag

SEQ ID NO: 1255718 - RNA, 19 nt, Artificial Sequence
  Description of Artificial Sequence: Synthetic oligonucleotide
gcaugugaaaauauucuau

SEQ ID NO: 1255719 - RNA, 19 nt, Artificial Sequence
  Description of Artificial Sequence: Synthetic oligonucleotide
gcuauucagaagacaugca

SEQ ID NO: 1255720 - RNA, 19 nt, Artificial Sequence
  Description of Artificial Sequence: Synthetic oligonucleotide
acggcacacugauccuagu

SEQ ID NO: 1255721 - RNA, 19 nt, Artificial Sequence
  Description of Artificial Sequence: Synthetic oligonucleotide
aggcaacacauagcauaca

SEQ ID NO: 1255722 - RNA, 19 nt, Artificial Sequence
  Description of Artificial Sequence: Synthetic oligonucleotide
caucaagugugugucuugu

SEQ ID NO: 1255723 - RNA, 19 nt, Artificial Sequence
  Description of Artificial Sequence: Synthetic oligonucleotide
aucugccggugaugaaaau

SEQ ID NO: 1255724 - RNA, 19 nt, Artificial Sequence
  Description of Artificial Sequence: Synthetic oligonucleotide
guacaacguaucugcugua

SEQ ID NO: 1255725 - RNA, 19 nt, Artificial Sequence
  Description of Artificial Sequence: Synthetic oligonucleotide
ggagccuaugcaguacaga

SEQ ID NO: 1255726 - RNA, 19 nt, Artificial Sequence
  Description of Artificial Sequence: Synthetic oligonucleotide
acgccucauugcauuucuc

SEQ ID NO: 1255727 - RNA, 19 nt, Artificial Sequence
  Description of Artificial Sequence: Synthetic oligonucleotide
gcaacacauagcauacaaa

SEQ ID NO: 1255728 - RNA, 19 nt, Artificial Sequence
  Description of Artificial Sequence: Synthetic oligonucleotide
uugguacaaucagguuauc

SEQ ID NO: 1255729 - RNA, 19 nt, Artificial Sequence
  Description of Artificial Sequence: Synthetic oligonucleotide
gcaguacagacuuccugua

SEQ ID NO: 1255730 - RNA, 19 nt, Artificial Sequence
  Description of Artificial Sequence: Synthetic oligonucleotide
caccaccggaaccugugaa

SEQ ID NO: 1255731 - RNA, 19 nt, Artificial Sequence
  Description of Artificial Sequence: Synthetic oligonucleotide
gccuuaaaugguucauacu

SEQ ID NO: 1255732 - RNA, 19 nt, Artificial Sequence
  Description of Artificial Sequence: Synthetic oligonucleotide
gguaugcucuguaagcaau

SEQ ID NO: 1255733 - RNA, 19 nt, Artificial Sequence
  Description of Artificial Sequence: Synthetic oligonucleotide
cgacaugauucccuucaug

SEQ ID NO: 1255734 - RNA, 19 nt, Artificial Sequence
  Description of Artificial Sequence: Synthetic oligonucleotide
caccggaaccugugaauua

SEQ ID NO: 1255735 - RNA, 19 nt, Artificial Sequence
  Description of Artificial Sequence: Synthetic oligonucleotide
gaccuagaagacacucuau

SEQ ID NO: 1255736 - RNA, 19 nt, Artificial Sequence
  Description of Artificial Sequence: Synthetic oligonucleotide
cuacggcacacugauccua

SEQ ID NO: 1255737 - RNA, 19 nt, Artificial Sequence
  Description of Artificial Sequence: Synthetic oligonucleotide
cacuaaccauagcuuggua

SEQ ID NO: 1255738 - RNA, 19 nt, Artificial Sequence
  Description of Artificial Sequence: Synthetic oligonucleotide
guaugcucuguaagcaauu

SEQ ID NO: 1255739 - RNA, 19 nt, Artificial Sequence
  Description of Artificial Sequence: Synthetic oligonucleotide
cagaccuuuuaaacacuuu

SEQ ID NO: 1255740 - RNA, 19 nt, Artificial Sequence
  Description of Artificial Sequence: Synthetic oligonucleotide
gcuaacccugcugggaaaa

SEQ ID NO: 1255741 - RNA, 19 nt, Artificial Sequence
  Description of Artificial Sequence: Synthetic oligonucleotide
cuauagcaggacacucuuu

SEQ ID NO: 1255742 - RNA, 19 nt, Artificial Sequence
  Description of Artificial Sequence: Synthetic oligonucleotide
acccugcugggaaaauauu

SEQ ID NO: 1255743 - RNA, 19 nt, Artificial Sequence
  Description of Artificial Sequence: Synthetic oligonucleotide
caucaucaccagguauuua

SEQ ID NO: 1255744 - RNA, 19 nt, Artificial Sequence
  Description of Artificial Sequence: Synthetic oligonucleotide
ccuguaguguaaugucacu

SEQ ID NO: 1255745 - RNA, 19 nt, Artificial Sequence
  Description of Artificial Sequence: Synthetic oligonucleotide
ccacaccagugaauauaca

SEQ ID NO: 1255746 - RNA, 19 nt, Artificial Sequence
  Description of Artificial Sequence: Synthetic oligonucleotide
gguuauccuucgacaucaa

SEQ ID NO: 1255747 - RNA, 19 nt, Artificial Sequence
  Description of Artificial Sequence: Synthetic oligonucleotide
cuaacccugcugggaaaau

SEQ ID NO: 1255748 - RNA, 19 nt, Artificial Sequence
  Description of Artificial Sequence: Synthetic oligonucleotide
ccacuaaccauagcuuggu

SEQ ID NO: 1255749 - RNA, 19 nt, Artificial Sequence
  Description of Artificial Sequence: Synthetic oligonucleotide
ccggaaccugugaauuacu

SEQ ID NO: 1255750 - RNA, 19 nt, Artificial Sequence
  Description of Artificial Sequence: Synthetic oligonucleotide
cggcacacugauccuaguu

SEQ ID NO: 1255751 - RNA, 19 nt, Artificial Sequence
  Description of Artificial Sequence: Synthetic oligonucleotide
aaucagaugaguuagacug

SEQ ID NO: 1255752 - RNA, 19 nt, Artificial Sequence
  Description of Artificial Sequence: Synthetic oligonucleotide
ugcauauuaaaucagauga

SEQ ID NO: 1255753 - RNA, 19 nt, Artificial Sequence
  Description of Artificial Sequence: Synthetic oligonucleotide
aauaguauggcacagaaua

SEQ ID NO: 1255754 - RNA, 19 nt, Artificial Sequence
  Description of Artificial Sequence: Synthetic oligonucleotide
uuagguuaaauaaaccagg

SEQ ID NO: 1255755 - RNA, 19 nt, Artificial Sequence
  Description of Artificial Sequence: Synthetic oligonucleotide
uauuaauuagguuaaauaa

SEQ ID NO: 1255756 - RNA, 19 nt, Artificial Sequence
  Description of Artificial Sequence: Synthetic oligonucleotide
uguaguaaggucaugggag

SEQ ID NO: 1255757 - RNA, 19 nt, Artificial Sequence
  Description of Artificial Sequence: Synthetic oligonucleotide
aacauuguauguuggcucc

SEQ ID NO: 1255758 - RNA, 19 nt, Artificial Sequence
  Description of Artificial Sequence: Synthetic oligonucleotide
uuaauuagguuaaauaaac

SEQ ID NO: 1255759 - RNA, 19 nt, Artificial Sequence
  Description of Artificial Sequence: Synthetic oligonucleotide
uuagagauuguacaacugg

SEQ ID NO: 1255760 - RNA, 19 nt, Artificial Sequence
  Description of Artificial Sequence: Synthetic oligonucleotide
ugagcuacugcaaugacag

SEQ ID NO: 1255761 - RNA, 19 nt, Artificial Sequence
  Description of Artificial Sequence: Synthetic oligonucleotide
auuucuacuggcgugaugc

SEQ ID NO: 1255762 - RNA, 19 nt, Artificial Sequence
  Description of Artificial Sequence: Synthetic oligonucleotide
uuuacucaagaauagagcu

SEQ ID NO: 1255763 - RNA, 19 nt, Artificial Sequence
  Description of Artificial Sequence: Synthetic oligonucleotide
aaaccguugguaaagaaac

SEQ ID NO: 1255764 - RNA, 19 nt, Artificial Sequence
  Description of Artificial Sequence: Synthetic oligonucleotide
gauguaacaaagugcaggg

SEQ ID NO: 1255765 - RNA, 19 nt, Artificial Sequence
  Description of Artificial Sequence: Synthetic oligonucleotide
uguacauuauccacaaugc

SEQ ID NO: 1255766 - RNA, 19 nt, Artificial Sequence
  Description of Artificial Sequence: Synthetic oligonucleotide
uauagacuaucucugauca

SEQ ID NO: 1255767 - RNA, 19 nt, Artificial Sequence
  Description of Artificial Sequence: Synthetic oligonucleotide
aauuagagauuguacaacu

SEQ ID NO: 1255768 - RNA, 19 nt, Artificial Sequence
  Description of Artificial Sequence: Synthetic oligonucleotide
auuaaaucagaugaguuag

SEQ ID NO: 1255769 - RNA, 19 nt, Artificial Sequence
  Description of Artificial Sequence: Synthetic oligonucleotide
augcaaaucauuauugugc

SEQ ID NO: 1255770 - RNA, 19 nt, Artificial Sequence
  Description of Artificial Sequence: Synthetic oligonucleotide
caagauaucaugcaaauca

SEQ ID NO: 1255771 - RNA, 19 nt, Artificial Sequence
  Description of Artificial Sequence: Synthetic oligonucleotide
gaugaguuagacuguaucc

SEQ ID NO: 1255772 - RNA, 19 nt, Artificial Sequence
  Description of Artificial Sequence: Synthetic oligonucleotide
auaaagguugguuacaaga

SEQ ID NO: 1255773 - RNA, 19 nt, Artificial Sequence
  Description of Artificial Sequence: Synthetic oligonucleotide
agauuguacaacuggcacc

SEQ ID NO: 1255774 - RNA, 19 nt, Artificial Sequence
  Description of Artificial Sequence: Synthetic oligonucleotide
uuaguaaucaguaucccau

SEQ ID NO: 1255775 - RNA, 19 nt, Artificial Sequence
  Description of Artificial Sequence: Synthetic oligonucleotide
aaccaugcgcuacaaaagg

SEQ ID NO: 1255776 - RNA, 19 nt, Artificial Sequence
  Description of Artificial Sequence: Synthetic oligonucleotide
cugccuagcagcuagaacc

SEQ ID NO: 1255777 - RNA, 19 nt, Artificial Sequence
  Description of Artificial Sequence: Synthetic oligonucleotide
uauugugcugcaauuauga

SEQ ID NO: 1255778 - RNA, 19 nt, Artificial Sequence
  Description of Artificial Sequence: Synthetic oligonucleotide
uaugguuacuguaguaagg

SEQ ID NO: 1255779 - RNA, 19 nt, Artificial Sequence
  Description of Artificial Sequence: Synthetic oligonucleotide
gguuaaauaaaccaggcac

SEQ ID NO: 1255780 - RNA, 19 nt, Artificial Sequence
  Description of Artificial Sequence: Synthetic oligonucleotide
aauaaacuggacacacucc

SEQ ID NO: 1255781 - RNA, 19 nt, Artificial Sequence
  Description of Artificial Sequence: Synthetic oligonucleotide
aagaagugccauucgaaag

SEQ ID NO: 1255782 - RNA, 19 nt, Artificial Sequence
  Description of Artificial Sequence: Synthetic oligonucleotide
aaagaaaccuucccggucu

SEQ ID NO: 1255783 - RNA, 19 nt, Artificial Sequence
  Description of Artificial Sequence: Synthetic oligonucleotide
aauauccauaauggcagcc

SEQ ID NO: 1255784 - RNA, 19 nt, Artificial Sequence
  Description of Artificial Sequence: Synthetic oligonucleotide
acuagaaugucccuaaaga

SEQ ID NO: 1255785 - RNA, 19 nt, Artificial Sequence
  Description of Artificial Sequence: Synthetic oligonucleotide
uauuuugccauugaguaug

SEQ ID NO: 1255786 - RNA, 19 nt, Artificial Sequence
  Description of Artificial Sequence: Synthetic oligonucleotide
uucgaaagaaaauccaucu

SEQ ID NO: 1255787 - RNA, 19 nt, Artificial Sequence
  Description of Artificial Sequence: Synthetic oligonucleotide
uugaucaaauuagagauug

SEQ ID NO: 1255788 - RNA, 19 nt, Artificial Sequence
  Description of Artificial Sequence: Synthetic oligonucleotide
aauacuagaaugucccuaa

SEQ ID NO: 1255789 - RNA, 19 nt, Artificial Sequence
  Description of Artificial Sequence: Synthetic oligonucleotide
aacuuauuuuaguaaucag

SEQ ID NO: 1255790 - RNA, 19 nt, Artificial Sequence
  Description of Artificial Sequence: Synthetic oligonucleotide
ucaucugucuguaaacaag

SEQ ID NO: 1255791 - RNA, 19 nt, Artificial Sequence
  Description of Artificial Sequence: Synthetic oligonucleotide
ugcuaagacaaagugaugc

SEQ ID NO: 1255792 - RNA, 19 nt, Artificial Sequence
  Description of Artificial Sequence: Synthetic oligonucleotide
auuagguuaaauaaaccag

SEQ ID NO: 1255793 - RNA, 19 nt, Artificial Sequence
  Description of Artificial Sequence: Synthetic oligonucleotide
gcugaaaagacauugauca

SEQ ID NO: 1255794 - RNA, 19 nt, Artificial Sequence
  Description of Artificial Sequence: Synthetic oligonucleotide
aaaggagguauuaauuagg

SEQ ID NO: 1255795 - RNA, 19 nt, Artificial Sequence
  Description of Artificial Sequence: Synthetic oligonucleotide
uccacaauaaugcaacuuc

SEQ ID NO: 1255796 - RNA, 19 nt, Artificial Sequence
  Description of Artificial Sequence: Synthetic oligonucleotide
uaaagguugguuacaagac

SEQ ID NO: 1255797 - RNA, 19 nt, Artificial Sequence
  Description of Artificial Sequence: Synthetic oligonucleotide
ucuuauucaauccgccucc

SEQ ID NO: 1255798 - RNA, 19 nt, Artificial Sequence
  Description of Artificial Sequence: Synthetic oligonucleotide
agaugaguuagacuguauc

SEQ ID NO: 1255799 - RNA, 19 nt, Artificial Sequence
  Description of Artificial Sequence: Synthetic oligonucleotide
ucaccaucaacguauagac

SEQ ID NO: 1255800 - RNA, 19 nt, Artificial Sequence
  Description of Artificial Sequence: Synthetic oligonucleotide
ucaguaucccauuaauugc

SEQ ID NO: 1255801 - RNA, 19 nt, Artificial Sequence
  Description of Artificial Sequence: Synthetic oligonucleotide
ucaagugcaaucauaguau

SEQ ID NO: 1255802 - RNA, 19 nt, Artificial Sequence
  Description of Artificial Sequence: Synthetic oligonucleotide
gguaaagaaaccuucccgg

SEQ ID NO: 1255803 - RNA, 19 nt, Artificial Sequence
  Description of Artificial Sequence: Synthetic oligonucleotide
agacacuacaaauagucug

SEQ ID NO: 1255804 - RNA, 19 nt, Artificial Sequence
  Description of Artificial Sequence: Synthetic oligonucleotide
uuuaguaaucaguauccca

SEQ ID NO: 1255805 - RNA, 19 nt, Artificial Sequence
  Description of Artificial Sequence: Synthetic oligonucleotide
gacuaaaugagccaaguaa

SEQ ID NO: 1255806 - RNA, 19 nt, Artificial Sequence
  Description of Artificial Sequence: Synthetic oligonucleotide
uaauacuuaacagucugcc

SEQ ID NO: 1255807 - RNA, 19 nt, Artificial Sequence
  Description of Artificial Sequence: Synthetic oligonucleotide
acuauaaccaaugcucuac

SEQ ID NO: 1255808 - RNA, 19 nt, Artificial Sequence
  Description of Artificial Sequence: Synthetic oligonucleotide
auaaccaaugcucuaccag

SEQ ID NO: 1255809 - RNA, 19 nt, Artificial Sequence
  Description of Artificial Sequence: Synthetic oligonucleotide
auuugguuggaauaaauuu

SEQ ID NO: 1255810 - RNA, 19 nt, Artificial Sequence
  Description of Artificial Sequence: Synthetic oligonucleotide
uacuguaguaaggucaugg

SEQ ID NO: 1255811 - RNA, 19 nt, Artificial Sequence
  Description of Artificial Sequence: Synthetic oligonucleotide
aaagguugguuacaagacu

SEQ ID NO: 1255812 - RNA, 19 nt, Artificial Sequence
  Description of Artificial Sequence: Synthetic oligonucleotide
uacaaucauaucuauuucu

SEQ ID NO: 1255813 - RNA, 19 nt, Artificial Sequence
  Description of Artificial Sequence: Synthetic oligonucleotide
auaccucauguucaaaggg

SEQ ID NO: 1255814 - RNA, 19 nt, Artificial Sequence
  Description of Artificial Sequence: Synthetic oligonucleotide
aauacuuaacagucugccu

SEQ ID NO: 1255815 - RNA, 19 nt, Artificial Sequence
  Description of Artificial Sequence: Synthetic oligonucleotide
cuuauuuuaguaaucagua

SEQ ID NO: 1255816 - RNA, 19 nt, Artificial Sequence
  Description of Artificial Sequence: Synthetic oligonucleotide
agcucaucaacaaaggagg

SEQ ID NO: 1255817 - RNA, 19 nt, Artificial Sequence
  Description of Artificial Sequence: Synthetic oligonucleotide
uuuccccuaauacuuaaca

SEQ ID NO: 1255818 - RNA, 19 nt, Artificial Sequence
  Description of Artificial Sequence: Synthetic oligonucleotide
ugagccaaguaaaugcuca

SEQ ID NO: 1255819 - RNA, 19 nt, Artificial Sequence
  Description of Artificial Sequence: Synthetic oligonucleotide
ucucacaauagcaacaguu

SEQ ID NO: 1255820 - RNA, 19 nt, Artificial Sequence
  Description of Artificial Sequence: Synthetic oligonucleotide
auucaauccgccuccgugg

SEQ ID NO: 1255821 - RNA, 19 nt, Artificial Sequence
  Description of Artificial Sequence: Synthetic oligonucleotide
uacuagaaugucccuaaag

SEQ ID NO: 1255822 - RNA, 19 nt, Artificial Sequence
  Description of Artificial Sequence: Synthetic oligonucleotide
caaaggagguauuaauuag

SEQ ID NO: 1255823 - RNA, 19 nt, Artificial Sequence
  Description of Artificial Sequence: Synthetic oligonucleotide
aaaauugguccuaugaaaa

SEQ ID NO: 1255824 - RNA, 19 nt, Artificial Sequence
  Description of Artificial Sequence: Synthetic oligonucleotide
acaagacuuaagcuuacag

SEQ ID NO: 1255825 - RNA, 19 nt, Artificial Sequence
  Description of Artificial Sequence: Synthetic oligonucleotide
cacuacacaaaagagaaug

SEQ ID NO: 1255826 - RNA, 19 nt, Artificial Sequence
  Description of Artificial Sequence: Synthetic oligonucleotide
accaucaacguauagacua

SEQ ID NO: 1255827 - RNA, 19 nt, Artificial Sequence
  Description of Artificial Sequence: Synthetic oligonucleotide
agguuauccacguagcucu

SEQ ID NO: 1255828 - RNA, 19 nt, Artificial Sequence
  Description of Artificial Sequence: Synthetic oligonucleotide
uuacucaagaauagagcug

SEQ ID NO: 1255829 - RNA, 19 nt, Artificial Sequence
  Description of Artificial Sequence: Synthetic oligonucleotide
aacguauagacuaucucug

SEQ ID NO: 1255830 - RNA, 19 nt, Artificial Sequence
  Description of Artificial Sequence: Synthetic oligonucleotide
uauccuacagacacuacaa

SEQ ID NO: 1255831 - RNA, 19 nt, Artificial Sequence
  Description of Artificial Sequence: Synthetic oligonucleotide
auauccuacagacacuaca

SEQ ID NO: 1255832 - RNA, 19 nt, Artificial Sequence
  Description of Artificial Sequence: Synthetic oligonucleotide
ucuacuggcgugaugcucu

SEQ ID NO: 1255833 - RNA, 19 nt, Artificial Sequence
  Description of Artificial Sequence: Synthetic oligonucleotide
uccccuaauacuuaacagu

SEQ ID NO: 1255834 - RNA, 19 nt, Artificial Sequence
  Description of Artificial Sequence: Synthetic oligonucleotide
acuucuuugcaccaagagu

SEQ ID NO: 1255835 - RNA, 19 nt, Artificial Sequence
  Description of Artificial Sequence: Synthetic oligonucleotide
caucagguuauccacguag

SEQ ID NO: 1255836 - RNA, 19 nt, Artificial Sequence
  Description of Artificial Sequence: Synthetic oligonucleotide
auacuuaacagucugccua

SEQ ID NO: 1255837 - RNA, 19 nt, Artificial Sequence
  Description of Artificial Sequence: Synthetic oligonucleotide
uugguuggaauaaauuuau

SEQ ID NO: 1255838 - RNA, 19 nt, Artificial Sequence
  Description of Artificial Sequence: Synthetic oligonucleotide
uaaucaguaucccauuaau

SEQ ID NO: 1255839 - RNA, 19 nt, Artificial Sequence
  Description of Artificial Sequence: Synthetic oligonucleotide
uuccccuaauacuuaacag

SEQ ID NO: 1255840 - RNA, 19 nt, Artificial Sequence
  Description of Artificial Sequence: Synthetic oligonucleotide
guaugguuacuguaguaag

SEQ ID NO: 1255841 - RNA, 19 nt, Artificial Sequence
  Description of Artificial Sequence: Synthetic oligonucleotide
ucucugaucacugaacacu

SEQ ID NO: 1255842 - RNA, 19 nt, Artificial Sequence
  Description of Artificial Sequence: Synthetic oligonucleotide
uauuugguuggaauaaauu

SEQ ID NO: 1255843 - RNA, 19 nt, Artificial Sequence
  Description of Artificial Sequence: Synthetic oligonucleotide
uacuuaacagucugccuag

SEQ ID NO: 1255844 - RNA, 19 nt, Artificial Sequence
  Description of Artificial Sequence: Synthetic oligonucleotide
aaauugguccuaugaaaau

SEQ ID NO: 1255845 - RNA, 19 nt, Artificial Sequence
  Description of Artificial Sequence: Synthetic oligonucleotide
auuauugugcugcaauuau

SEQ ID NO: 1255846 - RNA, 19 nt, Artificial Sequence
  Description of Artificial Sequence: Synthetic oligonucleotide
uacagcuaggaaaauuuaa

SEQ ID NO: 1255847 - RNA, 19 nt, Artificial Sequence
  Description of Artificial Sequence: Synthetic oligonucleotide
acaauggcggccuccuggc

SEQ ID NO: 1255848 - RNA, 19 nt, Artificial Sequence
  Description of Artificial Sequence: Synthetic oligonucleotide
uuuguccggauauccauug

SEQ ID NO: 1255849 - RNA, 19 nt, Artificial Sequence
  Description of Artificial Sequence: Synthetic oligonucleotide
uaaaaccuaagcugcaaau

SEQ ID NO: 1255850 - RNA, 19 nt, Artificial Sequence
  Description of Artificial Sequence: Synthetic oligonucleotide
uuauccacguagcucugcc

SEQ ID NO: 1255851 - RNA, 19 nt, Artificial Sequence
  Description of Artificial Sequence: Synthetic oligonucleotide
ucuauuucuacuggcguga

SEQ ID NO: 1255852 - RNA, 19 nt, Artificial Sequence
  Description of Artificial Sequence: Synthetic oligonucleotide
aucuauuucuacuggcgug

SEQ ID NO: 1255853 - RNA, 19 nt, Artificial Sequence
  Description of Artificial Sequence: Synthetic oligonucleotide
uguccggauauccauugug

SEQ ID NO: 1255854 - RNA, 19 nt, Artificial Sequence
  Description of Artificial Sequence: Synthetic oligonucleotide
uaaagaaaccuucccgguc

SEQ ID NO: 1255855 - RNA, 19 nt, Artificial Sequence
  Description of Artificial Sequence: Synthetic oligonucleotide
acuccagaugguuauguug

SEQ ID NO: 1255856 - RNA, 19 nt, Artificial Sequence
  Description of Artificial Sequence: Synthetic oligonucleotide
agugcaaucauaguauuaa

SEQ ID NO: 1255857 - RNA, 19 nt, Artificial Sequence
  Description of Artificial Sequence: Synthetic oligonucleotide
uccaucucacaauagcaac

SEQ ID NO: 1255858 - RNA, 19 nt, Artificial Sequence
  Description of Artificial Sequence: Synthetic oligonucleotide
uuaagcuuacagcuaggaa

SEQ ID NO: 1255859 - RNA, 19 nt, Artificial Sequence
  Description of Artificial Sequence: Synthetic oligonucleotide
caccuugacucuuuguccg

SEQ ID NO: 1255860 - RNA, 19 nt, Artificial Sequence
  Description of Artificial Sequence: Synthetic oligonucleotide
uauaaccaaugcucuacca

SEQ ID NO: 1255861 - RNA, 19 nt, Artificial Sequence
  Description of Artificial Sequence: Synthetic oligonucleotide
augucccuaaagaagugcc

SEQ ID NO: 1255862 - RNA, 19 nt, Artificial Sequence
  Description of Artificial Sequence: Synthetic oligonucleotide
ugguuacaagacuuaagcu

SEQ ID NO: 1255863 - RNA, 19 nt, Artificial Sequence
  Description of Artificial Sequence: Synthetic oligonucleotide
aaggagguauuaauuaggu

SEQ ID NO: 1255864 - RNA, 19 nt, Artificial Sequence
  Description of Artificial Sequence: Synthetic oligonucleotide
aaguaaagaugcaugcacu

SEQ ID NO: 1255865 - RNA, 19 nt, Artificial Sequence
  Description of Artificial Sequence: Synthetic oligonucleotide
acuacacaaaagagaaugg

SEQ ID NO: 1255866 - RNA, 19 nt, Artificial Sequence
  Description of Artificial Sequence: Synthetic oligonucleotide
aaauacuagaaugucccua

SEQ ID NO: 1255867 - RNA, 19 nt, Artificial Sequence
  Description of Artificial Sequence: Synthetic oligonucleotide
aaccguugguaaagaaacc

SEQ ID NO: 1255868 - RNA, 19 nt, Artificial Sequence
  Description of Artificial Sequence: Synthetic oligonucleotide
aucaugcaaaucauuauug

SEQ ID NO: 1255869 - RNA, 19 nt, Artificial Sequence
  Description of Artificial Sequence: Synthetic oligonucleotide
ucccauuaauugcuaagac

SEQ ID NO: 1255870 - RNA, 19 nt, Artificial Sequence
  Description of Artificial Sequence: Synthetic oligonucleotide
agagucaaaccguugguaa

SEQ ID NO: 1255871 - RNA, 19 nt, Artificial Sequence
  Description of Artificial Sequence: Synthetic oligonucleotide
uacugcaaugacagaaugu

SEQ ID NO: 1255872 - RNA, 19 nt, Artificial Sequence
  Description of Artificial Sequence: Synthetic oligonucleotide
acuaaaugagccaaguaaa

SEQ ID NO: 1255873 - RNA, 19 nt, Artificial Sequence
  Description of Artificial Sequence: Synthetic oligonucleotide
uaguauggcacagaauaca

SEQ ID NO: 1255874 - RNA, 19 nt, Artificial Sequence
  Description of Artificial Sequence: Synthetic oligonucleotide
caugcgcuacaaaaggaag

SEQ ID NO: 1255875 - RNA, 19 nt, Artificial Sequence
  Description of Artificial Sequence: Synthetic oligonucleotide
caaccaugcgcuacaaaag

SEQ ID NO: 1255876 - RNA, 19 nt, Artificial Sequence
  Description of Artificial Sequence: Synthetic oligonucleotide
aaaaccuaagcugcaaaua

SEQ ID NO: 1255877 - RNA, 19 nt, Artificial Sequence
  Description of Artificial Sequence: Synthetic oligonucleotide
caauuaugaugccagauaa

SEQ ID NO: 1255878 - RNA, 19 nt, Artificial Sequence
  Description of Artificial Sequence: Synthetic oligonucleotide
auagacuaucucugaucac

SEQ ID NO: 1255879 - RNA, 19 nt, Artificial Sequence
  Description of Artificial Sequence: Synthetic oligonucleotide
guauagacuaucucugauc

SEQ ID NO: 1255880 - RNA, 19 nt, Artificial Sequence
  Description of Artificial Sequence: Synthetic oligonucleotide
ugggauaccuaauauccau

SEQ ID NO: 1255881 - RNA, 19 nt, Artificial Sequence
  Description of Artificial Sequence: Synthetic oligonucleotide
aguaugguuacuguaguaa

SEQ ID NO: 1255882 - RNA, 19 nt, Artificial Sequence
  Description of Artificial Sequence: Synthetic oligonucleotide
acuaucucugaucacugaa

SEQ ID NO: 1255883 - RNA, 19 nt, Artificial Sequence
  Description of Artificial Sequence: Synthetic oligonucleotide
agucaaaccguugguaaag

SEQ ID NO: 1255884 - RNA, 19 nt, Artificial Sequence
  Description of Artificial Sequence: Synthetic oligonucleotide
ucgcacaucagguuaucca

SEQ ID NO: 1255885 - RNA, 19 nt, Artificial Sequence
  Description of Artificial Sequence: Synthetic oligonucleotide
caaccggccaucuucgagc

SEQ ID NO: 1255886 - RNA, 19 nt, Artificial Sequence
  Description of Artificial Sequence: Synthetic oligonucleotide
uaacaauaguauggcacag

SEQ ID NO: 1255887 - RNA, 19 nt, Artificial Sequence
  Description of Artificial Sequence: Synthetic oligonucleotide
uugggauaccuaauaucca

SEQ ID NO: 1255888 - RNA, 19 nt, Artificial Sequence
  Description of Artificial Sequence: Synthetic oligonucleotide
uagaagcaaauacuagaau

SEQ ID NO: 1255889 - RNA, 19 nt, Artificial Sequence
  Description of Artificial Sequence: Synthetic oligonucleotide
ugcgcuacaaaaggaagac

SEQ ID NO: 1255890 - RNA, 19 nt, Artificial Sequence
  Description of Artificial Sequence: Synthetic oligonucleotide
ugccaaccggccaucuucg

SEQ ID NO: 1255891 - RNA, 19 nt, Artificial Sequence
  Description of Artificial Sequence: Synthetic oligonucleotide
augguuacuguaguaaggu

SEQ ID NO: 1255892 - RNA, 19 nt, Artificial Sequence
  Description of Artificial Sequence: Synthetic oligonucleotide
gaucaaauuagagauugua

SEQ ID NO: 1255893 - RNA, 19 nt, Artificial Sequence
  Description of Artificial Sequence: Synthetic oligonucleotide
ucauauccuacagacacua

SEQ ID NO: 1255894 - RNA, 19 nt, Artificial Sequence
  Description of Artificial Sequence: Synthetic oligonucleotide
uucauauccuacagacacu

SEQ ID NO: 1255895 - RNA, 19 nt, Artificial Sequence
  Description of Artificial Sequence: Synthetic oligonucleotide
ugucccuaaagaagugcca

SEQ ID NO: 1255896 - RNA, 19 nt, Artificial Sequence
  Description of Artificial Sequence: Synthetic oligonucleotide
uccggauauccauugugca

SEQ ID NO: 1255897 - RNA, 19 nt, Artificial Sequence
  Description of Artificial Sequence: Synthetic oligonucleotide
cuacaaauagucugucuca

SEQ ID NO: 1255898 - RNA, 19 nt, Artificial Sequence
  Description of Artificial Sequence: Synthetic oligonucleotide
gucgcaguagccgacaaug

SEQ ID NO: 1255899 - RNA, 19 nt, Artificial Sequence
  Description of Artificial Sequence: Synthetic oligonucleotide
ccaagagucaaaccguugg

SEQ ID NO: 1255900 - RNA, 19 nt, Artificial Sequence
  Description of Artificial Sequence: Synthetic oligonucleotide
cauugugcagucaccauca

SEQ ID NO: 1255901 - RNA, 19 nt, Artificial Sequence
  Description of Artificial Sequence: Synthetic oligonucleotide
aauccgccuccguggacac

SEQ ID NO: 1255902 - RNA, 19 nt, Artificial Sequence
  Description of Artificial Sequence: Synthetic oligonucleotide
cugcaaugacagaaugucc

SEQ ID NO: 1255903 - RNA, 19 nt, Artificial Sequence
  Description of Artificial Sequence: Synthetic oligonucleotide
ccuaauacuuaacagucug

SEQ ID NO: 1255904 - RNA, 19 nt, Artificial Sequence
  Description of Artificial Sequence: Synthetic oligonucleotide
gacguauuuggcgucgcag

SEQ ID NO: 1255905 - RNA, 19 nt, Artificial Sequence
  Description of Artificial Sequence: Synthetic oligonucleotide
ucuucgagcccuucgcacu

SEQ ID NO: 1255906 - RNA, 19 nt, Artificial Sequence
  Description of Artificial Sequence: Synthetic oligonucleotide
aguaaucaguaucccauua

SEQ ID NO: 1255907 - RNA, 19 nt, Artificial Sequence
  Description of Artificial Sequence: Synthetic oligonucleotide
aguuagacuguaucccaga

SEQ ID NO: 1255908 - RNA, 19 nt, Artificial Sequence
  Description of Artificial Sequence: Synthetic oligonucleotide
gauuguacaacuggcaccu

SEQ ID NO: 1255909 - RNA, 19 nt, Artificial Sequence
  Description of Artificial Sequence: Synthetic oligonucleotide
gagguauuaauuagguuaa

SEQ ID NO: 1255910 - RNA, 19 nt, Artificial Sequence
  Description of Artificial Sequence: Synthetic oligonucleotide
ugucucaagugcaaucaua

SEQ ID NO: 1255911 - RNA, 19 nt, Artificial Sequence
  Description of Artificial Sequence: Synthetic oligonucleotide
aagguugguuacaagacuu

SEQ ID NO: 1255912 - RNA, 19 nt, Artificial Sequence
  Description of Artificial Sequence: Synthetic oligonucleotide
uuuuccccuaauacuuaac

SEQ ID NO: 1255913 - RNA, 19 nt, Artificial Sequence
  Description of Artificial Sequence: Synthetic oligonucleotide
ugcaauuaugaugccagau

SEQ ID NO: 1255914 - RNA, 19 nt, Artificial Sequence
  Description of Artificial Sequence: Synthetic oligonucleotide
accguugguaaagaaaccu

SEQ ID NO: 1255915 - RNA, 19 nt, Artificial Sequence
  Description of Artificial Sequence: Synthetic oligonucleotide
agccaaguccacaauaaug

SEQ ID NO: 1255916 - RNA, 19 nt, Artificial Sequence
  Description of Artificial Sequence: Synthetic oligonucleotide
uauuucuacuggcgugaug

SEQ ID NO: 1255917 - RNA, 19 nt, Artificial Sequence
  Description of Artificial Sequence: Synthetic oligonucleotide
gguuacuguaguaagguca

SEQ ID NO: 1255918 - RNA, 19 nt, Artificial Sequence
  Description of Artificial Sequence: Synthetic oligonucleotide
uucaauccgccuccgugga

SEQ ID NO: 1255919 - RNA, 19 nt, Artificial Sequence
  Description of Artificial Sequence: Synthetic oligonucleotide
agcuuucaauagcucauca

SEQ ID NO: 1255920 - RNA, 19 nt, Artificial Sequence
  Description of Artificial Sequence: Synthetic oligonucleotide
ugcuuaauauuaacuuauu

SEQ ID NO: 1255921 - RNA, 19 nt, Artificial Sequence
  Description of Artificial Sequence: Synthetic oligonucleotide
gaguuagacuguaucccag

SEQ ID NO: 1255922 - RNA, 19 nt, Artificial Sequence
  Description of Artificial Sequence: Synthetic oligonucleotide
ccagauaaagguugguuac

SEQ ID NO: 1255923 - RNA, 19 nt, Artificial Sequence
  Description of Artificial Sequence: Synthetic oligonucleotide
auuuugccauugaguaugc

SEQ ID NO: 1255924 - RNA, 19 nt, Artificial Sequence
  Description of Artificial Sequence: Synthetic oligonucleotide
acauuguauguuggcuccc

SEQ ID NO: 1255925 - RNA, 19 nt, Artificial Sequence
  Description of Artificial Sequence: Synthetic oligonucleotide
uugcuaagacaaagugaug

SEQ ID NO: 1255926 - RNA, 19 nt, Artificial Sequence
  Description of Artificial Sequence: Synthetic oligonucleotide
gcaguagccgacaauggcg

SEQ ID NO: 1255927 - RNA, 19 nt, Artificial Sequence
  Description of Artificial Sequence: Synthetic oligonucleotide
acguauagacuaucucuga

SEQ ID NO: 1255928 - RNA, 19 nt, Artificial Sequence
  Description of Artificial Sequence: Synthetic oligonucleotide
ggcacuacacaaaagagaa

SEQ ID NO: 1255929 - RNA, 19 nt, Artificial Sequence
  Description of Artificial Sequence: Synthetic oligonucleotide
uuggcgucgcaguagccga

SEQ ID NO: 1255930 - RNA, 19 nt, Artificial Sequence
  Description of Artificial Sequence: Synthetic oligonucleotide
gacacuacaaauagucugu

SEQ ID NO: 1255931 - RNA, 19 nt, Artificial Sequence
  Description of Artificial Sequence: Synthetic oligonucleotide
uuauucaauccgccuccgu

SEQ ID NO: 1255932 - RNA, 19 nt, Artificial Sequence
  Description of Artificial Sequence: Synthetic oligonucleotide
uagucugucucaagugcaa

SEQ ID NO: 1255933 - RNA, 19 nt, Artificial Sequence
  Description of Artificial Sequence: Synthetic oligonucleotide
uccuacaaucauaucuauu

SEQ ID NO: 1255934 - RNA, 19 nt, Artificial Sequence
  Description of Artificial Sequence: Synthetic oligonucleotide
gcauauuaaaucagaugag

SEQ ID NO: 1255935 - RNA, 19 nt, Artificial Sequence
  Description of Artificial Sequence: Synthetic oligonucleotide
auccacguagcucugccaa

SEQ ID NO: 1255936 - RNA, 19 nt, Artificial Sequence
  Description of Artificial Sequence: Synthetic oligonucleotide
acacuacaaauagucuguc

SEQ ID NO: 1255937 - RNA, 19 nt, Artificial Sequence
  Description of Artificial Sequence: Synthetic oligonucleotide
acuuaacagucugccuagc

SEQ ID NO: 1255938 - RNA, 19 nt, Artificial Sequence
  Description of Artificial Sequence: Synthetic oligonucleotide
cucaagaauagagcuggug

SEQ ID NO: 1255939 - RNA, 19 nt, Artificial Sequence
  Description of Artificial Sequence: Synthetic oligonucleotide
cuuauucaauccgccuccg

SEQ ID NO: 1255940 - RNA, 19 nt, Artificial Sequence
  Description of Artificial Sequence: Synthetic oligonucleotide
aucaacguauagacuaucu

SEQ ID NO: 1255941 - RNA, 19 nt, Artificial Sequence
  Description of Artificial Sequence: Synthetic oligonucleotide
gccauucgaaagaaaaucc

SEQ ID NO: 1255942 - RNA, 19 nt, Artificial Sequence
  Description of Artificial Sequence: Synthetic oligonucleotide
caccuugcuuaauauuaac

SEQ ID NO: 1255943 - RNA, 19 nt, Artificial Sequence
  Description of Artificial Sequence: Synthetic oligonucleotide
auuguauguuggcucccca

SEQ ID NO: 1255944 - RNA, 19 nt, Artificial Sequence
  Description of Artificial Sequence: Synthetic oligonucleotide
gguuacaagacuuaagcuu

SEQ ID NO: 1255945 - RNA, 19 nt, Artificial Sequence
  Description of Artificial Sequence: Synthetic oligonucleotide
aguauggcacagaauacau

SEQ ID NO: 1255946 - RNA, 19 nt, Artificial Sequence
  Description of Artificial Sequence: Synthetic oligonucleotide
guccggauauccauugugc

SEQ ID NO: 1255947 - RNA, 19 nt, Artificial Sequence
  Description of Artificial Sequence: Synthetic oligonucleotide
ccuucuuauucaauccgcc

SEQ ID NO: 1255948 - RNA, 19 nt, Artificial Sequence
  Description of Artificial Sequence: Synthetic oligonucleotide
augagccaaguaaaugcuc

SEQ ID NO: 1255949 - RNA, 19 nt, Artificial Sequence
  Description of Artificial Sequence: Synthetic oligonucleotide
ccccuaauacuuaacaguc

SEQ ID NO: 1255950 - RNA, 19 nt, Artificial Sequence
  Description of Artificial Sequence: Synthetic oligonucleotide
cauuguauguuggcucccc

SEQ ID NO: 1255951 - RNA, 19 nt, Artificial Sequence
  Description of Artificial Sequence: Synthetic oligonucleotide
ugguuacuguaguaagguc

SEQ ID NO: 1255952 - RNA, 19 nt, Artificial Sequence
  Description of Artificial Sequence: Synthetic oligonucleotide
auccauugugcagucacca

SEQ ID NO: 1255953 - RNA, 19 nt, Artificial Sequence
  Description of Artificial Sequence: Synthetic oligonucleotide
uuccuacaaucauaucuau

SEQ ID NO: 1255954 - RNA, 19 nt, Artificial Sequence
  Description of Artificial Sequence: Synthetic oligonucleotide
cuugacaguugcacucuuc

SEQ ID NO: 1255955 - RNA, 19 nt, Artificial Sequence
  Description of Artificial Sequence: Synthetic oligonucleotide
gagucaaaccguugguaaa

SEQ ID NO: 1255956 - RNA, 19 nt, Artificial Sequence
  Description of Artificial Sequence: Synthetic oligonucleotide
cuuaacagucugccuagca

SEQ ID NO: 1255957 - RNA, 19 nt, Artificial Sequence
  Description of Artificial Sequence: Synthetic oligonucleotide
gguuggaauaaauuuauuu

SEQ ID NO: 1255958 - RNA, 19 nt, Artificial Sequence
  Description of Artificial Sequence: Synthetic oligonucleotide
uccauaauggcagccuuuu

SEQ ID NO: 1255959 - RNA, 19 nt, Artificial Sequence
  Description of Artificial Sequence: Synthetic oligonucleotide
aguccacaauaaugcaacu

SEQ ID NO: 1255960 - RNA, 19 nt, Artificial Sequence
  Description of Artificial Sequence: Synthetic oligonucleotide
cagguuauccacguagcuc

SEQ ID NO: 1255961 - RNA, 19 nt, Artificial Sequence
  Description of Artificial Sequence: Synthetic oligonucleotide
ccuaaagaagugccauucg

SEQ ID NO: 1255962 - RNA, 19 nt, Artificial Sequence
  Description of Artificial Sequence: Synthetic oligonucleotide
uacaagacuuaagcuuaca

SEQ ID NO: 1255963 - RNA, 19 nt, Artificial Sequence
  Description of Artificial Sequence: Synthetic oligonucleotide
acuuaagcuuacagcuagg

SEQ ID NO: 1255964 - RNA, 19 nt, Artificial Sequence
  Description of Artificial Sequence: Synthetic oligonucleotide
gacuaucucugaucacuga

SEQ ID NO: 1255965 - RNA, 19 nt, Artificial Sequence
  Description of Artificial Sequence: Synthetic oligonucleotide
uuucuacuggcgugaugcu

SEQ ID NO: 1255966 - RNA, 19 nt, Artificial Sequence
  Description of Artificial Sequence: Synthetic oligonucleotide
cauauccuacagacacuac

SEQ ID NO: 1255967 - RNA, 19 nt, Artificial Sequence
  Description of Artificial Sequence: Synthetic oligonucleotide
gacuauaaccaaugcucua

SEQ ID NO: 1255968 - RNA, 19 nt, Artificial Sequence
  Description of Artificial Sequence: Synthetic oligonucleotide
cauucgaaagaaaauccau

SEQ ID NO: 1255969 - RNA, 19 nt, Artificial Sequence
  Description of Artificial Sequence: Synthetic oligonucleotide
aagugcaaucauaguauua

SEQ ID NO: 1255970 - RNA, 19 nt, Artificial Sequence
  Description of Artificial Sequence: Synthetic oligonucleotide
cauuaauugcuaagacaaa

SEQ ID NO: 1255971 - RNA, 19 nt, Artificial Sequence
  Description of Artificial Sequence: Synthetic oligonucleotide
augcgcuacaaaaggaaga

SEQ ID NO: 1255972 - RNA, 19 nt, Artificial Sequence
  Description of Artificial Sequence: Synthetic oligonucleotide
ccaaccaugcgcuacaaaa

SEQ ID NO: 1255973 - RNA, 19 nt, Artificial Sequence
  Description of Artificial Sequence: Synthetic oligonucleotide
aggagguauuaauuagguu

SEQ ID NO: 1255974 - RNA, 19 nt, Artificial Sequence
  Description of Artificial Sequence: Synthetic oligonucleotide
uccgccuccguggacaccu

SEQ ID NO: 1255975 - RNA, 19 nt, Artificial Sequence
  Description of Artificial Sequence: Synthetic oligonucleotide
ugguuggaauaaauuuauu

SEQ ID NO: 1255976 - RNA, 19 nt, Artificial Sequence
  Description of Artificial Sequence: Synthetic oligonucleotide
cacguagcucugccaaccg

SEQ ID NO: 1255977 - RNA, 19 nt, Artificial Sequence
  Description of Artificial Sequence: Synthetic oligonucleotide
ggucaugggaggaaaugcc

SEQ ID NO: 1255978 - RNA, 19 nt, Artificial Sequence
  Description of Artificial Sequence: Synthetic oligonucleotide
guaucccagauguaacaaa

SEQ ID NO: 1255979 - RNA, 19 nt, Artificial Sequence
  Description of Artificial Sequence: Synthetic oligonucleotide
uuguccggauauccauugu

SEQ ID NO: 1255980 - RNA, 19 nt, Artificial Sequence
  Description of Artificial Sequence: Synthetic oligonucleotide
ccuacaaucauaucuauuu

SEQ ID NO: 1255981 - RNA, 19 nt, Artificial Sequence
  Description of Artificial Sequence: Synthetic oligonucleotide
cuucgagcccuucgcacug

SEQ ID NO: 1255982 - RNA, 19 nt, Artificial Sequence
  Description of Artificial Sequence: Synthetic oligonucleotide
ccucauguucaaagggagg

SEQ ID NO: 1255983 - RNA, 19 nt, Artificial Sequence
  Description of Artificial Sequence: Synthetic oligonucleotide
uucuacuggcgugaugcuc

SEQ ID NO: 1255984 - RNA, 19 nt, Artificial Sequence
  Description of Artificial Sequence: Synthetic oligonucleotide
auacuagaaugucccuaaa

SEQ ID NO: 1255985 - RNA, 19 nt, Artificial Sequence
  Description of Artificial Sequence: Synthetic oligonucleotide
acacuccagaugguuaugu

SEQ ID NO: 1255986 - RNA, 19 nt, Artificial Sequence
  Description of Artificial Sequence: Synthetic oligonucleotide
ccuacagacacuacaaaua

SEQ ID NO: 1255987 - RNA, 19 nt, Artificial Sequence
  Description of Artificial Sequence: Synthetic oligonucleotide
ccggauauccauugugcag

SEQ ID NO: 1255988 - RNA, 19 nt, Artificial Sequence
  Description of Artificial Sequence: Synthetic oligonucleotide
ucccuaaagaagugccauu

SEQ ID NO: 1255989 - RNA, 19 nt, Artificial Sequence
  Description of Artificial Sequence: Synthetic oligonucleotide
ccggucuuuuccuacaauc

SEQ ID NO: 1255990 - RNA, 19 nt, Artificial Sequence
  Description of Artificial Sequence: Synthetic oligonucleotide
cuucuuauucaauccgccu

SEQ ID NO: 1255991 - RNA, 19 nt, Artificial Sequence
  Description of Artificial Sequence: Synthetic oligonucleotide
cguugguaaagaaaccuuc

SEQ ID NO: 1255992 - RNA, 19 nt, Artificial Sequence
  Description of Artificial Sequence: Synthetic oligonucleotide
agacguauuuggcgucgca

SEQ ID NO: 1255993 - RNA, 19 nt, Artificial Sequence
  Description of Artificial Sequence: Synthetic oligonucleotide
ucuugacaguugcacucuu

SEQ ID NO: 1255994 - RNA, 19 nt, Artificial Sequence
  Description of Artificial Sequence: Synthetic oligonucleotide
ccuagcagcuagaacccag

SEQ ID NO: 1255995 - RNA, 19 nt, Artificial Sequence
  Description of Artificial Sequence: Synthetic oligonucleotide
gugcaaucauaguauuaaa

SEQ ID NO: 1255996 - RNA, 19 nt, Artificial Sequence
  Description of Artificial Sequence: Synthetic oligonucleotide
ccauucgaaagaaaaucca

SEQ ID NO: 1255997 - RNA, 19 nt, Artificial Sequence
  Description of Artificial Sequence: Synthetic oligonucleotide
ggcaccuugcuuaauauua

SEQ ID NO: 1255998 - RNA, 19 nt, Artificial Sequence
  Description of Artificial Sequence: Synthetic oligonucleotide
gcuggugugcaaagaaaag

SEQ ID NO: 1255999 - RNA, 19 nt, Artificial Sequence
  Description of Artificial Sequence: Synthetic oligonucleotide
gagccaaguaaaugcucaa

SEQ ID NO: 1256000 - RNA, 19 nt, Artificial Sequence
  Description of Artificial Sequence: Synthetic oligonucleotide
augcccaacucggcaugcc

SEQ ID NO: 1256001 - RNA, 19 nt, Artificial Sequence
  Description of Artificial Sequence: Synthetic oligonucleotide
uggcaccuugcuuaauauu

SEQ ID NO: 1256002 - RNA, 19 nt, Artificial Sequence
  Description of Artificial Sequence: Synthetic oligonucleotide
ucaauccgccuccguggac

SEQ ID NO: 1256003 - RNA, 19 nt, Artificial Sequence
  Description of Artificial Sequence: Synthetic oligonucleotide
gacucuuuguccggauauc

SEQ ID NO: 1256004 - RNA, 19 nt, Artificial Sequence
  Description of Artificial Sequence: Synthetic oligonucleotide
uucgcacugcagcggggac

SEQ ID NO: 1256005 - RNA, 19 nt, Artificial Sequence
  Description of Artificial Sequence: Synthetic oligonucleotide
ggugugcaaagaaaagaca

SEQ ID NO: 1256006 - RNA, 19 nt, Artificial Sequence
  Description of Artificial Sequence: Synthetic oligonucleotide
cgcacaucagguuauccac

SEQ ID NO: 1256007 - RNA, 19 nt, Artificial Sequence
  Description of Artificial Sequence: Synthetic oligonucleotide
agccaaguaaaugcucaaa

SEQ ID NO: 1256008 - RNA, 19 nt, Artificial Sequence
  Description of Artificial Sequence: Synthetic oligonucleotide
ccacaauaaugcaacuuca

SEQ ID NO: 1256009 - RNA, 19 nt, Artificial Sequence
  Description of Artificial Sequence: Synthetic oligonucleotide
cagacacuacaaauagucu

SEQ ID NO: 1256010 - RNA, 19 nt, Artificial Sequence
  Description of Artificial Sequence: Synthetic oligonucleotide
augaugccagauaaagguu

SEQ ID NO: 1256011 - RNA, 19 nt, Artificial Sequence
  Description of Artificial Sequence: Synthetic oligonucleotide
agacuuaagcuuacagcua

SEQ ID NO: 1256012 - RNA, 19 nt, Artificial Sequence
  Description of Artificial Sequence: Synthetic oligonucleotide
cccuaaagaagugccauuc

SEQ ID NO: 1256013 - RNA, 19 nt, Artificial Sequence
  Description of Artificial Sequence: Synthetic oligonucleotide
cagcuuucaauagcucauc

SEQ ID NO: 1256014 - RNA, 19 nt, Artificial Sequence
  Description of Artificial Sequence: Synthetic oligonucleotide
cugcaauuaugaugccaga

SEQ ID NO: 1256015 - RNA, 19 nt, Artificial Sequence
  Description of Artificial Sequence: Synthetic oligonucleotide
auugugcagucaccaucaa

SEQ ID NO: 1256016 - RNA, 19 nt, Artificial Sequence
  Description of Artificial Sequence: Synthetic oligonucleotide
gggacggcaggagcaaagg

SEQ ID NO: 1256017 - RNA, 19 nt, Artificial Sequence
  Description of Artificial Sequence: Synthetic oligonucleotide
caagagucaaaccguuggu

SEQ ID NO: 1256018 - RNA, 19 nt, Artificial Sequence
  Description of Artificial Sequence: Synthetic oligonucleotide
agccaucgcacaucagguu

SEQ ID NO: 1256019 - RNA, 19 nt, Artificial Sequence
  Description of Artificial Sequence: Synthetic oligonucleotide
aguaucccauuaauugcua

SEQ ID NO: 1256020 - RNA, 19 nt, Artificial Sequence
  Description of Artificial Sequence: Synthetic oligonucleotide
cacuacaaauagucugucu

SEQ ID NO: 1256021 - RNA, 19 nt, Artificial Sequence
  Description of Artificial Sequence: Synthetic oligonucleotide
agguauuaauuagguuaaa

SEQ ID NO: 1256022 - RNA, 19 nt, Artificial Sequence
  Description of Artificial Sequence: Synthetic oligonucleotide
gguugguuacaagacuuaa

SEQ ID NO: 1256023 - RNA, 19 nt, Artificial Sequence
  Description of Artificial Sequence: Synthetic oligonucleotide
gcaacauuguauguuggcu

SEQ ID NO: 1256024 - RNA, 19 nt, Artificial Sequence
  Description of Artificial Sequence: Synthetic oligonucleotide
ccaaccggccaucuucgag

SEQ ID NO: 1256025 - RNA, 19 nt, Artificial Sequence
  Description of Artificial Sequence: Synthetic oligonucleotide
gccaucgcacaucagguua

SEQ ID NO: 1256026 - RNA, 19 nt, Artificial Sequence
  Description of Artificial Sequence: Synthetic oligonucleotide
ccagacguauuuggcgucg

SEQ ID NO: 1256027 - RNA, 19 nt, Artificial Sequence
  Description of Artificial Sequence: Synthetic oligonucleotide
cuuccuuucccaugacuau

SEQ ID NO: 1256028 - RNA, 19 nt, Artificial Sequence
  Description of Artificial Sequence: Synthetic oligonucleotide
cacacuccagaugguuaug

SEQ ID NO: 1256029 - RNA, 19 nt, Artificial Sequence
  Description of Artificial Sequence: Synthetic oligonucleotide
ccaugcgcuacaaaaggaa

SEQ ID NO: 1256030 - RNA, 19 nt, Artificial Sequence
  Description of Artificial Sequence: Synthetic oligonucleotide
uucgagcccuucgcacugc

SEQ ID NO: 1256031 - RNA, 19 nt, Artificial Sequence
  Description of Artificial Sequence: Synthetic oligonucleotide
ccacguagcucugccaacc

SEQ ID NO: 1256032 - RNA, 19 nt, Artificial Sequence
  Description of Artificial Sequence: Synthetic oligonucleotide
caauaguauggcacagaau

SEQ ID NO: 1256033 - RNA, 19 nt, Artificial Sequence
  Description of Artificial Sequence: Synthetic oligonucleotide
auccauaauggcagccuuu

SEQ ID NO: 1256034 - RNA, 19 nt, Artificial Sequence
  Description of Artificial Sequence: Synthetic oligonucleotide
ggaauuugaucaguauggu

SEQ ID NO: 1256035 - RNA, 19 nt, Artificial Sequence
  Description of Artificial Sequence: Synthetic oligonucleotide
agguugguuacaagacuua

SEQ ID NO: 1256036 - RNA, 19 nt, Artificial Sequence
  Description of Artificial Sequence: Synthetic oligonucleotide
cuucgcacugcagcgggga

SEQ ID NO: 1256037 - RNA, 19 nt, Artificial Sequence
  Description of Artificial Sequence: Synthetic oligonucleotide
gucccuaaagaagugccau

SEQ ID NO: 1256038 - RNA, 19 nt, Artificial Sequence
  Description of Artificial Sequence: Synthetic oligonucleotide
gguuauguugggauaccua

SEQ ID NO: 1256039 - RNA, 19 nt, Artificial Sequence
  Description of Artificial Sequence: Synthetic oligonucleotide
acucaagaauagagcuggu

SEQ ID NO: 1256040 - RNA, 19 nt, Artificial Sequence
  Description of Artificial Sequence: Synthetic oligonucleotide
cuuuguccggauauccauu

SEQ ID NO: 1256041 - RNA, 19 nt, Artificial Sequence
  Description of Artificial Sequence: Synthetic oligonucleotide
gugccauucgaaagaaaau

SEQ ID NO: 1256042 - RNA, 19 nt, Artificial Sequence
  Description of Artificial Sequence: Synthetic oligonucleotide
caccaucaacguauagacu

SEQ ID NO: 1256043 - RNA, 19 nt, Artificial Sequence
  Description of Artificial Sequence: Synthetic oligonucleotide
auccgccuccguggacacc

SEQ ID NO: 1256044 - RNA, 19 nt, Artificial Sequence
  Description of Artificial Sequence: Synthetic oligonucleotide
gccguggcugcccagacgu

SEQ ID NO: 1256045 - RNA, 19 nt, Artificial Sequence
  Description of Artificial Sequence: Synthetic oligonucleotide
gcccagacguauuuggcgu

SEQ ID NO: 1256046 - RNA, 19 nt, Artificial Sequence
  Description of Artificial Sequence: Synthetic oligonucleotide
ccugggaauuugaucagua

SEQ ID NO: 1256047 - RNA, 19 nt, Artificial Sequence
  Description of Artificial Sequence: Synthetic oligonucleotide
cucuugacaguugcacucu

SEQ ID NO: 1256048 - RNA, 19 nt, Artificial Sequence
  Description of Artificial Sequence: Synthetic oligonucleotide
uccucccaaccaugcgcua

SEQ ID NO: 1256049 - RNA, 19 nt, Artificial Sequence
  Description of Artificial Sequence: Synthetic oligonucleotide
gucugccuagcagcuagaa

SEQ ID NO: 1256050 - RNA, 19 nt, Artificial Sequence
  Description of Artificial Sequence: Synthetic oligonucleotide
gggauaccuaauauccaua

SEQ ID NO: 1256051 - RNA, 19 nt, Artificial Sequence
  Description of Artificial Sequence: Synthetic oligonucleotide
cuugacucuuuguccggau

SEQ ID NO: 1256052 - RNA, 19 nt, Artificial Sequence
  Description of Artificial Sequence: Synthetic oligonucleotide
gcagcuuucaauagcucau

SEQ ID NO: 1256053 - RNA, 19 nt, Artificial Sequence
  Description of Artificial Sequence: Synthetic oligonucleotide
agucugccuagcagcuaga

SEQ ID NO: 1256054 - RNA, 19 nt, Artificial Sequence
  Description of Artificial Sequence: Synthetic oligonucleotide
cccagacguauuuggcguc

SEQ ID NO: 1256055 - RNA, 19 nt, Artificial Sequence
  Description of Artificial Sequence: Synthetic oligonucleotide
gcuacugcaaugacagaau

SEQ ID NO: 1256056 - RNA, 19 nt, Artificial Sequence
  Description of Artificial Sequence: Synthetic oligonucleotide
cugucucaagugcaaucau

SEQ ID NO: 1256057 - RNA, 19 nt, Artificial Sequence
  Description of Artificial Sequence: Synthetic oligonucleotide
gcccuucgcacugcagcgg

SEQ ID NO: 1256058 - RNA, 19 nt, Artificial Sequence
  Description of Artificial Sequence: Synthetic oligonucleotide
caucaacaaaggagguauu

SEQ ID NO: 1256059 - RNA, 19 nt, Artificial Sequence
  Description of Artificial Sequence: Synthetic oligonucleotide
caauggcggccuccuggca

SEQ ID NO: 1256060 - RNA, 19 nt, Artificial Sequence
  Description of Artificial Sequence: Synthetic oligonucleotide
gccgacaauggcggccucc

SEQ ID NO: 1256061 - RNA, 19 nt, Artificial Sequence
  Description of Artificial Sequence: Synthetic oligonucleotide
cccuaauacuuaacagucu

SEQ ID NO: 1256062 - RNA, 19 nt, Artificial Sequence
  Description of Artificial Sequence: Synthetic oligonucleotide
cacuccagaugguuauguu

SEQ ID NO: 1256063 - RNA, 19 nt, Artificial Sequence
  Description of Artificial Sequence: Synthetic oligonucleotide
gcuagaacccagagucucu

SEQ ID NO: 1256064 - RNA, 19 nt, Artificial Sequence
  Description of Artificial Sequence: Synthetic oligonucleotide
cggauauccauugugcagu

SEQ ID NO: 1256065 - RNA, 19 nt, Artificial Sequence
  Description of Artificial Sequence: Synthetic oligonucleotide
ccaucaacguauagacuau

SEQ ID NO: 1256066 - RNA, 19 nt, Artificial Sequence
  Description of Artificial Sequence: Synthetic oligonucleotide
cuauuucuacuggcgugau

SEQ ID NO: 1256067 - RNA, 19 nt, Artificial Sequence
  Description of Artificial Sequence: Synthetic oligonucleotide
cguauagacuaucucugau

SEQ ID NO: 1256068 - RNA, 19 nt, Artificial Sequence
  Description of Artificial Sequence: Synthetic oligonucleotide
ggcgucgcaguagccgaca

SEQ ID NO: 1256069 - RNA, 19 nt, Artificial Sequence
  Description of Artificial Sequence: Synthetic oligonucleotide
ccguugguaaagaaaccuu

SEQ ID NO: 1256070 - RNA, 19 nt, Artificial Sequence
  Description of Artificial Sequence: Synthetic oligonucleotide
gccaaccggccaucuucga

SEQ ID NO: 1256071 - RNA, 19 nt, Artificial Sequence
  Description of Artificial Sequence: Synthetic oligonucleotide
ccauaauggcagccuuuua

SEQ ID NO: 1256072 - RNA, 19 nt, Artificial Sequence
  Description of Artificial Sequence: Synthetic oligonucleotide
ccaucgcacaucagguuau

SEQ ID NO: 1256073 - RNA, 19 nt, Artificial Sequence
  Description of Artificial Sequence: Synthetic oligonucleotide
cccaaccaugcgcuacaaa

SEQ ID NO: 1256074 - RNA, 19 nt, Artificial Sequence
  Description of Artificial Sequence: Synthetic oligonucleotide
ccgacaauggcggccuccu

SEQ ID NO: 1256075 - RNA, 19 nt, Artificial Sequence
  Description of Artificial Sequence: Synthetic oligonucleotide
cccggccguggcugcccag

SEQ ID NO: 1256076 - RNA, 19 nt, Artificial Sequence
  Description of Artificial Sequence: Synthetic oligonucleotide
cgucgcaguagccgacaau

SEQ ID NO: 1256077 - RNA, 19 nt, Artificial Sequence
  Description of Artificial Sequence: Synthetic oligonucleotide
ccguggcugcccagacgua

SEQ ID NO: 1256078 - RNA, 19 nt, Artificial Sequence
  Description of Artificial Sequence: Synthetic oligonucleotide
ccgccuccguggacaccuu

SEQ ID NO: 1256079 - RNA, 19 nt, Artificial Sequence
  Description of Artificial Sequence: Synthetic oligonucleotide
aaauacugaccauagaccc

SEQ ID NO: 1256080 - RNA, 19 nt, Artificial Sequence
  Description of Artificial Sequence: Synthetic oligonucleotide
auugcuugcacuuuggucc

SEQ ID NO: 1256081 - RNA, 19 nt, Artificial Sequence
  Description of Artificial Sequence: Synthetic oligonucleotide
aauuguuccagcugcaacc

SEQ ID NO: 1256082 - RNA, 19 nt, Artificial Sequence
  Description of Artificial Sequence: Synthetic oligonucleotide
aaagauuucauccuugaca

SEQ ID NO: 1256083 - RNA, 19 nt, Artificial Sequence
  Description of Artificial Sequence: Synthetic oligonucleotide
ucuaagaagacauugguca

SEQ ID NO: 1256084 - RNA, 19 nt, Artificial Sequence
  Description of Artificial Sequence: Synthetic oligonucleotide
ugaagugagauuuucaaag

SEQ ID NO: 1256085 - RNA, 19 nt, Artificial Sequence
  Description of Artificial Sequence: Synthetic oligonucleotide
ucaaauacugaccauagac

SEQ ID NO: 1256086 - RNA, 19 nt, Artificial Sequence
  Description of Artificial Sequence: Synthetic oligonucleotide
caauaagucaucuaggaag

SEQ ID NO: 1256087 - RNA, 19 nt, Artificial Sequence
  Description of Artificial Sequence: Synthetic oligonucleotide
aauaagucaucuaggaagc

SEQ ID NO: 1256088 - RNA, 19 nt, Artificial Sequence
  Description of Artificial Sequence: Synthetic oligonucleotide
aaauucucguaauugauca

SEQ ID NO: 1256089 - RNA, 19 nt, Artificial Sequence
  Description of Artificial Sequence: Synthetic oligonucleotide
ucucauaaguccaaaagcc

SEQ ID NO: 1256090 - RNA, 19 nt, Artificial Sequence
  Description of Artificial Sequence: Synthetic oligonucleotide
ucuuauagaauucauuugu

SEQ ID NO: 1256091 - RNA, 19 nt, Artificial Sequence
  Description of Artificial Sequence: Synthetic oligonucleotide
aaaaccauaaauucuguaa

SEQ ID NO: 1256092 - RNA, 19 nt, Artificial Sequence
  Description of Artificial Sequence: Synthetic oligonucleotide
ugaauuuugaucuucccug

SEQ ID NO: 1256093 - RNA, 19 nt, Artificial Sequence
  Description of Artificial Sequence: Synthetic oligonucleotide
aagacauucagauaucccu

SEQ ID NO: 1256094 - RNA, 19 nt, Artificial Sequence
  Description of Artificial Sequence: Synthetic oligonucleotide
ucacgugucauccagaucu

SEQ ID NO: 1256095 - RNA, 19 nt, Artificial Sequence
  Description of Artificial Sequence: Synthetic oligonucleotide
ugaccauagacccucaggg

SEQ ID NO: 1256096 - RNA, 19 nt, Artificial Sequence
  Description of Artificial Sequence: Synthetic oligonucleotide
uuucgcaugacauaguuga

SEQ ID NO: 1256097 - RNA, 19 nt, Artificial Sequence
  Description of Artificial Sequence: Synthetic oligonucleotide
aagauuucauccuugacau

SEQ ID NO: 1256098 - RNA, 19 nt, Artificial Sequence
  Description of Artificial Sequence: Synthetic oligonucleotide
gauaaguuccaguauguag

SEQ ID NO: 1256099 - RNA, 19 nt, Artificial Sequence
  Description of Artificial Sequence: Synthetic oligonucleotide
aaugaaacaggauccuguc

SEQ ID NO: 1256100 - RNA, 19 nt, Artificial Sequence
  Description of Artificial Sequence: Synthetic oligonucleotide
auaugaaucuguaugaagg

SEQ ID NO: 1256101 - RNA, 19 nt, Artificial Sequence
  Description of Artificial Sequence: Synthetic oligonucleotide
agaucaauuagaauggugg

SEQ ID NO: 1256102 - RNA, 19 nt, Artificial Sequence
  Description of Artificial Sequence: Synthetic oligonucleotide
aguaauauuugguaaauaa

SEQ ID NO: 1256103 - RNA, 19 nt, Artificial Sequence
  Description of Artificial Sequence: Synthetic oligonucleotide
aaauucucccauaugaauc

SEQ ID NO: 1256104 - RNA, 19 nt, Artificial Sequence
  Description of Artificial Sequence: Synthetic oligonucleotide
aaguccaaaagccauucag

SEQ ID NO: 1256105 - RNA, 19 nt, Artificial Sequence
  Description of Artificial Sequence: Synthetic oligonucleotide
uguugauuaaauccugaag

SEQ ID NO: 1256106 - RNA, 19 nt, Artificial Sequence
  Description of Artificial Sequence: Synthetic oligonucleotide
ucuaguaaggcagauaucu

SEQ ID NO: 1256107 - RNA, 19 nt, Artificial Sequence
  Description of Artificial Sequence: Synthetic oligonucleotide
ucccauaugaaucuguaug

SEQ ID NO: 1256108 - RNA, 19 nt, Artificial Sequence
  Description of Artificial Sequence: Synthetic oligonucleotide
agaagaagaacuuccuaac

SEQ ID NO: 1256109 - RNA, 19 nt, Artificial Sequence
  Description of Artificial Sequence: Synthetic oligonucleotide
uguuguacaggcaugugcc

SEQ ID NO: 1256110 - RNA, 19 nt, Artificial Sequence
  Description of Artificial Sequence: Synthetic oligonucleotide
uuuggauccguguugggcg

SEQ ID NO: 1256111 - RNA, 19 nt, Artificial Sequence
  Description of Artificial Sequence: Synthetic oligonucleotide
uaaggcgagaacaaagucc

SEQ ID NO: 1256112 - RNA, 19 nt, Artificial Sequence
  Description of Artificial Sequence: Synthetic oligonucleotide
aagucaucuaggaagcugc

SEQ ID NO: 1256113 - RNA, 19 nt, Artificial Sequence
  Description of Artificial Sequence: Synthetic oligonucleotide
gauuaaauccugaagugag

SEQ ID NO: 1256114 - RNA, 19 nt, Artificial Sequence
  Description of Artificial Sequence: Synthetic oligonucleotide
ugugccaaguuuuauuuag

SEQ ID NO: 1256115 - RNA, 19 nt, Artificial Sequence
  Description of Artificial Sequence: Synthetic oligonucleotide
aaaauucucguaauugauc

SEQ ID NO: 1256116 - RNA, 19 nt, Artificial Sequence
  Description of Artificial Sequence: Synthetic oligonucleotide
aacuuuucgcaugacauag

SEQ ID NO: 1256117 - RNA, 19 nt, Artificial Sequence
  Description of Artificial Sequence: Synthetic oligonucleotide
uaucaagauucaaauacug

SEQ ID NO: 1256118 - RNA, 19 nt, Artificial Sequence
  Description of Artificial Sequence: Synthetic oligonucleotide
aagacauuggucaugguug

SEQ ID NO: 1256119 - RNA, 19 nt, Artificial Sequence
  Description of Artificial Sequence: Synthetic oligonucleotide
caaccuguaauaaaaccgg

SEQ ID NO: 1256120 - RNA, 19 nt, Artificial Sequence
  Description of Artificial Sequence: Synthetic oligonucleotide
caagauucaaauacugacc

SEQ ID NO: 1256121 - RNA, 19 nt, Artificial Sequence
  Description of Artificial Sequence: Synthetic oligonucleotide
ucauaagugagacacuccu

SEQ ID NO: 1256122 - RNA, 19 nt, Artificial Sequence
  Description of Artificial Sequence: Synthetic oligonucleotide
aaccaauuuguuucuugac

SEQ ID NO: 1256123 - RNA, 19 nt, Artificial Sequence
  Description of Artificial Sequence: Synthetic oligonucleotide
uucuaaggcgagaacaaag

SEQ ID NO: 1256124 - RNA, 19 nt, Artificial Sequence
  Description of Artificial Sequence: Synthetic oligonucleotide
auaacgggagaguucuucc

SEQ ID NO: 1256125 - RNA, 19 nt, Artificial Sequence
  Description of Artificial Sequence: Synthetic oligonucleotide
aguuugaaaauguacugca

SEQ ID NO: 1256126 - RNA, 19 nt, Artificial Sequence
  Description of Artificial Sequence: Synthetic oligonucleotide
uccgucauaagugagacac

SEQ ID NO: 1256127 - RNA, 19 nt, Artificial Sequence
  Description of Artificial Sequence: Synthetic oligonucleotide
accauagacccucagggcg

SEQ ID NO: 1256128 - RNA, 19 nt, Artificial Sequence
  Description of Artificial Sequence: Synthetic oligonucleotide
uguaugaaggaguuuggca

SEQ ID NO: 1256129 - RNA, 19 nt, Artificial Sequence
  Description of Artificial Sequence: Synthetic oligonucleotide
uccaauaagucaucuagga

SEQ ID NO: 1256130 - RNA, 19 nt, Artificial Sequence
  Description of Artificial Sequence: Synthetic oligonucleotide
aauucuugucugaugcagc

SEQ ID NO: 1256131 - RNA, 19 nt, Artificial Sequence
  Description of Artificial Sequence: Synthetic oligonucleotide
uguauggcccuaaagaaau

SEQ ID NO: 1256132 - RNA, 19 nt, Artificial Sequence
  Description of Artificial Sequence: Synthetic oligonucleotide
uuuauuuaggauguuucca

SEQ ID NO: 1256133 - RNA, 19 nt, Artificial Sequence
  Description of Artificial Sequence: Synthetic oligonucleotide
aauaaaaccggggaauggu

SEQ ID NO: 1256134 - RNA, 19 nt, Artificial Sequence
  Description of Artificial Sequence: Synthetic oligonucleotide
uuauuuaggauguuuccaa

SEQ ID NO: 1256135 - RNA, 19 nt, Artificial Sequence
  Description of Artificial Sequence: Synthetic oligonucleotide
gaaaacccggucuaagaag

SEQ ID NO: 1256136 - RNA, 19 nt, Artificial Sequence
  Description of Artificial Sequence: Synthetic oligonucleotide
ucuaaggcgagaacaaagu

SEQ ID NO: 1256137 - RNA, 19 nt, Artificial Sequence
  Description of Artificial Sequence: Synthetic oligonucleotide
ugcuguuccauaacgggag

SEQ ID NO: 1256138 - RNA, 19 nt, Artificial Sequence
  Description of Artificial Sequence: Synthetic oligonucleotide
auuagcggguuguuaaccg

SEQ ID NO: 1256139 - RNA, 19 nt, Artificial Sequence
  Description of Artificial Sequence: Synthetic oligonucleotide
uguaauaaaaccggggaau

SEQ ID NO: 1256140 - RNA, 19 nt, Artificial Sequence
  Description of Artificial Sequence: Synthetic oligonucleotide
uaauuguggcaaaguaggg

SEQ ID NO: 1256141 - RNA, 19 nt, Artificial Sequence
  Description of Artificial Sequence: Synthetic oligonucleotide
cauaugaaucuguaugaag

SEQ ID NO: 1256142 - RNA, 19 nt, Artificial Sequence
  Description of Artificial Sequence: Synthetic oligonucleotide
agacauuggucaugguugc

SEQ ID NO: 1256143 - RNA, 19 nt, Artificial Sequence
  Description of Artificial Sequence: Synthetic oligonucleotide
uguugggcgacgccaaacg

SEQ ID NO: 1256144 - RNA, 19 nt, Artificial Sequence
  Description of Artificial Sequence: Synthetic oligonucleotide
ucauaaguccaaaagccau

SEQ ID NO: 1256145 - RNA, 19 nt, Artificial Sequence
  Description of Artificial Sequence: Synthetic oligonucleotide
auaaguuccaguauguagu

SEQ ID NO: 1256146 - RNA, 19 nt, Artificial Sequence
  Description of Artificial Sequence: Synthetic oligonucleotide
uugcuguugauuaaauccu

SEQ ID NO: 1256147 - RNA, 19 nt, Artificial Sequence
  Description of Artificial Sequence: Synthetic oligonucleotide
ugguugcuguuccauaacg

SEQ ID NO: 1256148 - RNA, 19 nt, Artificial Sequence
  Description of Artificial Sequence: Synthetic oligonucleotide
uguaguaagacuucaucuu

SEQ ID NO: 1256149 - RNA, 19 nt, Artificial Sequence
  Description of Artificial Sequence: Synthetic oligonucleotide
uaauaaaaccggggaaugg

SEQ ID NO: 1256150 - RNA, 19 nt, Artificial Sequence
  Description of Artificial Sequence: Synthetic oligonucleotide
cuuuaugaaggcagucugg

SEQ ID NO: 1256151 - RNA, 19 nt, Artificial Sequence
  Description of Artificial Sequence: Synthetic oligonucleotide
uggacaauuccucaucccu

SEQ ID NO: 1256152 - RNA, 19 nt, Artificial Sequence
  Description of Artificial Sequence: Synthetic oligonucleotide
ucccuuagcuccaauaagu

SEQ ID NO: 1256153 - RNA, 19 nt, Artificial Sequence
  Description of Artificial Sequence: Synthetic oligonucleotide
caacccaucuaauuguggc

SEQ ID NO: 1256154 - RNA, 19 nt, Artificial Sequence
  Description of Artificial Sequence: Synthetic oligonucleotide
ugaucuucccuguucuuag

SEQ ID NO: 1256155 - RNA, 19 nt, Artificial Sequence
  Description of Artificial Sequence: Synthetic oligonucleotide
uuaagggaaaagacauuca

SEQ ID NO: 1256156 - RNA, 19 nt, Artificial Sequence
  Description of Artificial Sequence: Synthetic oligonucleotide
caaggauccugcaucaaag

SEQ ID NO: 1256157 - RNA, 19 nt, Artificial Sequence
  Description of Artificial Sequence: Synthetic oligonucleotide
ugaucauugcuuccucucc

SEQ ID NO: 1256158 - RNA, 19 nt, Artificial Sequence
  Description of Artificial Sequence: Synthetic oligonucleotide
ucguaauugaucauugcuu

SEQ ID NO: 1256159 - RNA, 19 nt, Artificial Sequence
  Description of Artificial Sequence: Synthetic oligonucleotide
ucugaugcagccaaacuuu

SEQ ID NO: 1256160 - RNA, 19 nt, Artificial Sequence
  Description of Artificial Sequence: Synthetic oligonucleotide
aacaaaguccagguagguc

SEQ ID NO: 1256161 - RNA, 19 nt, Artificial Sequence
  Description of Artificial Sequence: Synthetic oligonucleotide
ugucuaagagcucucugcu

SEQ ID NO: 1256162 - RNA, 19 nt, Artificial Sequence
  Description of Artificial Sequence: Synthetic oligonucleotide
ucugcuggcaaccuguaau

SEQ ID NO: 1256163 - RNA, 19 nt, Artificial Sequence
  Description of Artificial Sequence: Synthetic oligonucleotide
aaggcgagaacaaagucca

SEQ ID NO: 1256164 - RNA, 19 nt, Artificial Sequence
  Description of Artificial Sequence: Synthetic oligonucleotide
accagaacucuaguaaggc

SEQ ID NO: 1256165 - RNA, 19 nt, Artificial Sequence
  Description of Artificial Sequence: Synthetic oligonucleotide
gcuccaauaagucaucuag

SEQ ID NO: 1256166 - RNA, 19 nt, Artificial Sequence
  Description of Artificial Sequence: Synthetic oligonucleotide
ugcacuuugguccagccuu

SEQ ID NO: 1256167 - RNA, 19 nt, Artificial Sequence
  Description of Artificial Sequence: Synthetic oligonucleotide
uuugguaaauaaauccauu

SEQ ID NO: 1256168 - RNA, 19 nt, Artificial Sequence
  Description of Artificial Sequence: Synthetic oligonucleotide
gcaaccuguaauaaaaccg

SEQ ID NO: 1256169 - RNA, 19 nt, Artificial Sequence
  Description of Artificial Sequence: Synthetic oligonucleotide
auaaguccaaaagccauuc

SEQ ID NO: 1256170 - RNA, 19 nt, Artificial Sequence
  Description of Artificial Sequence: Synthetic oligonucleotide
ugcaugccaaaauaucuug

SEQ ID NO: 1256171 - RNA, 19 nt, Artificial Sequence
  Description of Artificial Sequence: Synthetic oligonucleotide
aaaacccggucuaagaaga

SEQ ID NO: 1256172 - RNA, 19 nt, Artificial Sequence
  Description of Artificial Sequence: Synthetic oligonucleotide
guaugaaggaguuuggcaa

SEQ ID NO: 1256173 - RNA, 19 nt, Artificial Sequence
  Description of Artificial Sequence: Synthetic oligonucleotide
uuuaugaaggcagucuggu

SEQ ID NO: 1256174 - RNA, 19 nt, Artificial Sequence
  Description of Artificial Sequence: Synthetic oligonucleotide
aacuuccuaacugcuguac

SEQ ID NO: 1256175 - RNA, 19 nt, Artificial Sequence
  Description of Artificial Sequence: Synthetic oligonucleotide
ucugauucccgaagguacc

SEQ ID NO: 1256176 - RNA, 19 nt, Artificial Sequence
  Description of Artificial Sequence: Synthetic oligonucleotide
caucuaggaagcugcaugc

SEQ ID NO: 1256177 - RNA, 19 nt, Artificial Sequence
  Description of Artificial Sequence: Synthetic oligonucleotide
uccauaacgggagaguucu

SEQ ID NO: 1256178 - RNA, 19 nt, Artificial Sequence
  Description of Artificial Sequence: Synthetic oligonucleotide
uuuucgcaugacauaguug

SEQ ID NO: 1256179 - RNA, 19 nt, Artificial Sequence
  Description of Artificial Sequence: Synthetic oligonucleotide
ugggcgacgccaaacgccg

SEQ ID NO: 1256180 - RNA, 19 nt, Artificial Sequence
  Description of Artificial Sequence: Synthetic oligonucleotide
aggaguuugaaaauguacu

SEQ ID NO: 1256181 - RNA, 19 nt, Artificial Sequence
  Description of Artificial Sequence: Synthetic oligonucleotide
aggacccuacauuagcggg

SEQ ID NO: 1256182 - RNA, 19 nt, Artificial Sequence
  Description of Artificial Sequence: Synthetic oligonucleotide
caacaucauauaaacugag

SEQ ID NO: 1256183 - RNA, 19 nt, Artificial Sequence
  Description of Artificial Sequence: Synthetic oligonucleotide
uaguaagacuucaucuucu

SEQ ID NO: 1256184 - RNA, 19 nt, Artificial Sequence
  Description of Artificial Sequence: Synthetic oligonucleotide
auuucuccgucauaaguga

SEQ ID NO: 1256185 - RNA, 19 nt, Artificial Sequence
  Description of Artificial Sequence: Synthetic oligonucleotide
ugccaaguuuuauuuagga

SEQ ID NO: 1256186 - RNA, 19 nt, Artificial Sequence
  Description of Artificial Sequence: Synthetic oligonucleotide
aacccaucuaauuguggca

SEQ ID NO: 1256187 - RNA, 19 nt, Artificial Sequence
  Description of Artificial Sequence: Synthetic oligonucleotide
uuguauggcccuaaagaaa

SEQ ID NO: 1256188 - RNA, 19 nt, Artificial Sequence
  Description of Artificial Sequence: Synthetic oligonucleotide
gacauucagauaucccuug

SEQ ID NO: 1256189 - RNA, 19 nt, Artificial Sequence
  Description of Artificial Sequence: Synthetic oligonucleotide
agacacuccuggaaaaccc

SEQ ID NO: 1256190 - RNA, 19 nt, Artificial Sequence
  Description of Artificial Sequence: Synthetic oligonucleotide
ugacauaguugaagaacug

SEQ ID NO: 1256191 - RNA, 19 nt, Artificial Sequence
  Description of Artificial Sequence: Synthetic oligonucleotide
uccuugacaucuugaaaug

SEQ ID NO: 1256192 - RNA, 19 nt, Artificial Sequence
  Description of Artificial Sequence: Synthetic oligonucleotide
uguacaggcaugugccaag

SEQ ID NO: 1256193 - RNA, 19 nt, Artificial Sequence
  Description of Artificial Sequence: Synthetic oligonucleotide
ugcuguugauuaaauccug

SEQ ID NO: 1256194 - RNA, 19 nt, Artificial Sequence
  Description of Artificial Sequence: Synthetic oligonucleotide
guguuguacaggcaugugc

SEQ ID NO: 1256195 - RNA, 19 nt, Artificial Sequence
  Description of Artificial Sequence: Synthetic oligonucleotide
uuccaacccaucuaauugu

SEQ ID NO: 1256196 - RNA, 19 nt, Artificial Sequence
  Description of Artificial Sequence: Synthetic oligonucleotide
aaccuguaauaaaaccggg

SEQ ID NO: 1256197 - RNA, 19 nt, Artificial Sequence
  Description of Artificial Sequence: Synthetic oligonucleotide
uggaaaacccggucuaaga

SEQ ID NO: 1256198 - RNA, 19 nt, Artificial Sequence
  Description of Artificial Sequence: Synthetic oligonucleotide
agugagacacuccuggaaa

SEQ ID NO: 1256199 - RNA, 19 nt, Artificial Sequence
  Description of Artificial Sequence: Synthetic oligonucleotide
guuguuaaccgcuccuccc

SEQ ID NO: 1256200 - RNA, 19 nt, Artificial Sequence
  Description of Artificial Sequence: Synthetic oligonucleotide
aucaauuagaaugguggug

SEQ ID NO: 1256201 - RNA, 19 nt, Artificial Sequence
  Description of Artificial Sequence: Synthetic oligonucleotide
agguaggucuuauagucca

SEQ ID NO: 1256202 - RNA, 19 nt, Artificial Sequence
  Description of Artificial Sequence: Synthetic oligonucleotide
cuuguauggcccuaaagaa

SEQ ID NO: 1256203 - RNA, 19 nt, Artificial Sequence
  Description of Artificial Sequence: Synthetic oligonucleotide
uugggcgacgccaaacgcc

SEQ ID NO: 1256204 - RNA, 19 nt, Artificial Sequence
  Description of Artificial Sequence: Synthetic oligonucleotide
aucuaauuguggcaaagua

SEQ ID NO: 1256205 - RNA, 19 nt, Artificial Sequence
  Description of Artificial Sequence: Synthetic oligonucleotide
aagucugauucccgaaggu

SEQ ID NO: 1256206 - RNA, 19 nt, Artificial Sequence
  Description of Artificial Sequence: Synthetic oligonucleotide
guaauaaaaccggggaaug

SEQ ID NO: 1256207 - RNA, 19 nt, Artificial Sequence
  Description of Artificial Sequence: Synthetic oligonucleotide
caauucuugucugaugcag

SEQ ID NO: 1256208 - RNA, 19 nt, Artificial Sequence
  Description of Artificial Sequence: Synthetic oligonucleotide
uggcccuaaagaaauaauu

SEQ ID NO: 1256209 - RNA, 19 nt, Artificial Sequence
  Description of Artificial Sequence: Synthetic oligonucleotide
aauuagaaugguggugacu

SEQ ID NO: 1256210 - RNA, 19 nt, Artificial Sequence
  Description of Artificial Sequence: Synthetic oligonucleotide
guagggauaaguuccagua

SEQ ID NO: 1256211 - RNA, 19 nt, Artificial Sequence
  Description of Artificial Sequence: Synthetic oligonucleotide
ugugaucuuuaucaagauu

SEQ ID NO: 1256212 - RNA, 19 nt, Artificial Sequence
  Description of Artificial Sequence: Synthetic oligonucleotide
gccguugugaucuuuauca

SEQ ID NO: 1256213 - RNA, 19 nt, Artificial Sequence
  Description of Artificial Sequence: Synthetic oligonucleotide
ucgcaugacauaguugaag

SEQ ID NO: 1256214 - RNA, 19 nt, Artificial Sequence
  Description of Artificial Sequence: Synthetic oligonucleotide
ugcagccaaacuuuucgca

SEQ ID NO: 1256215 - RNA, 19 nt, Artificial Sequence
  Description of Artificial Sequence: Synthetic oligonucleotide
ugaguaauauuugguaaau

SEQ ID NO: 1256216 - RNA, 19 nt, Artificial Sequence
  Description of Artificial Sequence: Synthetic oligonucleotide
uccaacccaucuaauugug

SEQ ID NO: 1256217 - RNA, 19 nt, Artificial Sequence
  Description of Artificial Sequence: Synthetic oligonucleotide
uccugaagugagauuuuca

SEQ ID NO: 1256218 - RNA, 19 nt, Artificial Sequence
  Description of Artificial Sequence: Synthetic oligonucleotide
ucuaccucccuuccauucu

SEQ ID NO: 1256219 - RNA, 19 nt, Artificial Sequence
  Description of Artificial Sequence: Synthetic oligonucleotide
uuagcggguuguuaaccgc

SEQ ID NO: 1256220 - RNA, 19 nt, Artificial Sequence
  Description of Artificial Sequence: Synthetic oligonucleotide
auaaaaccggggaaugguc

SEQ ID NO: 1256221 - RNA, 19 nt, Artificial Sequence
  Description of Artificial Sequence: Synthetic oligonucleotide
uggcaaagacuuuugcagu

SEQ ID NO: 1256222 - RNA, 19 nt, Artificial Sequence
  Description of Artificial Sequence: Synthetic oligonucleotide
guaagacuucaucuucugc

SEQ ID NO: 1256223 - RNA, 19 nt, Artificial Sequence
  Description of Artificial Sequence: Synthetic oligonucleotide
uguuuucuaaggcgagaac

SEQ ID NO: 1256224 - RNA, 19 nt, Artificial Sequence
  Description of Artificial Sequence: Synthetic oligonucleotide
aucuuuaugaaggcagucu

SEQ ID NO: 1256225 - RNA, 19 nt, Artificial Sequence
  Description of Artificial Sequence: Synthetic oligonucleotide
ucuaagucugauucccgaa

SEQ ID NO: 1256226 - RNA, 19 nt, Artificial Sequence
  Description of Artificial Sequence: Synthetic oligonucleotide
ugaguccaauucuugucug

SEQ ID NO: 1256227 - RNA, 19 nt, Artificial Sequence
  Description of Artificial Sequence: Synthetic oligonucleotide
aaaauguacugcagagcug

SEQ ID NO: 1256228 - RNA, 19 nt, Artificial Sequence
  Description of Artificial Sequence: Synthetic oligonucleotide
uuggucuuauuacuuugaa

SEQ ID NO: 1256229 - RNA, 19 nt, Artificial Sequence
  Description of Artificial Sequence: Synthetic oligonucleotide
aauacugaccauagacccu

SEQ ID NO: 1256230 - RNA, 19 nt, Artificial Sequence
  Description of Artificial Sequence: Synthetic oligonucleotide
uguggcaaaguagggauaa

SEQ ID NO: 1256231 - RNA, 19 nt, Artificial Sequence
  Description of Artificial Sequence: Synthetic oligonucleotide
gagagcucacgugucaucc

SEQ ID NO: 1256232 - RNA, 19 nt, Artificial Sequence
  Description of Artificial Sequence: Synthetic oligonucleotide
cuaguaaggcagauaucug

SEQ ID NO: 1256233 - RNA, 19 nt, Artificial Sequence
  Description of Artificial Sequence: Synthetic oligonucleotide
aggauccugcaucaaaggu

SEQ ID NO: 1256234 - RNA, 19 nt, Artificial Sequence
  Description of Artificial Sequence: Synthetic oligonucleotide
cauaagugagacacuccug

SEQ ID NO: 1256235 - RNA, 19 nt, Artificial Sequence
  Description of Artificial Sequence: Synthetic oligonucleotide
ucuguucucauaaguccaa

SEQ ID NO: 1256236 - RNA, 19 nt, Artificial Sequence
  Description of Artificial Sequence: Synthetic oligonucleotide
uggucuuauagaauucauu

SEQ ID NO: 1256237 - RNA, 19 nt, Artificial Sequence
  Description of Artificial Sequence: Synthetic oligonucleotide
ggcaaccuguaauaaaacc

SEQ ID NO: 1256238 - RNA, 19 nt, Artificial Sequence
  Description of Artificial Sequence: Synthetic oligonucleotide
uuucuguaguaagacuuca

SEQ ID NO: 1256239 - RNA, 19 nt, Artificial Sequence
  Description of Artificial Sequence: Synthetic oligonucleotide
aagaaauaauuaagggaaa

SEQ ID NO: 1256240 - RNA, 19 nt, Artificial Sequence
  Description of Artificial Sequence: Synthetic oligonucleotide
cucauaaguccaaaagcca

SEQ ID NO: 1256241 - RNA, 19 nt, Artificial Sequence
  Description of Artificial Sequence: Synthetic oligonucleotide
gaccauagacccucagggc

SEQ ID NO: 1256242 - RNA, 19 nt, Artificial Sequence
  Description of Artificial Sequence: Synthetic oligonucleotide
ucuccgucauaagugagac

SEQ ID NO: 1256243 - RNA, 19 nt, Artificial Sequence
  Description of Artificial Sequence: Synthetic oligonucleotide
cuaaggcgagaacaaaguc

SEQ ID NO: 1256244 - RNA, 19 nt, Artificial Sequence
  Description of Artificial Sequence: Synthetic oligonucleotide
cugaguaauauuugguaaa

SEQ ID NO: 1256245 - RNA, 19 nt, Artificial Sequence
  Description of Artificial Sequence: Synthetic oligonucleotide
aucaagauucaaauacuga

SEQ ID NO: 1256246 - RNA, 19 nt, Artificial Sequence
  Description of Artificial Sequence: Synthetic oligonucleotide
gagcucacgugucauccag

SEQ ID NO: 1256247 - RNA, 19 nt, Artificial Sequence
  Description of Artificial Sequence: Synthetic oligonucleotide
agcacgucuuuccagucca

SEQ ID NO: 1256248 - RNA, 19 nt, Artificial Sequence
  Description of Artificial Sequence: Synthetic oligonucleotide
uuagcuccaauaagucauc

SEQ ID NO: 1256249 - RNA, 19 nt, Artificial Sequence
  Description of Artificial Sequence: Synthetic oligonucleotide
uguucuuagaggguccaaa

SEQ ID NO: 1256250 - RNA, 19 nt, Artificial Sequence
  Description of Artificial Sequence: Synthetic oligonucleotide
uccucucuuaauuucugua

SEQ ID NO: 1256251 - RNA, 19 nt, Artificial Sequence
  Description of Artificial Sequence: Synthetic oligonucleotide
gucugauucccgaagguac

SEQ ID NO: 1256252 - RNA, 19 nt, Artificial Sequence
  Description of Artificial Sequence: Synthetic oligonucleotide
cauuagcggguuguuaacc

SEQ ID NO: 1256253 - RNA, 19 nt, Artificial Sequence
  Description of Artificial Sequence: Synthetic oligonucleotide
uggcaaccuguaauaaaac

SEQ ID NO: 1256254 - RNA, 19 nt, Artificial Sequence
  Description of Artificial Sequence: Synthetic oligonucleotide
aguccaaaagccauucaga

SEQ ID NO: 1256255 - RNA, 19 nt, Artificial Sequence
  Description of Artificial Sequence: Synthetic oligonucleotide
uuccauaacgggagaguuc

SEQ ID NO: 1256256 - RNA, 19 nt, Artificial Sequence
  Description of Artificial Sequence: Synthetic oligonucleotide
ucuguuuucuaaggcgaga

SEQ ID NO: 1256257 - RNA, 19 nt, Artificial Sequence
  Description of Artificial Sequence: Synthetic oligonucleotide
uucuaccucccuuccauuc

SEQ ID NO: 1256258 - RNA, 19 nt, Artificial Sequence
  Description of Artificial Sequence: Synthetic oligonucleotide
aagacagcucuagauuccu

SEQ ID NO: 1256259 - RNA, 19 nt, Artificial Sequence
  Description of Artificial Sequence: Synthetic oligonucleotide
uucaggcuucaucuuuaug

SEQ ID NO: 1256260 - RNA, 19 nt, Artificial Sequence
  Description of Artificial Sequence: Synthetic oligonucleotide
uaaguuccaguauguaguu

SEQ ID NO: 1256261 - RNA, 19 nt, Artificial Sequence
  Description of Artificial Sequence: Synthetic oligonucleotide
cucuguucucauaagucca

SEQ ID NO: 1256262 - RNA, 19 nt, Artificial Sequence
  Description of Artificial Sequence: Synthetic oligonucleotide
uugugaucuuuaucaagau

SEQ ID NO: 1256263 - RNA, 19 nt, Artificial Sequence
  Description of Artificial Sequence: Synthetic oligonucleotide
uucuguaguaagacuucau

SEQ ID NO: 1256264 - RNA, 19 nt, Artificial Sequence
  Description of Artificial Sequence: Synthetic oligonucleotide
ucuuuggauccguguuggg

SEQ ID NO: 1256265 - RNA, 19 nt, Artificial Sequence
  Description of Artificial Sequence: Synthetic oligonucleotide
gucaaagauuucauccuug

SEQ ID NO: 1256266 - RNA, 19 nt, Artificial Sequence
  Description of Artificial Sequence: Synthetic oligonucleotide
caugccaaaauaucuugaa

SEQ ID NO: 1256267 - RNA, 19 nt, Artificial Sequence
  Description of Artificial Sequence: Synthetic oligonucleotide
ccucucuuaauuucuguag

SEQ ID NO: 1256268 - RNA, 19 nt, Artificial Sequence
  Description of Artificial Sequence: Synthetic oligonucleotide
gauggaaauucucccauau

SEQ ID NO: 1256269 - RNA, 19 nt, Artificial Sequence
  Description of Artificial Sequence: Synthetic oligonucleotide
agccaaacuuuucgcauga

SEQ ID NO: 1256270 - RNA, 19 nt, Artificial Sequence
  Description of Artificial Sequence: Synthetic oligonucleotide
uagcggguuguuaaccgcu

SEQ ID NO: 1256271 - RNA, 19 nt, Artificial Sequence
  Description of Artificial Sequence: Synthetic oligonucleotide
uuaugaaggcagucugguc

SEQ ID NO: 1256272 - RNA, 19 nt, Artificial Sequence
  Description of Artificial Sequence: Synthetic oligonucleotide
aaacccggucuaagaagac

SEQ ID NO: 1256273 - RNA, 19 nt, Artificial Sequence
  Description of Artificial Sequence: Synthetic oligonucleotide
cauaacgggagaguucuuc

SEQ ID NO: 1256274 - RNA, 19 nt, Artificial Sequence
  Description of Artificial Sequence: Synthetic oligonucleotide
auuaaauccugaagugaga

SEQ ID NO: 1256275 - RNA, 19 nt, Artificial Sequence
  Description of Artificial Sequence: Synthetic oligonucleotide
agauuuucaaaggauccuu

SEQ ID NO: 1256276 - RNA, 19 nt, Artificial Sequence
  Description of Artificial Sequence: Synthetic oligonucleotide
ggucuuauagaauucauuu

SEQ ID NO: 1256277 - RNA, 19 nt, Artificial Sequence
  Description of Artificial Sequence: Synthetic oligonucleotide
cuuacugagcaugccguug

SEQ ID NO: 1256278 - RNA, 19 nt, Artificial Sequence
  Description of Artificial Sequence: Synthetic oligonucleotide
ggcgagaacaaaguccagg

SEQ ID NO: 1256279 - RNA, 19 nt, Artificial Sequence
  Description of Artificial Sequence: Synthetic oligonucleotide
agauucaaauacugaccau

SEQ ID NO: 1256280 - RNA, 19 nt, Artificial Sequence
  Description of Artificial Sequence: Synthetic oligonucleotide
gguuguuaaccgcuccucc

SEQ ID NO: 1256281 - RNA, 19 nt, Artificial Sequence
  Description of Artificial Sequence: Synthetic oligonucleotide
uuucuaaggcgagaacaaa

SEQ ID NO: 1256282 - RNA, 19 nt, Artificial Sequence
  Description of Artificial Sequence: Synthetic oligonucleotide
aacccggucuaagaagaca

SEQ ID NO: 1256283 - RNA, 19 nt, Artificial Sequence
  Description of Artificial Sequence: Synthetic oligonucleotide
guucuuagaggguccaaaa

SEQ ID NO: 1256284 - RNA, 19 nt, Artificial Sequence
  Description of Artificial Sequence: Synthetic oligonucleotide
uugcuugcacuuuggucca

SEQ ID NO: 1256285 - RNA, 19 nt, Artificial Sequence
  Description of Artificial Sequence: Synthetic oligonucleotide
cucguaauugaucauugcu

SEQ ID NO: 1256286 - RNA, 19 nt, Artificial Sequence
  Description of Artificial Sequence: Synthetic oligonucleotide
gugccaaguuuuauuuagg

SEQ ID NO: 1256287 - RNA, 19 nt, Artificial Sequence
  Description of Artificial Sequence: Synthetic oligonucleotide
ccuguaauaaaaccgggga

SEQ ID NO: 1256288 - RNA, 19 nt, Artificial Sequence
  Description of Artificial Sequence: Synthetic oligonucleotide
ugauggaaauucucccaua

SEQ ID NO: 1256289 - RNA, 19 nt, Artificial Sequence
  Description of Artificial Sequence: Synthetic oligonucleotide
gucauaagugagacacucc

SEQ ID NO: 1256290 - RNA, 19 nt, Artificial Sequence
  Description of Artificial Sequence: Synthetic oligonucleotide
guccaauucuugucugaug

SEQ ID NO: 1256291 - RNA, 19 nt, Artificial Sequence
  Description of Artificial Sequence: Synthetic oligonucleotide
uguguuguacaggcaugug

SEQ ID NO: 1256292 - RNA, 19 nt, Artificial Sequence
  Description of Artificial Sequence: Synthetic oligonucleotide
cuguugauuaaauccugaa

SEQ ID NO: 1256293 - RNA, 19 nt, Artificial Sequence
  Description of Artificial Sequence: Synthetic oligonucleotide
auccguguugggcgacgcc

SEQ ID NO: 1256294 - RNA, 19 nt, Artificial Sequence
  Description of Artificial Sequence: Synthetic oligonucleotide
guugggcgacgccaaacgc

SEQ ID NO: 1256295 - RNA, 19 nt, Artificial Sequence
  Description of Artificial Sequence: Synthetic oligonucleotide
gaguccaauucuugucuga

SEQ ID NO: 1256296 - RNA, 19 nt, Artificial Sequence
  Description of Artificial Sequence: Synthetic oligonucleotide
caaacgccggcggagcacg

SEQ ID NO: 1256297 - RNA, 19 nt, Artificial Sequence
  Description of Artificial Sequence: Synthetic oligonucleotide
ucaugguugcuguuccaua

SEQ ID NO: 1256298 - RNA, 19 nt, Artificial Sequence
  Description of Artificial Sequence: Synthetic oligonucleotide
uuguacaggcaugugccaa

SEQ ID NO: 1256299 - RNA, 19 nt, Artificial Sequence
  Description of Artificial Sequence: Synthetic oligonucleotide
ugccguugugaucuuuauc

SEQ ID NO: 1256300 - RNA, 19 nt, Artificial Sequence
  Description of Artificial Sequence: Synthetic oligonucleotide
ggaaaacccggucuaagaa

SEQ ID NO: 1256301 - RNA, 19 nt, Artificial Sequence
  Description of Artificial Sequence: Synthetic oligonucleotide
uucgcaugacauaguugaa

SEQ ID NO: 1256302 - RNA, 19 nt, Artificial Sequence
  Description of Artificial Sequence: Synthetic oligonucleotide
uuggauccguguugggcga

SEQ ID NO: 1256303 - RNA, 19 nt, Artificial Sequence
  Description of Artificial Sequence: Synthetic oligonucleotide
agaacucuaguaaggcaga

SEQ ID NO: 1256304 - RNA, 19 nt, Artificial Sequence
  Description of Artificial Sequence: Synthetic oligonucleotide
uagacccucagggcggaag

SEQ ID NO: 1256305 - RNA, 19 nt, Artificial Sequence
  Description of Artificial Sequence: Synthetic oligonucleotide
aacucuaguaaggcagaua

SEQ ID NO: 1256306 - RNA, 19 nt, Artificial Sequence
  Description of Artificial Sequence: Synthetic oligonucleotide
auaguccauuucuccguca

SEQ ID NO: 1256307 - RNA, 19 nt, Artificial Sequence
  Description of Artificial Sequence: Synthetic oligonucleotide
agcucuagauuccucucuu

SEQ ID NO: 1256308 - RNA, 19 nt, Artificial Sequence
  Description of Artificial Sequence: Synthetic oligonucleotide
guuggucuuauuacuuuga

SEQ ID NO: 1256309 - RNA, 19 nt, Artificial Sequence
  Description of Artificial Sequence: Synthetic oligonucleotide
uacugagcaugccguugug

SEQ ID NO: 1256310 - RNA, 19 nt, Artificial Sequence
  Description of Artificial Sequence: Synthetic oligonucleotide
cugauucccgaagguaccc

SEQ ID NO: 1256311 - RNA, 19 nt, Artificial Sequence
  Description of Artificial Sequence: Synthetic oligonucleotide
cucuaguaaggcagauauc

SEQ ID NO: 1256312 - RNA, 19 nt, Artificial Sequence
  Description of Artificial Sequence: Synthetic oligonucleotide
acccaucuaauuguggcaa

SEQ ID NO: 1256313 - RNA, 19 nt, Artificial Sequence
  Description of Artificial Sequence: Synthetic oligonucleotide
cccauaugaaucuguauga

SEQ ID NO: 1256314 - RNA, 19 nt, Artificial Sequence
  Description of Artificial Sequence: Synthetic oligonucleotide
agagcucacgugucaucca

SEQ ID NO: 1256315 - RNA, 19 nt, Artificial Sequence
  Description of Artificial Sequence: Synthetic oligonucleotide
gucugacccuggcucagag

SEQ ID NO: 1256316 - RNA, 19 nt, Artificial Sequence
  Description of Artificial Sequence: Synthetic oligonucleotide
gauccugcaucaaagguuu

SEQ ID NO: 1256317 - RNA, 19 nt, Artificial Sequence
  Description of Artificial Sequence: Synthetic oligonucleotide
gaaucuguaugaaggaguu

SEQ ID NO: 1256318 - RNA, 19 nt, Artificial Sequence
  Description of Artificial Sequence: Synthetic oligonucleotide
auaagucaucuaggaagcu

SEQ ID NO: 1256319 - RNA, 19 nt, Artificial Sequence
  Description of Artificial Sequence: Synthetic oligonucleotide
ccggggaauggucuuauag

SEQ ID NO: 1256320 - RNA, 19 nt, Artificial Sequence
  Description of Artificial Sequence: Synthetic oligonucleotide
cugaguccaauucuugucu

SEQ ID NO: 1256321 - RNA, 19 nt, Artificial Sequence
  Description of Artificial Sequence: Synthetic oligonucleotide
agucugauucccgaaggua

SEQ ID NO: 1256322 - RNA, 19 nt, Artificial Sequence
  Description of Artificial Sequence: Synthetic oligonucleotide
cauucaggcuucaucuuua

SEQ ID NO: 1256323 - RNA, 19 nt, Artificial Sequence
  Description of Artificial Sequence: Synthetic oligonucleotide
agcuccaauaagucaucua

SEQ ID NO: 1256324 - RNA, 19 nt, Artificial Sequence
  Description of Artificial Sequence: Synthetic oligonucleotide
ccugaagugagauuuucaa

SEQ ID NO: 1256325 - RNA, 19 nt, Artificial Sequence
  Description of Artificial Sequence: Synthetic oligonucleotide
ugauucccgaagguacccu

SEQ ID NO: 1256326 - RNA, 19 nt, Artificial Sequence
  Description of Artificial Sequence: Synthetic oligonucleotide
ggaaggagcagaaaaccaa

SEQ ID NO: 1256327 - RNA, 19 nt, Artificial Sequence
  Description of Artificial Sequence: Synthetic oligonucleotide
ccaacccaucuaauugugg

SEQ ID NO: 1256328 - RNA, 19 nt, Artificial Sequence
  Description of Artificial Sequence: Synthetic oligonucleotide
ucagggcggaaggagcaga

SEQ ID NO: 1256329 - RNA, 19 nt, Artificial Sequence
  Description of Artificial Sequence: Synthetic oligonucleotide
cguugugaucuuuaucaag

SEQ ID NO: 1256330 - RNA, 19 nt, Artificial Sequence
  Description of Artificial Sequence: Synthetic oligonucleotide
gcuucucuguucucauaag

SEQ ID NO: 1256331 - RNA, 19 nt, Artificial Sequence
  Description of Artificial Sequence: Synthetic oligonucleotide
acgggagaguucuuccuua

SEQ ID NO: 1256332 - RNA, 19 nt, Artificial Sequence
  Description of Artificial Sequence: Synthetic oligonucleotide
auggucuuauagaauucau

SEQ ID NO: 1256333 - RNA, 19 nt, Artificial Sequence
  Description of Artificial Sequence: Synthetic oligonucleotide
cacgugucauccagaucug

SEQ ID NO: 1256334 - RNA, 19 nt, Artificial Sequence
  Description of Artificial Sequence: Synthetic oligonucleotide
gacgccaaacgccggcgga

SEQ ID NO: 1256335 - RNA, 19 nt, Artificial Sequence
  Description of Artificial Sequence: Synthetic oligonucleotide
agcggguuguuaaccgcuc

SEQ ID NO: 1256336 - RNA, 19 nt, Artificial Sequence
  Description of Artificial Sequence: Synthetic oligonucleotide
augccguugugaucuuuau

SEQ ID NO: 1256337 - RNA, 19 nt, Artificial Sequence
  Description of Artificial Sequence: Synthetic oligonucleotide
cuuuucgcaugacauaguu

SEQ ID NO: 1256338 - RNA, 19 nt, Artificial Sequence
  Description of Artificial Sequence: Synthetic oligonucleotide
aaaccggggaauggucuua

SEQ ID NO: 1256339 - RNA, 19 nt, Artificial Sequence
  Description of Artificial Sequence: Synthetic oligonucleotide
ccggucuaagaagacauug

SEQ ID NO: 1256340 - RNA, 19 nt, Artificial Sequence
  Description of Artificial Sequence: Synthetic oligonucleotide
ccaaacuuuucgcaugaca

SEQ ID NO: 1256341 - RNA, 19 nt, Artificial Sequence
  Description of Artificial Sequence: Synthetic oligonucleotide
ccaucuaauuguggcaaag

SEQ ID NO: 1256342 - RNA, 19 nt, Artificial Sequence
  Description of Artificial Sequence: Synthetic oligonucleotide
auggcccuaaagaaauaau

SEQ ID NO: 1256343 - RNA, 19 nt, Artificial Sequence
  Description of Artificial Sequence: Synthetic oligonucleotide
aaccggggaauggucuuau

SEQ ID NO: 1256344 - RNA, 19 nt, Artificial Sequence
  Description of Artificial Sequence: Synthetic oligonucleotide
cucacgugucauccagauc

SEQ ID NO: 1256345 - RNA, 19 nt, Artificial Sequence
  Description of Artificial Sequence: Synthetic oligonucleotide
acuuuucgcaugacauagu

SEQ ID NO: 1256346 - RNA, 19 nt, Artificial Sequence
  Description of Artificial Sequence: Synthetic oligonucleotide
gcgagaacaaaguccaggu

SEQ ID NO: 1256347 - RNA, 19 nt, Artificial Sequence
  Description of Artificial Sequence: Synthetic oligonucleotide
acgccaaacgccggcggag

SEQ ID NO: 1256348 - RNA, 19 nt, Artificial Sequence
  Description of Artificial Sequence: Synthetic oligonucleotide
gggcggaaggagcagaaaa

SEQ ID NO: 1256349 - RNA, 19 nt, Artificial Sequence
  Description of Artificial Sequence: Synthetic oligonucleotide
cugagcaugccguugugau

SEQ ID NO: 1256350 - RNA, 19 nt, Artificial Sequence
  Description of Artificial Sequence: Synthetic oligonucleotide
gggaaaagacauucagaua

SEQ ID NO: 1256351 - RNA, 19 nt, Artificial Sequence
  Description of Artificial Sequence: Synthetic oligonucleotide
ucccuuccauucugaguaa

SEQ ID NO: 1256352 - RNA, 19 nt, Artificial Sequence
  Description of Artificial Sequence: Synthetic oligonucleotide
cacaggugguaucuggugu

SEQ ID NO: 1256353 - RNA, 19 nt, Artificial Sequence
  Description of Artificial Sequence: Synthetic oligonucleotide
cgucauaagugagacacuc

SEQ ID NO: 1256354 - RNA, 19 nt, Artificial Sequence
  Description of Artificial Sequence: Synthetic oligonucleotide
gcuguguuguacaggcaug

SEQ ID NO: 1256355 - RNA, 19 nt, Artificial Sequence
  Description of Artificial Sequence: Synthetic oligonucleotide
ccaauaagucaucuaggaa

SEQ ID NO: 1256356 - RNA, 19 nt, Artificial Sequence
  Description of Artificial Sequence: Synthetic oligonucleotide
gcuggcaaccuguaauaaa

SEQ ID NO: 1256357 - RNA, 19 nt, Artificial Sequence
  Description of Artificial Sequence: Synthetic oligonucleotide
guguugggcgacgccaaac

SEQ ID NO: 1256358 - RNA, 19 nt, Artificial Sequence
  Description of Artificial Sequence: Synthetic oligonucleotide
ggcagucuggucucugaga

SEQ ID NO: 1256359 - RNA, 19 nt, Artificial Sequence
  Description of Artificial Sequence: Synthetic oligonucleotide
ccgaagguacccuugccca

SEQ ID NO: 1256360 - RNA, 19 nt, Artificial Sequence
  Description of Artificial Sequence: Synthetic oligonucleotide
cugcaugccaaaauaucuu

SEQ ID NO: 1256361 - RNA, 19 nt, Artificial Sequence
  Description of Artificial Sequence: Synthetic oligonucleotide
guuccauaacgggagaguu

SEQ ID NO: 1256362 - RNA, 19 nt, Artificial Sequence
  Description of Artificial Sequence: Synthetic oligonucleotide
cccuguucuuagagggucc

SEQ ID NO: 1256363 - RNA, 19 nt, Artificial Sequence
  Description of Artificial Sequence: Synthetic oligonucleotide
gcggagcacgucuuuccag

SEQ ID NO: 1256364 - RNA, 19 nt, Artificial Sequence
  Description of Artificial Sequence: Synthetic oligonucleotide
ggcgacgccaaacgccggc

SEQ ID NO: 1256365 - RNA, 19 nt, Artificial Sequence
  Description of Artificial Sequence: Synthetic oligonucleotide
cuugucugaugcagccaaa

SEQ ID NO: 1256366 - RNA, 19 nt, Artificial Sequence
  Description of Artificial Sequence: Synthetic oligonucleotide
acccuacauuagcggguug

SEQ ID NO: 1256367 - RNA, 19 nt, Artificial Sequence
  Description of Artificial Sequence: Synthetic oligonucleotide
cuacauuagcggguuguua

SEQ ID NO: 1256368 - RNA, 19 nt, Artificial Sequence
  Description of Artificial Sequence: Synthetic oligonucleotide
cauuugcaacaagggcuuc

SEQ ID NO: 1256369 - RNA, 19 nt, Artificial Sequence
  Description of Artificial Sequence: Synthetic oligonucleotide
gcggguuguuaaccgcucc

SEQ ID NO: 1256370 - RNA, 19 nt, Artificial Sequence
  Description of Artificial Sequence: Synthetic oligonucleotide
gauaucccuuguucucaau

SEQ ID NO: 1256371 - RNA, 19 nt, Artificial Sequence
  Description of Artificial Sequence: Synthetic oligonucleotide
ugcuugcacuuugguccag

SEQ ID NO: 1256372 - RNA, 19 nt, Artificial Sequence
  Description of Artificial Sequence: Synthetic oligonucleotide
cuguguuguacaggcaugu

SEQ ID NO: 1256373 - RNA, 19 nt, Artificial Sequence
  Description of Artificial Sequence: Synthetic oligonucleotide
ggauccguguugggcgacg

SEQ ID NO: 1256374 - RNA, 19 nt, Artificial Sequence
  Description of Artificial Sequence: Synthetic oligonucleotide
ggguuguuaaccgcuccuc

SEQ ID NO: 1256375 - RNA, 19 nt, Artificial Sequence
  Description of Artificial Sequence: Synthetic oligonucleotide
ggauaaguuccaguaugua

SEQ ID NO: 1256376 - RNA, 19 nt, Artificial Sequence
  Description of Artificial Sequence: Synthetic oligonucleotide
ccauuucuccgucauaagu

SEQ ID NO: 1256377 - RNA, 19 nt, Artificial Sequence
  Description of Artificial Sequence: Synthetic oligonucleotide
cuccgucauaagugagaca

SEQ ID NO: 1256378 - RNA, 19 nt, Artificial Sequence
  Description of Artificial Sequence: Synthetic oligonucleotide
agcucacgugucauccaga

SEQ ID NO: 1256379 - RNA, 19 nt, Artificial Sequence
  Description of Artificial Sequence: Synthetic oligonucleotide
gaacucuaguaaggcagau

SEQ ID NO: 1256380 - RNA, 19 nt, Artificial Sequence
  Description of Artificial Sequence: Synthetic oligonucleotide
cucccauaugaaucuguau

SEQ ID NO: 1256381 - RNA, 19 nt, Artificial Sequence
  Description of Artificial Sequence: Synthetic oligonucleotide
uggauccguguugggcgac

SEQ ID NO: 1256382 - RNA, 19 nt, Artificial Sequence
  Description of Artificial Sequence: Synthetic oligonucleotide
ggcggagcacgucuuucca

SEQ ID NO: 1256383 - RNA, 19 nt, Artificial Sequence
  Description of Artificial Sequence: Synthetic oligonucleotide
gcuugcacuuugguccagc

SEQ ID NO: 1256384 - RNA, 19 nt, Artificial Sequence
  Description of Artificial Sequence: Synthetic oligonucleotide
cagggcggaaggagcagaa

SEQ ID NO: 1256385 - RNA, 19 nt, Artificial Sequence
  Description of Artificial Sequence: Synthetic oligonucleotide
ccugauugcuguugauuaa

SEQ ID NO: 1256386 - RNA, 19 nt, Artificial Sequence
  Description of Artificial Sequence: Synthetic oligonucleotide
ccauaugaaucuguaugaa

SEQ ID NO: 1256387 - RNA, 19 nt, Artificial Sequence
  Description of Artificial Sequence: Synthetic oligonucleotide
gcgacgccaaacgccggcg

SEQ ID NO: 1256388 - RNA, 19 nt, Artificial Sequence
  Description of Artificial Sequence: Synthetic oligonucleotide
gcauucaggcuucaucuuu

SEQ ID NO: 1256389 - RNA, 19 nt, Artificial Sequence
  Description of Artificial Sequence: Synthetic oligonucleotide
gauccuguccauggauuuu

SEQ ID NO: 1256390 - RNA, 19 nt, Artificial Sequence
  Description of Artificial Sequence: Synthetic oligonucleotide
caggauccuguccauggau

SEQ ID NO: 1256391 - RNA, 19 nt, Artificial Sequence
  Description of Artificial Sequence: Synthetic oligonucleotide
gacccuacauuagcggguu

SEQ ID NO: 1256392 - RNA, 19 nt, Artificial Sequence
  Description of Artificial Sequence: Synthetic oligonucleotide
guacaggcaugugccaagu

SEQ ID NO: 1256393 - RNA, 19 nt, Artificial Sequence
  Description of Artificial Sequence: Synthetic oligonucleotide
auccugcaucaaagguuug

SEQ ID NO: 1256394 - RNA, 19 nt, Artificial Sequence
  Description of Artificial Sequence: Synthetic oligonucleotide
gcucacgugucauccagau

SEQ ID NO: 1256395 - RNA, 19 nt, Artificial Sequence
  Description of Artificial Sequence: Synthetic oligonucleotide
aaacgccggcggagcacgu

SEQ ID NO: 1256396 - RNA, 19 nt, Artificial Sequence
  Description of Artificial Sequence: Synthetic oligonucleotide
gcucuagauuccucucuua

SEQ ID NO: 1256397 - RNA, 19 nt, Artificial Sequence
  Description of Artificial Sequence: Synthetic oligonucleotide
cugcaaccagaacucuagu

SEQ ID NO: 1256398 - RNA, 19 nt, Artificial Sequence
  Description of Artificial Sequence: Synthetic oligonucleotide
cuccaaucacaggugguau

SEQ ID NO: 1256399 - RNA, 19 nt, Artificial Sequence
  Description of Artificial Sequence: Synthetic oligonucleotide
agcaugccguugugaucuu

SEQ ID NO: 1256400 - RNA, 19 nt, Artificial Sequence
  Description of Artificial Sequence: Synthetic oligonucleotide
ggacccuacauuagcgggu

SEQ ID NO: 1256401 - RNA, 19 nt, Artificial Sequence
  Description of Artificial Sequence: Synthetic oligonucleotide
cggcggagcacgucuuucc

SEQ ID NO: 1256402 - RNA, 19 nt, Artificial Sequence
  Description of Artificial Sequence: Synthetic oligonucleotide
gggaauggucuuauagaau

SEQ ID NO: 1256403 - RNA, 19 nt, Artificial Sequence
  Description of Artificial Sequence: Synthetic oligonucleotide
ccguugugaucuuuaucaa

SEQ ID NO: 1256404 - RNA, 19 nt, Artificial Sequence
  Description of Artificial Sequence: Synthetic oligonucleotide
ccaaacgccggcggagcac

SEQ ID NO: 1256405 - RNA, 19 nt, Artificial Sequence
  Description of Artificial Sequence: Synthetic oligonucleotide
ggcagauaucugcuguguu

SEQ ID NO: 1256406 - RNA, 19 nt, Artificial Sequence
  Description of Artificial Sequence: Synthetic oligonucleotide
gccaaacgccggcggagca

SEQ ID NO: 1256407 - RNA, 19 nt, Artificial Sequence
  Description of Artificial Sequence: Synthetic oligonucleotide
gccaaacuuuucgcaugac

SEQ ID NO: 1256408 - RNA, 19 nt, Artificial Sequence
  Description of Artificial Sequence: Synthetic oligonucleotide
cgacgccaaacgccggcgg

SEQ ID NO: 1256409 - RNA, 19 nt, Artificial Sequence
  Description of Artificial Sequence: Synthetic oligonucleotide
cccaucuaauuguggcaaa

SEQ ID NO: 1256410 - RNA, 19 nt, Artificial Sequence
  Description of Artificial Sequence: Synthetic oligonucleotide
ggcaugugccaaguuuuau

SEQ ID NO: 1256411 - RNA, 19 nt, Artificial Sequence
  Description of Artificial Sequence: Synthetic oligonucleotide
cccuacauuagcggguugu

SEQ ID NO: 1256412 - RNA, 19 nt, Artificial Sequence
  Description of Artificial Sequence: Synthetic oligonucleotide
ccuggaaaacccggucuaa

SEQ ID NO: 1256413 - RNA, 19 nt, Artificial Sequence
  Description of Artificial Sequence: Synthetic oligonucleotide
gggcgacgccaaacgccgg

SEQ ID NO: 1256414 - RNA, 19 nt, Artificial Sequence
  Description of Artificial Sequence: Synthetic oligonucleotide
cgccaaacgccggcggagc

SEQ ID NO: 1256415 - RNA, 19 nt, Artificial Sequence
  Description of Artificial Sequence: Synthetic oligonucleotide
ccguguugggcgacgccaa

SEQ ID NO: 1256416 - RNA, 19 nt, Artificial Sequence
  Description of Artificial Sequence: Synthetic oligonucleotide
ccggcggagcacgucuuuc

SEQ ID NO: 1256417 - RNA, 19 nt, Artificial Sequence
  Description of Artificial Sequence: Synthetic oligonucleotide
ccgucauaagugagacacu

SEQ ID NO: 1256418 - RNA, 19 nt, Artificial Sequence
  Description of Artificial Sequence: Synthetic oligonucleotide
ccuacauuagcggguuguu

SEQ ID NO: 1256419 - RNA, 19 nt, Artificial Sequence
  Description of Artificial Sequence: Synthetic oligonucleotide
cguguugggcgacgccaaa

SEQ ID NO: 1256420 - RNA, 19 nt, Artificial Sequence
  Description of Artificial Sequence: Synthetic oligonucleotide
cccggucuaagaagacauu

SEQ ID NO: 1256421 - RNA, 19 nt, Artificial Sequence
  Description of Artificial Sequence: Synthetic oligonucleotide
gcaugccguugugaucuuu

SEQ ID NO: 1256422 - RNA, 19 nt, Artificial Sequence
  Description of Artificial Sequence: Synthetic oligonucleotide
ccauaacgggagaguucuu

SEQ ID NO: 1256423 - RNA, 19 nt, Artificial Sequence
  Description of Artificial Sequence: Synthetic oligonucleotide
gccggcggagcacgucuuu

SEQ ID NO: 1256424 - RNA, 19 nt, Artificial Sequence
  Description of Artificial Sequence: Synthetic oligonucleotide
cgccggcggagcacgucuu

SEQ ID NO: 1256425 - RNA, 19 nt, Artificial Sequence
  Description of Artificial Sequence: Synthetic oligonucleotide
aaucuuacagauuaaaugc

SEQ ID NO: 1256426 - RNA, 19 nt, Artificial Sequence
  Description of Artificial Sequence: Synthetic oligonucleotide
aauauuguagcauugcuga

SEQ ID NO: 1256427 - RNA, 19 nt, Artificial Sequence
  Description of Artificial Sequence: Synthetic oligonucleotide
uuuaacaucacaauauucu

SEQ ID NO: 1256428 - RNA, 19 nt, Artificial Sequence
  Description of Artificial Sequence: Synthetic oligonucleotide
uuuauauccacgcaggugu

SEQ ID NO: 1256429 - RNA, 19 nt, Artificial Sequence
  Description of Artificial Sequence: Synthetic oligonucleotide
agauuaaaugcccacuucc

SEQ ID NO: 1256430 - RNA, 19 nt, Artificial Sequence
  Description of Artificial Sequence: Synthetic oligonucleotide
aauugaugcacacuugauc

SEQ ID NO: 1256431 - RNA, 19 nt, Artificial Sequence
  Description of Artificial Sequence: Synthetic oligonucleotide
auauagauguacuagauau

SEQ ID NO: 1256432 - RNA, 19 nt, Artificial Sequence
  Description of Artificial Sequence: Synthetic oligonucleotide
aagcauugcgcucacaggg

SEQ ID NO: 1256433 - RNA, 19 nt, Artificial Sequence
  Description of Artificial Sequence: Synthetic oligonucleotide
uacacuacagaacaguacc

SEQ ID NO: 1256434 - RNA, 19 nt, Artificial Sequence
  Description of Artificial Sequence: Synthetic oligonucleotide
aauaguuguggccuguauc

SEQ ID NO: 1256435 - RNA, 19 nt, Artificial Sequence
  Description of Artificial Sequence: Synthetic oligonucleotide
aguaaaaggauccuggugu

SEQ ID NO: 1256436 - RNA, 19 nt, Artificial Sequence
  Description of Artificial Sequence: Synthetic oligonucleotide
agaauguuggauuaauauc

SEQ ID NO: 1256437 - RNA, 19 nt, Artificial Sequence
  Description of Artificial Sequence: Synthetic oligonucleotide
aagaauguuggauuaauau

SEQ ID NO: 1256438 - RNA, 19 nt, Artificial Sequence
  Description of Artificial Sequence: Synthetic oligonucleotide
auuauugucaaucguaaca

SEQ ID NO: 1256439 - RNA, 19 nt, Artificial Sequence
  Description of Artificial Sequence: Synthetic oligonucleotide
acugucuggauauagaugu

SEQ ID NO: 1256440 - RNA, 19 nt, Artificial Sequence
  Description of Artificial Sequence: Synthetic oligonucleotide
uucguuuauauccacgcag

SEQ ID NO: 1256441 - RNA, 19 nt, Artificial Sequence
  Description of Artificial Sequence: Synthetic oligonucleotide
uucacaagcacaagcauug

SEQ ID NO: 1256442 - RNA, 19 nt, Artificial Sequence
  Description of Artificial Sequence: Synthetic oligonucleotide
uauugacacagguagcucg

SEQ ID NO: 1256443 - RNA, 19 nt, Artificial Sequence
  Description of Artificial Sequence: Synthetic oligonucleotide
aauccgaaaaguauuaaug

SEQ ID NO: 1256444 - RNA, 19 nt, Artificial Sequence
  Description of Artificial Sequence: Synthetic oligonucleotide
uuugcugccaacugaaacc

SEQ ID NO: 1256445 - RNA, 19 nt, Artificial Sequence
  Description of Artificial Sequence: Synthetic oligonucleotide
uuuggcuuauuuaaaugcc

SEQ ID NO: 1256446 - RNA, 19 nt, Artificial Sequence
  Description of Artificial Sequence: Synthetic oligonucleotide
uagcauuugacacugggca

SEQ ID NO: 1256447 - RNA, 19 nt, Artificial Sequence
  Description of Artificial Sequence: Synthetic oligonucleotide
uagacuauagacuggggcc

SEQ ID NO: 1256448 - RNA, 19 nt, Artificial Sequence
  Description of Artificial Sequence: Synthetic oligonucleotide
ucguuuauauccacgcagg

SEQ ID NO: 1256449 - RNA, 19 nt, Artificial Sequence
  Description of Artificial Sequence: Synthetic oligonucleotide
agaacaguaccauugcuug

SEQ ID NO: 1256450 - RNA, 19 nt, Artificial Sequence
  Description of Artificial Sequence: Synthetic oligonucleotide
gcuaaaaugaaaauggccc

SEQ ID NO: 1256451 - RNA, 19 nt, Artificial Sequence
  Description of Artificial Sequence: Synthetic oligonucleotide
uuggcauaaauaguugugg

SEQ ID NO: 1256452 - RNA, 19 nt, Artificial Sequence
  Description of Artificial Sequence: Synthetic oligonucleotide
uuggcauacguuaugcuca

SEQ ID NO: 1256453 - RNA, 19 nt, Artificial Sequence
  Description of Artificial Sequence: Synthetic oligonucleotide
gauguuagaacauagggau

SEQ ID NO: 1256454 - RNA, 19 nt, Artificial Sequence
  Description of Artificial Sequence: Synthetic oligonucleotide
cauucauugauauccuggc

SEQ ID NO: 1256455 - RNA, 19 nt, Artificial Sequence
  Description of Artificial Sequence: Synthetic oligonucleotide
auagcgacuucacaagcac

SEQ ID NO: 1256456 - RNA, 19 nt, Artificial Sequence
  Description of Artificial Sequence: Synthetic oligonucleotide
uggucaauccucaugagau

SEQ ID NO: 1256457 - RNA, 19 nt, Artificial Sequence
  Description of Artificial Sequence: Synthetic oligonucleotide
uuuaauccgaaaaguauua

SEQ ID NO: 1256458 - RNA, 19 nt, Artificial Sequence
  Description of Artificial Sequence: Synthetic oligonucleotide
ugucaaucguaacacggag

SEQ ID NO: 1256459 - RNA, 19 nt, Artificial Sequence
  Description of Artificial Sequence: Synthetic oligonucleotide
ugauaauuccagcacauuu

SEQ ID NO: 1256460 - RNA, 19 nt, Artificial Sequence
  Description of Artificial Sequence: Synthetic oligonucleotide
uguuggauuaauaucuaau

SEQ ID NO: 1256461 - RNA, 19 nt, Artificial Sequence
  Description of Artificial Sequence: Synthetic oligonucleotide
auugucaaucguaacacgg

SEQ ID NO: 1256462 - RNA, 19 nt, Artificial Sequence
  Description of Artificial Sequence: Synthetic oligonucleotide
uucucuguacacuacagaa

SEQ ID NO: 1256463 - RNA, 19 nt, Artificial Sequence
  Description of Artificial Sequence: Synthetic oligonucleotide
uggauauagauguacuaga

SEQ ID NO: 1256464 - RNA, 19 nt, Artificial Sequence
  Description of Artificial Sequence: Synthetic oligonucleotide
uguagcauugcugagcaca

SEQ ID NO: 1256465 - RNA, 19 nt, Artificial Sequence
  Description of Artificial Sequence: Synthetic oligonucleotide
aaugaaaauggccccacua

SEQ ID NO: 1256466 - RNA, 19 nt, Artificial Sequence
  Description of Artificial Sequence: Synthetic oligonucleotide
guagacuauagacuggggc

SEQ ID NO: 1256467 - RNA, 19 nt, Artificial Sequence
  Description of Artificial Sequence: Synthetic oligonucleotide
ugaaucuuacagauuaaau

SEQ ID NO: 1256468 - RNA, 19 nt, Artificial Sequence
  Description of Artificial Sequence: Synthetic oligonucleotide
aauggccccacuauuauug

SEQ ID NO: 1256469 - RNA, 19 nt, Artificial Sequence
  Description of Artificial Sequence: Synthetic oligonucleotide
uauugucaaucguaacacg

SEQ ID NO: 1256470 - RNA, 19 nt, Artificial Sequence
  Description of Artificial Sequence: Synthetic oligonucleotide
uguuaagauggucaauccu

SEQ ID NO: 1256471 - RNA, 19 nt, Artificial Sequence
  Description of Artificial Sequence: Synthetic oligonucleotide
uggguaacaacggaagccg

SEQ ID NO: 1256472 - RNA, 19 nt, Artificial Sequence
  Description of Artificial Sequence: Synthetic oligonucleotide
gaaugagccgagaauauug

SEQ ID NO: 1256473 - RNA, 19 nt, Artificial Sequence
  Description of Artificial Sequence: Synthetic oligonucleotide
agaauauuguagcauugcu

SEQ ID NO: 1256474 - RNA, 19 nt, Artificial Sequence
  Description of Artificial Sequence: Synthetic oligonucleotide
aauauggaggcacggugca

SEQ ID NO: 1256475 - RNA, 19 nt, Artificial Sequence
  Description of Artificial Sequence: Synthetic oligonucleotide
ugguggacucuuauaaaag

SEQ ID NO: 1256476 - RNA, 19 nt, Artificial Sequence
  Description of Artificial Sequence: Synthetic oligonucleotide
uacguuaugcucacucugc

SEQ ID NO: 1256477 - RNA, 19 nt, Artificial Sequence
  Description of Artificial Sequence: Synthetic oligonucleotide
uauuguagcauugcugagc

SEQ ID NO: 1256478 - RNA, 19 nt, Artificial Sequence
  Description of Artificial Sequence: Synthetic oligonucleotide
agacuauagacuggggccc

SEQ ID NO: 1256479 - RNA, 19 nt, Artificial Sequence
  Description of Artificial Sequence: Synthetic oligonucleotide
uguguucacgcaucuuugg

SEQ ID NO: 1256480 - RNA, 19 nt, Artificial Sequence
  Description of Artificial Sequence: Synthetic oligonucleotide
gagccgagaauauuguagc

SEQ ID NO: 1256481 - RNA, 19 nt, Artificial Sequence
  Description of Artificial Sequence: Synthetic oligonucleotide
auguacuagauauaucuau

SEQ ID NO: 1256482 - RNA, 19 nt, Artificial Sequence
  Description of Artificial Sequence: Synthetic oligonucleotide
uaugcuacugacugucagc

SEQ ID NO: 1256483 - RNA, 19 nt, Artificial Sequence
  Description of Artificial Sequence: Synthetic oligonucleotide
ugauauugacacagguagc

SEQ ID NO: 1256484 - RNA, 19 nt, Artificial Sequence
  Description of Artificial Sequence: Synthetic oligonucleotide
gcacagaccugucagaucg

SEQ ID NO: 1256485 - RNA, 19 nt, Artificial Sequence
  Description of Artificial Sequence: Synthetic oligonucleotide
cuggauauagauguacuag

SEQ ID NO: 1256486 - RNA, 19 nt, Artificial Sequence
  Description of Artificial Sequence: Synthetic oligonucleotide
uguuggcauaaauaguugu

SEQ ID NO: 1256487 - RNA, 19 nt, Artificial Sequence
  Description of Artificial Sequence: Synthetic oligonucleotide
caauauggaggcacggugc

SEQ ID NO: 1256488 - RNA, 19 nt, Artificial Sequence
  Description of Artificial Sequence: Synthetic oligonucleotide
aaaauggccccacuauuau

SEQ ID NO: 1256489 - RNA, 19 nt, Artificial Sequence
  Description of Artificial Sequence: Synthetic oligonucleotide
uacuagauauaucuauaaa

SEQ ID NO: 1256490 - RNA, 19 nt, Artificial Sequence
  Description of Artificial Sequence: Synthetic oligonucleotide
cauuucaucuucucggcac

SEQ ID NO: 1256491 - RNA, 19 nt, Artificial Sequence
  Description of Artificial Sequence: Synthetic oligonucleotide
cauuaguggucucacauuc

SEQ ID NO: 1256492 - RNA, 19 nt, Artificial Sequence
  Description of Artificial Sequence: Synthetic oligonucleotide
aguauuaaugguguuggca

SEQ ID NO: 1256493 - RNA, 19 nt, Artificial Sequence
  Description of Artificial Sequence: Synthetic oligonucleotide
ucguggguaacaacggaag

SEQ ID NO: 1256494 - RNA, 19 nt, Artificial Sequence
  Description of Artificial Sequence: Synthetic oligonucleotide
auagauguacuagauauau

SEQ ID NO: 1256495 - RNA, 19 nt, Artificial Sequence
  Description of Artificial Sequence: Synthetic oligonucleotide
aguuguggccuguaucugg

SEQ ID NO: 1256496 - RNA, 19 nt, Artificial Sequence
  Description of Artificial Sequence: Synthetic oligonucleotide
uuggcuuauuuaaaugccu

SEQ ID NO: 1256497 - RNA, 19 nt, Artificial Sequence
  Description of Artificial Sequence: Synthetic oligonucleotide
uugcacuggcaguaaaagg

SEQ ID NO: 1256498 - RNA, 19 nt, Artificial Sequence
  Description of Artificial Sequence: Synthetic oligonucleotide
uugucaaucguaacacgga

SEQ ID NO: 1256499 - RNA, 19 nt, Artificial Sequence
  Description of Artificial Sequence: Synthetic oligonucleotide
gucccuaugcuacugacug

SEQ ID NO: 1256500 - RNA, 19 nt, Artificial Sequence
  Description of Artificial Sequence: Synthetic oligonucleotide
uggcauaaauaguuguggc

SEQ ID NO: 1256501 - RNA, 19 nt, Artificial Sequence
  Description of Artificial Sequence: Synthetic oligonucleotide
uuugucguagguagaacuc

SEQ ID NO: 1256502 - RNA, 19 nt, Artificial Sequence
  Description of Artificial Sequence: Synthetic oligonucleotide
gguuucguggguaacaacg

SEQ ID NO: 1256503 - RNA, 19 nt, Artificial Sequence
  Description of Artificial Sequence: Synthetic oligonucleotide
ugauagcgacuucacaagc

SEQ ID NO: 1256504 - RNA, 19 nt, Artificial Sequence
  Description of Artificial Sequence: Synthetic oligonucleotide
uaaaaugaaaauggcccca

SEQ ID NO: 1256505 - RNA, 19 nt, Artificial Sequence
  Description of Artificial Sequence: Synthetic oligonucleotide
gguggacucuuauaaaagg

SEQ ID NO: 1256506 - RNA, 19 nt, Artificial Sequence
  Description of Artificial Sequence: Synthetic oligonucleotide
uugauccucucuacaauug

SEQ ID NO: 1256507 - RNA, 19 nt, Artificial Sequence
  Description of Artificial Sequence: Synthetic oligonucleotide
cauagggaucuugacaugg

SEQ ID NO: 1256508 - RNA, 19 nt, Artificial Sequence
  Description of Artificial Sequence: Synthetic oligonucleotide
uguacacuacagaacagua

SEQ ID NO: 1256509 - RNA, 19 nt, Artificial Sequence
  Description of Artificial Sequence: Synthetic oligonucleotide
auacguuaugcucacucug

SEQ ID NO: 1256510 - RNA, 19 nt, Artificial Sequence
  Description of Artificial Sequence: Synthetic oligonucleotide
uaauccgaaaaguauuaau

SEQ ID NO: 1256511 - RNA, 19 nt, Artificial Sequence
  Description of Artificial Sequence: Synthetic oligonucleotide
gcuuguuugucguagguag

SEQ ID NO: 1256512 - RNA, 19 nt, Artificial Sequence
  Description of Artificial Sequence: Synthetic oligonucleotide
uucucggcacucauuagug

SEQ ID NO: 1256513 - RNA, 19 nt, Artificial Sequence
  Description of Artificial Sequence: Synthetic oligonucleotide
uguagacuauagacugggg

SEQ ID NO: 1256514 - RNA, 19 nt, Artificial Sequence
  Description of Artificial Sequence: Synthetic oligonucleotide
uauuauugucaaucguaac

SEQ ID NO: 1256515 - RNA, 19 nt, Artificial Sequence
  Description of Artificial Sequence: Synthetic oligonucleotide
uuacagauuaaaugcccac

SEQ ID NO: 1256516 - RNA, 19 nt, Artificial Sequence
  Description of Artificial Sequence: Synthetic oligonucleotide
uagacuggggccccucucg

SEQ ID NO: 1256517 - RNA, 19 nt, Artificial Sequence
  Description of Artificial Sequence: Synthetic oligonucleotide
cugauagcgacuucacaag

SEQ ID NO: 1256518 - RNA, 19 nt, Artificial Sequence
  Description of Artificial Sequence: Synthetic oligonucleotide
uuuaaaugccuguggugga

SEQ ID NO: 1256519 - RNA, 19 nt, Artificial Sequence
  Description of Artificial Sequence: Synthetic oligonucleotide
uaguguaacugucuggaua

SEQ ID NO: 1256520 - RNA, 19 nt, Artificial Sequence
  Description of Artificial Sequence: Synthetic oligonucleotide
auugcacuggcaguaaaag

SEQ ID NO: 1256521 - RNA, 19 nt, Artificial Sequence
  Description of Artificial Sequence: Synthetic oligonucleotide
ucgauaucuuggcauacgu

SEQ ID NO: 1256522 - RNA, 19 nt, Artificial Sequence
  Description of Artificial Sequence: Synthetic oligonucleotide
guugccacgcuacuggcag

SEQ ID NO: 1256523 - RNA, 19 nt, Artificial Sequence
  Description of Artificial Sequence: Synthetic oligonucleotide
ucuugguccugauagcgac

SEQ ID NO: 1256524 - RNA, 19 nt, Artificial Sequence
  Description of Artificial Sequence: Synthetic oligonucleotide
uaauuuacauacagugaua

SEQ ID NO: 1256525 - RNA, 19 nt, Artificial Sequence
  Description of Artificial Sequence: Synthetic oligonucleotide
augaaaauggccccacuau

SEQ ID NO: 1256526 - RNA, 19 nt, Artificial Sequence
  Description of Artificial Sequence: Synthetic oligonucleotide
acgauguauucucuugguc

SEQ ID NO: 1256527 - RNA, 19 nt, Artificial Sequence
  Description of Artificial Sequence: Synthetic oligonucleotide
augugaaggagccacguaa

SEQ ID NO: 1256528 - RNA, 19 nt, Artificial Sequence
  Description of Artificial Sequence: Synthetic oligonucleotide
ugcucaguucauauccuug

SEQ ID NO: 1256529 - RNA, 19 nt, Artificial Sequence
  Description of Artificial Sequence: Synthetic oligonucleotide
ggaauuguguauuucucug

SEQ ID NO: 1256530 - RNA, 19 nt, Artificial Sequence
  Description of Artificial Sequence: Synthetic oligonucleotide
ggauuaauaucuaauuuac

SEQ ID NO: 1256531 - RNA, 19 nt, Artificial Sequence
  Description of Artificial Sequence: Synthetic oligonucleotide
acuauuauugucaaucgua

SEQ ID NO: 1256532 - RNA, 19 nt, Artificial Sequence
  Description of Artificial Sequence: Synthetic oligonucleotide
ugaaaauggccccacuauu

SEQ ID NO: 1256533 - RNA, 19 nt, Artificial Sequence
  Description of Artificial Sequence: Synthetic oligonucleotide
uauccuugguugcacuggc

SEQ ID NO: 1256534 - RNA, 19 nt, Artificial Sequence
  Description of Artificial Sequence: Synthetic oligonucleotide
guuugcugccaacugaaac

SEQ ID NO: 1256535 - RNA, 19 nt, Artificial Sequence
  Description of Artificial Sequence: Synthetic oligonucleotide
aaauaguuguggccuguau

SEQ ID NO: 1256536 - RNA, 19 nt, Artificial Sequence
  Description of Artificial Sequence: Synthetic oligonucleotide
cacucaucgauaucuuggc

SEQ ID NO: 1256537 - RNA, 19 nt, Artificial Sequence
  Description of Artificial Sequence: Synthetic oligonucleotide
acagauuaaaugcccacuu

SEQ ID NO: 1256538 - RNA, 19 nt, Artificial Sequence
  Description of Artificial Sequence: Synthetic oligonucleotide
guaaaaggauccuggugug

SEQ ID NO: 1256539 - RNA, 19 nt, Artificial Sequence
  Description of Artificial Sequence: Synthetic oligonucleotide
cauaaauaguuguggccug

SEQ ID NO: 1256540 - RNA, 19 nt, Artificial Sequence
  Description of Artificial Sequence: Synthetic oligonucleotide
aacaacggaagccgccaug

SEQ ID NO: 1256541 - RNA, 19 nt, Artificial Sequence
  Description of Artificial Sequence: Synthetic oligonucleotide
auauuguagcauugcugag

SEQ ID NO: 1256542 - RNA, 19 nt, Artificial Sequence
  Description of Artificial Sequence: Synthetic oligonucleotide
uugaaucuuacagauuaaa

SEQ ID NO: 1256543 - RNA, 19 nt, Artificial Sequence
  Description of Artificial Sequence: Synthetic oligonucleotide
uucguggguaacaacggaa

SEQ ID NO: 1256544 - RNA, 19 nt, Artificial Sequence
  Description of Artificial Sequence: Synthetic oligonucleotide
ucguagguagaacucucca

SEQ ID NO: 1256545 - RNA, 19 nt, Artificial Sequence
  Description of Artificial Sequence: Synthetic oligonucleotide
auccucaugagauggucug

SEQ ID NO: 1256546 - RNA, 19 nt, Artificial Sequence
  Description of Artificial Sequence: Synthetic oligonucleotide
uacagauuaaaugcccacu

SEQ ID NO: 1256547 - RNA, 19 nt, Artificial Sequence
  Description of Artificial Sequence: Synthetic oligonucleotide
uuucguggguaacaacgga

SEQ ID NO: 1256548 - RNA, 19 nt, Artificial Sequence
  Description of Artificial Sequence: Synthetic oligonucleotide
ggcauaaauaguuguggcc

SEQ ID NO: 1256549 - RNA, 19 nt, Artificial Sequence
  Description of Artificial Sequence: Synthetic oligonucleotide
aaugagccgagaauauugu

SEQ ID NO: 1256550 - RNA, 19 nt, Artificial Sequence
  Description of Artificial Sequence: Synthetic oligonucleotide
guuuauauccacgcaggug

SEQ ID NO: 1256551 - RNA, 19 nt, Artificial Sequence
  Description of Artificial Sequence: Synthetic oligonucleotide
agcucgagguucugcauuc

SEQ ID NO: 1256552 - RNA, 19 nt, Artificial Sequence
  Description of Artificial Sequence: Synthetic oligonucleotide
gauaccccggaagacacug

SEQ ID NO: 1256553 - RNA, 19 nt, Artificial Sequence
  Description of Artificial Sequence: Synthetic oligonucleotide
guuucguggguaacaacgg

SEQ ID NO: 1256554 - RNA, 19 nt, Artificial Sequence
  Description of Artificial Sequence: Synthetic oligonucleotide
auggucaauccucaugaga

SEQ ID NO: 1256555 - RNA, 19 nt, Artificial Sequence
  Description of Artificial Sequence: Synthetic oligonucleotide
ccgaaaaguauuaauggug

SEQ ID NO: 1256556 - RNA, 19 nt, Artificial Sequence
  Description of Artificial Sequence: Synthetic oligonucleotide
ucucggcacucauuagugg

SEQ ID NO: 1256557 - RNA, 19 nt, Artificial Sequence
  Description of Artificial Sequence: Synthetic oligonucleotide
ugucuggauauagauguac

SEQ ID NO: 1256558 - RNA, 19 nt, Artificial Sequence
  Description of Artificial Sequence: Synthetic oligonucleotide
guggguaacaacggaagcc

SEQ ID NO: 1256559 - RNA, 19 nt, Artificial Sequence
  Description of Artificial Sequence: Synthetic oligonucleotide
auucguuuauauccacgca

SEQ ID NO: 1256560 - RNA, 19 nt, Artificial Sequence
  Description of Artificial Sequence: Synthetic oligonucleotide
guauuaaugguguuggcau

SEQ ID NO: 1256561 - RNA, 19 nt, Artificial Sequence
  Description of Artificial Sequence: Synthetic oligonucleotide
aacggaagccgccaugaua

SEQ ID NO: 1256562 - RNA, 19 nt, Artificial Sequence
  Description of Artificial Sequence: Synthetic oligonucleotide
ggcuaaaaugaaaauggcc

SEQ ID NO: 1256563 - RNA, 19 nt, Artificial Sequence
  Description of Artificial Sequence: Synthetic oligonucleotide
cgagguucugcauucaucg

SEQ ID NO: 1256564 - RNA, 19 nt, Artificial Sequence
  Description of Artificial Sequence: Synthetic oligonucleotide
ugguugcacuggcagauga

SEQ ID NO: 1256565 - RNA, 19 nt, Artificial Sequence
  Description of Artificial Sequence: Synthetic oligonucleotide
aucgauaucuuggcauacg

SEQ ID NO: 1256566 - RNA, 19 nt, Artificial Sequence
  Description of Artificial Sequence: Synthetic oligonucleotide
uagauguacuagauauauc

SEQ ID NO: 1256567 - RNA, 19 nt, Artificial Sequence
  Description of Artificial Sequence: Synthetic oligonucleotide
aggucccuaugcuacugac

SEQ ID NO: 1256568 - RNA, 19 nt, Artificial Sequence
  Description of Artificial Sequence: Synthetic oligonucleotide
gguuuucugauguuagaac

SEQ ID NO: 1256569 - RNA, 19 nt, Artificial Sequence
  Description of Artificial Sequence: Synthetic oligonucleotide
caauugugggucccugagg

SEQ ID NO: 1256570 - RNA, 19 nt, Artificial Sequence
  Description of Artificial Sequence: Synthetic oligonucleotide
aaggguuggaagggauacg

SEQ ID NO: 1256571 - RNA, 19 nt, Artificial Sequence
  Description of Artificial Sequence: Synthetic oligonucleotide
ugucguagguagaacucuc

SEQ ID NO: 1256572 - RNA, 19 nt, Artificial Sequence
  Description of Artificial Sequence: Synthetic oligonucleotide
uuaauccgaaaaguauuaa

SEQ ID NO: 1256573 - RNA, 19 nt, Artificial Sequence
  Description of Artificial Sequence: Synthetic oligonucleotide
cacguaaauugaugcacac

SEQ ID NO: 1256574 - RNA, 19 nt, Artificial Sequence
  Description of Artificial Sequence: Synthetic oligonucleotide
guuggauuaauaucuaauu

SEQ ID NO: 1256575 - RNA, 19 nt, Artificial Sequence
  Description of Artificial Sequence: Synthetic oligonucleotide
agguucugcauucaucgau

SEQ ID NO: 1256576 - RNA, 19 nt, Artificial Sequence
  Description of Artificial Sequence: Synthetic oligonucleotide
auugauauugacacaggua

SEQ ID NO: 1256577 - RNA, 19 nt, Artificial Sequence
  Description of Artificial Sequence: Synthetic oligonucleotide
gcaauauggaggcacggug

SEQ ID NO: 1256578 - RNA, 19 nt, Artificial Sequence
  Description of Artificial Sequence: Synthetic oligonucleotide
cacaccacugguugccacg

SEQ ID NO: 1256579 - RNA, 19 nt, Artificial Sequence
  Description of Artificial Sequence: Synthetic oligonucleotide
uccugauagcgacuucaca

SEQ ID NO: 1256580 - RNA, 19 nt, Artificial Sequence
  Description of Artificial Sequence: Synthetic oligonucleotide
gacacagguagcucgaggu

SEQ ID NO: 1256581 - RNA, 19 nt, Artificial Sequence
  Description of Artificial Sequence: Synthetic oligonucleotide
gauagcgacuucacaagca

SEQ ID NO: 1256582 - RNA, 19 nt, Artificial Sequence
  Description of Artificial Sequence: Synthetic oligonucleotide
uugucguagguagaacucu

SEQ ID NO: 1256583 - RNA, 19 nt, Artificial Sequence
  Description of Artificial Sequence: Synthetic oligonucleotide
auauccuggcagguccugc

SEQ ID NO: 1256584 - RNA, 19 nt, Artificial Sequence
  Description of Artificial Sequence: Synthetic oligonucleotide
ucauauccuugguugcacu

SEQ ID NO: 1256585 - RNA, 19 nt, Artificial Sequence
  Description of Artificial Sequence: Synthetic oligonucleotide
guuugucguagguagaacu

SEQ ID NO: 1256586 - RNA, 19 nt, Artificial Sequence
  Description of Artificial Sequence: Synthetic oligonucleotide
caguaccauugcuuggucc

SEQ ID NO: 1256587 - RNA, 19 nt, Artificial Sequence
  Description of Artificial Sequence: Synthetic oligonucleotide
gugguggacucuuauaaaa

SEQ ID NO: 1256588 - RNA, 19 nt, Artificial Sequence
  Description of Artificial Sequence: Synthetic oligonucleotide
cuucugauaccccggaaga

SEQ ID NO: 1256589 - RNA, 19 nt, Artificial Sequence
  Description of Artificial Sequence: Synthetic oligonucleotide
acauugauauugacacagg

SEQ ID NO: 1256590 - RNA, 19 nt, Artificial Sequence
  Description of Artificial Sequence: Synthetic oligonucleotide
guaucuggaagaugucuga

SEQ ID NO: 1256591 - RNA, 19 nt, Artificial Sequence
  Description of Artificial Sequence: Synthetic oligonucleotide
agaauccaacuuucaccag

SEQ ID NO: 1256592 - RNA, 19 nt, Artificial Sequence
  Description of Artificial Sequence: Synthetic oligonucleotide
acguucuugcuguuaagau

SEQ ID NO: 1256593 - RNA, 19 nt, Artificial Sequence
  Description of Artificial Sequence: Synthetic oligonucleotide
uucauauccuugguugcac

SEQ ID NO: 1256594 - RNA, 19 nt, Artificial Sequence
  Description of Artificial Sequence: Synthetic oligonucleotide
acaccacugguugccacgc

SEQ ID NO: 1256595 - RNA, 19 nt, Artificial Sequence
  Description of Artificial Sequence: Synthetic oligonucleotide
aaauggccccacuauuauu

SEQ ID NO: 1256596 - RNA, 19 nt, Artificial Sequence
  Description of Artificial Sequence: Synthetic oligonucleotide
uauagacuggggccccucu

SEQ ID NO: 1256597 - RNA, 19 nt, Artificial Sequence
  Description of Artificial Sequence: Synthetic oligonucleotide
cagauuaaaugcccacuuc

SEQ ID NO: 1256598 - RNA, 19 nt, Artificial Sequence
  Description of Artificial Sequence: Synthetic oligonucleotide
cccacuauuauugucaauc

SEQ ID NO: 1256599 - RNA, 19 nt, Artificial Sequence
  Description of Artificial Sequence: Synthetic oligonucleotide
aaggucccuaugcuacuga

SEQ ID NO: 1256600 - RNA, 19 nt, Artificial Sequence
  Description of Artificial Sequence: Synthetic oligonucleotide
aggcacggugcauucaucu

SEQ ID NO: 1256601 - RNA, 19 nt, Artificial Sequence
  Description of Artificial Sequence: Synthetic oligonucleotide
ucggcacauagcauuugac

SEQ ID NO: 1256602 - RNA, 19 nt, Artificial Sequence
  Description of Artificial Sequence: Synthetic oligonucleotide
agccacguaaauugaugca

SEQ ID NO: 1256603 - RNA, 19 nt, Artificial Sequence
  Description of Artificial Sequence: Synthetic oligonucleotide
gcuguuaagauggucaauc

SEQ ID NO: 1256604 - RNA, 19 nt, Artificial Sequence
  Description of Artificial Sequence: Synthetic oligonucleotide
uccggaugacaaaauuaau

SEQ ID NO: 1256605 - RNA, 19 nt, Artificial Sequence
  Description of Artificial Sequence: Synthetic oligonucleotide
auguuagaacauagggauc

SEQ ID NO: 1256606 - RNA, 19 nt, Artificial Sequence
  Description of Artificial Sequence: Synthetic oligonucleotide
guacacuacagaacaguac

SEQ ID NO: 1256607 - RNA, 19 nt, Artificial Sequence
  Description of Artificial Sequence: Synthetic oligonucleotide
ugucagaucggaugcucau

SEQ ID NO: 1256608 - RNA, 19 nt, Artificial Sequence
  Description of Artificial Sequence: Synthetic oligonucleotide
cacccgacgaugcuucugc

SEQ ID NO: 1256609 - RNA, 19 nt, Artificial Sequence
  Description of Artificial Sequence: Synthetic oligonucleotide
agcauuugacacugggcaa

SEQ ID NO: 1256610 - RNA, 19 nt, Artificial Sequence
  Description of Artificial Sequence: Synthetic oligonucleotide
auaaauaguuguggccugu

SEQ ID NO: 1256611 - RNA, 19 nt, Artificial Sequence
  Description of Artificial Sequence: Synthetic oligonucleotide
acaacggaagccgccauga

SEQ ID NO: 1256612 - RNA, 19 nt, Artificial Sequence
  Description of Artificial Sequence: Synthetic oligonucleotide
gcuacugacugucagcauc

SEQ ID NO: 1256613 - RNA, 19 nt, Artificial Sequence
  Description of Artificial Sequence: Synthetic oligonucleotide
uggcaauauggaggcacgg

SEQ ID NO: 1256614 - RNA, 19 nt, Artificial Sequence
  Description of Artificial Sequence: Synthetic oligonucleotide
acguuaugcucacucugcu

SEQ ID NO: 1256615 - RNA, 19 nt, Artificial Sequence
  Description of Artificial Sequence: Synthetic oligonucleotide
guggcaauauggaggcacg

SEQ ID NO: 1256616 - RNA, 19 nt, Artificial Sequence
  Description of Artificial Sequence: Synthetic oligonucleotide
guaacugucuggauauaga

SEQ ID NO: 1256617 - RNA, 19 nt, Artificial Sequence
  Description of Artificial Sequence: Synthetic oligonucleotide
acauacagugauaaagaua

SEQ ID NO: 1256618 - RNA, 19 nt, Artificial Sequence
  Description of Artificial Sequence: Synthetic oligonucleotide
ucggaugcucauguauuug

SEQ ID NO: 1256619 - RNA, 19 nt, Artificial Sequence
  Description of Artificial Sequence: Synthetic oligonucleotide
gcauacguuaugcucacuc

SEQ ID NO: 1256620 - RNA, 19 nt, Artificial Sequence
  Description of Artificial Sequence: Synthetic oligonucleotide
uucugauaccccggaagac

SEQ ID NO: 1256621 - RNA, 19 nt, Artificial Sequence
  Description of Artificial Sequence: Synthetic oligonucleotide
guaacaacggaagccgcca

SEQ ID NO: 1256622 - RNA, 19 nt, Artificial Sequence
  Description of Artificial Sequence: Synthetic oligonucleotide
ugaaugagccgagaauauu

SEQ ID NO: 1256623 - RNA, 19 nt, Artificial Sequence
  Description of Artificial Sequence: Synthetic oligonucleotide
agcgcuggccaugaaacca

SEQ ID NO: 1256624 - RNA, 19 nt, Artificial Sequence
  Description of Artificial Sequence: Synthetic oligonucleotide
aucggaugcucauguauuu

SEQ ID NO: 1256625 - RNA, 19 nt, Artificial Sequence
  Description of Artificial Sequence: Synthetic oligonucleotide
cacagguagcucgagguuc

SEQ ID NO: 1256626 - RNA, 19 nt, Artificial Sequence
  Description of Artificial Sequence: Synthetic oligonucleotide
acguaaauugaugcacacu

SEQ ID NO: 1256627 - RNA, 19 nt, Artificial Sequence
  Description of Artificial Sequence: Synthetic oligonucleotide
uggcauacguuaugcucac

SEQ ID NO: 1256628 - RNA, 19 nt, Artificial Sequence
  Description of Artificial Sequence: Synthetic oligonucleotide
gguggcaauauggaggcac

SEQ ID NO: 1256629 - RNA, 19 nt, Artificial Sequence
  Description of Artificial Sequence: Synthetic oligonucleotide
gauacgcugagggucagcu

SEQ ID NO: 1256630 - RNA, 19 nt, Artificial Sequence
  Description of Artificial Sequence: Synthetic oligonucleotide
uagcgcuggccaugaaacc

SEQ ID NO: 1256631 - RNA, 19 nt, Artificial Sequence
  Description of Artificial Sequence: Synthetic oligonucleotide
gguaacaacggaagccgcc

SEQ ID NO: 1256632 - RNA, 19 nt, Artificial Sequence
  Description of Artificial Sequence: Synthetic oligonucleotide
gacuauagacuggggcccc

SEQ ID NO: 1256633 - RNA, 19 nt, Artificial Sequence
  Description of Artificial Sequence: Synthetic oligonucleotide
caugauaauuccagcacau

SEQ ID NO: 1256634 - RNA, 19 nt, Artificial Sequence
  Description of Artificial Sequence: Synthetic oligonucleotide
uccucccguaguguaacug

SEQ ID NO: 1256635 - RNA, 19 nt, Artificial Sequence
  Description of Artificial Sequence: Synthetic oligonucleotide
gcauaaauaguuguggccu

SEQ ID NO: 1256636 - RNA, 19 nt, Artificial Sequence
  Description of Artificial Sequence: Synthetic oligonucleotide
uggcaucacauucguuuau

SEQ ID NO: 1256637 - RNA, 19 nt, Artificial Sequence
  Description of Artificial Sequence: Synthetic oligonucleotide
cucccguaguguaacuguc

SEQ ID NO: 1256638 - RNA, 19 nt, Artificial Sequence
  Description of Artificial Sequence: Synthetic oligonucleotide
cagaugaaugagccgagaa

SEQ ID NO: 1256639 - RNA, 19 nt, Artificial Sequence
  Description of Artificial Sequence: Synthetic oligonucleotide
ccgacgaugcuucugcagc

SEQ ID NO: 1256640 - RNA, 19 nt, Artificial Sequence
  Description of Artificial Sequence: Synthetic oligonucleotide
ucacgcaucuuugguggca

SEQ ID NO: 1256641 - RNA, 19 nt, Artificial Sequence
  Description of Artificial Sequence: Synthetic oligonucleotide
ggucaauccucaugagaug

SEQ ID NO: 1256642 - RNA, 19 nt, Artificial Sequence
  Description of Artificial Sequence: Synthetic oligonucleotide
gauauccuggcagguccug

SEQ ID NO: 1256643 - RNA, 19 nt, Artificial Sequence
  Description of Artificial Sequence: Synthetic oligonucleotide
uaacaacggaagccgccau

SEQ ID NO: 1256644 - RNA, 19 nt, Artificial Sequence
  Description of Artificial Sequence: Synthetic oligonucleotide
ugauaccccggaagacacu

SEQ ID NO: 1256645 - RNA, 19 nt, Artificial Sequence
  Description of Artificial Sequence: Synthetic oligonucleotide
gucguagguagaacucucc

SEQ ID NO: 1256646 - RNA, 19 nt, Artificial Sequence
  Description of Artificial Sequence: Synthetic oligonucleotide
ggagccacguaaauugaug

SEQ ID NO: 1256647 - RNA, 19 nt, Artificial Sequence
  Description of Artificial Sequence: Synthetic oligonucleotide
gccacguaaauugaugcac

SEQ ID NO: 1256648 - RNA, 19 nt, Artificial Sequence
  Description of Artificial Sequence: Synthetic oligonucleotide
caucgauaucuuggcauac

SEQ ID NO: 1256649 - RNA, 19 nt, Artificial Sequence
  Description of Artificial Sequence: Synthetic oligonucleotide
acacuacagaacaguacca

SEQ ID NO: 1256650 - RNA, 19 nt, Artificial Sequence
  Description of Artificial Sequence: Synthetic oligonucleotide
augaaugagccgagaauau

SEQ ID NO: 1256651 - RNA, 19 nt, Artificial Sequence
  Description of Artificial Sequence: Synthetic oligonucleotide
cguucuugcuguuaagaug

SEQ ID NO: 1256652 - RNA, 19 nt, Artificial Sequence
  Description of Artificial Sequence: Synthetic oligonucleotide
acauggguuucguggguaa

SEQ ID NO: 1256653 - RNA, 19 nt, Artificial Sequence
  Description of Artificial Sequence: Synthetic oligonucleotide
cauacguuaugcucacucu

SEQ ID NO: 1256654 - RNA, 19 nt, Artificial Sequence
  Description of Artificial Sequence: Synthetic oligonucleotide
uugguccugauagcgacuu

SEQ ID NO: 1256655 - RNA, 19 nt, Artificial Sequence
  Description of Artificial Sequence: Synthetic oligonucleotide
auacgcugagggucagcug

SEQ ID NO: 1256656 - RNA, 19 nt, Artificial Sequence
  Description of Artificial Sequence: Synthetic oligonucleotide
cacguucuugcuguuaaga

SEQ ID NO: 1256657 - RNA, 19 nt, Artificial Sequence
  Description of Artificial Sequence: Synthetic oligonucleotide
gucagaucggaugcucaug

SEQ ID NO: 1256658 - RNA, 19 nt, Artificial Sequence
  Description of Artificial Sequence: Synthetic oligonucleotide
ucccuaugcuacugacugu

SEQ ID NO: 1256659 - RNA, 19 nt, Artificial Sequence
  Description of Artificial Sequence: Synthetic oligonucleotide
cacaucgguuuucugaugu

SEQ ID NO: 1256660 - RNA, 19 nt, Artificial Sequence
  Description of Artificial Sequence: Synthetic oligonucleotide
acacagguagcucgagguu

SEQ ID NO: 1256661 - RNA, 19 nt, Artificial Sequence
  Description of Artificial Sequence: Synthetic oligonucleotide
gguguuggcauaaauaguu

SEQ ID NO: 1256662 - RNA, 19 nt, Artificial Sequence
  Description of Artificial Sequence: Synthetic oligonucleotide
gcuggcaucacauucguuu

SEQ ID NO: 1256663 - RNA, 19 nt, Artificial Sequence
  Description of Artificial Sequence: Synthetic oligonucleotide
uccucaugagauggucugu

SEQ ID NO: 1256664 - RNA, 19 nt, Artificial Sequence
  Description of Artificial Sequence: Synthetic oligonucleotide
acagaccugucagaucgga

SEQ ID NO: 1256665 - RNA, 19 nt, Artificial Sequence
  Description of Artificial Sequence: Synthetic oligonucleotide
cgagaauauuguagcauug

SEQ ID NO: 1256666 - RNA, 19 nt, Artificial Sequence
  Description of Artificial Sequence: Synthetic oligonucleotide
augauaauuccagcacauu

SEQ ID NO: 1256667 - RNA, 19 nt, Artificial Sequence
  Description of Artificial Sequence: Synthetic oligonucleotide
cacuauuauugucaaucgu

SEQ ID NO: 1256668 - RNA, 19 nt, Artificial Sequence
  Description of Artificial Sequence: Synthetic oligonucleotide
cucggcacucauuaguggu

SEQ ID NO: 1256669 - RNA, 19 nt, Artificial Sequence
  Description of Artificial Sequence: Synthetic oligonucleotide
uugugcggaaggucccuau

SEQ ID NO: 1256670 - RNA, 19 nt, Artificial Sequence
  Description of Artificial Sequence: Synthetic oligonucleotide
cuggcaucacauucguuua

SEQ ID NO: 1256671 - RNA, 19 nt, Artificial Sequence
  Description of Artificial Sequence: Synthetic oligonucleotide
ccguaguguaacugucugg

SEQ ID NO: 1256672 - RNA, 19 nt, Artificial Sequence
  Description of Artificial Sequence: Synthetic oligonucleotide
uggccccacuauuauuguc

SEQ ID NO: 1256673 - RNA, 19 nt, Artificial Sequence
  Description of Artificial Sequence: Synthetic oligonucleotide
uugccacgcuacuggcagc

SEQ ID NO: 1256674 - RNA, 19 nt, Artificial Sequence
  Description of Artificial Sequence: Synthetic oligonucleotide
cauugcugagcacacuggu

SEQ ID NO: 1256675 - RNA, 19 nt, Artificial Sequence
  Description of Artificial Sequence: Synthetic oligonucleotide
acggugcauucaucuauau

SEQ ID NO: 1256676 - RNA, 19 nt, Artificial Sequence
  Description of Artificial Sequence: Synthetic oligonucleotide
gaucggaugcucauguauu

SEQ ID NO: 1256677 - RNA, 19 nt, Artificial Sequence
  Description of Artificial Sequence: Synthetic oligonucleotide
ugcuacugacugucagcau

SEQ ID NO: 1256678 - RNA, 19 nt, Artificial Sequence
  Description of Artificial Sequence: Synthetic oligonucleotide
ggacucuuauaaaaggcua

SEQ ID NO: 1256679 - RNA, 19 nt, Artificial Sequence
  Description of Artificial Sequence: Synthetic oligonucleotide
cccguaguguaacugucug

SEQ ID NO: 1256680 - RNA, 19 nt, Artificial Sequence
  Description of Artificial Sequence: Synthetic oligonucleotide
uuccucccguaguguaacu

SEQ ID NO: 1256681 - RNA, 19 nt, Artificial Sequence
  Description of Artificial Sequence: Synthetic oligonucleotide
cguaaauugaugcacacuu

SEQ ID NO: 1256682 - RNA, 19 nt, Artificial Sequence
  Description of Artificial Sequence: Synthetic oligonucleotide
ccacguaaauugaugcaca

SEQ ID NO: 1256683 - RNA, 19 nt, Artificial Sequence
  Description of Artificial Sequence: Synthetic oligonucleotide
cguaguguaacugucugga

SEQ ID NO: 1256684 - RNA, 19 nt, Artificial Sequence
  Description of Artificial Sequence: Synthetic oligonucleotide
caucgguuuucugauguua

SEQ ID NO: 1256685 - RNA, 19 nt, Artificial Sequence
  Description of Artificial Sequence: Synthetic oligonucleotide
gcuuuaacaucacaauauu

SEQ ID NO: 1256686 - RNA, 19 nt, Artificial Sequence
  Description of Artificial Sequence: Synthetic oligonucleotide
cccuaugcuacugacuguc

SEQ ID NO: 1256687 - RNA, 19 nt, Artificial Sequence
  Description of Artificial Sequence: Synthetic oligonucleotide
acuauagacuggggccccu

SEQ ID NO: 1256688 - RNA, 19 nt, Artificial Sequence
  Description of Artificial Sequence: Synthetic oligonucleotide
cacggugcauucaucuaua

SEQ ID NO: 1256689 - RNA, 19 nt, Artificial Sequence
  Description of Artificial Sequence: Synthetic oligonucleotide
ugguccugauagcgacuuc

SEQ ID NO: 1256690 - RNA, 19 nt, Artificial Sequence
  Description of Artificial Sequence: Synthetic oligonucleotide
guugcacuggcagaugaau

SEQ ID NO: 1256691 - RNA, 19 nt, Artificial Sequence
  Description of Artificial Sequence: Synthetic oligonucleotide
cuauagacuggggccccuc

SEQ ID NO: 1256692 - RNA, 19 nt, Artificial Sequence
  Description of Artificial Sequence: Synthetic oligonucleotide
accauugcuugguccuauu

SEQ ID NO: 1256693 - RNA, 19 nt, Artificial Sequence
  Description of Artificial Sequence: Synthetic oligonucleotide
aggauugcacuggcaguaa

SEQ ID NO: 1256694 - RNA, 19 nt, Artificial Sequence
  Description of Artificial Sequence: Synthetic oligonucleotide
ugcuggcaucacauucguu

SEQ ID NO: 1256695 - RNA, 19 nt, Artificial Sequence
  Description of Artificial Sequence: Synthetic oligonucleotide
acccgacgaugcuucugca

SEQ ID NO: 1256696 - RNA, 19 nt, Artificial Sequence
  Description of Artificial Sequence: Synthetic oligonucleotide
cccgacgaugcuucugcag

SEQ ID NO: 1256697 - RNA, 19 nt, Artificial Sequence
  Description of Artificial Sequence: Synthetic oligonucleotide
accugucagaucggaugcu

SEQ ID NO: 1256698 - RNA, 19 nt, Artificial Sequence
  Description of Artificial Sequence: Synthetic oligonucleotide
agcacccgacgaugcuucu

SEQ ID NO: 1256699 - RNA, 19 nt, Artificial Sequence
  Description of Artificial Sequence: Synthetic oligonucleotide
ccggaugacaaaauuaauu

SEQ ID NO: 1256700 - RNA, 19 nt, Artificial Sequence
  Description of Artificial Sequence: Synthetic oligonucleotide
gcacaugcaugagaacuuc

SEQ ID NO: 1256701 - RNA, 19 nt, Artificial Sequence
  Description of Artificial Sequence: Synthetic oligonucleotide
uacugacugucagcaucuc

SEQ ID NO: 1256702 - RNA, 19 nt, Artificial Sequence
  Description of Artificial Sequence: Synthetic oligonucleotide
ggguuucguggguaacaac

SEQ ID NO: 1256703 - RNA, 19 nt, Artificial Sequence
  Description of Artificial Sequence: Synthetic oligonucleotide
cauugauauccuggcaggu

SEQ ID NO: 1256704 - RNA, 19 nt, Artificial Sequence
  Description of Artificial Sequence: Synthetic oligonucleotide
gaggcacggugcauucauc

SEQ ID NO: 1256705 - RNA, 19 nt, Artificial Sequence
  Description of Artificial Sequence: Synthetic oligonucleotide
uggauccggugggaagggu

SEQ ID NO: 1256706 - RNA, 19 nt, Artificial Sequence
  Description of Artificial Sequence: Synthetic oligonucleotide
gcgacuucacaagcacaag

SEQ ID NO: 1256707 - RNA, 19 nt, Artificial Sequence
  Description of Artificial Sequence: Synthetic oligonucleotide
cugucuggauauagaugua

SEQ ID NO: 1256708 - RNA, 19 nt, Artificial Sequence
  Description of Artificial Sequence: Synthetic oligonucleotide
ccacguucuugcuguuaag

SEQ ID NO: 1256709 - RNA, 19 nt, Artificial Sequence
  Description of Artificial Sequence: Synthetic oligonucleotide
cagcaacugcaguagcgcu

SEQ ID NO: 1256710 - RNA, 19 nt, Artificial Sequence
  Description of Artificial Sequence: Synthetic oligonucleotide
acgcaucuuugguggcaau

SEQ ID NO: 1256711 - RNA, 19 nt, Artificial Sequence
  Description of Artificial Sequence: Synthetic oligonucleotide
cuggcaguaaaaggauccu

SEQ ID NO: 1256712 - RNA, 19 nt, Artificial Sequence
  Description of Artificial Sequence: Synthetic oligonucleotide
ggaggcacggugcauucau

SEQ ID NO: 1256713 - RNA, 19 nt, Artificial Sequence
  Description of Artificial Sequence: Synthetic oligonucleotide
ggcaauauggaggcacggu

SEQ ID NO: 1256714 - RNA, 19 nt, Artificial Sequence
  Description of Artificial Sequence: Synthetic oligonucleotide
cagaucggaugcucaugua

SEQ ID NO: 1256715 - RNA, 19 nt, Artificial Sequence
  Description of Artificial Sequence: Synthetic oligonucleotide
ggcuuguuugucguaggua

SEQ ID NO: 1256716 - RNA, 19 nt, Artificial Sequence
  Description of Artificial Sequence: Synthetic oligonucleotide
ggcacggugcauucaucua

SEQ ID NO: 1256717 - RNA, 19 nt, Artificial Sequence
  Description of Artificial Sequence: Synthetic oligonucleotide
gcggaaggucccuaugcua

SEQ ID NO: 1256718 - RNA, 19 nt, Artificial Sequence
  Description of Artificial Sequence: Synthetic oligonucleotide
ggguuccuccggaugacaa

SEQ ID NO: 1256719 - RNA, 19 nt, Artificial Sequence
  Description of Artificial Sequence: Synthetic oligonucleotide
ccucccguaguguaacugu

SEQ ID NO: 1256720 - RNA, 19 nt, Artificial Sequence
  Description of Artificial Sequence: Synthetic oligonucleotide
cagaccugucagaucggau

SEQ ID NO: 1256721 - RNA, 19 nt, Artificial Sequence
  Description of Artificial Sequence: Synthetic oligonucleotide
cuugugcggaaggucccua

SEQ ID NO: 1256722 - RNA, 19 nt, Artificial Sequence
  Description of Artificial Sequence: Synthetic oligonucleotide
ggcacaugcaugagaacuu

SEQ ID NO: 1256723 - RNA, 19 nt, Artificial Sequence
  Description of Artificial Sequence: Synthetic oligonucleotide
gcacccgacgaugcuucug

SEQ ID NO: 1256724 - RNA, 19 nt, Artificial Sequence
  Description of Artificial Sequence: Synthetic oligonucleotide
ggaagccgccaugauaauu

SEQ ID NO: 1256725 - RNA, 19 nt, Artificial Sequence
  Description of Artificial Sequence: Synthetic oligonucleotide
cguuuauauccacgcaggu

SEQ ID NO: 1256726 - RNA, 19 nt, Artificial Sequence
  Description of Artificial Sequence: Synthetic oligonucleotide
ggguuggaagggauacgcu

SEQ ID NO: 1256727 - RNA, 19 nt, Artificial Sequence
  Description of Artificial Sequence: Synthetic oligonucleotide
caacggaagccgccaugau

SEQ ID NO: 1256728 - RNA, 19 nt, Artificial Sequence
  Description of Artificial Sequence: Synthetic oligonucleotide
caaucguaacacggagcuu

SEQ ID NO: 1256729 - RNA, 19 nt, Artificial Sequence
  Description of Artificial Sequence: Synthetic oligonucleotide
caccacugguugccacgcu

SEQ ID NO: 1256730 - RNA, 19 nt, Artificial Sequence
  Description of Artificial Sequence: Synthetic oligonucleotide
caguagcgcuggccaugaa

SEQ ID NO: 1256731 - RNA, 19 nt, Artificial Sequence
  Description of Artificial Sequence: Synthetic oligonucleotide
ccggugggaaggguuggaa

SEQ ID NO: 1256732 - RNA, 19 nt, Artificial Sequence
  Description of Artificial Sequence: Synthetic oligonucleotide
ggcauacguuaugcucacu

SEQ ID NO: 1256733 - RNA, 19 nt, Artificial Sequence
  Description of Artificial Sequence: Synthetic oligonucleotide
ccccacuauuauugucaau

SEQ ID NO: 1256734 - RNA, 19 nt, Artificial Sequence
  Description of Artificial Sequence: Synthetic oligonucleotide
cggaagccgccaugauaau

SEQ ID NO: 1256735 - RNA, 19 nt, Artificial Sequence
  Description of Artificial Sequence: Synthetic oligonucleotide
caauauaugagccaaaucg

SEQ ID NO: 1256736 - RNA, 19 nt, Artificial Sequence
  Description of Artificial Sequence: Synthetic oligonucleotide
aaaucuauaaucugaugug

SEQ ID NO: 1256737 - RNA, 19 nt, Artificial Sequence
  Description of Artificial Sequence: Synthetic oligonucleotide
uaauuaucaauauaugagc

SEQ ID NO: 1256738 - RNA, 19 nt, Artificial Sequence
  Description of Artificial Sequence: Synthetic oligonucleotide
aacgauuaugagcagcagc

SEQ ID NO: 1256739 - RNA, 19 nt, Artificial Sequence
  Description of Artificial Sequence: Synthetic oligonucleotide
auaaguguaauuuccauug

SEQ ID NO: 1256740 - RNA, 19 nt, Artificial Sequence
  Description of Artificial Sequence: Synthetic oligonucleotide
uguauuaggacuccacagg

SEQ ID NO: 1256741 - RNA, 19 nt, Artificial Sequence
  Description of Artificial Sequence: Synthetic oligonucleotide
aaaucgaaaaucaauaccu

SEQ ID NO: 1256742 - RNA, 19 nt, Artificial Sequence
  Description of Artificial Sequence: Synthetic oligonucleotide
uaucauacagguaacggcc

SEQ ID NO: 1256743 - RNA, 19 nt, Artificial Sequence
  Description of Artificial Sequence: Synthetic oligonucleotide
uagccauuugcacagacgg

SEQ ID NO: 1256744 - RNA, 19 nt, Artificial Sequence
  Description of Artificial Sequence: Synthetic oligonucleotide
auaucgugaauccucaggg

SEQ ID NO: 1256745 - RNA, 19 nt, Artificial Sequence
  Description of Artificial Sequence: Synthetic oligonucleotide
caaaguauugcuagggugg

SEQ ID NO: 1256746 - RNA, 19 nt, Artificial Sequence
  Description of Artificial Sequence: Synthetic oligonucleotide
aaugacuuguugucuugcc

SEQ ID NO: 1256747 - RNA, 19 nt, Artificial Sequence
  Description of Artificial Sequence: Synthetic oligonucleotide
uaaaacuccccaaaggaca

SEQ ID NO: 1256748 - RNA, 19 nt, Artificial Sequence
  Description of Artificial Sequence: Synthetic oligonucleotide
cuucauaggauccaguacc

SEQ ID NO: 1256749 - RNA, 19 nt, Artificial Sequence
  Description of Artificial Sequence: Synthetic oligonucleotide
aaugggauauugcagauua

SEQ ID NO: 1256750 - RNA, 19 nt, Artificial Sequence
  Description of Artificial Sequence: Synthetic oligonucleotide
aauaccugcacuucugcug

SEQ ID NO: 1256751 - RNA, 19 nt, Artificial Sequence
  Description of Artificial Sequence: Synthetic oligonucleotide
uuaucauacagguaacggc

SEQ ID NO: 1256752 - RNA, 19 nt, Artificial Sequence
  Description of Artificial Sequence: Synthetic oligonucleotide
uucguaaucccaaagucug

SEQ ID NO: 1256753 - RNA, 19 nt, Artificial Sequence
  Description of Artificial Sequence: Synthetic oligonucleotide
uuuuagaugaccaggcuuc

SEQ ID NO: 1256754 - RNA, 19 nt, Artificial Sequence
  Description of Artificial Sequence: Synthetic oligonucleotide
caaaucgaaaaucaauacc

SEQ ID NO: 1256755 - RNA, 19 nt, Artificial Sequence
  Description of Artificial Sequence: Synthetic oligonucleotide
uuaagauccucauuggacu

SEQ ID NO: 1256756 - RNA, 19 nt, Artificial Sequence
  Description of Artificial Sequence: Synthetic oligonucleotide
ugcagauuaucauacaggu

SEQ ID NO: 1256757 - RNA, 19 nt, Artificial Sequence
  Description of Artificial Sequence: Synthetic oligonucleotide
uugccaucacuucauaggg

SEQ ID NO: 1256758 - RNA, 19 nt, Artificial Sequence
  Description of Artificial Sequence: Synthetic oligonucleotide
uuguauuaggacuccacag

SEQ ID NO: 1256759 - RNA, 19 nt, Artificial Sequence
  Description of Artificial Sequence: Synthetic oligonucleotide
guagaaaagcuguucacag

SEQ ID NO: 1256760 - RNA, 19 nt, Artificial Sequence
  Description of Artificial Sequence: Synthetic oligonucleotide
auagcgaacaucaaccacg

SEQ ID NO: 1256761 - RNA, 19 nt, Artificial Sequence
  Description of Artificial Sequence: Synthetic oligonucleotide
acuucugcuggcucgaacg

SEQ ID NO: 1256762 - RNA, 19 nt, Artificial Sequence
  Description of Artificial Sequence: Synthetic oligonucleotide
aacggcacauugcuuauag

SEQ ID NO: 1256763 - RNA, 19 nt, Artificial Sequence
  Description of Artificial Sequence: Synthetic oligonucleotide
uucauugcuuguauuagga

SEQ ID NO: 1256764 - RNA, 19 nt, Artificial Sequence
  Description of Artificial Sequence: Synthetic oligonucleotide
cuccaaauaagauaucgug

SEQ ID NO: 1256765 - RNA, 19 nt, Artificial Sequence
  Description of Artificial Sequence: Synthetic oligonucleotide
ugacauauaaguguaauuu

SEQ ID NO: 1256766 - RNA, 19 nt, Artificial Sequence
  Description of Artificial Sequence: Synthetic oligonucleotide
cuauaaucugauguguucg

SEQ ID NO: 1256767 - RNA, 19 nt, Artificial Sequence
  Description of Artificial Sequence: Synthetic oligonucleotide
aacggguagccauuugcac

SEQ ID NO: 1256768 - RNA, 19 nt, Artificial Sequence
  Description of Artificial Sequence: Synthetic oligonucleotide
auugcuagggugguaaacg

SEQ ID NO: 1256769 - RNA, 19 nt, Artificial Sequence
  Description of Artificial Sequence: Synthetic oligonucleotide
ucggcaagcacugauaccc

SEQ ID NO: 1256770 - RNA, 19 nt, Artificial Sequence
  Description of Artificial Sequence: Synthetic oligonucleotide
acagccaugaaaguauugg

SEQ ID NO: 1256771 - RNA, 19 nt, Artificial Sequence
  Description of Artificial Sequence: Synthetic oligonucleotide
gaaacggguagccauuugc

SEQ ID NO: 1256772 - RNA, 19 nt, Artificial Sequence
  Description of Artificial Sequence: Synthetic oligonucleotide
aaucuauaaucugaugugu

SEQ ID NO: 1256773 - RNA, 19 nt, Artificial Sequence
  Description of Artificial Sequence: Synthetic oligonucleotide
auaugagccaaaucgaaaa

SEQ ID NO: 1256774 - RNA, 19 nt, Artificial Sequence
  Description of Artificial Sequence: Synthetic oligonucleotide
cugaucauaagugaggcug

SEQ ID NO: 1256775 - RNA, 19 nt, Artificial Sequence
  Description of Artificial Sequence: Synthetic oligonucleotide
auaccugcacuucugcugg

SEQ ID NO: 1256776 - RNA, 19 nt, Artificial Sequence
  Description of Artificial Sequence: Synthetic oligonucleotide
aaaacuccccaaaggacac

SEQ ID NO: 1256777 - RNA, 19 nt, Artificial Sequence
  Description of Artificial Sequence: Synthetic oligonucleotide
uguuaagauccucauugga

SEQ ID NO: 1256778 - RNA, 19 nt, Artificial Sequence
  Description of Artificial Sequence: Synthetic oligonucleotide
ugguaaacggcacauugcu

SEQ ID NO: 1256779 - RNA, 19 nt, Artificial Sequence
  Description of Artificial Sequence: Synthetic oligonucleotide
uauaugagccaaaucgaaa

SEQ ID NO: 1256780 - RNA, 19 nt, Artificial Sequence
  Description of Artificial Sequence: Synthetic oligonucleotide
uggacaaacccaaauggaa

SEQ ID NO: 1256781 - RNA, 19 nt, Artificial Sequence
  Description of Artificial Sequence: Synthetic oligonucleotide
uagaguaaaacuccccaaa

SEQ ID NO: 1256782 - RNA, 19 nt, Artificial Sequence
  Description of Artificial Sequence: Synthetic oligonucleotide
auagcgcacagacugguag

SEQ ID NO: 1256783 - RNA, 19 nt, Artificial Sequence
  Description of Artificial Sequence: Synthetic oligonucleotide
uauaaguguaauuuccauu

SEQ ID NO: 1256784 - RNA, 19 nt, Artificial Sequence
  Description of Artificial Sequence: Synthetic oligonucleotide
guaauuuccauugcccagg

SEQ ID NO: 1256785 - RNA, 19 nt, Artificial Sequence
  Description of Artificial Sequence: Synthetic oligonucleotide
uaaucugauguguucgucu

SEQ ID NO: 1256786 - RNA, 19 nt, Artificial Sequence
  Description of Artificial Sequence: Synthetic oligonucleotide
uguucgucucugcauauga

SEQ ID NO: 1256787 - RNA, 19 nt, Artificial Sequence
  Description of Artificial Sequence: Synthetic oligonucleotide
acauucguaaucccaaagu

SEQ ID NO: 1256788 - RNA, 19 nt, Artificial Sequence
  Description of Artificial Sequence: Synthetic oligonucleotide
uagcgaacaucaaccacgg

SEQ ID NO: 1256789 - RNA, 19 nt, Artificial Sequence
  Description of Artificial Sequence: Synthetic oligonucleotide
gcuggacaaacccaaaugg

SEQ ID NO: 1256790 - RNA, 19 nt, Artificial Sequence
  Description of Artificial Sequence: Synthetic oligonucleotide
ucuguuuaucucgagggug

SEQ ID NO: 1256791 - RNA, 19 nt, Artificial Sequence
  Description of Artificial Sequence: Synthetic oligonucleotide
aagucuguuugccaucacu

SEQ ID NO: 1256792 - RNA, 19 nt, Artificial Sequence
  Description of Artificial Sequence: Synthetic oligonucleotide
ggaacaugcaugaauacag

SEQ ID NO: 1256793 - RNA, 19 nt, Artificial Sequence
  Description of Artificial Sequence: Synthetic oligonucleotide
cauucguaaucccaaaguc

SEQ ID NO: 1256794 - RNA, 19 nt, Artificial Sequence
  Description of Artificial Sequence: Synthetic oligonucleotide
cucaccauaagccagagcu

SEQ ID NO: 1256795 - RNA, 19 nt, Artificial Sequence
  Description of Artificial Sequence: Synthetic oligonucleotide
uguugucuugccuaugcac

SEQ ID NO: 1256796 - RNA, 19 nt, Artificial Sequence
  Description of Artificial Sequence: Synthetic oligonucleotide
uguguugcagguccaguca

SEQ ID NO: 1256797 - RNA, 19 nt, Artificial Sequence
  Description of Artificial Sequence: Synthetic oligonucleotide
caaagagccagcacacugc

SEQ ID NO: 1256798 - RNA, 19 nt, Artificial Sequence
  Description of Artificial Sequence: Synthetic oligonucleotide
aaucgaaaaucaauaccug

SEQ ID NO: 1256799 - RNA, 19 nt, Artificial Sequence
  Description of Artificial Sequence: Synthetic oligonucleotide
uuaucaagguccuccuggc

SEQ ID NO: 1256800 - RNA, 19 nt, Artificial Sequence
  Description of Artificial Sequence: Synthetic oligonucleotide
cacaaagauccauagcaac

SEQ ID NO: 1256801 - RNA, 19 nt, Artificial Sequence
  Description of Artificial Sequence: Synthetic oligonucleotide
uguaccaaagccccagauc

SEQ ID NO: 1256802 - RNA, 19 nt, Artificial Sequence
  Description of Artificial Sequence: Synthetic oligonucleotide
uauaaucugauguguucgu

SEQ ID NO: 1256803 - RNA, 19 nt, Artificial Sequence
  Description of Artificial Sequence: Synthetic oligonucleotide
auauaaguguaauuuccau

SEQ ID NO: 1256804 - RNA, 19 nt, Artificial Sequence
  Description of Artificial Sequence: Synthetic oligonucleotide
guaacggccaaagagccag

SEQ ID NO: 1256805 - RNA, 19 nt, Artificial Sequence
  Description of Artificial Sequence: Synthetic oligonucleotide
caggucccuguuaagaucc

SEQ ID NO: 1256806 - RNA, 19 nt, Artificial Sequence
  Description of Artificial Sequence: Synthetic oligonucleotide
uucauaggauccaguacca

SEQ ID NO: 1256807 - RNA, 19 nt, Artificial Sequence
  Description of Artificial Sequence: Synthetic oligonucleotide
ugaucauaagugaggcuga

SEQ ID NO: 1256808 - RNA, 19 nt, Artificial Sequence
  Description of Artificial Sequence: Synthetic oligonucleotide
uugcuagggugguaaacgg

SEQ ID NO: 1256809 - RNA, 19 nt, Artificial Sequence
  Description of Artificial Sequence: Synthetic oligonucleotide
ugauguguucgucucugca

SEQ ID NO: 1256810 - RNA, 19 nt, Artificial Sequence
  Description of Artificial Sequence: Synthetic oligonucleotide
acgauuaugagcagcagca

SEQ ID NO: 1256811 - RNA, 19 nt, Artificial Sequence
  Description of Artificial Sequence: Synthetic oligonucleotide
guugucuugccuaugcacc

SEQ ID NO: 1256812 - RNA, 19 nt, Artificial Sequence
  Description of Artificial Sequence: Synthetic oligonucleotide
uccauagcaacagccauga

SEQ ID NO: 1256813 - RNA, 19 nt, Artificial Sequence
  Description of Artificial Sequence: Synthetic oligonucleotide
cagucgauaggccacaguc

SEQ ID NO: 1256814 - RNA, 19 nt, Artificial Sequence
  Description of Artificial Sequence: Synthetic oligonucleotide
agcccaaugggauauugca

SEQ ID NO: 1256815 - RNA, 19 nt, Artificial Sequence
  Description of Artificial Sequence: Synthetic oligonucleotide
gaauacaggucccuguuaa

SEQ ID NO: 1256816 - RNA, 19 nt, Artificial Sequence
  Description of Artificial Sequence: Synthetic oligonucleotide
gcgaacaucaaccacggug

SEQ ID NO: 1256817 - RNA, 19 nt, Artificial Sequence
  Description of Artificial Sequence: Synthetic oligonucleotide
guaaacggcacauugcuua

SEQ ID NO: 1256818 - RNA, 19 nt, Artificial Sequence
  Description of Artificial Sequence: Synthetic oligonucleotide
cauagcaacagccaugaaa

SEQ ID NO: 1256819 - RNA, 19 nt, Artificial Sequence
  Description of Artificial Sequence: Synthetic oligonucleotide
uaagugaggcugagcagcc

SEQ ID NO: 1256820 - RNA, 19 nt, Artificial Sequence
  Description of Artificial Sequence: Synthetic oligonucleotide
ggugguaaacggcacauug

SEQ ID NO: 1256821 - RNA, 19 nt, Artificial Sequence
  Description of Artificial Sequence: Synthetic oligonucleotide
cuuacacucacuccucgug

SEQ ID NO: 1256822 - RNA, 19 nt, Artificial Sequence
  Description of Artificial Sequence: Synthetic oligonucleotide
cagucuguuuaucucgagg

SEQ ID NO: 1256823 - RNA, 19 nt, Artificial Sequence
  Description of Artificial Sequence: Synthetic oligonucleotide
uggggacaaagccaaaguc

SEQ ID NO: 1256824 - RNA, 19 nt, Artificial Sequence
  Description of Artificial Sequence: Synthetic oligonucleotide
aaguauugggcaucuucaa

SEQ ID NO: 1256825 - RNA, 19 nt, Artificial Sequence
  Description of Artificial Sequence: Synthetic oligonucleotide
guauuaggacuccacagga

SEQ ID NO: 1256826 - RNA, 19 nt, Artificial Sequence
  Description of Artificial Sequence: Synthetic oligonucleotide
cugcauaugaagacagcug

SEQ ID NO: 1256827 - RNA, 19 nt, Artificial Sequence
  Description of Artificial Sequence: Synthetic oligonucleotide
ugacuuguugucuugccua

SEQ ID NO: 1256828 - RNA, 19 nt, Artificial Sequence
  Description of Artificial Sequence: Synthetic oligonucleotide
ucugauguguucgucucug

SEQ ID NO: 1256829 - RNA, 19 nt, Artificial Sequence
  Description of Artificial Sequence: Synthetic oligonucleotide
aggucaaccuuaucaaggu

SEQ ID NO: 1256830 - RNA, 19 nt, Artificial Sequence
  Description of Artificial Sequence: Synthetic oligonucleotide
ugggauauugcagauuauc

SEQ ID NO: 1256831 - RNA, 19 nt, Artificial Sequence
  Description of Artificial Sequence: Synthetic oligonucleotide
ucuggcgccagucaucaau

SEQ ID NO: 1256832 - RNA, 19 nt, Artificial Sequence
  Description of Artificial Sequence: Synthetic oligonucleotide
uugccuaugcaccuggauu

SEQ ID NO: 1256833 - RNA, 19 nt, Artificial Sequence
  Description of Artificial Sequence: Synthetic oligonucleotide
aaaguauugcuaggguggu

SEQ ID NO: 1256834 - RNA, 19 nt, Artificial Sequence
  Description of Artificial Sequence: Synthetic oligonucleotide
caccauguaauuaucaaua

SEQ ID NO: 1256835 - RNA, 19 nt, Artificial Sequence
  Description of Artificial Sequence: Synthetic oligonucleotide
ggcucgaacgauuaugagc

SEQ ID NO: 1256836 - RNA, 19 nt, Artificial Sequence
  Description of Artificial Sequence: Synthetic oligonucleotide
gcaaaguauugcuagggug

SEQ ID NO: 1256837 - RNA, 19 nt, Artificial Sequence
  Description of Artificial Sequence: Synthetic oligonucleotide
uagcgcacagacugguagg

SEQ ID NO: 1256838 - RNA, 19 nt, Artificial Sequence
  Description of Artificial Sequence: Synthetic oligonucleotide
agcaccauguaauuaucaa

SEQ ID NO: 1256839 - RNA, 19 nt, Artificial Sequence
  Description of Artificial Sequence: Synthetic oligonucleotide
ugcccuuuuagaugaccag

SEQ ID NO: 1256840 - RNA, 19 nt, Artificial Sequence
  Description of Artificial Sequence: Synthetic oligonucleotide
ugcuagggugguaaacggc

SEQ ID NO: 1256841 - RNA, 19 nt, Artificial Sequence
  Description of Artificial Sequence: Synthetic oligonucleotide
auguuacucugcccacugc

SEQ ID NO: 1256842 - RNA, 19 nt, Artificial Sequence
  Description of Artificial Sequence: Synthetic oligonucleotide
ucgaggcguuguaagaucu

SEQ ID NO: 1256843 - RNA, 19 nt, Artificial Sequence
  Description of Artificial Sequence: Synthetic oligonucleotide
auacagguaacggccaaag

SEQ ID NO: 1256844 - RNA, 19 nt, Artificial Sequence
  Description of Artificial Sequence: Synthetic oligonucleotide
ugccuaugcaccuggauuu

SEQ ID NO: 1256845 - RNA, 19 nt, Artificial Sequence
  Description of Artificial Sequence: Synthetic oligonucleotide
augacuuguugucuugccu

SEQ ID NO: 1256846 - RNA, 19 nt, Artificial Sequence
  Description of Artificial Sequence: Synthetic oligonucleotide
ucuuagguagugguccuug

SEQ ID NO: 1256847 - RNA, 19 nt, Artificial Sequence
  Description of Artificial Sequence: Synthetic oligonucleotide
uaucaauauaugagccaaa

SEQ ID NO: 1256848 - RNA, 19 nt, Artificial Sequence
  Description of Artificial Sequence: Synthetic oligonucleotide
ucguggaaagucuggcgcc

SEQ ID NO: 1256849 - RNA, 19 nt, Artificial Sequence
  Description of Artificial Sequence: Synthetic oligonucleotide
aaacggguagccauuugca

SEQ ID NO: 1256850 - RNA, 19 nt, Artificial Sequence
  Description of Artificial Sequence: Synthetic oligonucleotide
ucgaacgauuaugagcagc

SEQ ID NO: 1256851 - RNA, 19 nt, Artificial Sequence
  Description of Artificial Sequence: Synthetic oligonucleotide
guauugggcaucuucaagu

SEQ ID NO: 1256852 - RNA, 19 nt, Artificial Sequence
  Description of Artificial Sequence: Synthetic oligonucleotide
aaggacacaaggaccccuc

SEQ ID NO: 1256853 - RNA, 19 nt, Artificial Sequence
  Description of Artificial Sequence: Synthetic oligonucleotide
acucacuccucguggcucg

SEQ ID NO: 1256854 - RNA, 19 nt, Artificial Sequence
  Description of Artificial Sequence: Synthetic oligonucleotide
aguucaggucacaaagauc

SEQ ID NO: 1256855 - RNA, 19 nt, Artificial Sequence
  Description of Artificial Sequence: Synthetic oligonucleotide
uaucgugaauccucagggu

SEQ ID NO: 1256856 - RNA, 19 nt, Artificial Sequence
  Description of Artificial Sequence: Synthetic oligonucleotide
agcgcacagacugguaggc

SEQ ID NO: 1256857 - RNA, 19 nt, Artificial Sequence
  Description of Artificial Sequence: Synthetic oligonucleotide
gcucgaacgauuaugagca

SEQ ID NO: 1256858 - RNA, 19 nt, Artificial Sequence
  Description of Artificial Sequence: Synthetic oligonucleotide
ccaaaucgaaaaucaauac

SEQ ID NO: 1256859 - RNA, 19 nt, Artificial Sequence
  Description of Artificial Sequence: Synthetic oligonucleotide
uuguugucuugccuaugca

SEQ ID NO: 1256860 - RNA, 19 nt, Artificial Sequence
  Description of Artificial Sequence: Synthetic oligonucleotide
cucuuacacucacuccucg

SEQ ID NO: 1256861 - RNA, 19 nt, Artificial Sequence
  Description of Artificial Sequence: Synthetic oligonucleotide
cauaagccagagcucgagc

SEQ ID NO: 1256862 - RNA, 19 nt, Artificial Sequence
  Description of Artificial Sequence: Synthetic oligonucleotide
uucauguuacucugcccac

SEQ ID NO: 1256863 - RNA, 19 nt, Artificial Sequence
  Description of Artificial Sequence: Synthetic oligonucleotide
gacggugguagaguaaaac

SEQ ID NO: 1256864 - RNA, 19 nt, Artificial Sequence
  Description of Artificial Sequence: Synthetic oligonucleotide
uauugcuagggugguaaac

SEQ ID NO: 1256865 - RNA, 19 nt, Artificial Sequence
  Description of Artificial Sequence: Synthetic oligonucleotide
ugaauacaggucccuguua

SEQ ID NO: 1256866 - RNA, 19 nt, Artificial Sequence
  Description of Artificial Sequence: Synthetic oligonucleotide
augcaugaauacagguccc

SEQ ID NO: 1256867 - RNA, 19 nt, Artificial Sequence
  Description of Artificial Sequence: Synthetic oligonucleotide
agacggucacugcaacagg

SEQ ID NO: 1256868 - RNA, 19 nt, Artificial Sequence
  Description of Artificial Sequence: Synthetic oligonucleotide
ggagaucucaaaugacuug

SEQ ID NO: 1256869 - RNA, 19 nt, Artificial Sequence
  Description of Artificial Sequence: Synthetic oligonucleotide
acaaggaccccucacucuu

SEQ ID NO: 1256870 - RNA, 19 nt, Artificial Sequence
  Description of Artificial Sequence: Synthetic oligonucleotide
ggaaaucuauaaucugaug

SEQ ID NO: 1256871 - RNA, 19 nt, Artificial Sequence
  Description of Artificial Sequence: Synthetic oligonucleotide
gcacugauacccaagauca

SEQ ID NO: 1256872 - RNA, 19 nt, Artificial Sequence
  Description of Artificial Sequence: Synthetic oligonucleotide
uuuagaugaccaggcuuca

SEQ ID NO: 1256873 - RNA, 19 nt, Artificial Sequence
  Description of Artificial Sequence: Synthetic oligonucleotide
gaacaucaaccacggugcc

SEQ ID NO: 1256874 - RNA, 19 nt, Artificial Sequence
  Description of Artificial Sequence: Synthetic oligonucleotide
acggccaaagagccagcac

SEQ ID NO: 1256875 - RNA, 19 nt, Artificial Sequence
  Description of Artificial Sequence: Synthetic oligonucleotide
agaucagggucuugguaga

SEQ ID NO: 1256876 - RNA, 19 nt, Artificial Sequence
  Description of Artificial Sequence: Synthetic oligonucleotide
aucaauaccugcacuucug

SEQ ID NO: 1256877 - RNA, 19 nt, Artificial Sequence
  Description of Artificial Sequence: Synthetic oligonucleotide
ucguaaucccaaagucugu

SEQ ID NO: 1256878 - RNA, 19 nt, Artificial Sequence
  Description of Artificial Sequence: Synthetic oligonucleotide
uggaccaugacaggucaac

SEQ ID NO: 1256879 - RNA, 19 nt, Artificial Sequence
  Description of Artificial Sequence: Synthetic oligonucleotide
aacuccuucgaggcguugu

SEQ ID NO: 1256880 - RNA, 19 nt, Artificial Sequence
  Description of Artificial Sequence: Synthetic oligonucleotide
uucgaggcguuguaagauc

SEQ ID NO: 1256881 - RNA, 19 nt, Artificial Sequence
  Description of Artificial Sequence: Synthetic oligonucleotide
gggacaaagccaaagucug

SEQ ID NO: 1256882 - RNA, 19 nt, Artificial Sequence
  Description of Artificial Sequence: Synthetic oligonucleotide
cuggcucgaacgauuauga

SEQ ID NO: 1256883 - RNA, 19 nt, Artificial Sequence
  Description of Artificial Sequence: Synthetic oligonucleotide
aacagccaugaaaguauug

SEQ ID NO: 1256884 - RNA, 19 nt, Artificial Sequence
  Description of Artificial Sequence: Synthetic oligonucleotide
gguagaaaagcuguucaca

SEQ ID NO: 1256885 - RNA, 19 nt, Artificial Sequence
  Description of Artificial Sequence: Synthetic oligonucleotide
acagucuguuuaucucgag

SEQ ID NO: 1256886 - RNA, 19 nt, Artificial Sequence
  Description of Artificial Sequence: Synthetic oligonucleotide
caaagccccagaucaccgc

SEQ ID NO: 1256887 - RNA, 19 nt, Artificial Sequence
  Description of Artificial Sequence: Synthetic oligonucleotide
cccuuuuagaugaccaggc

SEQ ID NO: 1256888 - RNA, 19 nt, Artificial Sequence
  Description of Artificial Sequence: Synthetic oligonucleotide
gaacgauuaugagcagcag

SEQ ID NO: 1256889 - RNA, 19 nt, Artificial Sequence
  Description of Artificial Sequence: Synthetic oligonucleotide
gguccagucacagacggug

SEQ ID NO: 1256890 - RNA, 19 nt, Artificial Sequence
  Description of Artificial Sequence: Synthetic oligonucleotide
uggcucgaacgauuaugag

SEQ ID NO: 1256891 - RNA, 19 nt, Artificial Sequence
  Description of Artificial Sequence: Synthetic oligonucleotide
agguguaccaaagccccag

SEQ ID NO: 1256892 - RNA, 19 nt, Artificial Sequence
  Description of Artificial Sequence: Synthetic oligonucleotide
cucguggucugaagaauuc

SEQ ID NO: 1256893 - RNA, 19 nt, Artificial Sequence
  Description of Artificial Sequence: Synthetic oligonucleotide
cacucuuacacucacuccu

SEQ ID NO: 1256894 - RNA, 19 nt, Artificial Sequence
  Description of Artificial Sequence: Synthetic oligonucleotide
ugcaugaauacaggucccu

SEQ ID NO: 1256895 - RNA, 19 nt, Artificial Sequence
  Description of Artificial Sequence: Synthetic oligonucleotide
cuggcgccagucaucaaug

SEQ ID NO: 1256896 - RNA, 19 nt, Artificial Sequence
  Description of Artificial Sequence: Synthetic oligonucleotide
ucucaccauaagccagagc

SEQ ID NO: 1256897 - RNA, 19 nt, Artificial Sequence
  Description of Artificial Sequence: Synthetic oligonucleotide
aacacagaccccagggaaa

SEQ ID NO: 1256898 - RNA, 19 nt, Artificial Sequence
  Description of Artificial Sequence: Synthetic oligonucleotide
cagcccaaugggauauugc

SEQ ID NO: 1256899 - RNA, 19 nt, Artificial Sequence
  Description of Artificial Sequence: Synthetic oligonucleotide
agaaacggguagccauuug

SEQ ID NO: 1256900 - RNA, 19 nt, Artificial Sequence
  Description of Artificial Sequence: Synthetic oligonucleotide
ucacugcaacaggagaucu

SEQ ID NO: 1256901 - RNA, 19 nt, Artificial Sequence
  Description of Artificial Sequence: Synthetic oligonucleotide
ucauguuacucugcccacu

SEQ ID NO: 1256902 - RNA, 19 nt, Artificial Sequence
  Description of Artificial Sequence: Synthetic oligonucleotide
cagucacagacggugguag

SEQ ID NO: 1256903 - RNA, 19 nt, Artificial Sequence
  Description of Artificial Sequence: Synthetic oligonucleotide
ugggagccaucguggaaag

SEQ ID NO: 1256904 - RNA, 19 nt, Artificial Sequence
  Description of Artificial Sequence: Synthetic oligonucleotide
gaucaccgccccugaaggc

SEQ ID NO: 1256905 - RNA, 19 nt, Artificial Sequence
  Description of Artificial Sequence: Synthetic oligonucleotide
cucggcaagcacugauacc

SEQ ID NO: 1256906 - RNA, 19 nt, Artificial Sequence
  Description of Artificial Sequence: Synthetic oligonucleotide
acagacggucacugcaaca

SEQ ID NO: 1256907 - RNA, 19 nt, Artificial Sequence
  Description of Artificial Sequence: Synthetic oligonucleotide
agucuguuugccaucacuu

SEQ ID NO: 1256908 - RNA, 19 nt, Artificial Sequence
  Description of Artificial Sequence: Synthetic oligonucleotide
cauuugcacagacggucac

SEQ ID NO: 1256909 - RNA, 19 nt, Artificial Sequence
  Description of Artificial Sequence: Synthetic oligonucleotide
ccaaagagccagcacacug

SEQ ID NO: 1256910 - RNA, 19 nt, Artificial Sequence
  Description of Artificial Sequence: Synthetic oligonucleotide
uggcucguggucugaagaa

SEQ ID NO: 1256911 - RNA, 19 nt, Artificial Sequence
  Description of Artificial Sequence: Synthetic oligonucleotide
gcccuuuuagaugaccagg

SEQ ID NO: 1256912 - RNA, 19 nt, Artificial Sequence
  Description of Artificial Sequence: Synthetic oligonucleotide
aacggccaaagagccagca

SEQ ID NO: 1256913 - RNA, 19 nt, Artificial Sequence
  Description of Artificial Sequence: Synthetic oligonucleotide
ucguggucugaagaauucu

SEQ ID NO: 1256914 - RNA, 19 nt, Artificial Sequence
  Description of Artificial Sequence: Synthetic oligonucleotide
ggcacauugcuuauaguca

SEQ ID NO: 1256915 - RNA, 19 nt, Artificial Sequence
  Description of Artificial Sequence: Synthetic oligonucleotide
agcggaucucaggaaaucu

SEQ ID NO: 1256916 - RNA, 19 nt, Artificial Sequence
  Description of Artificial Sequence: Synthetic oligonucleotide
agauagcgcacagacuggu

SEQ ID NO: 1256917 - RNA, 19 nt, Artificial Sequence
  Description of Artificial Sequence: Synthetic oligonucleotide
agucuggcgccagucauca

SEQ ID NO: 1256918 - RNA, 19 nt, Artificial Sequence
  Description of Artificial Sequence: Synthetic oligonucleotide
ucauaggauccaguaccac

SEQ ID NO: 1256919 - RNA, 19 nt, Artificial Sequence
  Description of Artificial Sequence: Synthetic oligonucleotide
uggaaagucuggcgccagu

SEQ ID NO: 1256920 - RNA, 19 nt, Artificial Sequence
  Description of Artificial Sequence: Synthetic oligonucleotide
aucaccgccccugaaggcu

SEQ ID NO: 1256921 - RNA, 19 nt, Artificial Sequence
  Description of Artificial Sequence: Synthetic oligonucleotide
agucgauaggccacagucu

SEQ ID NO: 1256922 - RNA, 19 nt, Artificial Sequence
  Description of Artificial Sequence: Synthetic oligonucleotide
guuacucugcccacugcac

SEQ ID NO: 1256923 - RNA, 19 nt, Artificial Sequence
  Description of Artificial Sequence: Synthetic oligonucleotide
uggagugggcuuucacagu

SEQ ID NO: 1256924 - RNA, 19 nt, Artificial Sequence
  Description of Artificial Sequence: Synthetic oligonucleotide
gccaaaucgaaaaucaaua

SEQ ID NO: 1256925 - RNA, 19 nt, Artificial Sequence
  Description of Artificial Sequence: Synthetic oligonucleotide
aacgcucugucugcuucug

SEQ ID NO: 1256926 - RNA, 19 nt, Artificial Sequence
  Description of Artificial Sequence: Synthetic oligonucleotide
ggcguuguaagaucuguaa

SEQ ID NO: 1256927 - RNA, 19 nt, Artificial Sequence
  Description of Artificial Sequence: Synthetic oligonucleotide
cuuuuagaugaccaggcuu

SEQ ID NO: 1256928 - RNA, 19 nt, Artificial Sequence
  Description of Artificial Sequence: Synthetic oligonucleotide
gcguuguaagaucuguaac

SEQ ID NO: 1256929 - RNA, 19 nt, Artificial Sequence
  Description of Artificial Sequence: Synthetic oligonucleotide
ggcauuccagaggacagag

SEQ ID NO: 1256930 - RNA, 19 nt, Artificial Sequence
  Description of Artificial Sequence: Synthetic oligonucleotide
cacagucuguuuaucucga

SEQ ID NO: 1256931 - RNA, 19 nt, Artificial Sequence
  Description of Artificial Sequence: Synthetic oligonucleotide
uccucguggcucguggucu

SEQ ID NO: 1256932 - RNA, 19 nt, Artificial Sequence
  Description of Artificial Sequence: Synthetic oligonucleotide
agugguccuugaaaggcca

SEQ ID NO: 1256933 - RNA, 19 nt, Artificial Sequence
  Description of Artificial Sequence: Synthetic oligonucleotide
cccaaugggauauugcaga

SEQ ID NO: 1256934 - RNA, 19 nt, Artificial Sequence
  Description of Artificial Sequence: Synthetic oligonucleotide
ugucuugccuaugcaccug

SEQ ID NO: 1256935 - RNA, 19 nt, Artificial Sequence
  Description of Artificial Sequence: Synthetic oligonucleotide
ugccucggcaagcacugau

SEQ ID NO: 1256936 - RNA, 19 nt, Artificial Sequence
  Description of Artificial Sequence: Synthetic oligonucleotide
uaacggccaaagagccagc

SEQ ID NO: 1256937 - RNA, 19 nt, Artificial Sequence
  Description of Artificial Sequence: Synthetic oligonucleotide
cacagaaacggguagccau

SEQ ID NO: 1256938 - RNA, 19 nt, Artificial Sequence
  Description of Artificial Sequence: Synthetic oligonucleotide
uggcauuccagaggacaga

SEQ ID NO: 1256939 - RNA, 19 nt, Artificial Sequence
  Description of Artificial Sequence: Synthetic oligonucleotide
cucgaacgauuaugagcag

SEQ ID NO: 1256940 - RNA, 19 nt, Artificial Sequence
  Description of Artificial Sequence: Synthetic oligonucleotide
gguagccauuugcacagac

SEQ ID NO: 1256941 - RNA, 19 nt, Artificial Sequence
  Description of Artificial Sequence: Synthetic oligonucleotide
gcuagggugguaaacggca

SEQ ID NO: 1256942 - RNA, 19 nt, Artificial Sequence
  Description of Artificial Sequence: Synthetic oligonucleotide
gugcccuuuuagaugacca

SEQ ID NO: 1256943 - RNA, 19 nt, Artificial Sequence
  Description of Artificial Sequence: Synthetic oligonucleotide
uggauggaucauggcauuc

SEQ ID NO: 1256944 - RNA, 19 nt, Artificial Sequence
  Description of Artificial Sequence: Synthetic oligonucleotide
ucaccgccccugaaggcuc

SEQ ID NO: 1256945 - RNA, 19 nt, Artificial Sequence
  Description of Artificial Sequence: Synthetic oligonucleotide
ggugaguucaggucacaaa

SEQ ID NO: 1256946 - RNA, 19 nt, Artificial Sequence
  Description of Artificial Sequence: Synthetic oligonucleotide
ggugcagucgauaggccac

SEQ ID NO: 1256947 - RNA, 19 nt, Artificial Sequence
  Description of Artificial Sequence: Synthetic oligonucleotide
cuuggcacaaggucacugu

SEQ ID NO: 1256948 - RNA, 19 nt, Artificial Sequence
  Description of Artificial Sequence: Synthetic oligonucleotide
agaccagcccaaugggaua

SEQ ID NO: 1256949 - RNA, 19 nt, Artificial Sequence
  Description of Artificial Sequence: Synthetic oligonucleotide
aaggugaguucaggucaca

SEQ ID NO: 1256950 - RNA, 19 nt, Artificial Sequence
  Description of Artificial Sequence: Synthetic oligonucleotide
uggcgccagucaucaauga

SEQ ID NO: 1256951 - RNA, 19 nt, Artificial Sequence
  Description of Artificial Sequence: Synthetic oligonucleotide
cagacggugguagaguaaa

SEQ ID NO: 1256952 - RNA, 19 nt, Artificial Sequence
  Description of Artificial Sequence: Synthetic oligonucleotide
acggcacauugcuuauagu

SEQ ID NO: 1256953 - RNA, 19 nt, Artificial Sequence
  Description of Artificial Sequence: Synthetic oligonucleotide
uaucucgaggguggaugcu

SEQ ID NO: 1256954 - RNA, 19 nt, Artificial Sequence
  Description of Artificial Sequence: Synthetic oligonucleotide
acuccuucgaggcguugua

SEQ ID NO: 1256955 - RNA, 19 nt, Artificial Sequence
  Description of Artificial Sequence: Synthetic oligonucleotide
cugacauauaaguguaauu

SEQ ID NO: 1256956 - RNA, 19 nt, Artificial Sequence
  Description of Artificial Sequence: Synthetic oligonucleotide
cgaacgauuaugagcagca

SEQ ID NO: 1256957 - RNA, 19 nt, Artificial Sequence
  Description of Artificial Sequence: Synthetic oligonucleotide
ggugccucggcaagcacug

SEQ ID NO: 1256958 - RNA, 19 nt, Artificial Sequence
  Description of Artificial Sequence: Synthetic oligonucleotide
acggugccucggcaagcac

SEQ ID NO: 1256959 - RNA, 19 nt, Artificial Sequence
  Description of Artificial Sequence: Synthetic oligonucleotide
ccaaauggaaagaaacgcu

SEQ ID NO: 1256960 - RNA, 19 nt, Artificial Sequence
  Description of Artificial Sequence: Synthetic oligonucleotide
acuccucguggcucguggu

SEQ ID NO: 1256961 - RNA, 19 nt, Artificial Sequence
  Description of Artificial Sequence: Synthetic oligonucleotide
gcugucugaugccagcgga

SEQ ID NO: 1256962 - RNA, 19 nt, Artificial Sequence
  Description of Artificial Sequence: Synthetic oligonucleotide
gcccaaugggauauugcag

SEQ ID NO: 1256963 - RNA, 19 nt, Artificial Sequence
  Description of Artificial Sequence: Synthetic oligonucleotide
gaggcguuguaagaucugu

SEQ ID NO: 1256964 - RNA, 19 nt, Artificial Sequence
  Description of Artificial Sequence: Synthetic oligonucleotide
cagccuacugugagccaac

SEQ ID NO: 1256965 - RNA, 19 nt, Artificial Sequence
  Description of Artificial Sequence: Synthetic oligonucleotide
aaguauugcuaggguggua

SEQ ID NO: 1256966 - RNA, 19 nt, Artificial Sequence
  Description of Artificial Sequence: Synthetic oligonucleotide
uucugcuggcucgaacgau

SEQ ID NO: 1256967 - RNA, 19 nt, Artificial Sequence
  Description of Artificial Sequence: Synthetic oligonucleotide
ugguaccauaucaccccuu

SEQ ID NO: 1256968 - RNA, 19 nt, Artificial Sequence
  Description of Artificial Sequence: Synthetic oligonucleotide
cacucacuccucguggcuc

SEQ ID NO: 1256969 - RNA, 19 nt, Artificial Sequence
  Description of Artificial Sequence: Synthetic oligonucleotide
guguucgucucugcauaug

SEQ ID NO: 1256970 - RNA, 19 nt, Artificial Sequence
  Description of Artificial Sequence: Synthetic oligonucleotide
cgccagucaucaaugagug

SEQ ID NO: 1256971 - RNA, 19 nt, Artificial Sequence
  Description of Artificial Sequence: Synthetic oligonucleotide
guauugcuagggugguaaa

SEQ ID NO: 1256972 - RNA, 19 nt, Artificial Sequence
  Description of Artificial Sequence: Synthetic oligonucleotide
aaacggcacauugcuuaua

SEQ ID NO: 1256973 - RNA, 19 nt, Artificial Sequence
  Description of Artificial Sequence: Synthetic oligonucleotide
caauaccugcacuucugcu

SEQ ID NO: 1256974 - RNA, 19 nt, Artificial Sequence
  Description of Artificial Sequence: Synthetic oligonucleotide
ugccagcggaucucaggaa

SEQ ID NO: 1256975 - RNA, 19 nt, Artificial Sequence
  Description of Artificial Sequence: Synthetic oligonucleotide
cuccucguggcucgugguc

SEQ ID NO: 1256976 - RNA, 19 nt, Artificial Sequence
  Description of Artificial Sequence: Synthetic oligonucleotide
aaugggugucccaccccaa

SEQ ID NO: 1256977 - RNA, 19 nt, Artificial Sequence
  Description of Artificial Sequence: Synthetic oligonucleotide
aggugaguucaggucacaa

SEQ ID NO: 1256978 - RNA, 19 nt, Artificial Sequence
  Description of Artificial Sequence: Synthetic oligonucleotide
gccuacugugagccaacag

SEQ ID NO: 1256979 - RNA, 19 nt, Artificial Sequence
  Description of Artificial Sequence: Synthetic oligonucleotide
gcaacagccaugaaaguau

SEQ ID NO: 1256980 - RNA, 19 nt, Artificial Sequence
  Description of Artificial Sequence: Synthetic oligonucleotide
ccccaggugcagucgauag

SEQ ID NO: 1256981 - RNA, 19 nt, Artificial Sequence
  Description of Artificial Sequence: Synthetic oligonucleotide
cagcggaucucaggaaauc

SEQ ID NO: 1256982 - RNA, 19 nt, Artificial Sequence
  Description of Artificial Sequence: Synthetic oligonucleotide
uucuuagguagugguccuu

SEQ ID NO: 1256983 - RNA, 19 nt, Artificial Sequence
  Description of Artificial Sequence: Synthetic oligonucleotide
agcgaacaucaaccacggu

SEQ ID NO: 1256984 - RNA, 19 nt, Artificial Sequence
  Description of Artificial Sequence: Synthetic oligonucleotide
agcagccuacugugagcca

SEQ ID NO: 1256985 - RNA, 19 nt, Artificial Sequence
  Description of Artificial Sequence: Synthetic oligonucleotide
aggaccccucacucuuaca

SEQ ID NO: 1256986 - RNA, 19 nt, Artificial Sequence
  Description of Artificial Sequence: Synthetic oligonucleotide
ccuugaaaggccaaauuuu

SEQ ID NO: 1256987 - RNA, 19 nt, Artificial Sequence
  Description of Artificial Sequence: Synthetic oligonucleotide
gauagcgcacagacuggua

SEQ ID NO: 1256988 - RNA, 19 nt, Artificial Sequence
  Description of Artificial Sequence: Synthetic oligonucleotide
accauaagccagagcucga

SEQ ID NO: 1256989 - RNA, 19 nt, Artificial Sequence
  Description of Artificial Sequence: Synthetic oligonucleotide
gccagcggaucucaggaaa

SEQ ID NO: 1256990 - RNA, 19 nt, Artificial Sequence
  Description of Artificial Sequence: Synthetic oligonucleotide
uacccaagaucagggucuu

SEQ ID NO: 1256991 - RNA, 19 nt, Artificial Sequence
  Description of Artificial Sequence: Synthetic oligonucleotide
gguaccauaucaccccuuu

SEQ ID NO: 1256992 - RNA, 19 nt, Artificial Sequence
  Description of Artificial Sequence: Synthetic oligonucleotide
ccaggcuucaauggguguc

SEQ ID NO: 1256993 - RNA, 19 nt, Artificial Sequence
  Description of Artificial Sequence: Synthetic oligonucleotide
cagguguaccaaagcccca

SEQ ID NO: 1256994 - RNA, 19 nt, Artificial Sequence
  Description of Artificial Sequence: Synthetic oligonucleotide
ccuucgaggcguuguaaga

SEQ ID NO: 1256995 - RNA, 19 nt, Artificial Sequence
  Description of Artificial Sequence: Synthetic oligonucleotide
ucacuccucguggcucgug

SEQ ID NO: 1256996 - RNA, 19 nt, Artificial Sequence
  Description of Artificial Sequence: Synthetic oligonucleotide
cuucgaggcguuguaagau

SEQ ID NO: 1256997 - RNA, 19 nt, Artificial Sequence
  Description of Artificial Sequence: Synthetic oligonucleotide
cccaacuggaggagaccag

SEQ ID NO: 1256998 - RNA, 19 nt, Artificial Sequence
  Description of Artificial Sequence: Synthetic oligonucleotide
caggcauagcgaacaucaa

SEQ ID NO: 1256999 - RNA, 19 nt, Artificial Sequence
  Description of Artificial Sequence: Synthetic oligonucleotide
augggauauugcagauuau

SEQ ID NO: 1257000 - RNA, 19 nt, Artificial Sequence
  Description of Artificial Sequence: Synthetic oligonucleotide
cuugccuaugcaccuggau

SEQ ID NO: 1257001 - RNA, 19 nt, Artificial Sequence
  Description of Artificial Sequence: Synthetic oligonucleotide
cugcuggcucgaacgauua

SEQ ID NO: 1257002 - RNA, 19 nt, Artificial Sequence
  Description of Artificial Sequence: Synthetic oligonucleotide
caccgccccugaaggcucc

SEQ ID NO: 1257003 - RNA, 19 nt, Artificial Sequence
  Description of Artificial Sequence: Synthetic oligonucleotide
gguaacggccaaagagcca

SEQ ID NO: 1257004 - RNA, 19 nt, Artificial Sequence
  Description of Artificial Sequence: Synthetic oligonucleotide
ccauaucaccccuuucaaa

SEQ ID NO: 1257005 - RNA, 19 nt, Artificial Sequence
  Description of Artificial Sequence: Synthetic oligonucleotide
gugggcuuucacagugguc

SEQ ID NO: 1257006 - RNA, 19 nt, Artificial Sequence
  Description of Artificial Sequence: Synthetic oligonucleotide
gugcagucgauaggccaca

SEQ ID NO: 1257007 - RNA, 19 nt, Artificial Sequence
  Description of Artificial Sequence: Synthetic oligonucleotide
gcagccuacugugagccaa

SEQ ID NO: 1257008 - RNA, 19 nt, Artificial Sequence
  Description of Artificial Sequence: Synthetic oligonucleotide
gcagauuaucauacaggua

SEQ ID NO: 1257009 - RNA, 19 nt, Artificial Sequence
  Description of Artificial Sequence: Synthetic oligonucleotide
cacggugccucggcaagca

SEQ ID NO: 1257010 - RNA, 19 nt, Artificial Sequence
  Description of Artificial Sequence: Synthetic oligonucleotide
agacggugguagaguaaaa

SEQ ID NO: 1257011 - RNA, 19 nt, Artificial Sequence
  Description of Artificial Sequence: Synthetic oligonucleotide
agguccagucacagacggu

SEQ ID NO: 1257012 - RNA, 19 nt, Artificial Sequence
  Description of Artificial Sequence: Synthetic oligonucleotide
gccaacuccuucgaggcgu

SEQ ID NO: 1257013 - RNA, 19 nt, Artificial Sequence
  Description of Artificial Sequence: Synthetic oligonucleotide
ggauuucagugcccuuuua

SEQ ID NO: 1257014 - RNA, 19 nt, Artificial Sequence
  Description of Artificial Sequence: Synthetic oligonucleotide
aguuggggacaaagccaaa

SEQ ID NO: 1257015 - RNA, 19 nt, Artificial Sequence
  Description of Artificial Sequence: Synthetic oligonucleotide
acccaagaucagggucuug

SEQ ID NO: 1257016 - RNA, 19 nt, Artificial Sequence
  Description of Artificial Sequence: Synthetic oligonucleotide
gcggaucucaggaaaucua

SEQ ID NO: 1257017 - RNA, 19 nt, Artificial Sequence
  Description of Artificial Sequence: Synthetic oligonucleotide
ccuaugcaccuggauuuuc

SEQ ID NO: 1257018 - RNA, 19 nt, Artificial Sequence
  Description of Artificial Sequence: Synthetic oligonucleotide
ccuuuuagaugaccaggcu

SEQ ID NO: 1257019 - RNA, 19 nt, Artificial Sequence
  Description of Artificial Sequence: Synthetic oligonucleotide
cguggcucguggucugaag

SEQ ID NO: 1257020 - RNA, 19 nt, Artificial Sequence
  Description of Artificial Sequence: Synthetic oligonucleotide
ccaagaucagggucuuggu

SEQ ID NO: 1257021 - RNA, 19 nt, Artificial Sequence
  Description of Artificial Sequence: Synthetic oligonucleotide
gcagucgauaggccacagu

SEQ ID NO: 1257022 - RNA, 19 nt, Artificial Sequence
  Description of Artificial Sequence: Synthetic oligonucleotide
cggaucucaggaaaucuau

SEQ ID NO: 1257023 - RNA, 19 nt, Artificial Sequence
  Description of Artificial Sequence: Synthetic oligonucleotide
ccacggugccucggcaagc

SEQ ID NO: 1257024 - RNA, 19 nt, Artificial Sequence
  Description of Artificial Sequence: Synthetic oligonucleotide
gcucguggucugaagaauu

SEQ ID NO: 1257025 - RNA, 19 nt, Artificial Sequence
  Description of Artificial Sequence: Synthetic oligonucleotide
gccucggcaagcacugaua

SEQ ID NO: 1257026 - RNA, 19 nt, Artificial Sequence
  Description of Artificial Sequence: Synthetic oligonucleotide
cccagaucaccgccccuga

SEQ ID NO: 1257027 - RNA, 19 nt, Artificial Sequence
  Description of Artificial Sequence: Synthetic oligonucleotide
gcgcacagacugguaggca

SEQ ID NO: 1257028 - RNA, 19 nt, Artificial Sequence
  Description of Artificial Sequence: Synthetic oligonucleotide
gucuggcgccagucaucaa

SEQ ID NO: 1257029 - RNA, 19 nt, Artificial Sequence
  Description of Artificial Sequence: Synthetic oligonucleotide
ccagaucaccgccccugaa

SEQ ID NO: 1257030 - RNA, 19 nt, Artificial Sequence
  Description of Artificial Sequence: Synthetic oligonucleotide
cguaaucccaaagucuguu

SEQ ID NO: 1257031 - RNA, 19 nt, Artificial Sequence
  Description of Artificial Sequence: Synthetic oligonucleotide
cucacuccucguggcucgu

SEQ ID NO: 1257032 - RNA, 19 nt, Artificial Sequence
  Description of Artificial Sequence: Synthetic oligonucleotide
gggugguaaacggcacauu

SEQ ID NO: 1257033 - RNA, 19 nt, Artificial Sequence
  Description of Artificial Sequence: Synthetic oligonucleotide
gccuaugcaccuggauuuu

SEQ ID NO: 1257034 - RNA, 19 nt, Artificial Sequence
  Description of Artificial Sequence: Synthetic oligonucleotide
gccccagaucaccgccccu

SEQ ID NO: 1257035 - RNA, 19 nt, Artificial Sequence
  Description of Artificial Sequence: Synthetic oligonucleotide
ccgccccugaaggcuccuu

SEQ ID NO: 1257036 - RNA, 19 nt, Artificial Sequence
  Description of Artificial Sequence: Synthetic oligonucleotide
aaaguuugcauucauacga

SEQ ID NO: 1257037 - RNA, 19 nt, Artificial Sequence
  Description of Artificial Sequence: Synthetic oligonucleotide
aggauagucaaucuggaac

SEQ ID NO: 1257038 - RNA, 19 nt, Artificial Sequence
  Description of Artificial Sequence: Synthetic oligonucleotide
uucauacgaucccagaugg

SEQ ID NO: 1257039 - RNA, 19 nt, Artificial Sequence
  Description of Artificial Sequence: Synthetic oligonucleotide
uugggugugagccagguag

SEQ ID NO: 1257040 - RNA, 19 nt, Artificial Sequence
  Description of Artificial Sequence: Synthetic oligonucleotide
augucaaugguuucuaagg

SEQ ID NO: 1257041 - RNA, 19 nt, Artificial Sequence
  Description of Artificial Sequence: Synthetic oligonucleotide
acagaaaacuuuuccaagg

SEQ ID NO: 1257042 - RNA, 19 nt, Artificial Sequence
  Description of Artificial Sequence: Synthetic oligonucleotide
uuuuccauuuuaaagugga

SEQ ID NO: 1257043 - RNA, 19 nt, Artificial Sequence
  Description of Artificial Sequence: Synthetic oligonucleotide
ugcuuagucacuuuguagc

SEQ ID NO: 1257044 - RNA, 19 nt, Artificial Sequence
  Description of Artificial Sequence: Synthetic oligonucleotide
ucucauagggcucagcagc

SEQ ID NO: 1257045 - RNA, 19 nt, Artificial Sequence
  Description of Artificial Sequence: Synthetic oligonucleotide
uccauuuuaaaguggaacu

SEQ ID NO: 1257046 - RNA, 19 nt, Artificial Sequence
  Description of Artificial Sequence: Synthetic oligonucleotide
cucaggauagucaaucugg

SEQ ID NO: 1257047 - RNA, 19 nt, Artificial Sequence
  Description of Artificial Sequence: Synthetic oligonucleotide
aguagguacugccagcggc

SEQ ID NO: 1257048 - RNA, 19 nt, Artificial Sequence
  Description of Artificial Sequence: Synthetic oligonucleotide
ucaaugguuucuaaggcca

SEQ ID NO: 1257049 - RNA, 19 nt, Artificial Sequence
  Description of Artificial Sequence: Synthetic oligonucleotide
gaaauauggguccuuguug

SEQ ID NO: 1257050 - RNA, 19 nt, Artificial Sequence
  Description of Artificial Sequence: Synthetic oligonucleotide
uuugcauucauacgauccc

SEQ ID NO: 1257051 - RNA, 19 nt, Artificial Sequence
  Description of Artificial Sequence: Synthetic oligonucleotide
agaaaacuuuuccaaggac

SEQ ID NO: 1257052 - RNA, 19 nt, Artificial Sequence
  Description of Artificial Sequence: Synthetic oligonucleotide
ugucaaugguuucuaaggc

SEQ ID NO: 1257053 - RNA, 19 nt, Artificial Sequence
  Description of Artificial Sequence: Synthetic oligonucleotide
aaccccuggaggcugaggg

SEQ ID NO: 1257054 - RNA, 19 nt, Artificial Sequence
  Description of Artificial Sequence: Synthetic oligonucleotide
aaaacugcuuggucucucg

SEQ ID NO: 1257055 - RNA, 19 nt, Artificial Sequence
  Description of Artificial Sequence: Synthetic oligonucleotide
ucaggacaggacaaaacag

SEQ ID NO: 1257056 - RNA, 19 nt, Artificial Sequence
  Description of Artificial Sequence: Synthetic oligonucleotide
uuaaaguggaacugaagaa

SEQ ID NO: 1257057 - RNA, 19 nt, Artificial Sequence
  Description of Artificial Sequence: Synthetic oligonucleotide
uuagucacuuuguagccag

SEQ ID NO: 1257058 - RNA, 19 nt, Artificial Sequence
  Description of Artificial Sequence: Synthetic oligonucleotide
caaaguuugcauucauacg

SEQ ID NO: 1257059 - RNA, 19 nt, Artificial Sequence
  Description of Artificial Sequence: Synthetic oligonucleotide
agccaaguuagucugaugu

SEQ ID NO: 1257060 - RNA, 19 nt, Artificial Sequence
  Description of Artificial Sequence: Synthetic oligonucleotide
aggauuugaggggugaacc

SEQ ID NO: 1257061 - RNA, 19 nt, Artificial Sequence
  Description of Artificial Sequence: Synthetic oligonucleotide
auucauacgaucccagaug

SEQ ID NO: 1257062 - RNA, 19 nt, Artificial Sequence
  Description of Artificial Sequence: Synthetic oligonucleotide
uguuuaaugggcucaggac

SEQ ID NO: 1257063 - RNA, 19 nt, Artificial Sequence
  Description of Artificial Sequence: Synthetic oligonucleotide
ugguucuucaugaaauaug

SEQ ID NO: 1257064 - RNA, 19 nt, Artificial Sequence
  Description of Artificial Sequence: Synthetic oligonucleotide
auuguuaugcagugucagg

SEQ ID NO: 1257065 - RNA, 19 nt, Artificial Sequence
  Description of Artificial Sequence: Synthetic oligonucleotide
guuuaaugggcucaggaca

SEQ ID NO: 1257066 - RNA, 19 nt, Artificial Sequence
  Description of Artificial Sequence: Synthetic oligonucleotide
uuagucugauguuucuucc

SEQ ID NO: 1257067 - RNA, 19 nt, Artificial Sequence
  Description of Artificial Sequence: Synthetic oligonucleotide
gguucuucaugaaauaugg

SEQ ID NO: 1257068 - RNA, 19 nt, Artificial Sequence
  Description of Artificial Sequence: Synthetic oligonucleotide
ugaacuccagcugaugggg

SEQ ID NO: 1257069 - RNA, 19 nt, Artificial Sequence
  Description of Artificial Sequence: Synthetic oligonucleotide
uaaaguggaacugaagaaa

SEQ ID NO: 1257070 - RNA, 19 nt, Artificial Sequence
  Description of Artificial Sequence: Synthetic oligonucleotide
ugaaauauggguccuuguu

SEQ ID NO: 1257071 - RNA, 19 nt, Artificial Sequence
  Description of Artificial Sequence: Synthetic oligonucleotide
ugaguagguacugccagcg

SEQ ID NO: 1257072 - RNA, 19 nt, Artificial Sequence
  Description of Artificial Sequence: Synthetic oligonucleotide
augaacuccagcugauggg

SEQ ID NO: 1257073 - RNA, 19 nt, Artificial Sequence
  Description of Artificial Sequence: Synthetic oligonucleotide
ucucaggauagucaaucug

SEQ ID NO: 1257074 - RNA, 19 nt, Artificial Sequence
  Description of Artificial Sequence: Synthetic oligonucleotide
uuccauuuuaaaguggaac

SEQ ID NO: 1257075 - RNA, 19 nt, Artificial Sequence
  Description of Artificial Sequence: Synthetic oligonucleotide
guuugcauucauacgaucc

SEQ ID NO: 1257076 - RNA, 19 nt, Artificial Sequence
  Description of Artificial Sequence: Synthetic oligonucleotide
cucauuguuaugcaguguc

SEQ ID NO: 1257077 - RNA, 19 nt, Artificial Sequence
  Description of Artificial Sequence: Synthetic oligonucleotide
uugucaaucucccggcuug

SEQ ID NO: 1257078 - RNA, 19 nt, Artificial Sequence
  Description of Artificial Sequence: Synthetic oligonucleotide
agauguuuguggguguacc

SEQ ID NO: 1257079 - RNA, 19 nt, Artificial Sequence
  Description of Artificial Sequence: Synthetic oligonucleotide
aguggguccagaauuugcc

SEQ ID NO: 1257080 - RNA, 19 nt, Artificial Sequence
  Description of Artificial Sequence: Synthetic oligonucleotide
ucugauguuucuucccuug

SEQ ID NO: 1257081 - RNA, 19 nt, Artificial Sequence
  Description of Artificial Sequence: Synthetic oligonucleotide
augaguagguacugccagc

SEQ ID NO: 1257082 - RNA, 19 nt, Artificial Sequence
  Description of Artificial Sequence: Synthetic oligonucleotide
uguuucuucccuugggugu

SEQ ID NO: 1257083 - RNA, 19 nt, Artificial Sequence
  Description of Artificial Sequence: Synthetic oligonucleotide
cauggugaaggccuggaag

SEQ ID NO: 1257084 - RNA, 19 nt, Artificial Sequence
  Description of Artificial Sequence: Synthetic oligonucleotide
caugaguagguacugccag

SEQ ID NO: 1257085 - RNA, 19 nt, Artificial Sequence
  Description of Artificial Sequence: Synthetic oligonucleotide
cacuuuguagccagggcgg

SEQ ID NO: 1257086 - RNA, 19 nt, Artificial Sequence
  Description of Artificial Sequence: Synthetic oligonucleotide
uguggguguaccccagggg

SEQ ID NO: 1257087 - RNA, 19 nt, Artificial Sequence
  Description of Artificial Sequence: Synthetic oligonucleotide
cucagcaaucucaggauag

SEQ ID NO: 1257088 - RNA, 19 nt, Artificial Sequence
  Description of Artificial Sequence: Synthetic oligonucleotide
gaggcaugcucccagggcc

SEQ ID NO: 1257089 - RNA, 19 nt, Artificial Sequence
  Description of Artificial Sequence: Synthetic oligonucleotide
uggcaugaugcccucagca

SEQ ID NO: 1257090 - RNA, 19 nt, Artificial Sequence
  Description of Artificial Sequence: Synthetic oligonucleotide
aaaguggaacugaagaaaa

SEQ ID NO: 1257091 - RNA, 19 nt, Artificial Sequence
  Description of Artificial Sequence: Synthetic oligonucleotide
ucauuguuaugcaguguca

SEQ ID NO: 1257092 - RNA, 19 nt, Artificial Sequence
  Description of Artificial Sequence: Synthetic oligonucleotide
uguuaugcagugucaggca

SEQ ID NO: 1257093 - RNA, 19 nt, Artificial Sequence
  Description of Artificial Sequence: Synthetic oligonucleotide
agaauuugcccucagccuu

SEQ ID NO: 1257094 - RNA, 19 nt, Artificial Sequence
  Description of Artificial Sequence: Synthetic oligonucleotide
aaguuagucugauguuucu

SEQ ID NO: 1257095 - RNA, 19 nt, Artificial Sequence
  Description of Artificial Sequence: Synthetic oligonucleotide
aguuugcauucauacgauc

SEQ ID NO: 1257096 - RNA, 19 nt, Artificial Sequence
  Description of Artificial Sequence: Synthetic oligonucleotide
gauuugaggggugaacccc

SEQ ID NO: 1257097 - RNA, 19 nt, Artificial Sequence
  Description of Artificial Sequence: Synthetic oligonucleotide
ucuaaggccagcugucgca

SEQ ID NO: 1257098 - RNA, 19 nt, Artificial Sequence
  Description of Artificial Sequence: Synthetic oligonucleotide
aggggugaaccccuggagg

SEQ ID NO: 1257099 - RNA, 19 nt, Artificial Sequence
  Description of Artificial Sequence: Synthetic oligonucleotide
ugaggguggauaccaggag

SEQ ID NO: 1257100 - RNA, 19 nt, Artificial Sequence
  Description of Artificial Sequence: Synthetic oligonucleotide
gaggaugaacuccagcuga

SEQ ID NO: 1257101 - RNA, 19 nt, Artificial Sequence
  Description of Artificial Sequence: Synthetic oligonucleotide
uuucuaaggccagcugucg

SEQ ID NO: 1257102 - RNA, 19 nt, Artificial Sequence
  Description of Artificial Sequence: Synthetic oligonucleotide
auccucugcucauaggcag

SEQ ID NO: 1257103 - RNA, 19 nt, Artificial Sequence
  Description of Artificial Sequence: Synthetic oligonucleotide
cauuguuaugcagugucag

SEQ ID NO: 1257104 - RNA, 19 nt, Artificial Sequence
  Description of Artificial Sequence: Synthetic oligonucleotide
ucugcuuagucacuuugua

SEQ ID NO: 1257105 - RNA, 19 nt, Artificial Sequence
  Description of Artificial Sequence: Synthetic oligonucleotide
ugcaggaguagguggaugu

SEQ ID NO: 1257106 - RNA, 19 nt, Artificial Sequence
  Description of Artificial Sequence: Synthetic oligonucleotide
uguuuguggguguacccca

SEQ ID NO: 1257107 - RNA, 19 nt, Artificial Sequence
  Description of Artificial Sequence: Synthetic oligonucleotide
caaguuagucugauguuuc

SEQ ID NO: 1257108 - RNA, 19 nt, Artificial Sequence
  Description of Artificial Sequence: Synthetic oligonucleotide
ccagaauuugcccucagcc

SEQ ID NO: 1257109 - RNA, 19 nt, Artificial Sequence
  Description of Artificial Sequence: Synthetic oligonucleotide
aacugcuuggucucucggu

SEQ ID NO: 1257110 - RNA, 19 nt, Artificial Sequence
  Description of Artificial Sequence: Synthetic oligonucleotide
ggauagucaaucuggaaca

SEQ ID NO: 1257111 - RNA, 19 nt, Artificial Sequence
  Description of Artificial Sequence: Synthetic oligonucleotide
cugcuuagucacuuuguag

SEQ ID NO: 1257112 - RNA, 19 nt, Artificial Sequence
  Description of Artificial Sequence: Synthetic oligonucleotide
uccagaauuugcccucagc

SEQ ID NO: 1257113 - RNA, 19 nt, Artificial Sequence
  Description of Artificial Sequence: Synthetic oligonucleotide
uucuaaggccagcugucgc

SEQ ID NO: 1257114 - RNA, 19 nt, Artificial Sequence
  Description of Artificial Sequence: Synthetic oligonucleotide
uggggaugcaccccaggag

SEQ ID NO: 1257115 - RNA, 19 nt, Artificial Sequence
  Description of Artificial Sequence: Synthetic oligonucleotide
guggauggaccccaggagc

SEQ ID NO: 1257116 - RNA, 19 nt, Artificial Sequence
  Description of Artificial Sequence: Synthetic oligonucleotide
agucacuuuguagccaggg

SEQ ID NO: 1257117 - RNA, 19 nt, Artificial Sequence
  Description of Artificial Sequence: Synthetic oligonucleotide
gcuuuuccauuuuaaagug

SEQ ID NO: 1257118 - RNA, 19 nt, Artificial Sequence
  Description of Artificial Sequence: Synthetic oligonucleotide
uggauggaccccaggagcu

SEQ ID NO: 1257119 - RNA, 19 nt, Artificial Sequence
  Description of Artificial Sequence: Synthetic oligonucleotide
gaguagguggauguacucc

SEQ ID NO: 1257120 - RNA, 19 nt, Artificial Sequence
  Description of Artificial Sequence: Synthetic oligonucleotide
uggucucucgguuccagug

SEQ ID NO: 1257121 - RNA, 19 nt, Artificial Sequence
  Description of Artificial Sequence: Synthetic oligonucleotide
ugaggggugaaccccugga

SEQ ID NO: 1257122 - RNA, 19 nt, Artificial Sequence
  Description of Artificial Sequence: Synthetic oligonucleotide
uacgaucccagaugguucu

SEQ ID NO: 1257123 - RNA, 19 nt, Artificial Sequence
  Description of Artificial Sequence: Synthetic oligonucleotide
cuuggcagcucgccgagcc

SEQ ID NO: 1257124 - RNA, 19 nt, Artificial Sequence
  Description of Artificial Sequence: Synthetic oligonucleotide
caugaaauauggguccuug

SEQ ID NO: 1257125 - RNA, 19 nt, Artificial Sequence
  Description of Artificial Sequence: Synthetic oligonucleotide
acuuuuccaaggacuggcc

SEQ ID NO: 1257126 - RNA, 19 nt, Artificial Sequence
  Description of Artificial Sequence: Synthetic oligonucleotide
guagguacugccagcggcg

SEQ ID NO: 1257127 - RNA, 19 nt, Artificial Sequence
  Description of Artificial Sequence: Synthetic oligonucleotide
caccccagauguuuguggg

SEQ ID NO: 1257128 - RNA, 19 nt, Artificial Sequence
  Description of Artificial Sequence: Synthetic oligonucleotide
ugucaggcaaaguuugcau

SEQ ID NO: 1257129 - RNA, 19 nt, Artificial Sequence
  Description of Artificial Sequence: Synthetic oligonucleotide
caggccauucaugaguggg

SEQ ID NO: 1257130 - RNA, 19 nt, Artificial Sequence
  Description of Artificial Sequence: Synthetic oligonucleotide
uucccugcggucccgguug

SEQ ID NO: 1257131 - RNA, 19 nt, Artificial Sequence
  Description of Artificial Sequence: Synthetic oligonucleotide
gucccgguugcucucagag

SEQ ID NO: 1257132 - RNA, 19 nt, Artificial Sequence
  Description of Artificial Sequence: Synthetic oligonucleotide
augaaauauggguccuugu

SEQ ID NO: 1257133 - RNA, 19 nt, Artificial Sequence
  Description of Artificial Sequence: Synthetic oligonucleotide
aggcaggccauucaugagu

SEQ ID NO: 1257134 - RNA, 19 nt, Artificial Sequence
  Description of Artificial Sequence: Synthetic oligonucleotide
gucucauagggcucagcag

SEQ ID NO: 1257135 - RNA, 19 nt, Artificial Sequence
  Description of Artificial Sequence: Synthetic oligonucleotide
ugagggugaacugcaggag

SEQ ID NO: 1257136 - RNA, 19 nt, Artificial Sequence
  Description of Artificial Sequence: Synthetic oligonucleotide
accuugaccuucucgggug

SEQ ID NO: 1257137 - RNA, 19 nt, Artificial Sequence
  Description of Artificial Sequence: Synthetic oligonucleotide
agugucaggcaaaguuugc

SEQ ID NO: 1257138 - RNA, 19 nt, Artificial Sequence
  Description of Artificial Sequence: Synthetic oligonucleotide
gagggguguaccccagggg

SEQ ID NO: 1257139 - RNA, 19 nt, Artificial Sequence
  Description of Artificial Sequence: Synthetic oligonucleotide
gagccugaggaugaacucc

SEQ ID NO: 1257140 - RNA, 19 nt, Artificial Sequence
  Description of Artificial Sequence: Synthetic oligonucleotide
gucucucgguuccaguggg

SEQ ID NO: 1257141 - RNA, 19 nt, Artificial Sequence
  Description of Artificial Sequence: Synthetic oligonucleotide
ucucgguuccagugggucc

SEQ ID NO: 1257142 - RNA, 19 nt, Artificial Sequence
  Description of Artificial Sequence: Synthetic oligonucleotide
gaggggugaaccccuggag

SEQ ID NO: 1257143 - RNA, 19 nt, Artificial Sequence
  Description of Artificial Sequence: Synthetic oligonucleotide
ugcaggggcuuccuuggcc

SEQ ID NO: 1257144 - RNA, 19 nt, Artificial Sequence
  Description of Artificial Sequence: Synthetic oligonucleotide
caccuugaaggcaaugguc

SEQ ID NO: 1257145 - RNA, 19 nt, Artificial Sequence
  Description of Artificial Sequence: Synthetic oligonucleotide
uucaugaaauauggguccu

SEQ ID NO: 1257146 - RNA, 19 nt, Artificial Sequence
  Description of Artificial Sequence: Synthetic oligonucleotide
acuuuguagccagggcggc

SEQ ID NO: 1257147 - RNA, 19 nt, Artificial Sequence
  Description of Artificial Sequence: Synthetic oligonucleotide
cagaaaacuuuuccaagga

SEQ ID NO: 1257148 - RNA, 19 nt, Artificial Sequence
  Description of Artificial Sequence: Synthetic oligonucleotide
gauggaccccagauguggg

SEQ ID NO: 1257149 - RNA, 19 nt, Artificial Sequence
  Description of Artificial Sequence: Synthetic oligonucleotide
ugguuucuaaggccagcug

SEQ ID NO: 1257150 - RNA, 19 nt, Artificial Sequence
  Description of Artificial Sequence: Synthetic oligonucleotide
guaccccaggggcugaggg

SEQ ID NO: 1257151 - RNA, 19 nt, Artificial Sequence
  Description of Artificial Sequence: Synthetic oligonucleotide
acaugaagcgguggcgugg

SEQ ID NO: 1257152 - RNA, 19 nt, Artificial Sequence
  Description of Artificial Sequence: Synthetic oligonucleotide
cagguagcuccccucauug

SEQ ID NO: 1257153 - RNA, 19 nt, Artificial Sequence
  Description of Artificial Sequence: Synthetic oligonucleotide
uaccccaggggcuggagga

SEQ ID NO: 1257154 - RNA, 19 nt, Artificial Sequence
  Description of Artificial Sequence: Synthetic oligonucleotide
caguggguccagaauuugc

SEQ ID NO: 1257155 - RNA, 19 nt, Artificial Sequence
  Description of Artificial Sequence: Synthetic oligonucleotide
gaguagguacugccagcgg

SEQ ID NO: 1257156 - RNA, 19 nt, Artificial Sequence
  Description of Artificial Sequence: Synthetic oligonucleotide
uccuggagccugaggauga

SEQ ID NO: 1257157 - RNA, 19 nt, Artificial Sequence
  Description of Artificial Sequence: Synthetic oligonucleotide
uguugaugucaaugguuuc

SEQ ID NO: 1257158 - RNA, 19 nt, Artificial Sequence
  Description of Artificial Sequence: Synthetic oligonucleotide
ugggugugagccagguagc

SEQ ID NO: 1257159 - RNA, 19 nt, Artificial Sequence
  Description of Artificial Sequence: Synthetic oligonucleotide
auauggguccuuguugaug

SEQ ID NO: 1257160 - RNA, 19 nt, Artificial Sequence
  Description of Artificial Sequence: Synthetic oligonucleotide
gcuuagucacuuuguagcc

SEQ ID NO: 1257161 - RNA, 19 nt, Artificial Sequence
  Description of Artificial Sequence: Synthetic oligonucleotide
uccccucauuguuaugcag

SEQ ID NO: 1257162 - RNA, 19 nt, Artificial Sequence
  Description of Artificial Sequence: Synthetic oligonucleotide
agggcggccaaucuucaca

SEQ ID NO: 1257163 - RNA, 19 nt, Artificial Sequence
  Description of Artificial Sequence: Synthetic oligonucleotide
aaguuugcauucauacgau

SEQ ID NO: 1257164 - RNA, 19 nt, Artificial Sequence
  Description of Artificial Sequence: Synthetic oligonucleotide
aggaggcaugcucccaggg

SEQ ID NO: 1257165 - RNA, 19 nt, Artificial Sequence
  Description of Artificial Sequence: Synthetic oligonucleotide
ggggaggcuguuuaauggg

SEQ ID NO: 1257166 - RNA, 19 nt, Artificial Sequence
  Description of Artificial Sequence: Synthetic oligonucleotide
ggauuugaggggugaaccc

SEQ ID NO: 1257167 - RNA, 19 nt, Artificial Sequence
  Description of Artificial Sequence: Synthetic oligonucleotide
uggcguggcaugaugcccu

SEQ ID NO: 1257168 - RNA, 19 nt, Artificial Sequence
  Description of Artificial Sequence: Synthetic oligonucleotide
uuugaggggugaaccccug

SEQ ID NO: 1257169 - RNA, 19 nt, Artificial Sequence
  Description of Artificial Sequence: Synthetic oligonucleotide
ggauggaccccagaugugg

SEQ ID NO: 1257170 - RNA, 19 nt, Artificial Sequence
  Description of Artificial Sequence: Synthetic oligonucleotide
ugagccagguagcuccccu

SEQ ID NO: 1257171 - RNA, 19 nt, Artificial Sequence
  Description of Artificial Sequence: Synthetic oligonucleotide
gaggcuguuuaaugggcuc

SEQ ID NO: 1257172 - RNA, 19 nt, Artificial Sequence
  Description of Artificial Sequence: Synthetic oligonucleotide
ucccgguugcucucagagg

SEQ ID NO: 1257173 - RNA, 19 nt, Artificial Sequence
  Description of Artificial Sequence: Synthetic oligonucleotide
gguggauaccaggagcugg

SEQ ID NO: 1257174 - RNA, 19 nt, Artificial Sequence
  Description of Artificial Sequence: Synthetic oligonucleotide
gguggauggaccccaggag

SEQ ID NO: 1257175 - RNA, 19 nt, Artificial Sequence
  Description of Artificial Sequence: Synthetic oligonucleotide
ugucaaucucccggcuugg

SEQ ID NO: 1257176 - RNA, 19 nt, Artificial Sequence
  Description of Artificial Sequence: Synthetic oligonucleotide
uaaugggcucaggacagga

SEQ ID NO: 1257177 - RNA, 19 nt, Artificial Sequence
  Description of Artificial Sequence: Synthetic oligonucleotide
cauccggcaguggagggcg

SEQ ID NO: 1257178 - RNA, 19 nt, Artificial Sequence
  Description of Artificial Sequence: Synthetic oligonucleotide
guuaugcagugucaggcaa

SEQ ID NO: 1257179 - RNA, 19 nt, Artificial Sequence
  Description of Artificial Sequence: Synthetic oligonucleotide
ggggaugcaccccaggagc

SEQ ID NO: 1257180 - RNA, 19 nt, Artificial Sequence
  Description of Artificial Sequence: Synthetic oligonucleotide
cugaggguggauaccagga

SEQ ID NO: 1257181 - RNA, 19 nt, Artificial Sequence
  Description of Artificial Sequence: Synthetic oligonucleotide
agacaugaagcgguggcgu

SEQ ID NO: 1257182 - RNA, 19 nt, Artificial Sequence
  Description of Artificial Sequence: Synthetic oligonucleotide
uccaguggguccagaauuu

SEQ ID NO: 1257183 - RNA, 19 nt, Artificial Sequence
  Description of Artificial Sequence: Synthetic oligonucleotide
ggggccaguguucaguugc

SEQ ID NO: 1257184 - RNA, 19 nt, Artificial Sequence
  Description of Artificial Sequence: Synthetic oligonucleotide
ggacuacuggggcuggugg

SEQ ID NO: 1257185 - RNA, 19 nt, Artificial Sequence
  Description of Artificial Sequence: Synthetic oligonucleotide
ucauacgaucccagauggu

SEQ ID NO: 1257186 - RNA, 19 nt, Artificial Sequence
  Description of Artificial Sequence: Synthetic oligonucleotide
augguucuucaugaaauau

SEQ ID NO: 1257187 - RNA, 19 nt, Artificial Sequence
  Description of Artificial Sequence: Synthetic oligonucleotide
uggguguaccccaggggcu

SEQ ID NO: 1257188 - RNA, 19 nt, Artificial Sequence
  Description of Artificial Sequence: Synthetic oligonucleotide
ggucucucgguuccagugg

SEQ ID NO: 1257189 - RNA, 19 nt, Artificial Sequence
  Description of Artificial Sequence: Synthetic oligonucleotide
gcaaucucaggauagucaa

SEQ ID NO: 1257190 - RNA, 19 nt, Artificial Sequence
  Description of Artificial Sequence: Synthetic oligonucleotide
gucgcaggcguucccugcg

SEQ ID NO: 1257191 - RNA, 19 nt, Artificial Sequence
  Description of Artificial Sequence: Synthetic oligonucleotide
caaggcauccggcagugga

SEQ ID NO: 1257192 - RNA, 19 nt, Artificial Sequence
  Description of Artificial Sequence: Synthetic oligonucleotide
ugucgcaggcguucccugc

SEQ ID NO: 1257193 - RNA, 19 nt, Artificial Sequence
  Description of Artificial Sequence: Synthetic oligonucleotide
aggccauucaugagugggg

SEQ ID NO: 1257194 - RNA, 19 nt, Artificial Sequence
  Description of Artificial Sequence: Synthetic oligonucleotide
cagcugggagacugggugg

SEQ ID NO: 1257195 - RNA, 19 nt, Artificial Sequence
  Description of Artificial Sequence: Synthetic oligonucleotide
uagguacugccagcggcgg

SEQ ID NO: 1257196 - RNA, 19 nt, Artificial Sequence
  Description of Artificial Sequence: Synthetic oligonucleotide
ugugucccucugcuuaguc

SEQ ID NO: 1257197 - RNA, 19 nt, Artificial Sequence
  Description of Artificial Sequence: Synthetic oligonucleotide
aggguggauaccaggagcu

SEQ ID NO: 1257198 - RNA, 19 nt, Artificial Sequence
  Description of Artificial Sequence: Synthetic oligonucleotide
guaccccaggggcuggagg

SEQ ID NO: 1257199 - RNA, 19 nt, Artificial Sequence
  Description of Artificial Sequence: Synthetic oligonucleotide
aggcguucccugcgguccc

SEQ ID NO: 1257200 - RNA, 19 nt, Artificial Sequence
  Description of Artificial Sequence: Synthetic oligonucleotide
ggugggugcacaccuggag

SEQ ID NO: 1257201 - RNA, 19 nt, Artificial Sequence
  Description of Artificial Sequence: Synthetic oligonucleotide
auuugaggggugaaccccu

SEQ ID NO: 1257202 - RNA, 19 nt, Artificial Sequence
  Description of Artificial Sequence: Synthetic oligonucleotide
auguggguggauggacuac

SEQ ID NO: 1257203 - RNA, 19 nt, Artificial Sequence
  Description of Artificial Sequence: Synthetic oligonucleotide
caggaguagguggauguac

SEQ ID NO: 1257204 - RNA, 19 nt, Artificial Sequence
  Description of Artificial Sequence: Synthetic oligonucleotide
cuggugggugcacuccagg

SEQ ID NO: 1257205 - RNA, 19 nt, Artificial Sequence
  Description of Artificial Sequence: Synthetic oligonucleotide
caugaagcgguggcguggc

SEQ ID NO: 1257206 - RNA, 19 nt, Artificial Sequence
  Description of Artificial Sequence: Synthetic oligonucleotide
caaggacuggccaggaaaa

SEQ ID NO: 1257207 - RNA, 19 nt, Artificial Sequence
  Description of Artificial Sequence: Synthetic oligonucleotide
uguacuccuggagccugag

SEQ ID NO: 1257208 - RNA, 19 nt, Artificial Sequence
  Description of Artificial Sequence: Synthetic oligonucleotide
gaccccaggagcuggugga

SEQ ID NO: 1257209 - RNA, 19 nt, Artificial Sequence
  Description of Artificial Sequence: Synthetic oligonucleotide
aggaguagguggauguacu

SEQ ID NO: 1257210 - RNA, 19 nt, Artificial Sequence
  Description of Artificial Sequence: Synthetic oligonucleotide
ucgcaggcguucccugcgg

SEQ ID NO: 1257211 - RNA, 19 nt, Artificial Sequence
  Description of Artificial Sequence: Synthetic oligonucleotide
gguuucuaaggccagcugu

SEQ ID NO: 1257212 - RNA, 19 nt, Artificial Sequence
  Description of Artificial Sequence: Synthetic oligonucleotide
ucuucccuugggugugagc

SEQ ID NO: 1257213 - RNA, 19 nt, Artificial Sequence
  Description of Artificial Sequence: Synthetic oligonucleotide
ggggcauaggagcugggug

SEQ ID NO: 1257214 - RNA, 19 nt, Artificial Sequence
  Description of Artificial Sequence: Synthetic oligonucleotide
caggauuugaggggugaac

SEQ ID NO: 1257215 - RNA, 19 nt, Artificial Sequence
  Description of Artificial Sequence: Synthetic oligonucleotide
gcuccccucauuguuaugc

SEQ ID NO: 1257216 - RNA, 19 nt, Artificial Sequence
  Description of Artificial Sequence: Synthetic oligonucleotide
caggcguucccugcggucc

SEQ ID NO: 1257217 - RNA, 19 nt, Artificial Sequence
  Description of Artificial Sequence: Synthetic oligonucleotide
ggaccccuggagcuggugg

SEQ ID NO: 1257218 - RNA, 19 nt, Artificial Sequence
  Description of Artificial Sequence: Synthetic oligonucleotide
ggagccugaggguggauac

SEQ ID NO: 1257219 - RNA, 19 nt, Artificial Sequence
  Description of Artificial Sequence: Synthetic oligonucleotide
gccgagccaaguuagucug

SEQ ID NO: 1257220 - RNA, 19 nt, Artificial Sequence
  Description of Artificial Sequence: Synthetic oligonucleotide
cuuagucacuuuguagcca

SEQ ID NO: 1257221 - RNA, 19 nt, Artificial Sequence
  Description of Artificial Sequence: Synthetic oligonucleotide
ggaggguggaccccuggag

SEQ ID NO: 1257222 - RNA, 19 nt, Artificial Sequence
  Description of Artificial Sequence: Synthetic oligonucleotide
guacuccuggagccugagg

SEQ ID NO: 1257223 - RNA, 19 nt, Artificial Sequence
  Description of Artificial Sequence: Synthetic oligonucleotide
ccugaggguggauaccagg

SEQ ID NO: 1257224 - RNA, 19 nt, Artificial Sequence
  Description of Artificial Sequence: Synthetic oligonucleotide
aguuagucugauguuucuu

SEQ ID NO: 1257225 - RNA, 19 nt, Artificial Sequence
  Description of Artificial Sequence: Synthetic oligonucleotide
cuuuguagccagggcggcc

SEQ ID NO: 1257226 - RNA, 19 nt, Artificial Sequence
  Description of Artificial Sequence: Synthetic oligonucleotide
ggguggaccacaggggugg

SEQ ID NO: 1257227 - RNA, 19 nt, Artificial Sequence
  Description of Artificial Sequence: Synthetic oligonucleotide
uguaccccaggggcugagg

SEQ ID NO: 1257228 - RNA, 19 nt, Artificial Sequence
  Description of Artificial Sequence: Synthetic oligonucleotide
cagaugguucuucaugaaa

SEQ ID NO: 1257229 - RNA, 19 nt, Artificial Sequence
  Description of Artificial Sequence: Synthetic oligonucleotide
cagaauuugcccucagccu

SEQ ID NO: 1257230 - RNA, 19 nt, Artificial Sequence
  Description of Artificial Sequence: Synthetic oligonucleotide
agccugaggguggauacca

SEQ ID NO: 1257231 - RNA, 19 nt, Artificial Sequence
  Description of Artificial Sequence: Synthetic oligonucleotide
uggugggugcacaccugga

SEQ ID NO: 1257232 - RNA, 19 nt, Artificial Sequence
  Description of Artificial Sequence: Synthetic oligonucleotide
gaggguggaccacaggggu

SEQ ID NO: 1257233 - RNA, 19 nt, Artificial Sequence
  Description of Artificial Sequence: Synthetic oligonucleotide
guuuguggguguaccccag

SEQ ID NO: 1257234 - RNA, 19 nt, Artificial Sequence
  Description of Artificial Sequence: Synthetic oligonucleotide
agcucgccgagccaaguua

SEQ ID NO: 1257235 - RNA, 19 nt, Artificial Sequence
  Description of Artificial Sequence: Synthetic oligonucleotide
ggaggcaugcucccagggc

SEQ ID NO: 1257236 - RNA, 19 nt, Artificial Sequence
  Description of Artificial Sequence: Synthetic oligonucleotide
aggcuguuuaaugggcuca

SEQ ID NO: 1257237 - RNA, 19 nt, Artificial Sequence
  Description of Artificial Sequence: Synthetic oligonucleotide
uagcuccccucauuguuau

SEQ ID NO: 1257238 - RNA, 19 nt, Artificial Sequence
  Description of Artificial Sequence: Synthetic oligonucleotide
ggaccccagaugugggugg

SEQ ID NO: 1257239 - RNA, 19 nt, Artificial Sequence
  Description of Artificial Sequence: Synthetic oligonucleotide
ucauagggcucagcagcca

SEQ ID NO: 1257240 - RNA, 19 nt, Artificial Sequence
  Description of Artificial Sequence: Synthetic oligonucleotide
agucuugccuccaggucug

SEQ ID NO: 1257241 - RNA, 19 nt, Artificial Sequence
  Description of Artificial Sequence: Synthetic oligonucleotide
ggcaauggucucauagggc

SEQ ID NO: 1257242 - RNA, 19 nt, Artificial Sequence
  Description of Artificial Sequence: Synthetic oligonucleotide
cagucuugccuccaggucu

SEQ ID NO: 1257243 - RNA, 19 nt, Artificial Sequence
  Description of Artificial Sequence: Synthetic oligonucleotide
uuggcagcucgccgagcca

SEQ ID NO: 1257244 - RNA, 19 nt, Artificial Sequence
  Description of Artificial Sequence: Synthetic oligonucleotide
ucaugaaauauggguccuu

SEQ ID NO: 1257245 - RNA, 19 nt, Artificial Sequence
  Description of Artificial Sequence: Synthetic oligonucleotide
agguagcuccccucauugu

SEQ ID NO: 1257246 - RNA, 19 nt, Artificial Sequence
  Description of Artificial Sequence: Synthetic oligonucleotide
ggugcacaccuggagcugg

SEQ ID NO: 1257247 - RNA, 19 nt, Artificial Sequence
  Description of Artificial Sequence: Synthetic oligonucleotide
ucucucgguuccagugggu

SEQ ID NO: 1257248 - RNA, 19 nt, Artificial Sequence
  Description of Artificial Sequence: Synthetic oligonucleotide
cccucauuguuaugcagug

SEQ ID NO: 1257249 - RNA, 19 nt, Artificial Sequence
  Description of Artificial Sequence: Synthetic oligonucleotide
cugagggguguaccccagg

SEQ ID NO: 1257250 - RNA, 19 nt, Artificial Sequence
  Description of Artificial Sequence: Synthetic oligonucleotide
cuccuuggcagcucgccga

SEQ ID NO: 1257251 - RNA, 19 nt, Artificial Sequence
  Description of Artificial Sequence: Synthetic oligonucleotide
guggcaugaugcccucagc

SEQ ID NO: 1257252 - RNA, 19 nt, Artificial Sequence
  Description of Artificial Sequence: Synthetic oligonucleotide
gcgggaguaggcccugugg

SEQ ID NO: 1257253 - RNA, 19 nt, Artificial Sequence
  Description of Artificial Sequence: Synthetic oligonucleotide
guagguggauguacuccug

SEQ ID NO: 1257254 - RNA, 19 nt, Artificial Sequence
  Description of Artificial Sequence: Synthetic oligonucleotide
ucgccgagccaaguuaguc

SEQ ID NO: 1257255 - RNA, 19 nt, Artificial Sequence
  Description of Artificial Sequence: Synthetic oligonucleotide
uguaccccaggggcuggag

SEQ ID NO: 1257256 - RNA, 19 nt, Artificial Sequence
  Description of Artificial Sequence: Synthetic oligonucleotide
cucucgguuccaguggguc

SEQ ID NO: 1257257 - RNA, 19 nt, Artificial Sequence
  Description of Artificial Sequence: Synthetic oligonucleotide
ggagccugaggaugaacuc

SEQ ID NO: 1257258 - RNA, 19 nt, Artificial Sequence
  Description of Artificial Sequence: Synthetic oligonucleotide
caggauagucaaucuggaa

SEQ ID NO: 1257259 - RNA, 19 nt, Artificial Sequence
  Description of Artificial Sequence: Synthetic oligonucleotide
cauaggagcugggugcaca

SEQ ID NO: 1257260 - RNA, 19 nt, Artificial Sequence
  Description of Artificial Sequence: Synthetic oligonucleotide
uggggccaguguucaguug

SEQ ID NO: 1257261 - RNA, 19 nt, Artificial Sequence
  Description of Artificial Sequence: Synthetic oligonucleotide
ucuugccuccaggucugug

SEQ ID NO: 1257262 - RNA, 19 nt, Artificial Sequence
  Description of Artificial Sequence: Synthetic oligonucleotide
ggacaaaacagaaaacuuu

SEQ ID NO: 1257263 - RNA, 19 nt, Artificial Sequence
  Description of Artificial Sequence: Synthetic oligonucleotide
caagggaugcuggggccag

SEQ ID NO: 1257264 - RNA, 19 nt, Artificial Sequence
  Description of Artificial Sequence: Synthetic oligonucleotide
auagggcucagcagccaug

SEQ ID NO: 1257265 - RNA, 19 nt, Artificial Sequence
  Description of Artificial Sequence: Synthetic oligonucleotide
ggccgcuugacgccugggg

SEQ ID NO: 1257266 - RNA, 19 nt, Artificial Sequence
  Description of Artificial Sequence: Synthetic oligonucleotide
gagccugaggguggauacc

SEQ ID NO: 1257267 - RNA, 19 nt, Artificial Sequence
  Description of Artificial Sequence: Synthetic oligonucleotide
guagccagggcggccaauc

SEQ ID NO: 1257268 - RNA, 19 nt, Artificial Sequence
  Description of Artificial Sequence: Synthetic oligonucleotide
cccgguugcucucagagga

SEQ ID NO: 1257269 - RNA, 19 nt, Artificial Sequence
  Description of Artificial Sequence: Synthetic oligonucleotide
cauacgaucccagaugguu

SEQ ID NO: 1257270 - RNA, 19 nt, Artificial Sequence
  Description of Artificial Sequence: Synthetic oligonucleotide
cucgguuccagugggucca

SEQ ID NO: 1257271 - RNA, 19 nt, Artificial Sequence
  Description of Artificial Sequence: Synthetic oligonucleotide
cuggcccaucucugugucc

SEQ ID NO: 1257272 - RNA, 19 nt, Artificial Sequence
  Description of Artificial Sequence: Synthetic oligonucleotide
cugucgcaggcguucccug

SEQ ID NO: 1257273 - RNA, 19 nt, Artificial Sequence
  Description of Artificial Sequence: Synthetic oligonucleotide
ggcuguuuaaugggcucag

SEQ ID NO: 1257274 - RNA, 19 nt, Artificial Sequence
  Description of Artificial Sequence: Synthetic oligonucleotide
cucccagucuugccuccag

SEQ ID NO: 1257275 - RNA, 19 nt, Artificial Sequence
  Description of Artificial Sequence: Synthetic oligonucleotide
cucugcuuagucacuuugu

SEQ ID NO: 1257276 - RNA, 19 nt, Artificial Sequence
  Description of Artificial Sequence: Synthetic oligonucleotide
uccggcaguggagggcgag

SEQ ID NO: 1257277 - RNA, 19 nt, Artificial Sequence
  Description of Artificial Sequence: Synthetic oligonucleotide
gucaggcaaaguuugcauu

SEQ ID NO: 1257278 - RNA, 19 nt, Artificial Sequence
  Description of Artificial Sequence: Synthetic oligonucleotide
gcuguuuaaugggcucagg

SEQ ID NO: 1257279 - RNA, 19 nt, Artificial Sequence
  Description of Artificial Sequence: Synthetic oligonucleotide
ccaaggacuggccaggaaa

SEQ ID NO: 1257280 - RNA, 19 nt, Artificial Sequence
  Description of Artificial Sequence: Synthetic oligonucleotide
cuccccucauuguuaugca

SEQ ID NO: 1257281 - RNA, 19 nt, Artificial Sequence
  Description of Artificial Sequence: Synthetic oligonucleotide
cugccagcggcggucuggg

SEQ ID NO: 1257282 - RNA, 19 nt, Artificial Sequence
  Description of Artificial Sequence: Synthetic oligonucleotide
caggcaaaguuugcauuca

SEQ ID NO: 1257283 - RNA, 19 nt, Artificial Sequence
  Description of Artificial Sequence: Synthetic oligonucleotide
gucaaucucccggcuuggc

SEQ ID NO: 1257284 - RNA, 19 nt, Artificial Sequence
  Description of Artificial Sequence: Synthetic oligonucleotide
gguacugccagcggcgguc

SEQ ID NO: 1257285 - RNA, 19 nt, Artificial Sequence
  Description of Artificial Sequence: Synthetic oligonucleotide
aggaugaacuccagcugau

SEQ ID NO: 1257286 - RNA, 19 nt, Artificial Sequence
  Description of Artificial Sequence: Synthetic oligonucleotide
ggugcaccccagauguuug

SEQ ID NO: 1257287 - RNA, 19 nt, Artificial Sequence
  Description of Artificial Sequence: Synthetic oligonucleotide
gguggcuuuuccauuuuaa

SEQ ID NO: 1257288 - RNA, 19 nt, Artificial Sequence
  Description of Artificial Sequence: Synthetic oligonucleotide
guagcuccccucauuguua

SEQ ID NO: 1257289 - RNA, 19 nt, Artificial Sequence
  Description of Artificial Sequence: Synthetic oligonucleotide
uggucucauagggcucagc

SEQ ID NO: 1257290 - RNA, 19 nt, Artificial Sequence
  Description of Artificial Sequence: Synthetic oligonucleotide
uggcaccuugaaggcaaug

SEQ ID NO: 1257291 - RNA, 19 nt, Artificial Sequence
  Description of Artificial Sequence: Synthetic oligonucleotide
uggggccgguggcuuuucc

SEQ ID NO: 1257292 - RNA, 19 nt, Artificial Sequence
  Description of Artificial Sequence: Synthetic oligonucleotide
aggauggaccccagaugug

SEQ ID NO: 1257293 - RNA, 19 nt, Artificial Sequence
  Description of Artificial Sequence: Synthetic oligonucleotide
uucucgggugcuggcugug

SEQ ID NO: 1257294 - RNA, 19 nt, Artificial Sequence
  Description of Artificial Sequence: Synthetic oligonucleotide
agguacugccagcggcggu

SEQ ID NO: 1257295 - RNA, 19 nt, Artificial Sequence
  Description of Artificial Sequence: Synthetic oligonucleotide
augcuggggccaguguuca

SEQ ID NO: 1257296 - RNA, 19 nt, Artificial Sequence
  Description of Artificial Sequence: Synthetic oligonucleotide
ccaugaguagguacugcca

SEQ ID NO: 1257297 - RNA, 19 nt, Artificial Sequence
  Description of Artificial Sequence: Synthetic oligonucleotide
guuccaguggguccagaau

SEQ ID NO: 1257298 - RNA, 19 nt, Artificial Sequence
  Description of Artificial Sequence: Synthetic oligonucleotide
aggguggaccacaggggug

SEQ ID NO: 1257299 - RNA, 19 nt, Artificial Sequence
  Description of Artificial Sequence: Synthetic oligonucleotide
ucccggcuuggcaccuuga

SEQ ID NO: 1257300 - RNA, 19 nt, Artificial Sequence
  Description of Artificial Sequence: Synthetic oligonucleotide
gcaggccauucaugagugg

SEQ ID NO: 1257301 - RNA, 19 nt, Artificial Sequence
  Description of Artificial Sequence: Synthetic oligonucleotide
ucccugcggucccgguugc

SEQ ID NO: 1257302 - RNA, 19 nt, Artificial Sequence
  Description of Artificial Sequence: Synthetic oligonucleotide
gcucgccgagccaaguuag

SEQ ID NO: 1257303 - RNA, 19 nt, Artificial Sequence
  Description of Artificial Sequence: Synthetic oligonucleotide
ccggcuuggcaccuugaag

SEQ ID NO: 1257304 - RNA, 19 nt, Artificial Sequence
  Description of Artificial Sequence: Synthetic oligonucleotide
aggagccugaggguggaua

SEQ ID NO: 1257305 - RNA, 19 nt, Artificial Sequence
  Description of Artificial Sequence: Synthetic oligonucleotide
agcuccccucauuguuaug

SEQ ID NO: 1257306 - RNA, 19 nt, Artificial Sequence
  Description of Artificial Sequence: Synthetic oligonucleotide
gagggcgaggaggcaggcc

SEQ ID NO: 1257307 - RNA, 19 nt, Artificial Sequence
  Description of Artificial Sequence: Synthetic oligonucleotide
cucccggcuuggcaccuug

SEQ ID NO: 1257308 - RNA, 19 nt, Artificial Sequence
  Description of Artificial Sequence: Synthetic oligonucleotide
cagggcggccaaucuucac

SEQ ID NO: 1257309 - RNA, 19 nt, Artificial Sequence
  Description of Artificial Sequence: Synthetic oligonucleotide
ugcaccccaggggcuggag

SEQ ID NO: 1257310 - RNA, 19 nt, Artificial Sequence
  Description of Artificial Sequence: Synthetic oligonucleotide
ggugcacuccaggggcugg

SEQ ID NO: 1257311 - RNA, 19 nt, Artificial Sequence
  Description of Artificial Sequence: Synthetic oligonucleotide
ccuucucgggugcuggcug

SEQ ID NO: 1257312 - RNA, 19 nt, Artificial Sequence
  Description of Artificial Sequence: Synthetic oligonucleotide
cucgggugcuggcugugca

SEQ ID NO: 1257313 - RNA, 19 nt, Artificial Sequence
  Description of Artificial Sequence: Synthetic oligonucleotide
gagcugguggaggcaucug

SEQ ID NO: 1257314 - RNA, 19 nt, Artificial Sequence
  Description of Artificial Sequence: Synthetic oligonucleotide
ucgguuccaguggguccag

SEQ ID NO: 1257315 - RNA, 19 nt, Artificial Sequence
  Description of Artificial Sequence: Synthetic oligonucleotide
uggggcuggugggugcacu

SEQ ID NO: 1257316 - RNA, 19 nt, Artificial Sequence
  Description of Artificial Sequence: Synthetic oligonucleotide
gguagcuccccucauuguu

SEQ ID NO: 1257317 - RNA, 19 nt, Artificial Sequence
  Description of Artificial Sequence: Synthetic oligonucleotide
ugccagcggcggucugggg

SEQ ID NO: 1257318 - RNA, 19 nt, Artificial Sequence
  Description of Artificial Sequence: Synthetic oligonucleotide
gcucagcagccaugaguag

SEQ ID NO: 1257319 - RNA, 19 nt, Artificial Sequence
  Description of Artificial Sequence: Synthetic oligonucleotide
gcaugaugcccucagcaau

SEQ ID NO: 1257320 - RNA, 19 nt, Artificial Sequence
  Description of Artificial Sequence: Synthetic oligonucleotide
ggguguaccccaggggcug

SEQ ID NO: 1257321 - RNA, 19 nt, Artificial Sequence
  Description of Artificial Sequence: Synthetic oligonucleotide
uggaccccuggagcuggug

SEQ ID NO: 1257322 - RNA, 19 nt, Artificial Sequence
  Description of Artificial Sequence: Synthetic oligonucleotide
augaagcgguggcguggca

SEQ ID NO: 1257323 - RNA, 19 nt, Artificial Sequence
  Description of Artificial Sequence: Synthetic oligonucleotide
caccuugaccuucucgggu

SEQ ID NO: 1257324 - RNA, 19 nt, Artificial Sequence
  Description of Artificial Sequence: Synthetic oligonucleotide
auguacuccuggagccuga

SEQ ID NO: 1257325 - RNA, 19 nt, Artificial Sequence
  Description of Artificial Sequence: Synthetic oligonucleotide
gcuggcccaucucuguguc

SEQ ID NO: 1257326 - RNA, 19 nt, Artificial Sequence
  Description of Artificial Sequence: Synthetic oligonucleotide
ggggcucuauccucugcuc

SEQ ID NO: 1257327 - RNA, 19 nt, Artificial Sequence
  Description of Artificial Sequence: Synthetic oligonucleotide
ggcauaggagcugggugca

SEQ ID NO: 1257328 - RNA, 19 nt, Artificial Sequence
  Description of Artificial Sequence: Synthetic oligonucleotide
acucccagucuugccucca

SEQ ID NO: 1257329 - RNA, 19 nt, Artificial Sequence
  Description of Artificial Sequence: Synthetic oligonucleotide
ggugugagccagguagcuc

SEQ ID NO: 1257330 - RNA, 19 nt, Artificial Sequence
  Description of Artificial Sequence: Synthetic oligonucleotide
gguguaccccaggggcugg

SEQ ID NO: 1257331 - RNA, 19 nt, Artificial Sequence
  Description of Artificial Sequence: Synthetic oligonucleotide
caugcucccagggccaucu

SEQ ID NO: 1257332 - RNA, 19 nt, Artificial Sequence
  Description of Artificial Sequence: Synthetic oligonucleotide
ggugcacaccuggggcugg

SEQ ID NO: 1257333 - RNA, 19 nt, Artificial Sequence
  Description of Artificial Sequence: Synthetic oligonucleotide
cauagggcucagcagccau

SEQ ID NO: 1257334 - RNA, 19 nt, Artificial Sequence
  Description of Artificial Sequence: Synthetic oligonucleotide
uguagccagggcggccaau

SEQ ID NO: 1257335 - RNA, 19 nt, Artificial Sequence
  Description of Artificial Sequence: Synthetic oligonucleotide
gcauccggcaguggagggc

SEQ ID NO: 1257336 - RNA, 19 nt, Artificial Sequence
  Description of Artificial Sequence: Synthetic oligonucleotide
gcgguggcguggcaugaug

SEQ ID NO: 1257337 - RNA, 19 nt, Artificial Sequence
  Description of Artificial Sequence: Synthetic oligonucleotide
ccacagggguggcaggaug

SEQ ID NO: 1257338 - RNA, 19 nt, Artificial Sequence
  Description of Artificial Sequence: Synthetic oligonucleotide
aggggcuggugggugcacu

SEQ ID NO: 1257339 - RNA, 19 nt, Artificial Sequence
  Description of Artificial Sequence: Synthetic oligonucleotide
ggguggauaccaggagcug

SEQ ID NO: 1257340 - RNA, 19 nt, Artificial Sequence
  Description of Artificial Sequence: Synthetic oligonucleotide
ccgguugcucucagaggag

SEQ ID NO: 1257341 - RNA, 19 nt, Artificial Sequence
  Description of Artificial Sequence: Synthetic oligonucleotide
ccucugcucauaggcagac

SEQ ID NO: 1257342 - RNA, 19 nt, Artificial Sequence
  Description of Artificial Sequence: Synthetic oligonucleotide
gccuccuuggcagcucgcc

SEQ ID NO: 1257343 - RNA, 19 nt, Artificial Sequence
  Description of Artificial Sequence: Synthetic oligonucleotide
gguccagaauuugcccuca

SEQ ID NO: 1257344 - RNA, 19 nt, Artificial Sequence
  Description of Artificial Sequence: Synthetic oligonucleotide
cgguugcucucagaggagg

SEQ ID NO: 1257345 - RNA, 19 nt, Artificial Sequence
  Description of Artificial Sequence: Synthetic oligonucleotide
ggugcaccccaggggcugg

SEQ ID NO: 1257346 - RNA, 19 nt, Artificial Sequence
  Description of Artificial Sequence: Synthetic oligonucleotide
ggggccgguggcuuuucca

SEQ ID NO: 1257347 - RNA, 19 nt, Artificial Sequence
  Description of Artificial Sequence: Synthetic oligonucleotide
ggcucuauccucugcucau

SEQ ID NO: 1257348 - RNA, 19 nt, Artificial Sequence
  Description of Artificial Sequence: Synthetic oligonucleotide
gcugagggguguaccccag

SEQ ID NO: 1257349 - RNA, 19 nt, Artificial Sequence
  Description of Artificial Sequence: Synthetic oligonucleotide
cuucucgggugcuggcugu

SEQ ID NO: 1257350 - RNA, 19 nt, Artificial Sequence
  Description of Artificial Sequence: Synthetic oligonucleotide
ccaguggguccagaauuug

SEQ ID NO: 1257351 - RNA, 19 nt, Artificial Sequence
  Description of Artificial Sequence: Synthetic oligonucleotide
ccccucauuguuaugcagu

SEQ ID NO: 1257352 - RNA, 19 nt, Artificial Sequence
  Description of Artificial Sequence: Synthetic oligonucleotide
gcaggcguucccugcgguc

SEQ ID NO: 1257353 - RNA, 19 nt, Artificial Sequence
  Description of Artificial Sequence: Synthetic oligonucleotide
cuggugggugcaccccaga

SEQ ID NO: 1257354 - RNA, 19 nt, Artificial Sequence
  Description of Artificial Sequence: Synthetic oligonucleotide
gggugcacaccuggagcug

SEQ ID NO: 1257355 - RNA, 19 nt, Artificial Sequence
  Description of Artificial Sequence: Synthetic oligonucleotide
ccaaguuagucugauguuu

SEQ ID NO: 1257356 - RNA, 19 nt, Artificial Sequence
  Description of Artificial Sequence: Synthetic oligonucleotide
gccaaguuagucugauguu

SEQ ID NO: 1257357 - RNA, 19 nt, Artificial Sequence
  Description of Artificial Sequence: Synthetic oligonucleotide
gcaaggcauccggcagugg

SEQ ID NO: 1257358 - RNA, 19 nt, Artificial Sequence
  Description of Artificial Sequence: Synthetic oligonucleotide
gccugaggguggauaccag

SEQ ID NO: 1257359 - RNA, 19 nt, Artificial Sequence
  Description of Artificial Sequence: Synthetic oligonucleotide
ggcagcucgccgagccaag

SEQ ID NO: 1257360 - RNA, 19 nt, Artificial Sequence
  Description of Artificial Sequence: Synthetic oligonucleotide
guucccugcggucccgguu

SEQ ID NO: 1257361 - RNA, 19 nt, Artificial Sequence
  Description of Artificial Sequence: Synthetic oligonucleotide
cucgccgagccaaguuagu

SEQ ID NO: 1257362 - RNA, 19 nt, Artificial Sequence
  Description of Artificial Sequence: Synthetic oligonucleotide
ggcguggcaugaugcccuc

SEQ ID NO: 1257363 - RNA, 19 nt, Artificial Sequence
  Description of Artificial Sequence: Synthetic oligonucleotide
cccagucuugccuccaggu

SEQ ID NO: 1257364 - RNA, 19 nt, Artificial Sequence
  Description of Artificial Sequence: Synthetic oligonucleotide
gggccgguggcuuuuccau

SEQ ID NO: 1257365 - RNA, 19 nt, Artificial Sequence
  Description of Artificial Sequence: Synthetic oligonucleotide
acgaucccagaugguucuu

SEQ ID NO: 1257366 - RNA, 19 nt, Artificial Sequence
  Description of Artificial Sequence: Synthetic oligonucleotide
ggucccgguugcucucaga

SEQ ID NO: 1257367 - RNA, 19 nt, Artificial Sequence
  Description of Artificial Sequence: Synthetic oligonucleotide
ccggcaguggagggcgagg

SEQ ID NO: 1257368 - RNA, 19 nt, Artificial Sequence
  Description of Artificial Sequence: Synthetic oligonucleotide
gguggaccacagggguggc

SEQ ID NO: 1257369 - RNA, 19 nt, Artificial Sequence
  Description of Artificial Sequence: Synthetic oligonucleotide
cuugaccuucucgggugcu

SEQ ID NO: 1257370 - RNA, 19 nt, Artificial Sequence
  Description of Artificial Sequence: Synthetic oligonucleotide
gccgguggcuuuuccauuu

SEQ ID NO: 1257371 - RNA, 19 nt, Artificial Sequence
  Description of Artificial Sequence: Synthetic oligonucleotide
accccagauguggguggau

SEQ ID NO: 1257372 - RNA, 19 nt, Artificial Sequence
  Description of Artificial Sequence: Synthetic oligonucleotide
ccagggcggccaaucuuca

SEQ ID NO: 1257373 - RNA, 19 nt, Artificial Sequence
  Description of Artificial Sequence: Synthetic oligonucleotide
gcugucgcaggcguucccu

SEQ ID NO: 1257374 - RNA, 19 nt, Artificial Sequence
  Description of Artificial Sequence: Synthetic oligonucleotide
gguguaccccaggggcuga

SEQ ID NO: 1257375 - RNA, 19 nt, Artificial Sequence
  Description of Artificial Sequence: Synthetic oligonucleotide
ggcggccaaucuucacaaa

SEQ ID NO: 1257376 - RNA, 19 nt, Artificial Sequence
  Description of Artificial Sequence: Synthetic oligonucleotide
gggugugagccagguagcu

SEQ ID NO: 1257377 - RNA, 19 nt, Artificial Sequence
  Description of Artificial Sequence: Synthetic oligonucleotide
ccgagccaaguuagucuga

SEQ ID NO: 1257378 - RNA, 19 nt, Artificial Sequence
  Description of Artificial Sequence: Synthetic oligonucleotide
gggugcaccccagauguuu

SEQ ID NO: 1257379 - RNA, 19 nt, Artificial Sequence
  Description of Artificial Sequence: Synthetic oligonucleotide
gggccgcuugacgccuggg

SEQ ID NO: 1257380 - RNA, 19 nt, Artificial Sequence
  Description of Artificial Sequence: Synthetic oligonucleotide
gggguguaccccaggggcu

SEQ ID NO: 1257381 - RNA, 19 nt, Artificial Sequence
  Description of Artificial Sequence: Synthetic oligonucleotide
ccagauguuugugggugua

SEQ ID NO: 1257382 - RNA, 19 nt, Artificial Sequence
  Description of Artificial Sequence: Synthetic oligonucleotide
gucugugcuggaaguccau

SEQ ID NO: 1257383 - RNA, 19 nt, Artificial Sequence
  Description of Artificial Sequence: Synthetic oligonucleotide
cccggcuuggcaccuugaa

SEQ ID NO: 1257384 - RNA, 19 nt, Artificial Sequence
  Description of Artificial Sequence: Synthetic oligonucleotide
cgccgagccaaguuagucu

SEQ ID NO: 1257385 - RNA, 19 nt, Artificial Sequence
  Description of Artificial Sequence: Synthetic oligonucleotide
auccggcaguggagggcga

SEQ ID NO: 1257386 - RNA, 19 nt, Artificial Sequence
  Description of Artificial Sequence: Synthetic oligonucleotide
caggggccugagggugaac

SEQ ID NO: 1257387 - RNA, 19 nt, Artificial Sequence
  Description of Artificial Sequence: Synthetic oligonucleotide
guggggccgguggcuuuuc

SEQ ID NO: 1257388 - RNA, 19 nt, Artificial Sequence
  Description of Artificial Sequence: Synthetic oligonucleotide
cagcucgccgagccaaguu

SEQ ID NO: 1257389 - RNA, 19 nt, Artificial Sequence
  Description of Artificial Sequence: Synthetic oligonucleotide
cugugucccucugcuuagu

SEQ ID NO: 1257390 - RNA, 19 nt, Artificial Sequence
  Description of Artificial Sequence: Synthetic oligonucleotide
ccagcgggaguaggcccug

SEQ ID NO: 1257391 - RNA, 19 nt, Artificial Sequence
  Description of Artificial Sequence: Synthetic oligonucleotide
ggccaguguucaguugccu

SEQ ID NO: 1257392 - RNA, 19 nt, Artificial Sequence
  Description of Artificial Sequence: Synthetic oligonucleotide
ccucauuguuaugcagugu

SEQ ID NO: 1257393 - RNA, 19 nt, Artificial Sequence
  Description of Artificial Sequence: Synthetic oligonucleotide
ccuugggugugagccaggu

SEQ ID NO: 1257394 - RNA, 19 nt, Artificial Sequence
  Description of Artificial Sequence: Synthetic oligonucleotide
ggccgguggcuuuuccauu

SEQ ID NO: 1257395 - RNA, 19 nt, Artificial Sequence
  Description of Artificial Sequence: Synthetic oligonucleotide
gcggucccgguugcucuca

SEQ ID NO: 1257396 - RNA, 19 nt, Artificial Sequence
  Description of Artificial Sequence: Synthetic oligonucleotide
gcagcucgccgagccaagu

SEQ ID NO: 1257397 - RNA, 19 nt, Artificial Sequence
  Description of Artificial Sequence: Synthetic oligonucleotide
cggucccgguugcucucag

SEQ ID NO: 1257398 - RNA, 19 nt, Artificial Sequence
  Description of Artificial Sequence: Synthetic oligonucleotide
cgguggcuuuuccauuuua

SEQ ID NO: 1257399 - RNA, 19 nt, Artificial Sequence
  Description of Artificial Sequence: Synthetic oligonucleotide
gguggggccgguggcuuuu

SEQ ID NO: 1257400 - RNA, 19 nt, Artificial Sequence
  Description of Artificial Sequence: Synthetic oligonucleotide
ccaggggccugagggugaa

SEQ ID NO: 1257401 - RNA, 19 nt, Artificial Sequence
  Description of Artificial Sequence: Synthetic oligonucleotide
cccucugcuuagucacuuu

SEQ ID NO: 1257402 - RNA, 19 nt, Artificial Sequence
  Description of Artificial Sequence: Synthetic oligonucleotide
ggcgaggaggcaggccauu

SEQ ID NO: 1257403 - RNA, 19 nt, Artificial Sequence
  Description of Artificial Sequence: Synthetic oligonucleotide
gggcgaggaggcaggccau

SEQ ID NO: 1257404 - RNA, 19 nt, Artificial Sequence
  Description of Artificial Sequence: Synthetic oligonucleotide
gccagcugucgcaggcguu

SEQ ID NO: 1257405 - RNA, 19 nt, Artificial Sequence
  Description of Artificial Sequence: Synthetic oligonucleotide
cgcaggcguucccugcggu

SEQ ID NO: 1257406 - RNA, 19 nt, Artificial Sequence
  Description of Artificial Sequence: Synthetic oligonucleotide
cguucccugcggucccggu

SEQ ID NO: 1257407 - RNA, 19 nt, Artificial Sequence
  Description of Artificial Sequence: Synthetic oligonucleotide
uguuauaaccccaauaucg

SEQ ID NO: 1257408 - RNA, 19 nt, Artificial Sequence
  Description of Artificial Sequence: Synthetic oligonucleotide
guaaaugucauccagaagc

SEQ ID NO: 1257409 - RNA, 19 nt, Artificial Sequence
  Description of Artificial Sequence: Synthetic oligonucleotide
uguuuguuuauacacacgg

SEQ ID NO: 1257410 - RNA, 19 nt, Artificial Sequence
  Description of Artificial Sequence: Synthetic oligonucleotide
aaacucguaaaugucaucc

SEQ ID NO: 1257411 - RNA, 19 nt, Artificial Sequence
  Description of Artificial Sequence: Synthetic oligonucleotide
aacacaauauccuggguac

SEQ ID NO: 1257412 - RNA, 19 nt, Artificial Sequence
  Description of Artificial Sequence: Synthetic oligonucleotide
agggacaucaaacucaacc

SEQ ID NO: 1257413 - RNA, 19 nt, Artificial Sequence
  Description of Artificial Sequence: Synthetic oligonucleotide
ucuugcagcgauaaggacg

SEQ ID NO: 1257414 - RNA, 19 nt, Artificial Sequence
  Description of Artificial Sequence: Synthetic oligonucleotide
uuaguaaacucguaaaugu

SEQ ID NO: 1257415 - RNA, 19 nt, Artificial Sequence
  Description of Artificial Sequence: Synthetic oligonucleotide
uaaaaugauucgaagggcc

SEQ ID NO: 1257416 - RNA, 19 nt, Artificial Sequence
  Description of Artificial Sequence: Synthetic oligonucleotide
aaggcuaugccuuuguuca

SEQ ID NO: 1257417 - RNA, 19 nt, Artificial Sequence
  Description of Artificial Sequence: Synthetic oligonucleotide
ucggauauaagcagcaugc

SEQ ID NO: 1257418 - RNA, 19 nt, Artificial Sequence
  Description of Artificial Sequence: Synthetic oligonucleotide
cuguaaaaugauucgaagg

SEQ ID NO: 1257419 - RNA, 19 nt, Artificial Sequence
  Description of Artificial Sequence: Synthetic oligonucleotide
uagagaauaggccuguuca

SEQ ID NO: 1257420 - RNA, 19 nt, Artificial Sequence
  Description of Artificial Sequence: Synthetic oligonucleotide
uauauguggcuccuggagg

SEQ ID NO: 1257421 - RNA, 19 nt, Artificial Sequence
  Description of Artificial Sequence: Synthetic oligonucleotide
uuuggcgucaucaaccuug

SEQ ID NO: 1257422 - RNA, 19 nt, Artificial Sequence
  Description of Artificial Sequence: Synthetic oligonucleotide
uccuggguaccuaugaugg

SEQ ID NO: 1257423 - RNA, 19 nt, Artificial Sequence
  Description of Artificial Sequence: Synthetic oligonucleotide
aagagaaaaguucuuagua

SEQ ID NO: 1257424 - RNA, 19 nt, Artificial Sequence
  Description of Artificial Sequence: Synthetic oligonucleotide
auaagcagcaugcauucgg

SEQ ID NO: 1257425 - RNA, 19 nt, Artificial Sequence
  Description of Artificial Sequence: Synthetic oligonucleotide
ugauaugguucaaaauccg

SEQ ID NO: 1257426 - RNA, 19 nt, Artificial Sequence
  Description of Artificial Sequence: Synthetic oligonucleotide
aauaucgacaguccuauuu

SEQ ID NO: 1257427 - RNA, 19 nt, Artificial Sequence
  Description of Artificial Sequence: Synthetic oligonucleotide
uggacacauagucuaaccg

SEQ ID NO: 1257428 - RNA, 19 nt, Artificial Sequence
  Description of Artificial Sequence: Synthetic oligonucleotide
cuugcagcgauaaggacgg

SEQ ID NO: 1257429 - RNA, 19 nt, Artificial Sequence
  Description of Artificial Sequence: Synthetic oligonucleotide
ucaaccuugaucuccccgg

SEQ ID NO: 1257430 - RNA, 19 nt, Artificial Sequence
  Description of Artificial Sequence: Synthetic oligonucleotide
ucauaaacgucguagggcu

SEQ ID NO: 1257431 - RNA, 19 nt, Artificial Sequence
  Description of Artificial Sequence: Synthetic oligonucleotide
caaacucucccuuaggagc

SEQ ID NO: 1257432 - RNA, 19 nt, Artificial Sequence
  Description of Artificial Sequence: Synthetic oligonucleotide
ugaauccauaguuaagugc

SEQ ID NO: 1257433 - RNA, 19 nt, Artificial Sequence
  Description of Artificial Sequence: Synthetic oligonucleotide
auaucgacaguccuauuuc

SEQ ID NO: 1257434 - RNA, 19 nt, Artificial Sequence
  Description of Artificial Sequence: Synthetic oligonucleotide
uaucguagcaguccccucg

SEQ ID NO: 1257435 - RNA, 19 nt, Artificial Sequence
  Description of Artificial Sequence: Synthetic oligonucleotide
ucuccaaacacaauauccu

SEQ ID NO: 1257436 - RNA, 19 nt, Artificial Sequence
  Description of Artificial Sequence: Synthetic oligonucleotide
aaccuggucauaaacgucg

SEQ ID NO: 1257437 - RNA, 19 nt, Artificial Sequence
  Description of Artificial Sequence: Synthetic oligonucleotide
acuguaaaaugauucgaag

SEQ ID NO: 1257438 - RNA, 19 nt, Artificial Sequence
  Description of Artificial Sequence: Synthetic oligonucleotide
aaccccaauaucgacaguc

SEQ ID NO: 1257439 - RNA, 19 nt, Artificial Sequence
  Description of Artificial Sequence: Synthetic oligonucleotide
auaaccccaauaucgacag

SEQ ID NO: 1257440 - RNA, 19 nt, Artificial Sequence
  Description of Artificial Sequence: Synthetic oligonucleotide
ugaagugaugaauuaguga

SEQ ID NO: 1257441 - RNA, 19 nt, Artificial Sequence
  Description of Artificial Sequence: Synthetic oligonucleotide
agccucauagccuaugagg

SEQ ID NO: 1257442 - RNA, 19 nt, Artificial Sequence
  Description of Artificial Sequence: Synthetic oligonucleotide
acaugugucccuuagacau

SEQ ID NO: 1257443 - RNA, 19 nt, Artificial Sequence
  Description of Artificial Sequence: Synthetic oligonucleotide
aaggcggcuaauuuaauau

SEQ ID NO: 1257444 - RNA, 19 nt, Artificial Sequence
  Description of Artificial Sequence: Synthetic oligonucleotide
acgacauagguaccuaucg

SEQ ID NO: 1257445 - RNA, 19 nt, Artificial Sequence
  Description of Artificial Sequence: Synthetic oligonucleotide
gauucgaagggccuggcgc

SEQ ID NO: 1257446 - RNA, 19 nt, Artificial Sequence
  Description of Artificial Sequence: Synthetic oligonucleotide
uuguuuauacacacggaga

SEQ ID NO: 1257447 - RNA, 19 nt, Artificial Sequence
  Description of Artificial Sequence: Synthetic oligonucleotide
agugaugaauuagugacuc

SEQ ID NO: 1257448 - RNA, 19 nt, Artificial Sequence
  Description of Artificial Sequence: Synthetic oligonucleotide
cucaaccuggucauaaacg

SEQ ID NO: 1257449 - RNA, 19 nt, Artificial Sequence
  Description of Artificial Sequence: Synthetic oligonucleotide
auggacacauagucuaacc

SEQ ID NO: 1257450 - RNA, 19 nt, Artificial Sequence
  Description of Artificial Sequence: Synthetic oligonucleotide
uuaggagcuucaauggcag

SEQ ID NO: 1257451 - RNA, 19 nt, Artificial Sequence
  Description of Artificial Sequence: Synthetic oligonucleotide
uaagcagcaugcauucggg

SEQ ID NO: 1257452 - RNA, 19 nt, Artificial Sequence
  Description of Artificial Sequence: Synthetic oligonucleotide
ugauucgguagucggaucc

SEQ ID NO: 1257453 - RNA, 19 nt, Artificial Sequence
  Description of Artificial Sequence: Synthetic oligonucleotide
aaugauucgaagggccugg

SEQ ID NO: 1257454 - RNA, 19 nt, Artificial Sequence
  Description of Artificial Sequence: Synthetic oligonucleotide
uucagacacuguaaaauga

SEQ ID NO: 1257455 - RNA, 19 nt, Artificial Sequence
  Description of Artificial Sequence: Synthetic oligonucleotide
ugaugaauuagugacucca

SEQ ID NO: 1257456 - RNA, 19 nt, Artificial Sequence
  Description of Artificial Sequence: Synthetic oligonucleotide
agacacuguaaaaugauuc

SEQ ID NO: 1257457 - RNA, 19 nt, Artificial Sequence
  Description of Artificial Sequence: Synthetic oligonucleotide
caucucuccacucaacucc

SEQ ID NO: 1257458 - RNA, 19 nt, Artificial Sequence
  Description of Artificial Sequence: Synthetic oligonucleotide
uuagacaucuuguccaaac

SEQ ID NO: 1257459 - RNA, 19 nt, Artificial Sequence
  Description of Artificial Sequence: Synthetic oligonucleotide
agacacacagccucauagc

SEQ ID NO: 1257460 - RNA, 19 nt, Artificial Sequence
  Description of Artificial Sequence: Synthetic oligonucleotide
aauuagugacuccauggaa

SEQ ID NO: 1257461 - RNA, 19 nt, Artificial Sequence
  Description of Artificial Sequence: Synthetic oligonucleotide
uuaggaggagacacuuugg

SEQ ID NO: 1257462 - RNA, 19 nt, Artificial Sequence
  Description of Artificial Sequence: Synthetic oligonucleotide
cauuacacaucauggacac

SEQ ID NO: 1257463 - RNA, 19 nt, Artificial Sequence
  Description of Artificial Sequence: Synthetic oligonucleotide
uaucuggcugccauugccg

SEQ ID NO: 1257464 - RNA, 19 nt, Artificial Sequence
  Description of Artificial Sequence: Synthetic oligonucleotide
acucaaccuggucauaaac

SEQ ID NO: 1257465 - RNA, 19 nt, Artificial Sequence
  Description of Artificial Sequence: Synthetic oligonucleotide
uaucgacaguccuauuucg

SEQ ID NO: 1257466 - RNA, 19 nt, Artificial Sequence
  Description of Artificial Sequence: Synthetic oligonucleotide
ugcagauaggucuuguacu

SEQ ID NO: 1257467 - RNA, 19 nt, Artificial Sequence
  Description of Artificial Sequence: Synthetic oligonucleotide
uguucagacacuguaaaau

SEQ ID NO: 1257468 - RNA, 19 nt, Artificial Sequence
  Description of Artificial Sequence: Synthetic oligonucleotide
accuaugauggcuacaaca

SEQ ID NO: 1257469 - RNA, 19 nt, Artificial Sequence
  Description of Artificial Sequence: Synthetic oligonucleotide
guauauguggcuccuggag

SEQ ID NO: 1257470 - RNA, 19 nt, Artificial Sequence
  Description of Artificial Sequence: Synthetic oligonucleotide
cuccuuuucuagcacaugc

SEQ ID NO: 1257471 - RNA, 19 nt, Artificial Sequence
  Description of Artificial Sequence: Synthetic oligonucleotide
guucagacacuguaaaaug

SEQ ID NO: 1257472 - RNA, 19 nt, Artificial Sequence
  Description of Artificial Sequence: Synthetic oligonucleotide
uuguucaucggucuauuuc

SEQ ID NO: 1257473 - RNA, 19 nt, Artificial Sequence
  Description of Artificial Sequence: Synthetic oligonucleotide
ucaaugagcuucucagugc

SEQ ID NO: 1257474 - RNA, 19 nt, Artificial Sequence
  Description of Artificial Sequence: Synthetic oligonucleotide
guagucggaucccagaccc

SEQ ID NO: 1257475 - RNA, 19 nt, Artificial Sequence
  Description of Artificial Sequence: Synthetic oligonucleotide
acggcuagagaauaggccu

SEQ ID NO: 1257476 - RNA, 19 nt, Artificial Sequence
  Description of Artificial Sequence: Synthetic oligonucleotide
uccuggucggauauaagca

SEQ ID NO: 1257477 - RNA, 19 nt, Artificial Sequence
  Description of Artificial Sequence: Synthetic oligonucleotide
uaggaggagacacuuuggc

SEQ ID NO: 1257478 - RNA, 19 nt, Artificial Sequence
  Description of Artificial Sequence: Synthetic oligonucleotide
uacaugauagcuccuccga

SEQ ID NO: 1257479 - RNA, 19 nt, Artificial Sequence
  Description of Artificial Sequence: Synthetic oligonucleotide
agucuaaccggucaaagua

SEQ ID NO: 1257480 - RNA, 19 nt, Artificial Sequence
  Description of Artificial Sequence: Synthetic oligonucleotide
aauaggccuguucauuaca

SEQ ID NO: 1257481 - RNA, 19 nt, Artificial Sequence
  Description of Artificial Sequence: Synthetic oligonucleotide
acacaucauggacacauag

SEQ ID NO: 1257482 - RNA, 19 nt, Artificial Sequence
  Description of Artificial Sequence: Synthetic oligonucleotide
caacaugugucccuuagac

SEQ ID NO: 1257483 - RNA, 19 nt, Artificial Sequence
  Description of Artificial Sequence: Synthetic oligonucleotide
ucccuuagacaucuugucc

SEQ ID NO: 1257484 - RNA, 19 nt, Artificial Sequence
  Description of Artificial Sequence: Synthetic oligonucleotide
ucuaaccggucaaaguaug

SEQ ID NO: 1257485 - RNA, 19 nt, Artificial Sequence
  Description of Artificial Sequence: Synthetic oligonucleotide
ucaaacucaaccuggucau

SEQ ID NO: 1257486 - RNA, 19 nt, Artificial Sequence
  Description of Artificial Sequence: Synthetic oligonucleotide
cauaguuaagugcaucuuc

SEQ ID NO: 1257487 - RNA, 19 nt, Artificial Sequence
  Description of Artificial Sequence: Synthetic oligonucleotide
cuccuggucggauauaagc

SEQ ID NO: 1257488 - RNA, 19 nt, Artificial Sequence
  Description of Artificial Sequence: Synthetic oligonucleotide
ucguaaaugucauccagaa

SEQ ID NO: 1257489 - RNA, 19 nt, Artificial Sequence
  Description of Artificial Sequence: Synthetic oligonucleotide
cucaguauacagcuugaag

SEQ ID NO: 1257490 - RNA, 19 nt, Artificial Sequence
  Description of Artificial Sequence: Synthetic oligonucleotide
gacaucuuguccaaaccag

SEQ ID NO: 1257491 - RNA, 19 nt, Artificial Sequence
  Description of Artificial Sequence: Synthetic oligonucleotide
aggcacaggagcucaaagg

SEQ ID NO: 1257492 - RNA, 19 nt, Artificial Sequence
  Description of Artificial Sequence: Synthetic oligonucleotide
aguaaacucguaaauguca

SEQ ID NO: 1257493 - RNA, 19 nt, Artificial Sequence
  Description of Artificial Sequence: Synthetic oligonucleotide
ucgacaguccuauuucgcc

SEQ ID NO: 1257494 - RNA, 19 nt, Artificial Sequence
  Description of Artificial Sequence: Synthetic oligonucleotide
guacaugauagcuccuccg

SEQ ID NO: 1257495 - RNA, 19 nt, Artificial Sequence
  Description of Artificial Sequence: Synthetic oligonucleotide
ugguucaaaauccguguga

SEQ ID NO: 1257496 - RNA, 19 nt, Artificial Sequence
  Description of Artificial Sequence: Synthetic oligonucleotide
auaaacgucguagggcugg

SEQ ID NO: 1257497 - RNA, 19 nt, Artificial Sequence
  Description of Artificial Sequence: Synthetic oligonucleotide
uaguaaacucguaaauguc

SEQ ID NO: 1257498 - RNA, 19 nt, Artificial Sequence
  Description of Artificial Sequence: Synthetic oligonucleotide
cuuguacucaaugagcuuc

SEQ ID NO: 1257499 - RNA, 19 nt, Artificial Sequence
  Description of Artificial Sequence: Synthetic oligonucleotide
agggccugcagauaggucu

SEQ ID NO: 1257500 - RNA, 19 nt, Artificial Sequence
  Description of Artificial Sequence: Synthetic oligonucleotide
aaaugauucgaagggccug

SEQ ID NO: 1257501 - RNA, 19 nt, Artificial Sequence
  Description of Artificial Sequence: Synthetic oligonucleotide
caguauauguggcuccugg

SEQ ID NO: 1257502 - RNA, 19 nt, Artificial Sequence
  Description of Artificial Sequence: Synthetic oligonucleotide
gauaaggacggcugcugcc

SEQ ID NO: 1257503 - RNA, 19 nt, Artificial Sequence
  Description of Artificial Sequence: Synthetic oligonucleotide
ucaaauuggagaccacuuu

SEQ ID NO: 1257504 - RNA, 19 nt, Artificial Sequence
  Description of Artificial Sequence: Synthetic oligonucleotide
auaugguucaaaauccgug

SEQ ID NO: 1257505 - RNA, 19 nt, Artificial Sequence
  Description of Artificial Sequence: Synthetic oligonucleotide
agcauguacauguauguuu

SEQ ID NO: 1257506 - RNA, 19 nt, Artificial Sequence
  Description of Artificial Sequence: Synthetic oligonucleotide
gucaaaguauggaagggcc

SEQ ID NO: 1257507 - RNA, 19 nt, Artificial Sequence
  Description of Artificial Sequence: Synthetic oligonucleotide
ugcaaauccaggagccuug

SEQ ID NO: 1257508 - RNA, 19 nt, Artificial Sequence
  Description of Artificial Sequence: Synthetic oligonucleotide
caugauagcuccuccgaac

SEQ ID NO: 1257509 - RNA, 19 nt, Artificial Sequence
  Description of Artificial Sequence: Synthetic oligonucleotide
auauguggcuccuggagga

SEQ ID NO: 1257510 - RNA, 19 nt, Artificial Sequence
  Description of Artificial Sequence: Synthetic oligonucleotide
gacaguccuauuucgccag

SEQ ID NO: 1257511 - RNA, 19 nt, Artificial Sequence
  Description of Artificial Sequence: Synthetic oligonucleotide
cuaaccggucaaaguaugg

SEQ ID NO: 1257512 - RNA, 19 nt, Artificial Sequence
  Description of Artificial Sequence: Synthetic oligonucleotide
gucauaaacgucguagggc

SEQ ID NO: 1257513 - RNA, 19 nt, Artificial Sequence
  Description of Artificial Sequence: Synthetic oligonucleotide
aaccggucaaaguauggaa

SEQ ID NO: 1257514 - RNA, 19 nt, Artificial Sequence
  Description of Artificial Sequence: Synthetic oligonucleotide
uccuauuucgccagauccu

SEQ ID NO: 1257515 - RNA, 19 nt, Artificial Sequence
  Description of Artificial Sequence: Synthetic oligonucleotide
ugcucguuuaggaggagac

SEQ ID NO: 1257516 - RNA, 19 nt, Artificial Sequence
  Description of Artificial Sequence: Synthetic oligonucleotide
uaccuaucguagcaguccc

SEQ ID NO: 1257517 - RNA, 19 nt, Artificial Sequence
  Description of Artificial Sequence: Synthetic oligonucleotide
uauacagcuugaagugaug

SEQ ID NO: 1257518 - RNA, 19 nt, Artificial Sequence
  Description of Artificial Sequence: Synthetic oligonucleotide
cucggauccacugugcccg

SEQ ID NO: 1257519 - RNA, 19 nt, Artificial Sequence
  Description of Artificial Sequence: Synthetic oligonucleotide
ugauucgaagggccuggcg

SEQ ID NO: 1257520 - RNA, 19 nt, Artificial Sequence
  Description of Artificial Sequence: Synthetic oligonucleotide
cucguuuaggaggagacac

SEQ ID NO: 1257521 - RNA, 19 nt, Artificial Sequence
  Description of Artificial Sequence: Synthetic oligonucleotide
auauccuggguaccuauga

SEQ ID NO: 1257522 - RNA, 19 nt, Artificial Sequence
  Description of Artificial Sequence: Synthetic oligonucleotide
gucggauauaagcagcaug

SEQ ID NO: 1257523 - RNA, 19 nt, Artificial Sequence
  Description of Artificial Sequence: Synthetic oligonucleotide
ucaauccgaagagaaaagu

SEQ ID NO: 1257524 - RNA, 19 nt, Artificial Sequence
  Description of Artificial Sequence: Synthetic oligonucleotide
ggucauaaacgucguaggg

SEQ ID NO: 1257525 - RNA, 19 nt, Artificial Sequence
  Description of Artificial Sequence: Synthetic oligonucleotide
ugcuguuauaaccccaaua

SEQ ID NO: 1257526 - RNA, 19 nt, Artificial Sequence
  Description of Artificial Sequence: Synthetic oligonucleotide
guucuuaguaaacucguaa

SEQ ID NO: 1257527 - RNA, 19 nt, Artificial Sequence
  Description of Artificial Sequence: Synthetic oligonucleotide
cugaauccauaguuaagug

SEQ ID NO: 1257528 - RNA, 19 nt, Artificial Sequence
  Description of Artificial Sequence: Synthetic oligonucleotide
auucgggcuccagauaccc

SEQ ID NO: 1257529 - RNA, 19 nt, Artificial Sequence
  Description of Artificial Sequence: Synthetic oligonucleotide
uucaucggucuauuucucc

SEQ ID NO: 1257530 - RNA, 19 nt, Artificial Sequence
  Description of Artificial Sequence: Synthetic oligonucleotide
uccacggcuagagaauagg

SEQ ID NO: 1257531 - RNA, 19 nt, Artificial Sequence
  Description of Artificial Sequence: Synthetic oligonucleotide
gaagagaaaaguucuuagu

SEQ ID NO: 1257532 - RNA, 19 nt, Artificial Sequence
  Description of Artificial Sequence: Synthetic oligonucleotide
agaauaggccuguucauua

SEQ ID NO: 1257533 - RNA, 19 nt, Artificial Sequence
  Description of Artificial Sequence: Synthetic oligonucleotide
uagucuaaccggucaaagu

SEQ ID NO: 1257534 - RNA, 19 nt, Artificial Sequence
  Description of Artificial Sequence: Synthetic oligonucleotide
cauucuauaucuggcugcc

SEQ ID NO: 1257535 - RNA, 19 nt, Artificial Sequence
  Description of Artificial Sequence: Synthetic oligonucleotide
gacauagguaccuaucgua

SEQ ID NO: 1257536 - RNA, 19 nt, Artificial Sequence
  Description of Artificial Sequence: Synthetic oligonucleotide
auagucuaaccggucaaag

SEQ ID NO: 1257537 - RNA, 19 nt, Artificial Sequence
  Description of Artificial Sequence: Synthetic oligonucleotide
uauaucuggcugccauugc

SEQ ID NO: 1257538 - RNA, 19 nt, Artificial Sequence
  Description of Artificial Sequence: Synthetic oligonucleotide
gauacccgcucauagaacu

SEQ ID NO: 1257539 - RNA, 19 nt, Artificial Sequence
  Description of Artificial Sequence: Synthetic oligonucleotide
uggucggauauaagcagca

SEQ ID NO: 1257540 - RNA, 19 nt, Artificial Sequence
  Description of Artificial Sequence: Synthetic oligonucleotide
auccuggguaccuaugaug

SEQ ID NO: 1257541 - RNA, 19 nt, Artificial Sequence
  Description of Artificial Sequence: Synthetic oligonucleotide
gaucuugcagcgauaagga

SEQ ID NO: 1257542 - RNA, 19 nt, Artificial Sequence
  Description of Artificial Sequence: Synthetic oligonucleotide
cuggucggauauaagcagc

SEQ ID NO: 1257543 - RNA, 19 nt, Artificial Sequence
  Description of Artificial Sequence: Synthetic oligonucleotide
aucgacaguccuauuucgc

SEQ ID NO: 1257544 - RNA, 19 nt, Artificial Sequence
  Description of Artificial Sequence: Synthetic oligonucleotide
agcacucggauccacugug

SEQ ID NO: 1257545 - RNA, 19 nt, Artificial Sequence
  Description of Artificial Sequence: Synthetic oligonucleotide
aaacucucccuuaggagcu

SEQ ID NO: 1257546 - RNA, 19 nt, Artificial Sequence
  Description of Artificial Sequence: Synthetic oligonucleotide
uuucgccagauccuauugu

SEQ ID NO: 1257547 - RNA, 19 nt, Artificial Sequence
  Description of Artificial Sequence: Synthetic oligonucleotide
aguauauguggcuccugga

SEQ ID NO: 1257548 - RNA, 19 nt, Artificial Sequence
  Description of Artificial Sequence: Synthetic oligonucleotide
guaccuaucguagcagucc

SEQ ID NO: 1257549 - RNA, 19 nt, Artificial Sequence
  Description of Artificial Sequence: Synthetic oligonucleotide
gaauaggccuguucauuac

SEQ ID NO: 1257550 - RNA, 19 nt, Artificial Sequence
  Description of Artificial Sequence: Synthetic oligonucleotide
uaaccggucaaaguaugga

SEQ ID NO: 1257551 - RNA, 19 nt, Artificial Sequence
  Description of Artificial Sequence: Synthetic oligonucleotide
agauccuauuguuggucag

SEQ ID NO: 1257552 - RNA, 19 nt, Artificial Sequence
  Description of Artificial Sequence: Synthetic oligonucleotide
ucaaaauccgugugaucuc

SEQ ID NO: 1257553 - RNA, 19 nt, Artificial Sequence
  Description of Artificial Sequence: Synthetic oligonucleotide
aagugaugaauuagugacu

SEQ ID NO: 1257554 - RNA, 19 nt, Artificial Sequence
  Description of Artificial Sequence: Synthetic oligonucleotide
ugcugggcugauucgguag

SEQ ID NO: 1257555 - RNA, 19 nt, Artificial Sequence
  Description of Artificial Sequence: Synthetic oligonucleotide
gagucauagcaccaauguc

SEQ ID NO: 1257556 - RNA, 19 nt, Artificial Sequence
  Description of Artificial Sequence: Synthetic oligonucleotide
gauccuauuguuggucagc

SEQ ID NO: 1257557 - RNA, 19 nt, Artificial Sequence
  Description of Artificial Sequence: Synthetic oligonucleotide
caauggcaguauauguggc

SEQ ID NO: 1257558 - RNA, 19 nt, Artificial Sequence
  Description of Artificial Sequence: Synthetic oligonucleotide
uugaucuugcagcgauaag

SEQ ID NO: 1257559 - RNA, 19 nt, Artificial Sequence
  Description of Artificial Sequence: Synthetic oligonucleotide
agacacuuuggcgucauca

SEQ ID NO: 1257560 - RNA, 19 nt, Artificial Sequence
  Description of Artificial Sequence: Synthetic oligonucleotide
guauguuuguuuauacaca

SEQ ID NO: 1257561 - RNA, 19 nt, Artificial Sequence
  Description of Artificial Sequence: Synthetic oligonucleotide
aaaggagucauagcaccaa

SEQ ID NO: 1257562 - RNA, 19 nt, Artificial Sequence
  Description of Artificial Sequence: Synthetic oligonucleotide
aguauggaagggccugcag

SEQ ID NO: 1257563 - RNA, 19 nt, Artificial Sequence
  Description of Artificial Sequence: Synthetic oligonucleotide
cuagagaauaggccuguuc

SEQ ID NO: 1257564 - RNA, 19 nt, Artificial Sequence
  Description of Artificial Sequence: Synthetic oligonucleotide
cuguuauaaccccaauauc

SEQ ID NO: 1257565 - RNA, 19 nt, Artificial Sequence
  Description of Artificial Sequence: Synthetic oligonucleotide
aggccuguucauuacacau

SEQ ID NO: 1257566 - RNA, 19 nt, Artificial Sequence
  Description of Artificial Sequence: Synthetic oligonucleotide
aaggagucauagcaccaau

SEQ ID NO: 1257567 - RNA, 19 nt, Artificial Sequence
  Description of Artificial Sequence: Synthetic oligonucleotide
agagaauaggccuguucau

SEQ ID NO: 1257568 - RNA, 19 nt, Artificial Sequence
  Description of Artificial Sequence: Synthetic oligonucleotide
auccauaguuaagugcauc

SEQ ID NO: 1257569 - RNA, 19 nt, Artificial Sequence
  Description of Artificial Sequence: Synthetic oligonucleotide
auccgaagagaaaaguucu

SEQ ID NO: 1257570 - RNA, 19 nt, Artificial Sequence
  Description of Artificial Sequence: Synthetic oligonucleotide
aucaauccgaagagaaaag

SEQ ID NO: 1257571 - RNA, 19 nt, Artificial Sequence
  Description of Artificial Sequence: Synthetic oligonucleotide
ucguuuaggaggagacacu

SEQ ID NO: 1257572 - RNA, 19 nt, Artificial Sequence
  Description of Artificial Sequence: Synthetic oligonucleotide
agucggaucccagacccgg

SEQ ID NO: 1257573 - RNA, 19 nt, Artificial Sequence
  Description of Artificial Sequence: Synthetic oligonucleotide
uggcaguauauguggcucc

SEQ ID NO: 1257574 - RNA, 19 nt, Artificial Sequence
  Description of Artificial Sequence: Synthetic oligonucleotide
ugcugugcccauucuauau

SEQ ID NO: 1257575 - RNA, 19 nt, Artificial Sequence
  Description of Artificial Sequence: Synthetic oligonucleotide
cucguaaaugucauccaga

SEQ ID NO: 1257576 - RNA, 19 nt, Artificial Sequence
  Description of Artificial Sequence: Synthetic oligonucleotide
agaaagccuguacagcuua

SEQ ID NO: 1257577 - RNA, 19 nt, Artificial Sequence
  Description of Artificial Sequence: Synthetic oligonucleotide
gcuuaagucagcauguaca

SEQ ID NO: 1257578 - RNA, 19 nt, Artificial Sequence
  Description of Artificial Sequence: Synthetic oligonucleotide
acauagucuaaccggucaa

SEQ ID NO: 1257579 - RNA, 19 nt, Artificial Sequence
  Description of Artificial Sequence: Synthetic oligonucleotide
cuaugauggcuacaacauc

SEQ ID NO: 1257580 - RNA, 19 nt, Artificial Sequence
  Description of Artificial Sequence: Synthetic oligonucleotide
uauuucgccagauccuauu

SEQ ID NO: 1257581 - RNA, 19 nt, Artificial Sequence
  Description of Artificial Sequence: Synthetic oligonucleotide
uucgccagauccuauuguu

SEQ ID NO: 1257582 - RNA, 19 nt, Artificial Sequence
  Description of Artificial Sequence: Synthetic oligonucleotide
gguacaugauagcuccucc

SEQ ID NO: 1257583 - RNA, 19 nt, Artificial Sequence
  Description of Artificial Sequence: Synthetic oligonucleotide
gcuaugccuuuguucaucg

SEQ ID NO: 1257584 - RNA, 19 nt, Artificial Sequence
  Description of Artificial Sequence: Synthetic oligonucleotide
ggcgucaucaaccuugauc

SEQ ID NO: 1257585 - RNA, 19 nt, Artificial Sequence
  Description of Artificial Sequence: Synthetic oligonucleotide
uauccuggguaccuaugau

SEQ ID NO: 1257586 - RNA, 19 nt, Artificial Sequence
  Description of Artificial Sequence: Synthetic oligonucleotide
cacgacauagguaccuauc

SEQ ID NO: 1257587 - RNA, 19 nt, Artificial Sequence
  Description of Artificial Sequence: Synthetic oligonucleotide
augcauucgggcuccagau

SEQ ID NO: 1257588 - RNA, 19 nt, Artificial Sequence
  Description of Artificial Sequence: Synthetic oligonucleotide
aaggacggcugcugccauc

SEQ ID NO: 1257589 - RNA, 19 nt, Artificial Sequence
  Description of Artificial Sequence: Synthetic oligonucleotide
aagugcaucuucugcuguu

SEQ ID NO: 1257590 - RNA, 19 nt, Artificial Sequence
  Description of Artificial Sequence: Synthetic oligonucleotide
uucgggcuccagauacccg

SEQ ID NO: 1257591 - RNA, 19 nt, Artificial Sequence
  Description of Artificial Sequence: Synthetic oligonucleotide
acagccucauagccuauga

SEQ ID NO: 1257592 - RNA, 19 nt, Artificial Sequence
  Description of Artificial Sequence: Synthetic oligonucleotide
uggcgcaucuccuccacac

SEQ ID NO: 1257593 - RNA, 19 nt, Artificial Sequence
  Description of Artificial Sequence: Synthetic oligonucleotide
auccgugugaucucugcaa

SEQ ID NO: 1257594 - RNA, 19 nt, Artificial Sequence
  Description of Artificial Sequence: Synthetic oligonucleotide
auaaggacggcugcugcca

SEQ ID NO: 1257595 - RNA, 19 nt, Artificial Sequence
  Description of Artificial Sequence: Synthetic oligonucleotide
gaaaggagucauagcacca

SEQ ID NO: 1257596 - RNA, 19 nt, Artificial Sequence
  Description of Artificial Sequence: Synthetic oligonucleotide
uaggccuguucauuacaca

SEQ ID NO: 1257597 - RNA, 19 nt, Artificial Sequence
  Description of Artificial Sequence: Synthetic oligonucleotide
acaugauagcuccuccgaa

SEQ ID NO: 1257598 - RNA, 19 nt, Artificial Sequence
  Description of Artificial Sequence: Synthetic oligonucleotide
caaccuugaucuccccggg

SEQ ID NO: 1257599 - RNA, 19 nt, Artificial Sequence
  Description of Artificial Sequence: Synthetic oligonucleotide
agcuucuccacggcuagag

SEQ ID NO: 1257600 - RNA, 19 nt, Artificial Sequence
  Description of Artificial Sequence: Synthetic oligonucleotide
gauucgguagucggauccc

SEQ ID NO: 1257601 - RNA, 19 nt, Artificial Sequence
  Description of Artificial Sequence: Synthetic oligonucleotide
ucgguagucggaucccaga

SEQ ID NO: 1257602 - RNA, 19 nt, Artificial Sequence
  Description of Artificial Sequence: Synthetic oligonucleotide
gcuugaagugaugaauuag

SEQ ID NO: 1257603 - RNA, 19 nt, Artificial Sequence
  Description of Artificial Sequence: Synthetic oligonucleotide
agguaccuaucguagcagu

SEQ ID NO: 1257604 - RNA, 19 nt, Artificial Sequence
  Description of Artificial Sequence: Synthetic oligonucleotide
uggagggguacaugauagc

SEQ ID NO: 1257605 - RNA, 19 nt, Artificial Sequence
  Description of Artificial Sequence: Synthetic oligonucleotide
gcauucgggcuccagauac

SEQ ID NO: 1257606 - RNA, 19 nt, Artificial Sequence
  Description of Artificial Sequence: Synthetic oligonucleotide
uagucggaucccagacccg

SEQ ID NO: 1257607 - RNA, 19 nt, Artificial Sequence
  Description of Artificial Sequence: Synthetic oligonucleotide
uggaggaacuugguagccc

SEQ ID NO: 1257608 - RNA, 19 nt, Artificial Sequence
  Description of Artificial Sequence: Synthetic oligonucleotide
agauacccgcucauagaac

SEQ ID NO: 1257609 - RNA, 19 nt, Artificial Sequence
  Description of Artificial Sequence: Synthetic oligonucleotide
uaaacgucguagggcuggg

SEQ ID NO: 1257610 - RNA, 19 nt, Artificial Sequence
  Description of Artificial Sequence: Synthetic oligonucleotide
cuguacagcuuaagucagc

SEQ ID NO: 1257611 - RNA, 19 nt, Artificial Sequence
  Description of Artificial Sequence: Synthetic oligonucleotide
gucccuuagacaucuuguc

SEQ ID NO: 1257612 - RNA, 19 nt, Artificial Sequence
  Description of Artificial Sequence: Synthetic oligonucleotide
aucagacaccagguauacc

SEQ ID NO: 1257613 - RNA, 19 nt, Artificial Sequence
  Description of Artificial Sequence: Synthetic oligonucleotide
uccgacgccgcggaggcag

SEQ ID NO: 1257614 - RNA, 19 nt, Artificial Sequence
  Description of Artificial Sequence: Synthetic oligonucleotide
guaccuaugauggcuacaa

SEQ ID NO: 1257615 - RNA, 19 nt, Artificial Sequence
  Description of Artificial Sequence: Synthetic oligonucleotide
ugcagcgauaaggacggcu

SEQ ID NO: 1257616 - RNA, 19 nt, Artificial Sequence
  Description of Artificial Sequence: Synthetic oligonucleotide
cuaugccuuuguucaucgg

SEQ ID NO: 1257617 - RNA, 19 nt, Artificial Sequence
  Description of Artificial Sequence: Synthetic oligonucleotide
aaguauggaagggccugca

SEQ ID NO: 1257618 - RNA, 19 nt, Artificial Sequence
  Description of Artificial Sequence: Synthetic oligonucleotide
caucagacaccagguauac

SEQ ID NO: 1257619 - RNA, 19 nt, Artificial Sequence
  Description of Artificial Sequence: Synthetic oligonucleotide
cauaaacgucguagggcug

SEQ ID NO: 1257620 - RNA, 19 nt, Artificial Sequence
  Description of Artificial Sequence: Synthetic oligonucleotide
acuugguagcccucaguau

SEQ ID NO: 1257621 - RNA, 19 nt, Artificial Sequence
  Description of Artificial Sequence: Synthetic oligonucleotide
uuuguucaucggucuauuu

SEQ ID NO: 1257622 - RNA, 19 nt, Artificial Sequence
  Description of Artificial Sequence: Synthetic oligonucleotide
uacccgcucauagaacuca

SEQ ID NO: 1257623 - RNA, 19 nt, Artificial Sequence
  Description of Artificial Sequence: Synthetic oligonucleotide
gacacauagucuaaccggu

SEQ ID NO: 1257624 - RNA, 19 nt, Artificial Sequence
  Description of Artificial Sequence: Synthetic oligonucleotide
acacuuccgcaccaucucu

SEQ ID NO: 1257625 - RNA, 19 nt, Artificial Sequence
  Description of Artificial Sequence: Synthetic oligonucleotide
auugccgggcaccucugcu

SEQ ID NO: 1257626 - RNA, 19 nt, Artificial Sequence
  Description of Artificial Sequence: Synthetic oligonucleotide
augauucgaagggccuggc

SEQ ID NO: 1257627 - RNA, 19 nt, Artificial Sequence
  Description of Artificial Sequence: Synthetic oligonucleotide
caugcauucgggcuccaga

SEQ ID NO: 1257628 - RNA, 19 nt, Artificial Sequence
  Description of Artificial Sequence: Synthetic oligonucleotide
cacacuuccgcaccaucuc

SEQ ID NO: 1257629 - RNA, 19 nt, Artificial Sequence
  Description of Artificial Sequence: Synthetic oligonucleotide
uugccgggcaccucugcug

SEQ ID NO: 1257630 - RNA, 19 nt, Artificial Sequence
  Description of Artificial Sequence: Synthetic oligonucleotide
cagauccuauuguugguca

SEQ ID NO: 1257631 - RNA, 19 nt, Artificial Sequence
  Description of Artificial Sequence: Synthetic oligonucleotide
ugugcaaauccaggagccu

SEQ ID NO: 1257632 - RNA, 19 nt, Artificial Sequence
  Description of Artificial Sequence: Synthetic oligonucleotide
gagggguacaugauagcuc

SEQ ID NO: 1257633 - RNA, 19 nt, Artificial Sequence
  Description of Artificial Sequence: Synthetic oligonucleotide
uaccuaugauggcuacaac

SEQ ID NO: 1257634 - RNA, 19 nt, Artificial Sequence
  Description of Artificial Sequence: Synthetic oligonucleotide
ccuggucggauauaagcag

SEQ ID NO: 1257635 - RNA, 19 nt, Artificial Sequence
  Description of Artificial Sequence: Synthetic oligonucleotide
aauccauaguuaagugcau

SEQ ID NO: 1257636 - RNA, 19 nt, Artificial Sequence
  Description of Artificial Sequence: Synthetic oligonucleotide
cuugaucuugcagcgauaa

SEQ ID NO: 1257637 - RNA, 19 nt, Artificial Sequence
  Description of Artificial Sequence: Synthetic oligonucleotide
ggagucauagcaccaaugu

SEQ ID NO: 1257638 - RNA, 19 nt, Artificial Sequence
  Description of Artificial Sequence: Synthetic oligonucleotide
gguagucggaucccagacc

SEQ ID NO: 1257639 - RNA, 19 nt, Artificial Sequence
  Description of Artificial Sequence: Synthetic oligonucleotide
uuuccuuggagggguacau

SEQ ID NO: 1257640 - RNA, 19 nt, Artificial Sequence
  Description of Artificial Sequence: Synthetic oligonucleotide
ggcuacaacaucugccaac

SEQ ID NO: 1257641 - RNA, 19 nt, Artificial Sequence
  Description of Artificial Sequence: Synthetic oligonucleotide
gcccucaguauacagcuug

SEQ ID NO: 1257642 - RNA, 19 nt, Artificial Sequence
  Description of Artificial Sequence: Synthetic oligonucleotide
aucguagcaguccccucga

SEQ ID NO: 1257643 - RNA, 19 nt, Artificial Sequence
  Description of Artificial Sequence: Synthetic oligonucleotide
caccagguauaccccaaac

SEQ ID NO: 1257644 - RNA, 19 nt, Artificial Sequence
  Description of Artificial Sequence: Synthetic oligonucleotide
caugugucccuuagacauc

SEQ ID NO: 1257645 - RNA, 19 nt, Artificial Sequence
  Description of Artificial Sequence: Synthetic oligonucleotide
aucggucuauuucuccaaa

SEQ ID NO: 1257646 - RNA, 19 nt, Artificial Sequence
  Description of Artificial Sequence: Synthetic oligonucleotide
aggagcuucaauggcagua

SEQ ID NO: 1257647 - RNA, 19 nt, Artificial Sequence
  Description of Artificial Sequence: Synthetic oligonucleotide
acacgacauagguaccuau

SEQ ID NO: 1257648 - RNA, 19 nt, Artificial Sequence
  Description of Artificial Sequence: Synthetic oligonucleotide
cagcgauaaggacggcugc

SEQ ID NO: 1257649 - RNA, 19 nt, Artificial Sequence
  Description of Artificial Sequence: Synthetic oligonucleotide
cagccucauagccuaugag

SEQ ID NO: 1257650 - RNA, 19 nt, Artificial Sequence
  Description of Artificial Sequence: Synthetic oligonucleotide
gggcccaaaguucaggguc

SEQ ID NO: 1257651 - RNA, 19 nt, Artificial Sequence
  Description of Artificial Sequence: Synthetic oligonucleotide
accuaucguagcagucccc

SEQ ID NO: 1257652 - RNA, 19 nt, Artificial Sequence
  Description of Artificial Sequence: Synthetic oligonucleotide
aggcggcuaauuuaauaua

SEQ ID NO: 1257653 - RNA, 19 nt, Artificial Sequence
  Description of Artificial Sequence: Synthetic oligonucleotide
cuaugagggacaggccuug

SEQ ID NO: 1257654 - RNA, 19 nt, Artificial Sequence
  Description of Artificial Sequence: Synthetic oligonucleotide
ccgcucauagaacucaaac

SEQ ID NO: 1257655 - RNA, 19 nt, Artificial Sequence
  Description of Artificial Sequence: Synthetic oligonucleotide
auacccgcucauagaacuc

SEQ ID NO: 1257656 - RNA, 19 nt, Artificial Sequence
  Description of Artificial Sequence: Synthetic oligonucleotide
cuuggagggguacaugaua

SEQ ID NO: 1257657 - RNA, 19 nt, Artificial Sequence
  Description of Artificial Sequence: Synthetic oligonucleotide
cacuuccgcaccaucucuc

SEQ ID NO: 1257658 - RNA, 19 nt, Artificial Sequence
  Description of Artificial Sequence: Synthetic oligonucleotide
cuccacggcuagagaauag

SEQ ID NO: 1257659 - RNA, 19 nt, Artificial Sequence
  Description of Artificial Sequence: Synthetic oligonucleotide
gauccacugugcccgggga

SEQ ID NO: 1257660 - RNA, 19 nt, Artificial Sequence
  Description of Artificial Sequence: Synthetic oligonucleotide
uccccgggaggcaucuugu

SEQ ID NO: 1257661 - RNA, 19 nt, Artificial Sequence
  Description of Artificial Sequence: Synthetic oligonucleotide
caaggcggcuaauuuaaua

SEQ ID NO: 1257662 - RNA, 19 nt, Artificial Sequence
  Description of Artificial Sequence: Synthetic oligonucleotide
ucuccacggcuagagaaua

SEQ ID NO: 1257663 - RNA, 19 nt, Artificial Sequence
  Description of Artificial Sequence: Synthetic oligonucleotide
gacggcugcugccaucaga

SEQ ID NO: 1257664 - RNA, 19 nt, Artificial Sequence
  Description of Artificial Sequence: Synthetic oligonucleotide
guaaacucguaaaugucau

SEQ ID NO: 1257665 - RNA, 19 nt, Artificial Sequence
  Description of Artificial Sequence: Synthetic oligonucleotide
acaugcacagaaagccugu

SEQ ID NO: 1257666 - RNA, 19 nt, Artificial Sequence
  Description of Artificial Sequence: Synthetic oligonucleotide
caauccgaagagaaaaguu

SEQ ID NO: 1257667 - RNA, 19 nt, Artificial Sequence
  Description of Artificial Sequence: Synthetic oligonucleotide
aggacggcugcugccauca

SEQ ID NO: 1257668 - RNA, 19 nt, Artificial Sequence
  Description of Artificial Sequence: Synthetic oligonucleotide
ucggauccacugugcccgg

SEQ ID NO: 1257669 - RNA, 19 nt, Artificial Sequence
  Description of Artificial Sequence: Synthetic oligonucleotide
cugauucgguagucggauc

SEQ ID NO: 1257670 - RNA, 19 nt, Artificial Sequence
  Description of Artificial Sequence: Synthetic oligonucleotide
ccacggcuagagaauaggc

SEQ ID NO: 1257671 - RNA, 19 nt, Artificial Sequence
  Description of Artificial Sequence: Synthetic oligonucleotide
agcccgaugugagggucac

SEQ ID NO: 1257672 - RNA, 19 nt, Artificial Sequence
  Description of Artificial Sequence: Synthetic oligonucleotide
acggagcaucacuccacug

SEQ ID NO: 1257673 - RNA, 19 nt, Artificial Sequence
  Description of Artificial Sequence: Synthetic oligonucleotide
cuccccgggaggcaucuug

SEQ ID NO: 1257674 - RNA, 19 nt, Artificial Sequence
  Description of Artificial Sequence: Synthetic oligonucleotide
auucgguagucggauccca

SEQ ID NO: 1257675 - RNA, 19 nt, Artificial Sequence
  Description of Artificial Sequence: Synthetic oligonucleotide
ggcggcuaauuuaauauaa

SEQ ID NO: 1257676 - RNA, 19 nt, Artificial Sequence
  Description of Artificial Sequence: Synthetic oligonucleotide
cauugccgggcaccucugc

SEQ ID NO: 1257677 - RNA, 19 nt, Artificial Sequence
  Description of Artificial Sequence: Synthetic oligonucleotide
ggcgcaucuccuccacacg

SEQ ID NO: 1257678 - RNA, 19 nt, Artificial Sequence
  Description of Artificial Sequence: Synthetic oligonucleotide
acaauauccuggguaccua

SEQ ID NO: 1257679 - RNA, 19 nt, Artificial Sequence
  Description of Artificial Sequence: Synthetic oligonucleotide
cagcaugcauucgggcucc

SEQ ID NO: 1257680 - RNA, 19 nt, Artificial Sequence
  Description of Artificial Sequence: Synthetic oligonucleotide
caucggucuauuucuccaa

SEQ ID NO: 1257681 - RNA, 19 nt, Artificial Sequence
  Description of Artificial Sequence: Synthetic oligonucleotide
cccgaugugagggucacac

SEQ ID NO: 1257682 - RNA, 19 nt, Artificial Sequence
  Description of Artificial Sequence: Synthetic oligonucleotide
ucugcucguuuaggaggag

SEQ ID NO: 1257683 - RNA, 19 nt, Artificial Sequence
  Description of Artificial Sequence: Synthetic oligonucleotide
cugugcccauucuauaucu

SEQ ID NO: 1257684 - RNA, 19 nt, Artificial Sequence
  Description of Artificial Sequence: Synthetic oligonucleotide
cauagucuaaccggucaaa

SEQ ID NO: 1257685 - RNA, 19 nt, Artificial Sequence
  Description of Artificial Sequence: Synthetic oligonucleotide
auucuauaucuggcugcca

SEQ ID NO: 1257686 - RNA, 19 nt, Artificial Sequence
  Description of Artificial Sequence: Synthetic oligonucleotide
ccuaugauggcuacaacau

SEQ ID NO: 1257687 - RNA, 19 nt, Artificial Sequence
  Description of Artificial Sequence: Synthetic oligonucleotide
gcugugcccauucuauauc

SEQ ID NO: 1257688 - RNA, 19 nt, Artificial Sequence
  Description of Artificial Sequence: Synthetic oligonucleotide
cuccgaacugcugugccca

SEQ ID NO: 1257689 - RNA, 19 nt, Artificial Sequence
  Description of Artificial Sequence: Synthetic oligonucleotide
gagaauaggccuguucauu

SEQ ID NO: 1257690 - RNA, 19 nt, Artificial Sequence
  Description of Artificial Sequence: Synthetic oligonucleotide
aaacgucguagggcugggu

SEQ ID NO: 1257691 - RNA, 19 nt, Artificial Sequence
  Description of Artificial Sequence: Synthetic oligonucleotide
gaagggccugcagauaggu

SEQ ID NO: 1257692 - RNA, 19 nt, Artificial Sequence
  Description of Artificial Sequence: Synthetic oligonucleotide
gguaccuaucguagcaguc

SEQ ID NO: 1257693 - RNA, 19 nt, Artificial Sequence
  Description of Artificial Sequence: Synthetic oligonucleotide
caucuuucccgggcugcag

SEQ ID NO: 1257694 - RNA, 19 nt, Artificial Sequence
  Description of Artificial Sequence: Synthetic oligonucleotide
cagcuugaagugaugaauu

SEQ ID NO: 1257695 - RNA, 19 nt, Artificial Sequence
  Description of Artificial Sequence: Synthetic oligonucleotide
gacaccagguauaccccaa

SEQ ID NO: 1257696 - RNA, 19 nt, Artificial Sequence
  Description of Artificial Sequence: Synthetic oligonucleotide
gucggaucccagacccggg

SEQ ID NO: 1257697 - RNA, 19 nt, Artificial Sequence
  Description of Artificial Sequence: Synthetic oligonucleotide
cuggguaccuaugauggcu

SEQ ID NO: 1257698 - RNA, 19 nt, Artificial Sequence
  Description of Artificial Sequence: Synthetic oligonucleotide
cacaauauccuggguaccu

SEQ ID NO: 1257699 - RNA, 19 nt, Artificial Sequence
  Description of Artificial Sequence: Synthetic oligonucleotide
aggaggcuuccagugggcu

SEQ ID NO: 1257700 - RNA, 19 nt, Artificial Sequence
  Description of Artificial Sequence: Synthetic oligonucleotide
cauguguggucacagccau

SEQ ID NO: 1257701 - RNA, 19 nt, Artificial Sequence
  Description of Artificial Sequence: Synthetic oligonucleotide
guccccucgagagccaaca

SEQ ID NO: 1257702 - RNA, 19 nt, Artificial Sequence
  Description of Artificial Sequence: Synthetic oligonucleotide
caauauccuggguaccuau

SEQ ID NO: 1257703 - RNA, 19 nt, Artificial Sequence
  Description of Artificial Sequence: Synthetic oligonucleotide
ccuccgaacugcugugccc

SEQ ID NO: 1257704 - RNA, 19 nt, Artificial Sequence
  Description of Artificial Sequence: Synthetic oligonucleotide
gcuccgacgccgcggaggc

SEQ ID NO: 1257705 - RNA, 19 nt, Artificial Sequence
  Description of Artificial Sequence: Synthetic oligonucleotide
ccagauacccgcucauaga

SEQ ID NO: 1257706 - RNA, 19 nt, Artificial Sequence
  Description of Artificial Sequence: Synthetic oligonucleotide
ccuggguaccuaugauggc

SEQ ID NO: 1257707 - RNA, 19 nt, Artificial Sequence
  Description of Artificial Sequence: Synthetic oligonucleotide
gcauguguggucacagcca

SEQ ID NO: 1257708 - RNA, 19 nt, Artificial Sequence
  Description of Artificial Sequence: Synthetic oligonucleotide
acgccgcggaggcagcaca

SEQ ID NO: 1257709 - RNA, 19 nt, Artificial Sequence
  Description of Artificial Sequence: Synthetic oligonucleotide
gucuaaccggucaaaguau

SEQ ID NO: 1257710 - RNA, 19 nt, Artificial Sequence
  Description of Artificial Sequence: Synthetic oligonucleotide
ccacggagcaucacuccac

SEQ ID NO: 1257711 - RNA, 19 nt, Artificial Sequence
  Description of Artificial Sequence: Synthetic oligonucleotide
ggcuaugccuuuguucauc

SEQ ID NO: 1257712 - RNA, 19 nt, Artificial Sequence
  Description of Artificial Sequence: Synthetic oligonucleotide
gccacggagcaucacucca

SEQ ID NO: 1257713 - RNA, 19 nt, Artificial Sequence
  Description of Artificial Sequence: Synthetic oligonucleotide
cuuagacaucuuguccaaa

SEQ ID NO: 1257714 - RNA, 19 nt, Artificial Sequence
  Description of Artificial Sequence: Synthetic oligonucleotide
cccaauaucgacaguccua

SEQ ID NO: 1257715 - RNA, 19 nt, Artificial Sequence
  Description of Artificial Sequence: Synthetic oligonucleotide
ggguaccuaugauggcuac

SEQ ID NO: 1257716 - RNA, 19 nt, Artificial Sequence
  Description of Artificial Sequence: Synthetic oligonucleotide
uucgaagggccuggcgcau

SEQ ID NO: 1257717 - RNA, 19 nt, Artificial Sequence
  Description of Artificial Sequence: Synthetic oligonucleotide
ggccuguucauuacacauc

SEQ ID NO: 1257718 - RNA, 19 nt, Artificial Sequence
  Description of Artificial Sequence: Synthetic oligonucleotide
gguaccuaugauggcuaca

SEQ ID NO: 1257719 - RNA, 19 nt, Artificial Sequence
  Description of Artificial Sequence: Synthetic oligonucleotide
cugggcugauucgguaguc

SEQ ID NO: 1257720 - RNA, 19 nt, Artificial Sequence
  Description of Artificial Sequence: Synthetic oligonucleotide
cugcucguuuaggaggaga

SEQ ID NO: 1257721 - RNA, 19 nt, Artificial Sequence
  Description of Artificial Sequence: Synthetic oligonucleotide
uccgaacugcugugcccau

SEQ ID NO: 1257722 - RNA, 19 nt, Artificial Sequence
  Description of Artificial Sequence: Synthetic oligonucleotide
ugccaacaugugucccuua

SEQ ID NO: 1257723 - RNA, 19 nt, Artificial Sequence
  Description of Artificial Sequence: Synthetic oligonucleotide
gagcccgaugugaggguca

SEQ ID NO: 1257724 - RNA, 19 nt, Artificial Sequence
  Description of Artificial Sequence: Synthetic oligonucleotide
cggagcaucacuccacuga

SEQ ID NO: 1257725 - RNA, 19 nt, Artificial Sequence
  Description of Artificial Sequence: Synthetic oligonucleotide
cuauuucgccagauccuau

SEQ ID NO: 1257726 - RNA, 19 nt, Artificial Sequence
  Description of Artificial Sequence: Synthetic oligonucleotide
guacagcuuaagucagcau

SEQ ID NO: 1257727 - RNA, 19 nt, Artificial Sequence
  Description of Artificial Sequence: Synthetic oligonucleotide
cgugugaucucugcaaaca

SEQ ID NO: 1257728 - RNA, 19 nt, Artificial Sequence
  Description of Artificial Sequence: Synthetic oligonucleotide
ccaacaugugucccuuaga

SEQ ID NO: 1257729 - RNA, 19 nt, Artificial Sequence
  Description of Artificial Sequence: Synthetic oligonucleotide
gacgccgcggaggcagcac

SEQ ID NO: 1257730 - RNA, 19 nt, Artificial Sequence
  Description of Artificial Sequence: Synthetic oligonucleotide
gugcaaauccaggagccuu

SEQ ID NO: 1257731 - RNA, 19 nt, Artificial Sequence
  Description of Artificial Sequence: Synthetic oligonucleotide
cacggagcaucacuccacu

SEQ ID NO: 1257732 - RNA, 19 nt, Artificial Sequence
  Description of Artificial Sequence: Synthetic oligonucleotide
ccgcggaggcagcacagag

SEQ ID NO: 1257733 - RNA, 19 nt, Artificial Sequence
  Description of Artificial Sequence: Synthetic oligonucleotide
gcugauucgguagucggau

SEQ ID NO: 1257734 - RNA, 19 nt, Artificial Sequence
  Description of Artificial Sequence: Synthetic oligonucleotide
cgacaguccuauuucgcca

SEQ ID NO: 1257735 - RNA, 19 nt, Artificial Sequence
  Description of Artificial Sequence: Synthetic oligonucleotide
gcucguuuaggaggagaca

SEQ ID NO: 1257736 - RNA, 19 nt, Artificial Sequence
  Description of Artificial Sequence: Synthetic oligonucleotide
ccuauuucgccagauccua

SEQ ID NO: 1257737 - RNA, 19 nt, Artificial Sequence
  Description of Artificial Sequence: Synthetic oligonucleotide
cacacgacauagguaccua

SEQ ID NO: 1257738 - RNA, 19 nt, Artificial Sequence
  Description of Artificial Sequence: Synthetic oligonucleotide
gcaaauccaggagccuuga

SEQ ID NO: 1257739 - RNA, 19 nt, Artificial Sequence
  Description of Artificial Sequence: Synthetic oligonucleotide
gggucacacuuccgcacca

SEQ ID NO: 1257740 - RNA, 19 nt, Artificial Sequence
  Description of Artificial Sequence: Synthetic oligonucleotide
cagggcauguguggucaca

SEQ ID NO: 1257741 - RNA, 19 nt, Artificial Sequence
  Description of Artificial Sequence: Synthetic oligonucleotide
cccucaguauacagcuuga

SEQ ID NO: 1257742 - RNA, 19 nt, Artificial Sequence
  Description of Artificial Sequence: Synthetic oligonucleotide
uugcagcgauaaggacggc

SEQ ID NO: 1257743 - RNA, 19 nt, Artificial Sequence
  Description of Artificial Sequence: Synthetic oligonucleotide
cagcuuaagucagcaugua

SEQ ID NO: 1257744 - RNA, 19 nt, Artificial Sequence
  Description of Artificial Sequence: Synthetic oligonucleotide
cagcacucggauccacugu

SEQ ID NO: 1257745 - RNA, 19 nt, Artificial Sequence
  Description of Artificial Sequence: Synthetic oligonucleotide
gcugggcugauucgguagu

SEQ ID NO: 1257746 - RNA, 19 nt, Artificial Sequence
  Description of Artificial Sequence: Synthetic oligonucleotide
cuccagauacccgcucaua

SEQ ID NO: 1257747 - RNA, 19 nt, Artificial Sequence
  Description of Artificial Sequence: Synthetic oligonucleotide
gugacuccauggaagucuu

SEQ ID NO: 1257748 - RNA, 19 nt, Artificial Sequence
  Description of Artificial Sequence: Synthetic oligonucleotide
ccgcaaggcggcuaauuua

SEQ ID NO: 1257749 - RNA, 19 nt, Artificial Sequence
  Description of Artificial Sequence: Synthetic oligonucleotide
ggggccgcaaggcggcuaa

SEQ ID NO: 1257750 - RNA, 19 nt, Artificial Sequence
  Description of Artificial Sequence: Synthetic oligonucleotide
cagcauguacauguauguu

SEQ ID NO: 1257751 - RNA, 19 nt, Artificial Sequence
  Description of Artificial Sequence: Synthetic oligonucleotide
caaauccaggagccuugau

SEQ ID NO: 1257752 - RNA, 19 nt, Artificial Sequence
  Description of Artificial Sequence: Synthetic oligonucleotide
ggggcccaaaguucagggu

SEQ ID NO: 1257753 - RNA, 19 nt, Artificial Sequence
  Description of Artificial Sequence: Synthetic oligonucleotide
gcggcuaauuuaauauaau

SEQ ID NO: 1257754 - RNA, 19 nt, Artificial Sequence
  Description of Artificial Sequence: Synthetic oligonucleotide
gccgcaaggcggcuaauuu

SEQ ID NO: 1257755 - RNA, 19 nt, Artificial Sequence
  Description of Artificial Sequence: Synthetic oligonucleotide
ccgggcaccucugcugggc

SEQ ID NO: 1257756 - RNA, 19 nt, Artificial Sequence
  Description of Artificial Sequence: Synthetic oligonucleotide
cugcuguuauaaccccaau

SEQ ID NO: 1257757 - RNA, 19 nt, Artificial Sequence
  Description of Artificial Sequence: Synthetic oligonucleotide
gacccgggccucagcaccu

SEQ ID NO: 1257758 - RNA, 19 nt, Artificial Sequence
  Description of Artificial Sequence: Synthetic oligonucleotide
ccccaauaucgacaguccu

SEQ ID NO: 1257759 - RNA, 19 nt, Artificial Sequence
  Description of Artificial Sequence: Synthetic oligonucleotide
ccucaguauacagcuugaa

SEQ ID NO: 1257760 - RNA, 19 nt, Artificial Sequence
  Description of Artificial Sequence: Synthetic oligonucleotide
gcuccagauacccgcucau

SEQ ID NO: 1257761 - RNA, 19 nt, Artificial Sequence
  Description of Artificial Sequence: Synthetic oligonucleotide
cgacauagguaccuaucgu

SEQ ID NO: 1257762 - RNA, 19 nt, Artificial Sequence
  Description of Artificial Sequence: Synthetic oligonucleotide
cccgggccucagcaccugg

SEQ ID NO: 1257763 - RNA, 19 nt, Artificial Sequence
  Description of Artificial Sequence: Synthetic oligonucleotide
ggucggauauaagcagcau

SEQ ID NO: 1257764 - RNA, 19 nt, Artificial Sequence
  Description of Artificial Sequence: Synthetic oligonucleotide
caguccccucgagagccaa

SEQ ID NO: 1257765 - RNA, 19 nt, Artificial Sequence
  Description of Artificial Sequence: Synthetic oligonucleotide
cccgcucauagaacucaaa

SEQ ID NO: 1257766 - RNA, 19 nt, Artificial Sequence
  Description of Artificial Sequence: Synthetic oligonucleotide
ccacacgacauagguaccu

SEQ ID NO: 1257767 - RNA, 19 nt, Artificial Sequence
  Description of Artificial Sequence: Synthetic oligonucleotide
aggggccgcaaggcggcua

SEQ ID NO: 1257768 - RNA, 19 nt, Artificial Sequence
  Description of Artificial Sequence: Synthetic oligonucleotide
ccuuggagggguacaugau

SEQ ID NO: 1257769 - RNA, 19 nt, Artificial Sequence
  Description of Artificial Sequence: Synthetic oligonucleotide
ccauaguuaagugcaucuu

SEQ ID NO: 1257770 - RNA, 19 nt, Artificial Sequence
  Description of Artificial Sequence: Synthetic oligonucleotide
gggcuccgacgccgcggag

SEQ ID NO: 1257771 - RNA, 19 nt, Artificial Sequence
  Description of Artificial Sequence: Synthetic oligonucleotide
gccgcggaggcagcacaga

SEQ ID NO: 1257772 - RNA, 19 nt, Artificial Sequence
  Description of Artificial Sequence: Synthetic oligonucleotide
ccggugcaggagcccgaug

SEQ ID NO: 1257773 - RNA, 19 nt, Artificial Sequence
  Description of Artificial Sequence: Synthetic oligonucleotide
ggucacacuuccgcaccau

SEQ ID NO: 1257774 - RNA, 19 nt, Artificial Sequence
  Description of Artificial Sequence: Synthetic oligonucleotide
ccgaugugagggucacacu

SEQ ID NO: 1257775 - RNA, 19 nt, Artificial Sequence
  Description of Artificial Sequence: Synthetic oligonucleotide
gggccugcagauaggucuu

SEQ ID NO: 1257776 - RNA, 19 nt, Artificial Sequence
  Description of Artificial Sequence: Synthetic oligonucleotide
gcaaggcggcuaauuuaau

SEQ ID NO: 1257777 - RNA, 19 nt, Artificial Sequence
  Description of Artificial Sequence: Synthetic oligonucleotide
ggccgcaaggcggcuaauu

SEQ ID NO: 1257778 - RNA, 19 nt, Artificial Sequence
  Description of Artificial Sequence: Synthetic oligonucleotide
cuccgacgccgcggaggca

SEQ ID NO: 1257779 - RNA, 19 nt, Artificial Sequence
  Description of Artificial Sequence: Synthetic oligonucleotide
ccccggugcaggagcccga

SEQ ID NO: 1257780 - RNA, 19 nt, Artificial Sequence
  Description of Artificial Sequence: Synthetic oligonucleotide
gcccgaugugagggucaca

SEQ ID NO: 1257781 - RNA, 19 nt, Artificial Sequence
  Description of Artificial Sequence: Synthetic oligonucleotide
cgucguagggcugggucuu

SEQ ID NO: 1257782 - RNA, 19 nt, Artificial Sequence
  Description of Artificial Sequence: Synthetic oligonucleotide
ccccgggaggcaucuuguu

SEQ ID NO: 1257783 - RNA, 19 nt, Artificial Sequence
  Description of Artificial Sequence: Synthetic oligonucleotide
cgacgccgcggaggcagca

SEQ ID NO: 1257784 - RNA, 19 nt, Artificial Sequence
  Description of Artificial Sequence: Synthetic oligonucleotide
ccgaacugcugugcccauu

SEQ ID NO: 1257785 - RNA, 19 nt, Artificial Sequence
  Description of Artificial Sequence: Synthetic oligonucleotide
cccggugcaggagcccgau

SEQ ID NO: 1257786 - RNA, 19 nt, Artificial Sequence
  Description of Artificial Sequence: Synthetic oligonucleotide
gggccgcaaggcggcuaau

SEQ ID NO: 1257787 - RNA, 19 nt, Artificial Sequence
  Description of Artificial Sequence: Synthetic oligonucleotide
cccggggaggaggcuggau

SEQ ID NO: 1257788 - RNA, 19 nt, Artificial Sequence
  Description of Artificial Sequence: Synthetic oligonucleotide
aacuuaaagagagagagag

SEQ ID NO: 1257789 - RNA, 19 nt, Artificial Sequence
  Description of Artificial Sequence: Synthetic oligonucleotide
uaaagagagagagagagag

SEQ ID NO: 1257790 - RNA, 19 nt, Artificial Sequence
  Description of Artificial Sequence: Synthetic oligonucleotide
gucaaaguuaaacagauac

SEQ ID NO: 1257791 - RNA, 19 nt, Artificial Sequence
  Description of Artificial Sequence: Synthetic oligonucleotide
cuuaaagagagagagagag

SEQ ID NO: 1257792 - RNA, 19 nt, Artificial Sequence
  Description of Artificial Sequence: Synthetic oligonucleotide
uuuaaggcgucauagacac

SEQ ID NO: 1257793 - RNA, 19 nt, Artificial Sequence
  Description of Artificial Sequence: Synthetic oligonucleotide
aagagagagagagagagag

SEQ ID NO: 1257794 - RNA, 19 nt, Artificial Sequence
  Description of Artificial Sequence: Synthetic oligonucleotide
uguacugagacccauugga

SEQ ID NO: 1257795 - RNA, 19 nt, Artificial Sequence
  Description of Artificial Sequence: Synthetic oligonucleotide
auagagaaaugccggaggc

SEQ ID NO: 1257796 - RNA, 19 nt, Artificial Sequence
  Description of Artificial Sequence: Synthetic oligonucleotide
ggcaaaauaaacuucaaac

SEQ ID NO: 1257797 - RNA, 19 nt, Artificial Sequence
  Description of Artificial Sequence: Synthetic oligonucleotide
cauaagcugauucauuugg

SEQ ID NO: 1257798 - RNA, 19 nt, Artificial Sequence
  Description of Artificial Sequence: Synthetic oligonucleotide
cuucauagagaaaugccgg

SEQ ID NO: 1257799 - RNA, 19 nt, Artificial Sequence
  Description of Artificial Sequence: Synthetic oligonucleotide
uucuggucuauaaagaccu

SEQ ID NO: 1257800 - RNA, 19 nt, Artificial Sequence
  Description of Artificial Sequence: Synthetic oligonucleotide
ucaauaucaucauggaucu

SEQ ID NO: 1257801 - RNA, 19 nt, Artificial Sequence
  Description of Artificial Sequence: Synthetic oligonucleotide
gagagagagagagagaucc

SEQ ID NO: 1257802 - RNA, 19 nt, Artificial Sequence
  Description of Artificial Sequence: Synthetic oligonucleotide
auggguaucuucuugggag

SEQ ID NO: 1257803 - RNA, 19 nt, Artificial Sequence
  Description of Artificial Sequence: Synthetic oligonucleotide
aguucuggcacuccugagc

SEQ ID NO: 1257804 - RNA, 19 nt, Artificial Sequence
  Description of Artificial Sequence: Synthetic oligonucleotide
gagagagagagagagagag

SEQ ID NO: 1257805 - RNA, 19 nt, Artificial Sequence
  Description of Artificial Sequence: Synthetic oligonucleotide
cucaaauuugucauuggag

SEQ ID NO: 1257806 - RNA, 19 nt, Artificial Sequence
  Description of Artificial Sequence: Synthetic oligonucleotide
ucuuuugccauguuaccag

SEQ ID NO: 1257807 - RNA, 19 nt, Artificial Sequence
  Description of Artificial Sequence: Synthetic oligonucleotide
ugaggagucagacggcugg

SEQ ID NO: 1257808 - RNA, 19 nt, Artificial Sequence
  Description of Artificial Sequence: Synthetic oligonucleotide
aguaugugggcuuccuacc

SEQ ID NO: 1257809 - RNA, 19 nt, Artificial Sequence
  Description of Artificial Sequence: Synthetic oligonucleotide
uggauguagaaccuguugu

SEQ ID NO: 1257810 - RNA, 19 nt, Artificial Sequence
  Description of Artificial Sequence: Synthetic oligonucleotide
ugccguuggauguagaacc

SEQ ID NO: 1257811 - RNA, 19 nt, Artificial Sequence
  Description of Artificial Sequence: Synthetic oligonucleotide
gauucuggucuauaaagac

SEQ ID NO: 1257812 - RNA, 19 nt, Artificial Sequence
  Description of Artificial Sequence: Synthetic oligonucleotide
uucaauuagacuggcaucu

SEQ ID NO: 1257813 - RNA, 19 nt, Artificial Sequence
  Description of Artificial Sequence: Synthetic oligonucleotide
uugccauguuaccagaucc

SEQ ID NO: 1257814 - RNA, 19 nt, Artificial Sequence
  Description of Artificial Sequence: Synthetic oligonucleotide
uuacuggaggugcagaucu

SEQ ID NO: 1257815 - RNA, 19 nt, Artificial Sequence
  Description of Artificial Sequence: Synthetic oligonucleotide
agauacucaaauuugucau

SEQ ID NO: 1257816 - RNA, 19 nt, Artificial Sequence
  Description of Artificial Sequence: Synthetic oligonucleotide
cauuuaaggcgucauagac

SEQ ID NO: 1257817 - RNA, 19 nt, Artificial Sequence
  Description of Artificial Sequence: Synthetic oligonucleotide
auugacauuggacugucca

SEQ ID NO: 1257818 - RNA, 19 nt, Artificial Sequence
  Description of Artificial Sequence: Synthetic oligonucleotide
uugaggggcaaaauaaacu

SEQ ID NO: 1257819 - RNA, 19 nt, Artificial Sequence
  Description of Artificial Sequence: Synthetic oligonucleotide
gauguagaaccuguugucg

SEQ ID NO: 1257820 - RNA, 19 nt, Artificial Sequence
  Description of Artificial Sequence: Synthetic oligonucleotide
aggccaauccacuugaucu

SEQ ID NO: 1257821 - RNA, 19 nt, Artificial Sequence
  Description of Artificial Sequence: Synthetic oligonucleotide
ugucgugacaaauacucca

SEQ ID NO: 1257822 - RNA, 19 nt, Artificial Sequence
  Description of Artificial Sequence: Synthetic oligonucleotide
accacaauaguguuugaug

SEQ ID NO: 1257823 - RNA, 19 nt, Artificial Sequence
  Description of Artificial Sequence: Synthetic oligonucleotide
uuuccaaguguguucacug

SEQ ID NO: 1257824 - RNA, 19 nt, Artificial Sequence
  Description of Artificial Sequence: Synthetic oligonucleotide
auucuggucuauaaagacc

SEQ ID NO: 1257825 - RNA, 19 nt, Artificial Sequence
  Description of Artificial Sequence: Synthetic oligonucleotide
cauagagaaaugccggagg

SEQ ID NO: 1257826 - RNA, 19 nt, Artificial Sequence
  Description of Artificial Sequence: Synthetic oligonucleotide
acggauauucuucugguca

SEQ ID NO: 1257827 - RNA, 19 nt, Artificial Sequence
  Description of Artificial Sequence: Synthetic oligonucleotide
aaucaaggcuguaacugcg

SEQ ID NO: 1257828 - RNA, 19 nt, Artificial Sequence
  Description of Artificial Sequence: Synthetic oligonucleotide
aaaguuaaacagauacuca

SEQ ID NO: 1257829 - RNA, 19 nt, Artificial Sequence
  Description of Artificial Sequence: Synthetic oligonucleotide
aauaguguuugaugcugca

SEQ ID NO: 1257830 - RNA, 19 nt, Artificial Sequence
  Description of Artificial Sequence: Synthetic oligonucleotide
caccuuaagaucuucagca

SEQ ID NO: 1257831 - RNA, 19 nt, Artificial Sequence
  Description of Artificial Sequence: Synthetic oligonucleotide
agcgcugaacucugcaacc

SEQ ID NO: 1257832 - RNA, 19 nt, Artificial Sequence
  Description of Artificial Sequence: Synthetic oligonucleotide
gaguaugugggcuuccuac

SEQ ID NO: 1257833 - RNA, 19 nt, Artificial Sequence
  Description of Artificial Sequence: Synthetic oligonucleotide
gacccauuggagcuugugg

SEQ ID NO: 1257834 - RNA, 19 nt, Artificial Sequence
  Description of Artificial Sequence: Synthetic oligonucleotide
aacagauacucaaauuugu

SEQ ID NO: 1257835 - RNA, 19 nt, Artificial Sequence
  Description of Artificial Sequence: Synthetic oligonucleotide
acugagacccauuggagcu

SEQ ID NO: 1257836 - RNA, 19 nt, Artificial Sequence
  Description of Artificial Sequence: Synthetic oligonucleotide
agaucuaacuccacaacuc

SEQ ID NO: 1257837 - RNA, 19 nt, Artificial Sequence
  Description of Artificial Sequence: Synthetic oligonucleotide
ugacaaauacuccaccaau

SEQ ID NO: 1257838 - RNA, 19 nt, Artificial Sequence
  Description of Artificial Sequence: Synthetic oligonucleotide
uuaaagagagagagagaga

SEQ ID NO: 1257839 - RNA, 19 nt, Artificial Sequence
  Description of Artificial Sequence: Synthetic oligonucleotide
uacugagacccauuggagc

SEQ ID NO: 1257840 - RNA, 19 nt, Artificial Sequence
  Description of Artificial Sequence: Synthetic oligonucleotide
aaucaauccuccucaucgu

SEQ ID NO: 1257841 - RNA, 19 nt, Artificial Sequence
  Description of Artificial Sequence: Synthetic oligonucleotide
auuugguaggauaugguug

SEQ ID NO: 1257842 - RNA, 19 nt, Artificial Sequence
  Description of Artificial Sequence: Synthetic oligonucleotide
ucauaagcugauucauuug

SEQ ID NO: 1257843 - RNA, 19 nt, Artificial Sequence
  Description of Artificial Sequence: Synthetic oligonucleotide
acaacucauggguaucuuc

SEQ ID NO: 1257844 - RNA, 19 nt, Artificial Sequence
  Description of Artificial Sequence: Synthetic oligonucleotide
cauuguaggaggugguccc

SEQ ID NO: 1257845 - RNA, 19 nt, Artificial Sequence
  Description of Artificial Sequence: Synthetic oligonucleotide
ucacacaccuucauagaga

SEQ ID NO: 1257846 - RNA, 19 nt, Artificial Sequence
  Description of Artificial Sequence: Synthetic oligonucleotide
accuuuaguucuccguugg

SEQ ID NO: 1257847 - RNA, 19 nt, Artificial Sequence
  Description of Artificial Sequence: Synthetic oligonucleotide
gaggugcagaucuaacucc

SEQ ID NO: 1257848 - RNA, 19 nt, Artificial Sequence
  Description of Artificial Sequence: Synthetic oligonucleotide
uguugacaaugaugaaggg

SEQ ID NO: 1257849 - RNA, 19 nt, Artificial Sequence
  Description of Artificial Sequence: Synthetic oligonucleotide
uguagaaccuguugucgug

SEQ ID NO: 1257850 - RNA, 19 nt, Artificial Sequence
  Description of Artificial Sequence: Synthetic oligonucleotide
ugcagaucuaacuccacaa

SEQ ID NO: 1257851 - RNA, 19 nt, Artificial Sequence
  Description of Artificial Sequence: Synthetic oligonucleotide
gaucuaacuccacaacuca

SEQ ID NO: 1257852 - RNA, 19 nt, Artificial Sequence
  Description of Artificial Sequence: Synthetic oligonucleotide
agaacagaaagucccacuu

SEQ ID NO: 1257853 - RNA, 19 nt, Artificial Sequence
  Description of Artificial Sequence: Synthetic oligonucleotide
ucauuugguaggauauggu

SEQ ID NO: 1257854 - RNA, 19 nt, Artificial Sequence
  Description of Artificial Sequence: Synthetic oligonucleotide
ucucuagacauuucuuccu

SEQ ID NO: 1257855 - RNA, 19 nt, Artificial Sequence
  Description of Artificial Sequence: Synthetic oligonucleotide
aaaugccggaggcccuugc

SEQ ID NO: 1257856 - RNA, 19 nt, Artificial Sequence
  Description of Artificial Sequence: Synthetic oligonucleotide
uguaacugcguacccgcca

SEQ ID NO: 1257857 - RNA, 19 nt, Artificial Sequence
  Description of Artificial Sequence: Synthetic oligonucleotide
acuucuggccaccuuaaga

SEQ ID NO: 1257858 - RNA, 19 nt, Artificial Sequence
  Description of Artificial Sequence: Synthetic oligonucleotide
cagguugagcaaucaaucc

SEQ ID NO: 1257859 - RNA, 19 nt, Artificial Sequence
  Description of Artificial Sequence: Synthetic oligonucleotide
cccgacauaggaaacaggg

SEQ ID NO: 1257860 - RNA, 19 nt, Artificial Sequence
  Description of Artificial Sequence: Synthetic oligonucleotide
accucauuguaggaggugg

SEQ ID NO: 1257861 - RNA, 19 nt, Artificial Sequence
  Description of Artificial Sequence: Synthetic oligonucleotide
aacguguugucaaaguuaa

SEQ ID NO: 1257862 - RNA, 19 nt, Artificial Sequence
  Description of Artificial Sequence: Synthetic oligonucleotide
uuugccauguuaccagauc

SEQ ID NO: 1257863 - RNA, 19 nt, Artificial Sequence
  Description of Artificial Sequence: Synthetic oligonucleotide
cagucaaugacggucuucc

SEQ ID NO: 1257864 - RNA, 19 nt, Artificial Sequence
  Description of Artificial Sequence: Synthetic oligonucleotide
ugggcuuccuaccacaaua

SEQ ID NO: 1257865 - RNA, 19 nt, Artificial Sequence
  Description of Artificial Sequence: Synthetic oligonucleotide
uugucgugacaaauacucc

SEQ ID NO: 1257866 - RNA, 19 nt, Artificial Sequence
  Description of Artificial Sequence: Synthetic oligonucleotide
gagcaaucaauccuccuca

SEQ ID NO: 1257867 - RNA, 19 nt, Artificial Sequence
  Description of Artificial Sequence: Synthetic oligonucleotide
acauuuaaggcgucauaga

SEQ ID NO: 1257868 - RNA, 19 nt, Artificial Sequence
  Description of Artificial Sequence: Synthetic oligonucleotide
gagagagagagauccuuac

SEQ ID NO: 1257869 - RNA, 19 nt, Artificial Sequence
  Description of Artificial Sequence: Synthetic oligonucleotide
ucuccguuggcuucaauua

SEQ ID NO: 1257870 - RNA, 19 nt, Artificial Sequence
  Description of Artificial Sequence: Synthetic oligonucleotide
agacggcugguucugggac

SEQ ID NO: 1257871 - RNA, 19 nt, Artificial Sequence
  Description of Artificial Sequence: Synthetic oligonucleotide
ugucacauacgguucuaga

SEQ ID NO: 1257872 - RNA, 19 nt, Artificial Sequence
  Description of Artificial Sequence: Synthetic oligonucleotide
aauuagacuggcaucuuuu

SEQ ID NO: 1257873 - RNA, 19 nt, Artificial Sequence
  Description of Artificial Sequence: Synthetic oligonucleotide
ucgugacaaauacuccacc

SEQ ID NO: 1257874 - RNA, 19 nt, Artificial Sequence
  Description of Artificial Sequence: Synthetic oligonucleotide
cuuccuaccacaauagugu

SEQ ID NO: 1257875 - RNA, 19 nt, Artificial Sequence
  Description of Artificial Sequence: Synthetic oligonucleotide
aacaggggucucuacccug

SEQ ID NO: 1257876 - RNA, 19 nt, Artificial Sequence
  Description of Artificial Sequence: Synthetic oligonucleotide
acccaugcguuugagcacc

SEQ ID NO: 1257877 - RNA, 19 nt, Artificial Sequence
  Description of Artificial Sequence: Synthetic oligonucleotide
acgguucuagagcuuuugg

SEQ ID NO: 1257878 - RNA, 19 nt, Artificial Sequence
  Description of Artificial Sequence: Synthetic oligonucleotide
aaacaggggucucuacccu

SEQ ID NO: 1257879 - RNA, 19 nt, Artificial Sequence
  Description of Artificial Sequence: Synthetic oligonucleotide
auguagaaccuguugucgu

SEQ ID NO: 1257880 - RNA, 19 nt, Artificial Sequence
  Description of Artificial Sequence: Synthetic oligonucleotide
aaugacggucuuccugcug

SEQ ID NO: 1257881 - RNA, 19 nt, Artificial Sequence
  Description of Artificial Sequence: Synthetic oligonucleotide
uucugucacauacgguucu

SEQ ID NO: 1257882 - RNA, 19 nt, Artificial Sequence
  Description of Artificial Sequence: Synthetic oligonucleotide
uugacauuggacuguccaa

SEQ ID NO: 1257883 - RNA, 19 nt, Artificial Sequence
  Description of Artificial Sequence: Synthetic oligonucleotide
uugaagaggagaggggucu

SEQ ID NO: 1257884 - RNA, 19 nt, Artificial Sequence
  Description of Artificial Sequence: Synthetic oligonucleotide
ugccauguuaccagaucca

SEQ ID NO: 1257885 - RNA, 19 nt, Artificial Sequence
  Description of Artificial Sequence: Synthetic oligonucleotide
acuguggauggguggacag

SEQ ID NO: 1257886 - RNA, 19 nt, Artificial Sequence
  Description of Artificial Sequence: Synthetic oligonucleotide
cagcaacaacuguugaggg

SEQ ID NO: 1257887 - RNA, 19 nt, Artificial Sequence
  Description of Artificial Sequence: Synthetic oligonucleotide
ugaguguugggaguaugug

SEQ ID NO: 1257888 - RNA, 19 nt, Artificial Sequence
  Description of Artificial Sequence: Synthetic oligonucleotide
uagagaugauguucauggc

SEQ ID NO: 1257889 - RNA, 19 nt, Artificial Sequence
  Description of Artificial Sequence: Synthetic oligonucleotide
uggguaucuucuugggagc

SEQ ID NO: 1257890 - RNA, 19 nt, Artificial Sequence
  Description of Artificial Sequence: Synthetic oligonucleotide
gaccuuuaguucuccguug

SEQ ID NO: 1257891 - RNA, 19 nt, Artificial Sequence
  Description of Artificial Sequence: Synthetic oligonucleotide
gcaacaacuguugaggggc

SEQ ID NO: 1257892 - RNA, 19 nt, Artificial Sequence
  Description of Artificial Sequence: Synthetic oligonucleotide
agagagagagauccuuacu

SEQ ID NO: 1257893 - RNA, 19 nt, Artificial Sequence
  Description of Artificial Sequence: Synthetic oligonucleotide
uucuccguuggcuucaauu

SEQ ID NO: 1257894 - RNA, 19 nt, Artificial Sequence
  Description of Artificial Sequence: Synthetic oligonucleotide
cauacccaugcguuugagc

SEQ ID NO: 1257895 - RNA, 19 nt, Artificial Sequence
  Description of Artificial Sequence: Synthetic oligonucleotide
gagcaccucaauaucauca

SEQ ID NO: 1257896 - RNA, 19 nt, Artificial Sequence
  Description of Artificial Sequence: Synthetic oligonucleotide
ucccacuuuaaaaguuucu

SEQ ID NO: 1257897 - RNA, 19 nt, Artificial Sequence
  Description of Artificial Sequence: Synthetic oligonucleotide
aaagugaguguugggagua

SEQ ID NO: 1257898 - RNA, 19 nt, Artificial Sequence
  Description of Artificial Sequence: Synthetic oligonucleotide
agagauccuuacuggaggu

SEQ ID NO: 1257899 - RNA, 19 nt, Artificial Sequence
  Description of Artificial Sequence: Synthetic oligonucleotide
ugacauuggacuguccaaa

SEQ ID NO: 1257900 - RNA, 19 nt, Artificial Sequence
  Description of Artificial Sequence: Synthetic oligonucleotide
uccuccccgacauaggaaa

SEQ ID NO: 1257901 - RNA, 19 nt, Artificial Sequence
  Description of Artificial Sequence: Synthetic oligonucleotide
aggggcaaaauaaacuuca

SEQ ID NO: 1257902 - RNA, 19 nt, Artificial Sequence
  Description of Artificial Sequence: Synthetic oligonucleotide
agaccuuuaguucuccguu

SEQ ID NO: 1257903 - RNA, 19 nt, Artificial Sequence
  Description of Artificial Sequence: Synthetic oligonucleotide
uaugugggcuuccuaccac

SEQ ID NO: 1257904 - RNA, 19 nt, Artificial Sequence
  Description of Artificial Sequence: Synthetic oligonucleotide
ccauuucugucacauacgg

SEQ ID NO: 1257905 - RNA, 19 nt, Artificial Sequence
  Description of Artificial Sequence: Synthetic oligonucleotide
guugaggggcaaaauaaac

SEQ ID NO: 1257906 - RNA, 19 nt, Artificial Sequence
  Description of Artificial Sequence: Synthetic oligonucleotide
ugugccguuggauguagaa

SEQ ID NO: 1257907 - RNA, 19 nt, Artificial Sequence
  Description of Artificial Sequence: Synthetic oligonucleotide
uuaguucuccguuggcuuc

SEQ ID NO: 1257908 - RNA, 19 nt, Artificial Sequence
  Description of Artificial Sequence: Synthetic oligonucleotide
ggucuauaaagaccuuuag

SEQ ID NO: 1257909 - RNA, 19 nt, Artificial Sequence
  Description of Artificial Sequence: Synthetic oligonucleotide
aggcgucauagacacgccg

SEQ ID NO: 1257910 - RNA, 19 nt, Artificial Sequence
  Description of Artificial Sequence: Synthetic oligonucleotide
uccaccaauggaucccuga

SEQ ID NO: 1257911 - RNA, 19 nt, Artificial Sequence
  Description of Artificial Sequence: Synthetic oligonucleotide
ugcucaaaucacuggcaga

SEQ ID NO: 1257912 - RNA, 19 nt, Artificial Sequence
  Description of Artificial Sequence: Synthetic oligonucleotide
ggauaugguugucagcagc

SEQ ID NO: 1257913 - RNA, 19 nt, Artificial Sequence
  Description of Artificial Sequence: Synthetic oligonucleotide
gauucauuugguaggauau

SEQ ID NO: 1257914 - RNA, 19 nt, Artificial Sequence
  Description of Artificial Sequence: Synthetic oligonucleotide
cuggucauaagcugauuca

SEQ ID NO: 1257915 - RNA, 19 nt, Artificial Sequence
  Description of Artificial Sequence: Synthetic oligonucleotide
gaugucuaggcaggguagc

SEQ ID NO: 1257916 - RNA, 19 nt, Artificial Sequence
  Description of Artificial Sequence: Synthetic oligonucleotide
aacugcguacccgccacag

SEQ ID NO: 1257917 - RNA, 19 nt, Artificial Sequence
  Description of Artificial Sequence: Synthetic oligonucleotide
uuuugccauguuaccagau

SEQ ID NO: 1257918 - RNA, 19 nt, Artificial Sequence
  Description of Artificial Sequence: Synthetic oligonucleotide
ucauagacacgccgacgga

SEQ ID NO: 1257919 - RNA, 19 nt, Artificial Sequence
  Description of Artificial Sequence: Synthetic oligonucleotide
uuaaggcgucauagacacg

SEQ ID NO: 1257920 - RNA, 19 nt, Artificial Sequence
  Description of Artificial Sequence: Synthetic oligonucleotide
cacaaagugaguguuggga

SEQ ID NO: 1257921 - RNA, 19 nt, Artificial Sequence
  Description of Artificial Sequence: Synthetic oligonucleotide
aaagagagagagagagaga

SEQ ID NO: 1257922 - RNA, 19 nt, Artificial Sequence
  Description of Artificial Sequence: Synthetic oligonucleotide
caaggcuguaacugcguac

SEQ ID NO: 1257923 - RNA, 19 nt, Artificial Sequence
  Description of Artificial Sequence: Synthetic oligonucleotide
gucuauaaagaccuuuagu

SEQ ID NO: 1257924 - RNA, 19 nt, Artificial Sequence
  Description of Artificial Sequence: Synthetic oligonucleotide
guaccaaacuucuggccac

SEQ ID NO: 1257925 - RNA, 19 nt, Artificial Sequence
  Description of Artificial Sequence: Synthetic oligonucleotide
gagagagagagagagagau

SEQ ID NO: 1257926 - RNA, 19 nt, Artificial Sequence
  Description of Artificial Sequence: Synthetic oligonucleotide
guaacugcguacccgccac

SEQ ID NO: 1257927 - RNA, 19 nt, Artificial Sequence
  Description of Artificial Sequence: Synthetic oligonucleotide
accauugcucaaaucacug

SEQ ID NO: 1257928 - RNA, 19 nt, Artificial Sequence
  Description of Artificial Sequence: Synthetic oligonucleotide
aaggcgucauagacacgcc

SEQ ID NO: 1257929 - RNA, 19 nt, Artificial Sequence
  Description of Artificial Sequence: Synthetic oligonucleotide
uuaagaucuucagcagaac

SEQ ID NO: 1257930 - RNA, 19 nt, Artificial Sequence
  Description of Artificial Sequence: Synthetic oligonucleotide
cucaaacguguugucaaag

SEQ ID NO: 1257931 - RNA, 19 nt, Artificial Sequence
  Description of Artificial Sequence: Synthetic oligonucleotide
ggaggugcagaucuaacuc

SEQ ID NO: 1257932 - RNA, 19 nt, Artificial Sequence
  Description of Artificial Sequence: Synthetic oligonucleotide
ugcuuggcgguuccuuugc

SEQ ID NO: 1257933 - RNA, 19 nt, Artificial Sequence
  Description of Artificial Sequence: Synthetic oligonucleotide
guuccccgauuccaggccg

SEQ ID NO: 1257934 - RNA, 19 nt, Artificial Sequence
  Description of Artificial Sequence: Synthetic oligonucleotide
ugcuguucugcuuggcggu

SEQ ID NO: 1257935 - RNA, 19 nt, Artificial Sequence
  Description of Artificial Sequence: Synthetic oligonucleotide
uuccaaguguguucacugu

SEQ ID NO: 1257936 - RNA, 19 nt, Artificial Sequence
  Description of Artificial Sequence: Synthetic oligonucleotide
gcuguaacugcguacccgc

SEQ ID NO: 1257937 - RNA, 19 nt, Artificial Sequence
  Description of Artificial Sequence: Synthetic oligonucleotide
ccuaccacaauaguguuug

SEQ ID NO: 1257938 - RNA, 19 nt, Artificial Sequence
  Description of Artificial Sequence: Synthetic oligonucleotide
guacugagacccauuggag

SEQ ID NO: 1257939 - RNA, 19 nt, Artificial Sequence
  Description of Artificial Sequence: Synthetic oligonucleotide
uccccgacauaggaaacag

SEQ ID NO: 1257940 - RNA, 19 nt, Artificial Sequence
  Description of Artificial Sequence: Synthetic oligonucleotide
agcaccucaauaucaucau

SEQ ID NO: 1257941 - RNA, 19 nt, Artificial Sequence
  Description of Artificial Sequence: Synthetic oligonucleotide
uagagcuuuugguaccaaa

SEQ ID NO: 1257942 - RNA, 19 nt, Artificial Sequence
  Description of Artificial Sequence: Synthetic oligonucleotide
ugacaaugaugaagggcaa

SEQ ID NO: 1257943 - RNA, 19 nt, Artificial Sequence
  Description of Artificial Sequence: Synthetic oligonucleotide
gguucuagagcuuuuggua

SEQ ID NO: 1257944 - RNA, 19 nt, Artificial Sequence
  Description of Artificial Sequence: Synthetic oligonucleotide
cuccguuggcuucaauuag

SEQ ID NO: 1257945 - RNA, 19 nt, Artificial Sequence
  Description of Artificial Sequence: Synthetic oligonucleotide
ucaaggcuguaacugcgua

SEQ ID NO: 1257946 - RNA, 19 nt, Artificial Sequence
  Description of Artificial Sequence: Synthetic oligonucleotide
caccaauggaucccugagc

SEQ ID NO: 1257947 - RNA, 19 nt, Artificial Sequence
  Description of Artificial Sequence: Synthetic oligonucleotide
uggucauaagcugauucau

SEQ ID NO: 1257948 - RNA, 19 nt, Artificial Sequence
  Description of Artificial Sequence: Synthetic oligonucleotide
gugacaaauacuccaccaa

SEQ ID NO: 1257949 - RNA, 19 nt, Artificial Sequence
  Description of Artificial Sequence: Synthetic oligonucleotide
auugcucaaaucacuggca

SEQ ID NO: 1257950 - RNA, 19 nt, Artificial Sequence
  Description of Artificial Sequence: Synthetic oligonucleotide
cuugauccucuccagccuc

SEQ ID NO: 1257951 - RNA, 19 nt, Artificial Sequence
  Description of Artificial Sequence: Synthetic oligonucleotide
auuugcuguaggaugaguu

SEQ ID NO: 1257952 - RNA, 19 nt, Artificial Sequence
  Description of Artificial Sequence: Synthetic oligonucleotide
ucccaucugcaccauugcu

SEQ ID NO: 1257953 - RNA, 19 nt, Artificial Sequence
  Description of Artificial Sequence: Synthetic oligonucleotide
uacccuggagccacuguac

SEQ ID NO: 1257954 - RNA, 19 nt, Artificial Sequence
  Description of Artificial Sequence: Synthetic oligonucleotide
gacagcuacaagagacacc

SEQ ID NO: 1257955 - RNA, 19 nt, Artificial Sequence
  Description of Artificial Sequence: Synthetic oligonucleotide
uacgguucuagagcuuuug

SEQ ID NO: 1257956 - RNA, 19 nt, Artificial Sequence
  Description of Artificial Sequence: Synthetic oligonucleotide
caggacuaagauucugguc

SEQ ID NO: 1257957 - RNA, 19 nt, Artificial Sequence
  Description of Artificial Sequence: Synthetic oligonucleotide
gacacgccgacggauauuc

SEQ ID NO: 1257958 - RNA, 19 nt, Artificial Sequence
  Description of Artificial Sequence: Synthetic oligonucleotide
gcuuccuaccacaauagug

SEQ ID NO: 1257959 - RNA, 19 nt, Artificial Sequence
  Description of Artificial Sequence: Synthetic oligonucleotide
cuuggcgguuccuuugcac

SEQ ID NO: 1257960 - RNA, 19 nt, Artificial Sequence
  Description of Artificial Sequence: Synthetic oligonucleotide
auaagcugauucauuuggu

SEQ ID NO: 1257961 - RNA, 19 nt, Artificial Sequence
  Description of Artificial Sequence: Synthetic oligonucleotide
guugagcaaucaauccucc

SEQ ID NO: 1257962 - RNA, 19 nt, Artificial Sequence
  Description of Artificial Sequence: Synthetic oligonucleotide
ucuaggcaggguagcauuu

SEQ ID NO: 1257963 - RNA, 19 nt, Artificial Sequence
  Description of Artificial Sequence: Synthetic oligonucleotide
cuagacauuucuuccugaa

SEQ ID NO: 1257964 - RNA, 19 nt, Artificial Sequence
  Description of Artificial Sequence: Synthetic oligonucleotide
cagcgcugaacucugcaac

SEQ ID NO: 1257965 - RNA, 19 nt, Artificial Sequence
  Description of Artificial Sequence: Synthetic oligonucleotide
cauuggagcuuguggccag

SEQ ID NO: 1257966 - RNA, 19 nt, Artificial Sequence
  Description of Artificial Sequence: Synthetic oligonucleotide
ucuacccuggagccacugu

SEQ ID NO: 1257967 - RNA, 19 nt, Artificial Sequence
  Description of Artificial Sequence: Synthetic oligonucleotide
agagagagagagagagauc

SEQ ID NO: 1257968 - RNA, 19 nt, Artificial Sequence
  Description of Artificial Sequence: Synthetic oligonucleotide
gaggggcaaaauaaacuuc

SEQ ID NO: 1257969 - RNA, 19 nt, Artificial Sequence
  Description of Artificial Sequence: Synthetic oligonucleotide
gucgugacaaauacuccac

SEQ ID NO: 1257970 - RNA, 19 nt, Artificial Sequence
  Description of Artificial Sequence: Synthetic oligonucleotide
augugggcuuccuaccaca

SEQ ID NO: 1257971 - RNA, 19 nt, Artificial Sequence
  Description of Artificial Sequence: Synthetic oligonucleotide
cugaggcgugccaaucacc

SEQ ID NO: 1257972 - RNA, 19 nt, Artificial Sequence
  Description of Artificial Sequence: Synthetic oligonucleotide
ugagacccauuggagcuug

SEQ ID NO: 1257973 - RNA, 19 nt, Artificial Sequence
  Description of Artificial Sequence: Synthetic oligonucleotide
uacccaugcguuugagcac

SEQ ID NO: 1257974 - RNA, 19 nt, Artificial Sequence
  Description of Artificial Sequence: Synthetic oligonucleotide
gguugagcaaucaauccuc

SEQ ID NO: 1257975 - RNA, 19 nt, Artificial Sequence
  Description of Artificial Sequence: Synthetic oligonucleotide
acgccgacggauauucuuc

SEQ ID NO: 1257976 - RNA, 19 nt, Artificial Sequence
  Description of Artificial Sequence: Synthetic oligonucleotide
acuuaaagagagagagaga

SEQ ID NO: 1257977 - RNA, 19 nt, Artificial Sequence
  Description of Artificial Sequence: Synthetic oligonucleotide
cuuacuggaggugcagauc

SEQ ID NO: 1257978 - RNA, 19 nt, Artificial Sequence
  Description of Artificial Sequence: Synthetic oligonucleotide
uagacacgccgacggauau

SEQ ID NO: 1257979 - RNA, 19 nt, Artificial Sequence
  Description of Artificial Sequence: Synthetic oligonucleotide
ccgacggauauucuucugg

SEQ ID NO: 1257980 - RNA, 19 nt, Artificial Sequence
  Description of Artificial Sequence: Synthetic oligonucleotide
cacauacgguucuagagcu

SEQ ID NO: 1257981 - RNA, 19 nt, Artificial Sequence
  Description of Artificial Sequence: Synthetic oligonucleotide
uccuaccacaauaguguuu

SEQ ID NO: 1257982 - RNA, 19 nt, Artificial Sequence
  Description of Artificial Sequence: Synthetic oligonucleotide
gguagcauuuuauuauugu

SEQ ID NO: 1257983 - RNA, 19 nt, Artificial Sequence
  Description of Artificial Sequence: Synthetic oligonucleotide
uaggcaggguagcauuuua

SEQ ID NO: 1257984 - RNA, 19 nt, Artificial Sequence
  Description of Artificial Sequence: Synthetic oligonucleotide
gugugauauugacauugga

SEQ ID NO: 1257985 - RNA, 19 nt, Artificial Sequence
  Description of Artificial Sequence: Synthetic oligonucleotide
cuguaacugcguacccgcc

SEQ ID NO: 1257986 - RNA, 19 nt, Artificial Sequence
  Description of Artificial Sequence: Synthetic oligonucleotide
ccauguuaccagauccagg

SEQ ID NO: 1257987 - RNA, 19 nt, Artificial Sequence
  Description of Artificial Sequence: Synthetic oligonucleotide
caggguagcauuuuauuau

SEQ ID NO: 1257988 - RNA, 19 nt, Artificial Sequence
  Description of Artificial Sequence: Synthetic oligonucleotide
ccgacauaggaaacagggg

SEQ ID NO: 1257989 - RNA, 19 nt, Artificial Sequence
  Description of Artificial Sequence: Synthetic oligonucleotide
gagauccuuacuggaggug

SEQ ID NO: 1257990 - RNA, 19 nt, Artificial Sequence
  Description of Artificial Sequence: Synthetic oligonucleotide
aggggucuacagguugagc

SEQ ID NO: 1257991 - RNA, 19 nt, Artificial Sequence
  Description of Artificial Sequence: Synthetic oligonucleotide
uuccuaccacaauaguguu

SEQ ID NO: 1257992 - RNA, 19 nt, Artificial Sequence
  Description of Artificial Sequence: Synthetic oligonucleotide
aagccuugugccguuggau

SEQ ID NO: 1257993 - RNA, 19 nt, Artificial Sequence
  Description of Artificial Sequence: Synthetic oligonucleotide
gcagaucuaacuccacaac

SEQ ID NO: 1257994 - RNA, 19 nt, Artificial Sequence
  Description of Artificial Sequence: Synthetic oligonucleotide
aaccuguugucgugacaaa

SEQ ID NO: 1257995 - RNA, 19 nt, Artificial Sequence
  Description of Artificial Sequence: Synthetic oligonucleotide
cauggguaucuucuuggga

SEQ ID NO: 1257996 - RNA, 19 nt, Artificial Sequence
  Description of Artificial Sequence: Synthetic oligonucleotide
cauuugguaggauaugguu

SEQ ID NO: 1257997 - RNA, 19 nt, Artificial Sequence
  Description of Artificial Sequence: Synthetic oligonucleotide
acuaagauucuggucuaua

SEQ ID NO: 1257998 - RNA, 19 nt, Artificial Sequence
  Description of Artificial Sequence: Synthetic oligonucleotide
gccauuucugucacauacg

SEQ ID NO: 1257999 - RNA, 19 nt, Artificial Sequence
  Description of Artificial Sequence: Synthetic oligonucleotide
cugcuuggcgguuccuuug

SEQ ID NO: 1258000 - RNA, 19 nt, Artificial Sequence
  Description of Artificial Sequence: Synthetic oligonucleotide
uccacaacucauggguauc

SEQ ID NO: 1258001 - RNA, 19 nt, Artificial Sequence
  Description of Artificial Sequence: Synthetic oligonucleotide
uucccaggacuaagauucu

SEQ ID NO: 1258002 - RNA, 19 nt, Artificial Sequence
  Description of Artificial Sequence: Synthetic oligonucleotide
gagucagacggcugguucu

SEQ ID NO: 1258003 - RNA, 19 nt, Artificial Sequence
  Description of Artificial Sequence: Synthetic oligonucleotide
ugucuaggcaggguagcau

SEQ ID NO: 1258004 - RNA, 19 nt, Artificial Sequence
  Description of Artificial Sequence: Synthetic oligonucleotide
aggugaggagucagacggc

SEQ ID NO: 1258005 - RNA, 19 nt, Artificial Sequence
  Description of Artificial Sequence: Synthetic oligonucleotide
uuccccgauuccaggccgc

SEQ ID NO: 1258006 - RNA, 19 nt, Artificial Sequence
  Description of Artificial Sequence: Synthetic oligonucleotide
aggugcagaucuaacucca

SEQ ID NO: 1258007 - RNA, 19 nt, Artificial Sequence
  Description of Artificial Sequence: Synthetic oligonucleotide
cuugugccguuggauguag

SEQ ID NO: 1258008 - RNA, 19 nt, Artificial Sequence
  Description of Artificial Sequence: Synthetic oligonucleotide
ggaugucuaggcaggguag

SEQ ID NO: 1258009 - RNA, 19 nt, Artificial Sequence
  Description of Artificial Sequence: Synthetic oligonucleotide
ugcguacccgccacagaaa

SEQ ID NO: 1258010 - RNA, 19 nt, Artificial Sequence
  Description of Artificial Sequence: Synthetic oligonucleotide
guagaaccuguugucguga

SEQ ID NO: 1258011 - RNA, 19 nt, Artificial Sequence
  Description of Artificial Sequence: Synthetic oligonucleotide
cccacuuuaaaaguuucuc

SEQ ID NO: 1258012 - RNA, 19 nt, Artificial Sequence
  Description of Artificial Sequence: Synthetic oligonucleotide
cccaucugcaccauugcuc

SEQ ID NO: 1258013 - RNA, 19 nt, Artificial Sequence
  Description of Artificial Sequence: Synthetic oligonucleotide
agucagacggcugguucug

SEQ ID NO: 1258014 - RNA, 19 nt, Artificial Sequence
  Description of Artificial Sequence: Synthetic oligonucleotide
auccuuacuggaggugcag

SEQ ID NO: 1258015 - RNA, 19 nt, Artificial Sequence
  Description of Artificial Sequence: Synthetic oligonucleotide
uggcuucaauuagacuggc

SEQ ID NO: 1258016 - RNA, 19 nt, Artificial Sequence
  Description of Artificial Sequence: Synthetic oligonucleotide
uaacugcguacccgccaca

SEQ ID NO: 1258017 - RNA, 19 nt, Artificial Sequence
  Description of Artificial Sequence: Synthetic oligonucleotide
agagagagagagauccuua

SEQ ID NO: 1258018 - RNA, 19 nt, Artificial Sequence
  Description of Artificial Sequence: Synthetic oligonucleotide
ucuggucuauaaagaccuu

SEQ ID NO: 1258019 - RNA, 19 nt, Artificial Sequence
  Description of Artificial Sequence: Synthetic oligonucleotide
aacaacuguugaggggcaa

SEQ ID NO: 1258020 - RNA, 19 nt, Artificial Sequence
  Description of Artificial Sequence: Synthetic oligonucleotide
gggcaaaauaaacuucaaa

SEQ ID NO: 1258021 - RNA, 19 nt, Artificial Sequence
  Description of Artificial Sequence: Synthetic oligonucleotide
cccauuggagcuuguggcc

SEQ ID NO: 1258022 - RNA, 19 nt, Artificial Sequence
  Description of Artificial Sequence: Synthetic oligonucleotide
cuuuaguucuccguuggcu

SEQ ID NO: 1258023 - RNA, 19 nt, Artificial Sequence
  Description of Artificial Sequence: Synthetic oligonucleotide
gcaggguagcauuuuauua

SEQ ID NO: 1258024 - RNA, 19 nt, Artificial Sequence
  Description of Artificial Sequence: Synthetic oligonucleotide
ggagucagacggcugguuc

SEQ ID NO: 1258025 - RNA, 19 nt, Artificial Sequence
  Description of Artificial Sequence: Synthetic oligonucleotide
aucuaacuccacaacucau

SEQ ID NO: 1258026 - RNA, 19 nt, Artificial Sequence
  Description of Artificial Sequence: Synthetic oligonucleotide
ucaauuagacuggcaucuu

SEQ ID NO: 1258027 - RNA, 19 nt, Artificial Sequence
  Description of Artificial Sequence: Synthetic oligonucleotide
gugccguuggauguagaac

SEQ ID NO: 1258028 - RNA, 19 nt, Artificial Sequence
  Description of Artificial Sequence: Synthetic oligonucleotide
ccaccaauggaucccugag

SEQ ID NO: 1258029 - RNA, 19 nt, Artificial Sequence
  Description of Artificial Sequence: Synthetic oligonucleotide
cucuaaguucuggcacucc

SEQ ID NO: 1258030 - RNA, 19 nt, Artificial Sequence
  Description of Artificial Sequence: Synthetic oligonucleotide
agagagagagagagagaga

SEQ ID NO: 1258031 - RNA, 19 nt, Artificial Sequence
  Description of Artificial Sequence: Synthetic oligonucleotide
agacccauuggagcuugug

SEQ ID NO: 1258032 - RNA, 19 nt, Artificial Sequence
  Description of Artificial Sequence: Synthetic oligonucleotide
agaggggucuacagguuga

SEQ ID NO: 1258033 - RNA, 19 nt, Artificial Sequence
  Description of Artificial Sequence: Synthetic oligonucleotide
ucucugaggcgugccaauc

SEQ ID NO: 1258034 - RNA, 19 nt, Artificial Sequence
  Description of Artificial Sequence: Synthetic oligonucleotide
cccgauuccaggccgcacg

SEQ ID NO: 1258035 - RNA, 19 nt, Artificial Sequence
  Description of Artificial Sequence: Synthetic oligonucleotide
aggucucugaggcgugcca

SEQ ID NO: 1258036 - RNA, 19 nt, Artificial Sequence
  Description of Artificial Sequence: Synthetic oligonucleotide
ccuuaagaucuucagcaga

SEQ ID NO: 1258037 - RNA, 19 nt, Artificial Sequence
  Description of Artificial Sequence: Synthetic oligonucleotide
aagugaguguugggaguau

SEQ ID NO: 1258038 - RNA, 19 nt, Artificial Sequence
  Description of Artificial Sequence: Synthetic oligonucleotide
agagagagagagagauccu

SEQ ID NO: 1258039 - RNA, 19 nt, Artificial Sequence
  Description of Artificial Sequence: Synthetic oligonucleotide
accuuucccaggacuaaga

SEQ ID NO: 1258040 - RNA, 19 nt, Artificial Sequence
  Description of Artificial Sequence: Synthetic oligonucleotide
ucugucacauacgguucua

SEQ ID NO: 1258041 - RNA, 19 nt, Artificial Sequence
  Description of Artificial Sequence: Synthetic oligonucleotide
uugugccguuggauguaga

SEQ ID NO: 1258042 - RNA, 19 nt, Artificial Sequence
  Description of Artificial Sequence: Synthetic oligonucleotide
auagacacgccgacggaua

SEQ ID NO: 1258043 - RNA, 19 nt, Artificial Sequence
  Description of Artificial Sequence: Synthetic oligonucleotide
gcaccauugcucaaaucac

SEQ ID NO: 1258044 - RNA, 19 nt, Artificial Sequence
  Description of Artificial Sequence: Synthetic oligonucleotide
gaaaugccggaggcccuug

SEQ ID NO: 1258045 - RNA, 19 nt, Artificial Sequence
  Description of Artificial Sequence: Synthetic oligonucleotide
gcugauucauuugguagga

SEQ ID NO: 1258046 - RNA, 19 nt, Artificial Sequence
  Description of Artificial Sequence: Synthetic oligonucleotide
caccauugcucaaaucacu

SEQ ID NO: 1258047 - RNA, 19 nt, Artificial Sequence
  Description of Artificial Sequence: Synthetic oligonucleotide
gcaaucaauccuccucauc

SEQ ID NO: 1258048 - RNA, 19 nt, Artificial Sequence
  Description of Artificial Sequence: Synthetic oligonucleotide
caacaacuguugaggggca

SEQ ID NO: 1258049 - RNA, 19 nt, Artificial Sequence
  Description of Artificial Sequence: Synthetic oligonucleotide
ugcagucaaugacggucuu

SEQ ID NO: 1258050 - RNA, 19 nt, Artificial Sequence
  Description of Artificial Sequence: Synthetic oligonucleotide
aauggaucccugagccauu

SEQ ID NO: 1258051 - RNA, 19 nt, Artificial Sequence
  Description of Artificial Sequence: Synthetic oligonucleotide
cugcagucaaugacggucu

SEQ ID NO: 1258052 - RNA, 19 nt, Artificial Sequence
  Description of Artificial Sequence: Synthetic oligonucleotide
cauuucugucacauacggu

SEQ ID NO: 1258053 - RNA, 19 nt, Artificial Sequence
  Description of Artificial Sequence: Synthetic oligonucleotide
gagagagagagagauccuu

SEQ ID NO: 1258054 - RNA, 19 nt, Artificial Sequence
  Description of Artificial Sequence: Synthetic oligonucleotide
gucuacagguugagcaauc

SEQ ID NO: 1258055 - RNA, 19 nt, Artificial Sequence
  Description of Artificial Sequence: Synthetic oligonucleotide
caauggaucccugagccau

SEQ ID NO: 1258056 - RNA, 19 nt, Artificial Sequence
  Description of Artificial Sequence: Synthetic oligonucleotide
cagacggcugguucuggga

SEQ ID NO: 1258057 - RNA, 19 nt, Artificial Sequence
  Description of Artificial Sequence: Synthetic oligonucleotide
gggucuacagguugagcaa

SEQ ID NO: 1258058 - RNA, 19 nt, Artificial Sequence
  Description of Artificial Sequence: Synthetic oligonucleotide
ccuuuaguucuccguuggc

SEQ ID NO: 1258059 - RNA, 19 nt, Artificial Sequence
  Description of Artificial Sequence: Synthetic oligonucleotide
cuuuccaaguguguucacu

SEQ ID NO: 1258060 - RNA, 19 nt, Artificial Sequence
  Description of Artificial Sequence: Synthetic oligonucleotide
gacggucuuccugcuggug

SEQ ID NO: 1258061 - RNA, 19 nt, Artificial Sequence
  Description of Artificial Sequence: Synthetic oligonucleotide
ccgcacgccauacccaugc

SEQ ID NO: 1258062 - RNA, 19 nt, Artificial Sequence
  Description of Artificial Sequence: Synthetic oligonucleotide
cuuucccaggacuaagauu

SEQ ID NO: 1258063 - RNA, 19 nt, Artificial Sequence
  Description of Artificial Sequence: Synthetic oligonucleotide
accaaacuucuggccaccu

SEQ ID NO: 1258064 - RNA, 19 nt, Artificial Sequence
  Description of Artificial Sequence: Synthetic oligonucleotide
gcgucauagacacgccgac

SEQ ID NO: 1258065 - RNA, 19 nt, Artificial Sequence
  Description of Artificial Sequence: Synthetic oligonucleotide
ggcgucauagacacgccga

SEQ ID NO: 1258066 - RNA, 19 nt, Artificial Sequence
  Description of Artificial Sequence: Synthetic oligonucleotide
acgccauacccaugcguuu

SEQ ID NO: 1258067 - RNA, 19 nt, Artificial Sequence
  Description of Artificial Sequence: Synthetic oligonucleotide
cacgccauacccaugcguu

SEQ ID NO: 1258068 - RNA, 19 nt, Artificial Sequence
  Description of Artificial Sequence: Synthetic oligonucleotide
gaguuggugggcaggccaa

SEQ ID NO: 1258069 - RNA, 19 nt, Artificial Sequence
  Description of Artificial Sequence: Synthetic oligonucleotide
cgacauaggaaacaggggu

SEQ ID NO: 1258070 - RNA, 19 nt, Artificial Sequence
  Description of Artificial Sequence: Synthetic oligonucleotide
uccaggccgcacgccauac

SEQ ID NO: 1258071 - RNA, 19 nt, Artificial Sequence
  Description of Artificial Sequence: Synthetic oligonucleotide
cuccccgacauaggaaaca

SEQ ID NO: 1258072 - RNA, 19 nt, Artificial Sequence
  Description of Artificial Sequence: Synthetic oligonucleotide
gucuaggcaggguagcauu

SEQ ID NO: 1258073 - RNA, 19 nt, Artificial Sequence
  Description of Artificial Sequence: Synthetic oligonucleotide
caauaucaucauggaucuc

SEQ ID NO: 1258074 - RNA, 19 nt, Artificial Sequence
  Description of Artificial Sequence: Synthetic oligonucleotide
cuccacaacucauggguau

SEQ ID NO: 1258075 - RNA, 19 nt, Artificial Sequence
  Description of Artificial Sequence: Synthetic oligonucleotide
ggacuaagauucuggucua

SEQ ID NO: 1258076 - RNA, 19 nt, Artificial Sequence
  Description of Artificial Sequence: Synthetic oligonucleotide
cuguucugcuuggcgguuc

SEQ ID NO: 1258077 - RNA, 19 nt, Artificial Sequence
  Description of Artificial Sequence: Synthetic oligonucleotide
ccccgacauaggaaacagg

SEQ ID NO: 1258078 - RNA, 19 nt, Artificial Sequence
  Description of Artificial Sequence: Synthetic oligonucleotide
cucuacccuggagccacug

SEQ ID NO: 1258079 - RNA, 19 nt, Artificial Sequence
  Description of Artificial Sequence: Synthetic oligonucleotide
cauagacacgccgacggau

SEQ ID NO: 1258080 - RNA, 19 nt, Artificial Sequence
  Description of Artificial Sequence: Synthetic oligonucleotide
cacuguggauggguggaca

SEQ ID NO: 1258081 - RNA, 19 nt, Artificial Sequence
  Description of Artificial Sequence: Synthetic oligonucleotide
gcguacccgccacagaaaa

SEQ ID NO: 1258082 - RNA, 19 nt, Artificial Sequence
  Description of Artificial Sequence: Synthetic oligonucleotide
cguuugagcaccucaauau

SEQ ID NO: 1258083 - RNA, 19 nt, Artificial Sequence
  Description of Artificial Sequence: Synthetic oligonucleotide
ggugcagaucuaacuccac

SEQ ID NO: 1258084 - RNA, 19 nt, Artificial Sequence
  Description of Artificial Sequence: Synthetic oligonucleotide
ggguaucuucuugggagca

SEQ ID NO: 1258085 - RNA, 19 nt, Artificial Sequence
  Description of Artificial Sequence: Synthetic oligonucleotide
gagaaaugccggaggcccu

SEQ ID NO: 1258086 - RNA, 19 nt, Artificial Sequence
  Description of Artificial Sequence: Synthetic oligonucleotide
gccgacggauauucuucug

SEQ ID NO: 1258087 - RNA, 19 nt, Artificial Sequence
  Description of Artificial Sequence: Synthetic oligonucleotide
cgucauagacacgccgacg

SEQ ID NO: 1258088 - RNA, 19 nt, Artificial Sequence
  Description of Artificial Sequence: Synthetic oligonucleotide
cuggucuauaaagaccuuu

SEQ ID NO: 1258089 - RNA, 19 nt, Artificial Sequence
  Description of Artificial Sequence: Synthetic oligonucleotide
gcagaaagccuugugccgu

SEQ ID NO: 1258090 - RNA, 19 nt, Artificial Sequence
  Description of Artificial Sequence: Synthetic oligonucleotide
gcgguuccuuugcaccaag

SEQ ID NO: 1258091 - RNA, 19 nt, Artificial Sequence
  Description of Artificial Sequence: Synthetic oligonucleotide
aggagucagacggcugguu

SEQ ID NO: 1258092 - RNA, 19 nt, Artificial Sequence
  Description of Artificial Sequence: Synthetic oligonucleotide
acauacgguucuagagcuu

SEQ ID NO: 1258093 - RNA, 19 nt, Artificial Sequence
  Description of Artificial Sequence: Synthetic oligonucleotide
gcagucaaugacggucuuc

SEQ ID NO: 1258094 - RNA, 19 nt, Artificial Sequence
  Description of Artificial Sequence: Synthetic oligonucleotide
cugagccauuucugucaca

SEQ ID NO: 1258095 - RNA, 19 nt, Artificial Sequence
  Description of Artificial Sequence: Synthetic oligonucleotide
guuggauguagaaccuguu

SEQ ID NO: 1258096 - RNA, 19 nt, Artificial Sequence
  Description of Artificial Sequence: Synthetic oligonucleotide
gacuaagauucuggucuau

SEQ ID NO: 1258097 - RNA, 19 nt, Artificial Sequence
  Description of Artificial Sequence: Synthetic oligonucleotide
ccaggacuaagauucuggu

SEQ ID NO: 1258098 - RNA, 19 nt, Artificial Sequence
  Description of Artificial Sequence: Synthetic oligonucleotide
cacgccgacggauauucuu

SEQ ID NO: 1258099 - RNA, 19 nt, Artificial Sequence
  Description of Artificial Sequence: Synthetic oligonucleotide
cgcugaacucugcaaccag

SEQ ID NO: 1258100 - RNA, 19 nt, Artificial Sequence
  Description of Artificial Sequence: Synthetic oligonucleotide
ggggcaaaauaaacuucaa

SEQ ID NO: 1258101 - RNA, 19 nt, Artificial Sequence
  Description of Artificial Sequence: Synthetic oligonucleotide
ccuccccgacauaggaaac

SEQ ID NO: 1258102 - RNA, 19 nt, Artificial Sequence
  Description of Artificial Sequence: Synthetic oligonucleotide
ggcuucaauuagacuggca

SEQ ID NO: 1258103 - RNA, 19 nt, Artificial Sequence
  Description of Artificial Sequence: Synthetic oligonucleotide
caaugacggucuuccugcu

SEQ ID NO: 1258104 - RNA, 19 nt, Artificial Sequence
  Description of Artificial Sequence: Synthetic oligonucleotide
agacacgccgacggauauu

SEQ ID NO: 1258105 - RNA, 19 nt, Artificial Sequence
  Description of Artificial Sequence: Synthetic oligonucleotide
gucucugaggcgugccaau

SEQ ID NO: 1258106 - RNA, 19 nt, Artificial Sequence
  Description of Artificial Sequence: Synthetic oligonucleotide
aguucuccguuggcuucaa

SEQ ID NO: 1258107 - RNA, 19 nt, Artificial Sequence
  Description of Artificial Sequence: Synthetic oligonucleotide
ggauauucuucuggucaua

SEQ ID NO: 1258108 - RNA, 19 nt, Artificial Sequence
  Description of Artificial Sequence: Synthetic oligonucleotide
cuagagcuuuugguaccaa

SEQ ID NO: 1258109 - RNA, 19 nt, Artificial Sequence
  Description of Artificial Sequence: Synthetic oligonucleotide
agcaucccaucugcaccau

SEQ ID NO: 1258110 - RNA, 19 nt, Artificial Sequence
  Description of Artificial Sequence: Synthetic oligonucleotide
ggucauaagcugauucauu

SEQ ID NO: 1258111 - RNA, 19 nt, Artificial Sequence
  Description of Artificial Sequence: Synthetic oligonucleotide
ggcaaguggaugacagagu

SEQ ID NO: 1258112 - RNA, 19 nt, Artificial Sequence
  Description of Artificial Sequence: Synthetic oligonucleotide
cgccauacccaugcguuug

SEQ ID NO: 1258113 - RNA, 19 nt, Artificial Sequence
  Description of Artificial Sequence: Synthetic oligonucleotide
cuggaugucuaggcagggu

SEQ ID NO: 1258114 - RNA, 19 nt, Artificial Sequence
  Description of Artificial Sequence: Synthetic oligonucleotide
ccuuacuggaggugcagau

SEQ ID NO: 1258115 - RNA, 19 nt, Artificial Sequence
  Description of Artificial Sequence: Synthetic oligonucleotide
acacgccgacggauauucu

SEQ ID NO: 1258116 - RNA, 19 nt, Artificial Sequence
  Description of Artificial Sequence: Synthetic oligonucleotide
caaucaccacuugcugugu

SEQ ID NO: 1258117 - RNA, 19 nt, Artificial Sequence
  Description of Artificial Sequence: Synthetic oligonucleotide
cgguucuagagcuuuuggu

SEQ ID NO: 1258118 - RNA, 19 nt, Artificial Sequence
  Description of Artificial Sequence: Synthetic oligonucleotide
gcgugccaaucaccacuug

SEQ ID NO: 1258119 - RNA, 19 nt, Artificial Sequence
  Description of Artificial Sequence: Synthetic oligonucleotide
ccucauuguaggagguggu

SEQ ID NO: 1258120 - RNA, 19 nt, Artificial Sequence
  Description of Artificial Sequence: Synthetic oligonucleotide
cuaggcaggguagcauuuu

SEQ ID NO: 1258121 - RNA, 19 nt, Artificial Sequence
  Description of Artificial Sequence: Synthetic oligonucleotide
cgacggauauucuucuggu

SEQ ID NO: 1258122 - RNA, 19 nt, Artificial Sequence
  Description of Artificial Sequence: Synthetic oligonucleotide
gggaguaugugggcuuccu

SEQ ID NO: 1258123 - RNA, 19 nt, Artificial Sequence
  Description of Artificial Sequence: Synthetic oligonucleotide
ccaaguucuugaaggcaau

SEQ ID NO: 1258124 - RNA, 19 nt, Artificial Sequence
  Description of Artificial Sequence: Synthetic oligonucleotide
ggccgcacgccauacccau

SEQ ID NO: 1258125 - RNA, 19 nt, Artificial Sequence
  Description of Artificial Sequence: Synthetic oligonucleotide
cgcacgccauacccaugcg

SEQ ID NO: 1258126 - RNA, 19 nt, Artificial Sequence
  Description of Artificial Sequence: Synthetic oligonucleotide
ggcgguuccuuugcaccaa

SEQ ID NO: 1258127 - RNA, 19 nt, Artificial Sequence
  Description of Artificial Sequence: Synthetic oligonucleotide
gccugcgugccugcuguuc

SEQ ID NO: 1258128 - RNA, 19 nt, Artificial Sequence
  Description of Artificial Sequence: Synthetic oligonucleotide
cacaacucauggguaucuu

SEQ ID NO: 1258129 - RNA, 19 nt, Artificial Sequence
  Description of Artificial Sequence: Synthetic oligonucleotide
ccacaacucauggguaucu

SEQ ID NO: 1258130 - RNA, 19 nt, Artificial Sequence
  Description of Artificial Sequence: Synthetic oligonucleotide
gagacccauuggagcuugu

SEQ ID NO: 1258131 - RNA, 19 nt, Artificial Sequence
  Description of Artificial Sequence: Synthetic oligonucleotide
guucuccguuggcuucaau

SEQ ID NO: 1258132 - RNA, 19 nt, Artificial Sequence
  Description of Artificial Sequence: Synthetic oligonucleotide
ccaugcguuugagcaccuc

SEQ ID NO: 1258133 - RNA, 19 nt, Artificial Sequence
  Description of Artificial Sequence: Synthetic oligonucleotide
gccgcacgccauacccaug

SEQ ID NO: 1258134 - RNA, 19 nt, Artificial Sequence
  Description of Artificial Sequence: Synthetic oligonucleotide
ggcgugccaaucaccacuu

SEQ ID NO: 1258135 - RNA, 19 nt, Artificial Sequence
  Description of Artificial Sequence: Synthetic oligonucleotide
gcagaacaguuccccgauu

SEQ ID NO: 1258136 - RNA, 19 nt, Artificial Sequence
  Description of Artificial Sequence: Synthetic oligonucleotide
ccuugugccguuggaugua

SEQ ID NO: 1258137 - RNA, 19 nt, Artificial Sequence
  Description of Artificial Sequence: Synthetic oligonucleotide
cgccgacggauauucuucu

SEQ ID NO: 1258138 - RNA, 19 nt, Artificial Sequence
  Description of Artificial Sequence: Synthetic oligonucleotide
gcuguucugcuuggcgguu

SEQ ID NO: 1258139 - RNA, 19 nt, Artificial Sequence
  Description of Artificial Sequence: Synthetic oligonucleotide
cccaugcguuugagcaccu

SEQ ID NO: 1258140 - RNA, 19 nt, Artificial Sequence
  Description of Artificial Sequence: Synthetic oligonucleotide
aauaacaugacuguaaaac

SEQ ID NO: 1258141 - RNA, 19 nt, Artificial Sequence
  Description of Artificial Sequence: Synthetic oligonucleotide
aauccauauaaacuaaggc

SEQ ID NO: 1258142 - RNA, 19 nt, Artificial Sequence
  Description of Artificial Sequence: Synthetic oligonucleotide
aacuauaauggaaagaagc

SEQ ID NO: 1258143 - RNA, 19 nt, Artificial Sequence
  Description of Artificial Sequence: Synthetic oligonucleotide
aaaucuauuacacacuuca

SEQ ID NO: 1258144 - RNA, 19 nt, Artificial Sequence
  Description of Artificial Sequence: Synthetic oligonucleotide
gaauaagccaauuauaggc

SEQ ID NO: 1258145 - RNA, 19 nt, Artificial Sequence
  Description of Artificial Sequence: Synthetic oligonucleotide
aagucuuauaaacaaguac

SEQ ID NO: 1258146 - RNA, 19 nt, Artificial Sequence
  Description of Artificial Sequence: Synthetic oligonucleotide
gaaucguucucucaaaucg

SEQ ID NO: 1258147 - RNA, 19 nt, Artificial Sequence
  Description of Artificial Sequence: Synthetic oligonucleotide
aguuugaagucuuauaaac

SEQ ID NO: 1258148 - RNA, 19 nt, Artificial Sequence
  Description of Artificial Sequence: Synthetic oligonucleotide
aaaaucauuccccugaggu

SEQ ID NO: 1258149 - RNA, 19 nt, Artificial Sequence
  Description of Artificial Sequence: Synthetic oligonucleotide
uuugauggaacuuaaugcc

SEQ ID NO: 1258150 - RNA, 19 nt, Artificial Sequence
  Description of Artificial Sequence: Synthetic oligonucleotide
uuuaucaaagagcaaagac

SEQ ID NO: 1258151 - RNA, 19 nt, Artificial Sequence
  Description of Artificial Sequence: Synthetic oligonucleotide
aaggcuaacugauuuacuc

SEQ ID NO: 1258152 - RNA, 19 nt, Artificial Sequence
  Description of Artificial Sequence: Synthetic oligonucleotide
ggugucuuaacuuuaaugg

SEQ ID NO: 1258153 - RNA, 19 nt, Artificial Sequence
  Description of Artificial Sequence: Synthetic oligonucleotide
ugcuguauauucaaaauca

SEQ ID NO: 1258154 - RNA, 19 nt, Artificial Sequence
  Description of Artificial Sequence: Synthetic oligonucleotide
uaaacuauaauggaaagaa

SEQ ID NO: 1258155 - RNA, 19 nt, Artificial Sequence
  Description of Artificial Sequence: Synthetic oligonucleotide
gaagccaauauuuaugccc

SEQ ID NO: 1258156 - RNA, 19 nt, Artificial Sequence
  Description of Artificial Sequence: Synthetic oligonucleotide
uugaaguauaaaauaagca

SEQ ID NO: 1258157 - RNA, 19 nt, Artificial Sequence
  Description of Artificial Sequence: Synthetic oligonucleotide
uauaaacuaaggcucagug

SEQ ID NO: 1258158 - RNA, 19 nt, Artificial Sequence
  Description of Artificial Sequence: Synthetic oligonucleotide
uaaucaugaaacauuugag

SEQ ID NO: 1258159 - RNA, 19 nt, Artificial Sequence
  Description of Artificial Sequence: Synthetic oligonucleotide
uuuggaauaagccaauuau

SEQ ID NO: 1258160 - RNA, 19 nt, Artificial Sequence
  Description of Artificial Sequence: Synthetic oligonucleotide
uccauauaaacuaaggcuc

SEQ ID NO: 1258161 - RNA, 19 nt, Artificial Sequence
  Description of Artificial Sequence: Synthetic oligonucleotide
acgacuaguagcuucauuc

SEQ ID NO: 1258162 - RNA, 19 nt, Artificial Sequence
  Description of Artificial Sequence: Synthetic oligonucleotide
acuauaauggaaagaagcc

SEQ ID NO: 1258163 - RNA, 19 nt, Artificial Sequence
  Description of Artificial Sequence: Synthetic oligonucleotide
uucacuacauauuugggug

SEQ ID NO: 1258164 - RNA, 19 nt, Artificial Sequence
  Description of Artificial Sequence: Synthetic oligonucleotide
auccauauaaacuaaggcu

SEQ ID NO: 1258165 - RNA, 19 nt, Artificial Sequence
  Description of Artificial Sequence: Synthetic oligonucleotide
aauauguggccauuugaag

SEQ ID NO: 1258166 - RNA, 19 nt, Artificial Sequence
  Description of Artificial Sequence: Synthetic oligonucleotide
ugaagucuuauaaacaagu

SEQ ID NO: 1258167 - RNA, 19 nt, Artificial Sequence
  Description of Artificial Sequence: Synthetic oligonucleotide
ucuauuucuaguaaauuau

SEQ ID NO: 1258168 - RNA, 19 nt, Artificial Sequence
  Description of Artificial Sequence: Synthetic oligonucleotide
uguaaaacuacuaguuuga

SEQ ID NO: 1258169 - RNA, 19 nt, Artificial Sequence
  Description of Artificial Sequence: Synthetic oligonucleotide
uauaauggaaagaagccaa

SEQ ID NO: 1258170 - RNA, 19 nt, Artificial Sequence
  Description of Artificial Sequence: Synthetic oligonucleotide
aaauccauauaaacuaagg

SEQ ID NO: 1258171 - RNA, 19 nt, Artificial Sequence
  Description of Artificial Sequence: Synthetic oligonucleotide
gaauauagcucaguggugg

SEQ ID NO: 1258172 - RNA, 19 nt, Artificial Sequence
  Description of Artificial Sequence: Synthetic oligonucleotide
uaagaagauaacuccuugg

SEQ ID NO: 1258173 - RNA, 19 nt, Artificial Sequence
  Description of Artificial Sequence: Synthetic oligonucleotide
uccugcagaauuuuggagg

SEQ ID NO: 1258174 - RNA, 19 nt, Artificial Sequence
  Description of Artificial Sequence: Synthetic oligonucleotide
aaacaaaggugucuuaacu

SEQ ID NO: 1258175 - RNA, 19 nt, Artificial Sequence
  Description of Artificial Sequence: Synthetic oligonucleotide
aaucucaaagguuugcaga

SEQ ID NO: 1258176 - RNA, 19 nt, Artificial Sequence
  Description of Artificial Sequence: Synthetic oligonucleotide
auaaacuaaggcucagugg

SEQ ID NO: 1258177 - RNA, 19 nt, Artificial Sequence
  Description of Artificial Sequence: Synthetic oligonucleotide
aagccaauauuuaugcccc

SEQ ID NO: 1258178 - RNA, 19 nt, Artificial Sequence
  Description of Artificial Sequence: Synthetic oligonucleotide
uauccaacuggcuacaucu

SEQ ID NO: 1258179 - RNA, 19 nt, Artificial Sequence
  Description of Artificial Sequence: Synthetic oligonucleotide
guuuugauggaacuuaaug

SEQ ID NO: 1258180 - RNA, 19 nt, Artificial Sequence
  Description of Artificial Sequence: Synthetic oligonucleotide
aacaugacuguaaaacuac

SEQ ID NO: 1258181 - RNA, 19 nt, Artificial Sequence
  Description of Artificial Sequence: Synthetic oligonucleotide
guuaaaaggauuccacuag

SEQ ID NO: 1258182 - RNA, 19 nt, Artificial Sequence
  Description of Artificial Sequence: Synthetic oligonucleotide
ucgaacugaacccaguuca

SEQ ID NO: 1258183 - RNA, 19 nt, Artificial Sequence
  Description of Artificial Sequence: Synthetic oligonucleotide
uauaccaccuaacacaaau

SEQ ID NO: 1258184 - RNA, 19 nt, Artificial Sequence
  Description of Artificial Sequence: Synthetic oligonucleotide
auuuacucuucucccaggc

SEQ ID NO: 1258185 - RNA, 19 nt, Artificial Sequence
  Description of Artificial Sequence: Synthetic oligonucleotide
uuaaacuaacaauaaacua

SEQ ID NO: 1258186 - RNA, 19 nt, Artificial Sequence
  Description of Artificial Sequence: Synthetic oligonucleotide
aguaacaaggcccucauau

SEQ ID NO: 1258187 - RNA, 19 nt, Artificial Sequence
  Description of Artificial Sequence: Synthetic oligonucleotide
aaucguucgcuucuauuuc

SEQ ID NO: 1258188 - RNA, 19 nt, Artificial Sequence
  Description of Artificial Sequence: Synthetic oligonucleotide
uaacaaggcccucauaugc

SEQ ID NO: 1258189 - RNA, 19 nt, Artificial Sequence
  Description of Artificial Sequence: Synthetic oligonucleotide
uugagugucauucgaacug

SEQ ID NO: 1258190 - RNA, 19 nt, Artificial Sequence
  Description of Artificial Sequence: Synthetic oligonucleotide
gacucauuuccucaauucg

SEQ ID NO: 1258191 - RNA, 19 nt, Artificial Sequence
  Description of Artificial Sequence: Synthetic oligonucleotide
ugucauucgaacugaaccc

SEQ ID NO: 1258192 - RNA, 19 nt, Artificial Sequence
  Description of Artificial Sequence: Synthetic oligonucleotide
acccauuagaugaaaaugc

SEQ ID NO: 1258193 - RNA, 19 nt, Artificial Sequence
  Description of Artificial Sequence: Synthetic oligonucleotide
aagugauucuuccuccagg

SEQ ID NO: 1258194 - RNA, 19 nt, Artificial Sequence
  Description of Artificial Sequence: Synthetic oligonucleotide
aaaucguucgcuucuauuu

SEQ ID NO: 1258195 - RNA, 19 nt, Artificial Sequence
  Description of Artificial Sequence: Synthetic oligonucleotide
aaugcacuauccaacuggc

SEQ ID NO: 1258196 - RNA, 19 nt, Artificial Sequence
  Description of Artificial Sequence: Synthetic oligonucleotide
aaccaaagcauaugcuuuc

SEQ ID NO: 1258197 - RNA, 19 nt, Artificial Sequence
  Description of Artificial Sequence: Synthetic oligonucleotide
cuguaaaacuacuaguuug

SEQ ID NO: 1258198 - RNA, 19 nt, Artificial Sequence
  Description of Artificial Sequence: Synthetic oligonucleotide
agcaaagacaacauauacc

SEQ ID NO: 1258199 - RNA, 19 nt, Artificial Sequence
  Description of Artificial Sequence: Synthetic oligonucleotide
uaaguaauuugauaguuua

SEQ ID NO: 1258200 - RNA, 19 nt, Artificial Sequence
  Description of Artificial Sequence: Synthetic oligonucleotide
auaagccaauuauaggcac

SEQ ID NO: 1258201 - RNA, 19 nt, Artificial Sequence
  Description of Artificial Sequence: Synthetic oligonucleotide
aaaucauuccccugaggug

SEQ ID NO: 1258202 - RNA, 19 nt, Artificial Sequence
  Description of Artificial Sequence: Synthetic oligonucleotide
ugauucuuccuccagggga

SEQ ID NO: 1258203 - RNA, 19 nt, Artificial Sequence
  Description of Artificial Sequence: Synthetic oligonucleotide
gaagauaacuccuuggcaa

SEQ ID NO: 1258204 - RNA, 19 nt, Artificial Sequence
  Description of Artificial Sequence: Synthetic oligonucleotide
caaugcacuauccaacugg

SEQ ID NO: 1258205 - RNA, 19 nt, Artificial Sequence
  Description of Artificial Sequence: Synthetic oligonucleotide
uuugaggggaaaauuauuu

SEQ ID NO: 1258206 - RNA, 19 nt, Artificial Sequence
  Description of Artificial Sequence: Synthetic oligonucleotide
acuuuaauggcuaccaauc

SEQ ID NO: 1258207 - RNA, 19 nt, Artificial Sequence
  Description of Artificial Sequence: Synthetic oligonucleotide
uuugauaguuuaaaucuau

SEQ ID NO: 1258208 - RNA, 19 nt, Artificial Sequence
  Description of Artificial Sequence: Synthetic oligonucleotide
ugauuuacucuucucccag

SEQ ID NO: 1258209 - RNA, 19 nt, Artificial Sequence
  Description of Artificial Sequence: Synthetic oligonucleotide
agugcauaacuguacauca

SEQ ID NO: 1258210 - RNA, 19 nt, Artificial Sequence
  Description of Artificial Sequence: Synthetic oligonucleotide
gauggguuaaccuuuuaca

SEQ ID NO: 1258211 - RNA, 19 nt, Artificial Sequence
  Description of Artificial Sequence: Synthetic oligonucleotide
uugaagucuuauaaacaag

SEQ ID NO: 1258212 - RNA, 19 nt, Artificial Sequence
  Description of Artificial Sequence: Synthetic oligonucleotide
aagauguuuugauggaacu

SEQ ID NO: 1258213 - RNA, 19 nt, Artificial Sequence
  Description of Artificial Sequence: Synthetic oligonucleotide
uuauuuugguuaaacuaac

SEQ ID NO: 1258214 - RNA, 19 nt, Artificial Sequence
  Description of Artificial Sequence: Synthetic oligonucleotide
ucuaguaaauuauucuuau

SEQ ID NO: 1258215 - RNA, 19 nt, Artificial Sequence
  Description of Artificial Sequence: Synthetic oligonucleotide
cauaacuguacaucagugc

SEQ ID NO: 1258216 - RNA, 19 nt, Artificial Sequence
  Description of Artificial Sequence: Synthetic oligonucleotide
uuaaaaggauuccacuagu

SEQ ID NO: 1258217 - RNA, 19 nt, Artificial Sequence
  Description of Artificial Sequence: Synthetic oligonucleotide
uaccaccuaacacaaauga

SEQ ID NO: 1258218 - RNA, 19 nt, Artificial Sequence
  Description of Artificial Sequence: Synthetic oligonucleotide
uucaggacaagacucauuu

SEQ ID NO: 1258219 - RNA, 19 nt, Artificial Sequence
  Description of Artificial Sequence: Synthetic oligonucleotide
uucuagguuaaaaggauuc

SEQ ID NO: 1258220 - RNA, 19 nt, Artificial Sequence
  Description of Artificial Sequence: Synthetic oligonucleotide
agacucauuuccucaauuc

SEQ ID NO: 1258221 - RNA, 19 nt, Artificial Sequence
  Description of Artificial Sequence: Synthetic oligonucleotide
uggcuuacauugcucaagg

SEQ ID NO: 1258222 - RNA, 19 nt, Artificial Sequence
  Description of Artificial Sequence: Synthetic oligonucleotide
auacaagagguuccugagc

SEQ ID NO: 1258223 - RNA, 19 nt, Artificial Sequence
  Description of Artificial Sequence: Synthetic oligonucleotide
uucaaauaaguaauuugau

SEQ ID NO: 1258224 - RNA, 19 nt, Artificial Sequence
  Description of Artificial Sequence: Synthetic oligonucleotide
aacaaaggugucuuaacuu

SEQ ID NO: 1258225 - RNA, 19 nt, Artificial Sequence
  Description of Artificial Sequence: Synthetic oligonucleotide
uuagucagccaguaaauaa

SEQ ID NO: 1258226 - RNA, 19 nt, Artificial Sequence
  Description of Artificial Sequence: Synthetic oligonucleotide
uguagugacuggaacaaaa

SEQ ID NO: 1258227 - RNA, 19 nt, Artificial Sequence
  Description of Artificial Sequence: Synthetic oligonucleotide
caccuaagaagauaacucc

SEQ ID NO: 1258228 - RNA, 19 nt, Artificial Sequence
  Description of Artificial Sequence: Synthetic oligonucleotide
uauuuaugccccaucauuu

SEQ ID NO: 1258229 - RNA, 19 nt, Artificial Sequence
  Description of Artificial Sequence: Synthetic oligonucleotide
uuuaugccccaucauuucc

SEQ ID NO: 1258230 - RNA, 19 nt, Artificial Sequence
  Description of Artificial Sequence: Synthetic oligonucleotide
uagguuaaaaggauuccac

SEQ ID NO: 1258231 - RNA, 19 nt, Artificial Sequence
  Description of Artificial Sequence: Synthetic oligonucleotide
ucaaaaucauuccccugag

SEQ ID NO: 1258232 - RNA, 19 nt, Artificial Sequence
  Description of Artificial Sequence: Synthetic oligonucleotide
uaacaugacuguaaaacua

SEQ ID NO: 1258233 - RNA, 19 nt, Artificial Sequence
  Description of Artificial Sequence: Synthetic oligonucleotide
auuuaugccccaucauuuc

SEQ ID NO: 1258234 - RNA, 19 nt, Artificial Sequence
  Description of Artificial Sequence: Synthetic oligonucleotide
uggcuguaaauccauauaa

SEQ ID NO: 1258235 - RNA, 19 nt, Artificial Sequence
  Description of Artificial Sequence: Synthetic oligonucleotide
cuaacacaaaugacaaccc

SEQ ID NO: 1258236 - RNA, 19 nt, Artificial Sequence
  Description of Artificial Sequence: Synthetic oligonucleotide
aacaaggcccucauaugcc

SEQ ID NO: 1258237 - RNA, 19 nt, Artificial Sequence
  Description of Artificial Sequence: Synthetic oligonucleotide
accuuuuacaacuuuuagu

SEQ ID NO: 1258238 - RNA, 19 nt, Artificial Sequence
  Description of Artificial Sequence: Synthetic oligonucleotide
ucauucaaugcacuaucca

SEQ ID NO: 1258239 - RNA, 19 nt, Artificial Sequence
  Description of Artificial Sequence: Synthetic oligonucleotide
uucauucaaugcacuaucc

SEQ ID NO: 1258240 - RNA, 19 nt, Artificial Sequence
  Description of Artificial Sequence: Synthetic oligonucleotide
aauguagugacuggaacaa

SEQ ID NO: 1258241 - RNA, 19 nt, Artificial Sequence
  Description of Artificial Sequence: Synthetic oligonucleotide
ucuuccacucuucaauggc

SEQ ID NO: 1258242 - RNA, 19 nt, Artificial Sequence
  Description of Artificial Sequence: Synthetic oligonucleotide
caaagaaucgcuccguuuc

SEQ ID NO: 1258243 - RNA, 19 nt, Artificial Sequence
  Description of Artificial Sequence: Synthetic oligonucleotide
auaagcaaaguguaagaau

SEQ ID NO: 1258244 - RNA, 19 nt, Artificial Sequence
  Description of Artificial Sequence: Synthetic oligonucleotide
aagguuugcagagcugcgc

SEQ ID NO: 1258245 - RNA, 19 nt, Artificial Sequence
  Description of Artificial Sequence: Synthetic oligonucleotide
guaaagugauucuuccucc

SEQ ID NO: 1258246 - RNA, 19 nt, Artificial Sequence
  Description of Artificial Sequence: Synthetic oligonucleotide
uuaaccuuuuacaacuuuu

SEQ ID NO: 1258247 - RNA, 19 nt, Artificial Sequence
  Description of Artificial Sequence: Synthetic oligonucleotide
auuuggaaaagcaccuggc

SEQ ID NO: 1258248 - RNA, 19 nt, Artificial Sequence
  Description of Artificial Sequence: Synthetic oligonucleotide
ugcacuauccaacuggcua

SEQ ID NO: 1258249 - RNA, 19 nt, Artificial Sequence
  Description of Artificial Sequence: Synthetic oligonucleotide
aggugucuuaacuuuaaug

SEQ ID NO: 1258250 - RNA, 19 nt, Artificial Sequence
  Description of Artificial Sequence: Synthetic oligonucleotide
auuaaggaaauuaauuuaa

SEQ ID NO: 1258251 - RNA, 19 nt, Artificial Sequence
  Description of Artificial Sequence: Synthetic oligonucleotide
uuuuagucagccaguaaau

SEQ ID NO: 1258252 - RNA, 19 nt, Artificial Sequence
  Description of Artificial Sequence: Synthetic oligonucleotide
ccuaacacaaaugacaacc

SEQ ID NO: 1258253 - RNA, 19 nt, Artificial Sequence
  Description of Artificial Sequence: Synthetic oligonucleotide
ggaauaagccaauuauagg

SEQ ID NO: 1258254 - RNA, 19 nt, Artificial Sequence
  Description of Artificial Sequence: Synthetic oligonucleotide
cuaguuugaagucuuauaa

SEQ ID NO: 1258255 - RNA, 19 nt, Artificial Sequence
  Description of Artificial Sequence: Synthetic oligonucleotide
uuggaauaagccaauuaua

SEQ ID NO: 1258256 - RNA, 19 nt, Artificial Sequence
  Description of Artificial Sequence: Synthetic oligonucleotide
aaacuauaauggaaagaag

SEQ ID NO: 1258257 - RNA, 19 nt, Artificial Sequence
  Description of Artificial Sequence: Synthetic oligonucleotide
uugauggaacuuaaugccu

SEQ ID NO: 1258258 - RNA, 19 nt, Artificial Sequence
  Description of Artificial Sequence: Synthetic oligonucleotide
ugcuuucugagaagcacag

SEQ ID NO: 1258259 - RNA, 19 nt, Artificial Sequence
  Description of Artificial Sequence: Synthetic oligonucleotide
ucuugagugucauucgaac

SEQ ID NO: 1258260 - RNA, 19 nt, Artificial Sequence
  Description of Artificial Sequence: Synthetic oligonucleotide
uagucagccaguaaauaaa

SEQ ID NO: 1258261 - RNA, 19 nt, Artificial Sequence
  Description of Artificial Sequence: Synthetic oligonucleotide
agaaucgcuccguuucagc

SEQ ID NO: 1258262 - RNA, 19 nt, Artificial Sequence
  Description of Artificial Sequence: Synthetic oligonucleotide
uaggcaccuaagaagauaa

SEQ ID NO: 1258263 - RNA, 19 nt, Artificial Sequence
  Description of Artificial Sequence: Synthetic oligonucleotide
aagacaacauauaccaccu

SEQ ID NO: 1258264 - RNA, 19 nt, Artificial Sequence
  Description of Artificial Sequence: Synthetic oligonucleotide
augacaacccaauguagug

SEQ ID NO: 1258265 - RNA, 19 nt, Artificial Sequence
  Description of Artificial Sequence: Synthetic oligonucleotide
agaagauaacuccuuggca

SEQ ID NO: 1258266 - RNA, 19 nt, Artificial Sequence
  Description of Artificial Sequence: Synthetic oligonucleotide
cauaugcuuucugagaagc

SEQ ID NO: 1258267 - RNA, 19 nt, Artificial Sequence
  Description of Artificial Sequence: Synthetic oligonucleotide
acauuugauggguuaaccu

SEQ ID NO: 1258268 - RNA, 19 nt, Artificial Sequence
  Description of Artificial Sequence: Synthetic oligonucleotide
aaagaaucgcuccguuuca

SEQ ID NO: 1258269 - RNA, 19 nt, Artificial Sequence
  Description of Artificial Sequence: Synthetic oligonucleotide
cuuuuagucagccaguaaa

SEQ ID NO: 1258270 - RNA, 19 nt, Artificial Sequence
  Description of Artificial Sequence: Synthetic oligonucleotide
acaacauauaccaccuaac

SEQ ID NO: 1258271 - RNA, 19 nt, Artificial Sequence
  Description of Artificial Sequence: Synthetic oligonucleotide
uucaaguguucgcacacga

SEQ ID NO: 1258272 - RNA, 19 nt, Artificial Sequence
  Description of Artificial Sequence: Synthetic oligonucleotide
cuaagaagauaacuccuug

SEQ ID NO: 1258273 - RNA, 19 nt, Artificial Sequence
  Description of Artificial Sequence: Synthetic oligonucleotide
uucgcacacgacuaguagc

SEQ ID NO: 1258274 - RNA, 19 nt, Artificial Sequence
  Description of Artificial Sequence: Synthetic oligonucleotide
agcaaaguguaagaauaac

SEQ ID NO: 1258275 - RNA, 19 nt, Artificial Sequence
  Description of Artificial Sequence: Synthetic oligonucleotide
ucuagguuaaaaggauucc

SEQ ID NO: 1258276 - RNA, 19 nt, Artificial Sequence
  Description of Artificial Sequence: Synthetic oligonucleotide
uucgcuucuauuucuagua

SEQ ID NO: 1258277 - RNA, 19 nt, Artificial Sequence
  Description of Artificial Sequence: Synthetic oligonucleotide
gggaaaauuauuuugguua

SEQ ID NO: 1258278 - RNA, 19 nt, Artificial Sequence
  Description of Artificial Sequence: Synthetic oligonucleotide
uggaggucuaaucaugaaa

SEQ ID NO: 1258279 - RNA, 19 nt, Artificial Sequence
  Description of Artificial Sequence: Synthetic oligonucleotide
ugaggugcugcugacagug

SEQ ID NO: 1258280 - RNA, 19 nt, Artificial Sequence
  Description of Artificial Sequence: Synthetic oligonucleotide
uggguuaaccuuuuacaac

SEQ ID NO: 1258281 - RNA, 19 nt, Artificial Sequence
  Description of Artificial Sequence: Synthetic oligonucleotide
cuuaacuuuaauggcuacc

SEQ ID NO: 1258282 - RNA, 19 nt, Artificial Sequence
  Description of Artificial Sequence: Synthetic oligonucleotide
cuuacauugcucaaggcua

SEQ ID NO: 1258283 - RNA, 19 nt, Artificial Sequence
  Description of Artificial Sequence: Synthetic oligonucleotide
acaauaaacuauaauggaa

SEQ ID NO: 1258284 - RNA, 19 nt, Artificial Sequence
  Description of Artificial Sequence: Synthetic oligonucleotide
agguuaaaaggauuccacu

SEQ ID NO: 1258285 - RNA, 19 nt, Artificial Sequence
  Description of Artificial Sequence: Synthetic oligonucleotide
aaagagcaaagacaacaua

SEQ ID NO: 1258286 - RNA, 19 nt, Artificial Sequence
  Description of Artificial Sequence: Synthetic oligonucleotide
gaagauguuuugauggaac

SEQ ID NO: 1258287 - RNA, 19 nt, Artificial Sequence
  Description of Artificial Sequence: Synthetic oligonucleotide
uccaaacggucuuccaagg

SEQ ID NO: 1258288 - RNA, 19 nt, Artificial Sequence
  Description of Artificial Sequence: Synthetic oligonucleotide
cauugcucaaggcuaacug

SEQ ID NO: 1258289 - RNA, 19 nt, Artificial Sequence
  Description of Artificial Sequence: Synthetic oligonucleotide
gcuguaaauccauauaaac

SEQ ID NO: 1258290 - RNA, 19 nt, Artificial Sequence
  Description of Artificial Sequence: Synthetic oligonucleotide
uggcuaccaaucucaaagg

SEQ ID NO: 1258291 - RNA, 19 nt, Artificial Sequence
  Description of Artificial Sequence: Synthetic oligonucleotide
gacaagacucauuuccuca

SEQ ID NO: 1258292 - RNA, 19 nt, Artificial Sequence
  Description of Artificial Sequence: Synthetic oligonucleotide
ucgcacacgacuaguagcu

SEQ ID NO: 1258293 - RNA, 19 nt, Artificial Sequence
  Description of Artificial Sequence: Synthetic oligonucleotide
cuucaaaggacaagcagca

SEQ ID NO: 1258294 - RNA, 19 nt, Artificial Sequence
  Description of Artificial Sequence: Synthetic oligonucleotide
ucacuacauauuugggugc

SEQ ID NO: 1258295 - RNA, 19 nt, Artificial Sequence
  Description of Artificial Sequence: Synthetic oligonucleotide
aacccuugauuuuaucaaa

SEQ ID NO: 1258296 - RNA, 19 nt, Artificial Sequence
  Description of Artificial Sequence: Synthetic oligonucleotide
uggguugggaauauagcuc

SEQ ID NO: 1258297 - RNA, 19 nt, Artificial Sequence
  Description of Artificial Sequence: Synthetic oligonucleotide
cacagaagauguuuugaug

SEQ ID NO: 1258298 - RNA, 19 nt, Artificial Sequence
  Description of Artificial Sequence: Synthetic oligonucleotide
guaagaauaacaugacugu

SEQ ID NO: 1258299 - RNA, 19 nt, Artificial Sequence
  Description of Artificial Sequence: Synthetic oligonucleotide
aagccaauuauaggcaccu

SEQ ID NO: 1258300 - RNA, 19 nt, Artificial Sequence
  Description of Artificial Sequence: Synthetic oligonucleotide
auuucacuacauauuuggg

SEQ ID NO: 1258301 - RNA, 19 nt, Artificial Sequence
  Description of Artificial Sequence: Synthetic oligonucleotide
agcaccuggcuuuucuagg

SEQ ID NO: 1258302 - RNA, 19 nt, Artificial Sequence
  Description of Artificial Sequence: Synthetic oligonucleotide
cuacauauuugggugcagg

SEQ ID NO: 1258303 - RNA, 19 nt, Artificial Sequence
  Description of Artificial Sequence: Synthetic oligonucleotide
agccaguaaauaaauaaca

SEQ ID NO: 1258304 - RNA, 19 nt, Artificial Sequence
  Description of Artificial Sequence: Synthetic oligonucleotide
agguggaccauccuccuug

SEQ ID NO: 1258305 - RNA, 19 nt, Artificial Sequence
  Description of Artificial Sequence: Synthetic oligonucleotide
acuaguuugaagucuuaua

SEQ ID NO: 1258306 - RNA, 19 nt, Artificial Sequence
  Description of Artificial Sequence: Synthetic oligonucleotide
aucgcuccguuucagcuag

SEQ ID NO: 1258307 - RNA, 19 nt, Artificial Sequence
  Description of Artificial Sequence: Synthetic oligonucleotide
cauucaaugcacuauccaa

SEQ ID NO: 1258308 - RNA, 19 nt, Artificial Sequence
  Description of Artificial Sequence: Synthetic oligonucleotide
cuguaaauccauauaaacu

SEQ ID NO: 1258309 - RNA, 19 nt, Artificial Sequence
  Description of Artificial Sequence: Synthetic oligonucleotide
uugcucaaggcuaacugau

SEQ ID NO: 1258310 - RNA, 19 nt, Artificial Sequence
  Description of Artificial Sequence: Synthetic oligonucleotide
accuaacacaaaugacaac

SEQ ID NO: 1258311 - RNA, 19 nt, Artificial Sequence
  Description of Artificial Sequence: Synthetic oligonucleotide
cacccauuagaugaaaaug

SEQ ID NO: 1258312 - RNA, 19 nt, Artificial Sequence
  Description of Artificial Sequence: Synthetic oligonucleotide
ucaaagguuugcagagcug

SEQ ID NO: 1258313 - RNA, 19 nt, Artificial Sequence
  Description of Artificial Sequence: Synthetic oligonucleotide
aggcuaacugauuuacucu

SEQ ID NO: 1258314 - RNA, 19 nt, Artificial Sequence
  Description of Artificial Sequence: Synthetic oligonucleotide
uuacauugcucaaggcuaa

SEQ ID NO: 1258315 - RNA, 19 nt, Artificial Sequence
  Description of Artificial Sequence: Synthetic oligonucleotide
uugaaucguucucucaaau

SEQ ID NO: 1258316 - RNA, 19 nt, Artificial Sequence
  Description of Artificial Sequence: Synthetic oligonucleotide
uccaacuggcuacaucugu

SEQ ID NO: 1258317 - RNA, 19 nt, Artificial Sequence
  Description of Artificial Sequence: Synthetic oligonucleotide
cuauaauggaaagaagcca

SEQ ID NO: 1258318 - RNA, 19 nt, Artificial Sequence
  Description of Artificial Sequence: Synthetic oligonucleotide
caacauauaccaccuaaca

SEQ ID NO: 1258319 - RNA, 19 nt, Artificial Sequence
  Description of Artificial Sequence: Synthetic oligonucleotide
uaacuguacaucagugcaa

SEQ ID NO: 1258320 - RNA, 19 nt, Artificial Sequence
  Description of Artificial Sequence: Synthetic oligonucleotide
uccugagcauaacaaaaua

SEQ ID NO: 1258321 - RNA, 19 nt, Artificial Sequence
  Description of Artificial Sequence: Synthetic oligonucleotide
cuucacuccguuuggcaag

SEQ ID NO: 1258322 - RNA, 19 nt, Artificial Sequence
  Description of Artificial Sequence: Synthetic oligonucleotide
cuuaaugcugccucaaucu

SEQ ID NO: 1258323 - RNA, 19 nt, Artificial Sequence
  Description of Artificial Sequence: Synthetic oligonucleotide
aggggaaaauuauuuuggu

SEQ ID NO: 1258324 - RNA, 19 nt, Artificial Sequence
  Description of Artificial Sequence: Synthetic oligonucleotide
aggcaccucuuccaggugg

SEQ ID NO: 1258325 - RNA, 19 nt, Artificial Sequence
  Description of Artificial Sequence: Synthetic oligonucleotide
uaagaauaacaugacugua

SEQ ID NO: 1258326 - RNA, 19 nt, Artificial Sequence
  Description of Artificial Sequence: Synthetic oligonucleotide
caaaaucauuccccugagg

SEQ ID NO: 1258327 - RNA, 19 nt, Artificial Sequence
  Description of Artificial Sequence: Synthetic oligonucleotide
uccggcuuaaugcugccuc

SEQ ID NO: 1258328 - RNA, 19 nt, Artificial Sequence
  Description of Artificial Sequence: Synthetic oligonucleotide
aauggcuaccaaucucaaa

SEQ ID NO: 1258329 - RNA, 19 nt, Artificial Sequence
  Description of Artificial Sequence: Synthetic oligonucleotide
uugucucgcagacacuuuc

SEQ ID NO: 1258330 - RNA, 19 nt, Artificial Sequence
  Description of Artificial Sequence: Synthetic oligonucleotide
uugauccuuuccaaacggu

SEQ ID NO: 1258331 - RNA, 19 nt, Artificial Sequence
  Description of Artificial Sequence: Synthetic oligonucleotide
aaucguucucucaaaucgu

SEQ ID NO: 1258332 - RNA, 19 nt, Artificial Sequence
  Description of Artificial Sequence: Synthetic oligonucleotide
guucgcacacgacuaguag

SEQ ID NO: 1258333 - RNA, 19 nt, Artificial Sequence
  Description of Artificial Sequence: Synthetic oligonucleotide
ugacaacccaauguaguga

SEQ ID NO: 1258334 - RNA, 19 nt, Artificial Sequence
  Description of Artificial Sequence: Synthetic oligonucleotide
aguguucgcacacgacuag

SEQ ID NO: 1258335 - RNA, 19 nt, Artificial Sequence
  Description of Artificial Sequence: Synthetic oligonucleotide
ucaaguguucgcacacgac

SEQ ID NO: 1258336 - RNA, 19 nt, Artificial Sequence
  Description of Artificial Sequence: Synthetic oligonucleotide
agagcugcgcaagacauga

SEQ ID NO: 1258337 - RNA, 19 nt, Artificial Sequence
  Description of Artificial Sequence: Synthetic oligonucleotide
cacauuugauggguuaacc

SEQ ID NO: 1258338 - RNA, 19 nt, Artificial Sequence
  Description of Artificial Sequence: Synthetic oligonucleotide
gauuuagucuugucuguaa

SEQ ID NO: 1258339 - RNA, 19 nt, Artificial Sequence
  Description of Artificial Sequence: Synthetic oligonucleotide
acuaaggcucaguggcagg

SEQ ID NO: 1258340 - RNA, 19 nt, Artificial Sequence
  Description of Artificial Sequence: Synthetic oligonucleotide
caaagacaacauauaccac

SEQ ID NO: 1258341 - RNA, 19 nt, Artificial Sequence
  Description of Artificial Sequence: Synthetic oligonucleotide
ggcuacaucugucugcaag

SEQ ID NO: 1258342 - RNA, 19 nt, Artificial Sequence
  Description of Artificial Sequence: Synthetic oligonucleotide
uucacauuugauggguuaa

SEQ ID NO: 1258343 - RNA, 19 nt, Artificial Sequence
  Description of Artificial Sequence: Synthetic oligonucleotide
aagaaucgcuccguuucag

SEQ ID NO: 1258344 - RNA, 19 nt, Artificial Sequence
  Description of Artificial Sequence: Synthetic oligonucleotide
uccucaauucguuccugca

SEQ ID NO: 1258345 - RNA, 19 nt, Artificial Sequence
  Description of Artificial Sequence: Synthetic oligonucleotide
uguuuugauggaacuuaau

SEQ ID NO: 1258346 - RNA, 19 nt, Artificial Sequence
  Description of Artificial Sequence: Synthetic oligonucleotide
ugcauugaaucguucucuc

SEQ ID NO: 1258347 - RNA, 19 nt, Artificial Sequence
  Description of Artificial Sequence: Synthetic oligonucleotide
acaagacucauuuccucaa

SEQ ID NO: 1258348 - RNA, 19 nt, Artificial Sequence
  Description of Artificial Sequence: Synthetic oligonucleotide
cauauaaacuaaggcucag

SEQ ID NO: 1258349 - RNA, 19 nt, Artificial Sequence
  Description of Artificial Sequence: Synthetic oligonucleotide
uucagcuaggguccuaauu

SEQ ID NO: 1258350 - RNA, 19 nt, Artificial Sequence
  Description of Artificial Sequence: Synthetic oligonucleotide
aaguaauuugauaguuuaa

SEQ ID NO: 1258351 - RNA, 19 nt, Artificial Sequence
  Description of Artificial Sequence: Synthetic oligonucleotide
ggcuucaaaggacaagcag

SEQ ID NO: 1258352 - RNA, 19 nt, Artificial Sequence
  Description of Artificial Sequence: Synthetic oligonucleotide
uuuagucagccaguaaaua

SEQ ID NO: 1258353 - RNA, 19 nt, Artificial Sequence
  Description of Artificial Sequence: Synthetic oligonucleotide
uucacuccguuuggcaagg

SEQ ID NO: 1258354 - RNA, 19 nt, Artificial Sequence
  Description of Artificial Sequence: Synthetic oligonucleotide
aucguucgcuucuauuucu

SEQ ID NO: 1258355 - RNA, 19 nt, Artificial Sequence
  Description of Artificial Sequence: Synthetic oligonucleotide
gguuaaaaggauuccacua

SEQ ID NO: 1258356 - RNA, 19 nt, Artificial Sequence
  Description of Artificial Sequence: Synthetic oligonucleotide
aaucgcuccguuucagcua

SEQ ID NO: 1258357 - RNA, 19 nt, Artificial Sequence
  Description of Artificial Sequence: Synthetic oligonucleotide
uguccuuugccuccaguuu

SEQ ID NO: 1258358 - RNA, 19 nt, Artificial Sequence
  Description of Artificial Sequence: Synthetic oligonucleotide
cucucaaaucguucgcuuc

SEQ ID NO: 1258359 - RNA, 19 nt, Artificial Sequence
  Description of Artificial Sequence: Synthetic oligonucleotide
cuguacaucagugcaaaca

SEQ ID NO: 1258360 - RNA, 19 nt, Artificial Sequence
  Description of Artificial Sequence: Synthetic oligonucleotide
cagaguuguccuuugccuc

SEQ ID NO: 1258361 - RNA, 19 nt, Artificial Sequence
  Description of Artificial Sequence: Synthetic oligonucleotide
cuaaggcucaguggcaggc

SEQ ID NO: 1258362 - RNA, 19 nt, Artificial Sequence
  Description of Artificial Sequence: Synthetic oligonucleotide
cuagguuaaaaggauucca

SEQ ID NO: 1258363 - RNA, 19 nt, Artificial Sequence
  Description of Artificial Sequence: Synthetic oligonucleotide
auucgaacugaacccaguu

SEQ ID NO: 1258364 - RNA, 19 nt, Artificial Sequence
  Description of Artificial Sequence: Synthetic oligonucleotide
auaaguaauuugauaguuu

SEQ ID NO: 1258365 - RNA, 19 nt, Artificial Sequence
  Description of Artificial Sequence: Synthetic oligonucleotide
aacuuuuagucagccagua

SEQ ID NO: 1258366 - RNA, 19 nt, Artificial Sequence
  Description of Artificial Sequence: Synthetic oligonucleotide
uguucgcacacgacuagua

SEQ ID NO: 1258367 - RNA, 19 nt, Artificial Sequence
  Description of Artificial Sequence: Synthetic oligonucleotide
ccaucauuuccuuccaccc

SEQ ID NO: 1258368 - RNA, 19 nt, Artificial Sequence
  Description of Artificial Sequence: Synthetic oligonucleotide
accuaagaagauaacuccu

SEQ ID NO: 1258369 - RNA, 19 nt, Artificial Sequence
  Description of Artificial Sequence: Synthetic oligonucleotide
ucaauucguuccugcagaa

SEQ ID NO: 1258370 - RNA, 19 nt, Artificial Sequence
  Description of Artificial Sequence: Synthetic oligonucleotide
aaucuauuacacacuucaa

SEQ ID NO: 1258371 - RNA, 19 nt, Artificial Sequence
  Description of Artificial Sequence: Synthetic oligonucleotide
auauuugggugcaggcuuc

SEQ ID NO: 1258372 - RNA, 19 nt, Artificial Sequence
  Description of Artificial Sequence: Synthetic oligonucleotide
ccugcagaauuuuggaggc

SEQ ID NO: 1258373 - RNA, 19 nt, Artificial Sequence
  Description of Artificial Sequence: Synthetic oligonucleotide
cagaauuuuggaggcacug

SEQ ID NO: 1258374 - RNA, 19 nt, Artificial Sequence
  Description of Artificial Sequence: Synthetic oligonucleotide
cguucucucaaaucguucg

SEQ ID NO: 1258375 - RNA, 19 nt, Artificial Sequence
  Description of Artificial Sequence: Synthetic oligonucleotide
ucguucucucaaaucguuc

SEQ ID NO: 1258376 - RNA, 19 nt, Artificial Sequence
  Description of Artificial Sequence: Synthetic oligonucleotide
acccuugauuuuaucaaag

SEQ ID NO: 1258377 - RNA, 19 nt, Artificial Sequence
  Description of Artificial Sequence: Synthetic oligonucleotide
cugauuuacucuucuccca

SEQ ID NO: 1258378 - RNA, 19 nt, Artificial Sequence
  Description of Artificial Sequence: Synthetic oligonucleotide
ugucuguaaagugauucuu

SEQ ID NO: 1258379 - RNA, 19 nt, Artificial Sequence
  Description of Artificial Sequence: Synthetic oligonucleotide
ucgcuucuauuucuaguaa

SEQ ID NO: 1258380 - RNA, 19 nt, Artificial Sequence
  Description of Artificial Sequence: Synthetic oligonucleotide
auuugauggguuaaccuuu

SEQ ID NO: 1258381 - RNA, 19 nt, Artificial Sequence
  Description of Artificial Sequence: Synthetic oligonucleotide
guggcuuacauugcucaag

SEQ ID NO: 1258382 - RNA, 19 nt, Artificial Sequence
  Description of Artificial Sequence: Synthetic oligonucleotide
ucguuccugcagaauuuug

SEQ ID NO: 1258383 - RNA, 19 nt, Artificial Sequence
  Description of Artificial Sequence: Synthetic oligonucleotide
aaacuaaggcucaguggca

SEQ ID NO: 1258384 - RNA, 19 nt, Artificial Sequence
  Description of Artificial Sequence: Synthetic oligonucleotide
gaagucuuauaaacaagua

SEQ ID NO: 1258385 - RNA, 19 nt, Artificial Sequence
  Description of Artificial Sequence: Synthetic oligonucleotide
uacuaguuugaagucuuau

SEQ ID NO: 1258386 - RNA, 19 nt, Artificial Sequence
  Description of Artificial Sequence: Synthetic oligonucleotide
acuaguagcuucauucaau

SEQ ID NO: 1258387 - RNA, 19 nt, Artificial Sequence
  Description of Artificial Sequence: Synthetic oligonucleotide
gcaaaguguaagaauaaca

SEQ ID NO: 1258388 - RNA, 19 nt, Artificial Sequence
  Description of Artificial Sequence: Synthetic oligonucleotide
gucuuauaaacaaguacaa

SEQ ID NO: 1258389 - RNA, 19 nt, Artificial Sequence
  Description of Artificial Sequence: Synthetic oligonucleotide
gacuguaaaacuacuaguu

SEQ ID NO: 1258390 - RNA, 19 nt, Artificial Sequence
  Description of Artificial Sequence: Synthetic oligonucleotide
aggcauccggcuuaaugcu

SEQ ID NO: 1258391 - RNA, 19 nt, Artificial Sequence
  Description of Artificial Sequence: Synthetic oligonucleotide
ucaaaucguucgcuucuau

SEQ ID NO: 1258392 - RNA, 19 nt, Artificial Sequence
  Description of Artificial Sequence: Synthetic oligonucleotide
gaaucgcuccguuucagcu

SEQ ID NO: 1258393 - RNA, 19 nt, Artificial Sequence
  Description of Artificial Sequence: Synthetic oligonucleotide
ggguuaaccuuuuacaacu

SEQ ID NO: 1258394 - RNA, 19 nt, Artificial Sequence
  Description of Artificial Sequence: Synthetic oligonucleotide
aaguguucgcacacgacua

SEQ ID NO: 1258395 - RNA, 19 nt, Artificial Sequence
  Description of Artificial Sequence: Synthetic oligonucleotide
cugagugcauaacuguaca

SEQ ID NO: 1258396 - RNA, 19 nt, Artificial Sequence
  Description of Artificial Sequence: Synthetic oligonucleotide
cagaagauguuuugaugga

SEQ ID NO: 1258397 - RNA, 19 nt, Artificial Sequence
  Description of Artificial Sequence: Synthetic oligonucleotide
uuggaggucuaaucaugaa

SEQ ID NO: 1258398 - RNA, 19 nt, Artificial Sequence
  Description of Artificial Sequence: Synthetic oligonucleotide
aaacggucuuccaaggcuu

SEQ ID NO: 1258399 - RNA, 19 nt, Artificial Sequence
  Description of Artificial Sequence: Synthetic oligonucleotide
acuuuuagucagccaguaa

SEQ ID NO: 1258400 - RNA, 19 nt, Artificial Sequence
  Description of Artificial Sequence: Synthetic oligonucleotide
gcaccuaagaagauaacuc

SEQ ID NO: 1258401 - RNA, 19 nt, Artificial Sequence
  Description of Artificial Sequence: Synthetic oligonucleotide
cacacgacuaguagcuuca

SEQ ID NO: 1258402 - RNA, 19 nt, Artificial Sequence
  Description of Artificial Sequence: Synthetic oligonucleotide
gcuuaaugcugccucaauc

SEQ ID NO: 1258403 - RNA, 19 nt, Artificial Sequence
  Description of Artificial Sequence: Synthetic oligonucleotide
uccacucuucaauggcaga

SEQ ID NO: 1258404 - RNA, 19 nt, Artificial Sequence
  Description of Artificial Sequence: Synthetic oligonucleotide
acaguggcuuacauugcuc

SEQ ID NO: 1258405 - RNA, 19 nt, Artificial Sequence
  Description of Artificial Sequence: Synthetic oligonucleotide
auaccaccuaacacaaaug

SEQ ID NO: 1258406 - RNA, 19 nt, Artificial Sequence
  Description of Artificial Sequence: Synthetic oligonucleotide
caaguguucgcacacgacu

SEQ ID NO: 1258407 - RNA, 19 nt, Artificial Sequence
  Description of Artificial Sequence: Synthetic oligonucleotide
caguggcuuacauugcuca

SEQ ID NO: 1258408 - RNA, 19 nt, Artificial Sequence
  Description of Artificial Sequence: Synthetic oligonucleotide
gcacuauccaacuggcuac

SEQ ID NO: 1258409 - RNA, 19 nt, Artificial Sequence
  Description of Artificial Sequence: Synthetic oligonucleotide
gcuacaucugucugcaaga

SEQ ID NO: 1258410 - RNA, 19 nt, Artificial Sequence
  Description of Artificial Sequence: Synthetic oligonucleotide
aguggcuuacauugcucaa

SEQ ID NO: 1258411 - RNA, 19 nt, Artificial Sequence
  Description of Artificial Sequence: Synthetic oligonucleotide
acgguugauccuuuccaaa

SEQ ID NO: 1258412 - RNA, 19 nt, Artificial Sequence
  Description of Artificial Sequence: Synthetic oligonucleotide
auaacuccuuggcaagaua

SEQ ID NO: 1258413 - RNA, 19 nt, Artificial Sequence
  Description of Artificial Sequence: Synthetic oligonucleotide
cuugagugucauucgaacu

SEQ ID NO: 1258414 - RNA, 19 nt, Artificial Sequence
  Description of Artificial Sequence: Synthetic oligonucleotide
uggcaagguuucaggacaa

SEQ ID NO: 1258415 - RNA, 19 nt, Artificial Sequence
  Description of Artificial Sequence: Synthetic oligonucleotide
ccaauguagugacuggaac

SEQ ID NO: 1258416 - RNA, 19 nt, Artificial Sequence
  Description of Artificial Sequence: Synthetic oligonucleotide
caugaaacuucuugagugu

SEQ ID NO: 1258417 - RNA, 19 nt, Artificial Sequence
  Description of Artificial Sequence: Synthetic oligonucleotide
cuaacugauuuacucuucu

SEQ ID NO: 1258418 - RNA, 19 nt, Artificial Sequence
  Description of Artificial Sequence: Synthetic oligonucleotide
acuacauauuugggugcag

SEQ ID NO: 1258419 - RNA, 19 nt, Artificial Sequence
  Description of Artificial Sequence: Synthetic oligonucleotide
auaauggaaagaagccaau

SEQ ID NO: 1258420 - RNA, 19 nt, Artificial Sequence
  Description of Artificial Sequence: Synthetic oligonucleotide
aacuccuuggcaagauaaa

SEQ ID NO: 1258421 - RNA, 19 nt, Artificial Sequence
  Description of Artificial Sequence: Synthetic oligonucleotide
agauaacuccuuggcaaga

SEQ ID NO: 1258422 - RNA, 19 nt, Artificial Sequence
  Description of Artificial Sequence: Synthetic oligonucleotide
aaguaacaaggcccucaua

SEQ ID NO: 1258423 - RNA, 19 nt, Artificial Sequence
  Description of Artificial Sequence: Synthetic oligonucleotide
augccccaucauuuccuuc

SEQ ID NO: 1258424 - RNA, 19 nt, Artificial Sequence
  Description of Artificial Sequence: Synthetic oligonucleotide
ugcucaaggcuaacugauu

SEQ ID NO: 1258425 - RNA, 19 nt, Artificial Sequence
  Description of Artificial Sequence: Synthetic oligonucleotide
gaacccaguucacgguuga

SEQ ID NO: 1258426 - RNA, 19 nt, Artificial Sequence
  Description of Artificial Sequence: Synthetic oligonucleotide
uguggccauuugaaguaua

SEQ ID NO: 1258427 - RNA, 19 nt, Artificial Sequence
  Description of Artificial Sequence: Synthetic oligonucleotide
uuggcaagauaaagcuauu

SEQ ID NO: 1258428 - RNA, 19 nt, Artificial Sequence
  Description of Artificial Sequence: Synthetic oligonucleotide
uggcaagauaaagcuauuu

SEQ ID NO: 1258429 - RNA, 19 nt, Artificial Sequence
  Description of Artificial Sequence: Synthetic oligonucleotide
acccaauguagugacugga

SEQ ID NO: 1258430 - RNA, 19 nt, Artificial Sequence
  Description of Artificial Sequence: Synthetic oligonucleotide
ucguucgcuucuauuucua

SEQ ID NO: 1258431 - RNA, 19 nt, Artificial Sequence
  Description of Artificial Sequence: Synthetic oligonucleotide
agguuccugagcauaacaa

SEQ ID NO: 1258432 - RNA, 19 nt, Artificial Sequence
  Description of Artificial Sequence: Synthetic oligonucleotide
auaugcuuucugagaagca

SEQ ID NO: 1258433 - RNA, 19 nt, Artificial Sequence
  Description of Artificial Sequence: Synthetic oligonucleotide
gccaauuauaggcaccuaa

SEQ ID NO: 1258434 - RNA, 19 nt, Artificial Sequence
  Description of Artificial Sequence: Synthetic oligonucleotide
cauauuugggugcaggcuu

SEQ ID NO: 1258435 - RNA, 19 nt, Artificial Sequence
  Description of Artificial Sequence: Synthetic oligonucleotide
accuggcuuuucuagguua

SEQ ID NO: 1258436 - RNA, 19 nt, Artificial Sequence
  Description of Artificial Sequence: Synthetic oligonucleotide
uaaggcucaguggcaggca

SEQ ID NO: 1258437 - RNA, 19 nt, Artificial Sequence
  Description of Artificial Sequence: Synthetic oligonucleotide
cuguauauucaaaaucauu

SEQ ID NO: 1258438 - RNA, 19 nt, Artificial Sequence
  Description of Artificial Sequence: Synthetic oligonucleotide
ccauauaaacuaaggcuca

SEQ ID NO: 1258439 - RNA, 19 nt, Artificial Sequence
  Description of Artificial Sequence: Synthetic oligonucleotide
acaagagguuccugagcau

SEQ ID NO: 1258440 - RNA, 19 nt, Artificial Sequence
  Description of Artificial Sequence: Synthetic oligonucleotide
cguuuggcaagguuucagg

SEQ ID NO: 1258441 - RNA, 19 nt, Artificial Sequence
  Description of Artificial Sequence: Synthetic oligonucleotide
ggacaagacucauuuccuc

SEQ ID NO: 1258442 - RNA, 19 nt, Artificial Sequence
  Description of Artificial Sequence: Synthetic oligonucleotide
gucuaaucaugaaacauuu

SEQ ID NO: 1258443 - RNA, 19 nt, Artificial Sequence
  Description of Artificial Sequence: Synthetic oligonucleotide
cuggcuacaucugucugca

SEQ ID NO: 1258444 - RNA, 19 nt, Artificial Sequence
  Description of Artificial Sequence: Synthetic oligonucleotide
agccaauauuuaugcccca

SEQ ID NO: 1258445 - RNA, 19 nt, Artificial Sequence
  Description of Artificial Sequence: Synthetic oligonucleotide
gcugcgcaagacaugaaac

SEQ ID NO: 1258446 - RNA, 19 nt, Artificial Sequence
  Description of Artificial Sequence: Synthetic oligonucleotide
ggaaagaagccaauauuua

SEQ ID NO: 1258447 - RNA, 19 nt, Artificial Sequence
  Description of Artificial Sequence: Synthetic oligonucleotide
ccaauauuuaugccccauc

SEQ ID NO: 1258448 - RNA, 19 nt, Artificial Sequence
  Description of Artificial Sequence: Synthetic oligonucleotide
gguuucaggacaagacuca

SEQ ID NO: 1258449 - RNA, 19 nt, Artificial Sequence
  Description of Artificial Sequence: Synthetic oligonucleotide
auucguuccugcagaauuu

SEQ ID NO: 1258450 - RNA, 19 nt, Artificial Sequence
  Description of Artificial Sequence: Synthetic oligonucleotide
ggauuccacuagucucucg

SEQ ID NO: 1258451 - RNA, 19 nt, Artificial Sequence
  Description of Artificial Sequence: Synthetic oligonucleotide
ccaacuggcuacaucuguc

SEQ ID NO: 1258452 - RNA, 19 nt, Artificial Sequence
  Description of Artificial Sequence: Synthetic oligonucleotide
uacauugcucaaggcuaac

SEQ ID NO: 1258453 - RNA, 19 nt, Artificial Sequence
  Description of Artificial Sequence: Synthetic oligonucleotide
augucugauuucacuacau

SEQ ID NO: 1258454 - RNA, 19 nt, Artificial Sequence
  Description of Artificial Sequence: Synthetic oligonucleotide
guuucagcuaggguccuaa

SEQ ID NO: 1258455 - RNA, 19 nt, Artificial Sequence
  Description of Artificial Sequence: Synthetic oligonucleotide
ggcaagauaaagcuauuuu

SEQ ID NO: 1258456 - RNA, 19 nt, Artificial Sequence
  Description of Artificial Sequence: Synthetic oligonucleotide
cugcgcaagacaugaaacu

SEQ ID NO: 1258457 - RNA, 19 nt, Artificial Sequence
  Description of Artificial Sequence: Synthetic oligonucleotide
gaagcacagaagauguuuu

SEQ ID NO: 1258458 - RNA, 19 nt, Artificial Sequence
  Description of Artificial Sequence: Synthetic oligonucleotide
aggcaccuaagaagauaac

SEQ ID NO: 1258459 - RNA, 19 nt, Artificial Sequence
  Description of Artificial Sequence: Synthetic oligonucleotide
gauggaacuuaaugccuuu

SEQ ID NO: 1258460 - RNA, 19 nt, Artificial Sequence
  Description of Artificial Sequence: Synthetic oligonucleotide
ggcuuacauugcucaaggc

SEQ ID NO: 1258461 - RNA, 19 nt, Artificial Sequence
  Description of Artificial Sequence: Synthetic oligonucleotide
guuaaccuuuuacaacuuu

SEQ ID NO: 1258462 - RNA, 19 nt, Artificial Sequence
  Description of Artificial Sequence: Synthetic oligonucleotide
agacaacauauaccaccua

SEQ ID NO: 1258463 - RNA, 19 nt, Artificial Sequence
  Description of Artificial Sequence: Synthetic oligonucleotide
gcacacgacuaguagcuuc

SEQ ID NO: 1258464 - RNA, 19 nt, Artificial Sequence
  Description of Artificial Sequence: Synthetic oligonucleotide
aggggaaggcauccggcuu

SEQ ID NO: 1258465 - RNA, 19 nt, Artificial Sequence
  Description of Artificial Sequence: Synthetic oligonucleotide
ggcaccuaagaagauaacu

SEQ ID NO: 1258466 - RNA, 19 nt, Artificial Sequence
  Description of Artificial Sequence: Synthetic oligonucleotide
caagagguuccugagcaua

SEQ ID NO: 1258467 - RNA, 19 nt, Artificial Sequence
  Description of Artificial Sequence: Synthetic oligonucleotide
cuaguaaauuauucuuauu

SEQ ID NO: 1258468 - RNA, 19 nt, Artificial Sequence
  Description of Artificial Sequence: Synthetic oligonucleotide
agucucucgauggcuguaa

SEQ ID NO: 1258469 - RNA, 19 nt, Artificial Sequence
  Description of Artificial Sequence: Synthetic oligonucleotide
ggcuguaaauccauauaaa

SEQ ID NO: 1258470 - RNA, 19 nt, Artificial Sequence
  Description of Artificial Sequence: Synthetic oligonucleotide
guacaucagugcaaacaaa

SEQ ID NO: 1258471 - RNA, 19 nt, Artificial Sequence
  Description of Artificial Sequence: Synthetic oligonucleotide
guagugacuggaacaaaau

SEQ ID NO: 1258472 - RNA, 19 nt, Artificial Sequence
  Description of Artificial Sequence: Synthetic oligonucleotide
guucacgguugauccuuuc

SEQ ID NO: 1258473 - RNA, 19 nt, Artificial Sequence
  Description of Artificial Sequence: Synthetic oligonucleotide
ggucuaaucaugaaacauu

SEQ ID NO: 1258474 - RNA, 19 nt, Artificial Sequence
  Description of Artificial Sequence: Synthetic oligonucleotide
gaaaagcaccuggcuuuuc

SEQ ID NO: 1258475 - RNA, 19 nt, Artificial Sequence
  Description of Artificial Sequence: Synthetic oligonucleotide
cauucgaacugaacccagu

SEQ ID NO: 1258476 - RNA, 19 nt, Artificial Sequence
  Description of Artificial Sequence: Synthetic oligonucleotide
gcuaacugauuuacucuuc

SEQ ID NO: 1258477 - RNA, 19 nt, Artificial Sequence
  Description of Artificial Sequence: Synthetic oligonucleotide
caaaucguucgcuucuauu

SEQ ID NO: 1258478 - RNA, 19 nt, Artificial Sequence
  Description of Artificial Sequence: Synthetic oligonucleotide
ggaguccucuggaaguaac

SEQ ID NO: 1258479 - RNA, 19 nt, Artificial Sequence
  Description of Artificial Sequence: Synthetic oligonucleotide
cuacuaguuugaagucuua

SEQ ID NO: 1258480 - RNA, 19 nt, Artificial Sequence
  Description of Artificial Sequence: Synthetic oligonucleotide
ggggaaaauuauuuugguu

SEQ ID NO: 1258481 - RNA, 19 nt, Artificial Sequence
  Description of Artificial Sequence: Synthetic oligonucleotide
ccacuagucucucgauggc

SEQ ID NO: 1258482 - RNA, 19 nt, Artificial Sequence
  Description of Artificial Sequence: Synthetic oligonucleotide
aacccaguucacgguugau

SEQ ID NO: 1258483 - RNA, 19 nt, Artificial Sequence
  Description of Artificial Sequence: Synthetic oligonucleotide
uagucucucgauggcugua

SEQ ID NO: 1258484 - RNA, 19 nt, Artificial Sequence
  Description of Artificial Sequence: Synthetic oligonucleotide
gcgcaagacaugaaacuuc

SEQ ID NO: 1258485 - RNA, 19 nt, Artificial Sequence
  Description of Artificial Sequence: Synthetic oligonucleotide
ucgcuccguuucagcuagg

SEQ ID NO: 1258486 - RNA, 19 nt, Artificial Sequence
  Description of Artificial Sequence: Synthetic oligonucleotide
caucaaagaaucgcuccgu

SEQ ID NO: 1258487 - RNA, 19 nt, Artificial Sequence
  Description of Artificial Sequence: Synthetic oligonucleotide
acuauccaacuggcuacau

SEQ ID NO: 1258488 - RNA, 19 nt, Artificial Sequence
  Description of Artificial Sequence: Synthetic oligonucleotide
gcucaaggcuaacugauuu

SEQ ID NO: 1258489 - RNA, 19 nt, Artificial Sequence
  Description of Artificial Sequence: Synthetic oligonucleotide
cguucgcuucuauuucuag

SEQ ID NO: 1258490 - RNA, 19 nt, Artificial Sequence
  Description of Artificial Sequence: Synthetic oligonucleotide
gcccucauaugccauuaaa

SEQ ID NO: 1258491 - RNA, 19 nt, Artificial Sequence
  Description of Artificial Sequence: Synthetic oligonucleotide
auauaccaccuaacacaaa

SEQ ID NO: 1258492 - RNA, 19 nt, Artificial Sequence
  Description of Artificial Sequence: Synthetic oligonucleotide
augaaacauuugaggggaa

SEQ ID NO: 1258493 - RNA, 19 nt, Artificial Sequence
  Description of Artificial Sequence: Synthetic oligonucleotide
cgacuaguagcuucauuca

SEQ ID NO: 1258494 - RNA, 19 nt, Artificial Sequence
  Description of Artificial Sequence: Synthetic oligonucleotide
auccggcuuaaugcugccu

SEQ ID NO: 1258495 - RNA, 19 nt, Artificial Sequence
  Description of Artificial Sequence: Synthetic oligonucleotide
ggcaagguuucaggacaag

SEQ ID NO: 1258496 - RNA, 19 nt, Artificial Sequence
  Description of Artificial Sequence: Synthetic oligonucleotide
ccguuuggcaagguuucag

SEQ ID NO: 1258497 - RNA, 19 nt, Artificial Sequence
  Description of Artificial Sequence: Synthetic oligonucleotide
ggggaaggcauccggcuua

SEQ ID NO: 1258498 - RNA, 19 nt, Artificial Sequence
  Description of Artificial Sequence: Synthetic oligonucleotide
ccuaagaagauaacuccuu

SEQ ID NO: 1258499 - RNA, 19 nt, Artificial Sequence
  Description of Artificial Sequence: Synthetic oligonucleotide
cugaacccaguucacgguu

SEQ ID NO: 1258500 - RNA, 19 nt, Artificial Sequence
  Description of Artificial Sequence: Synthetic oligonucleotide
uggcuacaucugucugcaa

SEQ ID NO: 1258501 - RNA, 19 nt, Artificial Sequence
  Description of Artificial Sequence: Synthetic oligonucleotide
cacuagucucucgauggcu

SEQ ID NO: 1258502 - RNA, 19 nt, Artificial Sequence
  Description of Artificial Sequence: Synthetic oligonucleotide
acacgacuaguagcuucau

SEQ ID NO: 1258503 - RNA, 19 nt, Artificial Sequence
  Description of Artificial Sequence: Synthetic oligonucleotide
gucucgcagacacuuucuu

SEQ ID NO: 1258504 - RNA, 19 nt, Artificial Sequence
  Description of Artificial Sequence: Synthetic oligonucleotide
ucacuccguuuggcaaggu

SEQ ID NO: 1258505 - RNA, 19 nt, Artificial Sequence
  Description of Artificial Sequence: Synthetic oligonucleotide
cagcuaggguccuaauuuu

SEQ ID NO: 1258506 - RNA, 19 nt, Artificial Sequence
  Description of Artificial Sequence: Synthetic oligonucleotide
cgcaagacaugaaacuucu

SEQ ID NO: 1258507 - RNA, 19 nt, Artificial Sequence
  Description of Artificial Sequence: Synthetic oligonucleotide
guguucgcacacgacuagu

SEQ ID NO: 1258508 - RNA, 19 nt, Artificial Sequence
  Description of Artificial Sequence: Synthetic oligonucleotide
gcuugucucgcagacacuu

SEQ ID NO: 1258509 - RNA, 19 nt, Artificial Sequence
  Description of Artificial Sequence: Synthetic oligonucleotide
caguucacgguugauccuu

SEQ ID NO: 1258510 - RNA, 19 nt, Artificial Sequence
  Description of Artificial Sequence: Synthetic oligonucleotide
ccggcuuaaugcugccuca

SEQ ID NO: 1258511 - RNA, 19 nt, Artificial Sequence
  Description of Artificial Sequence: Synthetic oligonucleotide
cgcuccguuucagcuaggg

SEQ ID NO: 1258512 - RNA, 19 nt, Artificial Sequence
  Description of Artificial Sequence: Synthetic oligonucleotide
ggcuuaaugcugccucaau

SEQ ID NO: 1258513 - RNA, 19 nt, Artificial Sequence
  Description of Artificial Sequence: Synthetic oligonucleotide
caauucguuccugcagaau

SEQ ID NO: 1258514 - RNA, 19 nt, Artificial Sequence
  Description of Artificial Sequence: Synthetic oligonucleotide
cacgacuaguagcuucauu

SEQ ID NO: 1258515 - RNA, 19 nt, Artificial Sequence
  Description of Artificial Sequence: Synthetic oligonucleotide
gcuccguuucagcuagggu

SEQ ID NO: 1258516 - RNA, 19 nt, Artificial Sequence
  Description of Artificial Sequence: Synthetic oligonucleotide
gccaauauuuaugccccau

SEQ ID NO: 1258517 - RNA, 19 nt, Artificial Sequence
  Description of Artificial Sequence: Synthetic oligonucleotide
cacuccguuuggcaagguu

SEQ ID NO: 1258518 - RNA, 19 nt, Artificial Sequence
  Description of Artificial Sequence: Synthetic oligonucleotide
gguuaaccuuuuacaacuu

SEQ ID NO: 1258519 - RNA, 19 nt, Artificial Sequence
  Description of Artificial Sequence: Synthetic oligonucleotide
cgauggcuguaaauccaua

SEQ ID NO: 1258520 - RNA, 19 nt, Artificial Sequence
  Description of Artificial Sequence: Synthetic oligonucleotide
ggcuugucucgcagacacu

SEQ ID NO: 1258521 - RNA, 19 nt, Artificial Sequence
  Description of Artificial Sequence: Synthetic oligonucleotide
cggcuuaaugcugccucaa

SEQ ID NO: 1258522 - RNA, 19 nt, Artificial Sequence
  Description of Artificial Sequence: Synthetic oligonucleotide
cguuucagcuaggguccua

SEQ ID NO: 1258523 - RNA, 19 nt, Artificial Sequence
  Description of Artificial Sequence: Synthetic oligonucleotide
ccguuucagcuaggguccu

SEQ ID NO: 1258524 - RNA, 19 nt, Artificial Sequence
  Description of Artificial Sequence: Synthetic oligonucleotide
cgcacacgacuaguagcuu

SEQ ID NO: 1258525 - RNA, 19 nt, Artificial Sequence
  Description of Artificial Sequence: Synthetic oligonucleotide
aggaaauuagaucacaucc

SEQ ID NO: 1258526 - RNA, 19 nt, Artificial Sequence
  Description of Artificial Sequence: Synthetic oligonucleotide
aagucaagauuucaaagcc

SEQ ID NO: 1258527 - RNA, 19 nt, Artificial Sequence
  Description of Artificial Sequence: Synthetic oligonucleotide
aauguacucacuucucacc

SEQ ID NO: 1258528 - RNA, 19 nt, Artificial Sequence
  Description of Artificial Sequence: Synthetic oligonucleotide
aauuagaucacaucccaag

SEQ ID NO: 1258529 - RNA, 19 nt, Artificial Sequence
  Description of Artificial Sequence: Synthetic oligonucleotide
ucauaucaaaccaagacac

SEQ ID NO: 1258530 - RNA, 19 nt, Artificial Sequence
  Description of Artificial Sequence: Synthetic oligonucleotide
gaacgaaaccaucagacgg

SEQ ID NO: 1258531 - RNA, 19 nt, Artificial Sequence
  Description of Artificial Sequence: Synthetic oligonucleotide
uccaugauagauuuacugg

SEQ ID NO: 1258532 - RNA, 19 nt, Artificial Sequence
  Description of Artificial Sequence: Synthetic oligonucleotide
ugauuaggauccaugauag

SEQ ID NO: 1258533 - RNA, 19 nt, Artificial Sequence
  Description of Artificial Sequence: Synthetic oligonucleotide
aauucucaaacaccguagg

SEQ ID NO: 1258534 - RNA, 19 nt, Artificial Sequence
  Description of Artificial Sequence: Synthetic oligonucleotide
aaggacgggauuccaaacc

SEQ ID NO: 1258535 - RNA, 19 nt, Artificial Sequence
  Description of Artificial Sequence: Synthetic oligonucleotide
aaauaaaucgcaaggccgg

SEQ ID NO: 1258536 - RNA, 19 nt, Artificial Sequence
  Description of Artificial Sequence: Synthetic oligonucleotide
uuaaagacagcgaagcuuc

SEQ ID NO: 1258537 - RNA, 19 nt, Artificial Sequence
  Description of Artificial Sequence: Synthetic oligonucleotide
acuuaaagcaaaugagcac

SEQ ID NO: 1258538 - RNA, 19 nt, Artificial Sequence
  Description of Artificial Sequence: Synthetic oligonucleotide
gagcauucgauguaagugg

SEQ ID NO: 1258539 - RNA, 19 nt, Artificial Sequence
  Description of Artificial Sequence: Synthetic oligonucleotide
ucauuaaagacagcgaagc

SEQ ID NO: 1258540 - RNA, 19 nt, Artificial Sequence
  Description of Artificial Sequence: Synthetic oligonucleotide
gugaaauucgcuuuguggc

SEQ ID NO: 1258541 - RNA, 19 nt, Artificial Sequence
  Description of Artificial Sequence: Synthetic oligonucleotide
uaauucucaaacaccguag

SEQ ID NO: 1258542 - RNA, 19 nt, Artificial Sequence
  Description of Artificial Sequence: Synthetic oligonucleotide
caucagacggaauauaaag

SEQ ID NO: 1258543 - RNA, 19 nt, Artificial Sequence
  Description of Artificial Sequence: Synthetic oligonucleotide
uaaaucgcaaggccggugg

SEQ ID NO: 1258544 - RNA, 19 nt, Artificial Sequence
  Description of Artificial Sequence: Synthetic oligonucleotide
uaaacagcgcacaaaauau

SEQ ID NO: 1258545 - RNA, 19 nt, Artificial Sequence
  Description of Artificial Sequence: Synthetic oligonucleotide
uuguccuuccguaaguccg

SEQ ID NO: 1258546 - RNA, 19 nt, Artificial Sequence
  Description of Artificial Sequence: Synthetic oligonucleotide
aaucacuaucauaucaaac

SEQ ID NO: 1258547 - RNA, 19 nt, Artificial Sequence
  Description of Artificial Sequence: Synthetic oligonucleotide
cagacuuaaagcaaaugag

SEQ ID NO: 1258548 - RNA, 19 nt, Artificial Sequence
  Description of Artificial Sequence: Synthetic oligonucleotide
augaacgaaaccaucagac

SEQ ID NO: 1258549 - RNA, 19 nt, Artificial Sequence
  Description of Artificial Sequence: Synthetic oligonucleotide
gaucauaugacacaggcgu

SEQ ID NO: 1258550 - RNA, 19 nt, Artificial Sequence
  Description of Artificial Sequence: Synthetic oligonucleotide
aucuaugcgaucuuugcag

SEQ ID NO: 1258551 - RNA, 19 nt, Artificial Sequence
  Description of Artificial Sequence: Synthetic oligonucleotide
agggacguaauuuucgggg

SEQ ID NO: 1258552 - RNA, 19 nt, Artificial Sequence
  Description of Artificial Sequence: Synthetic oligonucleotide
acuacuaucuugcauuuca

SEQ ID NO: 1258553 - RNA, 19 nt, Artificial Sequence
  Description of Artificial Sequence: Synthetic oligonucleotide
uuagaucacaucccaagca

SEQ ID NO: 1258554 - RNA, 19 nt, Artificial Sequence
  Description of Artificial Sequence: Synthetic oligonucleotide
cugaucauaugacacaggc

SEQ ID NO: 1258555 - RNA, 19 nt, Artificial Sequence
  Description of Artificial Sequence: Synthetic oligonucleotide
acuaucuugcauuucacgu

SEQ ID NO: 1258556 - RNA, 19 nt, Artificial Sequence
  Description of Artificial Sequence: Synthetic oligonucleotide
ugaacgaaaccaucagacg

SEQ ID NO: 1258557 - RNA, 19 nt, Artificial Sequence
  Description of Artificial Sequence: Synthetic oligonucleotide
ugaucauaugacacaggcg

SEQ ID NO: 1258558 - RNA, 19 nt, Artificial Sequence
  Description of Artificial Sequence: Synthetic oligonucleotide
uccucuuuaaaucacuauc

SEQ ID NO: 1258559 - RNA, 19 nt, Artificial Sequence
  Description of Artificial Sequence: Synthetic oligonucleotide
acaaaauauuacauugagc

SEQ ID NO: 1258560 - RNA, 19 nt, Artificial Sequence
  Description of Artificial Sequence: Synthetic oligonucleotide
ugauuugagagcuccacca

SEQ ID NO: 1258561 - RNA, 19 nt, Artificial Sequence
  Description of Artificial Sequence: Synthetic oligonucleotide
acaaggaugaacgaaacca

SEQ ID NO: 1258562 - RNA, 19 nt, Artificial Sequence
  Description of Artificial Sequence: Synthetic oligonucleotide
ugagcauucgauguaagug

SEQ ID NO: 1258563 - RNA, 19 nt, Artificial Sequence
  Description of Artificial Sequence: Synthetic oligonucleotide
uucguuugacuccuuuucg

SEQ ID NO: 1258564 - RNA, 19 nt, Artificial Sequence
  Description of Artificial Sequence: Synthetic oligonucleotide
gauaauuucuggcuggcuc

SEQ ID NO: 1258565 - RNA, 19 nt, Artificial Sequence
  Description of Artificial Sequence: Synthetic oligonucleotide
uuaagcguagcgcagugga

SEQ ID NO: 1258566 - RNA, 19 nt, Artificial Sequence
  Description of Artificial Sequence: Synthetic oligonucleotide
uaauuuucggggaagcagu

SEQ ID NO: 1258567 - RNA, 19 nt, Artificial Sequence
  Description of Artificial Sequence: Synthetic oligonucleotide
ucuauuugaucuaugcgau

SEQ ID NO: 1258568 - RNA, 19 nt, Artificial Sequence
  Description of Artificial Sequence: Synthetic oligonucleotide
ucuaagucacacuucaaaa

SEQ ID NO: 1258569 - RNA, 19 nt, Artificial Sequence
  Description of Artificial Sequence: Synthetic oligonucleotide
ugugugucgauuucaaaac

SEQ ID NO: 1258570 - RNA, 19 nt, Artificial Sequence
  Description of Artificial Sequence: Synthetic oligonucleotide
caugccgaaccuaaggacg

SEQ ID NO: 1258571 - RNA, 19 nt, Artificial Sequence
  Description of Artificial Sequence: Synthetic oligonucleotide
ucaagauuucaaagccucg

SEQ ID NO: 1258572 - RNA, 19 nt, Artificial Sequence
  Description of Artificial Sequence: Synthetic oligonucleotide
aagauuucaaagccucgug

SEQ ID NO: 1258573 - RNA, 19 nt, Artificial Sequence
  Description of Artificial Sequence: Synthetic oligonucleotide
aaccccuuaagcguagcgc

SEQ ID NO: 1258574 - RNA, 19 nt, Artificial Sequence
  Description of Artificial Sequence: Synthetic oligonucleotide
uugugugucgauuucaaaa

SEQ ID NO: 1258575 - RNA, 19 nt, Artificial Sequence
  Description of Artificial Sequence: Synthetic oligonucleotide
uucuaagucacacuucaaa

SEQ ID NO: 1258576 - RNA, 19 nt, Artificial Sequence
  Description of Artificial Sequence: Synthetic oligonucleotide
ugaaauucgcuuuguggcc

SEQ ID NO: 1258577 - RNA, 19 nt, Artificial Sequence
  Description of Artificial Sequence: Synthetic oligonucleotide
ugaucuaugcgaucuuugc

SEQ ID NO: 1258578 - RNA, 19 nt, Artificial Sequence
  Description of Artificial Sequence: Synthetic oligonucleotide
auucgauguaaguggcugc

SEQ ID NO: 1258579 - RNA, 19 nt, Artificial Sequence
  Description of Artificial Sequence: Synthetic oligonucleotide
uuacuggauaauuucuggc

SEQ ID NO: 1258580 - RNA, 19 nt, Artificial Sequence
  Description of Artificial Sequence: Synthetic oligonucleotide
acagcgaagcuucacauga

SEQ ID NO: 1258581 - RNA, 19 nt, Artificial Sequence
  Description of Artificial Sequence: Synthetic oligonucleotide
uguaaagcugagcauucga

SEQ ID NO: 1258582 - RNA, 19 nt, Artificial Sequence
  Description of Artificial Sequence: Synthetic oligonucleotide
uagaucacaucccaagcac

SEQ ID NO: 1258583 - RNA, 19 nt, Artificial Sequence
  Description of Artificial Sequence: Synthetic oligonucleotide
cugacuguaaagcugagca

SEQ ID NO: 1258584 - RNA, 19 nt, Artificial Sequence
  Description of Artificial Sequence: Synthetic oligonucleotide
agcgcaguggaggagaggc

SEQ ID NO: 1258585 - RNA, 19 nt, Artificial Sequence
  Description of Artificial Sequence: Synthetic oligonucleotide
gaauccggguaagagaggg

SEQ ID NO: 1258586 - RNA, 19 nt, Artificial Sequence
  Description of Artificial Sequence: Synthetic oligonucleotide
auaauuucuggcuggcucu

SEQ ID NO: 1258587 - RNA, 19 nt, Artificial Sequence
  Description of Artificial Sequence: Synthetic oligonucleotide
uacaugccgaaccuaagga

SEQ ID NO: 1258588 - RNA, 19 nt, Artificial Sequence
  Description of Artificial Sequence: Synthetic oligonucleotide
uagcccauuuguuagcucc

SEQ ID NO: 1258589 - RNA, 19 nt, Artificial Sequence
  Description of Artificial Sequence: Synthetic oligonucleotide
acaugccgaaccuaaggac

SEQ ID NO: 1258590 - RNA, 19 nt, Artificial Sequence
  Description of Artificial Sequence: Synthetic oligonucleotide
uuguaaggccggcagaggc

SEQ ID NO: 1258591 - RNA, 19 nt, Artificial Sequence
  Description of Artificial Sequence: Synthetic oligonucleotide
agacggaauauaaagcaac

SEQ ID NO: 1258592 - RNA, 19 nt, Artificial Sequence
  Description of Artificial Sequence: Synthetic oligonucleotide
auuaggauccaugauagau

SEQ ID NO: 1258593 - RNA, 19 nt, Artificial Sequence
  Description of Artificial Sequence: Synthetic oligonucleotide
ucggucuacaugccgaacc

SEQ ID NO: 1258594 - RNA, 19 nt, Artificial Sequence
  Description of Artificial Sequence: Synthetic oligonucleotide
ugauguugccuuauuuucu

SEQ ID NO: 1258595 - RNA, 19 nt, Artificial Sequence
  Description of Artificial Sequence: Synthetic oligonucleotide
uucucuugaaacaggaauu

SEQ ID NO: 1258596 - RNA, 19 nt, Artificial Sequence
  Description of Artificial Sequence: Synthetic oligonucleotide
aagcguagcgcaguggagg

SEQ ID NO: 1258597 - RNA, 19 nt, Artificial Sequence
  Description of Artificial Sequence: Synthetic oligonucleotide
auuuguuccgcuuaacguu

SEQ ID NO: 1258598 - RNA, 19 nt, Artificial Sequence
  Description of Artificial Sequence: Synthetic oligonucleotide
ucacguucugauuaggauc

SEQ ID NO: 1258599 - RNA, 19 nt, Artificial Sequence
  Description of Artificial Sequence: Synthetic oligonucleotide
uagauuuacuggauaauuu

SEQ ID NO: 1258600 - RNA, 19 nt, Artificial Sequence
  Description of Artificial Sequence: Synthetic oligonucleotide
ugcuuucaaaccaucucgc

SEQ ID NO: 1258601 - RNA, 19 nt, Artificial Sequence
  Description of Artificial Sequence: Synthetic oligonucleotide
acauugucauaguaaggag

SEQ ID NO: 1258602 - RNA, 19 nt, Artificial Sequence
  Description of Artificial Sequence: Synthetic oligonucleotide
uucguuuugcucuugguuu

SEQ ID NO: 1258603 - RNA, 19 nt, Artificial Sequence
  Description of Artificial Sequence: Synthetic oligonucleotide
cuacaugccgaaccuaagg

SEQ ID NO: 1258604 - RNA, 19 nt, Artificial Sequence
  Description of Artificial Sequence: Synthetic oligonucleotide
ucagccugcguccauguga

SEQ ID NO: 1258605 - RNA, 19 nt, Artificial Sequence
  Description of Artificial Sequence: Synthetic oligonucleotide
uuuucuaaacagcgcacaa

SEQ ID NO: 1258606 - RNA, 19 nt, Artificial Sequence
  Description of Artificial Sequence: Synthetic oligonucleotide
guagggacguaauuuucgg

SEQ ID NO: 1258607 - RNA, 19 nt, Artificial Sequence
  Description of Artificial Sequence: Synthetic oligonucleotide
ucuuaacuccccuccaaca

SEQ ID NO: 1258608 - RNA, 19 nt, Artificial Sequence
  Description of Artificial Sequence: Synthetic oligonucleotide
uggucuacacaucuuguaa

SEQ ID NO: 1258609 - RNA, 19 nt, Artificial Sequence
  Description of Artificial Sequence: Synthetic oligonucleotide
aaaucgcaaggccgguggg

SEQ ID NO: 1258610 - RNA, 19 nt, Artificial Sequence
  Description of Artificial Sequence: Synthetic oligonucleotide
ucaaacaccguagggacgu

SEQ ID NO: 1258611 - RNA, 19 nt, Artificial Sequence
  Description of Artificial Sequence: Synthetic oligonucleotide
gaugaacgaaaccaucaga

SEQ ID NO: 1258612 - RNA, 19 nt, Artificial Sequence
  Description of Artificial Sequence: Synthetic oligonucleotide
ugacgcuguuuucugacug

SEQ ID NO: 1258613 - RNA, 19 nt, Artificial Sequence
  Description of Artificial Sequence: Synthetic oligonucleotide
aucuagcccauuuguuagc

SEQ ID NO: 1258614 - RNA, 19 nt, Artificial Sequence
  Description of Artificial Sequence: Synthetic oligonucleotide
cuaaacagcgcacaaaaua

SEQ ID NO: 1258615 - RNA, 19 nt, Artificial Sequence
  Description of Artificial Sequence: Synthetic oligonucleotide
auuaaagacagcgaagcuu

SEQ ID NO: 1258616 - RNA, 19 nt, Artificial Sequence
  Description of Artificial Sequence: Synthetic oligonucleotide
acggaauauaaagcaacac

SEQ ID NO: 1258617 - RNA, 19 nt, Artificial Sequence
  Description of Artificial Sequence: Synthetic oligonucleotide
ucgcccacuacuacuaucu

SEQ ID NO: 1258618 - RNA, 19 nt, Artificial Sequence
  Description of Artificial Sequence: Synthetic oligonucleotide
auguacucacuucucacca

SEQ ID NO: 1258619 - RNA, 19 nt, Artificial Sequence
  Description of Artificial Sequence: Synthetic oligonucleotide
uagggacguaauuuucggg

SEQ ID NO: 1258620 - RNA, 19 nt, Artificial Sequence
  Description of Artificial Sequence: Synthetic oligonucleotide
uaggauccaugauagauuu

SEQ ID NO: 1258621 - RNA, 19 nt, Artificial Sequence
  Description of Artificial Sequence: Synthetic oligonucleotide
cauugucauaguaaggaga

SEQ ID NO: 1258622 - RNA, 19 nt, Artificial Sequence
  Description of Artificial Sequence: Synthetic oligonucleotide
uaucaaaccaagacacuuu

SEQ ID NO: 1258623 - RNA, 19 nt, Artificial Sequence
  Description of Artificial Sequence: Synthetic oligonucleotide
uuacacacgccaagguggc

SEQ ID NO: 1258624 - RNA, 19 nt, Artificial Sequence
  Description of Artificial Sequence: Synthetic oligonucleotide
ugcgacugcugaaaguucu

SEQ ID NO: 1258625 - RNA, 19 nt, Artificial Sequence
  Description of Artificial Sequence: Synthetic oligonucleotide
agaucacaucccaagcacc

SEQ ID NO: 1258626 - RNA, 19 nt, Artificial Sequence
  Description of Artificial Sequence: Synthetic oligonucleotide
gaaauucgcuuuguggccc

SEQ ID NO: 1258627 - RNA, 19 nt, Artificial Sequence
  Description of Artificial Sequence: Synthetic oligonucleotide
agcauucgauguaaguggc

SEQ ID NO: 1258628 - RNA, 19 nt, Artificial Sequence
  Description of Artificial Sequence: Synthetic oligonucleotide
ucugacgcuguuuucugac

SEQ ID NO: 1258629 - RNA, 19 nt, Artificial Sequence
  Description of Artificial Sequence: Synthetic oligonucleotide
uucacguucugauuaggau

SEQ ID NO: 1258630 - RNA, 19 nt, Artificial Sequence
  Description of Artificial Sequence: Synthetic oligonucleotide
ugugauuugagagcuccac

SEQ ID NO: 1258631 - RNA, 19 nt, Artificial Sequence
  Description of Artificial Sequence: Synthetic oligonucleotide
gaucuaugcgaucuuugca

SEQ ID NO: 1258632 - RNA, 19 nt, Artificial Sequence
  Description of Artificial Sequence: Synthetic oligonucleotide
ucgugaaguuuuccucucg

SEQ ID NO: 1258633 - RNA, 19 nt, Artificial Sequence
  Description of Artificial Sequence: Synthetic oligonucleotide
aggaagucaagauuucaaa

SEQ ID NO: 1258634 - RNA, 19 nt, Artificial Sequence
  Description of Artificial Sequence: Synthetic oligonucleotide
aacgaaaccaucagacgga

SEQ ID NO: 1258635 - RNA, 19 nt, Artificial Sequence
  Description of Artificial Sequence: Synthetic oligonucleotide
ucauaugacacaggcgucu

SEQ ID NO: 1258636 - RNA, 19 nt, Artificial Sequence
  Description of Artificial Sequence: Synthetic oligonucleotide
uuuguuccgcuuaacguuu

SEQ ID NO: 1258637 - RNA, 19 nt, Artificial Sequence
  Description of Artificial Sequence: Synthetic oligonucleotide
cauuucacguucugauuag

SEQ ID NO: 1258638 - RNA, 19 nt, Artificial Sequence
  Description of Artificial Sequence: Synthetic oligonucleotide
ucccgcguccucauuaaag

SEQ ID NO: 1258639 - RNA, 19 nt, Artificial Sequence
  Description of Artificial Sequence: Synthetic oligonucleotide
gaaccuaaggacgggauuc

SEQ ID NO: 1258640 - RNA, 19 nt, Artificial Sequence
  Description of Artificial Sequence: Synthetic oligonucleotide
ucuaucuagcccauuuguu

SEQ ID NO: 1258641 - RNA, 19 nt, Artificial Sequence
  Description of Artificial Sequence: Synthetic oligonucleotide
acguaauuuucggggaagc

SEQ ID NO: 1258642 - RNA, 19 nt, Artificial Sequence
  Description of Artificial Sequence: Synthetic oligonucleotide
ugcagcacuggucuacaca

SEQ ID NO: 1258643 - RNA, 19 nt, Artificial Sequence
  Description of Artificial Sequence: Synthetic oligonucleotide
ccacuuguuaauaacaauc

SEQ ID NO: 1258644 - RNA, 19 nt, Artificial Sequence
  Description of Artificial Sequence: Synthetic oligonucleotide
guaauucucaaacaccgua

SEQ ID NO: 1258645 - RNA, 19 nt, Artificial Sequence
  Description of Artificial Sequence: Synthetic oligonucleotide
uggguacccuuucaggggc

SEQ ID NO: 1258646 - RNA, 19 nt, Artificial Sequence
  Description of Artificial Sequence: Synthetic oligonucleotide
auaucaaaccaagacacuu

SEQ ID NO: 1258647 - RNA, 19 nt, Artificial Sequence
  Description of Artificial Sequence: Synthetic oligonucleotide
gaagcagcgcuguuuuccc

SEQ ID NO: 1258648 - RNA, 19 nt, Artificial Sequence
  Description of Artificial Sequence: Synthetic oligonucleotide
caacucuauucuuugugug

SEQ ID NO: 1258649 - RNA, 19 nt, Artificial Sequence
  Description of Artificial Sequence: Synthetic oligonucleotide
ugaugagcuaggaggaaau

SEQ ID NO: 1258650 - RNA, 19 nt, Artificial Sequence
  Description of Artificial Sequence: Synthetic oligonucleotide
uccggguaagagagggacg

SEQ ID NO: 1258651 - RNA, 19 nt, Artificial Sequence
  Description of Artificial Sequence: Synthetic oligonucleotide
ucuaaacagcgcacaaaau

SEQ ID NO: 1258652 - RNA, 19 nt, Artificial Sequence
  Description of Artificial Sequence: Synthetic oligonucleotide
ucguuugacuccuuuucgu

SEQ ID NO: 1258653 - RNA, 19 nt, Artificial Sequence
  Description of Artificial Sequence: Synthetic oligonucleotide
acagcgcacaaaauauuac

SEQ ID NO: 1258654 - RNA, 19 nt, Artificial Sequence
  Description of Artificial Sequence: Synthetic oligonucleotide
ugcugaaaguucuggucug

SEQ ID NO: 1258655 - RNA, 19 nt, Artificial Sequence
  Description of Artificial Sequence: Synthetic oligonucleotide
accccuuaagcguagcgca

SEQ ID NO: 1258656 - RNA, 19 nt, Artificial Sequence
  Description of Artificial Sequence: Synthetic oligonucleotide
aacagcgcacaaaauauua

SEQ ID NO: 1258657 - RNA, 19 nt, Artificial Sequence
  Description of Artificial Sequence: Synthetic oligonucleotide
ccgcaaaucagacuuaaag

SEQ ID NO: 1258658 - RNA, 19 nt, Artificial Sequence
  Description of Artificial Sequence: Synthetic oligonucleotide
uccacuuguuaauaacaau

SEQ ID NO: 1258659 - RNA, 19 nt, Artificial Sequence
  Description of Artificial Sequence: Synthetic oligonucleotide
cacaaggaugaacgaaacc

SEQ ID NO: 1258660 - RNA, 19 nt, Artificial Sequence
  Description of Artificial Sequence: Synthetic oligonucleotide
aaaccuggguacccuuuca

SEQ ID NO: 1258661 - RNA, 19 nt, Artificial Sequence
  Description of Artificial Sequence: Synthetic oligonucleotide
aggacgggauuccaaaccu

SEQ ID NO: 1258662 - RNA, 19 nt, Artificial Sequence
  Description of Artificial Sequence: Synthetic oligonucleotide
uaaggacgggauuccaaac

SEQ ID NO: 1258663 - RNA, 19 nt, Artificial Sequence
  Description of Artificial Sequence: Synthetic oligonucleotide
ggaugaacgaaaccaucag

SEQ ID NO: 1258664 - RNA, 19 nt, Artificial Sequence
  Description of Artificial Sequence: Synthetic oligonucleotide
gacagcgaagcuucacaug

SEQ ID NO: 1258665 - RNA, 19 nt, Artificial Sequence
  Description of Artificial Sequence: Synthetic oligonucleotide
uccuuugcgaagacgugaa

SEQ ID NO: 1258666 - RNA, 19 nt, Artificial Sequence
  Description of Artificial Sequence: Synthetic oligonucleotide
aaucccacgggucccggau

SEQ ID NO: 1258667 - RNA, 19 nt, Artificial Sequence
  Description of Artificial Sequence: Synthetic oligonucleotide
aaagccucgugaaguuuuc

SEQ ID NO: 1258668 - RNA, 19 nt, Artificial Sequence
  Description of Artificial Sequence: Synthetic oligonucleotide
ugcacuucguuugacuccu

SEQ ID NO: 1258669 - RNA, 19 nt, Artificial Sequence
  Description of Artificial Sequence: Synthetic oligonucleotide
ucugacuguaaagcugagc

SEQ ID NO: 1258670 - RNA, 19 nt, Artificial Sequence
  Description of Artificial Sequence: Synthetic oligonucleotide
agcgaagcuucacaugaca

SEQ ID NO: 1258671 - RNA, 19 nt, Artificial Sequence
  Description of Artificial Sequence: Synthetic oligonucleotide
uauuuacgucucucuauaa

SEQ ID NO: 1258672 - RNA, 19 nt, Artificial Sequence
  Description of Artificial Sequence: Synthetic oligonucleotide
uaugcgaucuuugcagcac

SEQ ID NO: 1258673 - RNA, 19 nt, Artificial Sequence
  Description of Artificial Sequence: Synthetic oligonucleotide
gacggaauauaaagcaaca

SEQ ID NO: 1258674 - RNA, 19 nt, Artificial Sequence
  Description of Artificial Sequence: Synthetic oligonucleotide
uucgauguaaguggcugcu

SEQ ID NO: 1258675 - RNA, 19 nt, Artificial Sequence
  Description of Artificial Sequence: Synthetic oligonucleotide
aguccguugcgacugcuga

SEQ ID NO: 1258676 - RNA, 19 nt, Artificial Sequence
  Description of Artificial Sequence: Synthetic oligonucleotide
gcuaggaggaaauuagauc

SEQ ID NO: 1258677 - RNA, 19 nt, Artificial Sequence
  Description of Artificial Sequence: Synthetic oligonucleotide
aaauuagaucacaucccaa

SEQ ID NO: 1258678 - RNA, 19 nt, Artificial Sequence
  Description of Artificial Sequence: Synthetic oligonucleotide
auuucacguucugauuagg

SEQ ID NO: 1258679 - RNA, 19 nt, Artificial Sequence
  Description of Artificial Sequence: Synthetic oligonucleotide
uccguaaguccguugcgac

SEQ ID NO: 1258680 - RNA, 19 nt, Artificial Sequence
  Description of Artificial Sequence: Synthetic oligonucleotide
uuugugugucgauuucaaa

SEQ ID NO: 1258681 - RNA, 19 nt, Artificial Sequence
  Description of Artificial Sequence: Synthetic oligonucleotide
aucuguccgcaaaucagac

SEQ ID NO: 1258682 - RNA, 19 nt, Artificial Sequence
  Description of Artificial Sequence: Synthetic oligonucleotide
ucuagcccauuuguuagcu

SEQ ID NO: 1258683 - RNA, 19 nt, Artificial Sequence
  Description of Artificial Sequence: Synthetic oligonucleotide
cucuuaacuccccuccaac

SEQ ID NO: 1258684 - RNA, 19 nt, Artificial Sequence
  Description of Artificial Sequence: Synthetic oligonucleotide
aagacgugaagcagcgcug

SEQ ID NO: 1258685 - RNA, 19 nt, Artificial Sequence
  Description of Artificial Sequence: Synthetic oligonucleotide
agacagcgaagcuucacau

SEQ ID NO: 1258686 - RNA, 19 nt, Artificial Sequence
  Description of Artificial Sequence: Synthetic oligonucleotide
cagcgcacaaaauauuaca

SEQ ID NO: 1258687 - RNA, 19 nt, Artificial Sequence
  Description of Artificial Sequence: Synthetic oligonucleotide
ucuguccgcaaaucagacu

SEQ ID NO: 1258688 - RNA, 19 nt, Artificial Sequence
  Description of Artificial Sequence: Synthetic oligonucleotide
gagagggacggacauuguc

SEQ ID NO: 1258689 - RNA, 19 nt, Artificial Sequence
  Description of Artificial Sequence: Synthetic oligonucleotide
gauuugagagcuccaccaa

SEQ ID NO: 1258690 - RNA, 19 nt, Artificial Sequence
  Description of Artificial Sequence: Synthetic oligonucleotide
uguaaguggcugcuccgau

SEQ ID NO: 1258691 - RNA, 19 nt, Artificial Sequence
  Description of Artificial Sequence: Synthetic oligonucleotide
ggggaagcaguccuuugcg

SEQ ID NO: 1258692 - RNA, 19 nt, Artificial Sequence
  Description of Artificial Sequence: Synthetic oligonucleotide
cuaaggacgggauuccaaa

SEQ ID NO: 1258693 - RNA, 19 nt, Artificial Sequence
  Description of Artificial Sequence: Synthetic oligonucleotide
uucgccuuguccuuccgua

SEQ ID NO: 1258694 - RNA, 19 nt, Artificial Sequence
  Description of Artificial Sequence: Synthetic oligonucleotide
aucauaugacacaggcguc

SEQ ID NO: 1258695 - RNA, 19 nt, Artificial Sequence
  Description of Artificial Sequence: Synthetic oligonucleotide
ugugugaaauucgcuuugu

SEQ ID NO: 1258696 - RNA, 19 nt, Artificial Sequence
  Description of Artificial Sequence: Synthetic oligonucleotide
caucuguccgcaaaucaga

SEQ ID NO: 1258697 - RNA, 19 nt, Artificial Sequence
  Description of Artificial Sequence: Synthetic oligonucleotide
uuccguaaguccguugcga

SEQ ID NO: 1258698 - RNA, 19 nt, Artificial Sequence
  Description of Artificial Sequence: Synthetic oligonucleotide
aaugaugagcuaggaggaa

SEQ ID NO: 1258699 - RNA, 19 nt, Artificial Sequence
  Description of Artificial Sequence: Synthetic oligonucleotide
accguagggacguaauuuu

SEQ ID NO: 1258700 - RNA, 19 nt, Artificial Sequence
  Description of Artificial Sequence: Synthetic oligonucleotide
ugcauuucacguucugauu

SEQ ID NO: 1258701 - RNA, 19 nt, Artificial Sequence
  Description of Artificial Sequence: Synthetic oligonucleotide
cuuaagcguagcgcagugg

SEQ ID NO: 1258702 - RNA, 19 nt, Artificial Sequence
  Description of Artificial Sequence: Synthetic oligonucleotide
cuguaaagcugagcauucg

SEQ ID NO: 1258703 - RNA, 19 nt, Artificial Sequence
  Description of Artificial Sequence: Synthetic oligonucleotide
augccgaaccuaaggacgg

SEQ ID NO: 1258704 - RNA, 19 nt, Artificial Sequence
  Description of Artificial Sequence: Synthetic oligonucleotide
agcgcacaaaauauuacau

SEQ ID NO: 1258705 - RNA, 19 nt, Artificial Sequence
  Description of Artificial Sequence: Synthetic oligonucleotide
ucuucgccuuguccuuccg

SEQ ID NO: 1258706 - RNA, 19 nt, Artificial Sequence
  Description of Artificial Sequence: Synthetic oligonucleotide
gauuaggauccaugauaga

SEQ ID NO: 1258707 - RNA, 19 nt, Artificial Sequence
  Description of Artificial Sequence: Synthetic oligonucleotide
ccuuccguaaguccguugc

SEQ ID NO: 1258708 - RNA, 19 nt, Artificial Sequence
  Description of Artificial Sequence: Synthetic oligonucleotide
aaucgcaaggccgguggga

SEQ ID NO: 1258709 - RNA, 19 nt, Artificial Sequence
  Description of Artificial Sequence: Synthetic oligonucleotide
auaaaucgcaaggccggug

SEQ ID NO: 1258710 - RNA, 19 nt, Artificial Sequence
  Description of Artificial Sequence: Synthetic oligonucleotide
cguagggacguaauuuucg

SEQ ID NO: 1258711 - RNA, 19 nt, Artificial Sequence
  Description of Artificial Sequence: Synthetic oligonucleotide
augagcuaggaggaaauua

SEQ ID NO: 1258712 - RNA, 19 nt, Artificial Sequence
  Description of Artificial Sequence: Synthetic oligonucleotide
cagccugcguccaugugac

SEQ ID NO: 1258713 - RNA, 19 nt, Artificial Sequence
  Description of Artificial Sequence: Synthetic oligonucleotide
aaacagcgcacaaaauauu

SEQ ID NO: 1258714 - RNA, 19 nt, Artificial Sequence
  Description of Artificial Sequence: Synthetic oligonucleotide
agcuaggaggaaauuagau

SEQ ID NO: 1258715 - RNA, 19 nt, Artificial Sequence
  Description of Artificial Sequence: Synthetic oligonucleotide
cucucgaaucccacggguc

SEQ ID NO: 1258716 - RNA, 19 nt, Artificial Sequence
  Description of Artificial Sequence: Synthetic oligonucleotide
agcguagcgcaguggagga

SEQ ID NO: 1258717 - RNA, 19 nt, Artificial Sequence
  Description of Artificial Sequence: Synthetic oligonucleotide
caaaccuggguacccuuuc

SEQ ID NO: 1258718 - RNA, 19 nt, Artificial Sequence
  Description of Artificial Sequence: Synthetic oligonucleotide
cucgugaaguuuuccucuc

SEQ ID NO: 1258719 - RNA, 19 nt, Artificial Sequence
  Description of Artificial Sequence: Synthetic oligonucleotide
ucccggauacaauuuccau

SEQ ID NO: 1258720 - RNA, 19 nt, Artificial Sequence
  Description of Artificial Sequence: Synthetic oligonucleotide
ugcguccaugugacuuugg

SEQ ID NO: 1258721 - RNA, 19 nt, Artificial Sequence
  Description of Artificial Sequence: Synthetic oligonucleotide
gcugcuccgaucugcuugg

SEQ ID NO: 1258722 - RNA, 19 nt, Artificial Sequence
  Description of Artificial Sequence: Synthetic oligonucleotide
cagacggaauauaaagcaa

SEQ ID NO: 1258723 - RNA, 19 nt, Artificial Sequence
  Description of Artificial Sequence: Synthetic oligonucleotide
uuucccgcguccucauuaa

SEQ ID NO: 1258724 - RNA, 19 nt, Artificial Sequence
  Description of Artificial Sequence: Synthetic oligonucleotide
ucccacgggucccggauac

SEQ ID NO: 1258725 - RNA, 19 nt, Artificial Sequence
  Description of Artificial Sequence: Synthetic oligonucleotide
uccguugcgacugcugaaa

SEQ ID NO: 1258726 - RNA, 19 nt, Artificial Sequence
  Description of Artificial Sequence: Synthetic oligonucleotide
aacaccguagggacguaau

SEQ ID NO: 1258727 - RNA, 19 nt, Artificial Sequence
  Description of Artificial Sequence: Synthetic oligonucleotide
acgggucccggauacaauu

SEQ ID NO: 1258728 - RNA, 19 nt, Artificial Sequence
  Description of Artificial Sequence: Synthetic oligonucleotide
gugggaaccccuuaagcgu

SEQ ID NO: 1258729 - RNA, 19 nt, Artificial Sequence
  Description of Artificial Sequence: Synthetic oligonucleotide
ucugccugacuccgcgccu

SEQ ID NO: 1258730 - RNA, 19 nt, Artificial Sequence
  Description of Artificial Sequence: Synthetic oligonucleotide
uccgcaaaucagacuuaaa

SEQ ID NO: 1258731 - RNA, 19 nt, Artificial Sequence
  Description of Artificial Sequence: Synthetic oligonucleotide
acacacgccaagguggcga

SEQ ID NO: 1258732 - RNA, 19 nt, Artificial Sequence
  Description of Artificial Sequence: Synthetic oligonucleotide
acaucccaagcaccauuca

SEQ ID NO: 1258733 - RNA, 19 nt, Artificial Sequence
  Description of Artificial Sequence: Synthetic oligonucleotide
ugacaucuguccgcaaauc

SEQ ID NO: 1258734 - RNA, 19 nt, Artificial Sequence
  Description of Artificial Sequence: Synthetic oligonucleotide
cuguccgcaaaucagacuu

SEQ ID NO: 1258735 - RNA, 19 nt, Artificial Sequence
  Description of Artificial Sequence: Synthetic oligonucleotide
agcgcuguuuucccacacu

SEQ ID NO: 1258736 - RNA, 19 nt, Artificial Sequence
  Description of Artificial Sequence: Synthetic oligonucleotide
aaacaccguagggacguaa

SEQ ID NO: 1258737 - RNA, 19 nt, Artificial Sequence
  Description of Artificial Sequence: Synthetic oligonucleotide
cucuaucuagcccauuugu

SEQ ID NO: 1258738 - RNA, 19 nt, Artificial Sequence
  Description of Artificial Sequence: Synthetic oligonucleotide
uguccgcaaaucagacuua

SEQ ID NO: 1258739 - RNA, 19 nt, Artificial Sequence
  Description of Artificial Sequence: Synthetic oligonucleotide
guccuuugcgaagacguga

SEQ ID NO: 1258740 - RNA, 19 nt, Artificial Sequence
  Description of Artificial Sequence: Synthetic oligonucleotide
gagcuaggaggaaauuaga

SEQ ID NO: 1258741 - RNA, 19 nt, Artificial Sequence
  Description of Artificial Sequence: Synthetic oligonucleotide
uccuuccguaaguccguug

SEQ ID NO: 1258742 - RNA, 19 nt, Artificial Sequence
  Description of Artificial Sequence: Synthetic oligonucleotide
ccggguaagagagggacgg

SEQ ID NO: 1258743 - RNA, 19 nt, Artificial Sequence
  Description of Artificial Sequence: Synthetic oligonucleotide
cauaucaaaccaagacacu

SEQ ID NO: 1258744 - RNA, 19 nt, Artificial Sequence
  Description of Artificial Sequence: Synthetic oligonucleotide
accaauguacugacaucug

SEQ ID NO: 1258745 - RNA, 19 nt, Artificial Sequence
  Description of Artificial Sequence: Synthetic oligonucleotide
ugccgaaccuaaggacggg

SEQ ID NO: 1258746 - RNA, 19 nt, Artificial Sequence
  Description of Artificial Sequence: Synthetic oligonucleotide
gcgaagcuucacaugacag

SEQ ID NO: 1258747 - RNA, 19 nt, Artificial Sequence
  Description of Artificial Sequence: Synthetic oligonucleotide
ccugaucauaugacacagg

SEQ ID NO: 1258748 - RNA, 19 nt, Artificial Sequence
  Description of Artificial Sequence: Synthetic oligonucleotide
guaaguccguugcgacugc

SEQ ID NO: 1258749 - RNA, 19 nt, Artificial Sequence
  Description of Artificial Sequence: Synthetic oligonucleotide
acuccgcgccucuccuccc

SEQ ID NO: 1258750 - RNA, 19 nt, Artificial Sequence
  Description of Artificial Sequence: Synthetic oligonucleotide
gcgcuguuuucccacacug

SEQ ID NO: 1258751 - RNA, 19 nt, Artificial Sequence
  Description of Artificial Sequence: Synthetic oligonucleotide
cacaucuuguaaggccggc

SEQ ID NO: 1258752 - RNA, 19 nt, Artificial Sequence
  Description of Artificial Sequence: Synthetic oligonucleotide
gagcuccaccaauguacug

SEQ ID NO: 1258753 - RNA, 19 nt, Artificial Sequence
  Description of Artificial Sequence: Synthetic oligonucleotide
gggacguaauuuucgggga

SEQ ID NO: 1258754 - RNA, 19 nt, Artificial Sequence
  Description of Artificial Sequence: Synthetic oligonucleotide
acaccguagggacguaauu

SEQ ID NO: 1258755 - RNA, 19 nt, Artificial Sequence
  Description of Artificial Sequence: Synthetic oligonucleotide
agcggcucuuaacuccccu

SEQ ID NO: 1258756 - RNA, 19 nt, Artificial Sequence
  Description of Artificial Sequence: Synthetic oligonucleotide
gguaagagagggacggaca

SEQ ID NO: 1258757 - RNA, 19 nt, Artificial Sequence
  Description of Artificial Sequence: Synthetic oligonucleotide
accauucagggcauggauu

SEQ ID NO: 1258758 - RNA, 19 nt, Artificial Sequence
  Description of Artificial Sequence: Synthetic oligonucleotide
cacacgccaagguggcgac

SEQ ID NO: 1258759 - RNA, 19 nt, Artificial Sequence
  Description of Artificial Sequence: Synthetic oligonucleotide
guaaagcugagcauucgau

SEQ ID NO: 1258760 - RNA, 19 nt, Artificial Sequence
  Description of Artificial Sequence: Synthetic oligonucleotide
ggucccggauacaauuucc

SEQ ID NO: 1258761 - RNA, 19 nt, Artificial Sequence
  Description of Artificial Sequence: Synthetic oligonucleotide
aucgcaaggccggugggaa

SEQ ID NO: 1258762 - RNA, 19 nt, Artificial Sequence
  Description of Artificial Sequence: Synthetic oligonucleotide
gucgcccacuacuacuauc

SEQ ID NO: 1258763 - RNA, 19 nt, Artificial Sequence
  Description of Artificial Sequence: Synthetic oligonucleotide
ugucgcccacuacuacuau

SEQ ID NO: 1258764 - RNA, 19 nt, Artificial Sequence
  Description of Artificial Sequence: Synthetic oligonucleotide
guagcgcaguggaggagag

SEQ ID NO: 1258765 - RNA, 19 nt, Artificial Sequence
  Description of Artificial Sequence: Synthetic oligonucleotide
gagggacggacauugucau

SEQ ID NO: 1258766 - RNA, 19 nt, Artificial Sequence
  Description of Artificial Sequence: Synthetic oligonucleotide
cugagcauucgauguaagu

SEQ ID NO: 1258767 - RNA, 19 nt, Artificial Sequence
  Description of Artificial Sequence: Synthetic oligonucleotide
ucgauguaaguggcugcuc

SEQ ID NO: 1258768 - RNA, 19 nt, Artificial Sequence
  Description of Artificial Sequence: Synthetic oligonucleotide
cguaaguccguugcgacug

SEQ ID NO: 1258769 - RNA, 19 nt, Artificial Sequence
  Description of Artificial Sequence: Synthetic oligonucleotide
gugauuuguuccgcuuaac

SEQ ID NO: 1258770 - RNA, 19 nt, Artificial Sequence
  Description of Artificial Sequence: Synthetic oligonucleotide
uagcgcaguggaggagagg

SEQ ID NO: 1258771 - RNA, 19 nt, Artificial Sequence
  Description of Artificial Sequence: Synthetic oligonucleotide
uucggggaagcaguccuuu

SEQ ID NO: 1258772 - RNA, 19 nt, Artificial Sequence
  Description of Artificial Sequence: Synthetic oligonucleotide
gcgaucuuugcagcacugg

SEQ ID NO: 1258773 - RNA, 19 nt, Artificial Sequence
  Description of Artificial Sequence: Synthetic oligonucleotide
uuguuccgcuuaacguuuu

SEQ ID NO: 1258774 - RNA, 19 nt, Artificial Sequence
  Description of Artificial Sequence: Synthetic oligonucleotide
cucugacgcuguuuucuga

SEQ ID NO: 1258775 - RNA, 19 nt, Artificial Sequence
  Description of Artificial Sequence: Synthetic oligonucleotide
aggcgucugccugugauuu

SEQ ID NO: 1258776 - RNA, 19 nt, Artificial Sequence
  Description of Artificial Sequence: Synthetic oligonucleotide
gcgaccuucacaggaaguc

SEQ ID NO: 1258777 - RNA, 19 nt, Artificial Sequence
  Description of Artificial Sequence: Synthetic oligonucleotide
cugucgcccacuacuacua

SEQ ID NO: 1258778 - RNA, 19 nt, Artificial Sequence
  Description of Artificial Sequence: Synthetic oligonucleotide
ucucaccacucggucuaca

SEQ ID NO: 1258779 - RNA, 19 nt, Artificial Sequence
  Description of Artificial Sequence: Synthetic oligonucleotide
ggacguaauuuucggggaa

SEQ ID NO: 1258780 - RNA, 19 nt, Artificial Sequence
  Description of Artificial Sequence: Synthetic oligonucleotide
cauuuguuagcuccccuuu

SEQ ID NO: 1258781 - RNA, 19 nt, Artificial Sequence
  Description of Artificial Sequence: Synthetic oligonucleotide
ucgcaaggccggugggaac

SEQ ID NO: 1258782 - RNA, 19 nt, Artificial Sequence
  Description of Artificial Sequence: Synthetic oligonucleotide
agcgaccuucacaggaagu

SEQ ID NO: 1258783 - RNA, 19 nt, Artificial Sequence
  Description of Artificial Sequence: Synthetic oligonucleotide
ccuuaagcguagcgcagug

SEQ ID NO: 1258784 - RNA, 19 nt, Artificial Sequence
  Description of Artificial Sequence: Synthetic oligonucleotide
guccgcaaaucagacuuaa

SEQ ID NO: 1258785 - RNA, 19 nt, Artificial Sequence
  Description of Artificial Sequence: Synthetic oligonucleotide
ugccugacuccgcgccucu

SEQ ID NO: 1258786 - RNA, 19 nt, Artificial Sequence
  Description of Artificial Sequence: Synthetic oligonucleotide
gggucccggauacaauuuc

SEQ ID NO: 1258787 - RNA, 19 nt, Artificial Sequence
  Description of Artificial Sequence: Synthetic oligonucleotide
cuacuacuaucuugcauuu

SEQ ID NO: 1258788 - RNA, 19 nt, Artificial Sequence
  Description of Artificial Sequence: Synthetic oligonucleotide
cacuacuacuaucuugcau

SEQ ID NO: 1258789 - RNA, 19 nt, Artificial Sequence
  Description of Artificial Sequence: Synthetic oligonucleotide
cugugcacuucguuugacu

SEQ ID NO: 1258790 - RNA, 19 nt, Artificial Sequence
  Description of Artificial Sequence: Synthetic oligonucleotide
cccgcguccucauuaaaga

SEQ ID NO: 1258791 - RNA, 19 nt, Artificial Sequence
  Description of Artificial Sequence: Synthetic oligonucleotide
ugacuccgcgccucuccuc

SEQ ID NO: 1258792 - RNA, 19 nt, Artificial Sequence
  Description of Artificial Sequence: Synthetic oligonucleotide
uacugacaucuguccgcaa

SEQ ID NO: 1258793 - RNA, 19 nt, Artificial Sequence
  Description of Artificial Sequence: Synthetic oligonucleotide
ccguagggacguaauuuuc

SEQ ID NO: 1258794 - RNA, 19 nt, Artificial Sequence
  Description of Artificial Sequence: Synthetic oligonucleotide
acgcuguuuucugacugua

SEQ ID NO: 1258795 - RNA, 19 nt, Artificial Sequence
  Description of Artificial Sequence: Synthetic oligonucleotide
ccgcguccucauuaaagac

SEQ ID NO: 1258796 - RNA, 19 nt, Artificial Sequence
  Description of Artificial Sequence: Synthetic oligonucleotide
ccccuuaagcguagcgcag

SEQ ID NO: 1258797 - RNA, 19 nt, Artificial Sequence
  Description of Artificial Sequence: Synthetic oligonucleotide
guccguugcgacugcugaa

SEQ ID NO: 1258798 - RNA, 19 nt, Artificial Sequence
  Description of Artificial Sequence: Synthetic oligonucleotide
ggaggaaauuagaucacau

SEQ ID NO: 1258799 - RNA, 19 nt, Artificial Sequence
  Description of Artificial Sequence: Synthetic oligonucleotide
cccaagcaccauucagggc

SEQ ID NO: 1258800 - RNA, 19 nt, Artificial Sequence
  Description of Artificial Sequence: Synthetic oligonucleotide
acgccaagguggcgacaug

SEQ ID NO: 1258801 - RNA, 19 nt, Artificial Sequence
  Description of Artificial Sequence: Synthetic oligonucleotide
cgcguccucauuaaagaca

SEQ ID NO: 1258802 - RNA, 19 nt, Artificial Sequence
  Description of Artificial Sequence: Synthetic oligonucleotide
gcugucgcccacuacuacu

SEQ ID NO: 1258803 - RNA, 19 nt, Artificial Sequence
  Description of Artificial Sequence: Synthetic oligonucleotide
uccgcgccucuccucccaa

SEQ ID NO: 1258804 - RNA, 19 nt, Artificial Sequence
  Description of Artificial Sequence: Synthetic oligonucleotide
gaugagcuaggaggaaauu

SEQ ID NO: 1258805 - RNA, 19 nt, Artificial Sequence
  Description of Artificial Sequence: Synthetic oligonucleotide
ccuaaggacgggauuccaa

SEQ ID NO: 1258806 - RNA, 19 nt, Artificial Sequence
  Description of Artificial Sequence: Synthetic oligonucleotide
aucccacgggucccggaua

SEQ ID NO: 1258807 - RNA, 19 nt, Artificial Sequence
  Description of Artificial Sequence: Synthetic oligonucleotide
ggcugucgcccacuacuac

SEQ ID NO: 1258808 - RNA, 19 nt, Artificial Sequence
  Description of Artificial Sequence: Synthetic oligonucleotide
cuagcucuaucuagcccau

SEQ ID NO: 1258809 - RNA, 19 nt, Artificial Sequence
  Description of Artificial Sequence: Synthetic oligonucleotide
gcgcacaaaauauuacauu

SEQ ID NO: 1258810 - RNA, 19 nt, Artificial Sequence
  Description of Artificial Sequence: Synthetic oligonucleotide
gcggcucuuaacuccccuc

SEQ ID NO: 1258811 - RNA, 19 nt, Artificial Sequence
  Description of Artificial Sequence: Synthetic oligonucleotide
acguucugauuaggaucca

SEQ ID NO: 1258812 - RNA, 19 nt, Artificial Sequence
  Description of Artificial Sequence: Synthetic oligonucleotide
gcgucugccugugauuuga

SEQ ID NO: 1258813 - RNA, 19 nt, Artificial Sequence
  Description of Artificial Sequence: Synthetic oligonucleotide
caccguagggacguaauuu

SEQ ID NO: 1258814 - RNA, 19 nt, Artificial Sequence
  Description of Artificial Sequence: Synthetic oligonucleotide
gggaaccccuuaagcguag

SEQ ID NO: 1258815 - RNA, 19 nt, Artificial Sequence
  Description of Artificial Sequence: Synthetic oligonucleotide
ggcgucugccugugauuug

SEQ ID NO: 1258816 - RNA, 19 nt, Artificial Sequence
  Description of Artificial Sequence: Synthetic oligonucleotide
uccgaucugcuuggccaua

SEQ ID NO: 1258817 - RNA, 19 nt, Artificial Sequence
  Description of Artificial Sequence: Synthetic oligonucleotide
ccguugcgacugcugaaag

SEQ ID NO: 1258818 - RNA, 19 nt, Artificial Sequence
  Description of Artificial Sequence: Synthetic oligonucleotide
uaaggccggcagaggccuu

SEQ ID NO: 1258819 - RNA, 19 nt, Artificial Sequence
  Description of Artificial Sequence: Synthetic oligonucleotide
gagcaauuuuccacuuguu

SEQ ID NO: 1258820 - RNA, 19 nt, Artificial Sequence
  Description of Artificial Sequence: Synthetic oligonucleotide
ggcaugugugaaauucgcu

SEQ ID NO: 1258821 - RNA, 19 nt, Artificial Sequence
  Description of Artificial Sequence: Synthetic oligonucleotide
aggauccaugauagauuua

SEQ ID NO: 1258822 - RNA, 19 nt, Artificial Sequence
  Description of Artificial Sequence: Synthetic oligonucleotide
caggcucaacucuauucuu

SEQ ID NO: 1258823 - RNA, 19 nt, Artificial Sequence
  Description of Artificial Sequence: Synthetic oligonucleotide
cguaauuuucggggaagca

SEQ ID NO: 1258824 - RNA, 19 nt, Artificial Sequence
  Description of Artificial Sequence: Synthetic oligonucleotide
agccugcguccaugugacu

SEQ ID NO: 1258825 - RNA, 19 nt, Artificial Sequence
  Description of Artificial Sequence: Synthetic oligonucleotide
cuucgccuuguccuuccgu

SEQ ID NO: 1258826 - RNA, 19 nt, Artificial Sequence
  Description of Artificial Sequence: Synthetic oligonucleotide
cgaagcuucacaugacagu

SEQ ID NO: 1258827 - RNA, 19 nt, Artificial Sequence
  Description of Artificial Sequence: Synthetic oligonucleotide
ggauaauuucuggcuggcu

SEQ ID NO: 1258828 - RNA, 19 nt, Artificial Sequence
  Description of Artificial Sequence: Synthetic oligonucleotide
gccgaaccuaaggacggga

SEQ ID NO: 1258829 - RNA, 19 nt, Artificial Sequence
  Description of Artificial Sequence: Synthetic oligonucleotide
acacgccaagguggcgaca

SEQ ID NO: 1258830 - RNA, 19 nt, Artificial Sequence
  Description of Artificial Sequence: Synthetic oligonucleotide
cacgccaagguggcgacau

SEQ ID NO: 1258831 - RNA, 19 nt, Artificial Sequence
  Description of Artificial Sequence: Synthetic oligonucleotide
cguagcgcaguggaggaga

SEQ ID NO: 1258832 - RNA, 19 nt, Artificial Sequence
  Description of Artificial Sequence: Synthetic oligonucleotide
cuccgcgccucuccuccca

SEQ ID NO: 1258833 - RNA, 19 nt, Artificial Sequence
  Description of Artificial Sequence: Synthetic oligonucleotide
ggucuacaugccgaaccua

SEQ ID NO: 1258834 - RNA, 19 nt, Artificial Sequence
  Description of Artificial Sequence: Synthetic oligonucleotide
gcguagcgcaguggaggag

SEQ ID NO: 1258835 - RNA, 19 nt, Artificial Sequence
  Description of Artificial Sequence: Synthetic oligonucleotide
ccucucgaaucccacgggu

SEQ ID NO: 1258836 - RNA, 19 nt, Artificial Sequence
  Description of Artificial Sequence: Synthetic oligonucleotide
gcauucgauguaaguggcu

SEQ ID NO: 1258837 - RNA, 19 nt, Artificial Sequence
  Description of Artificial Sequence: Synthetic oligonucleotide
caggcgucugccugugauu

SEQ ID NO: 1258838 - RNA, 19 nt, Artificial Sequence
  Description of Artificial Sequence: Synthetic oligonucleotide
cacaggcgucugccuguga

SEQ ID NO: 1258839 - RNA, 19 nt, Artificial Sequence
  Description of Artificial Sequence: Synthetic oligonucleotide
gccugcguccaugugacuu

SEQ ID NO: 1258840 - RNA, 19 nt, Artificial Sequence
  Description of Artificial Sequence: Synthetic oligonucleotide
ccguaaguccguugcgacu

SEQ ID NO: 1258841 - RNA, 19 nt, Artificial Sequence
  Description of Artificial Sequence: Synthetic oligonucleotide
cguuugacuccuuuucguu

SEQ ID NO: 1258842 - RNA, 19 nt, Artificial Sequence
  Description of Artificial Sequence: Synthetic oligonucleotide
caaacaccguagggacgua

SEQ ID NO: 1258843 - RNA, 19 nt, Artificial Sequence
  Description of Artificial Sequence: Synthetic oligonucleotide
ccgaaccuaaggacgggau

SEQ ID NO: 1258844 - RNA, 19 nt, Artificial Sequence
  Description of Artificial Sequence: Synthetic oligonucleotide
ccgcgccucuccucccaag

SEQ ID NO: 1258845 - RNA, 19 nt, Artificial Sequence
  Description of Artificial Sequence: Synthetic oligonucleotide
cggucuacaugccgaaccu

SEQ ID NO: 1258846 - RNA, 19 nt, Artificial Sequence
  Description of Artificial Sequence: Synthetic oligonucleotide
cguugcgacugcugaaagu

SEQ ID NO: 1258847 - RNA, 19 nt, Artificial Sequence
  Description of Artificial Sequence: Synthetic oligonucleotide
ccugcguccaugugacuuu

SEQ ID NO: 1258848 - RNA, 19 nt, Artificial Sequence
  Description of Artificial Sequence: Synthetic oligonucleotide
cccuuaagcguagcgcagu

SEQ ID NO: 1258849 - RNA, 19 nt, Artificial Sequence
  Description of Artificial Sequence: Synthetic oligonucleotide
cgaaccuaaggacgggauu

SEQ ID NO: 1258850 - RNA, 19 nt, Artificial Sequence
  Description of Artificial Sequence: Synthetic oligonucleotide
guccuuccguaaguccguu

SEQ ID NO: 1258851 - RNA, 19 nt, Artificial Sequence
  Description of Artificial Sequence: Synthetic oligonucleotide
cucgcucagcagcgaccuu

SEQ ID NO: 1258852 - RNA, 19 nt, Artificial Sequence
  Description of Artificial Sequence: Synthetic oligonucleotide
cgggucccggauacaauuu

SEQ ID NO: 1258853 - RNA, 19 nt, Artificial Sequence
  Description of Artificial Sequence: Synthetic oligonucleotide
cccacgggucccggauaca

SEQ ID NO: 1258854 - RNA, 19 nt, Artificial Sequence
  Description of Artificial Sequence: Synthetic oligonucleotide
cggauacaauuuccauuuu

SEQ ID NO: 1258855 - RNA, 19 nt, Artificial Sequence
  Description of Artificial Sequence: Synthetic oligonucleotide
cgcccacuacuacuaucuu

SEQ ID NO: 1258856 - RNA, 19 nt, Artificial Sequence
  Description of Artificial Sequence: Synthetic oligonucleotide
aaaguuaucaacaaaccac

SEQ ID NO: 1258857 - RNA, 19 nt, Artificial Sequence
  Description of Artificial Sequence: Synthetic oligonucleotide
uaaucuuaagauaaaagag

SEQ ID NO: 1258858 - RNA, 19 nt, Artificial Sequence
  Description of Artificial Sequence: Synthetic oligonucleotide
auauggguuagacaguucc

SEQ ID NO: 1258859 - RNA, 19 nt, Artificial Sequence
  Description of Artificial Sequence: Synthetic oligonucleotide
gacauauacagucagguug

SEQ ID NO: 1258860 - RNA, 19 nt, Artificial Sequence
  Description of Artificial Sequence: Synthetic oligonucleotide
ugucuauuagucaggaugg

SEQ ID NO: 1258861 - RNA, 19 nt, Artificial Sequence
  Description of Artificial Sequence: Synthetic oligonucleotide
uuagcacacaauaaaauga

SEQ ID NO: 1258862 - RNA, 19 nt, Artificial Sequence
  Description of Artificial Sequence: Synthetic oligonucleotide
aauaggcauaagcauauag

SEQ ID NO: 1258863 - RNA, 19 nt, Artificial Sequence
  Description of Artificial Sequence: Synthetic oligonucleotide
uuaaaguuaucaacaaacc

SEQ ID NO: 1258864 - RNA, 19 nt, Artificial Sequence
  Description of Artificial Sequence: Synthetic oligonucleotide
ucuuaaggccacaugauag

SEQ ID NO: 1258865 - RNA, 19 nt, Artificial Sequence
  Description of Artificial Sequence: Synthetic oligonucleotide
ugcacaauaggcauaagca

SEQ ID NO: 1258866 - RNA, 19 nt, Artificial Sequence
  Description of Artificial Sequence: Synthetic oligonucleotide
auaagcauauagcagcugg

SEQ ID NO: 1258867 - RNA, 19 nt, Artificial Sequence
  Description of Artificial Sequence: Synthetic oligonucleotide
aauguccacuccuuaagcg

SEQ ID NO: 1258868 - RNA, 19 nt, Artificial Sequence
  Description of Artificial Sequence: Synthetic oligonucleotide
uguaccuuaacuauggcau

SEQ ID NO: 1258869 - RNA, 19 nt, Artificial Sequence
  Description of Artificial Sequence: Synthetic oligonucleotide
augucuauuagucaggaug

SEQ ID NO: 1258870 - RNA, 19 nt, Artificial Sequence
  Description of Artificial Sequence: Synthetic oligonucleotide
uaagcgaccuuuauuaaag

SEQ ID NO: 1258871 - RNA, 19 nt, Artificial Sequence
  Description of Artificial Sequence: Synthetic oligonucleotide
uguuucauucccaaggaug

SEQ ID NO: 1258872 - RNA, 19 nt, Artificial Sequence
  Description of Artificial Sequence: Synthetic oligonucleotide
agcacuuaguuguucaccc

SEQ ID NO: 1258873 - RNA, 19 nt, Artificial Sequence
  Description of Artificial Sequence: Synthetic oligonucleotide
aaucuuaagauaaaagaga

SEQ ID NO: 1258874 - RNA, 19 nt, Artificial Sequence
  Description of Artificial Sequence: Synthetic oligonucleotide
uuagacaguuccaaccugg

SEQ ID NO: 1258875 - RNA, 19 nt, Artificial Sequence
  Description of Artificial Sequence: Synthetic oligonucleotide
ugugguuuaagauaauccu

SEQ ID NO: 1258876 - RNA, 19 nt, Artificial Sequence
  Description of Artificial Sequence: Synthetic oligonucleotide
uuaacuauggcaucagacu

SEQ ID NO: 1258877 - RNA, 19 nt, Artificial Sequence
  Description of Artificial Sequence: Synthetic oligonucleotide
ugcaacuuuuccaaaagug

SEQ ID NO: 1258878 - RNA, 19 nt, Artificial Sequence
  Description of Artificial Sequence: Synthetic oligonucleotide
ugauaguuuguccaaguca

SEQ ID NO: 1258879 - RNA, 19 nt, Artificial Sequence
  Description of Artificial Sequence: Synthetic oligonucleotide
uccgaaacaacugaaaaca

SEQ ID NO: 1258880 - RNA, 19 nt, Artificial Sequence
  Description of Artificial Sequence: Synthetic oligonucleotide
auaggcauaagcauauagc

SEQ ID NO: 1258881 - RNA, 19 nt, Artificial Sequence
  Description of Artificial Sequence: Synthetic oligonucleotide
agagccgucgcccauauag

SEQ ID NO: 1258882 - RNA, 19 nt, Artificial Sequence
  Description of Artificial Sequence: Synthetic oligonucleotide
ucugcaucaaucagcgagg

SEQ ID NO: 1258883 - RNA, 19 nt, Artificial Sequence
  Description of Artificial Sequence: Synthetic oligonucleotide
cuuaacuauggcaucagac

SEQ ID NO: 1258884 - RNA, 19 nt, Artificial Sequence
  Description of Artificial Sequence: Synthetic oligonucleotide
uggagaauuacuuuagaaa

SEQ ID NO: 1258885 - RNA, 19 nt, Artificial Sequence
  Description of Artificial Sequence: Synthetic oligonucleotide
ucgucuuaaggccacauga

SEQ ID NO: 1258886 - RNA, 19 nt, Artificial Sequence
  Description of Artificial Sequence: Synthetic oligonucleotide
uuaacucucucuuggguag

SEQ ID NO: 1258887 - RNA, 19 nt, Artificial Sequence
  Description of Artificial Sequence: Synthetic oligonucleotide
ucugucagcagaaaagagu

SEQ ID NO: 1258888 - RNA, 19 nt, Artificial Sequence
  Description of Artificial Sequence: Synthetic oligonucleotide
cucugcaucaaucagcgag

SEQ ID NO: 1258889 - RNA, 19 nt, Artificial Sequence
  Description of Artificial Sequence: Synthetic oligonucleotide
cucuuuacaguuuccaggc

SEQ ID NO: 1258890 - RNA, 19 nt, Artificial Sequence
  Description of Artificial Sequence: Synthetic oligonucleotide
uuuacaguuuccaggcaag

SEQ ID NO: 1258891 - RNA, 19 nt, Artificial Sequence
  Description of Artificial Sequence: Synthetic oligonucleotide
acauauacagucagguugc

SEQ ID NO: 1258892 - RNA, 19 nt, Artificial Sequence
  Description of Artificial Sequence: Synthetic oligonucleotide
auugcaacuuuuccaaaag

SEQ ID NO: 1258893 - RNA, 19 nt, Artificial Sequence
  Description of Artificial Sequence: Synthetic oligonucleotide
uuuccgaaacaacugaaaa

SEQ ID NO: 1258894 - RNA, 19 nt, Artificial Sequence
  Description of Artificial Sequence: Synthetic oligonucleotide
agaaaauaaucuuaagaua

SEQ ID NO: 1258895 - RNA, 19 nt, Artificial Sequence
  Description of Artificial Sequence: Synthetic oligonucleotide
ucaaaauauggguuagaca

SEQ ID NO: 1258896 - RNA, 19 nt, Artificial Sequence
  Description of Artificial Sequence: Synthetic oligonucleotide
agauugcagagccagugac

SEQ ID NO: 1258897 - RNA, 19 nt, Artificial Sequence
  Description of Artificial Sequence: Synthetic oligonucleotide
aagaugagcagcgugcgag

SEQ ID NO: 1258898 - RNA, 19 nt, Artificial Sequence
  Description of Artificial Sequence: Synthetic oligonucleotide
aaugacauauacagucagg

SEQ ID NO: 1258899 - RNA, 19 nt, Artificial Sequence
  Description of Artificial Sequence: Synthetic oligonucleotide
ucauuuguaaucuguguuc

SEQ ID NO: 1258900 - RNA, 19 nt, Artificial Sequence
  Description of Artificial Sequence: Synthetic oligonucleotide
ggcauaagcauauagcagc

SEQ ID NO: 1258901 - RNA, 19 nt, Artificial Sequence
  Description of Artificial Sequence: Synthetic oligonucleotide
gaagccacgauguagaggu

SEQ ID NO: 1258902 - RNA, 19 nt, Artificial Sequence
  Description of Artificial Sequence: Synthetic oligonucleotide
uauggcaucagacuugcua

SEQ ID NO: 1258903 - RNA, 19 nt, Artificial Sequence
  Description of Artificial Sequence: Synthetic oligonucleotide
cauauagagacccgcggcg

SEQ ID NO: 1258904 - RNA, 19 nt, Artificial Sequence
  Description of Artificial Sequence: Synthetic oligonucleotide
uuuuaacucucucuugggu

SEQ ID NO: 1258905 - RNA, 19 nt, Artificial Sequence
  Description of Artificial Sequence: Synthetic oligonucleotide
aagauaauccuaaauuuaa

SEQ ID NO: 1258906 - RNA, 19 nt, Artificial Sequence
  Description of Artificial Sequence: Synthetic oligonucleotide
cugaucauguuucauuccc

SEQ ID NO: 1258907 - RNA, 19 nt, Artificial Sequence
  Description of Artificial Sequence: Synthetic oligonucleotide
agaucaugaauccuagggu

SEQ ID NO: 1258908 - RNA, 19 nt, Artificial Sequence
  Description of Artificial Sequence: Synthetic oligonucleotide
uaugccagauuuaaugcaa

SEQ ID NO: 1258909 - RNA, 19 nt, Artificial Sequence
  Description of Artificial Sequence: Synthetic oligonucleotide
uuuguaaucuguguucugu

SEQ ID NO: 1258910 - RNA, 19 nt, Artificial Sequence
  Description of Artificial Sequence: Synthetic oligonucleotide
ugggagaacugcacaauag

SEQ ID NO: 1258911 - RNA, 19 nt, Artificial Sequence
  Description of Artificial Sequence: Synthetic oligonucleotide
uuuaacucucucuugggua

SEQ ID NO: 1258912 - RNA, 19 nt, Artificial Sequence
  Description of Artificial Sequence: Synthetic oligonucleotide
uuguaccuuaacuauggca

SEQ ID NO: 1258913 - RNA, 19 nt, Artificial Sequence
  Description of Artificial Sequence: Synthetic oligonucleotide
acacaauaaaaugacauau

SEQ ID NO: 1258914 - RNA, 19 nt, Artificial Sequence
  Description of Artificial Sequence: Synthetic oligonucleotide
uuccgaaacaacugaaaac

SEQ ID NO: 1258915 - RNA, 19 nt, Artificial Sequence
  Description of Artificial Sequence: Synthetic oligonucleotide
uaagcauauagcagcuggc

SEQ ID NO: 1258916 - RNA, 19 nt, Artificial Sequence
  Description of Artificial Sequence: Synthetic oligonucleotide
acuauggcaucagacuugc

SEQ ID NO: 1258917 - RNA, 19 nt, Artificial Sequence
  Description of Artificial Sequence: Synthetic oligonucleotide
uucccauugauuccuucag

SEQ ID NO: 1258918 - RNA, 19 nt, Artificial Sequence
  Description of Artificial Sequence: Synthetic oligonucleotide
uggcauaguaauuuagcac

SEQ ID NO: 1258919 - RNA, 19 nt, Artificial Sequence
  Description of Artificial Sequence: Synthetic oligonucleotide
gcagaaaagagucucaaac

SEQ ID NO: 1258920 - RNA, 19 nt, Artificial Sequence
  Description of Artificial Sequence: Synthetic oligonucleotide
cauugagcaucauggaagc

SEQ ID NO: 1258921 - RNA, 19 nt, Artificial Sequence
  Description of Artificial Sequence: Synthetic oligonucleotide
uaacuauggcaucagacuu

SEQ ID NO: 1258922 - RNA, 19 nt, Artificial Sequence
  Description of Artificial Sequence: Synthetic oligonucleotide
ggcauaguaauuuagcaca

SEQ ID NO: 1258923 - RNA, 19 nt, Artificial Sequence
  Description of Artificial Sequence: Synthetic oligonucleotide
accacaaauggagaauuac

SEQ ID NO: 1258924 - RNA, 19 nt, Artificial Sequence
  Description of Artificial Sequence: Synthetic oligonucleotide
uuaguuguucacccuucag

SEQ ID NO: 1258925 - RNA, 19 nt, Artificial Sequence
  Description of Artificial Sequence: Synthetic oligonucleotide
gaagauugcagagccagug

SEQ ID NO: 1258926 - RNA, 19 nt, Artificial Sequence
  Description of Artificial Sequence: Synthetic oligonucleotide
ucaguuuuggauggccugg

SEQ ID NO: 1258927 - RNA, 19 nt, Artificial Sequence
  Description of Artificial Sequence: Synthetic oligonucleotide
caguggaucucaauguacc

SEQ ID NO: 1258928 - RNA, 19 nt, Artificial Sequence
  Description of Artificial Sequence: Synthetic oligonucleotide
ucuuaagauaaaagagauc

SEQ ID NO: 1258929 - RNA, 19 nt, Artificial Sequence
  Description of Artificial Sequence: Synthetic oligonucleotide
uuaagcgaccuuuauuaaa

SEQ ID NO: 1258930 - RNA, 19 nt, Artificial Sequence
  Description of Artificial Sequence: Synthetic oligonucleotide
ugaaaacagggguaugaac

SEQ ID NO: 1258931 - RNA, 19 nt, Artificial Sequence
  Description of Artificial Sequence: Synthetic oligonucleotide
ugcagcguaugccagauuu

SEQ ID NO: 1258932 - RNA, 19 nt, Artificial Sequence
  Description of Artificial Sequence: Synthetic oligonucleotide
gaccacuucauuuguaauc

SEQ ID NO: 1258933 - RNA, 19 nt, Artificial Sequence
  Description of Artificial Sequence: Synthetic oligonucleotide
aagagaucaugaauccuag

SEQ ID NO: 1258934 - RNA, 19 nt, Artificial Sequence
  Description of Artificial Sequence: Synthetic oligonucleotide
aagauugcagagccaguga

SEQ ID NO: 1258935 - RNA, 19 nt, Artificial Sequence
  Description of Artificial Sequence: Synthetic oligonucleotide
cucugaucauguuucauuc

SEQ ID NO: 1258936 - RNA, 19 nt, Artificial Sequence
  Description of Artificial Sequence: Synthetic oligonucleotide
uggguagggagcuuuaaaa

SEQ ID NO: 1258937 - RNA, 19 nt, Artificial Sequence
  Description of Artificial Sequence: Synthetic oligonucleotide
ucugaugcagugagccggg

SEQ ID NO: 1258938 - RNA, 19 nt, Artificial Sequence
  Description of Artificial Sequence: Synthetic oligonucleotide
ugcuuguaccuuaacuaug

SEQ ID NO: 1258939 - RNA, 19 nt, Artificial Sequence
  Description of Artificial Sequence: Synthetic oligonucleotide
ucaguggaucucaauguac

SEQ ID NO: 1258940 - RNA, 19 nt, Artificial Sequence
  Description of Artificial Sequence: Synthetic oligonucleotide
aagucaccuccuugugacc

SEQ ID NO: 1258941 - RNA, 19 nt, Artificial Sequence
  Description of Artificial Sequence: Synthetic oligonucleotide
acaaaccacaaauggagaa

SEQ ID NO: 1258942 - RNA, 19 nt, Artificial Sequence
  Description of Artificial Sequence: Synthetic oligonucleotide
ucugaucauguuucauucc

SEQ ID NO: 1258943 - RNA, 19 nt, Artificial Sequence
  Description of Artificial Sequence: Synthetic oligonucleotide
auggagaauuacuuuagaa

SEQ ID NO: 1258944 - RNA, 19 nt, Artificial Sequence
  Description of Artificial Sequence: Synthetic oligonucleotide
uagggaaaguugaugcgca

SEQ ID NO: 1258945 - RNA, 19 nt, Artificial Sequence
  Description of Artificial Sequence: Synthetic oligonucleotide
auauagagacccgcggcgc

SEQ ID NO: 1258946 - RNA, 19 nt, Artificial Sequence
  Description of Artificial Sequence: Synthetic oligonucleotide
uccaaaagugcgucuuucc

SEQ ID NO: 1258947 - RNA, 19 nt, Artificial Sequence
  Description of Artificial Sequence: Synthetic oligonucleotide
ugaucauguuucauuccca

SEQ ID NO: 1258948 - RNA, 19 nt, Artificial Sequence
  Description of Artificial Sequence: Synthetic oligonucleotide
cagauuuaaugcaaaagaa

SEQ ID NO: 1258949 - RNA, 19 nt, Artificial Sequence
  Description of Artificial Sequence: Synthetic oligonucleotide
agauuuaaugcaaaagaaa

SEQ ID NO: 1258950 - RNA, 19 nt, Artificial Sequence
  Description of Artificial Sequence: Synthetic oligonucleotide
uauuagucaggauggcuuc

SEQ ID NO: 1258951 - RNA, 19 nt, Artificial Sequence
  Description of Artificial Sequence: Synthetic oligonucleotide
auacacaucuugucucguc

SEQ ID NO: 1258952 - RNA, 19 nt, Artificial Sequence
  Description of Artificial Sequence: Synthetic oligonucleotide
uuuuggauggccuggccau

SEQ ID NO: 1258953 - RNA, 19 nt, Artificial Sequence
  Description of Artificial Sequence: Synthetic oligonucleotide
cagccggacagccagaccc

SEQ ID NO: 1258954 - RNA, 19 nt, Artificial Sequence
  Description of Artificial Sequence: Synthetic oligonucleotide
uguccacuccuuaagcgac

SEQ ID NO: 1258955 - RNA, 19 nt, Artificial Sequence
  Description of Artificial Sequence: Synthetic oligonucleotide
gauacugaagcacucugua

SEQ ID NO: 1258956 - RNA, 19 nt, Artificial Sequence
  Description of Artificial Sequence: Synthetic oligonucleotide
ucuauuagucaggauggcu

SEQ ID NO: 1258957 - RNA, 19 nt, Artificial Sequence
  Description of Artificial Sequence: Synthetic oligonucleotide
aaggaugccaccacugugu

SEQ ID NO: 1258958 - RNA, 19 nt, Artificial Sequence
  Description of Artificial Sequence: Synthetic oligonucleotide
agccccuugcagaagaccc

SEQ ID NO: 1258959 - RNA, 19 nt, Artificial Sequence
  Description of Artificial Sequence: Synthetic oligonucleotide
guagggaaaguugaugcgc

SEQ ID NO: 1258960 - RNA, 19 nt, Artificial Sequence
  Description of Artificial Sequence: Synthetic oligonucleotide
aacuauggcaucagacuug

SEQ ID NO: 1258961 - RNA, 19 nt, Artificial Sequence
  Description of Artificial Sequence: Synthetic oligonucleotide
cauauagcagcuggcacag

SEQ ID NO: 1258962 - RNA, 19 nt, Artificial Sequence
  Description of Artificial Sequence: Synthetic oligonucleotide
aaagagucucaaacucuuc

SEQ ID NO: 1258963 - RNA, 19 nt, Artificial Sequence
  Description of Artificial Sequence: Synthetic oligonucleotide
uguucacccuucaggaaac

SEQ ID NO: 1258964 - RNA, 19 nt, Artificial Sequence
  Description of Artificial Sequence: Synthetic oligonucleotide
gcguaugccagauuuaaug

SEQ ID NO: 1258965 - RNA, 19 nt, Artificial Sequence
  Description of Artificial Sequence: Synthetic oligonucleotide
ugaaggagaguuuccucgu

SEQ ID NO: 1258966 - RNA, 19 nt, Artificial Sequence
  Description of Artificial Sequence: Synthetic oligonucleotide
cucaauguaccugcaggcg

SEQ ID NO: 1258967 - RNA, 19 nt, Artificial Sequence
  Description of Artificial Sequence: Synthetic oligonucleotide
ugaugucuauuagucagga

SEQ ID NO: 1258968 - RNA, 19 nt, Artificial Sequence
  Description of Artificial Sequence: Synthetic oligonucleotide
gcaacuuuuccaaaagugc

SEQ ID NO: 1258969 - RNA, 19 nt, Artificial Sequence
  Description of Artificial Sequence: Synthetic oligonucleotide
acucugaucauguuucauu

SEQ ID NO: 1258970 - RNA, 19 nt, Artificial Sequence
  Description of Artificial Sequence: Synthetic oligonucleotide
aauauggguuagacaguuc

SEQ ID NO: 1258971 - RNA, 19 nt, Artificial Sequence
  Description of Artificial Sequence: Synthetic oligonucleotide
ugagcagcgugcgagucag

SEQ ID NO: 1258972 - RNA, 19 nt, Artificial Sequence
  Description of Artificial Sequence: Synthetic oligonucleotide
gcuuguaccuuaacuaugg

SEQ ID NO: 1258973 - RNA, 19 nt, Artificial Sequence
  Description of Artificial Sequence: Synthetic oligonucleotide
cucaguuuuggauggccug

SEQ ID NO: 1258974 - RNA, 19 nt, Artificial Sequence
  Description of Artificial Sequence: Synthetic oligonucleotide
guaugccagauuuaaugca

SEQ ID NO: 1258975 - RNA, 19 nt, Artificial Sequence
  Description of Artificial Sequence: Synthetic oligonucleotide
uaccuuaacuauggcauca

SEQ ID NO: 1258976 - RNA, 19 nt, Artificial Sequence
  Description of Artificial Sequence: Synthetic oligonucleotide
uauuuccccaaaacacuaa

SEQ ID NO: 1258977 - RNA, 19 nt, Artificial Sequence
  Description of Artificial Sequence: Synthetic oligonucleotide
gaucauguuucauucccaa

SEQ ID NO: 1258978 - RNA, 19 nt, Artificial Sequence
  Description of Artificial Sequence: Synthetic oligonucleotide
agggguaugaacaguggag

SEQ ID NO: 1258979 - RNA, 19 nt, Artificial Sequence
  Description of Artificial Sequence: Synthetic oligonucleotide
cagcgugcgagucagcccc

SEQ ID NO: 1258980 - RNA, 19 nt, Artificial Sequence
  Description of Artificial Sequence: Synthetic oligonucleotide
caaaagugcgucuuuccga

SEQ ID NO: 1258981 - RNA, 19 nt, Artificial Sequence
  Description of Artificial Sequence: Synthetic oligonucleotide
uccuuaagcgaccuuuauu

SEQ ID NO: 1258982 - RNA, 19 nt, Artificial Sequence
  Description of Artificial Sequence: Synthetic oligonucleotide
uccuugugaccucuuuaca

SEQ ID NO: 1258983 - RNA, 19 nt, Artificial Sequence
  Description of Artificial Sequence: Synthetic oligonucleotide
caggaaacccauuucccuc

SEQ ID NO: 1258984 - RNA, 19 nt, Artificial Sequence
  Description of Artificial Sequence: Synthetic oligonucleotide
aauguaccugcaggcgcac

SEQ ID NO: 1258985 - RNA, 19 nt, Artificial Sequence
  Description of Artificial Sequence: Synthetic oligonucleotide
acaauaggcauaagcauau

SEQ ID NO: 1258986 - RNA, 19 nt, Artificial Sequence
  Description of Artificial Sequence: Synthetic oligonucleotide
uccugugacuuuccaucag

SEQ ID NO: 1258987 - RNA, 19 nt, Artificial Sequence
  Description of Artificial Sequence: Synthetic oligonucleotide
cauguuucauucccaagga

SEQ ID NO: 1258988 - RNA, 19 nt, Artificial Sequence
  Description of Artificial Sequence: Synthetic oligonucleotide
agaguuuccucguacucua

SEQ ID NO: 1258989 - RNA, 19 nt, Artificial Sequence
  Description of Artificial Sequence: Synthetic oligonucleotide
aggcauaagcauauagcag

SEQ ID NO: 1258990 - RNA, 19 nt, Artificial Sequence
  Description of Artificial Sequence: Synthetic oligonucleotide
gugaugucuauuagucagg

SEQ ID NO: 1258991 - RNA, 19 nt, Artificial Sequence
  Description of Artificial Sequence: Synthetic oligonucleotide
gggguaugaacaguggagg

SEQ ID NO: 1258992 - RNA, 19 nt, Artificial Sequence
  Description of Artificial Sequence: Synthetic oligonucleotide
acaugauaguuuguccaag

SEQ ID NO: 1258993 - RNA, 19 nt, Artificial Sequence
  Description of Artificial Sequence: Synthetic oligonucleotide
ccuugugaccucuuuacag

SEQ ID NO: 1258994 - RNA, 19 nt, Artificial Sequence
  Description of Artificial Sequence: Synthetic oligonucleotide
ugcgucuuuccgaaacaac

SEQ ID NO: 1258995 - RNA, 19 nt, Artificial Sequence
  Description of Artificial Sequence: Synthetic oligonucleotide
uggguuagacaguuccaac

SEQ ID NO: 1258996 - RNA, 19 nt, Artificial Sequence
  Description of Artificial Sequence: Synthetic oligonucleotide
ugacauauacagucagguu

SEQ ID NO: 1258997 - RNA, 19 nt, Artificial Sequence
  Description of Artificial Sequence: Synthetic oligonucleotide
gaccccauaggagcgggcg

SEQ ID NO: 1258998 - RNA, 19 nt, Artificial Sequence
  Description of Artificial Sequence: Synthetic oligonucleotide
gagcgcgacagccggacag

SEQ ID NO: 1258999 - RNA, 19 nt, Artificial Sequence
  Description of Artificial Sequence: Synthetic oligonucleotide
uagacaguuccaaccuggu

SEQ ID NO: 1259000 - RNA, 19 nt, Artificial Sequence
  Description of Artificial Sequence: Synthetic oligonucleotide
aggagaguuuccucguacu

SEQ ID NO: 1259001 - RNA, 19 nt, Artificial Sequence
  Description of Artificial Sequence: Synthetic oligonucleotide
caucaaucagcgaggugug

SEQ ID NO: 1259002 - RNA, 19 nt, Artificial Sequence
  Description of Artificial Sequence: Synthetic oligonucleotide
gucuuuccgaaacaacuga

SEQ ID NO: 1259003 - RNA, 19 nt, Artificial Sequence
  Description of Artificial Sequence: Synthetic oligonucleotide
ccaaaagugcgucuuuccg

SEQ ID NO: 1259004 - RNA, 19 nt, Artificial Sequence
  Description of Artificial Sequence: Synthetic oligonucleotide
aucagcgaggugugucugg

SEQ ID NO: 1259005 - RNA, 19 nt, Artificial Sequence
  Description of Artificial Sequence: Synthetic oligonucleotide
ggagaacugcacaauaggc

SEQ ID NO: 1259006 - RNA, 19 nt, Artificial Sequence
  Description of Artificial Sequence: Synthetic oligonucleotide
cuuguaccuuaacuauggc

SEQ ID NO: 1259007 - RNA, 19 nt, Artificial Sequence
  Description of Artificial Sequence: Synthetic oligonucleotide
gucgcccauauagagaccc

SEQ ID NO: 1259008 - RNA, 19 nt, Artificial Sequence
  Description of Artificial Sequence: Synthetic oligonucleotide
aggaaucagagcaggaacu

SEQ ID NO: 1259009 - RNA, 19 nt, Artificial Sequence
  Description of Artificial Sequence: Synthetic oligonucleotide
aucaugaauccuaggguug

SEQ ID NO: 1259010 - RNA, 19 nt, Artificial Sequence
  Description of Artificial Sequence: Synthetic oligonucleotide
cacacaauaaaaugacaua

SEQ ID NO: 1259011 - RNA, 19 nt, Artificial Sequence
  Description of Artificial Sequence: Synthetic oligonucleotide
cauccugacacccaggacu

SEQ ID NO: 1259012 - RNA, 19 nt, Artificial Sequence
  Description of Artificial Sequence: Synthetic oligonucleotide
agccgucgcccauauagag

SEQ ID NO: 1259013 - RNA, 19 nt, Artificial Sequence
  Description of Artificial Sequence: Synthetic oligonucleotide
uaugaacaguggaggaaua

SEQ ID NO: 1259014 - RNA, 19 nt, Artificial Sequence
  Description of Artificial Sequence: Synthetic oligonucleotide
auggaagccacgauguaga

SEQ ID NO: 1259015 - RNA, 19 nt, Artificial Sequence
  Description of Artificial Sequence: Synthetic oligonucleotide
agacaguuccaaccuggug

SEQ ID NO: 1259016 - RNA, 19 nt, Artificial Sequence
  Description of Artificial Sequence: Synthetic oligonucleotide
ggcuucucgucuuaaggcc

SEQ ID NO: 1259017 - RNA, 19 nt, Artificial Sequence
  Description of Artificial Sequence: Synthetic oligonucleotide
ugccagauuuaaugcaaaa

SEQ ID NO: 1259018 - RNA, 19 nt, Artificial Sequence
  Description of Artificial Sequence: Synthetic oligonucleotide
agugaccucaugacuaucu

SEQ ID NO: 1259019 - RNA, 19 nt, Artificial Sequence
  Description of Artificial Sequence: Synthetic oligonucleotide
aaacagggguaugaacagu

SEQ ID NO: 1259020 - RNA, 19 nt, Artificial Sequence
  Description of Artificial Sequence: Synthetic oligonucleotide
ugcgagucagccccuugca

SEQ ID NO: 1259021 - RNA, 19 nt, Artificial Sequence
  Description of Artificial Sequence: Synthetic oligonucleotide
aauaagcccauggcauagu

SEQ ID NO: 1259022 - RNA, 19 nt, Artificial Sequence
  Description of Artificial Sequence: Synthetic oligonucleotide
cguaugccagauuuaaugc

SEQ ID NO: 1259023 - RNA, 19 nt, Artificial Sequence
  Description of Artificial Sequence: Synthetic oligonucleotide
uggaagccacgauguagag

SEQ ID NO: 1259024 - RNA, 19 nt, Artificial Sequence
  Description of Artificial Sequence: Synthetic oligonucleotide
aaucagcgaggugugucug

SEQ ID NO: 1259025 - RNA, 19 nt, Artificial Sequence
  Description of Artificial Sequence: Synthetic oligonucleotide
ugaauggcugcagcguaug

SEQ ID NO: 1259026 - RNA, 19 nt, Artificial Sequence
  Description of Artificial Sequence: Synthetic oligonucleotide
ucgcccauauagagacccg

SEQ ID NO: 1259027 - RNA, 19 nt, Artificial Sequence
  Description of Artificial Sequence: Synthetic oligonucleotide
acagcucaaaauauggguu

SEQ ID NO: 1259028 - RNA, 19 nt, Artificial Sequence
  Description of Artificial Sequence: Synthetic oligonucleotide
aacugcaagacaaccuuua

SEQ ID NO: 1259029 - RNA, 19 nt, Artificial Sequence
  Description of Artificial Sequence: Synthetic oligonucleotide
gcauauagcagcuggcaca

SEQ ID NO: 1259030 - RNA, 19 nt, Artificial Sequence
  Description of Artificial Sequence: Synthetic oligonucleotide
uggccagucgcuuccuaug

SEQ ID NO: 1259031 - RNA, 19 nt, Artificial Sequence
  Description of Artificial Sequence: Synthetic oligonucleotide
ugcaucaaucagcgaggug

SEQ ID NO: 1259032 - RNA, 19 nt, Artificial Sequence
  Description of Artificial Sequence: Synthetic oligonucleotide
ugaugcgcagccgccaagc

SEQ ID NO: 1259033 - RNA, 19 nt, Artificial Sequence
  Description of Artificial Sequence: Synthetic oligonucleotide
agauaauccuaaauuuaau

SEQ ID NO: 1259034 - RNA, 19 nt, Artificial Sequence
  Description of Artificial Sequence: Synthetic oligonucleotide
agccacgauguagagguag

SEQ ID NO: 1259035 - RNA, 19 nt, Artificial Sequence
  Description of Artificial Sequence: Synthetic oligonucleotide
uacaguuuccaggcaaguc

SEQ ID NO: 1259036 - RNA, 19 nt, Artificial Sequence
  Description of Artificial Sequence: Synthetic oligonucleotide
ccuuaagcgaccuuuauua

SEQ ID NO: 1259037 - RNA, 19 nt, Artificial Sequence
  Description of Artificial Sequence: Synthetic oligonucleotide
agggaaaguugaugcgcag

SEQ ID NO: 1259038 - RNA, 19 nt, Artificial Sequence
  Description of Artificial Sequence: Synthetic oligonucleotide
auaggagcgggcggcggcc

SEQ ID NO: 1259039 - RNA, 19 nt, Artificial Sequence
  Description of Artificial Sequence: Synthetic oligonucleotide
guacccacugugaagcaug

SEQ ID NO: 1259040 - RNA, 19 nt, Artificial Sequence
  Description of Artificial Sequence: Synthetic oligonucleotide
uuccucguacucuacuuuu

SEQ ID NO: 1259041 - RNA, 19 nt, Artificial Sequence
  Description of Artificial Sequence: Synthetic oligonucleotide
uaacucucucuuggguagg

SEQ ID NO: 1259042 - RNA, 19 nt, Artificial Sequence
  Description of Artificial Sequence: Synthetic oligonucleotide
uugugaccucuuuacaguu

SEQ ID NO: 1259043 - RNA, 19 nt, Artificial Sequence
  Description of Artificial Sequence: Synthetic oligonucleotide
auccugacacccaggacuc

SEQ ID NO: 1259044 - RNA, 19 nt, Artificial Sequence
  Description of Artificial Sequence: Synthetic oligonucleotide
uuaaggccacaugauaguu

SEQ ID NO: 1259045 - RNA, 19 nt, Artificial Sequence
  Description of Artificial Sequence: Synthetic oligonucleotide
cagcacuuaguuguucacc

SEQ ID NO: 1259046 - RNA, 19 nt, Artificial Sequence
  Description of Artificial Sequence: Synthetic oligonucleotide
ucacucugaucauguuuca

SEQ ID NO: 1259047 - RNA, 19 nt, Artificial Sequence
  Description of Artificial Sequence: Synthetic oligonucleotide
gucagguugcucucucccc

SEQ ID NO: 1259048 - RNA, 19 nt, Artificial Sequence
  Description of Artificial Sequence: Synthetic oligonucleotide
cuucucgucuuaaggccac

SEQ ID NO: 1259049 - RNA, 19 nt, Artificial Sequence
  Description of Artificial Sequence: Synthetic oligonucleotide
caauguaccugcaggcgca

SEQ ID NO: 1259050 - RNA, 19 nt, Artificial Sequence
  Description of Artificial Sequence: Synthetic oligonucleotide
ugacuaucugcagaccauc

SEQ ID NO: 1259051 - RNA, 19 nt, Artificial Sequence
  Description of Artificial Sequence: Synthetic oligonucleotide
cacaaauggagaauuacuu

SEQ ID NO: 1259052 - RNA, 19 nt, Artificial Sequence
  Description of Artificial Sequence: Synthetic oligonucleotide
ccauauagagacccgcggc

SEQ ID NO: 1259053 - RNA, 19 nt, Artificial Sequence
  Description of Artificial Sequence: Synthetic oligonucleotide
uuacaguuuccaggcaagu

SEQ ID NO: 1259054 - RNA, 19 nt, Artificial Sequence
  Description of Artificial Sequence: Synthetic oligonucleotide
cuauuagucaggauggcuu

SEQ ID NO: 1259055 - RNA, 19 nt, Artificial Sequence
  Description of Artificial Sequence: Synthetic oligonucleotide
agacccgacagagccgucg

SEQ ID NO: 1259056 - RNA, 19 nt, Artificial Sequence
  Description of Artificial Sequence: Synthetic oligonucleotide
uugaugcgcagccgccaag

SEQ ID NO: 1259057 - RNA, 19 nt, Artificial Sequence
  Description of Artificial Sequence: Synthetic oligonucleotide
gcaucaaucagcgaggugu

SEQ ID NO: 1259058 - RNA, 19 nt, Artificial Sequence
  Description of Artificial Sequence: Synthetic oligonucleotide
uccccuucuggcuucucgu

SEQ ID NO: 1259059 - RNA, 19 nt, Artificial Sequence
  Description of Artificial Sequence: Synthetic oligonucleotide
cauaggagcgggcggcggc

SEQ ID NO: 1259060 - RNA, 19 nt, Artificial Sequence
  Description of Artificial Sequence: Synthetic oligonucleotide
auaagcccauggcauagua

SEQ ID NO: 1259061 - RNA, 19 nt, Artificial Sequence
  Description of Artificial Sequence: Synthetic oligonucleotide
cuugucucgucuucuggga

SEQ ID NO: 1259062 - RNA, 19 nt, Artificial Sequence
  Description of Artificial Sequence: Synthetic oligonucleotide
cuugugaccucuuuacagu

SEQ ID NO: 1259063 - RNA, 19 nt, Artificial Sequence
  Description of Artificial Sequence: Synthetic oligonucleotide
auggguuagacaguuccaa

SEQ ID NO: 1259064 - RNA, 19 nt, Artificial Sequence
  Description of Artificial Sequence: Synthetic oligonucleotide
uuccuauggcaucuccaau

SEQ ID NO: 1259065 - RNA, 19 nt, Artificial Sequence
  Description of Artificial Sequence: Synthetic oligonucleotide
accccauaggagcgggcgg

SEQ ID NO: 1259066 - RNA, 19 nt, Artificial Sequence
  Description of Artificial Sequence: Synthetic oligonucleotide
agaugagcagcgugcgagu

SEQ ID NO: 1259067 - RNA, 19 nt, Artificial Sequence
  Description of Artificial Sequence: Synthetic oligonucleotide
cucgucuuaaggccacaug

SEQ ID NO: 1259068 - RNA, 19 nt, Artificial Sequence
  Description of Artificial Sequence: Synthetic oligonucleotide
cacaugauaguuuguccaa

SEQ ID NO: 1259069 - RNA, 19 nt, Artificial Sequence
  Description of Artificial Sequence: Synthetic oligonucleotide
cacugugaagcaugagguc

SEQ ID NO: 1259070 - RNA, 19 nt, Artificial Sequence
  Description of Artificial Sequence: Synthetic oligonucleotide
cacaucuugucucgucuuc

SEQ ID NO: 1259071 - RNA, 19 nt, Artificial Sequence
  Description of Artificial Sequence: Synthetic oligonucleotide
cuuaagcgaccuuuauuaa

SEQ ID NO: 1259072 - RNA, 19 nt, Artificial Sequence
  Description of Artificial Sequence: Synthetic oligonucleotide
gugcgagucagccccuugc

SEQ ID NO: 1259073 - RNA, 19 nt, Artificial Sequence
  Description of Artificial Sequence: Synthetic oligonucleotide
caugaauccuaggguuggg

SEQ ID NO: 1259074 - RNA, 19 nt, Artificial Sequence
  Description of Artificial Sequence: Synthetic oligonucleotide
augagcagcgugcgaguca

SEQ ID NO: 1259075 - RNA, 19 nt, Artificial Sequence
  Description of Artificial Sequence: Synthetic oligonucleotide
cccauauagagacccgcgg

SEQ ID NO: 1259076 - RNA, 19 nt, Artificial Sequence
  Description of Artificial Sequence: Synthetic oligonucleotide
gugguuuaagauaauccua

SEQ ID NO: 1259077 - RNA, 19 nt, Artificial Sequence
  Description of Artificial Sequence: Synthetic oligonucleotide
guccuagggucccucuucc

SEQ ID NO: 1259078 - RNA, 19 nt, Artificial Sequence
  Description of Artificial Sequence: Synthetic oligonucleotide
gacccgacagagccgucgc

SEQ ID NO: 1259079 - RNA, 19 nt, Artificial Sequence
  Description of Artificial Sequence: Synthetic oligonucleotide
ccgucgcccauauagagac

SEQ ID NO: 1259080 - RNA, 19 nt, Artificial Sequence
  Description of Artificial Sequence: Synthetic oligonucleotide
gguuagacaguuccaaccu

SEQ ID NO: 1259081 - RNA, 19 nt, Artificial Sequence
  Description of Artificial Sequence: Synthetic oligonucleotide
guguucugucagcagaaaa

SEQ ID NO: 1259082 - RNA, 19 nt, Artificial Sequence
  Description of Artificial Sequence: Synthetic oligonucleotide
gagaguuuccucguacucu

SEQ ID NO: 1259083 - RNA, 19 nt, Artificial Sequence
  Description of Artificial Sequence: Synthetic oligonucleotide
ggccagucgcuuccuaugg

SEQ ID NO: 1259084 - RNA, 19 nt, Artificial Sequence
  Description of Artificial Sequence: Synthetic oligonucleotide
acccgacagagccgucgcc

SEQ ID NO: 1259085 - RNA, 19 nt, Artificial Sequence
  Description of Artificial Sequence: Synthetic oligonucleotide
uguacccacugugaagcau

SEQ ID NO: 1259086 - RNA, 19 nt, Artificial Sequence
  Description of Artificial Sequence: Synthetic oligonucleotide
caugauaguuuguccaagu

SEQ ID NO: 1259087 - RNA, 19 nt, Artificial Sequence
  Description of Artificial Sequence: Synthetic oligonucleotide
uccacuccuuaagcgaccu

SEQ ID NO: 1259088 - RNA, 19 nt, Artificial Sequence
  Description of Artificial Sequence: Synthetic oligonucleotide
agccgggugaugucuauua

SEQ ID NO: 1259089 - RNA, 19 nt, Artificial Sequence
  Description of Artificial Sequence: Synthetic oligonucleotide
gucuauuagucaggauggc

SEQ ID NO: 1259090 - RNA, 19 nt, Artificial Sequence
  Description of Artificial Sequence: Synthetic oligonucleotide
aguuaucaacaaaccacaa

SEQ ID NO: 1259091 - RNA, 19 nt, Artificial Sequence
  Description of Artificial Sequence: Synthetic oligonucleotide
acacaucuugucucgucuu

SEQ ID NO: 1259092 - RNA, 19 nt, Artificial Sequence
  Description of Artificial Sequence: Synthetic oligonucleotide
gaugagcagcgugcgaguc

SEQ ID NO: 1259093 - RNA, 19 nt, Artificial Sequence
  Description of Artificial Sequence: Synthetic oligonucleotide
cuuccuggccagucgcuuc

SEQ ID NO: 1259094 - RNA, 19 nt, Artificial Sequence
  Description of Artificial Sequence: Synthetic oligonucleotide
augacuaucugcagaccau

SEQ ID NO: 1259095 - RNA, 19 nt, Artificial Sequence
  Description of Artificial Sequence: Synthetic oligonucleotide
cauuuguaaucuguguucu

SEQ ID NO: 1259096 - RNA, 19 nt, Artificial Sequence
  Description of Artificial Sequence: Synthetic oligonucleotide
caguuuuggauggccuggc

SEQ ID NO: 1259097 - RNA, 19 nt, Artificial Sequence
  Description of Artificial Sequence: Synthetic oligonucleotide
gggaccacuucauuuguaa

SEQ ID NO: 1259098 - RNA, 19 nt, Artificial Sequence
  Description of Artificial Sequence: Synthetic oligonucleotide
ggguaugaacaguggagga

SEQ ID NO: 1259099 - RNA, 19 nt, Artificial Sequence
  Description of Artificial Sequence: Synthetic oligonucleotide
caggcgcacauugagcauc

SEQ ID NO: 1259100 - RNA, 19 nt, Artificial Sequence
  Description of Artificial Sequence: Synthetic oligonucleotide
gcgaccuuuauuaaaguua

SEQ ID NO: 1259101 - RNA, 19 nt, Artificial Sequence
  Description of Artificial Sequence: Synthetic oligonucleotide
gacagccggacagccagac

SEQ ID NO: 1259102 - RNA, 19 nt, Artificial Sequence
  Description of Artificial Sequence: Synthetic oligonucleotide
uccuagggucccucuucca

SEQ ID NO: 1259103 - RNA, 19 nt, Artificial Sequence
  Description of Artificial Sequence: Synthetic oligonucleotide
cgucuuuccgaaacaacug

SEQ ID NO: 1259104 - RNA, 19 nt, Artificial Sequence
  Description of Artificial Sequence: Synthetic oligonucleotide
gguaugaacaguggaggaa

SEQ ID NO: 1259105 - RNA, 19 nt, Artificial Sequence
  Description of Artificial Sequence: Synthetic oligonucleotide
agccucacucugaucaugu

SEQ ID NO: 1259106 - RNA, 19 nt, Artificial Sequence
  Description of Artificial Sequence: Synthetic oligonucleotide
ucucgucuuaaggccacau

SEQ ID NO: 1259107 - RNA, 19 nt, Artificial Sequence
  Description of Artificial Sequence: Synthetic oligonucleotide
cugcuuguaccuuaacuau

SEQ ID NO: 1259108 - RNA, 19 nt, Artificial Sequence
  Description of Artificial Sequence: Synthetic oligonucleotide
gcccauauagagacccgcg

SEQ ID NO: 1259109 - RNA, 19 nt, Artificial Sequence
  Description of Artificial Sequence: Synthetic oligonucleotide
agagacccgcggcgcuccc

SEQ ID NO: 1259110 - RNA, 19 nt, Artificial Sequence
  Description of Artificial Sequence: Synthetic oligonucleotide
uuccaaccugguguccggc

SEQ ID NO: 1259111 - RNA, 19 nt, Artificial Sequence
  Description of Artificial Sequence: Synthetic oligonucleotide
ccauaggagcugcuggagc

SEQ ID NO: 1259112 - RNA, 19 nt, Artificial Sequence
  Description of Artificial Sequence: Synthetic oligonucleotide
uuccaccccucaugcuuug

SEQ ID NO: 1259113 - RNA, 19 nt, Artificial Sequence
  Description of Artificial Sequence: Synthetic oligonucleotide
uuuggauggccuggccauc

SEQ ID NO: 1259114 - RNA, 19 nt, Artificial Sequence
  Description of Artificial Sequence: Synthetic oligonucleotide
ccuagggucccucuuccac

SEQ ID NO: 1259115 - RNA, 19 nt, Artificial Sequence
  Description of Artificial Sequence: Synthetic oligonucleotide
ugguguccggccccucagu

SEQ ID NO: 1259116 - RNA, 19 nt, Artificial Sequence
  Description of Artificial Sequence: Synthetic oligonucleotide
gcgcacauugagcaucaug

SEQ ID NO: 1259117 - RNA, 19 nt, Artificial Sequence
  Description of Artificial Sequence: Synthetic oligonucleotide
gaugucuauuagucaggau

SEQ ID NO: 1259118 - RNA, 19 nt, Artificial Sequence
  Description of Artificial Sequence: Synthetic oligonucleotide
acagagccgucgcccauau

SEQ ID NO: 1259119 - RNA, 19 nt, Artificial Sequence
  Description of Artificial Sequence: Synthetic oligonucleotide
ugagccgggugaugucuau

SEQ ID NO: 1259120 - RNA, 19 nt, Artificial Sequence
  Description of Artificial Sequence: Synthetic oligonucleotide
gcacaauaggcauaagcau

SEQ ID NO: 1259121 - RNA, 19 nt, Artificial Sequence
  Description of Artificial Sequence: Synthetic oligonucleotide
ccuuuaaaauuaaucugcu

SEQ ID NO: 1259122 - RNA, 19 nt, Artificial Sequence
  Description of Artificial Sequence: Synthetic oligonucleotide
ggccgagcgcgacagccgg

SEQ ID NO: 1259123 - RNA, 19 nt, Artificial Sequence
  Description of Artificial Sequence: Synthetic oligonucleotide
cagcguaugccagauuuaa

SEQ ID NO: 1259124 - RNA, 19 nt, Artificial Sequence
  Description of Artificial Sequence: Synthetic oligonucleotide
uucuucccauugauuccuu

SEQ ID NO: 1259125 - RNA, 19 nt, Artificial Sequence
  Description of Artificial Sequence: Synthetic oligonucleotide
gacuaucugcagaccaucu

SEQ ID NO: 1259126 - RNA, 19 nt, Artificial Sequence
  Description of Artificial Sequence: Synthetic oligonucleotide
aucaaucagcgaggugugu

SEQ ID NO: 1259127 - RNA, 19 nt, Artificial Sequence
  Description of Artificial Sequence: Synthetic oligonucleotide
augccagauuuaaugcaaa

SEQ ID NO: 1259128 - RNA, 19 nt, Artificial Sequence
  Description of Artificial Sequence: Synthetic oligonucleotide
cagccgccaagccaaguca

SEQ ID NO: 1259129 - RNA, 19 nt, Artificial Sequence
  Description of Artificial Sequence: Synthetic oligonucleotide
gaguuuccucguacucuac

SEQ ID NO: 1259130 - RNA, 19 nt, Artificial Sequence
  Description of Artificial Sequence: Synthetic oligonucleotide
uggcuucaguggaucucaa

SEQ ID NO: 1259131 - RNA, 19 nt, Artificial Sequence
  Description of Artificial Sequence: Synthetic oligonucleotide
uucucgucuuaaggccaca

SEQ ID NO: 1259132 - RNA, 19 nt, Artificial Sequence
  Description of Artificial Sequence: Synthetic oligonucleotide
gccgggugaugucuauuag

SEQ ID NO: 1259133 - RNA, 19 nt, Artificial Sequence
  Description of Artificial Sequence: Synthetic oligonucleotide
guccacuccuuaagcgacc

SEQ ID NO: 1259134 - RNA, 19 nt, Artificial Sequence
  Description of Artificial Sequence: Synthetic oligonucleotide
gcagccgccaagccaaguc

SEQ ID NO: 1259135 - RNA, 19 nt, Artificial Sequence
  Description of Artificial Sequence: Synthetic oligonucleotide
gcgagucagccccuugcag

SEQ ID NO: 1259136 - RNA, 19 nt, Artificial Sequence
  Description of Artificial Sequence: Synthetic oligonucleotide
guucacccuucaggaaacc

SEQ ID NO: 1259137 - RNA, 19 nt, Artificial Sequence
  Description of Artificial Sequence: Synthetic oligonucleotide
acuccuuaagcgaccuuua

SEQ ID NO: 1259138 - RNA, 19 nt, Artificial Sequence
  Description of Artificial Sequence: Synthetic oligonucleotide
aaccugguguccggccccu

SEQ ID NO: 1259139 - RNA, 19 nt, Artificial Sequence
  Description of Artificial Sequence: Synthetic oligonucleotide
ccacgauguagagguaggg

SEQ ID NO: 1259140 - RNA, 19 nt, Artificial Sequence
  Description of Artificial Sequence: Synthetic oligonucleotide
gccauaggagcugcuggag

SEQ ID NO: 1259141 - RNA, 19 nt, Artificial Sequence
  Description of Artificial Sequence: Synthetic oligonucleotide
agcguaugccagauuuaau

SEQ ID NO: 1259142 - RNA, 19 nt, Artificial Sequence
  Description of Artificial Sequence: Synthetic oligonucleotide
uccaccccucaugcuuugc

SEQ ID NO: 1259143 - RNA, 19 nt, Artificial Sequence
  Description of Artificial Sequence: Synthetic oligonucleotide
gcuucucgucuuaaggcca

SEQ ID NO: 1259144 - RNA, 19 nt, Artificial Sequence
  Description of Artificial Sequence: Synthetic oligonucleotide
caguuccaaccuggugucc

SEQ ID NO: 1259145 - RNA, 19 nt, Artificial Sequence
  Description of Artificial Sequence: Synthetic oligonucleotide
aggcgcacauugagcauca

SEQ ID NO: 1259146 - RNA, 19 nt, Artificial Sequence
  Description of Artificial Sequence: Synthetic oligonucleotide
caggaacugaauggcugca

SEQ ID NO: 1259147 - RNA, 19 nt, Artificial Sequence
  Description of Artificial Sequence: Synthetic oligonucleotide
gugcgucuuuccgaaacaa

SEQ ID NO: 1259148 - RNA, 19 nt, Artificial Sequence
  Description of Artificial Sequence: Synthetic oligonucleotide
cccgacagagccgucgccc

SEQ ID NO: 1259149 - RNA, 19 nt, Artificial Sequence
  Description of Artificial Sequence: Synthetic oligonucleotide
cacuccuuaagcgaccuuu

SEQ ID NO: 1259150 - RNA, 19 nt, Artificial Sequence
  Description of Artificial Sequence: Synthetic oligonucleotide
gacagagccgucgcccaua

SEQ ID NO: 1259151 - RNA, 19 nt, Artificial Sequence
  Description of Artificial Sequence: Synthetic oligonucleotide
cgagucagccccuugcaga

SEQ ID NO: 1259152 - RNA, 19 nt, Artificial Sequence
  Description of Artificial Sequence: Synthetic oligonucleotide
cagugaccucaugacuauc

SEQ ID NO: 1259153 - RNA, 19 nt, Artificial Sequence
  Description of Artificial Sequence: Synthetic oligonucleotide
ccuuaacuauggcaucaga

SEQ ID NO: 1259154 - RNA, 19 nt, Artificial Sequence
  Description of Artificial Sequence: Synthetic oligonucleotide
agccgccaagccaagucaa

SEQ ID NO: 1259155 - RNA, 19 nt, Artificial Sequence
  Description of Artificial Sequence: Synthetic oligonucleotide
cagcuggcacagcucaaaa

SEQ ID NO: 1259156 - RNA, 19 nt, Artificial Sequence
  Description of Artificial Sequence: Synthetic oligonucleotide
gcggccgagcgcgacagcc

SEQ ID NO: 1259157 - RNA, 19 nt, Artificial Sequence
  Description of Artificial Sequence: Synthetic oligonucleotide
agcccauggcauaguaauu

SEQ ID NO: 1259158 - RNA, 19 nt, Artificial Sequence
  Description of Artificial Sequence: Synthetic oligonucleotide
ccauccugacacccaggac

SEQ ID NO: 1259159 - RNA, 19 nt, Artificial Sequence
  Description of Artificial Sequence: Synthetic oligonucleotide
ggaccacuucauuuguaau

SEQ ID NO: 1259160 - RNA, 19 nt, Artificial Sequence
  Description of Artificial Sequence: Synthetic oligonucleotide
caaguccuagggucccucu

SEQ ID NO: 1259161 - RNA, 19 nt, Artificial Sequence
  Description of Artificial Sequence: Synthetic oligonucleotide
gccccuugcagaagacccc

SEQ ID NO: 1259162 - RNA, 19 nt, Artificial Sequence
  Description of Artificial Sequence: Synthetic oligonucleotide
gcagaccaucugaaggaga

SEQ ID NO: 1259163 - RNA, 19 nt, Artificial Sequence
  Description of Artificial Sequence: Synthetic oligonucleotide
caauaggcauaagcauaua

SEQ ID NO: 1259164 - RNA, 19 nt, Artificial Sequence
  Description of Artificial Sequence: Synthetic oligonucleotide
cgcccauauagagacccgc

SEQ ID NO: 1259165 - RNA, 19 nt, Artificial Sequence
  Description of Artificial Sequence: Synthetic oligonucleotide
ggcgcucccacugccccgc

SEQ ID NO: 1259166 - RNA, 19 nt, Artificial Sequence
  Description of Artificial Sequence: Synthetic oligonucleotide
cgccaagccaagucaaaga

SEQ ID NO: 1259167 - RNA, 19 nt, Artificial Sequence
  Description of Artificial Sequence: Synthetic oligonucleotide
ccugugacuuuccaucagu

SEQ ID NO: 1259168 - RNA, 19 nt, Artificial Sequence
  Description of Artificial Sequence: Synthetic oligonucleotide
gcacuuaguuguucacccu

SEQ ID NO: 1259169 - RNA, 19 nt, Artificial Sequence
  Description of Artificial Sequence: Synthetic oligonucleotide
gccgucgcccauauagaga

SEQ ID NO: 1259170 - RNA, 19 nt, Artificial Sequence
  Description of Artificial Sequence: Synthetic oligonucleotide
ccauaggagcgggcggcgg

SEQ ID NO: 1259171 - RNA, 19 nt, Artificial Sequence
  Description of Artificial Sequence: Synthetic oligonucleotide
gcaaguccuagggucccuc

SEQ ID NO: 1259172 - RNA, 19 nt, Artificial Sequence
  Description of Artificial Sequence: Synthetic oligonucleotide
cugcaucaaucagcgaggu

SEQ ID NO: 1259173 - RNA, 19 nt, Artificial Sequence
  Description of Artificial Sequence: Synthetic oligonucleotide
aagccacgauguagaggua

SEQ ID NO: 1259174 - RNA, 19 nt, Artificial Sequence
  Description of Artificial Sequence: Synthetic oligonucleotide
gagcgggcggcggccgagc

SEQ ID NO: 1259175 - RNA, 19 nt, Artificial Sequence
  Description of Artificial Sequence: Synthetic oligonucleotide
ccuccuugugaccucuuua

SEQ ID NO: 1259176 - RNA, 19 nt, Artificial Sequence
  Description of Artificial Sequence: Synthetic oligonucleotide
ccucaguuuuggauggccu

SEQ ID NO: 1259177 - RNA, 19 nt, Artificial Sequence
  Description of Artificial Sequence: Synthetic oligonucleotide
ccgggugaugucuauuagu

SEQ ID NO: 1259178 - RNA, 19 nt, Artificial Sequence
  Description of Artificial Sequence: Synthetic oligonucleotide
caaugccauaggagcugcu

SEQ ID NO: 1259179 - RNA, 19 nt, Artificial Sequence
  Description of Artificial Sequence: Synthetic oligonucleotide
gagcagcgugcgagucagc

SEQ ID NO: 1259180 - RNA, 19 nt, Artificial Sequence
  Description of Artificial Sequence: Synthetic oligonucleotide
cacucugaucauguuucau

SEQ ID NO: 1259181 - RNA, 19 nt, Artificial Sequence
  Description of Artificial Sequence: Synthetic oligonucleotide
gugagccgggugaugucua

SEQ ID NO: 1259182 - RNA, 19 nt, Artificial Sequence
  Description of Artificial Sequence: Synthetic oligonucleotide
ccgacagagccgucgccca

SEQ ID NO: 1259183 - RNA, 19 nt, Artificial Sequence
  Description of Artificial Sequence: Synthetic oligonucleotide
ccggacagccagacccgac

SEQ ID NO: 1259184 - RNA, 19 nt, Artificial Sequence
  Description of Artificial Sequence: Synthetic oligonucleotide
ccgagcgcgacagccggac

SEQ ID NO: 1259185 - RNA, 19 nt, Artificial Sequence
  Description of Artificial Sequence: Synthetic oligonucleotide
gcagcguaugccagauuua

SEQ ID NO: 1259186 - RNA, 19 nt, Artificial Sequence
  Description of Artificial Sequence: Synthetic oligonucleotide
gcgcgacagccggacagcc

SEQ ID NO: 1259187 - RNA, 19 nt, Artificial Sequence
  Description of Artificial Sequence: Synthetic oligonucleotide
agcgugcgagucagccccu

SEQ ID NO: 1259188 - RNA, 19 nt, Artificial Sequence
  Description of Artificial Sequence: Synthetic oligonucleotide
ggcuucaguggaucucaau

SEQ ID NO: 1259189 - RNA, 19 nt, Artificial Sequence
  Description of Artificial Sequence: Synthetic oligonucleotide
cggccgagcgcgacagccg

SEQ ID NO: 1259190 - RNA, 19 nt, Artificial Sequence
  Description of Artificial Sequence: Synthetic oligonucleotide
cuauggcaucagacuugcu

SEQ ID NO: 1259191 - RNA, 19 nt, Artificial Sequence
  Description of Artificial Sequence: Synthetic oligonucleotide
cgucgcccauauagagacc

SEQ ID NO: 1259192 - RNA, 19 nt, Artificial Sequence
  Description of Artificial Sequence: Synthetic oligonucleotide
gcugcagcguaugccagau

SEQ ID NO: 1259193 - RNA, 19 nt, Artificial Sequence
  Description of Artificial Sequence: Synthetic oligonucleotide
cgucuuaaggccacaugau

SEQ ID NO: 1259194 - RNA, 19 nt, Artificial Sequence
  Description of Artificial Sequence: Synthetic oligonucleotide
ccagugaccucaugacuau

SEQ ID NO: 1259195 - RNA, 19 nt, Artificial Sequence
  Description of Artificial Sequence: Synthetic oligonucleotide
guaccugcaggcgcacauu

SEQ ID NO: 1259196 - RNA, 19 nt, Artificial Sequence
  Description of Artificial Sequence: Synthetic oligonucleotide
ccagacccgacagagccgu

SEQ ID NO: 1259197 - RNA, 19 nt, Artificial Sequence
  Description of Artificial Sequence: Synthetic oligonucleotide
gagccgggugaugucuauu

SEQ ID NO: 1259198 - RNA, 19 nt, Artificial Sequence
  Description of Artificial Sequence: Synthetic oligonucleotide
cgcggcgcucccacugccc

SEQ ID NO: 1259199 - RNA, 19 nt, Artificial Sequence
  Description of Artificial Sequence: Synthetic oligonucleotide
gccgccaagccaagucaaa

SEQ ID NO: 1259200 - RNA, 19 nt, Artificial Sequence
  Description of Artificial Sequence: Synthetic oligonucleotide
ggggagggaccacuucauu

SEQ ID NO: 1259201 - RNA, 19 nt, Artificial Sequence
  Description of Artificial Sequence: Synthetic oligonucleotide
gccggacagccagacccga

SEQ ID NO: 1259202 - RNA, 19 nt, Artificial Sequence
  Description of Artificial Sequence: Synthetic oligonucleotide
gacccgcggcgcucccacu

SEQ ID NO: 1259203 - RNA, 19 nt, Artificial Sequence
  Description of Artificial Sequence: Synthetic oligonucleotide
cgcccgcccucccucuccg

SEQ ID NO: 1259204 - RNA, 19 nt, Artificial Sequence
  Description of Artificial Sequence: Synthetic oligonucleotide
gcaugaggucagccucacu

SEQ ID NO: 1259205 - RNA, 19 nt, Artificial Sequence
  Description of Artificial Sequence: Synthetic oligonucleotide
cugaugcagugagccgggu

SEQ ID NO: 1259206 - RNA, 19 nt, Artificial Sequence
  Description of Artificial Sequence: Synthetic oligonucleotide
cgcgacagccggacagcca

SEQ ID NO: 1259207 - RNA, 19 nt, Artificial Sequence
  Description of Artificial Sequence: Synthetic oligonucleotide
gcgcucccacugccccgcc

SEQ ID NO: 1259208 - RNA, 19 nt, Artificial Sequence
  Description of Artificial Sequence: Synthetic oligonucleotide
cugcagcguaugccagauu

SEQ ID NO: 1259209 - RNA, 19 nt, Artificial Sequence
  Description of Artificial Sequence: Synthetic oligonucleotide
gccgagcgcgacagccgga

SEQ ID NO: 1259210 - RNA, 19 nt, Artificial Sequence
  Description of Artificial Sequence: Synthetic oligonucleotide
cgacagccggacagccaga

SEQ ID NO: 1259211 - RNA, 19 nt, Artificial Sequence
  Description of Artificial Sequence: Synthetic oligonucleotide
cgagcgcgacagccggaca

SEQ ID NO: 1259212 - RNA, 19 nt, Artificial Sequence
  Description of Artificial Sequence: Synthetic oligonucleotide
gcgugcgagucagccccuu

SEQ ID NO: 1259213 - RNA, 19 nt, Artificial Sequence
  Description of Artificial Sequence: Synthetic oligonucleotide
guagcagagauccagaucg

SEQ ID NO: 1259214 - RNA, 19 nt, Artificial Sequence
  Description of Artificial Sequence: Synthetic oligonucleotide
aaucacgagacuuauagca

SEQ ID NO: 1259215 - RNA, 19 nt, Artificial Sequence
  Description of Artificial Sequence: Synthetic oligonucleotide
aacucugguauacaaggcc

SEQ ID NO: 1259216 - RNA, 19 nt, Artificial Sequence
  Description of Artificial Sequence: Synthetic oligonucleotide
aagcuaauaaucacgagac

SEQ ID NO: 1259217 - RNA, 19 nt, Artificial Sequence
  Description of Artificial Sequence: Synthetic oligonucleotide
auuauguaauuacagauga

SEQ ID NO: 1259218 - RNA, 19 nt, Artificial Sequence
  Description of Artificial Sequence: Synthetic oligonucleotide
augaguggcacucaaggcc

SEQ ID NO: 1259219 - RNA, 19 nt, Artificial Sequence
  Description of Artificial Sequence: Synthetic oligonucleotide
cuuaaggagagcuucacag

SEQ ID NO: 1259220 - RNA, 19 nt, Artificial Sequence
  Description of Artificial Sequence: Synthetic oligonucleotide
ugaacuaacacagauggug

SEQ ID NO: 1259221 - RNA, 19 nt, Artificial Sequence
  Description of Artificial Sequence: Synthetic oligonucleotide
uggauuucccaucuuacgg

SEQ ID NO: 1259222 - RNA, 19 nt, Artificial Sequence
  Description of Artificial Sequence: Synthetic oligonucleotide
uuagagaugagauucggcu

SEQ ID NO: 1259223 - RNA, 19 nt, Artificial Sequence
  Description of Artificial Sequence: Synthetic oligonucleotide
uauacaaggcccuggagag

SEQ ID NO: 1259224 - RNA, 19 nt, Artificial Sequence
  Description of Artificial Sequence: Synthetic oligonucleotide
auauauucuagacgccucc

SEQ ID NO: 1259225 - RNA, 19 nt, Artificial Sequence
  Description of Artificial Sequence: Synthetic oligonucleotide
gaagcuaauaaucacgaga

SEQ ID NO: 1259226 - RNA, 19 nt, Artificial Sequence
  Description of Artificial Sequence: Synthetic oligonucleotide
aagugggaaagguagaaga

SEQ ID NO: 1259227 - RNA, 19 nt, Artificial Sequence
  Description of Artificial Sequence: Synthetic oligonucleotide
aucuuacggagacaggucc

SEQ ID NO: 1259228 - RNA, 19 nt, Artificial Sequence
  Description of Artificial Sequence: Synthetic oligonucleotide
agacuuauagcagagaugu

SEQ ID NO: 1259229 - RNA, 19 nt, Artificial Sequence
  Description of Artificial Sequence: Synthetic oligonucleotide
cuaugaguggcacucaagg

SEQ ID NO: 1259230 - RNA, 19 nt, Artificial Sequence
  Description of Artificial Sequence: Synthetic oligonucleotide
guagacaccgacuugcuag

SEQ ID NO: 1259231 - RNA, 19 nt, Artificial Sequence
  Description of Artificial Sequence: Synthetic oligonucleotide
uacccagcaacauagcuag

SEQ ID NO: 1259232 - RNA, 19 nt, Artificial Sequence
  Description of Artificial Sequence: Synthetic oligonucleotide
gauuauguaauuacagaug

SEQ ID NO: 1259233 - RNA, 19 nt, Artificial Sequence
  Description of Artificial Sequence: Synthetic oligonucleotide
ucacuuaaggcuuugguau

SEQ ID NO: 1259234 - RNA, 19 nt, Artificial Sequence
  Description of Artificial Sequence: Synthetic oligonucleotide
uuucuaaguacaguggaag

SEQ ID NO: 1259235 - RNA, 19 nt, Artificial Sequence
  Description of Artificial Sequence: Synthetic oligonucleotide
agaccaaguggcuucuucc

SEQ ID NO: 1259236 - RNA, 19 nt, Artificial Sequence
  Description of Artificial Sequence: Synthetic oligonucleotide
acuggcuaaacucacuaag

SEQ ID NO: 1259237 - RNA, 19 nt, Artificial Sequence
  Description of Artificial Sequence: Synthetic oligonucleotide
agguggguagcagagaucc

SEQ ID NO: 1259238 - RNA, 19 nt, Artificial Sequence
  Description of Artificial Sequence: Synthetic oligonucleotide
ugccgauauauucuagacg

SEQ ID NO: 1259239 - RNA, 19 nt, Artificial Sequence
  Description of Artificial Sequence: Synthetic oligonucleotide
ugggaauuagagaugagau

SEQ ID NO: 1259240 - RNA, 19 nt, Artificial Sequence
  Description of Artificial Sequence: Synthetic oligonucleotide
uuucguagccuuuuaguug

SEQ ID NO: 1259241 - RNA, 19 nt, Artificial Sequence
  Description of Artificial Sequence: Synthetic oligonucleotide
gccgauauauucuagacgc

SEQ ID NO: 1259242 - RNA, 19 nt, Artificial Sequence
  Description of Artificial Sequence: Synthetic oligonucleotide
gaacuaacacagauggugg

SEQ ID NO: 1259243 - RNA, 19 nt, Artificial Sequence
  Description of Artificial Sequence: Synthetic oligonucleotide
ugagauucggcugagcagc

SEQ ID NO: 1259244 - RNA, 19 nt, Artificial Sequence
  Description of Artificial Sequence: Synthetic oligonucleotide
uucuaagugugucuugagc

SEQ ID NO: 1259245 - RNA, 19 nt, Artificial Sequence
  Description of Artificial Sequence: Synthetic oligonucleotide
aggaggagcucccuaaaac

SEQ ID NO: 1259246 - RNA, 19 nt, Artificial Sequence
  Description of Artificial Sequence: Synthetic oligonucleotide
uggcuaaacucacuaagug

SEQ ID NO: 1259247 - RNA, 19 nt, Artificial Sequence
  Description of Artificial Sequence: Synthetic oligonucleotide
gaugagauucggcugagca

SEQ ID NO: 1259248 - RNA, 19 nt, Artificial Sequence
  Description of Artificial Sequence: Synthetic oligonucleotide
uaaguacaguggaagagac

SEQ ID NO: 1259249 - RNA, 19 nt, Artificial Sequence
  Description of Artificial Sequence: Synthetic oligonucleotide
uucguagccuuuuaguugu

SEQ ID NO: 1259250 - RNA, 19 nt, Artificial Sequence
  Description of Artificial Sequence: Synthetic oligonucleotide
auagcuugaaggcuggcca

SEQ ID NO: 1259251 - RNA, 19 nt, Artificial Sequence
  Description of Artificial Sequence: Synthetic oligonucleotide
cuuuuaguugugaccaggc

SEQ ID NO: 1259252 - RNA, 19 nt, Artificial Sequence
  Description of Artificial Sequence: Synthetic oligonucleotide
aaacccuucuaaguguguc

SEQ ID NO: 1259253 - RNA, 19 nt, Artificial Sequence
  Description of Artificial Sequence: Synthetic oligonucleotide
uauucuagacgccuccaga

SEQ ID NO: 1259254 - RNA, 19 nt, Artificial Sequence
  Description of Artificial Sequence: Synthetic oligonucleotide
agugcuaggguuugcagca

SEQ ID NO: 1259255 - RNA, 19 nt, Artificial Sequence
  Description of Artificial Sequence: Synthetic oligonucleotide
ucuagacgccuccagaagu

SEQ ID NO: 1259256 - RNA, 19 nt, Artificial Sequence
  Description of Artificial Sequence: Synthetic oligonucleotide
agagaugagauucggcuga

SEQ ID NO: 1259257 - RNA, 19 nt, Artificial Sequence
  Description of Artificial Sequence: Synthetic oligonucleotide
auuagagaugagauucggc

SEQ ID NO: 1259258 - RNA, 19 nt, Artificial Sequence
  Description of Artificial Sequence: Synthetic oligonucleotide
agagcagugcucucugugg

SEQ ID NO: 1259259 - RNA, 19 nt, Artificial Sequence
  Description of Artificial Sequence: Synthetic oligonucleotide
acuggcuauccauuccagc

SEQ ID NO: 1259260 - RNA, 19 nt, Artificial Sequence
  Description of Artificial Sequence: Synthetic oligonucleotide
ugauuuugggccucccucc

SEQ ID NO: 1259261 - RNA, 19 nt, Artificial Sequence
  Description of Artificial Sequence: Synthetic oligonucleotide
uugggaauuagagaugaga

SEQ ID NO: 1259262 - RNA, 19 nt, Artificial Sequence
  Description of Artificial Sequence: Synthetic oligonucleotide
gaaagguagaagaaaacaa

SEQ ID NO: 1259263 - RNA, 19 nt, Artificial Sequence
  Description of Artificial Sequence: Synthetic oligonucleotide
uucuaaguacaguggaaga

SEQ ID NO: 1259264 - RNA, 19 nt, Artificial Sequence
  Description of Artificial Sequence: Synthetic oligonucleotide
acaccgacuugcuagcagg

SEQ ID NO: 1259265 - RNA, 19 nt, Artificial Sequence
  Description of Artificial Sequence: Synthetic oligonucleotide
aaacucacuaagugcuucu

SEQ ID NO: 1259266 - RNA, 19 nt, Artificial Sequence
  Description of Artificial Sequence: Synthetic oligonucleotide
gcugcagucaaguagagca

SEQ ID NO: 1259267 - RNA, 19 nt, Artificial Sequence
  Description of Artificial Sequence: Synthetic oligonucleotide
guggaagagaccaaguggc

SEQ ID NO: 1259268 - RNA, 19 nt, Artificial Sequence
  Description of Artificial Sequence: Synthetic oligonucleotide
aggaaccaucucuauugcc

SEQ ID NO: 1259269 - RNA, 19 nt, Artificial Sequence
  Description of Artificial Sequence: Synthetic oligonucleotide
uccguuccaaucuuuucag

SEQ ID NO: 1259270 - RNA, 19 nt, Artificial Sequence
  Description of Artificial Sequence: Synthetic oligonucleotide
aacuaacacagauggugga

SEQ ID NO: 1259271 - RNA, 19 nt, Artificial Sequence
  Description of Artificial Sequence: Synthetic oligonucleotide
acuaacacagaugguggac

SEQ ID NO: 1259272 - RNA, 19 nt, Artificial Sequence
  Description of Artificial Sequence: Synthetic oligonucleotide
guggauuucccaucuuacg

SEQ ID NO: 1259273 - RNA, 19 nt, Artificial Sequence
  Description of Artificial Sequence: Synthetic oligonucleotide
ucccuaaaacccuucuaag

SEQ ID NO: 1259274 - RNA, 19 nt, Artificial Sequence
  Description of Artificial Sequence: Synthetic oligonucleotide
uuaaggagagcuucacagu

SEQ ID NO: 1259275 - RNA, 19 nt, Artificial Sequence
  Description of Artificial Sequence: Synthetic oligonucleotide
aagacacuggcuaaacuca

SEQ ID NO: 1259276 - RNA, 19 nt, Artificial Sequence
  Description of Artificial Sequence: Synthetic oligonucleotide
uaaucacgagacuuauagc

SEQ ID NO: 1259277 - RNA, 19 nt, Artificial Sequence
  Description of Artificial Sequence: Synthetic oligonucleotide
aguauggcaguucuuuagu

SEQ ID NO: 1259278 - RNA, 19 nt, Artificial Sequence
  Description of Artificial Sequence: Synthetic oligonucleotide
uauggcaguucuuuaguuc

SEQ ID NO: 1259279 - RNA, 19 nt, Artificial Sequence
  Description of Artificial Sequence: Synthetic oligonucleotide
augagauucggcugagcag

SEQ ID NO: 1259280 - RNA, 19 nt, Artificial Sequence
  Description of Artificial Sequence: Synthetic oligonucleotide
aaguacaguggaagagacc

SEQ ID NO: 1259281 - RNA, 19 nt, Artificial Sequence
  Description of Artificial Sequence: Synthetic oligonucleotide
auauucuagacgccuccag

SEQ ID NO: 1259282 - RNA, 19 nt, Artificial Sequence
  Description of Artificial Sequence: Synthetic oligonucleotide
ucacgagacuuauagcaga

SEQ ID NO: 1259283 - RNA, 19 nt, Artificial Sequence
  Description of Artificial Sequence: Synthetic oligonucleotide
ugcacacuaaggaggaagu

SEQ ID NO: 1259284 - RNA, 19 nt, Artificial Sequence
  Description of Artificial Sequence: Synthetic oligonucleotide
agagacagacgagaacccc

SEQ ID NO: 1259285 - RNA, 19 nt, Artificial Sequence
  Description of Artificial Sequence: Synthetic oligonucleotide
cuugcuagcaggcgcuugg

SEQ ID NO: 1259286 - RNA, 19 nt, Artificial Sequence
  Description of Artificial Sequence: Synthetic oligonucleotide
uugccgauauauucuagac

SEQ ID NO: 1259287 - RNA, 19 nt, Artificial Sequence
  Description of Artificial Sequence: Synthetic oligonucleotide
caaguaauguucugcagca

SEQ ID NO: 1259288 - RNA, 19 nt, Artificial Sequence
  Description of Artificial Sequence: Synthetic oligonucleotide
auccagaucgggcaguaug

SEQ ID NO: 1259289 - RNA, 19 nt, Artificial Sequence
  Description of Artificial Sequence: Synthetic oligonucleotide
agacacaacucugguauac

SEQ ID NO: 1259290 - RNA, 19 nt, Artificial Sequence
  Description of Artificial Sequence: Synthetic oligonucleotide
aacccuucuaagugugucu

SEQ ID NO: 1259291 - RNA, 19 nt, Artificial Sequence
  Description of Artificial Sequence: Synthetic oligonucleotide
gauagcuugaaggcuggcc

SEQ ID NO: 1259292 - RNA, 19 nt, Artificial Sequence
  Description of Artificial Sequence: Synthetic oligonucleotide
uccauuccagcccacgacu

SEQ ID NO: 1259293 - RNA, 19 nt, Artificial Sequence
  Description of Artificial Sequence: Synthetic oligonucleotide
agcucaaacagguuucuaa

SEQ ID NO: 1259294 - RNA, 19 nt, Artificial Sequence
  Description of Artificial Sequence: Synthetic oligonucleotide
ucuuacggagacagguccc

SEQ ID NO: 1259295 - RNA, 19 nt, Artificial Sequence
  Description of Artificial Sequence: Synthetic oligonucleotide
agucacuuaaggcuuuggu

SEQ ID NO: 1259296 - RNA, 19 nt, Artificial Sequence
  Description of Artificial Sequence: Synthetic oligonucleotide
caguauggcaguucuuuag

SEQ ID NO: 1259297 - RNA, 19 nt, Artificial Sequence
  Description of Artificial Sequence: Synthetic oligonucleotide
uguacccaccuucaaggcu

SEQ ID NO: 1259298 - RNA, 19 nt, Artificial Sequence
  Description of Artificial Sequence: Synthetic oligonucleotide
ugguauacaaggcccugga

SEQ ID NO: 1259299 - RNA, 19 nt, Artificial Sequence
  Description of Artificial Sequence: Synthetic oligonucleotide
aaagcaucuggggcucggc

SEQ ID NO: 1259300 - RNA, 19 nt, Artificial Sequence
  Description of Artificial Sequence: Synthetic oligonucleotide
ugccacaucaggccaacac

SEQ ID NO: 1259301 - RNA, 19 nt, Artificial Sequence
  Description of Artificial Sequence: Synthetic oligonucleotide
auucuagacgccuccagaa

SEQ ID NO: 1259302 - RNA, 19 nt, Artificial Sequence
  Description of Artificial Sequence: Synthetic oligonucleotide
ggcuaaacucacuaagugc

SEQ ID NO: 1259303 - RNA, 19 nt, Artificial Sequence
  Description of Artificial Sequence: Synthetic oligonucleotide
aagauagcuugaaggcugg

SEQ ID NO: 1259304 - RNA, 19 nt, Artificial Sequence
  Description of Artificial Sequence: Synthetic oligonucleotide
gguaaaaggaaccaucucu

SEQ ID NO: 1259305 - RNA, 19 nt, Artificial Sequence
  Description of Artificial Sequence: Synthetic oligonucleotide
uccucacauacagucaaag

SEQ ID NO: 1259306 - RNA, 19 nt, Artificial Sequence
  Description of Artificial Sequence: Synthetic oligonucleotide
agaagauagcuugaaggcu

SEQ ID NO: 1259307 - RNA, 19 nt, Artificial Sequence
  Description of Artificial Sequence: Synthetic oligonucleotide
uguaucagcgccgcugcag

SEQ ID NO: 1259308 - RNA, 19 nt, Artificial Sequence
  Description of Artificial Sequence: Synthetic oligonucleotide
agaucgggcaguauggcag

SEQ ID NO: 1259309 - RNA, 19 nt, Artificial Sequence
  Description of Artificial Sequence: Synthetic oligonucleotide
agaugguccacaggagccc

SEQ ID NO: 1259310 - RNA, 19 nt, Artificial Sequence
  Description of Artificial Sequence: Synthetic oligonucleotide
gauauauucuagacgccuc

SEQ ID NO: 1259311 - RNA, 19 nt, Artificial Sequence
  Description of Artificial Sequence: Synthetic oligonucleotide
acggagacagguccccagc

SEQ ID NO: 1259312 - RNA, 19 nt, Artificial Sequence
  Description of Artificial Sequence: Synthetic oligonucleotide
ggaggagcucccuaaaacc

SEQ ID NO: 1259313 - RNA, 19 nt, Artificial Sequence
  Description of Artificial Sequence: Synthetic oligonucleotide
uaauaaucacgagacuuau

SEQ ID NO: 1259314 - RNA, 19 nt, Artificial Sequence
  Description of Artificial Sequence: Synthetic oligonucleotide
guagccuuuuaguugugac

SEQ ID NO: 1259315 - RNA, 19 nt, Artificial Sequence
  Description of Artificial Sequence: Synthetic oligonucleotide
agcagagauguuccaaacu

SEQ ID NO: 1259316 - RNA, 19 nt, Artificial Sequence
  Description of Artificial Sequence: Synthetic oligonucleotide
guugccgauauauucuaga

SEQ ID NO: 1259317 - RNA, 19 nt, Artificial Sequence
  Description of Artificial Sequence: Synthetic oligonucleotide
cacgagacuuauagcagag

SEQ ID NO: 1259318 - RNA, 19 nt, Artificial Sequence
  Description of Artificial Sequence: Synthetic oligonucleotide
uagacaccgacuugcuagc

SEQ ID NO: 1259319 - RNA, 19 nt, Artificial Sequence
  Description of Artificial Sequence: Synthetic oligonucleotide
acucaaggccucaaccagc

SEQ ID NO: 1259320 - RNA, 19 nt, Artificial Sequence
  Description of Artificial Sequence: Synthetic oligonucleotide
uauauucuagacgccucca

SEQ ID NO: 1259321 - RNA, 19 nt, Artificial Sequence
  Description of Artificial Sequence: Synthetic oligonucleotide
aggaagcuaauaaucacga

SEQ ID NO: 1259322 - RNA, 19 nt, Artificial Sequence
  Description of Artificial Sequence: Synthetic oligonucleotide
uaaacucacuaagugcuuc

SEQ ID NO: 1259323 - RNA, 19 nt, Artificial Sequence
  Description of Artificial Sequence: Synthetic oligonucleotide
gguuguacccaccuucaag

SEQ ID NO: 1259324 - RNA, 19 nt, Artificial Sequence
  Description of Artificial Sequence: Synthetic oligonucleotide
uuaaggcuuugguauccug

SEQ ID NO: 1259325 - RNA, 19 nt, Artificial Sequence
  Description of Artificial Sequence: Synthetic oligonucleotide
cacucaaggccucaaccag

SEQ ID NO: 1259326 - RNA, 19 nt, Artificial Sequence
  Description of Artificial Sequence: Synthetic oligonucleotide
cacgacuaagcagagcagc

SEQ ID NO: 1259327 - RNA, 19 nt, Artificial Sequence
  Description of Artificial Sequence: Synthetic oligonucleotide
cuagacgccuccagaagug

SEQ ID NO: 1259328 - RNA, 19 nt, Artificial Sequence
  Description of Artificial Sequence: Synthetic oligonucleotide
gacaccgacuugcuagcag

SEQ ID NO: 1259329 - RNA, 19 nt, Artificial Sequence
  Description of Artificial Sequence: Synthetic oligonucleotide
uguguacaccugaacuaac

SEQ ID NO: 1259330 - RNA, 19 nt, Artificial Sequence
  Description of Artificial Sequence: Synthetic oligonucleotide
guacccaccuucaaggcug

SEQ ID NO: 1259331 - RNA, 19 nt, Artificial Sequence
  Description of Artificial Sequence: Synthetic oligonucleotide
aucacgagacuuauagcag

SEQ ID NO: 1259332 - RNA, 19 nt, Artificial Sequence
  Description of Artificial Sequence: Synthetic oligonucleotide
acaaggacgucuugggaau

SEQ ID NO: 1259333 - RNA, 19 nt, Artificial Sequence
  Description of Artificial Sequence: Synthetic oligonucleotide
uuguacccaccuucaaggc

SEQ ID NO: 1259334 - RNA, 19 nt, Artificial Sequence
  Description of Artificial Sequence: Synthetic oligonucleotide
cuaagugugucuugagcca

SEQ ID NO: 1259335 - RNA, 19 nt, Artificial Sequence
  Description of Artificial Sequence: Synthetic oligonucleotide
uagcagagauccagaucgg

SEQ ID NO: 1259336 - RNA, 19 nt, Artificial Sequence
  Description of Artificial Sequence: Synthetic oligonucleotide
agagauguuccaaacuccu

SEQ ID NO: 1259337 - RNA, 19 nt, Artificial Sequence
  Description of Artificial Sequence: Synthetic oligonucleotide
agcuccuggaaacaaggaa

SEQ ID NO: 1259338 - RNA, 19 nt, Artificial Sequence
  Description of Artificial Sequence: Synthetic oligonucleotide
cagaugguggacacacgcc

SEQ ID NO: 1259339 - RNA, 19 nt, Artificial Sequence
  Description of Artificial Sequence: Synthetic oligonucleotide
caggccaacacuucugcuc

SEQ ID NO: 1259340 - RNA, 19 nt, Artificial Sequence
  Description of Artificial Sequence: Synthetic oligonucleotide
gucacuuaaggcuuuggua

SEQ ID NO: 1259341 - RNA, 19 nt, Artificial Sequence
  Description of Artificial Sequence: Synthetic oligonucleotide
uuuugggccucccuccaaa

SEQ ID NO: 1259342 - RNA, 19 nt, Artificial Sequence
  Description of Artificial Sequence: Synthetic oligonucleotide
ucggcuugccuguaucagc

SEQ ID NO: 1259343 - RNA, 19 nt, Artificial Sequence
  Description of Artificial Sequence: Synthetic oligonucleotide
gagcucaagacacuggcua

SEQ ID NO: 1259344 - RNA, 19 nt, Artificial Sequence
  Description of Artificial Sequence: Synthetic oligonucleotide
uagcagagauguuccaaac

SEQ ID NO: 1259345 - RNA, 19 nt, Artificial Sequence
  Description of Artificial Sequence: Synthetic oligonucleotide
cagcccacgacuaagcaga

SEQ ID NO: 1259346 - RNA, 19 nt, Artificial Sequence
  Description of Artificial Sequence: Synthetic oligonucleotide
uggaagagaccaaguggcu

SEQ ID NO: 1259347 - RNA, 19 nt, Artificial Sequence
  Description of Artificial Sequence: Synthetic oligonucleotide
ugucgccucagagacagac

SEQ ID NO: 1259348 - RNA, 19 nt, Artificial Sequence
  Description of Artificial Sequence: Synthetic oligonucleotide
agcagguccaaguaauguu

SEQ ID NO: 1259349 - RNA, 19 nt, Artificial Sequence
  Description of Artificial Sequence: Synthetic oligonucleotide
guaucagcgccgcugcagc

SEQ ID NO: 1259350 - RNA, 19 nt, Artificial Sequence
  Description of Artificial Sequence: Synthetic oligonucleotide
uacggagacagguccccag

SEQ ID NO: 1259351 - RNA, 19 nt, Artificial Sequence
  Description of Artificial Sequence: Synthetic oligonucleotide
acacaacucugguauacaa

SEQ ID NO: 1259352 - RNA, 19 nt, Artificial Sequence
  Description of Artificial Sequence: Synthetic oligonucleotide
aaacccugggccaggcuag

SEQ ID NO: 1259353 - RNA, 19 nt, Artificial Sequence
  Description of Artificial Sequence: Synthetic oligonucleotide
agugugucuugagccaaac

SEQ ID NO: 1259354 - RNA, 19 nt, Artificial Sequence
  Description of Artificial Sequence: Synthetic oligonucleotide
gaaacccugggccaggcua

SEQ ID NO: 1259355 - RNA, 19 nt, Artificial Sequence
  Description of Artificial Sequence: Synthetic oligonucleotide
cucccuaaaacccuucuaa

SEQ ID NO: 1259356 - RNA, 19 nt, Artificial Sequence
  Description of Artificial Sequence: Synthetic oligonucleotide
cuagcaggcgcuuggccac

SEQ ID NO: 1259357 - RNA, 19 nt, Artificial Sequence
  Description of Artificial Sequence: Synthetic oligonucleotide
caucuuacggagacagguc

SEQ ID NO: 1259358 - RNA, 19 nt, Artificial Sequence
  Description of Artificial Sequence: Synthetic oligonucleotide
agcuaauaaucacgagacu

SEQ ID NO: 1259359 - RNA, 19 nt, Artificial Sequence
  Description of Artificial Sequence: Synthetic oligonucleotide
cuaguugccgauauauucu

SEQ ID NO: 1259360 - RNA, 19 nt, Artificial Sequence
  Description of Artificial Sequence: Synthetic oligonucleotide
aguguaaggcagguagcag

SEQ ID NO: 1259361 - RNA, 19 nt, Artificial Sequence
  Description of Artificial Sequence: Synthetic oligonucleotide
cuccguuccaaucuuuuca

SEQ ID NO: 1259362 - RNA, 19 nt, Artificial Sequence
  Description of Artificial Sequence: Synthetic oligonucleotide
caucaggccaacacuucug

SEQ ID NO: 1259363 - RNA, 19 nt, Artificial Sequence
  Description of Artificial Sequence: Synthetic oligonucleotide
cuucugcucacaguuggag

SEQ ID NO: 1259364 - RNA, 19 nt, Artificial Sequence
  Description of Artificial Sequence: Synthetic oligonucleotide
ggaagaggagcucaagaca

SEQ ID NO: 1259365 - RNA, 19 nt, Artificial Sequence
  Description of Artificial Sequence: Synthetic oligonucleotide
ucugguauacaaggcccug

SEQ ID NO: 1259366 - RNA, 19 nt, Artificial Sequence
  Description of Artificial Sequence: Synthetic oligonucleotide
agagcacagagugccacag

SEQ ID NO: 1259367 - RNA, 19 nt, Artificial Sequence
  Description of Artificial Sequence: Synthetic oligonucleotide
cuuacggagacaggucccc

SEQ ID NO: 1259368 - RNA, 19 nt, Artificial Sequence
  Description of Artificial Sequence: Synthetic oligonucleotide
cugcagucaaguagagcag

SEQ ID NO: 1259369 - RNA, 19 nt, Artificial Sequence
  Description of Artificial Sequence: Synthetic oligonucleotide
gagaccaaguggcuucuuc

SEQ ID NO: 1259370 - RNA, 19 nt, Artificial Sequence
  Description of Artificial Sequence: Synthetic oligonucleotide
uagcagguccaaguaaugu

SEQ ID NO: 1259371 - RNA, 19 nt, Artificial Sequence
  Description of Artificial Sequence: Synthetic oligonucleotide
ugcagucaaguagagcagu

SEQ ID NO: 1259372 - RNA, 19 nt, Artificial Sequence
  Description of Artificial Sequence: Synthetic oligonucleotide
agacacuggcuaaacucac

SEQ ID NO: 1259373 - RNA, 19 nt, Artificial Sequence
  Description of Artificial Sequence: Synthetic oligonucleotide
cugguauacaaggcccugg

SEQ ID NO: 1259374 - RNA, 19 nt, Artificial Sequence
  Description of Artificial Sequence: Synthetic oligonucleotide
cuauccauuccagcccacg

SEQ ID NO: 1259375 - RNA, 19 nt, Artificial Sequence
  Description of Artificial Sequence: Synthetic oligonucleotide
uaguugccgauauauucua

SEQ ID NO: 1259376 - RNA, 19 nt, Artificial Sequence
  Description of Artificial Sequence: Synthetic oligonucleotide
uagacgccuccagaagugg

SEQ ID NO: 1259377 - RNA, 19 nt, Artificial Sequence
  Description of Artificial Sequence: Synthetic oligonucleotide
cucuaggccccuuuggaca

SEQ ID NO: 1259378 - RNA, 19 nt, Artificial Sequence
  Description of Artificial Sequence: Synthetic oligonucleotide
uaagugugucuugagccaa

SEQ ID NO: 1259379 - RNA, 19 nt, Artificial Sequence
  Description of Artificial Sequence: Synthetic oligonucleotide
ggguuugcagcaacuaagg

SEQ ID NO: 1259380 - RNA, 19 nt, Artificial Sequence
  Description of Artificial Sequence: Synthetic oligonucleotide
gcaacuaaggccagguccc

SEQ ID NO: 1259381 - RNA, 19 nt, Artificial Sequence
  Description of Artificial Sequence: Synthetic oligonucleotide
uccccauggagauggucca

SEQ ID NO: 1259382 - RNA, 19 nt, Artificial Sequence
  Description of Artificial Sequence: Synthetic oligonucleotide
gauuuugggccucccucca

SEQ ID NO: 1259383 - RNA, 19 nt, Artificial Sequence
  Description of Artificial Sequence: Synthetic oligonucleotide
cuugggaauuagagaugag

SEQ ID NO: 1259384 - RNA, 19 nt, Artificial Sequence
  Description of Artificial Sequence: Synthetic oligonucleotide
ucuaggccccuuuggacau

SEQ ID NO: 1259385 - RNA, 19 nt, Artificial Sequence
  Description of Artificial Sequence: Synthetic oligonucleotide
acuaugaguggcacucaag

SEQ ID NO: 1259386 - RNA, 19 nt, Artificial Sequence
  Description of Artificial Sequence: Synthetic oligonucleotide
ugaggaggagcucccuaaa

SEQ ID NO: 1259387 - RNA, 19 nt, Artificial Sequence
  Description of Artificial Sequence: Synthetic oligonucleotide
cauuuucccacaaggacgu

SEQ ID NO: 1259388 - RNA, 19 nt, Artificial Sequence
  Description of Artificial Sequence: Synthetic oligonucleotide
ggauuucccaucuuacgga

SEQ ID NO: 1259389 - RNA, 19 nt, Artificial Sequence
  Description of Artificial Sequence: Synthetic oligonucleotide
gaugguggacacacgccug

SEQ ID NO: 1259390 - RNA, 19 nt, Artificial Sequence
  Description of Artificial Sequence: Synthetic oligonucleotide
cuacccagcaacauagcua

SEQ ID NO: 1259391 - RNA, 19 nt, Artificial Sequence
  Description of Artificial Sequence: Synthetic oligonucleotide
agcucaagacacuggcuaa

SEQ ID NO: 1259392 - RNA, 19 nt, Artificial Sequence
  Description of Artificial Sequence: Synthetic oligonucleotide
gcuaaacucacuaagugcu

SEQ ID NO: 1259393 - RNA, 19 nt, Artificial Sequence
  Description of Artificial Sequence: Synthetic oligonucleotide
gguuugcagcaacuaaggc

SEQ ID NO: 1259394 - RNA, 19 nt, Artificial Sequence
  Description of Artificial Sequence: Synthetic oligonucleotide
uccuaguugccgauauauu

SEQ ID NO: 1259395 - RNA, 19 nt, Artificial Sequence
  Description of Artificial Sequence: Synthetic oligonucleotide
aaaacccuucuaagugugu

SEQ ID NO: 1259396 - RNA, 19 nt, Artificial Sequence
  Description of Artificial Sequence: Synthetic oligonucleotide
uuggagccugcccuuguuc

SEQ ID NO: 1259397 - RNA, 19 nt, Artificial Sequence
  Description of Artificial Sequence: Synthetic oligonucleotide
agauagcuugaaggcuggc

SEQ ID NO: 1259398 - RNA, 19 nt, Artificial Sequence
  Description of Artificial Sequence: Synthetic oligonucleotide
agcuagcagguccaaguaa

SEQ ID NO: 1259399 - RNA, 19 nt, Artificial Sequence
  Description of Artificial Sequence: Synthetic oligonucleotide
gguauacaaggcccuggag

SEQ ID NO: 1259400 - RNA, 19 nt, Artificial Sequence
  Description of Artificial Sequence: Synthetic oligonucleotide
ccucacauacagucaaagc

SEQ ID NO: 1259401 - RNA, 19 nt, Artificial Sequence
  Description of Artificial Sequence: Synthetic oligonucleotide
gagcagugcucucugugga

SEQ ID NO: 1259402 - RNA, 19 nt, Artificial Sequence
  Description of Artificial Sequence: Synthetic oligonucleotide
cgcuuggccacuaugagug

SEQ ID NO: 1259403 - RNA, 19 nt, Artificial Sequence
  Description of Artificial Sequence: Synthetic oligonucleotide
uggacacacgccugaggcu

SEQ ID NO: 1259404 - RNA, 19 nt, Artificial Sequence
  Description of Artificial Sequence: Synthetic oligonucleotide
ggcuuugguauccuggcca

SEQ ID NO: 1259405 - RNA, 19 nt, Artificial Sequence
  Description of Artificial Sequence: Synthetic oligonucleotide
uaucagcgccgcugcagcc

SEQ ID NO: 1259406 - RNA, 19 nt, Artificial Sequence
  Description of Artificial Sequence: Synthetic oligonucleotide
uccuccguuccaaucuuuu

SEQ ID NO: 1259407 - RNA, 19 nt, Artificial Sequence
  Description of Artificial Sequence: Synthetic oligonucleotide
cacuggcuauccauuccag

SEQ ID NO: 1259408 - RNA, 19 nt, Artificial Sequence
  Description of Artificial Sequence: Synthetic oligonucleotide
gagaugagauucggcugag

SEQ ID NO: 1259409 - RNA, 19 nt, Artificial Sequence
  Description of Artificial Sequence: Synthetic oligonucleotide
caccgacuugcuagcaggc

SEQ ID NO: 1259410 - RNA, 19 nt, Artificial Sequence
  Description of Artificial Sequence: Synthetic oligonucleotide
ugcucagugcuaggguuug

SEQ ID NO: 1259411 - RNA, 19 nt, Artificial Sequence
  Description of Artificial Sequence: Synthetic oligonucleotide
accgacuugcuagcaggcg

SEQ ID NO: 1259412 - RNA, 19 nt, Artificial Sequence
  Description of Artificial Sequence: Synthetic oligonucleotide
agugcucucuguggauuuc

SEQ ID NO: 1259413 - RNA, 19 nt, Artificial Sequence
  Description of Artificial Sequence: Synthetic oligonucleotide
cauuccuccguuccaaucu

SEQ ID NO: 1259414 - RNA, 19 nt, Artificial Sequence
  Description of Artificial Sequence: Synthetic oligonucleotide
acgacuaagcagagcagcu

SEQ ID NO: 1259415 - RNA, 19 nt, Artificial Sequence
  Description of Artificial Sequence: Synthetic oligonucleotide
aaguaauguucugcagcau

SEQ ID NO: 1259416 - RNA, 19 nt, Artificial Sequence
  Description of Artificial Sequence: Synthetic oligonucleotide
cuggagucccugcugcaac

SEQ ID NO: 1259417 - RNA, 19 nt, Artificial Sequence
  Description of Artificial Sequence: Synthetic oligonucleotide
caaagcaucuggggcucgg

SEQ ID NO: 1259418 - RNA, 19 nt, Artificial Sequence
  Description of Artificial Sequence: Synthetic oligonucleotide
gguggacacacgccugagg

SEQ ID NO: 1259419 - RNA, 19 nt, Artificial Sequence
  Description of Artificial Sequence: Synthetic oligonucleotide
cagugucuccuaguugccg

SEQ ID NO: 1259420 - RNA, 19 nt, Artificial Sequence
  Description of Artificial Sequence: Synthetic oligonucleotide
cuggcuaaacucacuaagu

SEQ ID NO: 1259421 - RNA, 19 nt, Artificial Sequence
  Description of Artificial Sequence: Synthetic oligonucleotide
aguugccgauauauucuag

SEQ ID NO: 1259422 - RNA, 19 nt, Artificial Sequence
  Description of Artificial Sequence: Synthetic oligonucleotide
cagguuguacccaccuuca

SEQ ID NO: 1259423 - RNA, 19 nt, Artificial Sequence
  Description of Artificial Sequence: Synthetic oligonucleotide
ggacacacgccugaggcug

SEQ ID NO: 1259424 - RNA, 19 nt, Artificial Sequence
  Description of Artificial Sequence: Synthetic oligonucleotide
cucggcuugccuguaucag

SEQ ID NO: 1259425 - RNA, 19 nt, Artificial Sequence
  Description of Artificial Sequence: Synthetic oligonucleotide
agcuacccagcaacauagc

SEQ ID NO: 1259426 - RNA, 19 nt, Artificial Sequence
  Description of Artificial Sequence: Synthetic oligonucleotide
aggacgucuugggaauuag

SEQ ID NO: 1259427 - RNA, 19 nt, Artificial Sequence
  Description of Artificial Sequence: Synthetic oligonucleotide
uugcagcaacuaaggccag

SEQ ID NO: 1259428 - RNA, 19 nt, Artificial Sequence
  Description of Artificial Sequence: Synthetic oligonucleotide
gugaggaggagcucccuaa

SEQ ID NO: 1259429 - RNA, 19 nt, Artificial Sequence
  Description of Artificial Sequence: Synthetic oligonucleotide
aacucacuaagugcuucuu

SEQ ID NO: 1259430 - RNA, 19 nt, Artificial Sequence
  Description of Artificial Sequence: Synthetic oligonucleotide
gcuagcaggcgcuuggcca

SEQ ID NO: 1259431 - RNA, 19 nt, Artificial Sequence
  Description of Artificial Sequence: Synthetic oligonucleotide
uaggccccuuuggacaucc

SEQ ID NO: 1259432 - RNA, 19 nt, Artificial Sequence
  Description of Artificial Sequence: Synthetic oligonucleotide
cuucugcccucccugucug

SEQ ID NO: 1259433 - RNA, 19 nt, Artificial Sequence
  Description of Artificial Sequence: Synthetic oligonucleotide
uucccacaaggacgucuug

SEQ ID NO: 1259434 - RNA, 19 nt, Artificial Sequence
  Description of Artificial Sequence: Synthetic oligonucleotide
gaggaggagcucccuaaaa

SEQ ID NO: 1259435 - RNA, 19 nt, Artificial Sequence
  Description of Artificial Sequence: Synthetic oligonucleotide
gcuaauaaucacgagacuu

SEQ ID NO: 1259436 - RNA, 19 nt, Artificial Sequence
  Description of Artificial Sequence: Synthetic oligonucleotide
gcuguguacaccugaacua

SEQ ID NO: 1259437 - RNA, 19 nt, Artificial Sequence
  Description of Artificial Sequence: Synthetic oligonucleotide
cuccuuaaggagagcuuca

SEQ ID NO: 1259438 - RNA, 19 nt, Artificial Sequence
  Description of Artificial Sequence: Synthetic oligonucleotide
guauccuggccacuggcua

SEQ ID NO: 1259439 - RNA, 19 nt, Artificial Sequence
  Description of Artificial Sequence: Synthetic oligonucleotide
aaggacgucuugggaauua

SEQ ID NO: 1259440 - RNA, 19 nt, Artificial Sequence
  Description of Artificial Sequence: Synthetic oligonucleotide
ucuauugccugggcauauc

SEQ ID NO: 1259441 - RNA, 19 nt, Artificial Sequence
  Description of Artificial Sequence: Synthetic oligonucleotide
aggagcucccuaaaacccu

SEQ ID NO: 1259442 - RNA, 19 nt, Artificial Sequence
  Description of Artificial Sequence: Synthetic oligonucleotide
ugguugauuuugggccucc

SEQ ID NO: 1259443 - RNA, 19 nt, Artificial Sequence
  Description of Artificial Sequence: Synthetic oligonucleotide
cagaucgggcaguauggca

SEQ ID NO: 1259444 - RNA, 19 nt, Artificial Sequence
  Description of Artificial Sequence: Synthetic oligonucleotide
caaguagagcagugcucuc

SEQ ID NO: 1259445 - RNA, 19 nt, Artificial Sequence
  Description of Artificial Sequence: Synthetic oligonucleotide
ucuguggauuucccaucuu

SEQ ID NO: 1259446 - RNA, 19 nt, Artificial Sequence
  Description of Artificial Sequence: Synthetic oligonucleotide
ccugucuguagacaccgac

SEQ ID NO: 1259447 - RNA, 19 nt, Artificial Sequence
  Description of Artificial Sequence: Synthetic oligonucleotide
agcagugcucucuguggau

SEQ ID NO: 1259448 - RNA, 19 nt, Artificial Sequence
  Description of Artificial Sequence: Synthetic oligonucleotide
uuacggagacaggucccca

SEQ ID NO: 1259449 - RNA, 19 nt, Artificial Sequence
  Description of Artificial Sequence: Synthetic oligonucleotide
gcaggaguccuugcaaaag

SEQ ID NO: 1259450 - RNA, 19 nt, Artificial Sequence
  Description of Artificial Sequence: Synthetic oligonucleotide
caaacuccuuaaggagagc

SEQ ID NO: 1259451 - RNA, 19 nt, Artificial Sequence
  Description of Artificial Sequence: Synthetic oligonucleotide
auuuugggccucccuccaa

SEQ ID NO: 1259452 - RNA, 19 nt, Artificial Sequence
  Description of Artificial Sequence: Synthetic oligonucleotide
ccagcccacgacuaagcag

SEQ ID NO: 1259453 - RNA, 19 nt, Artificial Sequence
  Description of Artificial Sequence: Synthetic oligonucleotide
agauucggcugagcagcuc

SEQ ID NO: 1259454 - RNA, 19 nt, Artificial Sequence
  Description of Artificial Sequence: Synthetic oligonucleotide
ccgauauauucuagacgcc

SEQ ID NO: 1259455 - RNA, 19 nt, Artificial Sequence
  Description of Artificial Sequence: Synthetic oligonucleotide
agcagcggccucauuccuc

SEQ ID NO: 1259456 - RNA, 19 nt, Artificial Sequence
  Description of Artificial Sequence: Synthetic oligonucleotide
uugcuagcaggcgcuuggc

SEQ ID NO: 1259457 - RNA, 19 nt, Artificial Sequence
  Description of Artificial Sequence: Synthetic oligonucleotide
cugucuguagacaccgacu

SEQ ID NO: 1259458 - RNA, 19 nt, Artificial Sequence
  Description of Artificial Sequence: Synthetic oligonucleotide
cggcuugccuguaucagcg

SEQ ID NO: 1259459 - RNA, 19 nt, Artificial Sequence
  Description of Artificial Sequence: Synthetic oligonucleotide
caacuaaggccaggucccc

SEQ ID NO: 1259460 - RNA, 19 nt, Artificial Sequence
  Description of Artificial Sequence: Synthetic oligonucleotide
ggcuauccauuccagccca

SEQ ID NO: 1259461 - RNA, 19 nt, Artificial Sequence
  Description of Artificial Sequence: Synthetic oligonucleotide
uccccagcgcuguguacac

SEQ ID NO: 1259462 - RNA, 19 nt, Artificial Sequence
  Description of Artificial Sequence: Synthetic oligonucleotide
gcagagcagcuacuugaag

SEQ ID NO: 1259463 - RNA, 19 nt, Artificial Sequence
  Description of Artificial Sequence: Synthetic oligonucleotide
auuuucccacaaggacguc

SEQ ID NO: 1259464 - RNA, 19 nt, Artificial Sequence
  Description of Artificial Sequence: Synthetic oligonucleotide
uggccacuaugaguggcac

SEQ ID NO: 1259465 - RNA, 19 nt, Artificial Sequence
  Description of Artificial Sequence: Synthetic oligonucleotide
aagugugucuugagccaaa

SEQ ID NO: 1259466 - RNA, 19 nt, Artificial Sequence
  Description of Artificial Sequence: Synthetic oligonucleotide
cuauugccugggcauaucu

SEQ ID NO: 1259467 - RNA, 19 nt, Artificial Sequence
  Description of Artificial Sequence: Synthetic oligonucleotide
agguuguacccaccuucaa

SEQ ID NO: 1259468 - RNA, 19 nt, Artificial Sequence
  Description of Artificial Sequence: Synthetic oligonucleotide
gccuguaucagcgccgcug

SEQ ID NO: 1259469 - RNA, 19 nt, Artificial Sequence
  Description of Artificial Sequence: Synthetic oligonucleotide
ggccccuuuggacauccug

SEQ ID NO: 1259470 - RNA, 19 nt, Artificial Sequence
  Description of Artificial Sequence: Synthetic oligonucleotide
cacuaugaguggcacucaa

SEQ ID NO: 1259471 - RNA, 19 nt, Artificial Sequence
  Description of Artificial Sequence: Synthetic oligonucleotide
caggaguccuugcaaaagu

SEQ ID NO: 1259472 - RNA, 19 nt, Artificial Sequence
  Description of Artificial Sequence: Synthetic oligonucleotide
gaucgggcaguauggcagu

SEQ ID NO: 1259473 - RNA, 19 nt, Artificial Sequence
  Description of Artificial Sequence: Synthetic oligonucleotide
cacuggcuaaacucacuaa

SEQ ID NO: 1259474 - RNA, 19 nt, Artificial Sequence
  Description of Artificial Sequence: Synthetic oligonucleotide
uuccuccguuccaaucuuu

SEQ ID NO: 1259475 - RNA, 19 nt, Artificial Sequence
  Description of Artificial Sequence: Synthetic oligonucleotide
gacacacgccugaggcugc

SEQ ID NO: 1259476 - RNA, 19 nt, Artificial Sequence
  Description of Artificial Sequence: Synthetic oligonucleotide
agccugcccuuguucuuug

SEQ ID NO: 1259477 - RNA, 19 nt, Artificial Sequence
  Description of Artificial Sequence: Synthetic oligonucleotide
cuccuaguugccgauauau

SEQ ID NO: 1259478 - RNA, 19 nt, Artificial Sequence
  Description of Artificial Sequence: Synthetic oligonucleotide
guauggcaguucuuuaguu

SEQ ID NO: 1259479 - RNA, 19 nt, Artificial Sequence
  Description of Artificial Sequence: Synthetic oligonucleotide
cucugguauacaaggcccu

SEQ ID NO: 1259480 - RNA, 19 nt, Artificial Sequence
  Description of Artificial Sequence: Synthetic oligonucleotide
cuaggguuugcagcaacua

SEQ ID NO: 1259481 - RNA, 19 nt, Artificial Sequence
  Description of Artificial Sequence: Synthetic oligonucleotide
cagguccaaguaauguucu

SEQ ID NO: 1259482 - RNA, 19 nt, Artificial Sequence
  Description of Artificial Sequence: Synthetic oligonucleotide
ucgggcaguauggcaguuc

SEQ ID NO: 1259483 - RNA, 19 nt, Artificial Sequence
  Description of Artificial Sequence: Synthetic oligonucleotide
gggaauuagagaugagauu

SEQ ID NO: 1259484 - RNA, 19 nt, Artificial Sequence
  Description of Artificial Sequence: Synthetic oligonucleotide
agacgccuccagaagugga

SEQ ID NO: 1259485 - RNA, 19 nt, Artificial Sequence
  Description of Artificial Sequence: Synthetic oligonucleotide
ccacgacuaagcagagcag

SEQ ID NO: 1259486 - RNA, 19 nt, Artificial Sequence
  Description of Artificial Sequence: Synthetic oligonucleotide
gcagcaggaguccuugcaa

SEQ ID NO: 1259487 - RNA, 19 nt, Artificial Sequence
  Description of Artificial Sequence: Synthetic oligonucleotide
gacacuggcuaaacucacu

SEQ ID NO: 1259488 - RNA, 19 nt, Artificial Sequence
  Description of Artificial Sequence: Synthetic oligonucleotide
cccaucuuacggagacagg

SEQ ID NO: 1259489 - RNA, 19 nt, Artificial Sequence
  Description of Artificial Sequence: Synthetic oligonucleotide
cuaaacucacuaagugcuu

SEQ ID NO: 1259490 - RNA, 19 nt, Artificial Sequence
  Description of Artificial Sequence: Synthetic oligonucleotide
agcgcuguguacaccugaa

SEQ ID NO: 1259491 - RNA, 19 nt, Artificial Sequence
  Description of Artificial Sequence: Synthetic oligonucleotide
uucugcccucccugucugu

SEQ ID NO: 1259492 - RNA, 19 nt, Artificial Sequence
  Description of Artificial Sequence: Synthetic oligonucleotide
ggaagggcacagguuguac

SEQ ID NO: 1259493 - RNA, 19 nt, Artificial Sequence
  Description of Artificial Sequence: Synthetic oligonucleotide
agacaccgacuugcuagca

SEQ ID NO: 1259494 - RNA, 19 nt, Artificial Sequence
  Description of Artificial Sequence: Synthetic oligonucleotide
auucggcugagcagcuccu

SEQ ID NO: 1259495 - RNA, 19 nt, Artificial Sequence
  Description of Artificial Sequence: Synthetic oligonucleotide
gcuccaaaggggagagcag

SEQ ID NO: 1259496 - RNA, 19 nt, Artificial Sequence
  Description of Artificial Sequence: Synthetic oligonucleotide
ggccacuggcuauccauuc

SEQ ID NO: 1259497 - RNA, 19 nt, Artificial Sequence
  Description of Artificial Sequence: Synthetic oligonucleotide
caaguggcuucuuccugua

SEQ ID NO: 1259498 - RNA, 19 nt, Artificial Sequence
  Description of Artificial Sequence: Synthetic oligonucleotide
ccuuaaggagagcuucaca

SEQ ID NO: 1259499 - RNA, 19 nt, Artificial Sequence
  Description of Artificial Sequence: Synthetic oligonucleotide
gugguugauuuugggccuc

SEQ ID NO: 1259500 - RNA, 19 nt, Artificial Sequence
  Description of Artificial Sequence: Synthetic oligonucleotide
gcaacauagcuagcagguc

SEQ ID NO: 1259501 - RNA, 19 nt, Artificial Sequence
  Description of Artificial Sequence: Synthetic oligonucleotide
ccaucuuacggagacaggu

SEQ ID NO: 1259502 - RNA, 19 nt, Artificial Sequence
  Description of Artificial Sequence: Synthetic oligonucleotide
cuaagcagagcagcuacuu

SEQ ID NO: 1259503 - RNA, 19 nt, Artificial Sequence
  Description of Artificial Sequence: Synthetic oligonucleotide
ccacuggcuauccauucca

SEQ ID NO: 1259504 - RNA, 19 nt, Artificial Sequence
  Description of Artificial Sequence: Synthetic oligonucleotide
gcucggcuugccuguauca

SEQ ID NO: 1259505 - RNA, 19 nt, Artificial Sequence
  Description of Artificial Sequence: Synthetic oligonucleotide
cuguagacaccgacuugcu

SEQ ID NO: 1259506 - RNA, 19 nt, Artificial Sequence
  Description of Artificial Sequence: Synthetic oligonucleotide
guacaguggaagagaccaa

SEQ ID NO: 1259507 - RNA, 19 nt, Artificial Sequence
  Description of Artificial Sequence: Synthetic oligonucleotide
ggcuugccuguaucagcgc

SEQ ID NO: 1259508 - RNA, 19 nt, Artificial Sequence
  Description of Artificial Sequence: Synthetic oligonucleotide
agcccacgacuaagcagag

SEQ ID NO: 1259509 - RNA, 19 nt, Artificial Sequence
  Description of Artificial Sequence: Synthetic oligonucleotide
cuuaaggcuuugguauccu

SEQ ID NO: 1259510 - RNA, 19 nt, Artificial Sequence
  Description of Artificial Sequence: Synthetic oligonucleotide
ggcacagguuguacccacc

SEQ ID NO: 1259511 - RNA, 19 nt, Artificial Sequence
  Description of Artificial Sequence: Synthetic oligonucleotide
gcacacuaaggaggaaguc

SEQ ID NO: 1259512 - RNA, 19 nt, Artificial Sequence
  Description of Artificial Sequence: Synthetic oligonucleotide
gcgcuguguacaccugaac

SEQ ID NO: 1259513 - RNA, 19 nt, Artificial Sequence
  Description of Artificial Sequence: Synthetic oligonucleotide
gagauucggcugagcagcu

SEQ ID NO: 1259514 - RNA, 19 nt, Artificial Sequence
  Description of Artificial Sequence: Synthetic oligonucleotide
ggacgucuugggaauuaga

SEQ ID NO: 1259515 - RNA, 19 nt, Artificial Sequence
  Description of Artificial Sequence: Synthetic oligonucleotide
gcacagguuguacccaccu

SEQ ID NO: 1259516 - RNA, 19 nt, Artificial Sequence
  Description of Artificial Sequence: Synthetic oligonucleotide
ccacaaggacgucuuggga

SEQ ID NO: 1259517 - RNA, 19 nt, Artificial Sequence
  Description of Artificial Sequence: Synthetic oligonucleotide
cgauauauucuagacgccu

SEQ ID NO: 1259518 - RNA, 19 nt, Artificial Sequence
  Description of Artificial Sequence: Synthetic oligonucleotide
guggaagggcacagguugu

SEQ ID NO: 1259519 - RNA, 19 nt, Artificial Sequence
  Description of Artificial Sequence: Synthetic oligonucleotide
guuggagccugcccuuguu

SEQ ID NO: 1259520 - RNA, 19 nt, Artificial Sequence
  Description of Artificial Sequence: Synthetic oligonucleotide
ggccaacacuucugcucac

SEQ ID NO: 1259521 - RNA, 19 nt, Artificial Sequence
  Description of Artificial Sequence: Synthetic oligonucleotide
cuaggccccuuuggacauc

SEQ ID NO: 1259522 - RNA, 19 nt, Artificial Sequence
  Description of Artificial Sequence: Synthetic oligonucleotide
gcuaggguuugcagcaacu

SEQ ID NO: 1259523 - RNA, 19 nt, Artificial Sequence
  Description of Artificial Sequence: Synthetic oligonucleotide
aucgggcaguauggcaguu

SEQ ID NO: 1259524 - RNA, 19 nt, Artificial Sequence
  Description of Artificial Sequence: Synthetic oligonucleotide
cucuauugccugggcauau

SEQ ID NO: 1259525 - RNA, 19 nt, Artificial Sequence
  Description of Artificial Sequence: Synthetic oligonucleotide
ccguuccaaucuuuucaga

SEQ ID NO: 1259526 - RNA, 19 nt, Artificial Sequence
  Description of Artificial Sequence: Synthetic oligonucleotide
ccauuccagcccacgacua

SEQ ID NO: 1259527 - RNA, 19 nt, Artificial Sequence
  Description of Artificial Sequence: Synthetic oligonucleotide
ccucauuccuccguuccaa

SEQ ID NO: 1259528 - RNA, 19 nt, Artificial Sequence
  Description of Artificial Sequence: Synthetic oligonucleotide
gcuauccauuccagcccac

SEQ ID NO: 1259529 - RNA, 19 nt, Artificial Sequence
  Description of Artificial Sequence: Synthetic oligonucleotide
cacagguuguacccaccuu

SEQ ID NO: 1259530 - RNA, 19 nt, Artificial Sequence
  Description of Artificial Sequence: Synthetic oligonucleotide
gauccagaucgggcaguau

SEQ ID NO: 1259531 - RNA, 19 nt, Artificial Sequence
  Description of Artificial Sequence: Synthetic oligonucleotide
gugcuaggguuugcagcaa

SEQ ID NO: 1259532 - RNA, 19 nt, Artificial Sequence
  Description of Artificial Sequence: Synthetic oligonucleotide
gacuugcuagcaggcgcuu

SEQ ID NO: 1259533 - RNA, 19 nt, Artificial Sequence
  Description of Artificial Sequence: Synthetic oligonucleotide
agcaggcgcuuggccacua

SEQ ID NO: 1259534 - RNA, 19 nt, Artificial Sequence
  Description of Artificial Sequence: Synthetic oligonucleotide
ggagccugcccuuguucuu

SEQ ID NO: 1259535 - RNA, 19 nt, Artificial Sequence
  Description of Artificial Sequence: Synthetic oligonucleotide
gcagugcucucuguggauu

SEQ ID NO: 1259536 - RNA, 19 nt, Artificial Sequence
  Description of Artificial Sequence: Synthetic oligonucleotide
cccagguggucaguacaca

SEQ ID NO: 1259537 - RNA, 19 nt, Artificial Sequence
  Description of Artificial Sequence: Synthetic oligonucleotide
ccacuaugaguggcacuca

SEQ ID NO: 1259538 - RNA, 19 nt, Artificial Sequence
  Description of Artificial Sequence: Synthetic oligonucleotide
cccucccugucuguagaca

SEQ ID NO: 1259539 - RNA, 19 nt, Artificial Sequence
  Description of Artificial Sequence: Synthetic oligonucleotide
caaggacgucuugggaauu

SEQ ID NO: 1259540 - RNA, 19 nt, Artificial Sequence
  Description of Artificial Sequence: Synthetic oligonucleotide
aggccccuuuggacauccu

SEQ ID NO: 1259541 - RNA, 19 nt, Artificial Sequence
  Description of Artificial Sequence: Synthetic oligonucleotide
cccugucuguagacaccga

SEQ ID NO: 1259542 - RNA, 19 nt, Artificial Sequence
  Description of Artificial Sequence: Synthetic oligonucleotide
gcggccucauuccuccguu

SEQ ID NO: 1259543 - RNA, 19 nt, Artificial Sequence
  Description of Artificial Sequence: Synthetic oligonucleotide
ccccagcgcuguguacacc

SEQ ID NO: 1259544 - RNA, 19 nt, Artificial Sequence
  Description of Artificial Sequence: Synthetic oligonucleotide
ggagucccugcugcaacuu

SEQ ID NO: 1259545 - RNA, 19 nt, Artificial Sequence
  Description of Artificial Sequence: Synthetic oligonucleotide
gggcucggcuugccuguau

SEQ ID NO: 1259546 - RNA, 19 nt, Artificial Sequence
  Description of Artificial Sequence: Synthetic oligonucleotide
cacucucucuaggccccuu

SEQ ID NO: 1259547 - RNA, 19 nt, Artificial Sequence
  Description of Artificial Sequence: Synthetic oligonucleotide
gggcaguauggcaguucuu

SEQ ID NO: 1259548 - RNA, 19 nt, Artificial Sequence
  Description of Artificial Sequence: Synthetic oligonucleotide
cacacgccugaggcugcuu

SEQ ID NO: 1259549 - RNA, 19 nt, Artificial Sequence
  Description of Artificial Sequence: Synthetic oligonucleotide
ucuugagacaugaagaagg

SEQ ID NO: 1259550 - RNA, 19 nt, Artificial Sequence
  Description of Artificial Sequence: Synthetic oligonucleotide
agaacuuaaaaccaugacg

SEQ ID NO: 1259551 - RNA, 19 nt, Artificial Sequence
  Description of Artificial Sequence: Synthetic oligonucleotide
aauaaguagugucugucuc

SEQ ID NO: 1259552 - RNA, 19 nt, Artificial Sequence
  Description of Artificial Sequence: Synthetic oligonucleotide
acaaacguggugcagaugg

SEQ ID NO: 1259553 - RNA, 19 nt, Artificial Sequence
  Description of Artificial Sequence: Synthetic oligonucleotide
aagaauaagggcugaagug

SEQ ID NO: 1259554 - RNA, 19 nt, Artificial Sequence
  Description of Artificial Sequence: Synthetic oligonucleotide
ugagacaugaagaagggau

SEQ ID NO: 1259555 - RNA, 19 nt, Artificial Sequence
  Description of Artificial Sequence: Synthetic oligonucleotide
aaauaaguagugucugucu

SEQ ID NO: 1259556 - RNA, 19 nt, Artificial Sequence
  Description of Artificial Sequence: Synthetic oligonucleotide
guuacuguccccuggagag

SEQ ID NO: 1259557 - RNA, 19 nt, Artificial Sequence
  Description of Artificial Sequence: Synthetic oligonucleotide
uaaauggccgcaaaguggu

SEQ ID NO: 1259558 - RNA, 19 nt, Artificial Sequence
  Description of Artificial Sequence: Synthetic oligonucleotide
acuaugugaugguuguggc

SEQ ID NO: 1259559 - RNA, 19 nt, Artificial Sequence
  Description of Artificial Sequence: Synthetic oligonucleotide
ugggagaauuucuugaggc

SEQ ID NO: 1259560 - RNA, 19 nt, Artificial Sequence
  Description of Artificial Sequence: Synthetic oligonucleotide
aguaaauggccgcaaagug

SEQ ID NO: 1259561 - RNA, 19 nt, Artificial Sequence
  Description of Artificial Sequence: Synthetic oligonucleotide
agcaggagguaguaaaugg

SEQ ID NO: 1259562 - RNA, 19 nt, Artificial Sequence
  Description of Artificial Sequence: Synthetic oligonucleotide
uuugaucugugguauccgg

SEQ ID NO: 1259563 - RNA, 19 nt, Artificial Sequence
  Description of Artificial Sequence: Synthetic oligonucleotide
ugucgcuucugacacacag

SEQ ID NO: 1259564 - RNA, 19 nt, Artificial Sequence
  Description of Artificial Sequence: Synthetic oligonucleotide
gaacuuaaaaccaugacgu

SEQ ID NO: 1259565 - RNA, 19 nt, Artificial Sequence
  Description of Artificial Sequence: Synthetic oligonucleotide
agacaugaagaagggaugc

SEQ ID NO: 1259566 - RNA, 19 nt, Artificial Sequence
  Description of Artificial Sequence: Synthetic oligonucleotide
ggugggaucaucuugcugc

SEQ ID NO: 1259567 - RNA, 19 nt, Artificial Sequence
  Description of Artificial Sequence: Synthetic oligonucleotide
cuugagacaugaagaaggg

SEQ ID NO: 1259568 - RNA, 19 nt, Artificial Sequence
  Description of Artificial Sequence: Synthetic oligonucleotide
guaaauggccgcaaagugg

SEQ ID NO: 1259569 - RNA, 19 nt, Artificial Sequence
  Description of Artificial Sequence: Synthetic oligonucleotide
ugagucgacuggcaggagg

SEQ ID NO: 1259570 - RNA, 19 nt, Artificial Sequence
  Description of Artificial Sequence: Synthetic oligonucleotide
ucgcuucugacacacagca

SEQ ID NO: 1259571 - RNA, 19 nt, Artificial Sequence
  Description of Artificial Sequence: Synthetic oligonucleotide
ucuucgagcagguuccugc

SEQ ID NO: 1259572 - RNA, 19 nt, Artificial Sequence
  Description of Artificial Sequence: Synthetic oligonucleotide
gaggacauacagcaccacg

SEQ ID NO: 1259573 - RNA, 19 nt, Artificial Sequence
  Description of Artificial Sequence: Synthetic oligonucleotide
agugucggcagguuggguc

SEQ ID NO: 1259574 - RNA, 19 nt, Artificial Sequence
  Description of Artificial Sequence: Synthetic oligonucleotide
gugacuagaagacacagaa

SEQ ID NO: 1259575 - RNA, 19 nt, Artificial Sequence
  Description of Artificial Sequence: Synthetic oligonucleotide
aacacgccacugcaguugg

SEQ ID NO: 1259576 - RNA, 19 nt, Artificial Sequence
  Description of Artificial Sequence: Synthetic oligonucleotide
cagacgaggacauacagca

SEQ ID NO: 1259577 - RNA, 19 nt, Artificial Sequence
  Description of Artificial Sequence: Synthetic oligonucleotide
guaguaaauggccgcaaag

SEQ ID NO: 1259578 - RNA, 19 nt, Artificial Sequence
  Description of Artificial Sequence: Synthetic oligonucleotide
uacucaugccuccucgggg

SEQ ID NO: 1259579 - RNA, 19 nt, Artificial Sequence
  Description of Artificial Sequence: Synthetic oligonucleotide
gaccaagggagguuuaagc

SEQ ID NO: 1259580 - RNA, 19 nt, Artificial Sequence
  Description of Artificial Sequence: Synthetic oligonucleotide
aaguaaagugcuugucgcu

SEQ ID NO: 1259581 - RNA, 19 nt, Artificial Sequence
  Description of Artificial Sequence: Synthetic oligonucleotide
aacacaaacguggugcaga

SEQ ID NO: 1259582 - RNA, 19 nt, Artificial Sequence
  Description of Artificial Sequence: Synthetic oligonucleotide
gacauacagcaccacgccg

SEQ ID NO: 1259583 - RNA, 19 nt, Artificial Sequence
  Description of Artificial Sequence: Synthetic oligonucleotide
ucgggagcugcauaugggg

SEQ ID NO: 1259584 - RNA, 19 nt, Artificial Sequence
  Description of Artificial Sequence: Synthetic oligonucleotide
agggaugcggaaccggccc

SEQ ID NO: 1259585 - RNA, 19 nt, Artificial Sequence
  Description of Artificial Sequence: Synthetic oligonucleotide
augggagaauuucuugagg

SEQ ID NO: 1259586 - RNA, 19 nt, Artificial Sequence
  Description of Artificial Sequence: Synthetic oligonucleotide
uggacuaugugaugguugu

SEQ ID NO: 1259587 - RNA, 19 nt, Artificial Sequence
  Description of Artificial Sequence: Synthetic oligonucleotide
uauccggacaggaacugug

SEQ ID NO: 1259588 - RNA, 19 nt, Artificial Sequence
  Description of Artificial Sequence: Synthetic oligonucleotide
agaaaguaaagugcuuguc

SEQ ID NO: 1259589 - RNA, 19 nt, Artificial Sequence
  Description of Artificial Sequence: Synthetic oligonucleotide
uucgggagcugcauauggg

SEQ ID NO: 1259590 - RNA, 19 nt, Artificial Sequence
  Description of Artificial Sequence: Synthetic oligonucleotide
ugaucugugguauccggac

SEQ ID NO: 1259591 - RNA, 19 nt, Artificial Sequence
  Description of Artificial Sequence: Synthetic oligonucleotide
gccggaaagggucacaugg

SEQ ID NO: 1259592 - RNA, 19 nt, Artificial Sequence
  Description of Artificial Sequence: Synthetic oligonucleotide
aagugguuguagcugcugu

SEQ ID NO: 1259593 - RNA, 19 nt, Artificial Sequence
  Description of Artificial Sequence: Synthetic oligonucleotide
uaaaaccaugacguuacug

SEQ ID NO: 1259594 - RNA, 19 nt, Artificial Sequence
  Description of Artificial Sequence: Synthetic oligonucleotide
ugacguuacuguccccugg

SEQ ID NO: 1259595 - RNA, 19 nt, Artificial Sequence
  Description of Artificial Sequence: Synthetic oligonucleotide
cuucguacuccuucccucg

SEQ ID NO: 1259596 - RNA, 19 nt, Artificial Sequence
  Description of Artificial Sequence: Synthetic oligonucleotide
aauggccgcaaagugguug

SEQ ID NO: 1259597 - RNA, 19 nt, Artificial Sequence
  Description of Artificial Sequence: Synthetic oligonucleotide
acagacgaggacauacagc

SEQ ID NO: 1259598 - RNA, 19 nt, Artificial Sequence
  Description of Artificial Sequence: Synthetic oligonucleotide
ugcaguugguauccacggg

SEQ ID NO: 1259599 - RNA, 19 nt, Artificial Sequence
  Description of Artificial Sequence: Synthetic oligonucleotide
ucuccuggcuuguagaaau

SEQ ID NO: 1259600 - RNA, 19 nt, Artificial Sequence
  Description of Artificial Sequence: Synthetic oligonucleotide
uagucgcccagguuggagg

SEQ ID NO: 1259601 - RNA, 19 nt, Artificial Sequence
  Description of Artificial Sequence: Synthetic oligonucleotide
uccgucaaaggaagggagc

SEQ ID NO: 1259602 - RNA, 19 nt, Artificial Sequence
  Description of Artificial Sequence: Synthetic oligonucleotide
uccggacaggaacuguggg

SEQ ID NO: 1259603 - RNA, 19 nt, Artificial Sequence
  Description of Artificial Sequence: Synthetic oligonucleotide
agguacucaugccuccucg

SEQ ID NO: 1259604 - RNA, 19 nt, Artificial Sequence
  Description of Artificial Sequence: Synthetic oligonucleotide
guagaaauucccaaaucca

SEQ ID NO: 1259605 - RNA, 19 nt, Artificial Sequence
  Description of Artificial Sequence: Synthetic oligonucleotide
cauccaucggugcuggcgg

SEQ ID NO: 1259606 - RNA, 19 nt, Artificial Sequence
  Description of Artificial Sequence: Synthetic oligonucleotide
gaacacaaaaguguauaca

SEQ ID NO: 1259607 - RNA, 19 nt, Artificial Sequence
  Description of Artificial Sequence: Synthetic oligonucleotide
auaagggcugaagugagcu

SEQ ID NO: 1259608 - RNA, 19 nt, Artificial Sequence
  Description of Artificial Sequence: Synthetic oligonucleotide
uugaucugugguauccgga

SEQ ID NO: 1259609 - RNA, 19 nt, Artificial Sequence
  Description of Artificial Sequence: Synthetic oligonucleotide
caagaacuuaaaaccauga

SEQ ID NO: 1259610 - RNA, 19 nt, Artificial Sequence
  Description of Artificial Sequence: Synthetic oligonucleotide
acaucuggugagucgacug

SEQ ID NO: 1259611 - RNA, 19 nt, Artificial Sequence
  Description of Artificial Sequence: Synthetic oligonucleotide
uggaagguacucaugccuc

SEQ ID NO: 1259612 - RNA, 19 nt, Artificial Sequence
  Description of Artificial Sequence: Synthetic oligonucleotide
uucccucgaagacuucggg

SEQ ID NO: 1259613 - RNA, 19 nt, Artificial Sequence
  Description of Artificial Sequence: Synthetic oligonucleotide
gagucgacuggcaggaggg

SEQ ID NO: 1259614 - RNA, 19 nt, Artificial Sequence
  Description of Artificial Sequence: Synthetic oligonucleotide
gacaugaagaagggaugcg

SEQ ID NO: 1259615 - RNA, 19 nt, Artificial Sequence
  Description of Artificial Sequence: Synthetic oligonucleotide
guaggugggaucaucuugc

SEQ ID NO: 1259616 - RNA, 19 nt, Artificial Sequence
  Description of Artificial Sequence: Synthetic oligonucleotide
gagacaugaagaagggaug

SEQ ID NO: 1259617 - RNA, 19 nt, Artificial Sequence
  Description of Artificial Sequence: Synthetic oligonucleotide
gagaauuucuugaggcacc

SEQ ID NO: 1259618 - RNA, 19 nt, Artificial Sequence
  Description of Artificial Sequence: Synthetic oligonucleotide
gcaguugguauccacgggg

SEQ ID NO: 1259619 - RNA, 19 nt, Artificial Sequence
  Description of Artificial Sequence: Synthetic oligonucleotide
ucggauggaggacuggcac

SEQ ID NO: 1259620 - RNA, 19 nt, Artificial Sequence
  Description of Artificial Sequence: Synthetic oligonucleotide
aagggaugcggaaccggcc

SEQ ID NO: 1259621 - RNA, 19 nt, Artificial Sequence
  Description of Artificial Sequence: Synthetic oligonucleotide
cacggggaagaauaagggc

SEQ ID NO: 1259622 - RNA, 19 nt, Artificial Sequence
  Description of Artificial Sequence: Synthetic oligonucleotide
caugcgucggaucagcguc

SEQ ID NO: 1259623 - RNA, 19 nt, Artificial Sequence
  Description of Artificial Sequence: Synthetic oligonucleotide
aacggugccggaacacgcc

SEQ ID NO: 1259624 - RNA, 19 nt, Artificial Sequence
  Description of Artificial Sequence: Synthetic oligonucleotide
acggggaagaauaagggcu

SEQ ID NO: 1259625 - RNA, 19 nt, Artificial Sequence
  Description of Artificial Sequence: Synthetic oligonucleotide
agguuuaagccaggaacac

SEQ ID NO: 1259626 - RNA, 19 nt, Artificial Sequence
  Description of Artificial Sequence: Synthetic oligonucleotide
uuccccgauccacacaucu

SEQ ID NO: 1259627 - RNA, 19 nt, Artificial Sequence
  Description of Artificial Sequence: Synthetic oligonucleotide
acuuaaaaccaugacguua

SEQ ID NO: 1259628 - RNA, 19 nt, Artificial Sequence
  Description of Artificial Sequence: Synthetic oligonucleotide
ugguauccggacaggaacu

SEQ ID NO: 1259629 - RNA, 19 nt, Artificial Sequence
  Description of Artificial Sequence: Synthetic oligonucleotide
aggagguaguaaauggccg

SEQ ID NO: 1259630 - RNA, 19 nt, Artificial Sequence
  Description of Artificial Sequence: Synthetic oligonucleotide
ugccggucgaugccaaggg

SEQ ID NO: 1259631 - RNA, 19 nt, Artificial Sequence
  Description of Artificial Sequence: Synthetic oligonucleotide
caucuggugagucgacugg

SEQ ID NO: 1259632 - RNA, 19 nt, Artificial Sequence
  Description of Artificial Sequence: Synthetic oligonucleotide
guacucaugccuccucggg

SEQ ID NO: 1259633 - RNA, 19 nt, Artificial Sequence
  Description of Artificial Sequence: Synthetic oligonucleotide
ucugucuccuauuuauaua

SEQ ID NO: 1259634 - RNA, 19 nt, Artificial Sequence
  Description of Artificial Sequence: Synthetic oligonucleotide
ugaggcaccuccagacugc

SEQ ID NO: 1259635 - RNA, 19 nt, Artificial Sequence
  Description of Artificial Sequence: Synthetic oligonucleotide
ugugguauccggacaggaa

SEQ ID NO: 1259636 - RNA, 19 nt, Artificial Sequence
  Description of Artificial Sequence: Synthetic oligonucleotide
aucuggugagucgacuggc

SEQ ID NO: 1259637 - RNA, 19 nt, Artificial Sequence
  Description of Artificial Sequence: Synthetic oligonucleotide
agacugcugagguccgagc

SEQ ID NO: 1259638 - RNA, 19 nt, Artificial Sequence
  Description of Artificial Sequence: Synthetic oligonucleotide
ucgacuggcaggagggaca

SEQ ID NO: 1259639 - RNA, 19 nt, Artificial Sequence
  Description of Artificial Sequence: Synthetic oligonucleotide
acaaaaguguauacaaaau

SEQ ID NO: 1259640 - RNA, 19 nt, Artificial Sequence
  Description of Artificial Sequence: Synthetic oligonucleotide
cuucccucgaagacuucgg

SEQ ID NO: 1259641 - RNA, 19 nt, Artificial Sequence
  Description of Artificial Sequence: Synthetic oligonucleotide
gaacugugggagacaaggg

SEQ ID NO: 1259642 - RNA, 19 nt, Artificial Sequence
  Description of Artificial Sequence: Synthetic oligonucleotide
ugacuagaagacacagaaa

SEQ ID NO: 1259643 - RNA, 19 nt, Artificial Sequence
  Description of Artificial Sequence: Synthetic oligonucleotide
cccugcauggaguaggugg

SEQ ID NO: 1259644 - RNA, 19 nt, Artificial Sequence
  Description of Artificial Sequence: Synthetic oligonucleotide
acucaugccuccucgggga

SEQ ID NO: 1259645 - RNA, 19 nt, Artificial Sequence
  Description of Artificial Sequence: Synthetic oligonucleotide
agccccaggacugauagcu

SEQ ID NO: 1259646 - RNA, 19 nt, Artificial Sequence
  Description of Artificial Sequence: Synthetic oligonucleotide
ugcucauuguagucgccca

SEQ ID NO: 1259647 - RNA, 19 nt, Artificial Sequence
  Description of Artificial Sequence: Synthetic oligonucleotide
ggaagaauaagggcugaag

SEQ ID NO: 1259648 - RNA, 19 nt, Artificial Sequence
  Description of Artificial Sequence: Synthetic oligonucleotide
gaacacgccacugcaguug

SEQ ID NO: 1259649 - RNA, 19 nt, Artificial Sequence
  Description of Artificial Sequence: Synthetic oligonucleotide
cuucgagcagguuccugcc

SEQ ID NO: 1259650 - RNA, 19 nt, Artificial Sequence
  Description of Artificial Sequence: Synthetic oligonucleotide
caaacguggugcagauggg

SEQ ID NO: 1259651 - RNA, 19 nt, Artificial Sequence
  Description of Artificial Sequence: Synthetic oligonucleotide
gucuugagacaugaagaag

SEQ ID NO: 1259652 - RNA, 19 nt, Artificial Sequence
  Description of Artificial Sequence: Synthetic oligonucleotide
ggaucagcgucucacaguc

SEQ ID NO: 1259653 - RNA, 19 nt, Artificial Sequence
  Description of Artificial Sequence: Synthetic oligonucleotide
uucuccgucuugagguccc

SEQ ID NO: 1259654 - RNA, 19 nt, Artificial Sequence
  Description of Artificial Sequence: Synthetic oligonucleotide
uccucggggagcucggaug

SEQ ID NO: 1259655 - RNA, 19 nt, Artificial Sequence
  Description of Artificial Sequence: Synthetic oligonucleotide
ucccucgaagacuucggga

SEQ ID NO: 1259656 - RNA, 19 nt, Artificial Sequence
  Description of Artificial Sequence: Synthetic oligonucleotide
guauccacggggaagaaua

SEQ ID NO: 1259657 - RNA, 19 nt, Artificial Sequence
  Description of Artificial Sequence: Synthetic oligonucleotide
gacggaacggugccggaac

SEQ ID NO: 1259658 - RNA, 19 nt, Artificial Sequence
  Description of Artificial Sequence: Synthetic oligonucleotide
aguaaagugcuugucgcuu

SEQ ID NO: 1259659 - RNA, 19 nt, Artificial Sequence
  Description of Artificial Sequence: Synthetic oligonucleotide
ucagugucggcagguuggg

SEQ ID NO: 1259660 - RNA, 19 nt, Artificial Sequence
  Description of Artificial Sequence: Synthetic oligonucleotide
uuggugucaaguggggcca

SEQ ID NO: 1259661 - RNA, 19 nt, Artificial Sequence
  Description of Artificial Sequence: Synthetic oligonucleotide
uggcgugccaacccuuuga

SEQ ID NO: 1259662 - RNA, 19 nt, Artificial Sequence
  Description of Artificial Sequence: Synthetic oligonucleotide
cuucaacacaaacguggug

SEQ ID NO: 1259663 - RNA, 19 nt, Artificial Sequence
  Description of Artificial Sequence: Synthetic oligonucleotide
uuacuguccccuggagagg

SEQ ID NO: 1259664 - RNA, 19 nt, Artificial Sequence
  Description of Artificial Sequence: Synthetic oligonucleotide
gacguuacuguccccugga

SEQ ID NO: 1259665 - RNA, 19 nt, Artificial Sequence
  Description of Artificial Sequence: Synthetic oligonucleotide
gugucggcagguugggucc

SEQ ID NO: 1259666 - RNA, 19 nt, Artificial Sequence
  Description of Artificial Sequence: Synthetic oligonucleotide
uggguccgucaaaggaagg

SEQ ID NO: 1259667 - RNA, 19 nt, Artificial Sequence
  Description of Artificial Sequence: Synthetic oligonucleotide
gcgggcacagcagagaggg

SEQ ID NO: 1259668 - RNA, 19 nt, Artificial Sequence
  Description of Artificial Sequence: Synthetic oligonucleotide
gaucugugguauccggaca

SEQ ID NO: 1259669 - RNA, 19 nt, Artificial Sequence
  Description of Artificial Sequence: Synthetic oligonucleotide
cuggugagucgacuggcag

SEQ ID NO: 1259670 - RNA, 19 nt, Artificial Sequence
  Description of Artificial Sequence: Synthetic oligonucleotide
uauccacggggaagaauaa

SEQ ID NO: 1259671 - RNA, 19 nt, Artificial Sequence
  Description of Artificial Sequence: Synthetic oligonucleotide
auggccgcaaagugguugu

SEQ ID NO: 1259672 - RNA, 19 nt, Artificial Sequence
  Description of Artificial Sequence: Synthetic oligonucleotide
gguuggguccgucaaagga

SEQ ID NO: 1259673 - RNA, 19 nt, Artificial Sequence
  Description of Artificial Sequence: Synthetic oligonucleotide
ggccgugcagccuugcagg

SEQ ID NO: 1259674 - RNA, 19 nt, Artificial Sequence
  Description of Artificial Sequence: Synthetic oligonucleotide
augacguuacuguccccug

SEQ ID NO: 1259675 - RNA, 19 nt, Artificial Sequence
  Description of Artificial Sequence: Synthetic oligonucleotide
agccugcauccaucggugc

SEQ ID NO: 1259676 - RNA, 19 nt, Artificial Sequence
  Description of Artificial Sequence: Synthetic oligonucleotide
acacaaacguggugcagau

SEQ ID NO: 1259677 - RNA, 19 nt, Artificial Sequence
  Description of Artificial Sequence: Synthetic oligonucleotide
ccacggggaagaauaaggg

SEQ ID NO: 1259678 - RNA, 19 nt, Artificial Sequence
  Description of Artificial Sequence: Synthetic oligonucleotide
agguuggguccgucaaagg

SEQ ID NO: 1259679 - RNA, 19 nt, Artificial Sequence
  Description of Artificial Sequence: Synthetic oligonucleotide
gaacggugccggaacacgc

SEQ ID NO: 1259680 - RNA, 19 nt, Artificial Sequence
  Description of Artificial Sequence: Synthetic oligonucleotide
gaggguugacagugacuag

SEQ ID NO: 1259681 - RNA, 19 nt, Artificial Sequence
  Description of Artificial Sequence: Synthetic oligonucleotide
acuccuucccucgaagacu

SEQ ID NO: 1259682 - RNA, 19 nt, Artificial Sequence
  Description of Artificial Sequence: Synthetic oligonucleotide
gagguccgagcuucggagc

SEQ ID NO: 1259683 - RNA, 19 nt, Artificial Sequence
  Description of Artificial Sequence: Synthetic oligonucleotide
aggccuuugaucuguggua

SEQ ID NO: 1259684 - RNA, 19 nt, Artificial Sequence
  Description of Artificial Sequence: Synthetic oligonucleotide
aguggugcuguaacuggag

SEQ ID NO: 1259685 - RNA, 19 nt, Artificial Sequence
  Description of Artificial Sequence: Synthetic oligonucleotide
cagacugagccaaggccug

SEQ ID NO: 1259686 - RNA, 19 nt, Artificial Sequence
  Description of Artificial Sequence: Synthetic oligonucleotide
ggucagccugcauccaucg

SEQ ID NO: 1259687 - RNA, 19 nt, Artificial Sequence
  Description of Artificial Sequence: Synthetic oligonucleotide
uggucagccugcauccauc

SEQ ID NO: 1259688 - RNA, 19 nt, Artificial Sequence
  Description of Artificial Sequence: Synthetic oligonucleotide
cugcgggcacagcagagag

SEQ ID NO: 1259689 - RNA, 19 nt, Artificial Sequence
  Description of Artificial Sequence: Synthetic oligonucleotide
uauacagaguggugcugua

SEQ ID NO: 1259690 - RNA, 19 nt, Artificial Sequence
  Description of Artificial Sequence: Synthetic oligonucleotide
agguuccugccuucccgac

SEQ ID NO: 1259691 - RNA, 19 nt, Artificial Sequence
  Description of Artificial Sequence: Synthetic oligonucleotide
ggaagguacucaugccucc

SEQ ID NO: 1259692 - RNA, 19 nt, Artificial Sequence
  Description of Artificial Sequence: Synthetic oligonucleotide
gagguaguaaauggccgca

SEQ ID NO: 1259693 - RNA, 19 nt, Artificial Sequence
  Description of Artificial Sequence: Synthetic oligonucleotide
agugacuagaagacacaga

SEQ ID NO: 1259694 - RNA, 19 nt, Artificial Sequence
  Description of Artificial Sequence: Synthetic oligonucleotide
uuggagguguagcccugca

SEQ ID NO: 1259695 - RNA, 19 nt, Artificial Sequence
  Description of Artificial Sequence: Synthetic oligonucleotide
guuggguccgucaaaggaa

SEQ ID NO: 1259696 - RNA, 19 nt, Artificial Sequence
  Description of Artificial Sequence: Synthetic oligonucleotide
acguuacuguccccuggag

SEQ ID NO: 1259697 - RNA, 19 nt, Artificial Sequence
  Description of Artificial Sequence: Synthetic oligonucleotide
gugucugucuccuauuuau

SEQ ID NO: 1259698 - RNA, 19 nt, Artificial Sequence
  Description of Artificial Sequence: Synthetic oligonucleotide
gaagggagccacagacgag

SEQ ID NO: 1259699 - RNA, 19 nt, Artificial Sequence
  Description of Artificial Sequence: Synthetic oligonucleotide
ccccgauccacacaucugg

SEQ ID NO: 1259700 - RNA, 19 nt, Artificial Sequence
  Description of Artificial Sequence: Synthetic oligonucleotide
auccggacaggaacugugg

SEQ ID NO: 1259701 - RNA, 19 nt, Artificial Sequence
  Description of Artificial Sequence: Synthetic oligonucleotide
aggugggaucaucuugcug

SEQ ID NO: 1259702 - RNA, 19 nt, Artificial Sequence
  Description of Artificial Sequence: Synthetic oligonucleotide
cacacaucuggugagucga

SEQ ID NO: 1259703 - RNA, 19 nt, Artificial Sequence
  Description of Artificial Sequence: Synthetic oligonucleotide
agcgucucacagucuugag

SEQ ID NO: 1259704 - RNA, 19 nt, Artificial Sequence
  Description of Artificial Sequence: Synthetic oligonucleotide
ggguccgucaaaggaaggg

SEQ ID NO: 1259705 - RNA, 19 nt, Artificial Sequence
  Description of Artificial Sequence: Synthetic oligonucleotide
gcuuguagaaauucccaaa

SEQ ID NO: 1259706 - RNA, 19 nt, Artificial Sequence
  Description of Artificial Sequence: Synthetic oligonucleotide
ggaacggugccggaacacg

SEQ ID NO: 1259707 - RNA, 19 nt, Artificial Sequence
  Description of Artificial Sequence: Synthetic oligonucleotide
uggagguguagcccugcau

SEQ ID NO: 1259708 - RNA, 19 nt, Artificial Sequence
  Description of Artificial Sequence: Synthetic oligonucleotide
acagugacuagaagacaca

SEQ ID NO: 1259709 - RNA, 19 nt, Artificial Sequence
  Description of Artificial Sequence: Synthetic oligonucleotide
gaagacuucgggagcugca

SEQ ID NO: 1259710 - RNA, 19 nt, Artificial Sequence
  Description of Artificial Sequence: Synthetic oligonucleotide
gggagaauuucuugaggca

SEQ ID NO: 1259711 - RNA, 19 nt, Artificial Sequence
  Description of Artificial Sequence: Synthetic oligonucleotide
auccacggggaagaauaag

SEQ ID NO: 1259712 - RNA, 19 nt, Artificial Sequence
  Description of Artificial Sequence: Synthetic oligonucleotide
uggcaggagggacacuuuu

SEQ ID NO: 1259713 - RNA, 19 nt, Artificial Sequence
  Description of Artificial Sequence: Synthetic oligonucleotide
uaggugggaucaucuugcu

SEQ ID NO: 1259714 - RNA, 19 nt, Artificial Sequence
  Description of Artificial Sequence: Synthetic oligonucleotide
ccggucgaugccaagggcc

SEQ ID NO: 1259715 - RNA, 19 nt, Artificial Sequence
  Description of Artificial Sequence: Synthetic oligonucleotide
ugugaccaagggagguuua

SEQ ID NO: 1259716 - RNA, 19 nt, Artificial Sequence
  Description of Artificial Sequence: Synthetic oligonucleotide
uguucagccccaggacuga

SEQ ID NO: 1259717 - RNA, 19 nt, Artificial Sequence
  Description of Artificial Sequence: Synthetic oligonucleotide
agacgaggacauacagcac

SEQ ID NO: 1259718 - RNA, 19 nt, Artificial Sequence
  Description of Artificial Sequence: Synthetic oligonucleotide
gucagccugcauccaucgg

SEQ ID NO: 1259719 - RNA, 19 nt, Artificial Sequence
  Description of Artificial Sequence: Synthetic oligonucleotide
gucgcuucugacacacagc

SEQ ID NO: 1259720 - RNA, 19 nt, Artificial Sequence
  Description of Artificial Sequence: Synthetic oligonucleotide
agacaagggcuggcugccc

SEQ ID NO: 1259721 - RNA, 19 nt, Artificial Sequence
  Description of Artificial Sequence: Synthetic oligonucleotide
ccgguggacuaugugaugg

SEQ ID NO: 1259722 - RNA, 19 nt, Artificial Sequence
  Description of Artificial Sequence: Synthetic oligonucleotide
ucugccggucgaugccaag

SEQ ID NO: 1259723 - RNA, 19 nt, Artificial Sequence
  Description of Artificial Sequence: Synthetic oligonucleotide
gccacagacgaggacauac

SEQ ID NO: 1259724 - RNA, 19 nt, Artificial Sequence
  Description of Artificial Sequence: Synthetic oligonucleotide
ucuacccuguguggaggug

SEQ ID NO: 1259725 - RNA, 19 nt, Artificial Sequence
  Description of Artificial Sequence: Synthetic oligonucleotide
ucggagccggggcugucug

SEQ ID NO: 1259726 - RNA, 19 nt, Artificial Sequence
  Description of Artificial Sequence: Synthetic oligonucleotide
gacuucgggagcugcauau

SEQ ID NO: 1259727 - RNA, 19 nt, Artificial Sequence
  Description of Artificial Sequence: Synthetic oligonucleotide
cagacugcugagguccgag

SEQ ID NO: 1259728 - RNA, 19 nt, Artificial Sequence
  Description of Artificial Sequence: Synthetic oligonucleotide
ccaagggagguuuaagcca

SEQ ID NO: 1259729 - RNA, 19 nt, Artificial Sequence
  Description of Artificial Sequence: Synthetic oligonucleotide
gccacugcaguugguaucc

SEQ ID NO: 1259730 - RNA, 19 nt, Artificial Sequence
  Description of Artificial Sequence: Synthetic oligonucleotide
ccggaaagggucacauggg

SEQ ID NO: 1259731 - RNA, 19 nt, Artificial Sequence
  Description of Artificial Sequence: Synthetic oligonucleotide
gucgaugccaagggccugc

SEQ ID NO: 1259732 - RNA, 19 nt, Artificial Sequence
  Description of Artificial Sequence: Synthetic oligonucleotide
agacugagccaaggccugg

SEQ ID NO: 1259733 - RNA, 19 nt, Artificial Sequence
  Description of Artificial Sequence: Synthetic oligonucleotide
ggggagacggaacggugcc

SEQ ID NO: 1259734 - RNA, 19 nt, Artificial Sequence
  Description of Artificial Sequence: Synthetic oligonucleotide
acggugccggaacacgcca

SEQ ID NO: 1259735 - RNA, 19 nt, Artificial Sequence
  Description of Artificial Sequence: Synthetic oligonucleotide
gugggaucaucuugcugca

SEQ ID NO: 1259736 - RNA, 19 nt, Artificial Sequence
  Description of Artificial Sequence: Synthetic oligonucleotide
ccgucaaaggaagggagcc

SEQ ID NO: 1259737 - RNA, 19 nt, Artificial Sequence
  Description of Artificial Sequence: Synthetic oligonucleotide
gugucaaguggggccaccc

SEQ ID NO: 1259738 - RNA, 19 nt, Artificial Sequence
  Description of Artificial Sequence: Synthetic oligonucleotide
uucagccccaggacugaua

SEQ ID NO: 1259739 - RNA, 19 nt, Artificial Sequence
  Description of Artificial Sequence: Synthetic oligonucleotide
agcaugcgucggaucagcg

SEQ ID NO: 1259740 - RNA, 19 nt, Artificial Sequence
  Description of Artificial Sequence: Synthetic oligonucleotide
gaugcggaaccggcccucc

SEQ ID NO: 1259741 - RNA, 19 nt, Artificial Sequence
  Description of Artificial Sequence: Synthetic oligonucleotide
acggaacggugccggaaca

SEQ ID NO: 1259742 - RNA, 19 nt, Artificial Sequence
  Description of Artificial Sequence: Synthetic oligonucleotide
ucgaagacuucgggagcug

SEQ ID NO: 1259743 - RNA, 19 nt, Artificial Sequence
  Description of Artificial Sequence: Synthetic oligonucleotide
ccuucccucgaagacuucg

SEQ ID NO: 1259744 - RNA, 19 nt, Artificial Sequence
  Description of Artificial Sequence: Synthetic oligonucleotide
caugacguuacuguccccu

SEQ ID NO: 1259745 - RNA, 19 nt, Artificial Sequence
  Description of Artificial Sequence: Synthetic oligonucleotide
acgccacugcaguugguau

SEQ ID NO: 1259746 - RNA, 19 nt, Artificial Sequence
  Description of Artificial Sequence: Synthetic oligonucleotide
ugggaucaucuugcugcag

SEQ ID NO: 1259747 - RNA, 19 nt, Artificial Sequence
  Description of Artificial Sequence: Synthetic oligonucleotide
cagcaugcgucggaucagc

SEQ ID NO: 1259748 - RNA, 19 nt, Artificial Sequence
  Description of Artificial Sequence: Synthetic oligonucleotide
gucgacuggcaggagggac

SEQ ID NO: 1259749 - RNA, 19 nt, Artificial Sequence
  Description of Artificial Sequence: Synthetic oligonucleotide
gguuuaagccaggaacaca

SEQ ID NO: 1259750 - RNA, 19 nt, Artificial Sequence
  Description of Artificial Sequence: Synthetic oligonucleotide
cugagguccgagcuucgga

SEQ ID NO: 1259751 - RNA, 19 nt, Artificial Sequence
  Description of Artificial Sequence: Synthetic oligonucleotide
gguauccggacaggaacug

SEQ ID NO: 1259752 - RNA, 19 nt, Artificial Sequence
  Description of Artificial Sequence: Synthetic oligonucleotide
uccgagcuucggagccggg

SEQ ID NO: 1259753 - RNA, 19 nt, Artificial Sequence
  Description of Artificial Sequence: Synthetic oligonucleotide
uguagucgcccagguugga

SEQ ID NO: 1259754 - RNA, 19 nt, Artificial Sequence
  Description of Artificial Sequence: Synthetic oligonucleotide
gguccgucaaaggaaggga

SEQ ID NO: 1259755 - RNA, 19 nt, Artificial Sequence
  Description of Artificial Sequence: Synthetic oligonucleotide
gcgucucacagucuugaga

SEQ ID NO: 1259756 - RNA, 19 nt, Artificial Sequence
  Description of Artificial Sequence: Synthetic oligonucleotide
cuggcgugccaacccuuug

SEQ ID NO: 1259757 - RNA, 19 nt, Artificial Sequence
  Description of Artificial Sequence: Synthetic oligonucleotide
auccaucggugcuggcgga

SEQ ID NO: 1259758 - RNA, 19 nt, Artificial Sequence
  Description of Artificial Sequence: Synthetic oligonucleotide
ggccgcaaagugguuguag

SEQ ID NO: 1259759 - RNA, 19 nt, Artificial Sequence
  Description of Artificial Sequence: Synthetic oligonucleotide
agcuucggagccggggcug

SEQ ID NO: 1259760 - RNA, 19 nt, Artificial Sequence
  Description of Artificial Sequence: Synthetic oligonucleotide
gagacggaacggugccgga

SEQ ID NO: 1259761 - RNA, 19 nt, Artificial Sequence
  Description of Artificial Sequence: Synthetic oligonucleotide
agagggccggaaaggguca

SEQ ID NO: 1259762 - RNA, 19 nt, Artificial Sequence
  Description of Artificial Sequence: Synthetic oligonucleotide
agacggaacggugccggaa

SEQ ID NO: 1259763 - RNA, 19 nt, Artificial Sequence
  Description of Artificial Sequence: Synthetic oligonucleotide
cuccgucuugaggucccgg

SEQ ID NO: 1259764 - RNA, 19 nt, Artificial Sequence
  Description of Artificial Sequence: Synthetic oligonucleotide
cacaaacguggugcagaug

SEQ ID NO: 1259765 - RNA, 19 nt, Artificial Sequence
  Description of Artificial Sequence: Synthetic oligonucleotide
ggucccgguggacuaugug

SEQ ID NO: 1259766 - RNA, 19 nt, Artificial Sequence
  Description of Artificial Sequence: Synthetic oligonucleotide
ucgaugccaagggccugca

SEQ ID NO: 1259767 - RNA, 19 nt, Artificial Sequence
  Description of Artificial Sequence: Synthetic oligonucleotide
gagaggguugacagugacu

SEQ ID NO: 1259768 - RNA, 19 nt, Artificial Sequence
  Description of Artificial Sequence: Synthetic oligonucleotide
cgagcuucggagccggggc

SEQ ID NO: 1259769 - RNA, 19 nt, Artificial Sequence
  Description of Artificial Sequence: Synthetic oligonucleotide
ccaggccuuugaucugugg

SEQ ID NO: 1259770 - RNA, 19 nt, Artificial Sequence
  Description of Artificial Sequence: Synthetic oligonucleotide
agucgacuggcaggaggga

SEQ ID NO: 1259771 - RNA, 19 nt, Artificial Sequence
  Description of Artificial Sequence: Synthetic oligonucleotide
caaagugguuguagcugcu

SEQ ID NO: 1259772 - RNA, 19 nt, Artificial Sequence
  Description of Artificial Sequence: Synthetic oligonucleotide
cccaggacugauagcugug

SEQ ID NO: 1259773 - RNA, 19 nt, Artificial Sequence
  Description of Artificial Sequence: Synthetic oligonucleotide
uccaucggugcuggcggau

SEQ ID NO: 1259774 - RNA, 19 nt, Artificial Sequence
  Description of Artificial Sequence: Synthetic oligonucleotide
aaauggccgcaaagugguu

SEQ ID NO: 1259775 - RNA, 19 nt, Artificial Sequence
  Description of Artificial Sequence: Synthetic oligonucleotide
gggagacggaacggugccg

SEQ ID NO: 1259776 - RNA, 19 nt, Artificial Sequence
  Description of Artificial Sequence: Synthetic oligonucleotide
ugguauccacggggaagaa

SEQ ID NO: 1259777 - RNA, 19 nt, Artificial Sequence
  Description of Artificial Sequence: Synthetic oligonucleotide
ugcgucggaucagcgucuc

SEQ ID NO: 1259778 - RNA, 19 nt, Artificial Sequence
  Description of Artificial Sequence: Synthetic oligonucleotide
augcgucggaucagcgucu

SEQ ID NO: 1259779 - RNA, 19 nt, Artificial Sequence
  Description of Artificial Sequence: Synthetic oligonucleotide
gagcuucggagccggggcu

SEQ ID NO: 1259780 - RNA, 19 nt, Artificial Sequence
  Description of Artificial Sequence: Synthetic oligonucleotide
ggacuaugugaugguugug

SEQ ID NO: 1259781 - RNA, 19 nt, Artificial Sequence
  Description of Artificial Sequence: Synthetic oligonucleotide
gugccggaacacgccacug

SEQ ID NO: 1259782 - RNA, 19 nt, Artificial Sequence
  Description of Artificial Sequence: Synthetic oligonucleotide
gccggucgaugccaagggc

SEQ ID NO: 1259783 - RNA, 19 nt, Artificial Sequence
  Description of Artificial Sequence: Synthetic oligonucleotide
ggccggaaagggucacaug

SEQ ID NO: 1259784 - RNA, 19 nt, Artificial Sequence
  Description of Artificial Sequence: Synthetic oligonucleotide
cacgccacugcaguuggua

SEQ ID NO: 1259785 - RNA, 19 nt, Artificial Sequence
  Description of Artificial Sequence: Synthetic oligonucleotide
ccgggaugagggcugggug

SEQ ID NO: 1259786 - RNA, 19 nt, Artificial Sequence
  Description of Artificial Sequence: Synthetic oligonucleotide
cuggcacaccuggcgugcc

SEQ ID NO: 1259787 - RNA, 19 nt, Artificial Sequence
  Description of Artificial Sequence: Synthetic oligonucleotide
gugguuguagcugcuguuu

SEQ ID NO: 1259788 - RNA, 19 nt, Artificial Sequence
  Description of Artificial Sequence: Synthetic oligonucleotide
gccgugcagccuugcaggc

SEQ ID NO: 1259789 - RNA, 19 nt, Artificial Sequence
  Description of Artificial Sequence: Synthetic oligonucleotide
ggugucaaguggggccacc

SEQ ID NO: 1259790 - RNA, 19 nt, Artificial Sequence
  Description of Artificial Sequence: Synthetic oligonucleotide
gugagucgacuggcaggag

SEQ ID NO: 1259791 - RNA, 19 nt, Artificial Sequence
  Description of Artificial Sequence: Synthetic oligonucleotide
ggagcucggauggaggacu

SEQ ID NO: 1259792 - RNA, 19 nt, Artificial Sequence
  Description of Artificial Sequence: Synthetic oligonucleotide
cucuacccuguguggaggu

SEQ ID NO: 1259793 - RNA, 19 nt, Artificial Sequence
  Description of Artificial Sequence: Synthetic oligonucleotide
ccgagcuucggagccgggg

SEQ ID NO: 1259794 - RNA, 19 nt, Artificial Sequence
  Description of Artificial Sequence: Synthetic oligonucleotide
guauccggacaggaacugu

SEQ ID NO: 1259795 - RNA, 19 nt, Artificial Sequence
  Description of Artificial Sequence: Synthetic oligonucleotide
ggacuggcacaccuggcgu

SEQ ID NO: 1259796 - RNA, 19 nt, Artificial Sequence
  Description of Artificial Sequence: Synthetic oligonucleotide
guggucagccugcauccau

SEQ ID NO: 1259797 - RNA, 19 nt, Artificial Sequence
  Description of Artificial Sequence: Synthetic oligonucleotide
cguuacuguccccuggaga

SEQ ID NO: 1259798 - RNA, 19 nt, Artificial Sequence
  Description of Artificial Sequence: Synthetic oligonucleotide
cgaagacuucgggagcugc

SEQ ID NO: 1259799 - RNA, 19 nt, Artificial Sequence
  Description of Artificial Sequence: Synthetic oligonucleotide
caucggugcuggcggaucu

SEQ ID NO: 1259800 - RNA, 19 nt, Artificial Sequence
  Description of Artificial Sequence: Synthetic oligonucleotide
ucccgacugcuggccgugc

SEQ ID NO: 1259801 - RNA, 19 nt, Artificial Sequence
  Description of Artificial Sequence: Synthetic oligonucleotide
gggagcucggauggaggac

SEQ ID NO: 1259802 - RNA, 19 nt, Artificial Sequence
  Description of Artificial Sequence: Synthetic oligonucleotide
gggaagaauaagggcugaa

SEQ ID NO: 1259803 - RNA, 19 nt, Artificial Sequence
  Description of Artificial Sequence: Synthetic oligonucleotide
cuggccgugcagccuugca

SEQ ID NO: 1259804 - RNA, 19 nt, Artificial Sequence
  Description of Artificial Sequence: Synthetic oligonucleotide
cuucccgacugcuggccgu

SEQ ID NO: 1259805 - RNA, 19 nt, Artificial Sequence
  Description of Artificial Sequence: Synthetic oligonucleotide
cacguggacaggggcucuc

SEQ ID NO: 1259806 - RNA, 19 nt, Artificial Sequence
  Description of Artificial Sequence: Synthetic oligonucleotide
cauuguagucgcccagguu

SEQ ID NO: 1259807 - RNA, 19 nt, Artificial Sequence
  Description of Artificial Sequence: Synthetic oligonucleotide
ucggcagguuggguccguc

SEQ ID NO: 1259808 - RNA, 19 nt, Artificial Sequence
  Description of Artificial Sequence: Synthetic oligonucleotide
uguguccagcaggcguguu

SEQ ID NO: 1259809 - RNA, 19 nt, Artificial Sequence
  Description of Artificial Sequence: Synthetic oligonucleotide
gcugggugcuuccccgauc

SEQ ID NO: 1259810 - RNA, 19 nt, Artificial Sequence
  Description of Artificial Sequence: Synthetic oligonucleotide
gguuccugccuucccgacu

SEQ ID NO: 1259811 - RNA, 19 nt, Artificial Sequence
  Description of Artificial Sequence: Synthetic oligonucleotide
gcaugcgucggaucagcgu

SEQ ID NO: 1259812 - RNA, 19 nt, Artificial Sequence
  Description of Artificial Sequence: Synthetic oligonucleotide
ccaugacguuacugucccc

SEQ ID NO: 1259813 - RNA, 19 nt, Artificial Sequence
  Description of Artificial Sequence: Synthetic oligonucleotide
ggugccggaacacgccacu

SEQ ID NO: 1259814 - RNA, 19 nt, Artificial Sequence
  Description of Artificial Sequence: Synthetic oligonucleotide
gcgugccaacccuuugauc

SEQ ID NO: 1259815 - RNA, 19 nt, Artificial Sequence
  Description of Artificial Sequence: Synthetic oligonucleotide
gccuucccgacugcuggcc

SEQ ID NO: 1259816 - RNA, 19 nt, Artificial Sequence
  Description of Artificial Sequence: Synthetic oligonucleotide
cccgguggacuaugugaug

SEQ ID NO: 1259817 - RNA, 19 nt, Artificial Sequence
  Description of Artificial Sequence: Synthetic oligonucleotide
gugagcuguggaggucaca

SEQ ID NO: 1259818 - RNA, 19 nt, Artificial Sequence
  Description of Artificial Sequence: Synthetic oligonucleotide
cucugccggucgaugccaa

SEQ ID NO: 1259819 - RNA, 19 nt, Artificial Sequence
  Description of Artificial Sequence: Synthetic oligonucleotide
ggccuuugaucugugguau

SEQ ID NO: 1259820 - RNA, 19 nt, Artificial Sequence
  Description of Artificial Sequence: Synthetic oligonucleotide
uggccgcaaagugguugua

SEQ ID NO: 1259821 - RNA, 19 nt, Artificial Sequence
  Description of Artificial Sequence: Synthetic oligonucleotide
ggaacacgccacugcaguu

SEQ ID NO: 1259822 - RNA, 19 nt, Artificial Sequence
  Description of Artificial Sequence: Synthetic oligonucleotide
ggcgugccaacccuuugau

SEQ ID NO: 1259823 - RNA, 19 nt, Artificial Sequence
  Description of Artificial Sequence: Synthetic oligonucleotide
caccuggcgugccaacccu

SEQ ID NO: 1259824 - RNA, 19 nt, Artificial Sequence
  Description of Artificial Sequence: Synthetic oligonucleotide
cuucggagccggggcuguc

SEQ ID NO: 1259825 - RNA, 19 nt, Artificial Sequence
  Description of Artificial Sequence: Synthetic oligonucleotide
accuggcgugccaacccuu

SEQ ID NO: 1259826 - RNA, 19 nt, Artificial Sequence
  Description of Artificial Sequence: Synthetic oligonucleotide
acacgccacugcaguuggu

SEQ ID NO: 1259827 - RNA, 19 nt, Artificial Sequence
  Description of Artificial Sequence: Synthetic oligonucleotide
cggaacggugccggaacac

SEQ ID NO: 1259828 - RNA, 19 nt, Artificial Sequence
  Description of Artificial Sequence: Synthetic oligonucleotide
cggugccggaacacgccac

SEQ ID NO: 1259829 - RNA, 19 nt, Artificial Sequence
  Description of Artificial Sequence: Synthetic oligonucleotide
guucagccccaggacugau

SEQ ID NO: 1259830 - RNA, 19 nt, Artificial Sequence
  Description of Artificial Sequence: Synthetic oligonucleotide
gggccggaaagggucacau

SEQ ID NO: 1259831 - RNA, 19 nt, Artificial Sequence
  Description of Artificial Sequence: Synthetic oligonucleotide
cccgauccacacaucuggu

SEQ ID NO: 1259832 - RNA, 19 nt, Artificial Sequence
  Description of Artificial Sequence: Synthetic oligonucleotide
gcgucggaucagcgucuca

SEQ ID NO: 1259833 - RNA, 19 nt, Artificial Sequence
  Description of Artificial Sequence: Synthetic oligonucleotide
cagugucggcagguugggu

SEQ ID NO: 1259834 - RNA, 19 nt, Artificial Sequence
  Description of Artificial Sequence: Synthetic oligonucleotide
gucggcagguuggguccgu

SEQ ID NO: 1259835 - RNA, 19 nt, Artificial Sequence
  Description of Artificial Sequence: Synthetic oligonucleotide
gcuucggagccggggcugu

SEQ ID NO: 1259836 - RNA, 19 nt, Artificial Sequence
  Description of Artificial Sequence: Synthetic oligonucleotide
ccuggcgugccaacccuuu

SEQ ID NO: 1259837 - RNA, 19 nt, Artificial Sequence
  Description of Artificial Sequence: Synthetic oligonucleotide
cgguggacuaugugauggu

SEQ ID NO: 1259838 - RNA, 19 nt, Artificial Sequence
  Description of Artificial Sequence: Synthetic oligonucleotide
ccaacccuuugaucuuguu

SEQ ID NO: 1259839 - RNA, 19 nt, Artificial Sequence
  Description of Artificial Sequence: Synthetic oligonucleotide
cguggacaggggcucuccu

SEQ ID NO: 1259840 - RNA, 19 nt, Artificial Sequence
  Description of Artificial Sequence: Synthetic oligonucleotide
ccacguggacaggggcucu

SEQ ID NO: 1259841 - RNA, 19 nt, Artificial Sequence
  Description of Artificial Sequence: Synthetic oligonucleotide
uguaacuuaaguuacagga

SEQ ID NO: 1259842 - RNA, 19 nt, Artificial Sequence
  Description of Artificial Sequence: Synthetic oligonucleotide
aguuacaggaaucgaaucc

SEQ ID NO: 1259843 - RNA, 19 nt, Artificial Sequence
  Description of Artificial Sequence: Synthetic oligonucleotide
uucuugguaagauagauga

SEQ ID NO: 1259844 - RNA, 19 nt, Artificial Sequence
  Description of Artificial Sequence: Synthetic oligonucleotide
auaugggaaaacuauacuc

SEQ ID NO: 1259845 - RNA, 19 nt, Artificial Sequence
  Description of Artificial Sequence: Synthetic oligonucleotide
aaaacuauacucagcagac

SEQ ID NO: 1259846 - RNA, 19 nt, Artificial Sequence
  Description of Artificial Sequence: Synthetic oligonucleotide
aaaggugacaucuaaucca

SEQ ID NO: 1259847 - RNA, 19 nt, Artificial Sequence
  Description of Artificial Sequence: Synthetic oligonucleotide
ugacaucuaauccauuugg

SEQ ID NO: 1259848 - RNA, 19 nt, Artificial Sequence
  Description of Artificial Sequence: Synthetic oligonucleotide
aacauuccaccccagagag

SEQ ID NO: 1259849 - RNA, 19 nt, Artificial Sequence
  Description of Artificial Sequence: Synthetic oligonucleotide
ugugguuugaagaaugaca

SEQ ID NO: 1259850 - RNA, 19 nt, Artificial Sequence
  Description of Artificial Sequence: Synthetic oligonucleotide
ugacuggucuuccauaugg

SEQ ID NO: 1259851 - RNA, 19 nt, Artificial Sequence
  Description of Artificial Sequence: Synthetic oligonucleotide
uccauaugaaaacugaaaa

SEQ ID NO: 1259852 - RNA, 19 nt, Artificial Sequence
  Description of Artificial Sequence: Synthetic oligonucleotide
agauucucgcugcacaucc

SEQ ID NO: 1259853 - RNA, 19 nt, Artificial Sequence
  Description of Artificial Sequence: Synthetic oligonucleotide
aagauagaugaauuccgag

SEQ ID NO: 1259854 - RNA, 19 nt, Artificial Sequence
  Description of Artificial Sequence: Synthetic oligonucleotide
acaugugucgaucaaaaca

SEQ ID NO: 1259855 - RNA, 19 nt, Artificial Sequence
  Description of Artificial Sequence: Synthetic oligonucleotide
caugcuaaauccucggacg

SEQ ID NO: 1259856 - RNA, 19 nt, Artificial Sequence
  Description of Artificial Sequence: Synthetic oligonucleotide
ugugucgaucaaaacaucc

SEQ ID NO: 1259857 - RNA, 19 nt, Artificial Sequence
  Description of Artificial Sequence: Synthetic oligonucleotide
aaguuacaggaaucgaauc

SEQ ID NO: 1259858 - RNA, 19 nt, Artificial Sequence
  Description of Artificial Sequence: Synthetic oligonucleotide
aauuccgagagucgaugac

SEQ ID NO: 1259859 - RNA, 19 nt, Artificial Sequence
  Description of Artificial Sequence: Synthetic oligonucleotide
ugugcaugcuaaauccucg

SEQ ID NO: 1259860 - RNA, 19 nt, Artificial Sequence
  Description of Artificial Sequence: Synthetic oligonucleotide
gauguugccaagccggagg

SEQ ID NO: 1259861 - RNA, 19 nt, Artificial Sequence
  Description of Artificial Sequence: Synthetic oligonucleotide
uggcuugucaccaaugggc

SEQ ID NO: 1259862 - RNA, 19 nt, Artificial Sequence
  Description of Artificial Sequence: Synthetic oligonucleotide
acaugaguggcuuauucag

SEQ ID NO: 1259863 - RNA, 19 nt, Artificial Sequence
  Description of Artificial Sequence: Synthetic oligonucleotide
acuuaaguuacaggaaucg

SEQ ID NO: 1259864 - RNA, 19 nt, Artificial Sequence
  Description of Artificial Sequence: Synthetic oligonucleotide
ugaaaaguucuccgaagcc

SEQ ID NO: 1259865 - RNA, 19 nt, Artificial Sequence
  Description of Artificial Sequence: Synthetic oligonucleotide
gagagagacgacuucagug

SEQ ID NO: 1259866 - RNA, 19 nt, Artificial Sequence
  Description of Artificial Sequence: Synthetic oligonucleotide
agauagaugaauuccgaga

SEQ ID NO: 1259867 - RNA, 19 nt, Artificial Sequence
  Description of Artificial Sequence: Synthetic oligonucleotide
aacaugaguggcuuauuca

SEQ ID NO: 1259868 - RNA, 19 nt, Artificial Sequence
  Description of Artificial Sequence: Synthetic oligonucleotide
auguggagaauaccgaauc

SEQ ID NO: 1259869 - RNA, 19 nt, Artificial Sequence
  Description of Artificial Sequence: Synthetic oligonucleotide
aauccucggacgcucgugg

SEQ ID NO: 1259870 - RNA, 19 nt, Artificial Sequence
  Description of Artificial Sequence: Synthetic oligonucleotide
aucaccuccaguauagccc

SEQ ID NO: 1259871 - RNA, 19 nt, Artificial Sequence
  Description of Artificial Sequence: Synthetic oligonucleotide
ugaaccaccacaucuuugu

SEQ ID NO: 1259872 - RNA, 19 nt, Artificial Sequence
  Description of Artificial Sequence: Synthetic oligonucleotide
uccgcauuaccucaaugag

SEQ ID NO: 1259873 - RNA, 19 nt, Artificial Sequence
  Description of Artificial Sequence: Synthetic oligonucleotide
agaauuuccuguuucgccu

SEQ ID NO: 1259874 - RNA, 19 nt, Artificial Sequence
  Description of Artificial Sequence: Synthetic oligonucleotide
uggcuuauucagcugaagc

SEQ ID NO: 1259875 - RNA, 19 nt, Artificial Sequence
  Description of Artificial Sequence: Synthetic oligonucleotide
ucaccaaugggcaccaaca

SEQ ID NO: 1259876 - RNA, 19 nt, Artificial Sequence
  Description of Artificial Sequence: Synthetic oligonucleotide
ugucgaucaaaacauccac

SEQ ID NO: 1259877 - RNA, 19 nt, Artificial Sequence
  Description of Artificial Sequence: Synthetic oligonucleotide
uuaugauccagaagcacuc

SEQ ID NO: 1259878 - RNA, 19 nt, Artificial Sequence
  Description of Artificial Sequence: Synthetic oligonucleotide
aaaauuccuaggcgaagca

SEQ ID NO: 1259879 - RNA, 19 nt, Artificial Sequence
  Description of Artificial Sequence: Synthetic oligonucleotide
uuucucucgaaguuuccag

SEQ ID NO: 1259880 - RNA, 19 nt, Artificial Sequence
  Description of Artificial Sequence: Synthetic oligonucleotide
accgaauccaacaugagug

SEQ ID NO: 1259881 - RNA, 19 nt, Artificial Sequence
  Description of Artificial Sequence: Synthetic oligonucleotide
aacuuaaguuacaggaauc

SEQ ID NO: 1259882 - RNA, 19 nt, Artificial Sequence
  Description of Artificial Sequence: Synthetic oligonucleotide
uguggagaauaccgaaucc

SEQ ID NO: 1259883 - RNA, 19 nt, Artificial Sequence
  Description of Artificial Sequence: Synthetic oligonucleotide
uccucugucggucucccgg

SEQ ID NO: 1259884 - RNA, 19 nt, Artificial Sequence
  Description of Artificial Sequence: Synthetic oligonucleotide
uuuucugcacguccuagga

SEQ ID NO: 1259885 - RNA, 19 nt, Artificial Sequence
  Description of Artificial Sequence: Synthetic oligonucleotide
auuccgagagucgaugacc

SEQ ID NO: 1259886 - RNA, 19 nt, Artificial Sequence
  Description of Artificial Sequence: Synthetic oligonucleotide
gguaagauagaugaauucc

SEQ ID NO: 1259887 - RNA, 19 nt, Artificial Sequence
  Description of Artificial Sequence: Synthetic oligonucleotide
uaacuuuauauaaguuuac

SEQ ID NO: 1259888 - RNA, 19 nt, Artificial Sequence
  Description of Artificial Sequence: Synthetic oligonucleotide
uuucaugugauuuccgcau

SEQ ID NO: 1259889 - RNA, 19 nt, Artificial Sequence
  Description of Artificial Sequence: Synthetic oligonucleotide
caucaaaaugaacaugcug

SEQ ID NO: 1259890 - RNA, 19 nt, Artificial Sequence
  Description of Artificial Sequence: Synthetic oligonucleotide
aucuaauccauuuggcagu

SEQ ID NO: 1259891 - RNA, 19 nt, Artificial Sequence
  Description of Artificial Sequence: Synthetic oligonucleotide
gacgaugccugcuccauag

SEQ ID NO: 1259892 - RNA, 19 nt, Artificial Sequence
  Description of Artificial Sequence: Synthetic oligonucleotide
uaaggauuaugauccagaa

SEQ ID NO: 1259893 - RNA, 19 nt, Artificial Sequence
  Description of Artificial Sequence: Synthetic oligonucleotide
uagaugaauuccgagaguc

SEQ ID NO: 1259894 - RNA, 19 nt, Artificial Sequence
  Description of Artificial Sequence: Synthetic oligonucleotide
guuacaggaaucgaauccc

SEQ ID NO: 1259895 - RNA, 19 nt, Artificial Sequence
  Description of Artificial Sequence: Synthetic oligonucleotide
guaacugccaguaagccuc

SEQ ID NO: 1259896 - RNA, 19 nt, Artificial Sequence
  Description of Artificial Sequence: Synthetic oligonucleotide
uuccgcacagcaaaugaug

SEQ ID NO: 1259897 - RNA, 19 nt, Artificial Sequence
  Description of Artificial Sequence: Synthetic oligonucleotide
aauuccuaggcgaagcagu

SEQ ID NO: 1259898 - RNA, 19 nt, Artificial Sequence
  Description of Artificial Sequence: Synthetic oligonucleotide
aaauuccuaggcgaagcag

SEQ ID NO: 1259899 - RNA, 19 nt, Artificial Sequence
  Description of Artificial Sequence: Synthetic oligonucleotide
uccgcacagcaaaugaugc

SEQ ID NO: 1259900 - RNA, 19 nt, Artificial Sequence
  Description of Artificial Sequence: Synthetic oligonucleotide
ucgaucaaaacauccacuu

SEQ ID NO: 1259901 - RNA, 19 nt, Artificial Sequence
  Description of Artificial Sequence: Synthetic oligonucleotide
uguaacugccaguaagccu

SEQ ID NO: 1259902 - RNA, 19 nt, Artificial Sequence
  Description of Artificial Sequence: Synthetic oligonucleotide
agcgauguugccaagccgg

SEQ ID NO: 1259903 - RNA, 19 nt, Artificial Sequence
  Description of Artificial Sequence: Synthetic oligonucleotide
ugauuuccgcauuaccuca

SEQ ID NO: 1259904 - RNA, 19 nt, Artificial Sequence
  Description of Artificial Sequence: Synthetic oligonucleotide
ucgcuguacgcccauagga

SEQ ID NO: 1259905 - RNA, 19 nt, Artificial Sequence
  Description of Artificial Sequence: Synthetic oligonucleotide
augcugaaccaccacaucu

SEQ ID NO: 1259906 - RNA, 19 nt, Artificial Sequence
  Description of Artificial Sequence: Synthetic oligonucleotide
guguaacuuaaguuacagg

SEQ ID NO: 1259907 - RNA, 19 nt, Artificial Sequence
  Description of Artificial Sequence: Synthetic oligonucleotide
acaaguugcccgcauugag

SEQ ID NO: 1259908 - RNA, 19 nt, Artificial Sequence
  Description of Artificial Sequence: Synthetic oligonucleotide
uggagaauaccgaauccaa

SEQ ID NO: 1259909 - RNA, 19 nt, Artificial Sequence
  Description of Artificial Sequence: Synthetic oligonucleotide
gagacgacuucagugagug

SEQ ID NO: 1259910 - RNA, 19 nt, Artificial Sequence
  Description of Artificial Sequence: Synthetic oligonucleotide
uggcaugcgagagagacga

SEQ ID NO: 1259911 - RNA, 19 nt, Artificial Sequence
  Description of Artificial Sequence: Synthetic oligonucleotide
ugguaagauagaugaauuc

SEQ ID NO: 1259912 - RNA, 19 nt, Artificial Sequence
  Description of Artificial Sequence: Synthetic oligonucleotide
gacgacuucagugaguguc

SEQ ID NO: 1259913 - RNA, 19 nt, Artificial Sequence
  Description of Artificial Sequence: Synthetic oligonucleotide
aguggguucugaaaaguuc

SEQ ID NO: 1259914 - RNA, 19 nt, Artificial Sequence
  Description of Artificial Sequence: Synthetic oligonucleotide
ucgaaucccagcuccaaac

SEQ ID NO: 1259915 - RNA, 19 nt, Artificial Sequence
  Description of Artificial Sequence: Synthetic oligonucleotide
acggguuucaugugauuuc

SEQ ID NO: 1259916 - RNA, 19 nt, Artificial Sequence
  Description of Artificial Sequence: Synthetic oligonucleotide
aggccaaguaccauacugc

SEQ ID NO: 1259917 - RNA, 19 nt, Artificial Sequence
  Description of Artificial Sequence: Synthetic oligonucleotide
uuucugcacguccuaggag

SEQ ID NO: 1259918 - RNA, 19 nt, Artificial Sequence
  Description of Artificial Sequence: Synthetic oligonucleotide
caucaccuccaguauagcc

SEQ ID NO: 1259919 - RNA, 19 nt, Artificial Sequence
  Description of Artificial Sequence: Synthetic oligonucleotide
ggaaucgaaucccagcucc

SEQ ID NO: 1259920 - RNA, 19 nt, Artificial Sequence
  Description of Artificial Sequence: Synthetic oligonucleotide
uuccgagagucgaugacca

SEQ ID NO: 1259921 - RNA, 19 nt, Artificial Sequence
  Description of Artificial Sequence: Synthetic oligonucleotide
gauuaugauccagaagcac

SEQ ID NO: 1259922 - RNA, 19 nt, Artificial Sequence
  Description of Artificial Sequence: Synthetic oligonucleotide
cauuugacggugugacugg

SEQ ID NO: 1259923 - RNA, 19 nt, Artificial Sequence
  Description of Artificial Sequence: Synthetic oligonucleotide
ugaauuccgagagucgaug

SEQ ID NO: 1259924 - RNA, 19 nt, Artificial Sequence
  Description of Artificial Sequence: Synthetic oligonucleotide
aaccaugguguuguaacug

SEQ ID NO: 1259925 - RNA, 19 nt, Artificial Sequence
  Description of Artificial Sequence: Synthetic oligonucleotide
guugccaagccggaggacg

SEQ ID NO: 1259926 - RNA, 19 nt, Artificial Sequence
  Description of Artificial Sequence: Synthetic oligonucleotide
uggucuuccauaugggaaa

SEQ ID NO: 1259927 - RNA, 19 nt, Artificial Sequence
  Description of Artificial Sequence: Synthetic oligonucleotide
uuacaggaaucgaauccca

SEQ ID NO: 1259928 - RNA, 19 nt, Artificial Sequence
  Description of Artificial Sequence: Synthetic oligonucleotide
uaugccuccccucccaggu

SEQ ID NO: 1259929 - RNA, 19 nt, Artificial Sequence
  Description of Artificial Sequence: Synthetic oligonucleotide
gugacaucuaauccauuug

SEQ ID NO: 1259930 - RNA, 19 nt, Artificial Sequence
  Description of Artificial Sequence: Synthetic oligonucleotide
auaaggauuaugauccaga

SEQ ID NO: 1259931 - RNA, 19 nt, Artificial Sequence
  Description of Artificial Sequence: Synthetic oligonucleotide
aguccguccaaguccauca

SEQ ID NO: 1259932 - RNA, 19 nt, Artificial Sequence
  Description of Artificial Sequence: Synthetic oligonucleotide
caguaagccuccuuaacuc

SEQ ID NO: 1259933 - RNA, 19 nt, Artificial Sequence
  Description of Artificial Sequence: Synthetic oligonucleotide
ucccagguaaaaccuguca

SEQ ID NO: 1259934 - RNA, 19 nt, Artificial Sequence
  Description of Artificial Sequence: Synthetic oligonucleotide
gaaugcaguaguucagcuc

SEQ ID NO: 1259935 - RNA, 19 nt, Artificial Sequence
  Description of Artificial Sequence: Synthetic oligonucleotide
uugaccugauuucccauaa

SEQ ID NO: 1259936 - RNA, 19 nt, Artificial Sequence
  Description of Artificial Sequence: Synthetic oligonucleotide
ugcccaguaacuuuauaua

SEQ ID NO: 1259937 - RNA, 19 nt, Artificial Sequence
  Description of Artificial Sequence: Synthetic oligonucleotide
aggaaucgaaucccagcuc

SEQ ID NO: 1259938 - RNA, 19 nt, Artificial Sequence
  Description of Artificial Sequence: Synthetic oligonucleotide
aguuuacagagaaauuucu

SEQ ID NO: 1259939 - RNA, 19 nt, Artificial Sequence
  Description of Artificial Sequence: Synthetic oligonucleotide
aaccgagcgauguugccaa

SEQ ID NO: 1259940 - RNA, 19 nt, Artificial Sequence
  Description of Artificial Sequence: Synthetic oligonucleotide
gguuucaugugauuuccgc

SEQ ID NO: 1259941 - RNA, 19 nt, Artificial Sequence
  Description of Artificial Sequence: Synthetic oligonucleotide
ucccauuugacggugugac

SEQ ID NO: 1259942 - RNA, 19 nt, Artificial Sequence
  Description of Artificial Sequence: Synthetic oligonucleotide
uguacgcccauaggaaugc

SEQ ID NO: 1259943 - RNA, 19 nt, Artificial Sequence
  Description of Artificial Sequence: Synthetic oligonucleotide
uccaaccgagcgauguugc

SEQ ID NO: 1259944 - RNA, 19 nt, Artificial Sequence
  Description of Artificial Sequence: Synthetic oligonucleotide
cauaaggauuaugauccag

SEQ ID NO: 1259945 - RNA, 19 nt, Artificial Sequence
  Description of Artificial Sequence: Synthetic oligonucleotide
uccuaggcgaagcaguuuu

SEQ ID NO: 1259946 - RNA, 19 nt, Artificial Sequence
  Description of Artificial Sequence: Synthetic oligonucleotide
uacgcccauaggaaugcag

SEQ ID NO: 1259947 - RNA, 19 nt, Artificial Sequence
  Description of Artificial Sequence: Synthetic oligonucleotide
ugcaugcuaaauccucgga

SEQ ID NO: 1259948 - RNA, 19 nt, Artificial Sequence
  Description of Artificial Sequence: Synthetic oligonucleotide
ucuaauccauuuggcagug

SEQ ID NO: 1259949 - RNA, 19 nt, Artificial Sequence
  Description of Artificial Sequence: Synthetic oligonucleotide
ucaccauaguugagguugc

SEQ ID NO: 1259950 - RNA, 19 nt, Artificial Sequence
  Description of Artificial Sequence: Synthetic oligonucleotide
cauaggaaugcaguaguuc

SEQ ID NO: 1259951 - RNA, 19 nt, Artificial Sequence
  Description of Artificial Sequence: Synthetic oligonucleotide
augcauucagccagcuucc

SEQ ID NO: 1259952 - RNA, 19 nt, Artificial Sequence
  Description of Artificial Sequence: Synthetic oligonucleotide
gguguaacuuaaguuacag

SEQ ID NO: 1259953 - RNA, 19 nt, Artificial Sequence
  Description of Artificial Sequence: Synthetic oligonucleotide
ggaguuugaggccaaguac

SEQ ID NO: 1259954 - RNA, 19 nt, Artificial Sequence
  Description of Artificial Sequence: Synthetic oligonucleotide
cuuaguccguccaagucca

SEQ ID NO: 1259955 - RNA, 19 nt, Artificial Sequence
  Description of Artificial Sequence: Synthetic oligonucleotide
ugaccuggguguaacuuaa

SEQ ID NO: 1259956 - RNA, 19 nt, Artificial Sequence
  Description of Artificial Sequence: Synthetic oligonucleotide
ccauaugggaaaacuauac

SEQ ID NO: 1259957 - RNA, 19 nt, Artificial Sequence
  Description of Artificial Sequence: Synthetic oligonucleotide
caugugucgaucaaaacau

SEQ ID NO: 1259958 - RNA, 19 nt, Artificial Sequence
  Description of Artificial Sequence: Synthetic oligonucleotide
agaugaauuccgagagucg

SEQ ID NO: 1259959 - RNA, 19 nt, Artificial Sequence
  Description of Artificial Sequence: Synthetic oligonucleotide
caacaugaguggcuuauuc

SEQ ID NO: 1259960 - RNA, 19 nt, Artificial Sequence
  Description of Artificial Sequence: Synthetic oligonucleotide
ucuugguaagauagaugaa

SEQ ID NO: 1259961 - RNA, 19 nt, Artificial Sequence
  Description of Artificial Sequence: Synthetic oligonucleotide
ugcgagagagacgacuuca

SEQ ID NO: 1259962 - RNA, 19 nt, Artificial Sequence
  Description of Artificial Sequence: Synthetic oligonucleotide
aaacuauacucagcagaca

SEQ ID NO: 1259963 - RNA, 19 nt, Artificial Sequence
  Description of Artificial Sequence: Synthetic oligonucleotide
aacuggacgccaucacaga

SEQ ID NO: 1259964 - RNA, 19 nt, Artificial Sequence
  Description of Artificial Sequence: Synthetic oligonucleotide
ugaccugauuucccauaag

SEQ ID NO: 1259965 - RNA, 19 nt, Artificial Sequence
  Description of Artificial Sequence: Synthetic oligonucleotide
gagagauguggagaauacc

SEQ ID NO: 1259966 - RNA, 19 nt, Artificial Sequence
  Description of Artificial Sequence: Synthetic oligonucleotide
ucaugugauuuccgcauua

SEQ ID NO: 1259967 - RNA, 19 nt, Artificial Sequence
  Description of Artificial Sequence: Synthetic oligonucleotide
ccuuaguccguccaagucc

SEQ ID NO: 1259968 - RNA, 19 nt, Artificial Sequence
  Description of Artificial Sequence: Synthetic oligonucleotide
uucucgcugcacauccaag

SEQ ID NO: 1259969 - RNA, 19 nt, Artificial Sequence
  Description of Artificial Sequence: Synthetic oligonucleotide
gaauuccgagagucgauga

SEQ ID NO: 1259970 - RNA, 19 nt, Artificial Sequence
  Description of Artificial Sequence: Synthetic oligonucleotide
cugugcaugcuaaauccuc

SEQ ID NO: 1259971 - RNA, 19 nt, Artificial Sequence
  Description of Artificial Sequence: Synthetic oligonucleotide
accuggguguaacuuaagu

SEQ ID NO: 1259972 - RNA, 19 nt, Artificial Sequence
  Description of Artificial Sequence: Synthetic oligonucleotide
ugcugaaccaccacaucuu

SEQ ID NO: 1259973 - RNA, 19 nt, Artificial Sequence
  Description of Artificial Sequence: Synthetic oligonucleotide
ggaaaacuauacucagcag

SEQ ID NO: 1259974 - RNA, 19 nt, Artificial Sequence
  Description of Artificial Sequence: Synthetic oligonucleotide
gccauaggaaguuucuuug

SEQ ID NO: 1259975 - RNA, 19 nt, Artificial Sequence
  Description of Artificial Sequence: Synthetic oligonucleotide
cuguacgcccauaggaaug

SEQ ID NO: 1259976 - RNA, 19 nt, Artificial Sequence
  Description of Artificial Sequence: Synthetic oligonucleotide
aaauccucggacgcucgug

SEQ ID NO: 1259977 - RNA, 19 nt, Artificial Sequence
  Description of Artificial Sequence: Synthetic oligonucleotide
cacucgauggaagaggcuc

SEQ ID NO: 1259978 - RNA, 19 nt, Artificial Sequence
  Description of Artificial Sequence: Synthetic oligonucleotide
gucaccucgcuguacgccc

SEQ ID NO: 1259979 - RNA, 19 nt, Artificial Sequence
  Description of Artificial Sequence: Synthetic oligonucleotide
cagguagucuccuucgcuc

SEQ ID NO: 1259980 - RNA, 19 nt, Artificial Sequence
  Description of Artificial Sequence: Synthetic oligonucleotide
caucacagauccugucacc

SEQ ID NO: 1259981 - RNA, 19 nt, Artificial Sequence
  Description of Artificial Sequence: Synthetic oligonucleotide
aguucagcuccaaccgagc

SEQ ID NO: 1259982 - RNA, 19 nt, Artificial Sequence
  Description of Artificial Sequence: Synthetic oligonucleotide
agcacucaacugugucacc

SEQ ID NO: 1259983 - RNA, 19 nt, Artificial Sequence
  Description of Artificial Sequence: Synthetic oligonucleotide
ccagguaaaaccugucagc

SEQ ID NO: 1259984 - RNA, 19 nt, Artificial Sequence
  Description of Artificial Sequence: Synthetic oligonucleotide
auuucucucgaaguuucca

SEQ ID NO: 1259985 - RNA, 19 nt, Artificial Sequence
  Description of Artificial Sequence: Synthetic oligonucleotide
uccaacaugaguggcuuau

SEQ ID NO: 1259986 - RNA, 19 nt, Artificial Sequence
  Description of Artificial Sequence: Synthetic oligonucleotide
uucacggguuucaugugau

SEQ ID NO: 1259987 - RNA, 19 nt, Artificial Sequence
  Description of Artificial Sequence: Synthetic oligonucleotide
uauugaccugauuucccau

SEQ ID NO: 1259988 - RNA, 19 nt, Artificial Sequence
  Description of Artificial Sequence: Synthetic oligonucleotide
cccaguaacuuuauauaag

SEQ ID NO: 1259989 - RNA, 19 nt, Artificial Sequence
  Description of Artificial Sequence: Synthetic oligonucleotide
auugaccugauuucccaua

SEQ ID NO: 1259990 - RNA, 19 nt, Artificial Sequence
  Description of Artificial Sequence: Synthetic oligonucleotide
gagguugcacaaguugccc

SEQ ID NO: 1259991 - RNA, 19 nt, Artificial Sequence
  Description of Artificial Sequence: Synthetic oligonucleotide
gagauguggagaauaccga

SEQ ID NO: 1259992 - RNA, 19 nt, Artificial Sequence
  Description of Artificial Sequence: Synthetic oligonucleotide
ggcaccaacauuccacccc

SEQ ID NO: 1259993 - RNA, 19 nt, Artificial Sequence
  Description of Artificial Sequence: Synthetic oligonucleotide
cauuuggcagugcaucauc

SEQ ID NO: 1259994 - RNA, 19 nt, Artificial Sequence
  Description of Artificial Sequence: Synthetic oligonucleotide
uaaauccucggacgcucgu

SEQ ID NO: 1259995 - RNA, 19 nt, Artificial Sequence
  Description of Artificial Sequence: Synthetic oligonucleotide
auguugccaagccggagga

SEQ ID NO: 1259996 - RNA, 19 nt, Artificial Sequence
  Description of Artificial Sequence: Synthetic oligonucleotide
uucgccucagguucaacuu

SEQ ID NO: 1259997 - RNA, 19 nt, Artificial Sequence
  Description of Artificial Sequence: Synthetic oligonucleotide
ccaacauuccaccccagag

SEQ ID NO: 1259998 - RNA, 19 nt, Artificial Sequence
  Description of Artificial Sequence: Synthetic oligonucleotide
guggagaauaccgaaucca

SEQ ID NO: 1259999 - RNA, 19 nt, Artificial Sequence
  Description of Artificial Sequence: Synthetic oligonucleotide
gucaccaaugggcaccaac

SEQ ID NO: 1260000 - RNA, 19 nt, Artificial Sequence
  Description of Artificial Sequence: Synthetic oligonucleotide
ucuccuucgcucugggguc

SEQ ID NO: 1260001 - RNA, 19 nt, Artificial Sequence
  Description of Artificial Sequence: Synthetic oligonucleotide
uugccaagccggaggacga

SEQ ID NO: 1260002 - RNA, 19 nt, Artificial Sequence
  Description of Artificial Sequence: Synthetic oligonucleotide
ucaccaugacaugugucga

SEQ ID NO: 1260003 - RNA, 19 nt, Artificial Sequence
  Description of Artificial Sequence: Synthetic oligonucleotide
cagguaaaaccugucagca

SEQ ID NO: 1260004 - RNA, 19 nt, Artificial Sequence
  Description of Artificial Sequence: Synthetic oligonucleotide
cuggucuuccauaugggaa

SEQ ID NO: 1260005 - RNA, 19 nt, Artificial Sequence
  Description of Artificial Sequence: Synthetic oligonucleotide
gcaugcuaaauccucggac

SEQ ID NO: 1260006 - RNA, 19 nt, Artificial Sequence
  Description of Artificial Sequence: Synthetic oligonucleotide
cucgcuguacgcccauagg

SEQ ID NO: 1260007 - RNA, 19 nt, Artificial Sequence
  Description of Artificial Sequence: Synthetic oligonucleotide
ugucaccucgcuguacgcc

SEQ ID NO: 1260008 - RNA, 19 nt, Artificial Sequence
  Description of Artificial Sequence: Synthetic oligonucleotide
ccggaugugggcuuugggg

SEQ ID NO: 1260009 - RNA, 19 nt, Artificial Sequence
  Description of Artificial Sequence: Synthetic oligonucleotide
uucaugugauuuccgcauu

SEQ ID NO: 1260010 - RNA, 19 nt, Artificial Sequence
  Description of Artificial Sequence: Synthetic oligonucleotide
ggccaaguaccauacugcc

SEQ ID NO: 1260011 - RNA, 19 nt, Artificial Sequence
  Description of Artificial Sequence: Synthetic oligonucleotide
guaagccuccuuaacucug

SEQ ID NO: 1260012 - RNA, 19 nt, Artificial Sequence
  Description of Artificial Sequence: Synthetic oligonucleotide
cugucggucucccggagug

SEQ ID NO: 1260013 - RNA, 19 nt, Artificial Sequence
  Description of Artificial Sequence: Synthetic oligonucleotide
auuaccucaaugagguuuu

SEQ ID NO: 1260014 - RNA, 19 nt, Artificial Sequence
  Description of Artificial Sequence: Synthetic oligonucleotide
caguucccgccacacaccc

SEQ ID NO: 1260015 - RNA, 19 nt, Artificial Sequence
  Description of Artificial Sequence: Synthetic oligonucleotide
uccuaggagauuggggagu

SEQ ID NO: 1260016 - RNA, 19 nt, Artificial Sequence
  Description of Artificial Sequence: Synthetic oligonucleotide
caaagucagguccacucga

SEQ ID NO: 1260017 - RNA, 19 nt, Artificial Sequence
  Description of Artificial Sequence: Synthetic oligonucleotide
cuccaguauagcccgccag

SEQ ID NO: 1260018 - RNA, 19 nt, Artificial Sequence
  Description of Artificial Sequence: Synthetic oligonucleotide
uggauggcuugucaccaau

SEQ ID NO: 1260019 - RNA, 19 nt, Artificial Sequence
  Description of Artificial Sequence: Synthetic oligonucleotide
aaguaccauacugccuuca

SEQ ID NO: 1260020 - RNA, 19 nt, Artificial Sequence
  Description of Artificial Sequence: Synthetic oligonucleotide
ccgcauuaccucaaugagg

SEQ ID NO: 1260021 - RNA, 19 nt, Artificial Sequence
  Description of Artificial Sequence: Synthetic oligonucleotide
ugcaguccucgagaggcag

SEQ ID NO: 1260022 - RNA, 19 nt, Artificial Sequence
  Description of Artificial Sequence: Synthetic oligonucleotide
gugucgaucaaaacaucca

SEQ ID NO: 1260023 - RNA, 19 nt, Artificial Sequence
  Description of Artificial Sequence: Synthetic oligonucleotide
aguuugaggccaaguacca

SEQ ID NO: 1260024 - RNA, 19 nt, Artificial Sequence
  Description of Artificial Sequence: Synthetic oligonucleotide
ccgaauccaacaugagugg

SEQ ID NO: 1260025 - RNA, 19 nt, Artificial Sequence
  Description of Artificial Sequence: Synthetic oligonucleotide
gaccagcggaugcauucag

SEQ ID NO: 1260026 - RNA, 19 nt, Artificial Sequence
  Description of Artificial Sequence: Synthetic oligonucleotide
guaugccuccccucccagg

SEQ ID NO: 1260027 - RNA, 19 nt, Artificial Sequence
  Description of Artificial Sequence: Synthetic oligonucleotide
ccugucaccucgcuguacg

SEQ ID NO: 1260028 - RNA, 19 nt, Artificial Sequence
  Description of Artificial Sequence: Synthetic oligonucleotide
uccguccaaguccaucaaa

SEQ ID NO: 1260029 - RNA, 19 nt, Artificial Sequence
  Description of Artificial Sequence: Synthetic oligonucleotide
augacaggccauaggaagu

SEQ ID NO: 1260030 - RNA, 19 nt, Artificial Sequence
  Description of Artificial Sequence: Synthetic oligonucleotide
accagcggaugcauucagc

SEQ ID NO: 1260031 - RNA, 19 nt, Artificial Sequence
  Description of Artificial Sequence: Synthetic oligonucleotide
uccucggacgcucguggga

SEQ ID NO: 1260032 - RNA, 19 nt, Artificial Sequence
  Description of Artificial Sequence: Synthetic oligonucleotide
guaguucagcuccaaccga

SEQ ID NO: 1260033 - RNA, 19 nt, Artificial Sequence
  Description of Artificial Sequence: Synthetic oligonucleotide
aguucuccgaagccacccu

SEQ ID NO: 1260034 - RNA, 19 nt, Artificial Sequence
  Description of Artificial Sequence: Synthetic oligonucleotide
guucuccgaagccacccug

SEQ ID NO: 1260035 - RNA, 19 nt, Artificial Sequence
  Description of Artificial Sequence: Synthetic oligonucleotide
gacggugugacuggucuuc

SEQ ID NO: 1260036 - RNA, 19 nt, Artificial Sequence
  Description of Artificial Sequence: Synthetic oligonucleotide
cuuccuugaugaagcucac

SEQ ID NO: 1260037 - RNA, 19 nt, Artificial Sequence
  Description of Artificial Sequence: Synthetic oligonucleotide
auccucggacgcucguggg

SEQ ID NO: 1260038 - RNA, 19 nt, Artificial Sequence
  Description of Artificial Sequence: Synthetic oligonucleotide
ggcuuauucagcugaagcu

SEQ ID NO: 1260039 - RNA, 19 nt, Artificial Sequence
  Description of Artificial Sequence: Synthetic oligonucleotide
caugcugaaccaccacauc

SEQ ID NO: 1260040 - RNA, 19 nt, Artificial Sequence
  Description of Artificial Sequence: Synthetic oligonucleotide
gcacaaguugcccgcauug

SEQ ID NO: 1260041 - RNA, 19 nt, Artificial Sequence
  Description of Artificial Sequence: Synthetic oligonucleotide
ugcacaaguugcccgcauu

SEQ ID NO: 1260042 - RNA, 19 nt, Artificial Sequence
  Description of Artificial Sequence: Synthetic oligonucleotide
cugcuccauaggaccagcg

SEQ ID NO: 1260043 - RNA, 19 nt, Artificial Sequence
  Description of Artificial Sequence: Synthetic oligonucleotide
cauaggaaguuucuuuggu

SEQ ID NO: 1260044 - RNA, 19 nt, Artificial Sequence
  Description of Artificial Sequence: Synthetic oligonucleotide
caggaaucgaaucccagcu

SEQ ID NO: 1260045 - RNA, 19 nt, Artificial Sequence
  Description of Artificial Sequence: Synthetic oligonucleotide
augugucgaucaaaacauc

SEQ ID NO: 1260046 - RNA, 19 nt, Artificial Sequence
  Description of Artificial Sequence: Synthetic oligonucleotide
cuccaaccgagcgauguug

SEQ ID NO: 1260047 - RNA, 19 nt, Artificial Sequence
  Description of Artificial Sequence: Synthetic oligonucleotide
agcccaguaugccuccccu

SEQ ID NO: 1260048 - RNA, 19 nt, Artificial Sequence
  Description of Artificial Sequence: Synthetic oligonucleotide
ucaccucgcuguacgccca

SEQ ID NO: 1260049 - RNA, 19 nt, Artificial Sequence
  Description of Artificial Sequence: Synthetic oligonucleotide
acgcccauaggaaugcagu

SEQ ID NO: 1260050 - RNA, 19 nt, Artificial Sequence
  Description of Artificial Sequence: Synthetic oligonucleotide
uugcccgcauugaggaaaa

SEQ ID NO: 1260051 - RNA, 19 nt, Artificial Sequence
  Description of Artificial Sequence: Synthetic oligonucleotide
cugcccaguaacuuuauau

SEQ ID NO: 1260052 - RNA, 19 nt, Artificial Sequence
  Description of Artificial Sequence: Synthetic oligonucleotide
gcucgugggaccucccagg

SEQ ID NO: 1260053 - RNA, 19 nt, Artificial Sequence
  Description of Artificial Sequence: Synthetic oligonucleotide
gggagauucucgcugcaca

SEQ ID NO: 1260054 - RNA, 19 nt, Artificial Sequence
  Description of Artificial Sequence: Synthetic oligonucleotide
gugacuggucuuccauaug

SEQ ID NO: 1260055 - RNA, 19 nt, Artificial Sequence
  Description of Artificial Sequence: Synthetic oligonucleotide
guccucgagaggcagccca

SEQ ID NO: 1260056 - RNA, 19 nt, Artificial Sequence
  Description of Artificial Sequence: Synthetic oligonucleotide
cccaguaugccuccccucc

SEQ ID NO: 1260057 - RNA, 19 nt, Artificial Sequence
  Description of Artificial Sequence: Synthetic oligonucleotide
gcccaguaacuuuauauaa

SEQ ID NO: 1260058 - RNA, 19 nt, Artificial Sequence
  Description of Artificial Sequence: Synthetic oligonucleotide
caaguaccauacugccuuc

SEQ ID NO: 1260059 - RNA, 19 nt, Artificial Sequence
  Description of Artificial Sequence: Synthetic oligonucleotide
gaacugcccaguaacuuua

SEQ ID NO: 1260060 - RNA, 19 nt, Artificial Sequence
  Description of Artificial Sequence: Synthetic oligonucleotide
cauaggaccagcggaugca

SEQ ID NO: 1260061 - RNA, 19 nt, Artificial Sequence
  Description of Artificial Sequence: Synthetic oligonucleotide
guggcuuauucagcugaag

SEQ ID NO: 1260062 - RNA, 19 nt, Artificial Sequence
  Description of Artificial Sequence: Synthetic oligonucleotide
ccugggagauucucgcugc

SEQ ID NO: 1260063 - RNA, 19 nt, Artificial Sequence
  Description of Artificial Sequence: Synthetic oligonucleotide
uagcccgccagcuccuggu

SEQ ID NO: 1260064 - RNA, 19 nt, Artificial Sequence
  Description of Artificial Sequence: Synthetic oligonucleotide
caugacaugugucgaucaa

SEQ ID NO: 1260065 - RNA, 19 nt, Artificial Sequence
  Description of Artificial Sequence: Synthetic oligonucleotide
guguccgcuuuccuuccgc

SEQ ID NO: 1260066 - RNA, 19 nt, Artificial Sequence
  Description of Artificial Sequence: Synthetic oligonucleotide
ggauuaugauccagaagca

SEQ ID NO: 1260067 - RNA, 19 nt, Artificial Sequence
  Description of Artificial Sequence: Synthetic oligonucleotide
ucgauggaagaggcuccag

SEQ ID NO: 1260068 - RNA, 19 nt, Artificial Sequence
  Description of Artificial Sequence: Synthetic oligonucleotide
gucggucucccggagugag

SEQ ID NO: 1260069 - RNA, 19 nt, Artificial Sequence
  Description of Artificial Sequence: Synthetic oligonucleotide
auuugacggugugacuggu

SEQ ID NO: 1260070 - RNA, 19 nt, Artificial Sequence
  Description of Artificial Sequence: Synthetic oligonucleotide
uugcacaaguugcccgcau

SEQ ID NO: 1260071 - RNA, 19 nt, Artificial Sequence
  Description of Artificial Sequence: Synthetic oligonucleotide
cucccagguaaaaccuguc

SEQ ID NO: 1260072 - RNA, 19 nt, Artificial Sequence
  Description of Artificial Sequence: Synthetic oligonucleotide
agugcccgcgcccagccua

SEQ ID NO: 1260073 - RNA, 19 nt, Artificial Sequence
  Description of Artificial Sequence: Synthetic oligonucleotide
ggaggacgaugccugcucc

SEQ ID NO: 1260074 - RNA, 19 nt, Artificial Sequence
  Description of Artificial Sequence: Synthetic oligonucleotide
gcaccaacauuccacccca

SEQ ID NO: 1260075 - RNA, 19 nt, Artificial Sequence
  Description of Artificial Sequence: Synthetic oligonucleotide
gcuaaauccucggacgcuc

SEQ ID NO: 1260076 - RNA, 19 nt, Artificial Sequence
  Description of Artificial Sequence: Synthetic oligonucleotide
gauuuccgcauuaccucaa

SEQ ID NO: 1260077 - RNA, 19 nt, Artificial Sequence
  Description of Artificial Sequence: Synthetic oligonucleotide
agagacgacuucagugagu

SEQ ID NO: 1260078 - RNA, 19 nt, Artificial Sequence
  Description of Artificial Sequence: Synthetic oligonucleotide
ugcaguaguucagcuccaa

SEQ ID NO: 1260079 - RNA, 19 nt, Artificial Sequence
  Description of Artificial Sequence: Synthetic oligonucleotide
caaccgagcgauguugcca

SEQ ID NO: 1260080 - RNA, 19 nt, Artificial Sequence
  Description of Artificial Sequence: Synthetic oligonucleotide
uguccccauggcucccucu

SEQ ID NO: 1260081 - RNA, 19 nt, Artificial Sequence
  Description of Artificial Sequence: Synthetic oligonucleotide
cuccgggcgugcacugucc

SEQ ID NO: 1260082 - RNA, 19 nt, Artificial Sequence
  Description of Artificial Sequence: Synthetic oligonucleotide
agacuccgggcgugcacug

SEQ ID NO: 1260083 - RNA, 19 nt, Artificial Sequence
  Description of Artificial Sequence: Synthetic oligonucleotide
cgcauuaccucaaugaggu

SEQ ID NO: 1260084 - RNA, 19 nt, Artificial Sequence
  Description of Artificial Sequence: Synthetic oligonucleotide
cagcccaguaugccucccc

SEQ ID NO: 1260085 - RNA, 19 nt, Artificial Sequence
  Description of Artificial Sequence: Synthetic oligonucleotide
gaccuggguguaacuuaag

SEQ ID NO: 1260086 - RNA, 19 nt, Artificial Sequence
  Description of Artificial Sequence: Synthetic oligonucleotide
cucggacgcucgugggacc

SEQ ID NO: 1260087 - RNA, 19 nt, Artificial Sequence
  Description of Artificial Sequence: Synthetic oligonucleotide
cgagcgauguugccaagcc

SEQ ID NO: 1260088 - RNA, 19 nt, Artificial Sequence
  Description of Artificial Sequence: Synthetic oligonucleotide
cucugucggucucccggag

SEQ ID NO: 1260089 - RNA, 19 nt, Artificial Sequence
  Description of Artificial Sequence: Synthetic oligonucleotide
ugacggugugacuggucuu

SEQ ID NO: 1260090 - RNA, 19 nt, Artificial Sequence
  Description of Artificial Sequence: Synthetic oligonucleotide
ucacggguuucaugugauu

SEQ ID NO: 1260091 - RNA, 19 nt, Artificial Sequence
  Description of Artificial Sequence: Synthetic oligonucleotide
agacgacuucagugagugu

SEQ ID NO: 1260092 - RNA, 19 nt, Artificial Sequence
  Description of Artificial Sequence: Synthetic oligonucleotide
ucggacgcucgugggaccu

SEQ ID NO: 1260093 - RNA, 19 nt, Artificial Sequence
  Description of Artificial Sequence: Synthetic oligonucleotide
caugcgagagagacgacuu

SEQ ID NO: 1260094 - RNA, 19 nt, Artificial Sequence
  Description of Artificial Sequence: Synthetic oligonucleotide
uguuucgccucagguucaa

SEQ ID NO: 1260095 - RNA, 19 nt, Artificial Sequence
  Description of Artificial Sequence: Synthetic oligonucleotide
uguugccaagccggaggac

SEQ ID NO: 1260096 - RNA, 19 nt, Artificial Sequence
  Description of Artificial Sequence: Synthetic oligonucleotide
cacaaguugcccgcauuga

SEQ ID NO: 1260097 - RNA, 19 nt, Artificial Sequence
  Description of Artificial Sequence: Synthetic oligonucleotide
uggggaguuugaggccaag

SEQ ID NO: 1260098 - RNA, 19 nt, Artificial Sequence
  Description of Artificial Sequence: Synthetic oligonucleotide
caccaacauuccaccccag

SEQ ID NO: 1260099 - RNA, 19 nt, Artificial Sequence
  Description of Artificial Sequence: Synthetic oligonucleotide
ggauggcuugucaccaaug

SEQ ID NO: 1260100 - RNA, 19 nt, Artificial Sequence
  Description of Artificial Sequence: Synthetic oligonucleotide
uccgagagucgaugaccau

SEQ ID NO: 1260101 - RNA, 19 nt, Artificial Sequence
  Description of Artificial Sequence: Synthetic oligonucleotide
ccgagagucgaugaccaug

SEQ ID NO: 1260102 - RNA, 19 nt, Artificial Sequence
  Description of Artificial Sequence: Synthetic oligonucleotide
cuccauaggaccagcggau

SEQ ID NO: 1260103 - RNA, 19 nt, Artificial Sequence
  Description of Artificial Sequence: Synthetic oligonucleotide
ccuuccgcacagcaaauga

SEQ ID NO: 1260104 - RNA, 19 nt, Artificial Sequence
  Description of Artificial Sequence: Synthetic oligonucleotide
ccucgcuguacgcccauag

SEQ ID NO: 1260105 - RNA, 19 nt, Artificial Sequence
  Description of Artificial Sequence: Synthetic oligonucleotide
gcuugucaccaaugggcac

SEQ ID NO: 1260106 - RNA, 19 nt, Artificial Sequence
  Description of Artificial Sequence: Synthetic oligonucleotide
guugcacaaguugcccgca

SEQ ID NO: 1260107 - RNA, 19 nt, Artificial Sequence
  Description of Artificial Sequence: Synthetic oligonucleotide
ccaaccgagcgauguugcc

SEQ ID NO: 1260108 - RNA, 19 nt, Artificial Sequence
  Description of Artificial Sequence: Synthetic oligonucleotide
cuuccgcacagcaaaugau

SEQ ID NO: 1260109 - RNA, 19 nt, Artificial Sequence
  Description of Artificial Sequence: Synthetic oligonucleotide
cgaaguuuccaggcugugg

SEQ ID NO: 1260110 - RNA, 19 nt, Artificial Sequence
  Description of Artificial Sequence: Synthetic oligonucleotide
gcgagagagacgacuucag

SEQ ID NO: 1260111 - RNA, 19 nt, Artificial Sequence
  Description of Artificial Sequence: Synthetic oligonucleotide
acgcucgugggaccuccca

SEQ ID NO: 1260112 - RNA, 19 nt, Artificial Sequence
  Description of Artificial Sequence: Synthetic oligonucleotide
ccguccaaguccaucaaaa

SEQ ID NO: 1260113 - RNA, 19 nt, Artificial Sequence
  Description of Artificial Sequence: Synthetic oligonucleotide
uuccuaggcgaagcaguuu

SEQ ID NO: 1260114 - RNA, 19 nt, Artificial Sequence
  Description of Artificial Sequence: Synthetic oligonucleotide
gggcaccaacauuccaccc

SEQ ID NO: 1260115 - RNA, 19 nt, Artificial Sequence
  Description of Artificial Sequence: Synthetic oligonucleotide
ccaguaugccuccccuccc

SEQ ID NO: 1260116 - RNA, 19 nt, Artificial Sequence
  Description of Artificial Sequence: Synthetic oligonucleotide
cucgauggaagaggcucca

SEQ ID NO: 1260117 - RNA, 19 nt, Artificial Sequence
  Description of Artificial Sequence: Synthetic oligonucleotide
ccaugacaugugucgauca

SEQ ID NO: 1260118 - RNA, 19 nt, Artificial Sequence
  Description of Artificial Sequence: Synthetic oligonucleotide
acgccaucacagauccugu

SEQ ID NO: 1260119 - RNA, 19 nt, Artificial Sequence
  Description of Artificial Sequence: Synthetic oligonucleotide
ccggagugagcuccauggg

SEQ ID NO: 1260120 - RNA, 19 nt, Artificial Sequence
  Description of Artificial Sequence: Synthetic oligonucleotide
ggccauaggaaguuucuuu

SEQ ID NO: 1260121 - RNA, 19 nt, Artificial Sequence
  Description of Artificial Sequence: Synthetic oligonucleotide
ggguguaacuuaaguuaca

SEQ ID NO: 1260122 - RNA, 19 nt, Artificial Sequence
  Description of Artificial Sequence: Synthetic oligonucleotide
augcaguaguucagcucca

SEQ ID NO: 1260123 - RNA, 19 nt, Artificial Sequence
  Description of Artificial Sequence: Synthetic oligonucleotide
cgugggaccucccagguaa

SEQ ID NO: 1260124 - RNA, 19 nt, Artificial Sequence
  Description of Artificial Sequence: Synthetic oligonucleotide
cuccagacuccgggcgugc

SEQ ID NO: 1260125 - RNA, 19 nt, Artificial Sequence
  Description of Artificial Sequence: Synthetic oligonucleotide
cacggguuucaugugauuu

SEQ ID NO: 1260126 - RNA, 19 nt, Artificial Sequence
  Description of Artificial Sequence: Synthetic oligonucleotide
ccucccauuugacggugug

SEQ ID NO: 1260127 - RNA, 19 nt, Artificial Sequence
  Description of Artificial Sequence: Synthetic oligonucleotide
gacgcucgugggaccuccc

SEQ ID NO: 1260128 - RNA, 19 nt, Artificial Sequence
  Description of Artificial Sequence: Synthetic oligonucleotide
guccguccaaguccaucaa

SEQ ID NO: 1260129 - RNA, 19 nt, Artificial Sequence
  Description of Artificial Sequence: Synthetic oligonucleotide
gcuguacgcccauaggaau

SEQ ID NO: 1260130 - RNA, 19 nt, Artificial Sequence
  Description of Artificial Sequence: Synthetic oligonucleotide
ccauaaggauuaugaucca

SEQ ID NO: 1260131 - RNA, 19 nt, Artificial Sequence
  Description of Artificial Sequence: Synthetic oligonucleotide
augcaguccucgagaggca

SEQ ID NO: 1260132 - RNA, 19 nt, Artificial Sequence
  Description of Artificial Sequence: Synthetic oligonucleotide
guuucgccucagguucaac

SEQ ID NO: 1260133 - RNA, 19 nt, Artificial Sequence
  Description of Artificial Sequence: Synthetic oligonucleotide
ccgagcgauguugccaagc

SEQ ID NO: 1260134 - RNA, 19 nt, Artificial Sequence
  Description of Artificial Sequence: Synthetic oligonucleotide
ggacgcucgugggaccucc

SEQ ID NO: 1260135 - RNA, 19 nt, Artificial Sequence
  Description of Artificial Sequence: Synthetic oligonucleotide
ccucggacgcucgugggac

SEQ ID NO: 1260136 - RNA, 19 nt, Artificial Sequence
  Description of Artificial Sequence: Synthetic oligonucleotide
ggaccagcggaugcauuca

SEQ ID NO: 1260137 - RNA, 19 nt, Artificial Sequence
  Description of Artificial Sequence: Synthetic oligonucleotide
gcaugcgagagagacgacu

SEQ ID NO: 1260138 - RNA, 19 nt, Artificial Sequence
  Description of Artificial Sequence: Synthetic oligonucleotide
caccaugacaugugucgau

SEQ ID NO: 1260139 - RNA, 19 nt, Artificial Sequence
  Description of Artificial Sequence: Synthetic oligonucleotide
ccugcuccauaggaccagc

SEQ ID NO: 1260140 - RNA, 19 nt, Artificial Sequence
  Description of Artificial Sequence: Synthetic oligonucleotide
gcacguccuaggagauugg

SEQ ID NO: 1260141 - RNA, 19 nt, Artificial Sequence
  Description of Artificial Sequence: Synthetic oligonucleotide
cucgugggaccucccaggu

SEQ ID NO: 1260142 - RNA, 19 nt, Artificial Sequence
  Description of Artificial Sequence: Synthetic oligonucleotide
guacgcccauaggaaugca

SEQ ID NO: 1260143 - RNA, 19 nt, Artificial Sequence
  Description of Artificial Sequence: Synthetic oligonucleotide
caccauaguugagguugca

SEQ ID NO: 1260144 - RNA, 19 nt, Artificial Sequence
  Description of Artificial Sequence: Synthetic oligonucleotide
cgcuguacgcccauaggaa

SEQ ID NO: 1260145 - RNA, 19 nt, Artificial Sequence
  Description of Artificial Sequence: Synthetic oligonucleotide
cagacuccgggcgugcacu

SEQ ID NO: 1260146 - RNA, 19 nt, Artificial Sequence
  Description of Artificial Sequence: Synthetic oligonucleotide
cagcuccaaccgagcgaug

SEQ ID NO: 1260147 - RNA, 19 nt, Artificial Sequence
  Description of Artificial Sequence: Synthetic oligonucleotide
cgcucgugggaccucccag

SEQ ID NO: 1260148 - RNA, 19 nt, Artificial Sequence
  Description of Artificial Sequence: Synthetic oligonucleotide
gcccaguaugccuccccuc

SEQ ID NO: 1260149 - RNA, 19 nt, Artificial Sequence
  Description of Artificial Sequence: Synthetic oligonucleotide
ccgggcgugcacugucccc

SEQ ID NO: 1260150 - RNA, 19 nt, Artificial Sequence
  Description of Artificial Sequence: Synthetic oligonucleotide
cggaggacgaugccugcuc

SEQ ID NO: 1260151 - RNA, 19 nt, Artificial Sequence
  Description of Artificial Sequence: Synthetic oligonucleotide
gcgauguugccaagccgga

SEQ ID NO: 1260152 - RNA, 19 nt, Artificial Sequence
  Description of Artificial Sequence: Synthetic oligonucleotide
cgauguugccaagccggag

SEQ ID NO: 1260153 - RNA, 19 nt, Artificial Sequence
  Description of Artificial Sequence: Synthetic oligonucleotide
gccaaguaccauacugccu

SEQ ID NO: 1260154 - RNA, 19 nt, Artificial Sequence
  Description of Artificial Sequence: Synthetic oligonucleotide
ggacgaugccugcuccaua

SEQ ID NO: 1260155 - RNA, 19 nt, Artificial Sequence
  Description of Artificial Sequence: Synthetic oligonucleotide
ggucucccggagugagcuc

SEQ ID NO: 1260156 - RNA, 19 nt, Artificial Sequence
  Description of Artificial Sequence: Synthetic oligonucleotide
ccuccaguauagcccgcca

SEQ ID NO: 1260157 - RNA, 19 nt, Artificial Sequence
  Description of Artificial Sequence: Synthetic oligonucleotide
ggggaguuugaggccaagu

SEQ ID NO: 1260158 - RNA, 19 nt, Artificial Sequence
  Description of Artificial Sequence: Synthetic oligonucleotide
gacuccgggcgugcacugu

SEQ ID NO: 1260159 - RNA, 19 nt, Artificial Sequence
  Description of Artificial Sequence: Synthetic oligonucleotide
gugggaccucccagguaaa

SEQ ID NO: 1260160 - RNA, 19 nt, Artificial Sequence
  Description of Artificial Sequence: Synthetic oligonucleotide
ccauaggaaugcaguaguu

SEQ ID NO: 1260161 - RNA, 19 nt, Artificial Sequence
  Description of Artificial Sequence: Synthetic oligonucleotide
accucgcuguacgcccaua

SEQ ID NO: 1260162 - RNA, 19 nt, Artificial Sequence
  Description of Artificial Sequence: Synthetic oligonucleotide
ggcaugcgagagagacgac

SEQ ID NO: 1260163 - RNA, 19 nt, Artificial Sequence
  Description of Artificial Sequence: Synthetic oligonucleotide
cgcccauaggaaugcagua

SEQ ID NO: 1260164 - RNA, 19 nt, Artificial Sequence
  Description of Artificial Sequence: Synthetic oligonucleotide
ccccgcggaagugcccgcg

SEQ ID NO: 1260165 - RNA, 19 nt, Artificial Sequence
  Description of Artificial Sequence: Synthetic oligonucleotide
cccauuugacggugugacu

SEQ ID NO: 1260166 - RNA, 19 nt, Artificial Sequence
  Description of Artificial Sequence: Synthetic oligonucleotide
gccccucuucuugguaaga

SEQ ID NO: 1260167 - RNA, 19 nt, Artificial Sequence
  Description of Artificial Sequence: Synthetic oligonucleotide
cuucgcucugggguccaau

SEQ ID NO: 1260168 - RNA, 19 nt, Artificial Sequence
  Description of Artificial Sequence: Synthetic oligonucleotide
cgggcgugcacugucccca

SEQ ID NO: 1260169 - RNA, 19 nt, Artificial Sequence
  Description of Artificial Sequence: Synthetic oligonucleotide
gcauuaccucaaugagguu

SEQ ID NO: 1260170 - RNA, 19 nt, Artificial Sequence
  Description of Artificial Sequence: Synthetic oligonucleotide
ccacucgauggaagaggcu

SEQ ID NO: 1260171 - RNA, 19 nt, Artificial Sequence
  Description of Artificial Sequence: Synthetic oligonucleotide
ccuaggagauuggggaguu

SEQ ID NO: 1260172 - RNA, 19 nt, Artificial Sequence
  Description of Artificial Sequence: Synthetic oligonucleotide
cgcuuuccuuccgcacagc

SEQ ID NO: 1260173 - RNA, 19 nt, Artificial Sequence
  Description of Artificial Sequence: Synthetic oligonucleotide
cacccuggccuggccggaa

SEQ ID NO: 1260174 - RNA, 19 nt, Artificial Sequence
  Description of Artificial Sequence: Synthetic oligonucleotide
caccucgcuguacgcccau

SEQ ID NO: 1260175 - RNA, 19 nt, Artificial Sequence
  Description of Artificial Sequence: Synthetic oligonucleotide
ccucaccauaguugagguu

SEQ ID NO: 1260176 - RNA, 19 nt, Artificial Sequence
  Description of Artificial Sequence: Synthetic oligonucleotide
cggaagggcaguggggugu

SEQ ID NO: 1260177 - RNA, 19 nt, Artificial Sequence
  Description of Artificial Sequence: Synthetic oligonucleotide
gcccgcgcccagccuagcu

SEQ ID NO: 1260178 - RNA, 19 nt, Artificial Sequence
  Description of Artificial Sequence: Synthetic oligonucleotide
cccucccauuugacggugu

SEQ ID NO: 1260179 - RNA, 19 nt, Artificial Sequence
  Description of Artificial Sequence: Synthetic oligonucleotide
cucccggagugagcuccau

SEQ ID NO: 1260180 - RNA, 19 nt, Artificial Sequence
  Description of Artificial Sequence: Synthetic oligonucleotide
cggacgcucgugggaccuc

SEQ ID NO: 1260181 - RNA, 19 nt, Artificial Sequence
  Description of Artificial Sequence: Synthetic oligonucleotide
uaaagaaacacgcugacgg

SEQ ID NO: 1260182 - RNA, 19 nt, Artificial Sequence
  Description of Artificial Sequence: Synthetic oligonucleotide
aauaaacuaucucacacag

SEQ ID NO: 1260183 - RNA, 19 nt, Artificial Sequence
  Description of Artificial Sequence: Synthetic oligonucleotide
uuuaaauucuaaauauggg

SEQ ID NO: 1260184 - RNA, 19 nt, Artificial Sequence
  Description of Artificial Sequence: Synthetic oligonucleotide
aauucuaaauaugggaacc

SEQ ID NO: 1260185 - RNA, 19 nt, Artificial Sequence
  Description of Artificial Sequence: Synthetic oligonucleotide
aaauucuaaauaugggaac

SEQ ID NO: 1260186 - RNA, 19 nt, Artificial Sequence
  Description of Artificial Sequence: Synthetic oligonucleotide
uuaaauucuaaauauggga

SEQ ID NO: 1260187 - RNA, 19 nt, Artificial Sequence
  Description of Artificial Sequence: Synthetic oligonucleotide
aauaaauucaugggguccc

SEQ ID NO: 1260188 - RNA, 19 nt, Artificial Sequence
  Description of Artificial Sequence: Synthetic oligonucleotide
acaauacucacuuauauca

SEQ ID NO: 1260189 - RNA, 19 nt, Artificial Sequence
  Description of Artificial Sequence: Synthetic oligonucleotide
agguccaucacuuugaucu

SEQ ID NO: 1260190 - RNA, 19 nt, Artificial Sequence
  Description of Artificial Sequence: Synthetic oligonucleotide
aagauugccuucaucaugc

SEQ ID NO: 1260191 - RNA, 19 nt, Artificial Sequence
  Description of Artificial Sequence: Synthetic oligonucleotide
ucucuauguuuccagaugg

SEQ ID NO: 1260192 - RNA, 19 nt, Artificial Sequence
  Description of Artificial Sequence: Synthetic oligonucleotide
ugagcuuugccccuggugg

SEQ ID NO: 1260193 - RNA, 19 nt, Artificial Sequence
  Description of Artificial Sequence: Synthetic oligonucleotide
ugaaauuguggguugauug

SEQ ID NO: 1260194 - RNA, 19 nt, Artificial Sequence
  Description of Artificial Sequence: Synthetic oligonucleotide
acagcuucaagugacaagc

SEQ ID NO: 1260195 - RNA, 19 nt, Artificial Sequence
  Description of Artificial Sequence: Synthetic oligonucleotide
aaugaugccgacuccauca

SEQ ID NO: 1260196 - RNA, 19 nt, Artificial Sequence
  Description of Artificial Sequence: Synthetic oligonucleotide
uuaaucuugugguuguacg

SEQ ID NO: 1260197 - RNA, 19 nt, Artificial Sequence
  Description of Artificial Sequence: Synthetic oligonucleotide
ucauuugcaacuccggucc

SEQ ID NO: 1260198 - RNA, 19 nt, Artificial Sequence
  Description of Artificial Sequence: Synthetic oligonucleotide
gaaauuguggguugauugg

SEQ ID NO: 1260199 - RNA, 19 nt, Artificial Sequence
  Description of Artificial Sequence: Synthetic oligonucleotide
guaguaaagaaacacgcug

SEQ ID NO: 1260200 - RNA, 19 nt, Artificial Sequence
  Description of Artificial Sequence: Synthetic oligonucleotide
ucuagaauacaugugugag

SEQ ID NO: 1260201 - RNA, 19 nt, Artificial Sequence
  Description of Artificial Sequence: Synthetic oligonucleotide
caguaguaaagaaacacgc

SEQ ID NO: 1260202 - RNA, 19 nt, Artificial Sequence
  Description of Artificial Sequence: Synthetic oligonucleotide
auaggcauuguuucgguuc

SEQ ID NO: 1260203 - RNA, 19 nt, Artificial Sequence
  Description of Artificial Sequence: Synthetic oligonucleotide
gauuauuagugucugcuac

SEQ ID NO: 1260204 - RNA, 19 nt, Artificial Sequence
  Description of Artificial Sequence: Synthetic oligonucleotide
ucauuaaaggccgacuccg

SEQ ID NO: 1260205 - RNA, 19 nt, Artificial Sequence
  Description of Artificial Sequence: Synthetic oligonucleotide
aaccacgacaucccaaggg

SEQ ID NO: 1260206 - RNA, 19 nt, Artificial Sequence
  Description of Artificial Sequence: Synthetic oligonucleotide
uggaucuacaacuuuaauc

SEQ ID NO: 1260207 - RNA, 19 nt, Artificial Sequence
  Description of Artificial Sequence: Synthetic oligonucleotide
uaguaaagaaacacgcuga

SEQ ID NO: 1260208 - RNA, 19 nt, Artificial Sequence
  Description of Artificial Sequence: Synthetic oligonucleotide
ucugcuacauacagcagcc

SEQ ID NO: 1260209 - RNA, 19 nt, Artificial Sequence
  Description of Artificial Sequence: Synthetic oligonucleotide
ucugcuaggaauguguuca

SEQ ID NO: 1260210 - RNA, 19 nt, Artificial Sequence
  Description of Artificial Sequence: Synthetic oligonucleotide
aucauuugcaacuccgguc

SEQ ID NO: 1260211 - RNA, 19 nt, Artificial Sequence
  Description of Artificial Sequence: Synthetic oligonucleotide
gacacauaagccuccaggc

SEQ ID NO: 1260212 - RNA, 19 nt, Artificial Sequence
  Description of Artificial Sequence: Synthetic oligonucleotide
gagucugcgacauacagca

SEQ ID NO: 1260213 - RNA, 19 nt, Artificial Sequence
  Description of Artificial Sequence: Synthetic oligonucleotide
gaucuggugauuauuagug

SEQ ID NO: 1260214 - RNA, 19 nt, Artificial Sequence
  Description of Artificial Sequence: Synthetic oligonucleotide
accaacgccagcuacagug

SEQ ID NO: 1260215 - RNA, 19 nt, Artificial Sequence
  Description of Artificial Sequence: Synthetic oligonucleotide
aauucauggggucccgcuc

SEQ ID NO: 1260216 - RNA, 19 nt, Artificial Sequence
  Description of Artificial Sequence: Synthetic oligonucleotide
uccagaugggaucuguucc

SEQ ID NO: 1260217 - RNA, 19 nt, Artificial Sequence
  Description of Artificial Sequence: Synthetic oligonucleotide
auaucagaauuaaagauca

SEQ ID NO: 1260218 - RNA, 19 nt, Artificial Sequence
  Description of Artificial Sequence: Synthetic oligonucleotide
uuaugugcaaagguugccg

SEQ ID NO: 1260219 - RNA, 19 nt, Artificial Sequence
  Description of Artificial Sequence: Synthetic oligonucleotide
uuuuggaucuacaacuuua

SEQ ID NO: 1260220 - RNA, 19 nt, Artificial Sequence
  Description of Artificial Sequence: Synthetic oligonucleotide
uuugaagguuuacauguga

SEQ ID NO: 1260221 - RNA, 19 nt, Artificial Sequence
  Description of Artificial Sequence: Synthetic oligonucleotide
aaguucuaccauuacaaua

SEQ ID NO: 1260222 - RNA, 19 nt, Artificial Sequence
  Description of Artificial Sequence: Synthetic oligonucleotide
agugagacgcuucucacug

SEQ ID NO: 1260223 - RNA, 19 nt, Artificial Sequence
  Description of Artificial Sequence: Synthetic oligonucleotide
uugagugagacgcuucuca

SEQ ID NO: 1260224 - RNA, 19 nt, Artificial Sequence
  Description of Artificial Sequence: Synthetic oligonucleotide
cuaaauaugggaaccaaaa

SEQ ID NO: 1260225 - RNA, 19 nt, Artificial Sequence
  Description of Artificial Sequence: Synthetic oligonucleotide
aauuucuagaauacaugug

SEQ ID NO: 1260226 - RNA, 19 nt, Artificial Sequence
  Description of Artificial Sequence: Synthetic oligonucleotide
cuagaauacaugugugagc

SEQ ID NO: 1260227 - RNA, 19 nt, Artificial Sequence
  Description of Artificial Sequence: Synthetic oligonucleotide
ucuaaauaugggaaccaaa

SEQ ID NO: 1260228 - RNA, 19 nt, Artificial Sequence
  Description of Artificial Sequence: Synthetic oligonucleotide
accacgacaucccaagggg

SEQ ID NO: 1260229 - RNA, 19 nt, Artificial Sequence
  Description of Artificial Sequence: Synthetic oligonucleotide
gcuacaaagaggcagcucc

SEQ ID NO: 1260230 - RNA, 19 nt, Artificial Sequence
  Description of Artificial Sequence: Synthetic oligonucleotide
uucuagaauacauguguga

SEQ ID NO: 1260231 - RNA, 19 nt, Artificial Sequence
  Description of Artificial Sequence: Synthetic oligonucleotide
uucgguucucuucauuucc

SEQ ID NO: 1260232 - RNA, 19 nt, Artificial Sequence
  Description of Artificial Sequence: Synthetic oligonucleotide
uauaucaaguucuaccauu

SEQ ID NO: 1260233 - RNA, 19 nt, Artificial Sequence
  Description of Artificial Sequence: Synthetic oligonucleotide
uggguaucgguuaugugca

SEQ ID NO: 1260234 - RNA, 19 nt, Artificial Sequence
  Description of Artificial Sequence: Synthetic oligonucleotide
ggaucuacaacuuuaaucu

SEQ ID NO: 1260235 - RNA, 19 nt, Artificial Sequence
  Description of Artificial Sequence: Synthetic oligonucleotide
gaggauaggcauuguuucg

SEQ ID NO: 1260236 - RNA, 19 nt, Artificial Sequence
  Description of Artificial Sequence: Synthetic oligonucleotide
acuuggguacuuugggcgc

SEQ ID NO: 1260237 - RNA, 19 nt, Artificial Sequence
  Description of Artificial Sequence: Synthetic oligonucleotide
aaauucauggggucccgcu

SEQ ID NO: 1260238 - RNA, 19 nt, Artificial Sequence
  Description of Artificial Sequence: Synthetic oligonucleotide
caauuugaagguuuacaug

SEQ ID NO: 1260239 - RNA, 19 nt, Artificial Sequence
  Description of Artificial Sequence: Synthetic oligonucleotide
aucaaguucuaccauuaca

SEQ ID NO: 1260240 - RNA, 19 nt, Artificial Sequence
  Description of Artificial Sequence: Synthetic oligonucleotide
uacaaggugcuucacggcu

SEQ ID NO: 1260241 - RNA, 19 nt, Artificial Sequence
  Description of Artificial Sequence: Synthetic oligonucleotide
aaguggaugcugaagcuuc

SEQ ID NO: 1260242 - RNA, 19 nt, Artificial Sequence
  Description of Artificial Sequence: Synthetic oligonucleotide
uuuggaucuacaacuuuaa

SEQ ID NO: 1260243 - RNA, 19 nt, Artificial Sequence
  Description of Artificial Sequence: Synthetic oligonucleotide
uugucugcuaggaaugugu

SEQ ID NO: 1260244 - RNA, 19 nt, Artificial Sequence
  Description of Artificial Sequence: Synthetic oligonucleotide
ugacggauaucacagcuuc

SEQ ID NO: 1260245 - RNA, 19 nt, Artificial Sequence
  Description of Artificial Sequence: Synthetic oligonucleotide
ucuggugauuauuaguguc

SEQ ID NO: 1260246 - RNA, 19 nt, Artificial Sequence
  Description of Artificial Sequence: Synthetic oligonucleotide
caaaacgaaggcagguucc

SEQ ID NO: 1260247 - RNA, 19 nt, Artificial Sequence
  Description of Artificial Sequence: Synthetic oligonucleotide
gaauuaaagaucauaauuu

SEQ ID NO: 1260248 - RNA, 19 nt, Artificial Sequence
  Description of Artificial Sequence: Synthetic oligonucleotide
auaguuaagaguaggucug

SEQ ID NO: 1260249 - RNA, 19 nt, Artificial Sequence
  Description of Artificial Sequence: Synthetic oligonucleotide
agaguaggucugcaugccc

SEQ ID NO: 1260250 - RNA, 19 nt, Artificial Sequence
  Description of Artificial Sequence: Synthetic oligonucleotide
ucccaugcaaccccaagug

SEQ ID NO: 1260251 - RNA, 19 nt, Artificial Sequence
  Description of Artificial Sequence: Synthetic oligonucleotide
ugccccuagaaauuucuag

SEQ ID NO: 1260252 - RNA, 19 nt, Artificial Sequence
  Description of Artificial Sequence: Synthetic oligonucleotide
guaucgguuaugugcaaag

SEQ ID NO: 1260253 - RNA, 19 nt, Artificial Sequence
  Description of Artificial Sequence: Synthetic oligonucleotide
cuaggaauguguucauuug

SEQ ID NO: 1260254 - RNA, 19 nt, Artificial Sequence
  Description of Artificial Sequence: Synthetic oligonucleotide
uccgcaaaacugcaaacaa

SEQ ID NO: 1260255 - RNA, 19 nt, Artificial Sequence
  Description of Artificial Sequence: Synthetic oligonucleotide
ugaagguuuacaugugauc

SEQ ID NO: 1260256 - RNA, 19 nt, Artificial Sequence
  Description of Artificial Sequence: Synthetic oligonucleotide
aaauuguggguugauugga

SEQ ID NO: 1260257 - RNA, 19 nt, Artificial Sequence
  Description of Artificial Sequence: Synthetic oligonucleotide
aucgguuaugugcaaaggu

SEQ ID NO: 1260258 - RNA, 19 nt, Artificial Sequence
  Description of Artificial Sequence: Synthetic oligonucleotide
cucacuuauaucaaguucu

SEQ ID NO: 1260259 - RNA, 19 nt, Artificial Sequence
  Description of Artificial Sequence: Synthetic oligonucleotide
ucuauguuuccagauggga

SEQ ID NO: 1260260 - RNA, 19 nt, Artificial Sequence
  Description of Artificial Sequence: Synthetic oligonucleotide
uccaucuuugagugagacg

SEQ ID NO: 1260261 - RNA, 19 nt, Artificial Sequence
  Description of Artificial Sequence: Synthetic oligonucleotide
ucugcgacauacagcagac

SEQ ID NO: 1260262 - RNA, 19 nt, Artificial Sequence
  Description of Artificial Sequence: Synthetic oligonucleotide
uucuaccauuacaauaaac

SEQ ID NO: 1260263 - RNA, 19 nt, Artificial Sequence
  Description of Artificial Sequence: Synthetic oligonucleotide
gguuguacgagucugcgac

SEQ ID NO: 1260264 - RNA, 19 nt, Artificial Sequence
  Description of Artificial Sequence: Synthetic oligonucleotide
gaaggggccaucuaccaca

SEQ ID NO: 1260265 - RNA, 19 nt, Artificial Sequence
  Description of Artificial Sequence: Synthetic oligonucleotide
cuacaggagcuccacagcc

SEQ ID NO: 1260266 - RNA, 19 nt, Artificial Sequence
  Description of Artificial Sequence: Synthetic oligonucleotide
ucuggucccaugcaacccc

SEQ ID NO: 1260267 - RNA, 19 nt, Artificial Sequence
  Description of Artificial Sequence: Synthetic oligonucleotide
ucgguuaugugcaaagguu

SEQ ID NO: 1260268 - RNA, 19 nt, Artificial Sequence
  Description of Artificial Sequence: Synthetic oligonucleotide
ugagacgcuucucacugug

SEQ ID NO: 1260269 - RNA, 19 nt, Artificial Sequence
  Description of Artificial Sequence: Synthetic oligonucleotide
aaagguugccggaacaaga

SEQ ID NO: 1260270 - RNA, 19 nt, Artificial Sequence
  Description of Artificial Sequence: Synthetic oligonucleotide
acuccgcaaaacugcaaac

SEQ ID NO: 1260271 - RNA, 19 nt, Artificial Sequence
  Description of Artificial Sequence: Synthetic oligonucleotide
ugugguuguacgagucugc

SEQ ID NO: 1260272 - RNA, 19 nt, Artificial Sequence
  Description of Artificial Sequence: Synthetic oligonucleotide
uaucgguuaugugcaaagg

SEQ ID NO: 1260273 - RNA, 19 nt, Artificial Sequence
  Description of Artificial Sequence: Synthetic oligonucleotide
ugggaaccaaaacaauaac

SEQ ID NO: 1260274 - RNA, 19 nt, Artificial Sequence
  Description of Artificial Sequence: Synthetic oligonucleotide
uacagugcucacuuucuca

SEQ ID NO: 1260275 - RNA, 19 nt, Artificial Sequence
  Description of Artificial Sequence: Synthetic oligonucleotide
ugugagcucuacaggagcu

SEQ ID NO: 1260276 - RNA, 19 nt, Artificial Sequence
  Description of Artificial Sequence: Synthetic oligonucleotide
agcaauuugaagguuuaca

SEQ ID NO: 1260277 - RNA, 19 nt, Artificial Sequence
  Description of Artificial Sequence: Synthetic oligonucleotide
aggauaggcauuguuucgg

SEQ ID NO: 1260278 - RNA, 19 nt, Artificial Sequence
  Description of Artificial Sequence: Synthetic oligonucleotide
uugaguugcagagucuggc

SEQ ID NO: 1260279 - RNA, 19 nt, Artificial Sequence
  Description of Artificial Sequence: Synthetic oligonucleotide
ucaccgacacauaagccuc

SEQ ID NO: 1260280 - RNA, 19 nt, Artificial Sequence
  Description of Artificial Sequence: Synthetic oligonucleotide
caagcacucagcaggaauc

SEQ ID NO: 1260281 - RNA, 19 nt, Artificial Sequence
  Description of Artificial Sequence: Synthetic oligonucleotide
acgagucugcgacauacag

SEQ ID NO: 1260282 - RNA, 19 nt, Artificial Sequence
  Description of Artificial Sequence: Synthetic oligonucleotide
acggcuccaucuuugagug

SEQ ID NO: 1260283 - RNA, 19 nt, Artificial Sequence
  Description of Artificial Sequence: Synthetic oligonucleotide
auuaaaggccgacuccgca

SEQ ID NO: 1260284 - RNA, 19 nt, Artificial Sequence
  Description of Artificial Sequence: Synthetic oligonucleotide
cacucauugccuucagcgg

SEQ ID NO: 1260285 - RNA, 19 nt, Artificial Sequence
  Description of Artificial Sequence: Synthetic oligonucleotide
ugacaacagcaauuugaag

SEQ ID NO: 1260286 - RNA, 19 nt, Artificial Sequence
  Description of Artificial Sequence: Synthetic oligonucleotide
aacgaaggcagguuccuuu

SEQ ID NO: 1260287 - RNA, 19 nt, Artificial Sequence
  Description of Artificial Sequence: Synthetic oligonucleotide
uuaaaggccgacuccgcaa

SEQ ID NO: 1260288 - RNA, 19 nt, Artificial Sequence
  Description of Artificial Sequence: Synthetic oligonucleotide
ugaugagucccggccaugg

SEQ ID NO: 1260289 - RNA, 19 nt, Artificial Sequence
  Description of Artificial Sequence: Synthetic oligonucleotide
cuugaguugcagagucugg

SEQ ID NO: 1260290 - RNA, 19 nt, Artificial Sequence
  Description of Artificial Sequence: Synthetic oligonucleotide
aggaauguguucauuugag

SEQ ID NO: 1260291 - RNA, 19 nt, Artificial Sequence
  Description of Artificial Sequence: Synthetic oligonucleotide
ugcaaagguugccggaaca

SEQ ID NO: 1260292 - RNA, 19 nt, Artificial Sequence
  Description of Artificial Sequence: Synthetic oligonucleotide
aaaagucagcaugucucug

SEQ ID NO: 1260293 - RNA, 19 nt, Artificial Sequence
  Description of Artificial Sequence: Synthetic oligonucleotide
ugauuauuagugucugcua

SEQ ID NO: 1260294 - RNA, 19 nt, Artificial Sequence
  Description of Artificial Sequence: Synthetic oligonucleotide
auguguucauuugagaaau

SEQ ID NO: 1260295 - RNA, 19 nt, Artificial Sequence
  Description of Artificial Sequence: Synthetic oligonucleotide
cuaccauuacaauaaacua

SEQ ID NO: 1260296 - RNA, 19 nt, Artificial Sequence
  Description of Artificial Sequence: Synthetic oligonucleotide
gaauacaugugugagcucu

SEQ ID NO: 1260297 - RNA, 19 nt, Artificial Sequence
  Description of Artificial Sequence: Synthetic oligonucleotide
aguaguaaagaaacacgcu

SEQ ID NO: 1260298 - RNA, 19 nt, Artificial Sequence
  Description of Artificial Sequence: Synthetic oligonucleotide
gguuccaaccacgacaucc

SEQ ID NO: 1260299 - RNA, 19 nt, Artificial Sequence
  Description of Artificial Sequence: Synthetic oligonucleotide
ugagugagacgcuucucac

SEQ ID NO: 1260300 - RNA, 19 nt, Artificial Sequence
  Description of Artificial Sequence: Synthetic oligonucleotide
gaugccgacuccaucagca

SEQ ID NO: 1260301 - RNA, 19 nt, Artificial Sequence
  Description of Artificial Sequence: Synthetic oligonucleotide
uagcgaaggggccaucuac

SEQ ID NO: 1260302 - RNA, 19 nt, Artificial Sequence
  Description of Artificial Sequence: Synthetic oligonucleotide
agcgaaggggccaucuacc

SEQ ID NO: 1260303 - RNA, 19 nt, Artificial Sequence
  Description of Artificial Sequence: Synthetic oligonucleotide
acaucauuugcaacuccgg

SEQ ID NO: 1260304 - RNA, 19 nt, Artificial Sequence
  Description of Artificial Sequence: Synthetic oligonucleotide
aacagcaauuugaagguuu

SEQ ID NO: 1260305 - RNA, 19 nt, Artificial Sequence
  Description of Artificial Sequence: Synthetic oligonucleotide
ugagcucuacaggagcucc

SEQ ID NO: 1260306 - RNA, 19 nt, Artificial Sequence
  Description of Artificial Sequence: Synthetic oligonucleotide
uacaugugugagcucuaca

SEQ ID NO: 1260307 - RNA, 19 nt, Artificial Sequence
  Description of Artificial Sequence: Synthetic oligonucleotide
ugugaggauaggcauuguu

SEQ ID NO: 1260308 - RNA, 19 nt, Artificial Sequence
  Description of Artificial Sequence: Synthetic oligonucleotide
ucacuuauaucaaguucua

SEQ ID NO: 1260309 - RNA, 19 nt, Artificial Sequence
  Description of Artificial Sequence: Synthetic oligonucleotide
uaaaggccgacuccgcaaa

SEQ ID NO: 1260310 - RNA, 19 nt, Artificial Sequence
  Description of Artificial Sequence: Synthetic oligonucleotide
cauuaaaggccgacuccgc

SEQ ID NO: 1260311 - RNA, 19 nt, Artificial Sequence
  Description of Artificial Sequence: Synthetic oligonucleotide
cuacauacagcagccggcc

SEQ ID NO: 1260312 - RNA, 19 nt, Artificial Sequence
  Description of Artificial Sequence: Synthetic oligonucleotide
auacucacuuauaucaagu

SEQ ID NO: 1260313 - RNA, 19 nt, Artificial Sequence
  Description of Artificial Sequence: Synthetic oligonucleotide
uucuaaauaugggaaccaa

SEQ ID NO: 1260314 - RNA, 19 nt, Artificial Sequence
  Description of Artificial Sequence: Synthetic oligonucleotide
uuucgguucucuucauuuc

SEQ ID NO: 1260315 - RNA, 19 nt, Artificial Sequence
  Description of Artificial Sequence: Synthetic oligonucleotide
ggaucgggagcacagagac

SEQ ID NO: 1260316 - RNA, 19 nt, Artificial Sequence
  Description of Artificial Sequence: Synthetic oligonucleotide
auaaauucauggggucccg

SEQ ID NO: 1260317 - RNA, 19 nt, Artificial Sequence
  Description of Artificial Sequence: Synthetic oligonucleotide
auacaugugugagcucuac

SEQ ID NO: 1260318 - RNA, 19 nt, Artificial Sequence
  Description of Artificial Sequence: Synthetic oligonucleotide
agacuguucuugcuuccag

SEQ ID NO: 1260319 - RNA, 19 nt, Artificial Sequence
  Description of Artificial Sequence: Synthetic oligonucleotide
aucuggugauuauuagugu

SEQ ID NO: 1260320 - RNA, 19 nt, Artificial Sequence
  Description of Artificial Sequence: Synthetic oligonucleotide
uguggguugauuggaaaua

SEQ ID NO: 1260321 - RNA, 19 nt, Artificial Sequence
  Description of Artificial Sequence: Synthetic oligonucleotide
uguugugcagaguuuuguu

SEQ ID NO: 1260322 - RNA, 19 nt, Artificial Sequence
  Description of Artificial Sequence: Synthetic oligonucleotide
ugcaacuccggucccggcu

SEQ ID NO: 1260323 - RNA, 19 nt, Artificial Sequence
  Description of Artificial Sequence: Synthetic oligonucleotide
gacuccgcaaaacugcaaa

SEQ ID NO: 1260324 - RNA, 19 nt, Artificial Sequence
  Description of Artificial Sequence: Synthetic oligonucleotide
guuaugugcaaagguugcc

SEQ ID NO: 1260325 - RNA, 19 nt, Artificial Sequence
  Description of Artificial Sequence: Synthetic oligonucleotide
guacgagucugcgacauac

SEQ ID NO: 1260326 - RNA, 19 nt, Artificial Sequence
  Description of Artificial Sequence: Synthetic oligonucleotide
gguugccggaacaagauug

SEQ ID NO: 1260327 - RNA, 19 nt, Artificial Sequence
  Description of Artificial Sequence: Synthetic oligonucleotide
aacacaauacucacuuaua

SEQ ID NO: 1260328 - RNA, 19 nt, Artificial Sequence
  Description of Artificial Sequence: Synthetic oligonucleotide
gucaccgacacauaagccu

SEQ ID NO: 1260329 - RNA, 19 nt, Artificial Sequence
  Description of Artificial Sequence: Synthetic oligonucleotide
cuuaaaacugaaguauaaa

SEQ ID NO: 1260330 - RNA, 19 nt, Artificial Sequence
  Description of Artificial Sequence: Synthetic oligonucleotide
ugucugcuacauacagcag

SEQ ID NO: 1260331 - RNA, 19 nt, Artificial Sequence
  Description of Artificial Sequence: Synthetic oligonucleotide
ugugcaaagguugccggaa

SEQ ID NO: 1260332 - RNA, 19 nt, Artificial Sequence
  Description of Artificial Sequence: Synthetic oligonucleotide
uuugggcgcugucuucugc

SEQ ID NO: 1260333 - RNA, 19 nt, Artificial Sequence
  Description of Artificial Sequence: Synthetic oligonucleotide
acgcugacggauaucacag

SEQ ID NO: 1260334 - RNA, 19 nt, Artificial Sequence
  Description of Artificial Sequence: Synthetic oligonucleotide
augaugccgacuccaucag

SEQ ID NO: 1260335 - RNA, 19 nt, Artificial Sequence
  Description of Artificial Sequence: Synthetic oligonucleotide
guuccaaccacgacauccc

SEQ ID NO: 1260336 - RNA, 19 nt, Artificial Sequence
  Description of Artificial Sequence: Synthetic oligonucleotide
cagcagacuccucuucugg

SEQ ID NO: 1260337 - RNA, 19 nt, Artificial Sequence
  Description of Artificial Sequence: Synthetic oligonucleotide
aagugaaauuguggguuga

SEQ ID NO: 1260338 - RNA, 19 nt, Artificial Sequence
  Description of Artificial Sequence: Synthetic oligonucleotide
auuugcaacuccggucccg

SEQ ID NO: 1260339 - RNA, 19 nt, Artificial Sequence
  Description of Artificial Sequence: Synthetic oligonucleotide
uaguuaagaguaggucugc

SEQ ID NO: 1260340 - RNA, 19 nt, Artificial Sequence
  Description of Artificial Sequence: Synthetic oligonucleotide
agcccauaucugaugaguc

SEQ ID NO: 1260341 - RNA, 19 nt, Artificial Sequence
  Description of Artificial Sequence: Synthetic oligonucleotide
gugguuguacgagucugcg

SEQ ID NO: 1260342 - RNA, 19 nt, Artificial Sequence
  Description of Artificial Sequence: Synthetic oligonucleotide
aauuguggguugauuggaa

SEQ ID NO: 1260343 - RNA, 19 nt, Artificial Sequence
  Description of Artificial Sequence: Synthetic oligonucleotide
uggccacaccuucugugag

SEQ ID NO: 1260344 - RNA, 19 nt, Artificial Sequence
  Description of Artificial Sequence: Synthetic oligonucleotide
ccuucagcggucaggaacc

SEQ ID NO: 1260345 - RNA, 19 nt, Artificial Sequence
  Description of Artificial Sequence: Synthetic oligonucleotide
ggguugauuggaaauauuc

SEQ ID NO: 1260346 - RNA, 19 nt, Artificial Sequence
  Description of Artificial Sequence: Synthetic oligonucleotide
cuuugccccugguggaagg

SEQ ID NO: 1260347 - RNA, 19 nt, Artificial Sequence
  Description of Artificial Sequence: Synthetic oligonucleotide
cagcuugagcuugaguugc

SEQ ID NO: 1260348 - RNA, 19 nt, Artificial Sequence
  Description of Artificial Sequence: Synthetic oligonucleotide
ugaugccgacuccaucagc

SEQ ID NO: 1260349 - RNA, 19 nt, Artificial Sequence
  Description of Artificial Sequence: Synthetic oligonucleotide
auaucaaguucuaccauua

SEQ ID NO: 1260350 - RNA, 19 nt, Artificial Sequence
  Description of Artificial Sequence: Synthetic oligonucleotide
aacgccagcuacagugcuc

SEQ ID NO: 1260351 - RNA, 19 nt, Artificial Sequence
  Description of Artificial Sequence: Synthetic oligonucleotide
uccuccuacaaggugcuuc

SEQ ID NO: 1260352 - RNA, 19 nt, Artificial Sequence
  Description of Artificial Sequence: Synthetic oligonucleotide
uguagcgaaggggccaucu

SEQ ID NO: 1260353 - RNA, 19 nt, Artificial Sequence
  Description of Artificial Sequence: Synthetic oligonucleotide
ggauaucacagcuucaagu

SEQ ID NO: 1260354 - RNA, 19 nt, Artificial Sequence
  Description of Artificial Sequence: Synthetic oligonucleotide
cacgcugacggauaucaca

SEQ ID NO: 1260355 - RNA, 19 nt, Artificial Sequence
  Description of Artificial Sequence: Synthetic oligonucleotide
uccaaccacgacaucccaa

SEQ ID NO: 1260356 - RNA, 19 nt, Artificial Sequence
  Description of Artificial Sequence: Synthetic oligonucleotide
ccaaccacgacaucccaag

SEQ ID NO: 1260357 - RNA, 19 nt, Artificial Sequence
  Description of Artificial Sequence: Synthetic oligonucleotide
gcggucaggaaccagcagc

SEQ ID NO: 1260358 - RNA, 19 nt, Artificial Sequence
  Description of Artificial Sequence: Synthetic oligonucleotide
uacgagucugcgacauaca

SEQ ID NO: 1260359 - RNA, 19 nt, Artificial Sequence
  Description of Artificial Sequence: Synthetic oligonucleotide
uauccacaggaugucauuu

SEQ ID NO: 1260360 - RNA, 19 nt, Artificial Sequence
  Description of Artificial Sequence: Synthetic oligonucleotide
acggauaucacagcuucaa

SEQ ID NO: 1260361 - RNA, 19 nt, Artificial Sequence
  Description of Artificial Sequence: Synthetic oligonucleotide
gcucauuaaaggccgacuc

SEQ ID NO: 1260362 - RNA, 19 nt, Artificial Sequence
  Description of Artificial Sequence: Synthetic oligonucleotide
gugagcuuugccccuggug

SEQ ID NO: 1260363 - RNA, 19 nt, Artificial Sequence
  Description of Artificial Sequence: Synthetic oligonucleotide
gcaaaacgaaggcagguuc

SEQ ID NO: 1260364 - RNA, 19 nt, Artificial Sequence
  Description of Artificial Sequence: Synthetic oligonucleotide
guugccggaacaagauugc

SEQ ID NO: 1260365 - RNA, 19 nt, Artificial Sequence
  Description of Artificial Sequence: Synthetic oligonucleotide
acaaggugcuucacggcuc

SEQ ID NO: 1260366 - RNA, 19 nt, Artificial Sequence
  Description of Artificial Sequence: Synthetic oligonucleotide
augggcugcuucucgccuc

SEQ ID NO: 1260367 - RNA, 19 nt, Artificial Sequence
  Description of Artificial Sequence: Synthetic oligonucleotide
ugguuguacgagucugcga

SEQ ID NO: 1260368 - RNA, 19 nt, Artificial Sequence
  Description of Artificial Sequence: Synthetic oligonucleotide
augugcaaagguugccgga

SEQ ID NO: 1260369 - RNA, 19 nt, Artificial Sequence
  Description of Artificial Sequence: Synthetic oligonucleotide
cgacacauaagccuccagg

SEQ ID NO: 1260370 - RNA, 19 nt, Artificial Sequence
  Description of Artificial Sequence: Synthetic oligonucleotide
aggcucauuaaaggccgac

SEQ ID NO: 1260371 - RNA, 19 nt, Artificial Sequence
  Description of Artificial Sequence: Synthetic oligonucleotide
caacacaauacucacuuau

SEQ ID NO: 1260372 - RNA, 19 nt, Artificial Sequence
  Description of Artificial Sequence: Synthetic oligonucleotide
uuguacgagucugcgacau

SEQ ID NO: 1260373 - RNA, 19 nt, Artificial Sequence
  Description of Artificial Sequence: Synthetic oligonucleotide
cacucccagcaaaacgaag

SEQ ID NO: 1260374 - RNA, 19 nt, Artificial Sequence
  Description of Artificial Sequence: Synthetic oligonucleotide
caaccacgacaucccaagg

SEQ ID NO: 1260375 - RNA, 19 nt, Artificial Sequence
  Description of Artificial Sequence: Synthetic oligonucleotide
agguuuacaugugaucuuu

SEQ ID NO: 1260376 - RNA, 19 nt, Artificial Sequence
  Description of Artificial Sequence: Synthetic oligonucleotide
cuauguuuccagaugggau

SEQ ID NO: 1260377 - RNA, 19 nt, Artificial Sequence
  Description of Artificial Sequence: Synthetic oligonucleotide
cuggugauuauuagugucu

SEQ ID NO: 1260378 - RNA, 19 nt, Artificial Sequence
  Description of Artificial Sequence: Synthetic oligonucleotide
uuugagugagacgcuucuc

SEQ ID NO: 1260379 - RNA, 19 nt, Artificial Sequence
  Description of Artificial Sequence: Synthetic oligonucleotide
caaugaugccgacuccauc

SEQ ID NO: 1260380 - RNA, 19 nt, Artificial Sequence
  Description of Artificial Sequence: Synthetic oligonucleotide
guuucgguucucuucauuu

SEQ ID NO: 1260381 - RNA, 19 nt, Artificial Sequence
  Description of Artificial Sequence: Synthetic oligonucleotide
cuccaggggucuucugagg

SEQ ID NO: 1260382 - RNA, 19 nt, Artificial Sequence
  Description of Artificial Sequence: Synthetic oligonucleotide
ccgcucuccuccuacaagg

SEQ ID NO: 1260383 - RNA, 19 nt, Artificial Sequence
  Description of Artificial Sequence: Synthetic oligonucleotide
uggguugauuggaaauauu

SEQ ID NO: 1260384 - RNA, 19 nt, Artificial Sequence
  Description of Artificial Sequence: Synthetic oligonucleotide
cccauaucugaugaguccc

SEQ ID NO: 1260385 - RNA, 19 nt, Artificial Sequence
  Description of Artificial Sequence: Synthetic oligonucleotide
cuacaaagaggcagcucca

SEQ ID NO: 1260386 - RNA, 19 nt, Artificial Sequence
  Description of Artificial Sequence: Synthetic oligonucleotide
aguguugugcagaguuuug

SEQ ID NO: 1260387 - RNA, 19 nt, Artificial Sequence
  Description of Artificial Sequence: Synthetic oligonucleotide
cauuugcaacuccgguccc

SEQ ID NO: 1260388 - RNA, 19 nt, Artificial Sequence
  Description of Artificial Sequence: Synthetic oligonucleotide
ccauaucugaugagucccg

SEQ ID NO: 1260389 - RNA, 19 nt, Artificial Sequence
  Description of Artificial Sequence: Synthetic oligonucleotide
agcuucgcaaugaugccga

SEQ ID NO: 1260390 - RNA, 19 nt, Artificial Sequence
  Description of Artificial Sequence: Synthetic oligonucleotide
uccggucccggcuaguguu

SEQ ID NO: 1260391 - RNA, 19 nt, Artificial Sequence
  Description of Artificial Sequence: Synthetic oligonucleotide
agcaaaacgaaggcagguu

SEQ ID NO: 1260392 - RNA, 19 nt, Artificial Sequence
  Description of Artificial Sequence: Synthetic oligonucleotide
aauacaugugugagcucua

SEQ ID NO: 1260393 - RNA, 19 nt, Artificial Sequence
  Description of Artificial Sequence: Synthetic oligonucleotide
agugaaauuguggguugau

SEQ ID NO: 1260394 - RNA, 19 nt, Artificial Sequence
  Description of Artificial Sequence: Synthetic oligonucleotide
ggagagcccauaucugaug

SEQ ID NO: 1260395 - RNA, 19 nt, Artificial Sequence
  Description of Artificial Sequence: Synthetic oligonucleotide
caccgacacauaagccucc

SEQ ID NO: 1260396 - RNA, 19 nt, Artificial Sequence
  Description of Artificial Sequence: Synthetic oligonucleotide
ucccggcuaguguugugca

SEQ ID NO: 1260397 - RNA, 19 nt, Artificial Sequence
  Description of Artificial Sequence: Synthetic oligonucleotide
cuccgcaaaacugcaaaca

SEQ ID NO: 1260398 - RNA, 19 nt, Artificial Sequence
  Description of Artificial Sequence: Synthetic oligonucleotide
gucugcacuacaguaguaa

SEQ ID NO: 1260399 - RNA, 19 nt, Artificial Sequence
  Description of Artificial Sequence: Synthetic oligonucleotide
aggccagagagagaccuga

SEQ ID NO: 1260400 - RNA, 19 nt, Artificial Sequence
  Description of Artificial Sequence: Synthetic oligonucleotide
ugugagcuuugccccuggu

SEQ ID NO: 1260401 - RNA, 19 nt, Artificial Sequence
  Description of Artificial Sequence: Synthetic oligonucleotide
ucuugcuuccagguccauc

SEQ ID NO: 1260402 - RNA, 19 nt, Artificial Sequence
  Description of Artificial Sequence: Synthetic oligonucleotide
ugucugcacuacaguagua

SEQ ID NO: 1260403 - RNA, 19 nt, Artificial Sequence
  Description of Artificial Sequence: Synthetic oligonucleotide
guuguacgagucugcgaca

SEQ ID NO: 1260404 - RNA, 19 nt, Artificial Sequence
  Description of Artificial Sequence: Synthetic oligonucleotide
acgaaggcagguuccuuuu

SEQ ID NO: 1260405 - RNA, 19 nt, Artificial Sequence
  Description of Artificial Sequence: Synthetic oligonucleotide
ugcaugccccuagaaauuu

SEQ ID NO: 1260406 - RNA, 19 nt, Artificial Sequence
  Description of Artificial Sequence: Synthetic oligonucleotide
acagcaauuugaagguuua

SEQ ID NO: 1260407 - RNA, 19 nt, Artificial Sequence
  Description of Artificial Sequence: Synthetic oligonucleotide
cuuugagugagacgcuucu

SEQ ID NO: 1260408 - RNA, 19 nt, Artificial Sequence
  Description of Artificial Sequence: Synthetic oligonucleotide
gguugauuggaaauauucu

SEQ ID NO: 1260409 - RNA, 19 nt, Artificial Sequence
  Description of Artificial Sequence: Synthetic oligonucleotide
gcuaguguugugcagaguu

SEQ ID NO: 1260410 - RNA, 19 nt, Artificial Sequence
  Description of Artificial Sequence: Synthetic oligonucleotide
uucagcggucaggaaccag

SEQ ID NO: 1260411 - RNA, 19 nt, Artificial Sequence
  Description of Artificial Sequence: Synthetic oligonucleotide
cugcuucucuguagcgaag

SEQ ID NO: 1260412 - RNA, 19 nt, Artificial Sequence
  Description of Artificial Sequence: Synthetic oligonucleotide
ugggcaaaccccgccuugu

SEQ ID NO: 1260413 - RNA, 19 nt, Artificial Sequence
  Description of Artificial Sequence: Synthetic oligonucleotide
gagugagacgcuucucacu

SEQ ID NO: 1260414 - RNA, 19 nt, Artificial Sequence
  Description of Artificial Sequence: Synthetic oligonucleotide
gucccggcuaguguugugc

SEQ ID NO: 1260415 - RNA, 19 nt, Artificial Sequence
  Description of Artificial Sequence: Synthetic oligonucleotide
uguacgagucugcgacaua

SEQ ID NO: 1260416 - RNA, 19 nt, Artificial Sequence
  Description of Artificial Sequence: Synthetic oligonucleotide
agaaacacgcugacggaua

SEQ ID NO: 1260417 - RNA, 19 nt, Artificial Sequence
  Description of Artificial Sequence: Synthetic oligonucleotide
aucuuugagugagacgcuu

SEQ ID NO: 1260418 - RNA, 19 nt, Artificial Sequence
  Description of Artificial Sequence: Synthetic oligonucleotide
ccaugcaaccccaagugga

SEQ ID NO: 1260419 - RNA, 19 nt, Artificial Sequence
  Description of Artificial Sequence: Synthetic oligonucleotide
cacggcuccaucuuugagu

SEQ ID NO: 1260420 - RNA, 19 nt, Artificial Sequence
  Description of Artificial Sequence: Synthetic oligonucleotide
ccgcaaaacugcaaacaac

SEQ ID NO: 1260421 - RNA, 19 nt, Artificial Sequence
  Description of Artificial Sequence: Synthetic oligonucleotide
gagguuccaaccacgacau

SEQ ID NO: 1260422 - RNA, 19 nt, Artificial Sequence
  Description of Artificial Sequence: Synthetic oligonucleotide
uucauggggucccgcucuc

SEQ ID NO: 1260423 - RNA, 19 nt, Artificial Sequence
  Description of Artificial Sequence: Synthetic oligonucleotide
cacugucaccgacacauaa

SEQ ID NO: 1260424 - RNA, 19 nt, Artificial Sequence
  Description of Artificial Sequence: Synthetic oligonucleotide
cugugagcuuugccccugg

SEQ ID NO: 1260425 - RNA, 19 nt, Artificial Sequence
  Description of Artificial Sequence: Synthetic oligonucleotide
cagcaauuugaagguuuac

SEQ ID NO: 1260426 - RNA, 19 nt, Artificial Sequence
  Description of Artificial Sequence: Synthetic oligonucleotide
ccaacgccagcuacagugc

SEQ ID NO: 1260427 - RNA, 19 nt, Artificial Sequence
  Description of Artificial Sequence: Synthetic oligonucleotide
augcaaccccaaguggaug

SEQ ID NO: 1260428 - RNA, 19 nt, Artificial Sequence
  Description of Artificial Sequence: Synthetic oligonucleotide
uggcuauccacaggauguc

SEQ ID NO: 1260429 - RNA, 19 nt, Artificial Sequence
  Description of Artificial Sequence: Synthetic oligonucleotide
agguugccggaacaagauu

SEQ ID NO: 1260430 - RNA, 19 nt, Artificial Sequence
  Description of Artificial Sequence: Synthetic oligonucleotide
cacaggaugucauuucuuu

SEQ ID NO: 1260431 - RNA, 19 nt, Artificial Sequence
  Description of Artificial Sequence: Synthetic oligonucleotide
uuggguacuuugggcgcug

SEQ ID NO: 1260432 - RNA, 19 nt, Artificial Sequence
  Description of Artificial Sequence: Synthetic oligonucleotide
aggaucgggagcacagaga

SEQ ID NO: 1260433 - RNA, 19 nt, Artificial Sequence
  Description of Artificial Sequence: Synthetic oligonucleotide
gcuaggaauguguucauuu

SEQ ID NO: 1260434 - RNA, 19 nt, Artificial Sequence
  Description of Artificial Sequence: Synthetic oligonucleotide
cgagucugcgacauacagc

SEQ ID NO: 1260435 - RNA, 19 nt, Artificial Sequence
  Description of Artificial Sequence: Synthetic oligonucleotide
gugaggauaggcauuguuu

SEQ ID NO: 1260436 - RNA, 19 nt, Artificial Sequence
  Description of Artificial Sequence: Synthetic oligonucleotide
gacggauaucacagcuuca

SEQ ID NO: 1260437 - RNA, 19 nt, Artificial Sequence
  Description of Artificial Sequence: Synthetic oligonucleotide
aggagagcccauaucugau

SEQ ID NO: 1260438 - RNA, 19 nt, Artificial Sequence
  Description of Artificial Sequence: Synthetic oligonucleotide
agguuccaaccacgacauc

SEQ ID NO: 1260439 - RNA, 19 nt, Artificial Sequence
  Description of Artificial Sequence: Synthetic oligonucleotide
gggccaucuaccacaacac

SEQ ID NO: 1260440 - RNA, 19 nt, Artificial Sequence
  Description of Artificial Sequence: Synthetic oligonucleotide
ggugcuucacggcuccauc

SEQ ID NO: 1260441 - RNA, 19 nt, Artificial Sequence
  Description of Artificial Sequence: Synthetic oligonucleotide
gauaggcauuguuucgguu

SEQ ID NO: 1260442 - RNA, 19 nt, Artificial Sequence
  Description of Artificial Sequence: Synthetic oligonucleotide
ugcuaggaauguguucauu

SEQ ID NO: 1260443 - RNA, 19 nt, Artificial Sequence
  Description of Artificial Sequence: Synthetic oligonucleotide
acuccggucccggcuagug

SEQ ID NO: 1260444 - RNA, 19 nt, Artificial Sequence
  Description of Artificial Sequence: Synthetic oligonucleotide
gccgacuccaucagcauca

SEQ ID NO: 1260445 - RNA, 19 nt, Artificial Sequence
  Description of Artificial Sequence: Synthetic oligonucleotide
gguacuuugggcgcugucu

SEQ ID NO: 1260446 - RNA, 19 nt, Artificial Sequence
  Description of Artificial Sequence: Synthetic oligonucleotide
gacgugggcauugucugcu

SEQ ID NO: 1260447 - RNA, 19 nt, Artificial Sequence
  Description of Artificial Sequence: Synthetic oligonucleotide
cagcggucaggaaccagca

SEQ ID NO: 1260448 - RNA, 19 nt, Artificial Sequence
  Description of Artificial Sequence: Synthetic oligonucleotide
accgacacauaagccucca

SEQ ID NO: 1260449 - RNA, 19 nt, Artificial Sequence
  Description of Artificial Sequence: Synthetic oligonucleotide
caugcaaccccaaguggau

SEQ ID NO: 1260450 - RNA, 19 nt, Artificial Sequence
  Description of Artificial Sequence: Synthetic oligonucleotide
ggguugggcaaaccccgcc

SEQ ID NO: 1260451 - RNA, 19 nt, Artificial Sequence
  Description of Artificial Sequence: Synthetic oligonucleotide
caggggucuucugaggcca

SEQ ID NO: 1260452 - RNA, 19 nt, Artificial Sequence
  Description of Artificial Sequence: Synthetic oligonucleotide
ggcaaaccccgccuuguga

SEQ ID NO: 1260453 - RNA, 19 nt, Artificial Sequence
  Description of Artificial Sequence: Synthetic oligonucleotide
gugagcucuacaggagcuc

SEQ ID NO: 1260454 - RNA, 19 nt, Artificial Sequence
  Description of Artificial Sequence: Synthetic oligonucleotide
ccggccauggcuauccaca

SEQ ID NO: 1260455 - RNA, 19 nt, Artificial Sequence
  Description of Artificial Sequence: Synthetic oligonucleotide
caacuccggucccggcuag

SEQ ID NO: 1260456 - RNA, 19 nt, Artificial Sequence
  Description of Artificial Sequence: Synthetic oligonucleotide
ccccuagaaauuucuagaa

SEQ ID NO: 1260457 - RNA, 19 nt, Artificial Sequence
  Description of Artificial Sequence: Synthetic oligonucleotide
guagcgaaggggccaucua

SEQ ID NO: 1260458 - RNA, 19 nt, Artificial Sequence
  Description of Artificial Sequence: Synthetic oligonucleotide
uggucccaugcaaccccaa

SEQ ID NO: 1260459 - RNA, 19 nt, Artificial Sequence
  Description of Artificial Sequence: Synthetic oligonucleotide
uugccccugguggaagguc

SEQ ID NO: 1260460 - RNA, 19 nt, Artificial Sequence
  Description of Artificial Sequence: Synthetic oligonucleotide
gguaucgguuaugugcaaa

SEQ ID NO: 1260461 - RNA, 19 nt, Artificial Sequence
  Description of Artificial Sequence: Synthetic oligonucleotide
cugaugagucccggccaug

SEQ ID NO: 1260462 - RNA, 19 nt, Artificial Sequence
  Description of Artificial Sequence: Synthetic oligonucleotide
aggugcuucacggcuccau

SEQ ID NO: 1260463 - RNA, 19 nt, Artificial Sequence
  Description of Artificial Sequence: Synthetic oligonucleotide
auacagcagccggccacug

SEQ ID NO: 1260464 - RNA, 19 nt, Artificial Sequence
  Description of Artificial Sequence: Synthetic oligonucleotide
gccggaacaagauugccuu

SEQ ID NO: 1260465 - RNA, 19 nt, Artificial Sequence
  Description of Artificial Sequence: Synthetic oligonucleotide
gcgaaggggccaucuacca

SEQ ID NO: 1260466 - RNA, 19 nt, Artificial Sequence
  Description of Artificial Sequence: Synthetic oligonucleotide
agcuuugccccugguggaa

SEQ ID NO: 1260467 - RNA, 19 nt, Artificial Sequence
  Description of Artificial Sequence: Synthetic oligonucleotide
agucccggccauggcuauc

SEQ ID NO: 1260468 - RNA, 19 nt, Artificial Sequence
  Description of Artificial Sequence: Synthetic oligonucleotide
gcaaagguugccggaacaa

SEQ ID NO: 1260469 - RNA, 19 nt, Artificial Sequence
  Description of Artificial Sequence: Synthetic oligonucleotide
cuauccacaggaugucauu

SEQ ID NO: 1260470 - RNA, 19 nt, Artificial Sequence
  Description of Artificial Sequence: Synthetic oligonucleotide
ggauaggcauuguuucggu

SEQ ID NO: 1260471 - RNA, 19 nt, Artificial Sequence
  Description of Artificial Sequence: Synthetic oligonucleotide
ccgccuugugaggauaggc

SEQ ID NO: 1260472 - RNA, 19 nt, Artificial Sequence
  Description of Artificial Sequence: Synthetic oligonucleotide
gugaaauuguggguugauu

SEQ ID NO: 1260473 - RNA, 19 nt, Artificial Sequence
  Description of Artificial Sequence: Synthetic oligonucleotide
cucucacugucugcuacaa

SEQ ID NO: 1260474 - RNA, 19 nt, Artificial Sequence
  Description of Artificial Sequence: Synthetic oligonucleotide
gggcaaaccccgccuugug

SEQ ID NO: 1260475 - RNA, 19 nt, Artificial Sequence
  Description of Artificial Sequence: Synthetic oligonucleotide
gguugggcaaaccccgccu

SEQ ID NO: 1260476 - RNA, 19 nt, Artificial Sequence
  Description of Artificial Sequence: Synthetic oligonucleotide
cagcaaaacgaaggcaggu

SEQ ID NO: 1260477 - RNA, 19 nt, Artificial Sequence
  Description of Artificial Sequence: Synthetic oligonucleotide
cugacggauaucacagcuu

SEQ ID NO: 1260478 - RNA, 19 nt, Artificial Sequence
  Description of Artificial Sequence: Synthetic oligonucleotide
gcuuugccccugguggaag

SEQ ID NO: 1260479 - RNA, 19 nt, Artificial Sequence
  Description of Artificial Sequence: Synthetic oligonucleotide
ggcuauccacaggauguca

SEQ ID NO: 1260480 - RNA, 19 nt, Artificial Sequence
  Description of Artificial Sequence: Synthetic oligonucleotide
gucccgcucuccuccuaca

SEQ ID NO: 1260481 - RNA, 19 nt, Artificial Sequence
  Description of Artificial Sequence: Synthetic oligonucleotide
acgugggcauugucugcua

SEQ ID NO: 1260482 - RNA, 19 nt, Artificial Sequence
  Description of Artificial Sequence: Synthetic oligonucleotide
augccccuagaaauuucua

SEQ ID NO: 1260483 - RNA, 19 nt, Artificial Sequence
  Description of Artificial Sequence: Synthetic oligonucleotide
cugcaugccccuagaaauu

SEQ ID NO: 1260484 - RNA, 19 nt, Artificial Sequence
  Description of Artificial Sequence: Synthetic oligonucleotide
cccggcuaguguugugcag

SEQ ID NO: 1260485 - RNA, 19 nt, Artificial Sequence
  Description of Artificial Sequence: Synthetic oligonucleotide
cuuggguacuuugggcgcu

SEQ ID NO: 1260486 - RNA, 19 nt, Artificial Sequence
  Description of Artificial Sequence: Synthetic oligonucleotide
ggcucauuaaaggccgacu

SEQ ID NO: 1260487 - RNA, 19 nt, Artificial Sequence
  Description of Artificial Sequence: Synthetic oligonucleotide
gugagacgcuucucacugu

SEQ ID NO: 1260488 - RNA, 19 nt, Artificial Sequence
  Description of Artificial Sequence: Synthetic oligonucleotide
ccagcuacagugcucacuu

SEQ ID NO: 1260489 - RNA, 19 nt, Artificial Sequence
  Description of Artificial Sequence: Synthetic oligonucleotide
ccggaacaagauugccuuc

SEQ ID NO: 1260490 - RNA, 19 nt, Artificial Sequence
  Description of Artificial Sequence: Synthetic oligonucleotide
gaucgggagcacagagacu

SEQ ID NO: 1260491 - RNA, 19 nt, Artificial Sequence
  Description of Artificial Sequence: Synthetic oligonucleotide
ccacgacaucccaagggga

SEQ ID NO: 1260492 - RNA, 19 nt, Artificial Sequence
  Description of Artificial Sequence: Synthetic oligonucleotide
cgugggcauugucugcuag

SEQ ID NO: 1260493 - RNA, 19 nt, Artificial Sequence
  Description of Artificial Sequence: Synthetic oligonucleotide
ccgacacauaagccuccag

SEQ ID NO: 1260494 - RNA, 19 nt, Artificial Sequence
  Description of Artificial Sequence: Synthetic oligonucleotide
caacgccagcuacagugcu

SEQ ID NO: 1260495 - RNA, 19 nt, Artificial Sequence
  Description of Artificial Sequence: Synthetic oligonucleotide
cgaaggggccaucuaccac

SEQ ID NO: 1260496 - RNA, 19 nt, Artificial Sequence
  Description of Artificial Sequence: Synthetic oligonucleotide
cggcuaguguugugcagag

SEQ ID NO: 1260497 - RNA, 19 nt, Artificial Sequence
  Description of Artificial Sequence: Synthetic oligonucleotide
ggucccggcuaguguugug

SEQ ID NO: 1260498 - RNA, 19 nt, Artificial Sequence
  Description of Artificial Sequence: Synthetic oligonucleotide
ggguacuuugggcgcuguc

SEQ ID NO: 1260499 - RNA, 19 nt, Artificial Sequence
  Description of Artificial Sequence: Synthetic oligonucleotide
uucuugcuuccagguccau

SEQ ID NO: 1260500 - RNA, 19 nt, Artificial Sequence
  Description of Artificial Sequence: Synthetic oligonucleotide
auaagccuccaggcucauu

SEQ ID NO: 1260501 - RNA, 19 nt, Artificial Sequence
  Description of Artificial Sequence: Synthetic oligonucleotide
ccggcuaguguugugcaga

SEQ ID NO: 1260502 - RNA, 19 nt, Artificial Sequence
  Description of Artificial Sequence: Synthetic oligonucleotide
cuucagcggucaggaacca

SEQ ID NO: 1260503 - RNA, 19 nt, Artificial Sequence
  Description of Artificial Sequence: Synthetic oligonucleotide
ccccgccuugugaggauag

SEQ ID NO: 1260504 - RNA, 19 nt, Artificial Sequence
  Description of Artificial Sequence: Synthetic oligonucleotide
cuggcuggguaucgguuau

SEQ ID NO: 1260505 - RNA, 19 nt, Artificial Sequence
  Description of Artificial Sequence: Synthetic oligonucleotide
gcuauccacaggaugucau

SEQ ID NO: 1260506 - RNA, 19 nt, Artificial Sequence
  Description of Artificial Sequence: Synthetic oligonucleotide
cccggccauggcuauccac

SEQ ID NO: 1260507 - RNA, 19 nt, Artificial Sequence
  Description of Artificial Sequence: Synthetic oligonucleotide
guaggucugcaugccccua

SEQ ID NO: 1260508 - RNA, 19 nt, Artificial Sequence
  Description of Artificial Sequence: Synthetic oligonucleotide
ggguaucgguuaugugcaa

SEQ ID NO: 1260509 - RNA, 19 nt, Artificial Sequence
  Description of Artificial Sequence: Synthetic oligonucleotide
ccacucccagcaaaacgaa

SEQ ID NO: 1260510 - RNA, 19 nt, Artificial Sequence
  Description of Artificial Sequence: Synthetic oligonucleotide
gagucccggccauggcuau

SEQ ID NO: 1260511 - RNA, 19 nt, Artificial Sequence
  Description of Artificial Sequence: Synthetic oligonucleotide
agccggccacugucaccga

SEQ ID NO: 1260512 - RNA, 19 nt, Artificial Sequence
  Description of Artificial Sequence: Synthetic oligonucleotide
gguuuacaugugaucuuuu

SEQ ID NO: 1260513 - RNA, 19 nt, Artificial Sequence
  Description of Artificial Sequence: Synthetic oligonucleotide
gccagcuacagugcucacu

SEQ ID NO: 1260514 - RNA, 19 nt, Artificial Sequence
  Description of Artificial Sequence: Synthetic oligonucleotide
cugcgacauacagcagacu

SEQ ID NO: 1260515 - RNA, 19 nt, Artificial Sequence
  Description of Artificial Sequence: Synthetic oligonucleotide
gcaaccccaaguggaugcu

SEQ ID NO: 1260516 - RNA, 19 nt, Artificial Sequence
  Description of Artificial Sequence: Synthetic oligonucleotide
caccaacgccagcuacagu

SEQ ID NO: 1260517 - RNA, 19 nt, Artificial Sequence
  Description of Artificial Sequence: Synthetic oligonucleotide
cgacuccgcaaaacugcaa

SEQ ID NO: 1260518 - RNA, 19 nt, Artificial Sequence
  Description of Artificial Sequence: Synthetic oligonucleotide
ccauggcuauccacaggau

SEQ ID NO: 1260519 - RNA, 19 nt, Artificial Sequence
  Description of Artificial Sequence: Synthetic oligonucleotide
ggggucccgcucuccuccu

SEQ ID NO: 1260520 - RNA, 19 nt, Artificial Sequence
  Description of Artificial Sequence: Synthetic oligonucleotide
gggucccgcucuccuccua

SEQ ID NO: 1260521 - RNA, 19 nt, Artificial Sequence
  Description of Artificial Sequence: Synthetic oligonucleotide
cuccuccuacaaggugcuu

SEQ ID NO: 1260522 - RNA, 19 nt, Artificial Sequence
  Description of Artificial Sequence: Synthetic oligonucleotide
cggucccggcuaguguugu

SEQ ID NO: 1260523 - RNA, 19 nt, Artificial Sequence
  Description of Artificial Sequence: Synthetic oligonucleotide
aauggggccauauccagcc

SEQ ID NO: 1260524 - RNA, 19 nt, Artificial Sequence
  Description of Artificial Sequence: Synthetic oligonucleotide
uuuauuagugguaauuggc

SEQ ID NO: 1260525 - RNA, 19 nt, Artificial Sequence
  Description of Artificial Sequence: Synthetic oligonucleotide
auuagugguaauuggcugc

SEQ ID NO: 1260526 - RNA, 19 nt, Artificial Sequence
  Description of Artificial Sequence: Synthetic oligonucleotide
agcaacggaagccagaggg

SEQ ID NO: 1260527 - RNA, 19 nt, Artificial Sequence
  Description of Artificial Sequence: Synthetic oligonucleotide
uuuguaaugucuguugagg

SEQ ID NO: 1260528 - RNA, 19 nt, Artificial Sequence
  Description of Artificial Sequence: Synthetic oligonucleotide
aguuacaccagguacagca

SEQ ID NO: 1260529 - RNA, 19 nt, Artificial Sequence
  Description of Artificial Sequence: Synthetic oligonucleotide
uuagacacagcaacggaag

SEQ ID NO: 1260530 - RNA, 19 nt, Artificial Sequence
  Description of Artificial Sequence: Synthetic oligonucleotide
cuuuauuagugguaauugg

SEQ ID NO: 1260531 - RNA, 19 nt, Artificial Sequence
  Description of Artificial Sequence: Synthetic oligonucleotide
auguugaagguuuggaaac

SEQ ID NO: 1260532 - RNA, 19 nt, Artificial Sequence
  Description of Artificial Sequence: Synthetic oligonucleotide
uuauuagugguaauuggcu

SEQ ID NO: 1260533 - RNA, 19 nt, Artificial Sequence
  Description of Artificial Sequence: Synthetic oligonucleotide
aaguacuuggagcaaaccu

SEQ ID NO: 1260534 - RNA, 19 nt, Artificial Sequence
  Description of Artificial Sequence: Synthetic oligonucleotide
ucaauccacacucccaccg

SEQ ID NO: 1260535 - RNA, 19 nt, Artificial Sequence
  Description of Artificial Sequence: Synthetic oligonucleotide
auguuuguggcagaggacc

SEQ ID NO: 1260536 - RNA, 19 nt, Artificial Sequence
  Description of Artificial Sequence: Synthetic oligonucleotide
agcgacauggaguuacacc

SEQ ID NO: 1260537 - RNA, 19 nt, Artificial Sequence
  Description of Artificial Sequence: Synthetic oligonucleotide
aacaugccgcuacggaucc

SEQ ID NO: 1260538 - RNA, 19 nt, Artificial Sequence
  Description of Artificial Sequence: Synthetic oligonucleotide
gguuacaccagccaggucc

SEQ ID NO: 1260539 - RNA, 19 nt, Artificial Sequence
  Description of Artificial Sequence: Synthetic oligonucleotide
auaagugcagucauagugg

SEQ ID NO: 1260540 - RNA, 19 nt, Artificial Sequence
  Description of Artificial Sequence: Synthetic oligonucleotide
ucucaauaggacuuuauua

SEQ ID NO: 1260541 - RNA, 19 nt, Artificial Sequence
  Description of Artificial Sequence: Synthetic oligonucleotide
aaugccguggcaugcaggu

SEQ ID NO: 1260542 - RNA, 19 nt, Artificial Sequence
  Description of Artificial Sequence: Synthetic oligonucleotide
uguugagguaaucagucaa

SEQ ID NO: 1260543 - RNA, 19 nt, Artificial Sequence
  Description of Artificial Sequence: Synthetic oligonucleotide
acauuguccggguuacacc

SEQ ID NO: 1260544 - RNA, 19 nt, Artificial Sequence
  Description of Artificial Sequence: Synthetic oligonucleotide
uuguuagacacagcaacgg

SEQ ID NO: 1260545 - RNA, 19 nt, Artificial Sequence
  Description of Artificial Sequence: Synthetic oligonucleotide
agcaguaugcucccgagug

SEQ ID NO: 1260546 - RNA, 19 nt, Artificial Sequence
  Description of Artificial Sequence: Synthetic oligonucleotide
uggagcaaaccucacgcag

SEQ ID NO: 1260547 - RNA, 19 nt, Artificial Sequence
  Description of Artificial Sequence: Synthetic oligonucleotide
ugaugagguaagcaguaug

SEQ ID NO: 1260548 - RNA, 19 nt, Artificial Sequence
  Description of Artificial Sequence: Synthetic oligonucleotide
agugguauguuuguggcag

SEQ ID NO: 1260549 - RNA, 19 nt, Artificial Sequence
  Description of Artificial Sequence: Synthetic oligonucleotide
agcuccacaacuuuuggca

SEQ ID NO: 1260550 - RNA, 19 nt, Artificial Sequence
  Description of Artificial Sequence: Synthetic oligonucleotide
ugcucaugccaucacauac

SEQ ID NO: 1260551 - RNA, 19 nt, Artificial Sequence
  Description of Artificial Sequence: Synthetic oligonucleotide
ucaauaggacuuuauuagu

SEQ ID NO: 1260552 - RNA, 19 nt, Artificial Sequence
  Description of Artificial Sequence: Synthetic oligonucleotide
acgaugacggaucucacug

SEQ ID NO: 1260553 - RNA, 19 nt, Artificial Sequence
  Description of Artificial Sequence: Synthetic oligonucleotide
ugacggaucucacugccag

SEQ ID NO: 1260554 - RNA, 19 nt, Artificial Sequence
  Description of Artificial Sequence: Synthetic oligonucleotide
uaggcauuaagaugagccc

SEQ ID NO: 1260555 - RNA, 19 nt, Artificial Sequence
  Description of Artificial Sequence: Synthetic oligonucleotide
agagacgcugcugaagugc

SEQ ID NO: 1260556 - RNA, 19 nt, Artificial Sequence
  Description of Artificial Sequence: Synthetic oligonucleotide
cauacgucugagcagcagg

SEQ ID NO: 1260557 - RNA, 19 nt, Artificial Sequence
  Description of Artificial Sequence: Synthetic oligonucleotide
uggacacuggucauagaag

SEQ ID NO: 1260558 - RNA, 19 nt, Artificial Sequence
  Description of Artificial Sequence: Synthetic oligonucleotide
uguuccaccccuccagcgg

SEQ ID NO: 1260559 - RNA, 19 nt, Artificial Sequence
  Description of Artificial Sequence: Synthetic oligonucleotide
agucaagucugcucgcgac

SEQ ID NO: 1260560 - RNA, 19 nt, Artificial Sequence
  Description of Artificial Sequence: Synthetic oligonucleotide
agugaagcgacauggaguu

SEQ ID NO: 1260561 - RNA, 19 nt, Artificial Sequence
  Description of Artificial Sequence: Synthetic oligonucleotide
gaugacggaucucacugcc

SEQ ID NO: 1260562 - RNA, 19 nt, Artificial Sequence
  Description of Artificial Sequence: Synthetic oligonucleotide
agaggugugcccuggaaug

SEQ ID NO: 1260563 - RNA, 19 nt, Artificial Sequence
  Description of Artificial Sequence: Synthetic oligonucleotide
agcuuuguaaugucuguug

SEQ ID NO: 1260564 - RNA, 19 nt, Artificial Sequence
  Description of Artificial Sequence: Synthetic oligonucleotide
gucacuucacucucugugg

SEQ ID NO: 1260565 - RNA, 19 nt, Artificial Sequence
  Description of Artificial Sequence: Synthetic oligonucleotide
caaagcuuguuagacacag

SEQ ID NO: 1260566 - RNA, 19 nt, Artificial Sequence
  Description of Artificial Sequence: Synthetic oligonucleotide
uaagugcagucauaguggc

SEQ ID NO: 1260567 - RNA, 19 nt, Artificial Sequence
  Description of Artificial Sequence: Synthetic oligonucleotide
cuuccugacguucucacug

SEQ ID NO: 1260568 - RNA, 19 nt, Artificial Sequence
  Description of Artificial Sequence: Synthetic oligonucleotide
aucucacugccagugaagc

SEQ ID NO: 1260569 - RNA, 19 nt, Artificial Sequence
  Description of Artificial Sequence: Synthetic oligonucleotide
agugcagucauaguggcca

SEQ ID NO: 1260570 - RNA, 19 nt, Artificial Sequence
  Description of Artificial Sequence: Synthetic oligonucleotide
ucugcauagaugcaucauu

SEQ ID NO: 1260571 - RNA, 19 nt, Artificial Sequence
  Description of Artificial Sequence: Synthetic oligonucleotide
uccggguuacaccagccag

SEQ ID NO: 1260572 - RNA, 19 nt, Artificial Sequence
  Description of Artificial Sequence: Synthetic oligonucleotide
cugggagucuuccagacug

SEQ ID NO: 1260573 - RNA, 19 nt, Artificial Sequence
  Description of Artificial Sequence: Synthetic oligonucleotide
ugagguaagcaguaugcuc

SEQ ID NO: 1260574 - RNA, 19 nt, Artificial Sequence
  Description of Artificial Sequence: Synthetic oligonucleotide
uucucaauaggacuuuauu

SEQ ID NO: 1260575 - RNA, 19 nt, Artificial Sequence
  Description of Artificial Sequence: Synthetic oligonucleotide
ugaagcgacauggaguuac

SEQ ID NO: 1260576 - RNA, 19 nt, Artificial Sequence
  Description of Artificial Sequence: Synthetic oligonucleotide
agcauuugggcauccaccu

SEQ ID NO: 1260577 - RNA, 19 nt, Artificial Sequence
  Description of Artificial Sequence: Synthetic oligonucleotide
agccagaacaugccgcuac

SEQ ID NO: 1260578 - RNA, 19 nt, Artificial Sequence
  Description of Artificial Sequence: Synthetic oligonucleotide
ucuucucagucucgugacg

SEQ ID NO: 1260579 - RNA, 19 nt, Artificial Sequence
  Description of Artificial Sequence: Synthetic oligonucleotide
ugguaauuggcugcauacg

SEQ ID NO: 1260580 - RNA, 19 nt, Artificial Sequence
  Description of Artificial Sequence: Synthetic oligonucleotide
uggaaagugccuugaugag

SEQ ID NO: 1260581 - RNA, 19 nt, Artificial Sequence
  Description of Artificial Sequence: Synthetic oligonucleotide
aucacgaugacggaucuca

SEQ ID NO: 1260582 - RNA, 19 nt, Artificial Sequence
  Description of Artificial Sequence: Synthetic oligonucleotide
uccaccauaagugcaguca

SEQ ID NO: 1260583 - RNA, 19 nt, Artificial Sequence
  Description of Artificial Sequence: Synthetic oligonucleotide
uugaagguuuggaaacucu

SEQ ID NO: 1260584 - RNA, 19 nt, Artificial Sequence
  Description of Artificial Sequence: Synthetic oligonucleotide
uguuuguggcagaggaccc

SEQ ID NO: 1260585 - RNA, 19 nt, Artificial Sequence
  Description of Artificial Sequence: Synthetic oligonucleotide
gcuuguuagacacagcaac

SEQ ID NO: 1260586 - RNA, 19 nt, Artificial Sequence
  Description of Artificial Sequence: Synthetic oligonucleotide
uccggcacgcucuggaggg

SEQ ID NO: 1260587 - RNA, 19 nt, Artificial Sequence
  Description of Artificial Sequence: Synthetic oligonucleotide
acaaagugugcaccuagca

SEQ ID NO: 1260588 - RNA, 19 nt, Artificial Sequence
  Description of Artificial Sequence: Synthetic oligonucleotide
ugccuagaagcgcagccag

SEQ ID NO: 1260589 - RNA, 19 nt, Artificial Sequence
  Description of Artificial Sequence: Synthetic oligonucleotide
agcgcuugcgucccagagc

SEQ ID NO: 1260590 - RNA, 19 nt, Artificial Sequence
  Description of Artificial Sequence: Synthetic oligonucleotide
ggcaaagcuuguuagacac

SEQ ID NO: 1260591 - RNA, 19 nt, Artificial Sequence
  Description of Artificial Sequence: Synthetic oligonucleotide
agaacaugccgcuacggau

SEQ ID NO: 1260592 - RNA, 19 nt, Artificial Sequence
  Description of Artificial Sequence: Synthetic oligonucleotide
gaucacgucucguugcuuc

SEQ ID NO: 1260593 - RNA, 19 nt, Artificial Sequence
  Description of Artificial Sequence: Synthetic oligonucleotide
uuccugacguucucacugg

SEQ ID NO: 1260594 - RNA, 19 nt, Artificial Sequence
  Description of Artificial Sequence: Synthetic oligonucleotide
agaaguacuuggagcaaac

SEQ ID NO: 1260595 - RNA, 19 nt, Artificial Sequence
  Description of Artificial Sequence: Synthetic oligonucleotide
cauucgaggagcuuuguaa

SEQ ID NO: 1260596 - RNA, 19 nt, Artificial Sequence
  Description of Artificial Sequence: Synthetic oligonucleotide
auucgaggagcuuuguaau

SEQ ID NO: 1260597 - RNA, 19 nt, Artificial Sequence
  Description of Artificial Sequence: Synthetic oligonucleotide
uucgaggagcuuuguaaug

SEQ ID NO: 1260598 - RNA, 19 nt, Artificial Sequence
  Description of Artificial Sequence: Synthetic oligonucleotide
gcucaauggggccauaucc

SEQ ID NO: 1260599 - RNA, 19 nt, Artificial Sequence
  Description of Artificial Sequence: Synthetic oligonucleotide
ggucacuucacucucugug

SEQ ID NO: 1260600 - RNA, 19 nt, Artificial Sequence
  Description of Artificial Sequence: Synthetic oligonucleotide
cauuguccggguuacacca

SEQ ID NO: 1260601 - RNA, 19 nt, Artificial Sequence
  Description of Artificial Sequence: Synthetic oligonucleotide
cugggagcugcucaauggg

SEQ ID NO: 1260602 - RNA, 19 nt, Artificial Sequence
  Description of Artificial Sequence: Synthetic oligonucleotide
uucgcaauccgagucuccc

SEQ ID NO: 1260603 - RNA, 19 nt, Artificial Sequence
  Description of Artificial Sequence: Synthetic oligonucleotide
aggacuuuauuagugguaa

SEQ ID NO: 1260604 - RNA, 19 nt, Artificial Sequence
  Description of Artificial Sequence: Synthetic oligonucleotide
cucuaaggcacugccaggc

SEQ ID NO: 1260605 - RNA, 19 nt, Artificial Sequence
  Description of Artificial Sequence: Synthetic oligonucleotide
uggccaaugauggcauugg

SEQ ID NO: 1260606 - RNA, 19 nt, Artificial Sequence
  Description of Artificial Sequence: Synthetic oligonucleotide
acagacugcggacgccgcc

SEQ ID NO: 1260607 - RNA, 19 nt, Artificial Sequence
  Description of Artificial Sequence: Synthetic oligonucleotide
ucgaggagcuuuguaaugu

SEQ ID NO: 1260608 - RNA, 19 nt, Artificial Sequence
  Description of Artificial Sequence: Synthetic oligonucleotide
ggagugguauguuuguggc

SEQ ID NO: 1260609 - RNA, 19 nt, Artificial Sequence
  Description of Artificial Sequence: Synthetic oligonucleotide
auccgagucucccacucag

SEQ ID NO: 1260610 - RNA, 19 nt, Artificial Sequence
  Description of Artificial Sequence: Synthetic oligonucleotide
cacacucccaccgugcagg

SEQ ID NO: 1260611 - RNA, 19 nt, Artificial Sequence
  Description of Artificial Sequence: Synthetic oligonucleotide
augucuguugagguaauca

SEQ ID NO: 1260612 - RNA, 19 nt, Artificial Sequence
  Description of Artificial Sequence: Synthetic oligonucleotide
gcgacauggaguuacacca

SEQ ID NO: 1260613 - RNA, 19 nt, Artificial Sequence
  Description of Artificial Sequence: Synthetic oligonucleotide
uacggauccgguuguaguc

SEQ ID NO: 1260614 - RNA, 19 nt, Artificial Sequence
  Description of Artificial Sequence: Synthetic oligonucleotide
ucagucucgugacggcugc

SEQ ID NO: 1260615 - RNA, 19 nt, Artificial Sequence
  Description of Artificial Sequence: Synthetic oligonucleotide
gauccgguuguagucuggg

SEQ ID NO: 1260616 - RNA, 19 nt, Artificial Sequence
  Description of Artificial Sequence: Synthetic oligonucleotide
agcacgcugaccugggucu

SEQ ID NO: 1260617 - RNA, 19 nt, Artificial Sequence
  Description of Artificial Sequence: Synthetic oligonucleotide
aagcgacauggaguuacac

SEQ ID NO: 1260618 - RNA, 19 nt, Artificial Sequence
  Description of Artificial Sequence: Synthetic oligonucleotide
cauaguggccaaugauggc

SEQ ID NO: 1260619 - RNA, 19 nt, Artificial Sequence
  Description of Artificial Sequence: Synthetic oligonucleotide
auacucucgagagacgcug

SEQ ID NO: 1260620 - RNA, 19 nt, Artificial Sequence
  Description of Artificial Sequence: Synthetic oligonucleotide
ugggcuaaaggcagggcau

SEQ ID NO: 1260621 - RNA, 19 nt, Artificial Sequence
  Description of Artificial Sequence: Synthetic oligonucleotide
gaaguacuuggagcaaacc

SEQ ID NO: 1260622 - RNA, 19 nt, Artificial Sequence
  Description of Artificial Sequence: Synthetic oligonucleotide
caggaucacgucucguugc

SEQ ID NO: 1260623 - RNA, 19 nt, Artificial Sequence
  Description of Artificial Sequence: Synthetic oligonucleotide
gaaagugccuugaugaggu

SEQ ID NO: 1260624 - RNA, 19 nt, Artificial Sequence
  Description of Artificial Sequence: Synthetic oligonucleotide
cagguccuuggaaagugcc

SEQ ID NO: 1260625 - RNA, 19 nt, Artificial Sequence
  Description of Artificial Sequence: Synthetic oligonucleotide
aauccgagucucccacuca

SEQ ID NO: 1260626 - RNA, 19 nt, Artificial Sequence
  Description of Artificial Sequence: Synthetic oligonucleotide
ugguauguuuguggcagag

SEQ ID NO: 1260627 - RNA, 19 nt, Artificial Sequence
  Description of Artificial Sequence: Synthetic oligonucleotide
uccugacguucucacuggg

SEQ ID NO: 1260628 - RNA, 19 nt, Artificial Sequence
  Description of Artificial Sequence: Synthetic oligonucleotide
agcccagucucagaguagg

SEQ ID NO: 1260629 - RNA, 19 nt, Artificial Sequence
  Description of Artificial Sequence: Synthetic oligonucleotide
aagcaguaugcucccgagu

SEQ ID NO: 1260630 - RNA, 19 nt, Artificial Sequence
  Description of Artificial Sequence: Synthetic oligonucleotide
cucaauggggccauaucca

SEQ ID NO: 1260631 - RNA, 19 nt, Artificial Sequence
  Description of Artificial Sequence: Synthetic oligonucleotide
ugcggcggccguaagucag

SEQ ID NO: 1260632 - RNA, 19 nt, Artificial Sequence
  Description of Artificial Sequence: Synthetic oligonucleotide
ucacgcagcauuugggcau

SEQ ID NO: 1260633 - RNA, 19 nt, Artificial Sequence
  Description of Artificial Sequence: Synthetic oligonucleotide
ucgagcucccgucagcgaa

SEQ ID NO: 1260634 - RNA, 19 nt, Artificial Sequence
  Description of Artificial Sequence: Synthetic oligonucleotide
gagauguugaagguuugga

SEQ ID NO: 1260635 - RNA, 19 nt, Artificial Sequence
  Description of Artificial Sequence: Synthetic oligonucleotide
agcgcagccagaacaugcc

SEQ ID NO: 1260636 - RNA, 19 nt, Artificial Sequence
  Description of Artificial Sequence: Synthetic oligonucleotide
ucugcucgcgacagcuucc

SEQ ID NO: 1260637 - RNA, 19 nt, Artificial Sequence
  Description of Artificial Sequence: Synthetic oligonucleotide
agcccgacagacugcggac

SEQ ID NO: 1260638 - RNA, 19 nt, Artificial Sequence
  Description of Artificial Sequence: Synthetic oligonucleotide
gacuuccugccuagaagcg

SEQ ID NO: 1260639 - RNA, 19 nt, Artificial Sequence
  Description of Artificial Sequence: Synthetic oligonucleotide
uuggagcaaaccucacgca

SEQ ID NO: 1260640 - RNA, 19 nt, Artificial Sequence
  Description of Artificial Sequence: Synthetic oligonucleotide
ggcgguaccccgcagggcg

SEQ ID NO: 1260641 - RNA, 19 nt, Artificial Sequence
  Description of Artificial Sequence: Synthetic oligonucleotide
cuucgagcucccgucagcg

SEQ ID NO: 1260642 - RNA, 19 nt, Artificial Sequence
  Description of Artificial Sequence: Synthetic oligonucleotide
gaugcggcggccguaaguc

SEQ ID NO: 1260643 - RNA, 19 nt, Artificial Sequence
  Description of Artificial Sequence: Synthetic oligonucleotide
ccaaugucuucacacacag

SEQ ID NO: 1260644 - RNA, 19 nt, Artificial Sequence
  Description of Artificial Sequence: Synthetic oligonucleotide
guaagcaguaugcucccga

SEQ ID NO: 1260645 - RNA, 19 nt, Artificial Sequence
  Description of Artificial Sequence: Synthetic oligonucleotide
aggagcuuuguaaugucug

SEQ ID NO: 1260646 - RNA, 19 nt, Artificial Sequence
  Description of Artificial Sequence: Synthetic oligonucleotide
gugggcuaaaggcagggca

SEQ ID NO: 1260647 - RNA, 19 nt, Artificial Sequence
  Description of Artificial Sequence: Synthetic oligonucleotide
uagaaguacuuggagcaaa

SEQ ID NO: 1260648 - RNA, 19 nt, Artificial Sequence
  Description of Artificial Sequence: Synthetic oligonucleotide
uucucagucucgugacggc

SEQ ID NO: 1260649 - RNA, 19 nt, Artificial Sequence
  Description of Artificial Sequence: Synthetic oligonucleotide
agugguaauuggcugcaua

SEQ ID NO: 1260650 - RNA, 19 nt, Artificial Sequence
  Description of Artificial Sequence: Synthetic oligonucleotide
gaggcugcgaccaaugucu

SEQ ID NO: 1260651 - RNA, 19 nt, Artificial Sequence
  Description of Artificial Sequence: Synthetic oligonucleotide
gggaggaccgcuccgaggc

SEQ ID NO: 1260652 - RNA, 19 nt, Artificial Sequence
  Description of Artificial Sequence: Synthetic oligonucleotide
ugcucccgagugcuguagg

SEQ ID NO: 1260653 - RNA, 19 nt, Artificial Sequence
  Description of Artificial Sequence: Synthetic oligonucleotide
uguaggcauuaagaugagc

SEQ ID NO: 1260654 - RNA, 19 nt, Artificial Sequence
  Description of Artificial Sequence: Synthetic oligonucleotide
gcgaccaaugucuucacac

SEQ ID NO: 1260655 - RNA, 19 nt, Artificial Sequence
  Description of Artificial Sequence: Synthetic oligonucleotide
uacucucgagagacgcugc

SEQ ID NO: 1260656 - RNA, 19 nt, Artificial Sequence
  Description of Artificial Sequence: Synthetic oligonucleotide
caugccgcuacggauccgg

SEQ ID NO: 1260657 - RNA, 19 nt, Artificial Sequence
  Description of Artificial Sequence: Synthetic oligonucleotide
cucgcgacagcuuccugac

SEQ ID NO: 1260658 - RNA, 19 nt, Artificial Sequence
  Description of Artificial Sequence: Synthetic oligonucleotide
ugcucaauggggccauauc

SEQ ID NO: 1260659 - RNA, 19 nt, Artificial Sequence
  Description of Artificial Sequence: Synthetic oligonucleotide
ugcccuggaaugccguggc

SEQ ID NO: 1260660 - RNA, 19 nt, Artificial Sequence
  Description of Artificial Sequence: Synthetic oligonucleotide
cuuccugccuagaagcgca

SEQ ID NO: 1260661 - RNA, 19 nt, Artificial Sequence
  Description of Artificial Sequence: Synthetic oligonucleotide
ucucgugacggcugccagc

SEQ ID NO: 1260662 - RNA, 19 nt, Artificial Sequence
  Description of Artificial Sequence: Synthetic oligonucleotide
aucuucgagcucccgucag

SEQ ID NO: 1260663 - RNA, 19 nt, Artificial Sequence
  Description of Artificial Sequence: Synthetic oligonucleotide
aaaccucacgcagcauuug

SEQ ID NO: 1260664 - RNA, 19 nt, Artificial Sequence
  Description of Artificial Sequence: Synthetic oligonucleotide
accuucgcaauccgagucu

SEQ ID NO: 1260665 - RNA, 19 nt, Artificial Sequence
  Description of Artificial Sequence: Synthetic oligonucleotide
guggcgguaccccgcaggg

SEQ ID NO: 1260666 - RNA, 19 nt, Artificial Sequence
  Description of Artificial Sequence: Synthetic oligonucleotide
ggagcuccacaacuuuugg

SEQ ID NO: 1260667 - RNA, 19 nt, Artificial Sequence
  Description of Artificial Sequence: Synthetic oligonucleotide
cucgaucugggagucuucc

SEQ ID NO: 1260668 - RNA, 19 nt, Artificial Sequence
  Description of Artificial Sequence: Synthetic oligonucleotide
cacaggcgcauccacuggc

SEQ ID NO: 1260669 - RNA, 19 nt, Artificial Sequence
  Description of Artificial Sequence: Synthetic oligonucleotide
cucagucucgugacggcug

SEQ ID NO: 1260670 - RNA, 19 nt, Artificial Sequence
  Description of Artificial Sequence: Synthetic oligonucleotide
acucuggcaaagcuuguua

SEQ ID NO: 1260671 - RNA, 19 nt, Artificial Sequence
  Description of Artificial Sequence: Synthetic oligonucleotide
guuccaccccuccagcggc

SEQ ID NO: 1260672 - RNA, 19 nt, Artificial Sequence
  Description of Artificial Sequence: Synthetic oligonucleotide
caauccgagucucccacuc

SEQ ID NO: 1260673 - RNA, 19 nt, Artificial Sequence
  Description of Artificial Sequence: Synthetic oligonucleotide
gagagacgcugcugaagug

SEQ ID NO: 1260674 - RNA, 19 nt, Artificial Sequence
  Description of Artificial Sequence: Synthetic oligonucleotide
gcucccgucagcgaaaagc

SEQ ID NO: 1260675 - RNA, 19 nt, Artificial Sequence
  Description of Artificial Sequence: Synthetic oligonucleotide
ugcaccuagcagcccaguc

SEQ ID NO: 1260676 - RNA, 19 nt, Artificial Sequence
  Description of Artificial Sequence: Synthetic oligonucleotide
ugcgaccaaugucuucaca

SEQ ID NO: 1260677 - RNA, 19 nt, Artificial Sequence
  Description of Artificial Sequence: Synthetic oligonucleotide
caccgugcaggugggaugg

SEQ ID NO: 1260678 - RNA, 19 nt, Artificial Sequence
  Description of Artificial Sequence: Synthetic oligonucleotide
ggcacugccaggccgauuc

SEQ ID NO: 1260679 - RNA, 19 nt, Artificial Sequence
  Description of Artificial Sequence: Synthetic oligonucleotide
ugugcccuggaaugccgug

SEQ ID NO: 1260680 - RNA, 19 nt, Artificial Sequence
  Description of Artificial Sequence: Synthetic oligonucleotide
caccauucgaggagcuuug

SEQ ID NO: 1260681 - RNA, 19 nt, Artificial Sequence
  Description of Artificial Sequence: Synthetic oligonucleotide
caccuucgcaauccgaguc

SEQ ID NO: 1260682 - RNA, 19 nt, Artificial Sequence
  Description of Artificial Sequence: Synthetic oligonucleotide
gagugguauguuuguggca

SEQ ID NO: 1260683 - RNA, 19 nt, Artificial Sequence
  Description of Artificial Sequence: Synthetic oligonucleotide
ucgaucugggagucuucca

SEQ ID NO: 1260684 - RNA, 19 nt, Artificial Sequence
  Description of Artificial Sequence: Synthetic oligonucleotide
aucacgucucguugcuucu

SEQ ID NO: 1260685 - RNA, 19 nt, Artificial Sequence
  Description of Artificial Sequence: Synthetic oligonucleotide
cuucgcaauccgagucucc

SEQ ID NO: 1260686 - RNA, 19 nt, Artificial Sequence
  Description of Artificial Sequence: Synthetic oligonucleotide
accucacgcagcauuuggg

SEQ ID NO: 1260687 - RNA, 19 nt, Artificial Sequence
  Description of Artificial Sequence: Synthetic oligonucleotide
gaagguggcgguaccccgc

SEQ ID NO: 1260688 - RNA, 19 nt, Artificial Sequence
  Description of Artificial Sequence: Synthetic oligonucleotide
cuccggcacgcucuggagg

SEQ ID NO: 1260689 - RNA, 19 nt, Artificial Sequence
  Description of Artificial Sequence: Synthetic oligonucleotide
aguagccugccccauuguu

SEQ ID NO: 1260690 - RNA, 19 nt, Artificial Sequence
  Description of Artificial Sequence: Synthetic oligonucleotide
auacgucugagcagcagga

SEQ ID NO: 1260691 - RNA, 19 nt, Artificial Sequence
  Description of Artificial Sequence: Synthetic oligonucleotide
gccgcuacggauccgguug

SEQ ID NO: 1260692 - RNA, 19 nt, Artificial Sequence
  Description of Artificial Sequence: Synthetic oligonucleotide
cuggaaugccguggcaugc

SEQ ID NO: 1260693 - RNA, 19 nt, Artificial Sequence
  Description of Artificial Sequence: Synthetic oligonucleotide
gaggugugcccuggaaugc

SEQ ID NO: 1260694 - RNA, 19 nt, Artificial Sequence
  Description of Artificial Sequence: Synthetic oligonucleotide
cccgucagcgaaaagccgc

SEQ ID NO: 1260695 - RNA, 19 nt, Artificial Sequence
  Description of Artificial Sequence: Synthetic oligonucleotide
cagaacaugccgcuacgga

SEQ ID NO: 1260696 - RNA, 19 nt, Artificial Sequence
  Description of Artificial Sequence: Synthetic oligonucleotide
ucgcaauccgagucuccca

SEQ ID NO: 1260697 - RNA, 19 nt, Artificial Sequence
  Description of Artificial Sequence: Synthetic oligonucleotide
cacgugggcuaaaggcagg

SEQ ID NO: 1260698 - RNA, 19 nt, Artificial Sequence
  Description of Artificial Sequence: Synthetic oligonucleotide
ggagcaaaccucacgcagc

SEQ ID NO: 1260699 - RNA, 19 nt, Artificial Sequence
  Description of Artificial Sequence: Synthetic oligonucleotide
acugccagugaagcgacau

SEQ ID NO: 1260700 - RNA, 19 nt, Artificial Sequence
  Description of Artificial Sequence: Synthetic oligonucleotide
cagugaagcgacauggagu

SEQ ID NO: 1260701 - RNA, 19 nt, Artificial Sequence
  Description of Artificial Sequence: Synthetic oligonucleotide
acgugggcuaaaggcaggg

SEQ ID NO: 1260702 - RNA, 19 nt, Artificial Sequence
  Description of Artificial Sequence: Synthetic oligonucleotide
gugugcaccuagcagccca

SEQ ID NO: 1260703 - RNA, 19 nt, Artificial Sequence
  Description of Artificial Sequence: Synthetic oligonucleotide
ggcaugcagguaaucaaag

SEQ ID NO: 1260704 - RNA, 19 nt, Artificial Sequence
  Description of Artificial Sequence: Synthetic oligonucleotide
agugugcaccuagcagccc

SEQ ID NO: 1260705 - RNA, 19 nt, Artificial Sequence
  Description of Artificial Sequence: Synthetic oligonucleotide
cuuccagacugcaguucug

SEQ ID NO: 1260706 - RNA, 19 nt, Artificial Sequence
  Description of Artificial Sequence: Synthetic oligonucleotide
auagaaguacuuggagcaa

SEQ ID NO: 1260707 - RNA, 19 nt, Artificial Sequence
  Description of Artificial Sequence: Synthetic oligonucleotide
ccucacgcagcauuugggc

SEQ ID NO: 1260708 - RNA, 19 nt, Artificial Sequence
  Description of Artificial Sequence: Synthetic oligonucleotide
guagccugccccauuguuc

SEQ ID NO: 1260709 - RNA, 19 nt, Artificial Sequence
  Description of Artificial Sequence: Synthetic oligonucleotide
uugaugagguaagcaguau

SEQ ID NO: 1260710 - RNA, 19 nt, Artificial Sequence
  Description of Artificial Sequence: Synthetic oligonucleotide
augggaggaccgcuccgag

SEQ ID NO: 1260711 - RNA, 19 nt, Artificial Sequence
  Description of Artificial Sequence: Synthetic oligonucleotide
uggaaugccguggcaugca

SEQ ID NO: 1260712 - RNA, 19 nt, Artificial Sequence
  Description of Artificial Sequence: Synthetic oligonucleotide
uuccugccuagaagcgcag

SEQ ID NO: 1260713 - RNA, 19 nt, Artificial Sequence
  Description of Artificial Sequence: Synthetic oligonucleotide
cugcgaagcagcgcuugcg

SEQ ID NO: 1260714 - RNA, 19 nt, Artificial Sequence
  Description of Artificial Sequence: Synthetic oligonucleotide
ucgcgacagcuuccugacg

SEQ ID NO: 1260715 - RNA, 19 nt, Artificial Sequence
  Description of Artificial Sequence: Synthetic oligonucleotide
gaagcgcagccagaacaug

SEQ ID NO: 1260716 - RNA, 19 nt, Artificial Sequence
  Description of Artificial Sequence: Synthetic oligonucleotide
gcugcgaccaaugucuuca

SEQ ID NO: 1260717 - RNA, 19 nt, Artificial Sequence
  Description of Artificial Sequence: Synthetic oligonucleotide
gucucgugacggcugccag

SEQ ID NO: 1260718 - RNA, 19 nt, Artificial Sequence
  Description of Artificial Sequence: Synthetic oligonucleotide
ccguaagucaggaggcugc

SEQ ID NO: 1260719 - RNA, 19 nt, Artificial Sequence
  Description of Artificial Sequence: Synthetic oligonucleotide
cugccaggccgauucuuug

SEQ ID NO: 1260720 - RNA, 19 nt, Artificial Sequence
  Description of Artificial Sequence: Synthetic oligonucleotide
acggauccgguuguagucu

SEQ ID NO: 1260721 - RNA, 19 nt, Artificial Sequence
  Description of Artificial Sequence: Synthetic oligonucleotide
ugggcgaagguggcgguac

SEQ ID NO: 1260722 - RNA, 19 nt, Artificial Sequence
  Description of Artificial Sequence: Synthetic oligonucleotide
cagcgcuugcgucccagag

SEQ ID NO: 1260723 - RNA, 19 nt, Artificial Sequence
  Description of Artificial Sequence: Synthetic oligonucleotide
cacagggguggugccaucc

SEQ ID NO: 1260724 - RNA, 19 nt, Artificial Sequence
  Description of Artificial Sequence: Synthetic oligonucleotide
aaagugccuugaugaggua

SEQ ID NO: 1260725 - RNA, 19 nt, Artificial Sequence
  Description of Artificial Sequence: Synthetic oligonucleotide
agagggaugcggcggccgu

SEQ ID NO: 1260726 - RNA, 19 nt, Artificial Sequence
  Description of Artificial Sequence: Synthetic oligonucleotide
gguguuccaccccuccagc

SEQ ID NO: 1260727 - RNA, 19 nt, Artificial Sequence
  Description of Artificial Sequence: Synthetic oligonucleotide
gguaaucagucaagucugc

SEQ ID NO: 1260728 - RNA, 19 nt, Artificial Sequence
  Description of Artificial Sequence: Synthetic oligonucleotide
ccgagucucccacucagcc

SEQ ID NO: 1260729 - RNA, 19 nt, Artificial Sequence
  Description of Artificial Sequence: Synthetic oligonucleotide
gcagucauaguggccaaug

SEQ ID NO: 1260730 - RNA, 19 nt, Artificial Sequence
  Description of Artificial Sequence: Synthetic oligonucleotide
uucgagcucccgucagcga

SEQ ID NO: 1260731 - RNA, 19 nt, Artificial Sequence
  Description of Artificial Sequence: Synthetic oligonucleotide
ccccucuacagccuggccc

SEQ ID NO: 1260732 - RNA, 19 nt, Artificial Sequence
  Description of Artificial Sequence: Synthetic oligonucleotide
aggugggaugggaggaccg

SEQ ID NO: 1260733 - RNA, 19 nt, Artificial Sequence
  Description of Artificial Sequence: Synthetic oligonucleotide
uggcccagaggugugcccu

SEQ ID NO: 1260734 - RNA, 19 nt, Artificial Sequence
  Description of Artificial Sequence: Synthetic oligonucleotide
gcgcuugcgucccagagca

SEQ ID NO: 1260735 - RNA, 19 nt, Artificial Sequence
  Description of Artificial Sequence: Synthetic oligonucleotide
gugaccgcagcagggccgg

SEQ ID NO: 1260736 - RNA, 19 nt, Artificial Sequence
  Description of Artificial Sequence: Synthetic oligonucleotide
uaugcucccgagugcugua

SEQ ID NO: 1260737 - RNA, 19 nt, Artificial Sequence
  Description of Artificial Sequence: Synthetic oligonucleotide
gcaguaugcucccgagugc

SEQ ID NO: 1260738 - RNA, 19 nt, Artificial Sequence
  Description of Artificial Sequence: Synthetic oligonucleotide
ggaaugccguggcaugcag

SEQ ID NO: 1260739 - RNA, 19 nt, Artificial Sequence
  Description of Artificial Sequence: Synthetic oligonucleotide
ccaucuucgagcucccguc

SEQ ID NO: 1260740 - RNA, 19 nt, Artificial Sequence
  Description of Artificial Sequence: Synthetic oligonucleotide
cugccagugaagcgacaug

SEQ ID NO: 1260741 - RNA, 19 nt, Artificial Sequence
  Description of Artificial Sequence: Synthetic oligonucleotide
agucucgugacggcugcca

SEQ ID NO: 1260742 - RNA, 19 nt, Artificial Sequence
  Description of Artificial Sequence: Synthetic oligonucleotide
gcaugcagguaaucaaaga

SEQ ID NO: 1260743 - RNA, 19 nt, Artificial Sequence
  Description of Artificial Sequence: Synthetic oligonucleotide
cucgugacggcugccagca

SEQ ID NO: 1260744 - RNA, 19 nt, Artificial Sequence
  Description of Artificial Sequence: Synthetic oligonucleotide
agcuuguuagacacagcaa

SEQ ID NO: 1260745 - RNA, 19 nt, Artificial Sequence
  Description of Artificial Sequence: Synthetic oligonucleotide
uaccccgcagggcggguga

SEQ ID NO: 1260746 - RNA, 19 nt, Artificial Sequence
  Description of Artificial Sequence: Synthetic oligonucleotide
cugaagugcuucugggcaa

SEQ ID NO: 1260747 - RNA, 19 nt, Artificial Sequence
  Description of Artificial Sequence: Synthetic oligonucleotide
gaagcgacauggaguuaca

SEQ ID NO: 1260748 - RNA, 19 nt, Artificial Sequence
  Description of Artificial Sequence: Synthetic oligonucleotide
auuguccggguuacaccag

SEQ ID NO: 1260749 - RNA, 19 nt, Artificial Sequence
  Description of Artificial Sequence: Synthetic oligonucleotide
cuacggauccgguuguagu

SEQ ID NO: 1260750 - RNA, 19 nt, Artificial Sequence
  Description of Artificial Sequence: Synthetic oligonucleotide
caccagguacagcauccuc

SEQ ID NO: 1260751 - RNA, 19 nt, Artificial Sequence
  Description of Artificial Sequence: Synthetic oligonucleotide
cagcccgacagacugcgga

SEQ ID NO: 1260752 - RNA, 19 nt, Artificial Sequence
  Description of Artificial Sequence: Synthetic oligonucleotide
uccugccuagaagcgcagc

SEQ ID NO: 1260753 - RNA, 19 nt, Artificial Sequence
  Description of Artificial Sequence: Synthetic oligonucleotide
guuuguggcagaggaccca

SEQ ID NO: 1260754 - RNA, 19 nt, Artificial Sequence
  Description of Artificial Sequence: Synthetic oligonucleotide
caucuucgagcucccguca

SEQ ID NO: 1260755 - RNA, 19 nt, Artificial Sequence
  Description of Artificial Sequence: Synthetic oligonucleotide
gcucgcgacagcuuccuga

SEQ ID NO: 1260756 - RNA, 19 nt, Artificial Sequence
  Description of Artificial Sequence: Synthetic oligonucleotide
gacagacugcggacgccgc

SEQ ID NO: 1260757 - RNA, 19 nt, Artificial Sequence
  Description of Artificial Sequence: Synthetic oligonucleotide
gguaagcaguaugcucccg

SEQ ID NO: 1260758 - RNA, 19 nt, Artificial Sequence
  Description of Artificial Sequence: Synthetic oligonucleotide
acccucuugccugccagca

SEQ ID NO: 1260759 - RNA, 19 nt, Artificial Sequence
  Description of Artificial Sequence: Synthetic oligonucleotide
cucccaccgugcagguggg

SEQ ID NO: 1260760 - RNA, 19 nt, Artificial Sequence
  Description of Artificial Sequence: Synthetic oligonucleotide
guaaucagucaagucugcu

SEQ ID NO: 1260761 - RNA, 19 nt, Artificial Sequence
  Description of Artificial Sequence: Synthetic oligonucleotide
ggugugcccuggaaugccg

SEQ ID NO: 1260762 - RNA, 19 nt, Artificial Sequence
  Description of Artificial Sequence: Synthetic oligonucleotide
acgucucguugcuucucga

SEQ ID NO: 1260763 - RNA, 19 nt, Artificial Sequence
  Description of Artificial Sequence: Synthetic oligonucleotide
cccagucucagaguaggag

SEQ ID NO: 1260764 - RNA, 19 nt, Artificial Sequence
  Description of Artificial Sequence: Synthetic oligonucleotide
cugcgaccaaugucuucac

SEQ ID NO: 1260765 - RNA, 19 nt, Artificial Sequence
  Description of Artificial Sequence: Synthetic oligonucleotide
aguaugcucccgagugcug

SEQ ID NO: 1260766 - RNA, 19 nt, Artificial Sequence
  Description of Artificial Sequence: Synthetic oligonucleotide
gcuacggauccgguuguag

SEQ ID NO: 1260767 - RNA, 19 nt, Artificial Sequence
  Description of Artificial Sequence: Synthetic oligonucleotide
gcgcagccagaacaugccg

SEQ ID NO: 1260768 - RNA, 19 nt, Artificial Sequence
  Description of Artificial Sequence: Synthetic oligonucleotide
gaggaccgcuccgaggcca

SEQ ID NO: 1260769 - RNA, 19 nt, Artificial Sequence
  Description of Artificial Sequence: Synthetic oligonucleotide
augcucccgagugcuguag

SEQ ID NO: 1260770 - RNA, 19 nt, Artificial Sequence
  Description of Artificial Sequence: Synthetic oligonucleotide
gugguauguuuguggcaga

SEQ ID NO: 1260771 - RNA, 19 nt, Artificial Sequence
  Description of Artificial Sequence: Synthetic oligonucleotide
ucacgucucguugcuucuc

SEQ ID NO: 1260772 - RNA, 19 nt, Artificial Sequence
  Description of Artificial Sequence: Synthetic oligonucleotide
cagucaagucugcucgcga

SEQ ID NO: 1260773 - RNA, 19 nt, Artificial Sequence
  Description of Artificial Sequence: Synthetic oligonucleotide
gcacaggcgcauccacugg

SEQ ID NO: 1260774 - RNA, 19 nt, Artificial Sequence
  Description of Artificial Sequence: Synthetic oligonucleotide
gcucccgagugcuguaggc

SEQ ID NO: 1260775 - RNA, 19 nt, Artificial Sequence
  Description of Artificial Sequence: Synthetic oligonucleotide
agcagcgcuugcgucccag

SEQ ID NO: 1260776 - RNA, 19 nt, Artificial Sequence
  Description of Artificial Sequence: Synthetic oligonucleotide
cauacucucgagagacgcu

SEQ ID NO: 1260777 - RNA, 19 nt, Artificial Sequence
  Description of Artificial Sequence: Synthetic oligonucleotide
ggcgcauccacuggccuug

SEQ ID NO: 1260778 - RNA, 19 nt, Artificial Sequence
  Description of Artificial Sequence: Synthetic oligonucleotide
caaaccucacgcagcauuu

SEQ ID NO: 1260779 - RNA, 19 nt, Artificial Sequence
  Description of Artificial Sequence: Synthetic oligonucleotide
aggcgcauccacuggccuu

SEQ ID NO: 1260780 - RNA, 19 nt, Artificial Sequence
  Description of Artificial Sequence: Synthetic oligonucleotide
gccugggcgaagguggcgg

SEQ ID NO: 1260781 - RNA, 19 nt, Artificial Sequence
  Description of Artificial Sequence: Synthetic oligonucleotide
cacgaugacggaucucacu

SEQ ID NO: 1260782 - RNA, 19 nt, Artificial Sequence
  Description of Artificial Sequence: Synthetic oligonucleotide
acgcagcauuugggcaucc

SEQ ID NO: 1260783 - RNA, 19 nt, Artificial Sequence
  Description of Artificial Sequence: Synthetic oligonucleotide
ucuugccugccagcacaga

SEQ ID NO: 1260784 - RNA, 19 nt, Artificial Sequence
  Description of Artificial Sequence: Synthetic oligonucleotide
ugcagucauaguggccaau

SEQ ID NO: 1260785 - RNA, 19 nt, Artificial Sequence
  Description of Artificial Sequence: Synthetic oligonucleotide
augcggcggccguaaguca

SEQ ID NO: 1260786 - RNA, 19 nt, Artificial Sequence
  Description of Artificial Sequence: Synthetic oligonucleotide
gagacgcugcugaagugcu

SEQ ID NO: 1260787 - RNA, 19 nt, Artificial Sequence
  Description of Artificial Sequence: Synthetic oligonucleotide
gggugaccgcagcagggcc

SEQ ID NO: 1260788 - RNA, 19 nt, Artificial Sequence
  Description of Artificial Sequence: Synthetic oligonucleotide
ugccgcuacggauccgguu

SEQ ID NO: 1260789 - RNA, 19 nt, Artificial Sequence
  Description of Artificial Sequence: Synthetic oligonucleotide
cccguuguccagcacgcug

SEQ ID NO: 1260790 - RNA, 19 nt, Artificial Sequence
  Description of Artificial Sequence: Synthetic oligonucleotide
gcaauggccacgugggcua

SEQ ID NO: 1260791 - RNA, 19 nt, Artificial Sequence
  Description of Artificial Sequence: Synthetic oligonucleotide
aggaccgcuccgaggccac

SEQ ID NO: 1260792 - RNA, 19 nt, Artificial Sequence
  Description of Artificial Sequence: Synthetic oligonucleotide
ccuagcagcccagucucag

SEQ ID NO: 1260793 - RNA, 19 nt, Artificial Sequence
  Description of Artificial Sequence: Synthetic oligonucleotide
gcauacgucugagcagcag

SEQ ID NO: 1260794 - RNA, 19 nt, Artificial Sequence
  Description of Artificial Sequence: Synthetic oligonucleotide
guaagucaggaggcugcga

SEQ ID NO: 1260795 - RNA, 19 nt, Artificial Sequence
  Description of Artificial Sequence: Synthetic oligonucleotide
agcucccgucagcgaaaag

SEQ ID NO: 1260796 - RNA, 19 nt, Artificial Sequence
  Description of Artificial Sequence: Synthetic oligonucleotide
guaugcucccgagugcugu

SEQ ID NO: 1260797 - RNA, 19 nt, Artificial Sequence
  Description of Artificial Sequence: Synthetic oligonucleotide
ggauccgguuguagucugg

SEQ ID NO: 1260798 - RNA, 19 nt, Artificial Sequence
  Description of Artificial Sequence: Synthetic oligonucleotide
cacgcugaccugggucucc

SEQ ID NO: 1260799 - RNA, 19 nt, Artificial Sequence
  Description of Artificial Sequence: Synthetic oligonucleotide
gaccgcuccgaggccacac

SEQ ID NO: 1260800 - RNA, 19 nt, Artificial Sequence
  Description of Artificial Sequence: Synthetic oligonucleotide
cucccgagugcuguaggca

SEQ ID NO: 1260801 - RNA, 19 nt, Artificial Sequence
  Description of Artificial Sequence: Synthetic oligonucleotide
gccguaagucaggaggcug

SEQ ID NO: 1260802 - RNA, 19 nt, Artificial Sequence
  Description of Artificial Sequence: Synthetic oligonucleotide
caccauaagugcagucaua

SEQ ID NO: 1260803 - RNA, 19 nt, Artificial Sequence
  Description of Artificial Sequence: Synthetic oligonucleotide
gcaccuagcagcccagucu

SEQ ID NO: 1260804 - RNA, 19 nt, Artificial Sequence
  Description of Artificial Sequence: Synthetic oligonucleotide
ccucuugccugccagcaca

SEQ ID NO: 1260805 - RNA, 19 nt, Artificial Sequence
  Description of Artificial Sequence: Synthetic oligonucleotide
cgaugacggaucucacugc

SEQ ID NO: 1260806 - RNA, 19 nt, Artificial Sequence
  Description of Artificial Sequence: Synthetic oligonucleotide
cacgcagcauuugggcauc

SEQ ID NO: 1260807 - RNA, 19 nt, Artificial Sequence
  Description of Artificial Sequence: Synthetic oligonucleotide
cgacauggaguuacaccag

SEQ ID NO: 1260808 - RNA, 19 nt, Artificial Sequence
  Description of Artificial Sequence: Synthetic oligonucleotide
gcgaagguggcgguacccc

SEQ ID NO: 1260809 - RNA, 19 nt, Artificial Sequence
  Description of Artificial Sequence: Synthetic oligonucleotide
cggccguaagucaggaggc

SEQ ID NO: 1260810 - RNA, 19 nt, Artificial Sequence
  Description of Artificial Sequence: Synthetic oligonucleotide
uaucugccaggagcuccac

SEQ ID NO: 1260811 - RNA, 19 nt, Artificial Sequence
  Description of Artificial Sequence: Synthetic oligonucleotide
caguaugcucccgagugcu

SEQ ID NO: 1260812 - RNA, 19 nt, Artificial Sequence
  Description of Artificial Sequence: Synthetic oligonucleotide
gacggaucucacugccagu

SEQ ID NO: 1260813 - RNA, 19 nt, Artificial Sequence
  Description of Artificial Sequence: Synthetic oligonucleotide
gggcaaguucuagcagccg

SEQ ID NO: 1260814 - RNA, 19 nt, Artificial Sequence
  Description of Artificial Sequence: Synthetic oligonucleotide
gcgggugaccgcagcaggg

SEQ ID NO: 1260815 - RNA, 19 nt, Artificial Sequence
  Description of Artificial Sequence: Synthetic oligonucleotide
caucacgaugacggaucuc

SEQ ID NO: 1260816 - RNA, 19 nt, Artificial Sequence
  Description of Artificial Sequence: Synthetic oligonucleotide
uggcgguaccccgcagggc

SEQ ID NO: 1260817 - RNA, 19 nt, Artificial Sequence
  Description of Artificial Sequence: Synthetic oligonucleotide
agggaugcggcggccguaa

SEQ ID NO: 1260818 - RNA, 19 nt, Artificial Sequence
  Description of Artificial Sequence: Synthetic oligonucleotide
ggccacauuguccggguua

SEQ ID NO: 1260819 - RNA, 19 nt, Artificial Sequence
  Description of Artificial Sequence: Synthetic oligonucleotide
acaugccgcuacggauccg

SEQ ID NO: 1260820 - RNA, 19 nt, Artificial Sequence
  Description of Artificial Sequence: Synthetic oligonucleotide
cguaagucaggaggcugcg

SEQ ID NO: 1260821 - RNA, 19 nt, Artificial Sequence
  Description of Artificial Sequence: Synthetic oligonucleotide
gcggcugcgaagcagcgcu

SEQ ID NO: 1260822 - RNA, 19 nt, Artificial Sequence
  Description of Artificial Sequence: Synthetic oligonucleotide
gcccgacagacugcggacg

SEQ ID NO: 1260823 - RNA, 19 nt, Artificial Sequence
  Description of Artificial Sequence: Synthetic oligonucleotide
ccaccgugcaggugggaug

SEQ ID NO: 1260824 - RNA, 19 nt, Artificial Sequence
  Description of Artificial Sequence: Synthetic oligonucleotide
cgacagacugcggacgccg

SEQ ID NO: 1260825 - RNA, 19 nt, Artificial Sequence
  Description of Artificial Sequence: Synthetic oligonucleotide
ccuagaagcgcagccagaa

SEQ ID NO: 1260826 - RNA, 19 nt, Artificial Sequence
  Description of Artificial Sequence: Synthetic oligonucleotide
agcaccauucgaggagcuu

SEQ ID NO: 1260827 - RNA, 19 nt, Artificial Sequence
  Description of Artificial Sequence: Synthetic oligonucleotide
ccauuguucuucucagucu

SEQ ID NO: 1260828 - RNA, 19 nt, Artificial Sequence
  Description of Artificial Sequence: Synthetic oligonucleotide
ggaggaccgcuccgaggcc

SEQ ID NO: 1260829 - RNA, 19 nt, Artificial Sequence
  Description of Artificial Sequence: Synthetic oligonucleotide
cgaggagcuuuguaauguc

SEQ ID NO: 1260830 - RNA, 19 nt, Artificial Sequence
  Description of Artificial Sequence: Synthetic oligonucleotide
cccgcaggaucacgucucg

SEQ ID NO: 1260831 - RNA, 19 nt, Artificial Sequence
  Description of Artificial Sequence: Synthetic oligonucleotide
cagucucgugacggcugcc

SEQ ID NO: 1260832 - RNA, 19 nt, Artificial Sequence
  Description of Artificial Sequence: Synthetic oligonucleotide
cccgcagggcgggugaccg

SEQ ID NO: 1260833 - RNA, 19 nt, Artificial Sequence
  Description of Artificial Sequence: Synthetic oligonucleotide
agcaaaccucacgcagcau

SEQ ID NO: 1260834 - RNA, 19 nt, Artificial Sequence
  Description of Artificial Sequence: Synthetic oligonucleotide
guaccccgcagggcgggug

SEQ ID NO: 1260835 - RNA, 19 nt, Artificial Sequence
  Description of Artificial Sequence: Synthetic oligonucleotide
ggcggccguaagucaggag

SEQ ID NO: 1260836 - RNA, 19 nt, Artificial Sequence
  Description of Artificial Sequence: Synthetic oligonucleotide
gggcuaaaggcagggcauc

SEQ ID NO: 1260837 - RNA, 19 nt, Artificial Sequence
  Description of Artificial Sequence: Synthetic oligonucleotide
ccuucgcaauccgagucuc

SEQ ID NO: 1260838 - RNA, 19 nt, Artificial Sequence
  Description of Artificial Sequence: Synthetic oligonucleotide
gagcucccgucagcgaaaa

SEQ ID NO: 1260839 - RNA, 19 nt, Artificial Sequence
  Description of Artificial Sequence: Synthetic oligonucleotide
ggcugcgaccaaugucuuc

SEQ ID NO: 1260840 - RNA, 19 nt, Artificial Sequence
  Description of Artificial Sequence: Synthetic oligonucleotide
accccgcagggcgggugac

SEQ ID NO: 1260841 - RNA, 19 nt, Artificial Sequence
  Description of Artificial Sequence: Synthetic oligonucleotide
ucgugacggcugccagcau

SEQ ID NO: 1260842 - RNA, 19 nt, Artificial Sequence
  Description of Artificial Sequence: Synthetic oligonucleotide
cacagacuuccugccuaga

SEQ ID NO: 1260843 - RNA, 19 nt, Artificial Sequence
  Description of Artificial Sequence: Synthetic oligonucleotide
gcggcggccguaagucagg

SEQ ID NO: 1260844 - RNA, 19 nt, Artificial Sequence
  Description of Artificial Sequence: Synthetic oligonucleotide
cacugccagugaagcgaca

SEQ ID NO: 1260845 - RNA, 19 nt, Artificial Sequence
  Description of Artificial Sequence: Synthetic oligonucleotide
agucugcucgcgacagcuu

SEQ ID NO: 1260846 - RNA, 19 nt, Artificial Sequence
  Description of Artificial Sequence: Synthetic oligonucleotide
gugcacaggcgcauccacu

SEQ ID NO: 1260847 - RNA, 19 nt, Artificial Sequence
  Description of Artificial Sequence: Synthetic oligonucleotide
gcuuccugacguucucacu

SEQ ID NO: 1260848 - RNA, 19 nt, Artificial Sequence
  Description of Artificial Sequence: Synthetic oligonucleotide
ccaccauaagugcagucau

SEQ ID NO: 1260849 - RNA, 19 nt, Artificial Sequence
  Description of Artificial Sequence: Synthetic oligonucleotide
augccgcuacggauccggu

SEQ ID NO: 1260850 - RNA, 19 nt, Artificial Sequence
  Description of Artificial Sequence: Synthetic oligonucleotide
gcgguaccccgcagggcgg

SEQ ID NO: 1260851 - RNA, 19 nt, Artificial Sequence
  Description of Artificial Sequence: Synthetic oligonucleotide
ccauaagugcagucauagu

SEQ ID NO: 1260852 - RNA, 19 nt, Artificial Sequence
  Description of Artificial Sequence: Synthetic oligonucleotide
ggguuacaccagccagguc

SEQ ID NO: 1260853 - RNA, 19 nt, Artificial Sequence
  Description of Artificial Sequence: Synthetic oligonucleotide
cgcgacagcuuccugacgu

SEQ ID NO: 1260854 - RNA, 19 nt, Artificial Sequence
  Description of Artificial Sequence: Synthetic oligonucleotide
agacgcugcugaagugcuu

SEQ ID NO: 1260855 - RNA, 19 nt, Artificial Sequence
  Description of Artificial Sequence: Synthetic oligonucleotide
gcagcgcuugcgucccaga

SEQ ID NO: 1260856 - RNA, 19 nt, Artificial Sequence
  Description of Artificial Sequence: Synthetic oligonucleotide
augccguggcaugcaggua

SEQ ID NO: 1260857 - RNA, 19 nt, Artificial Sequence
  Description of Artificial Sequence: Synthetic oligonucleotide
gccuagaagcgcagccaga

SEQ ID NO: 1260858 - RNA, 19 nt, Artificial Sequence
  Description of Artificial Sequence: Synthetic oligonucleotide
gcagcccgacagacugcgg

SEQ ID NO: 1260859 - RNA, 19 nt, Artificial Sequence
  Description of Artificial Sequence: Synthetic oligonucleotide
gugaagcgacauggaguua

SEQ ID NO: 1260860 - RNA, 19 nt, Artificial Sequence
  Description of Artificial Sequence: Synthetic oligonucleotide
aggcugcgaccaaugucuu

SEQ ID NO: 1260861 - RNA, 19 nt, Artificial Sequence
  Description of Artificial Sequence: Synthetic oligonucleotide
caauggccacgugggcuaa

SEQ ID NO: 1260862 - RNA, 19 nt, Artificial Sequence
  Description of Artificial Sequence: Synthetic oligonucleotide
gccgauucuuuguucccuu

SEQ ID NO: 1260863 - RNA, 19 nt, Artificial Sequence
  Description of Artificial Sequence: Synthetic oligonucleotide
ccaccuucgcaauccgagu

SEQ ID NO: 1260864 - RNA, 19 nt, Artificial Sequence
  Description of Artificial Sequence: Synthetic oligonucleotide
cugcucgcgacagcuuccu

SEQ ID NO: 1260865 - RNA, 19 nt, Artificial Sequence
  Description of Artificial Sequence: Synthetic oligonucleotide
cugggcgaagguggcggua

SEQ ID NO: 1260866 - RNA, 19 nt, Artificial Sequence
  Description of Artificial Sequence: Synthetic oligonucleotide
cuucucgaucugggagucu

SEQ ID NO: 1260867 - RNA, 19 nt, Artificial Sequence
  Description of Artificial Sequence: Synthetic oligonucleotide
gcccagucucagaguagga

SEQ ID NO: 1260868 - RNA, 19 nt, Artificial Sequence
  Description of Artificial Sequence: Synthetic oligonucleotide
ccgagugcuguaggcauua

SEQ ID NO: 1260869 - RNA, 19 nt, Artificial Sequence
  Description of Artificial Sequence: Synthetic oligonucleotide
aggcacugccaggccgauu

SEQ ID NO: 1260870 - RNA, 19 nt, Artificial Sequence
  Description of Artificial Sequence: Synthetic oligonucleotide
cggcacgcucuggagggcc

SEQ ID NO: 1260871 - RNA, 19 nt, Artificial Sequence
  Description of Artificial Sequence: Synthetic oligonucleotide
cgcuccgaggccacacgca

SEQ ID NO: 1260872 - RNA, 19 nt, Artificial Sequence
  Description of Artificial Sequence: Synthetic oligonucleotide
gugcaccuagcagcccagu

SEQ ID NO: 1260873 - RNA, 19 nt, Artificial Sequence
  Description of Artificial Sequence: Synthetic oligonucleotide
cgcaggaucacgucucguu

SEQ ID NO: 1260874 - RNA, 19 nt, Artificial Sequence
  Description of Artificial Sequence: Synthetic oligonucleotide
gcgacagcuuccugacguu

SEQ ID NO: 1260875 - RNA, 19 nt, Artificial Sequence
  Description of Artificial Sequence: Synthetic oligonucleotide
ggcgugcggcggcugcgaa

SEQ ID NO: 1260876 - RNA, 19 nt, Artificial Sequence
  Description of Artificial Sequence: Synthetic oligonucleotide
gcgcauccacuggccuugc

SEQ ID NO: 1260877 - RNA, 19 nt, Artificial Sequence
  Description of Artificial Sequence: Synthetic oligonucleotide
cgguaccccgcagggcggg

SEQ ID NO: 1260878 - RNA, 19 nt, Artificial Sequence
  Description of Artificial Sequence: Synthetic oligonucleotide
ccccgcagggcgggugacc

SEQ ID NO: 1260879 - RNA, 19 nt, Artificial Sequence
  Description of Artificial Sequence: Synthetic oligonucleotide
cgcuugcgucccagagcag

SEQ ID NO: 1260880 - RNA, 19 nt, Artificial Sequence
  Description of Artificial Sequence: Synthetic oligonucleotide
cggguuacaccagccaggu

SEQ ID NO: 1260881 - RNA, 19 nt, Artificial Sequence
  Description of Artificial Sequence: Synthetic oligonucleotide
cgucucguugcuucucgau

SEQ ID NO: 1260882 - RNA, 19 nt, Artificial Sequence
  Description of Artificial Sequence: Synthetic oligonucleotide
ggaccgcuccgaggccaca

SEQ ID NO: 1260883 - RNA, 19 nt, Artificial Sequence
  Description of Artificial Sequence: Synthetic oligonucleotide
ccugggcgaagguggcggu

SEQ ID NO: 1260884 - RNA, 19 nt, Artificial Sequence
  Description of Artificial Sequence: Synthetic oligonucleotide
ccgcuacggauccgguugu

SEQ ID NO: 1260885 - RNA, 19 nt, Artificial Sequence
  Description of Artificial Sequence: Synthetic oligonucleotide
gggccacauuguccggguu

SEQ ID NO: 1260886 - RNA, 19 nt, Artificial Sequence
  Description of Artificial Sequence: Synthetic oligonucleotide
gguaccccgcagggcgggu

SEQ ID NO: 1260887 - RNA, 19 nt, Artificial Sequence
  Description of Artificial Sequence: Synthetic oligonucleotide
cggcggccguaagucagga

SEQ ID NO: 1260888 - RNA, 19 nt, Artificial Sequence
  Description of Artificial Sequence: Synthetic oligonucleotide
ccgcaggaucacgucucgu

SEQ ID NO: 1260889 - RNA, 19 nt, Artificial Sequence
  Description of Artificial Sequence: Synthetic oligonucleotide
cgcuacggauccgguugua

SEQ ID NO: 1260890 - RNA, 19 nt, Artificial Sequence
  Description of Artificial Sequence: Synthetic oligonucleotide
cggcugcgaagcagcgcuu

SEQ ID NO: 1260891 - RNA, 19 nt, Artificial Sequence
  Description of Artificial Sequence: Synthetic oligonucleotide
aagagaauuagccaaaagg

SEQ ID NO: 1260892 - RNA, 19 nt, Artificial Sequence
  Description of Artificial Sequence: Synthetic oligonucleotide
ucuuaagggaagcagagag

SEQ ID NO: 1260893 - RNA, 19 nt, Artificial Sequence
  Description of Artificial Sequence: Synthetic oligonucleotide
gaugauaucuguuaucagc

SEQ ID NO: 1260894 - RNA, 19 nt, Artificial Sequence
  Description of Artificial Sequence: Synthetic oligonucleotide
aaucuuucuaucuuggacu

SEQ ID NO: 1260895 - RNA, 19 nt, Artificial Sequence
  Description of Artificial Sequence: Synthetic oligonucleotide
accaucuauggcuaaaggc

SEQ ID NO: 1260896 - RNA, 19 nt, Artificial Sequence
  Description of Artificial Sequence: Synthetic oligonucleotide
uauucuaacaggccugggg

SEQ ID NO: 1260897 - RNA, 19 nt, Artificial Sequence
  Description of Artificial Sequence: Synthetic oligonucleotide
ucacacaucguccagagaa

SEQ ID NO: 1260898 - RNA, 19 nt, Artificial Sequence
  Description of Artificial Sequence: Synthetic oligonucleotide
gacugauuggaauagcuug

SEQ ID NO: 1260899 - RNA, 19 nt, Artificial Sequence
  Description of Artificial Sequence: Synthetic oligonucleotide
ucuuauacucacugggagg

SEQ ID NO: 1260900 - RNA, 19 nt, Artificial Sequence
  Description of Artificial Sequence: Synthetic oligonucleotide
aagauaucgacaggggugg

SEQ ID NO: 1260901 - RNA, 19 nt, Artificial Sequence
  Description of Artificial Sequence: Synthetic oligonucleotide
aacagaugguacaaggacg

SEQ ID NO: 1260902 - RNA, 19 nt, Artificial Sequence
  Description of Artificial Sequence: Synthetic oligonucleotide
ucauguaugaaucuuucua

SEQ ID NO: 1260903 - RNA, 19 nt, Artificial Sequence
  Description of Artificial Sequence: Synthetic oligonucleotide
ucuugugcaucgaagaacu

SEQ ID NO: 1260904 - RNA, 19 nt, Artificial Sequence
  Description of Artificial Sequence: Synthetic oligonucleotide
ugagaugugaagauaucga

SEQ ID NO: 1260905 - RNA, 19 nt, Artificial Sequence
  Description of Artificial Sequence: Synthetic oligonucleotide
ugauugucggccaguagcg

SEQ ID NO: 1260906 - RNA, 19 nt, Artificial Sequence
  Description of Artificial Sequence: Synthetic oligonucleotide
uguaugaaucuuucuaucu

SEQ ID NO: 1260907 - RNA, 19 nt, Artificial Sequence
  Description of Artificial Sequence: Synthetic oligonucleotide
aaggaaucuuaagggaagc

SEQ ID NO: 1260908 - RNA, 19 nt, Artificial Sequence
  Description of Artificial Sequence: Synthetic oligonucleotide
ugguacaaggacgacacgg

SEQ ID NO: 1260909 - RNA, 19 nt, Artificial Sequence
  Description of Artificial Sequence: Synthetic oligonucleotide
uucugucuuauacucacug

SEQ ID NO: 1260910 - RNA, 19 nt, Artificial Sequence
  Description of Artificial Sequence: Synthetic oligonucleotide
uuugguuacgaauggccag

SEQ ID NO: 1260911 - RNA, 19 nt, Artificial Sequence
  Description of Artificial Sequence: Synthetic oligonucleotide
uacuccucgauccaguugu

SEQ ID NO: 1260912 - RNA, 19 nt, Artificial Sequence
  Description of Artificial Sequence: Synthetic oligonucleotide
ucgaugauaucuguuauca

SEQ ID NO: 1260913 - RNA, 19 nt, Artificial Sequence
  Description of Artificial Sequence: Synthetic oligonucleotide
ugaagauaucgacaggggu

SEQ ID NO: 1260914 - RNA, 19 nt, Artificial Sequence
  Description of Artificial Sequence: Synthetic oligonucleotide
auugucggccaguagcggc

SEQ ID NO: 1260915 - RNA, 19 nt, Artificial Sequence
  Description of Artificial Sequence: Synthetic oligonucleotide
cuuauacucacugggaggc

SEQ ID NO: 1260916 - RNA, 19 nt, Artificial Sequence
  Description of Artificial Sequence: Synthetic oligonucleotide
uucuauucuaacaggccug

SEQ ID NO: 1260917 - RNA, 19 nt, Artificial Sequence
  Description of Artificial Sequence: Synthetic oligonucleotide
gugauugucggccaguagc

SEQ ID NO: 1260918 - RNA, 19 nt, Artificial Sequence
  Description of Artificial Sequence: Synthetic oligonucleotide
auucuaacaggccuggggu

SEQ ID NO: 1260919 - RNA, 19 nt, Artificial Sequence
  Description of Artificial Sequence: Synthetic oligonucleotide
gaugguacaaggacgacac

SEQ ID NO: 1260920 - RNA, 19 nt, Artificial Sequence
  Description of Artificial Sequence: Synthetic oligonucleotide
uuuucgggacagcauaagc

SEQ ID NO: 1260921 - RNA, 19 nt, Artificial Sequence
  Description of Artificial Sequence: Synthetic oligonucleotide
gugacuaaggcuucuauuc

SEQ ID NO: 1260922 - RNA, 19 nt, Artificial Sequence
  Description of Artificial Sequence: Synthetic oligonucleotide
ugagucuugacugauugga

SEQ ID NO: 1260923 - RNA, 19 nt, Artificial Sequence
  Description of Artificial Sequence: Synthetic oligonucleotide
gagaugugaagauaucgac

SEQ ID NO: 1260924 - RNA, 19 nt, Artificial Sequence
  Description of Artificial Sequence: Synthetic oligonucleotide
caguccauaccacucaucc

SEQ ID NO: 1260925 - RNA, 19 nt, Artificial Sequence
  Description of Artificial Sequence: Synthetic oligonucleotide
uccuuaagagaauuagcca

SEQ ID NO: 1260926 - RNA, 19 nt, Artificial Sequence
  Description of Artificial Sequence: Synthetic oligonucleotide
aggugcuucucccaauggc

SEQ ID NO: 1260927 - RNA, 19 nt, Artificial Sequence
  Description of Artificial Sequence: Synthetic oligonucleotide
aagcuguacuucccuuucc

SEQ ID NO: 1260928 - RNA, 19 nt, Artificial Sequence
  Description of Artificial Sequence: Synthetic oligonucleotide
uucgggacagcauaagcug

SEQ ID NO: 1260929 - RNA, 19 nt, Artificial Sequence
  Description of Artificial Sequence: Synthetic oligonucleotide
ucuauucuaacaggccugg

SEQ ID NO: 1260930 - RNA, 19 nt, Artificial Sequence
  Description of Artificial Sequence: Synthetic oligonucleotide
ugucuuauacucacuggga

SEQ ID NO: 1260931 - RNA, 19 nt, Artificial Sequence
  Description of Artificial Sequence: Synthetic oligonucleotide
uggggcuuccuuaagagaa

SEQ ID NO: 1260932 - RNA, 19 nt, Artificial Sequence
  Description of Artificial Sequence: Synthetic oligonucleotide
uuacgaauggccaggccug

SEQ ID NO: 1260933 - RNA, 19 nt, Artificial Sequence
  Description of Artificial Sequence: Synthetic oligonucleotide
caucuauggcuaaaggccc

SEQ ID NO: 1260934 - RNA, 19 nt, Artificial Sequence
  Description of Artificial Sequence: Synthetic oligonucleotide
cucagucuuuguaaagugg

SEQ ID NO: 1260935 - RNA, 19 nt, Artificial Sequence
  Description of Artificial Sequence: Synthetic oligonucleotide
acaucguccagagaaacag

SEQ ID NO: 1260936 - RNA, 19 nt, Artificial Sequence
  Description of Artificial Sequence: Synthetic oligonucleotide
gucuuauacucacugggag

SEQ ID NO: 1260937 - RNA, 19 nt, Artificial Sequence
  Description of Artificial Sequence: Synthetic oligonucleotide
gacaaugucgaugauaucu

SEQ ID NO: 1260938 - RNA, 19 nt, Artificial Sequence
  Description of Artificial Sequence: Synthetic oligonucleotide
ucuaacaggccuggggugg

SEQ ID NO: 1260939 - RNA, 19 nt, Artificial Sequence
  Description of Artificial Sequence: Synthetic oligonucleotide
aguccuaggacuguggaug

SEQ ID NO: 1260940 - RNA, 19 nt, Artificial Sequence
  Description of Artificial Sequence: Synthetic oligonucleotide
uguucaguccauaccacuc

SEQ ID NO: 1260941 - RNA, 19 nt, Artificial Sequence
  Description of Artificial Sequence: Synthetic oligonucleotide
aguggggcuuccuuaagag

SEQ ID NO: 1260942 - RNA, 19 nt, Artificial Sequence
  Description of Artificial Sequence: Synthetic oligonucleotide
aucuuucuaucuuggacug

SEQ ID NO: 1260943 - RNA, 19 nt, Artificial Sequence
  Description of Artificial Sequence: Synthetic oligonucleotide
acugauuggaauagcuugg

SEQ ID NO: 1260944 - RNA, 19 nt, Artificial Sequence
  Description of Artificial Sequence: Synthetic oligonucleotide
uugguuacgaauggccagg

SEQ ID NO: 1260945 - RNA, 19 nt, Artificial Sequence
  Description of Artificial Sequence: Synthetic oligonucleotide
cacuuagugauguccuugg

SEQ ID NO: 1260946 - RNA, 19 nt, Artificial Sequence
  Description of Artificial Sequence: Synthetic oligonucleotide
ugacuaaggcuucuauucu

SEQ ID NO: 1260947 - RNA, 19 nt, Artificial Sequence
  Description of Artificial Sequence: Synthetic oligonucleotide
cacccuuugguuacgaaug

SEQ ID NO: 1260948 - RNA, 19 nt, Artificial Sequence
  Description of Artificial Sequence: Synthetic oligonucleotide
aauuagccaaaaggaaucu

SEQ ID NO: 1260949 - RNA, 19 nt, Artificial Sequence
  Description of Artificial Sequence: Synthetic oligonucleotide
uccuccuuuagaaaucaaa

SEQ ID NO: 1260950 - RNA, 19 nt, Artificial Sequence
  Description of Artificial Sequence: Synthetic oligonucleotide
augauaucuguuaucagcu

SEQ ID NO: 1260951 - RNA, 19 nt, Artificial Sequence
  Description of Artificial Sequence: Synthetic oligonucleotide
gaaucuuaagggaagcaga

SEQ ID NO: 1260952 - RNA, 19 nt, Artificial Sequence
  Description of Artificial Sequence: Synthetic oligonucleotide
uguggagggagugacuaag

SEQ ID NO: 1260953 - RNA, 19 nt, Artificial Sequence
  Description of Artificial Sequence: Synthetic oligonucleotide
uuagaggaccuugaggacu

SEQ ID NO: 1260954 - RNA, 19 nt, Artificial Sequence
  Description of Artificial Sequence: Synthetic oligonucleotide
ccaguugucagagagaggc

SEQ ID NO: 1260955 - RNA, 19 nt, Artificial Sequence
  Description of Artificial Sequence: Synthetic oligonucleotide
caugaugggaaggagccgc

SEQ ID NO: 1260956 - RNA, 19 nt, Artificial Sequence
  Description of Artificial Sequence: Synthetic oligonucleotide
cacgguucacacaucgucc

SEQ ID NO: 1260957 - RNA, 19 nt, Artificial Sequence
  Description of Artificial Sequence: Synthetic oligonucleotide
ugaaucuuucuaucuugga

SEQ ID NO: 1260958 - RNA, 19 nt, Artificial Sequence
  Description of Artificial Sequence: Synthetic oligonucleotide
uagccaaaaggaaucuuaa

SEQ ID NO: 1260959 - RNA, 19 nt, Artificial Sequence
  Description of Artificial Sequence: Synthetic oligonucleotide
uccaugaggucauuugagu

SEQ ID NO: 1260960 - RNA, 19 nt, Artificial Sequence
  Description of Artificial Sequence: Synthetic oligonucleotide
aaguggggcuuccuuaaga

SEQ ID NO: 1260961 - RNA, 19 nt, Artificial Sequence
  Description of Artificial Sequence: Synthetic oligonucleotide
ucaguccuaggacugugga

SEQ ID NO: 1260962 - RNA, 19 nt, Artificial Sequence
  Description of Artificial Sequence: Synthetic oligonucleotide
agccaaaaggaaucuuaag

SEQ ID NO: 1260963 - RNA, 19 nt, Artificial Sequence
  Description of Artificial Sequence: Synthetic oligonucleotide
aggcuucuauucuaacagg

SEQ ID NO: 1260964 - RNA, 19 nt, Artificial Sequence
  Description of Artificial Sequence: Synthetic oligonucleotide
acuuccucguugcacaggu

SEQ ID NO: 1260965 - RNA, 19 nt, Artificial Sequence
  Description of Artificial Sequence: Synthetic oligonucleotide
uauugcagguggccugagg

SEQ ID NO: 1260966 - RNA, 19 nt, Artificial Sequence
  Description of Artificial Sequence: Synthetic oligonucleotide
gauaucgacaggggugggg

SEQ ID NO: 1260967 - RNA, 19 nt, Artificial Sequence
  Description of Artificial Sequence: Synthetic oligonucleotide
cucuauguucaguccauac

SEQ ID NO: 1260968 - RNA, 19 nt, Artificial Sequence
  Description of Artificial Sequence: Synthetic oligonucleotide
caucacucgccgcaggccg

SEQ ID NO: 1260969 - RNA, 19 nt, Artificial Sequence
  Description of Artificial Sequence: Synthetic oligonucleotide
cuccuuuagaaaucaaaga

SEQ ID NO: 1260970 - RNA, 19 nt, Artificial Sequence
  Description of Artificial Sequence: Synthetic oligonucleotide
ucacccuuugguuacgaau

SEQ ID NO: 1260971 - RNA, 19 nt, Artificial Sequence
  Description of Artificial Sequence: Synthetic oligonucleotide
cuuugguuacgaauggcca

SEQ ID NO: 1260972 - RNA, 19 nt, Artificial Sequence
  Description of Artificial Sequence: Synthetic oligonucleotide
aggauccuugacaaugucg

SEQ ID NO: 1260973 - RNA, 19 nt, Artificial Sequence
  Description of Artificial Sequence: Synthetic oligonucleotide
guuacgaauggccaggccu

SEQ ID NO: 1260974 - RNA, 19 nt, Artificial Sequence
  Description of Artificial Sequence: Synthetic oligonucleotide
guucucuauguucagucca

SEQ ID NO: 1260975 - RNA, 19 nt, Artificial Sequence
  Description of Artificial Sequence: Synthetic oligonucleotide
uggcuccccgcuuagagga

SEQ ID NO: 1260976 - RNA, 19 nt, Artificial Sequence
  Description of Artificial Sequence: Synthetic oligonucleotide
guuccacuuagugaugucc

SEQ ID NO: 1260977 - RNA, 19 nt, Artificial Sequence
  Description of Artificial Sequence: Synthetic oligonucleotide
acacaucguccagagaaac

SEQ ID NO: 1260978 - RNA, 19 nt, Artificial Sequence
  Description of Artificial Sequence: Synthetic oligonucleotide
ugacugauuggaauagcuu

SEQ ID NO: 1260979 - RNA, 19 nt, Artificial Sequence
  Description of Artificial Sequence: Synthetic oligonucleotide
uucuaacaggccuggggug

SEQ ID NO: 1260980 - RNA, 19 nt, Artificial Sequence
  Description of Artificial Sequence: Synthetic oligonucleotide
uucgucagagucccuggca

SEQ ID NO: 1260981 - RNA, 19 nt, Artificial Sequence
  Description of Artificial Sequence: Synthetic oligonucleotide
acccuuugguuacgaaugg

SEQ ID NO: 1260982 - RNA, 19 nt, Artificial Sequence
  Description of Artificial Sequence: Synthetic oligonucleotide
uuggggaauacuuccucgu

SEQ ID NO: 1260983 - RNA, 19 nt, Artificial Sequence
  Description of Artificial Sequence: Synthetic oligonucleotide
gggaauacuuccucguugc

SEQ ID NO: 1260984 - RNA, 19 nt, Artificial Sequence
  Description of Artificial Sequence: Synthetic oligonucleotide
cuuaagagaauuagccaaa

SEQ ID NO: 1260985 - RNA, 19 nt, Artificial Sequence
  Description of Artificial Sequence: Synthetic oligonucleotide
gugaagauaucgacagggg

SEQ ID NO: 1260986 - RNA, 19 nt, Artificial Sequence
  Description of Artificial Sequence: Synthetic oligonucleotide
uuaagagaauuagccaaaa

SEQ ID NO: 1260987 - RNA, 19 nt, Artificial Sequence
  Description of Artificial Sequence: Synthetic oligonucleotide
agugacuaaggcuucuauu

SEQ ID NO: 1260988 - RNA, 19 nt, Artificial Sequence
  Description of Artificial Sequence: Synthetic oligonucleotide
acaaugucgaugauaucug

SEQ ID NO: 1260989 - RNA, 19 nt, Artificial Sequence
  Description of Artificial Sequence: Synthetic oligonucleotide
uuucuaucuuggacugccc

SEQ ID NO: 1260990 - RNA, 19 nt, Artificial Sequence
  Description of Artificial Sequence: Synthetic oligonucleotide
aggggcacgguucacacau

SEQ ID NO: 1260991 - RNA, 19 nt, Artificial Sequence
  Description of Artificial Sequence: Synthetic oligonucleotide
acagaugguacaaggacga

SEQ ID NO: 1260992 - RNA, 19 nt, Artificial Sequence
  Description of Artificial Sequence: Synthetic oligonucleotide
uuaagggacuuugaccuuc

SEQ ID NO: 1260993 - RNA, 19 nt, Artificial Sequence
  Description of Artificial Sequence: Synthetic oligonucleotide
ucccuuuccaguucucgga

SEQ ID NO: 1260994 - RNA, 19 nt, Artificial Sequence
  Description of Artificial Sequence: Synthetic oligonucleotide
uggguucuuugcugaaucc

SEQ ID NO: 1260995 - RNA, 19 nt, Artificial Sequence
  Description of Artificial Sequence: Synthetic oligonucleotide
gcuuccuuaagagaauuag

SEQ ID NO: 1260996 - RNA, 19 nt, Artificial Sequence
  Description of Artificial Sequence: Synthetic oligonucleotide
uauacucacugggaggcac

SEQ ID NO: 1260997 - RNA, 19 nt, Artificial Sequence
  Description of Artificial Sequence: Synthetic oligonucleotide
ucguccagagaaacagaug

SEQ ID NO: 1260998 - RNA, 19 nt, Artificial Sequence
  Description of Artificial Sequence: Synthetic oligonucleotide
cuuagaggaccuugaggac

SEQ ID NO: 1260999 - RNA, 19 nt, Artificial Sequence
  Description of Artificial Sequence: Synthetic oligonucleotide
auggcuaaaggcccuggga

SEQ ID NO: 1261000 - RNA, 19 nt, Artificial Sequence
  Description of Artificial Sequence: Synthetic oligonucleotide
gggcagcucacacagaacc

SEQ ID NO: 1261001 - RNA, 19 nt, Artificial Sequence
  Description of Artificial Sequence: Synthetic oligonucleotide
uggacugccccaguaucgg

SEQ ID NO: 1261002 - RNA, 19 nt, Artificial Sequence
  Description of Artificial Sequence: Synthetic oligonucleotide
cugauuggaauagcuuggg

SEQ ID NO: 1261003 - RNA, 19 nt, Artificial Sequence
  Description of Artificial Sequence: Synthetic oligonucleotide
aguuccacuuagugauguc

SEQ ID NO: 1261004 - RNA, 19 nt, Artificial Sequence
  Description of Artificial Sequence: Synthetic oligonucleotide
aagacgggugugguugagg

SEQ ID NO: 1261005 - RNA, 19 nt, Artificial Sequence
  Description of Artificial Sequence: Synthetic oligonucleotide
agaugguacaaggacgaca

SEQ ID NO: 1261006 - RNA, 19 nt, Artificial Sequence
  Description of Artificial Sequence: Synthetic oligonucleotide
agugauugucggccaguag

SEQ ID NO: 1261007 - RNA, 19 nt, Artificial Sequence
  Description of Artificial Sequence: Synthetic oligonucleotide
caccaucuauggcuaaagg

SEQ ID NO: 1261008 - RNA, 19 nt, Artificial Sequence
  Description of Artificial Sequence: Synthetic oligonucleotide
gguacaaggacgacacggg

SEQ ID NO: 1261009 - RNA, 19 nt, Artificial Sequence
  Description of Artificial Sequence: Synthetic oligonucleotide
ggagagaccaagcccacug

SEQ ID NO: 1261010 - RNA, 19 nt, Artificial Sequence
  Description of Artificial Sequence: Synthetic oligonucleotide
cucuugugcaucgaagaac

SEQ ID NO: 1261011 - RNA, 19 nt, Artificial Sequence
  Description of Artificial Sequence: Synthetic oligonucleotide
cucaguccuaggacugugg

SEQ ID NO: 1261012 - RNA, 19 nt, Artificial Sequence
  Description of Artificial Sequence: Synthetic oligonucleotide
auaucuguuaucagcuggu

SEQ ID NO: 1261013 - RNA, 19 nt, Artificial Sequence
  Description of Artificial Sequence: Synthetic oligonucleotide
auaucgacagggguggggu

SEQ ID NO: 1261014 - RNA, 19 nt, Artificial Sequence
  Description of Artificial Sequence: Synthetic oligonucleotide
gagaccaagcccacugacc

SEQ ID NO: 1261015 - RNA, 19 nt, Artificial Sequence
  Description of Artificial Sequence: Synthetic oligonucleotide
cuucuauucuaacaggccu

SEQ ID NO: 1261016 - RNA, 19 nt, Artificial Sequence
  Description of Artificial Sequence: Synthetic oligonucleotide
uucaguccauaccacucau

SEQ ID NO: 1261017 - RNA, 19 nt, Artificial Sequence
  Description of Artificial Sequence: Synthetic oligonucleotide
agagagcagacuugagcga

SEQ ID NO: 1261018 - RNA, 19 nt, Artificial Sequence
  Description of Artificial Sequence: Synthetic oligonucleotide
acgguucacacaucgucca

SEQ ID NO: 1261019 - RNA, 19 nt, Artificial Sequence
  Description of Artificial Sequence: Synthetic oligonucleotide
ucaggggcacgguucacac

SEQ ID NO: 1261020 - RNA, 19 nt, Artificial Sequence
  Description of Artificial Sequence: Synthetic oligonucleotide
ccuuaagagaauuagccaa

SEQ ID NO: 1261021 - RNA, 19 nt, Artificial Sequence
  Description of Artificial Sequence: Synthetic oligonucleotide
gauugucggccaguagcgg

SEQ ID NO: 1261022 - RNA, 19 nt, Artificial Sequence
  Description of Artificial Sequence: Synthetic oligonucleotide
uucucccaauggcugguca

SEQ ID NO: 1261023 - RNA, 19 nt, Artificial Sequence
  Description of Artificial Sequence: Synthetic oligonucleotide
ggauccuugacaaugucga

SEQ ID NO: 1261024 - RNA, 19 nt, Artificial Sequence
  Description of Artificial Sequence: Synthetic oligonucleotide
caccuugcagagcuuguag

SEQ ID NO: 1261025 - RNA, 19 nt, Artificial Sequence
  Description of Artificial Sequence: Synthetic oligonucleotide
acaaggucugccucacccu

SEQ ID NO: 1261026 - RNA, 19 nt, Artificial Sequence
  Description of Artificial Sequence: Synthetic oligonucleotide
gucgaugauaucuguuauc

SEQ ID NO: 1261027 - RNA, 19 nt, Artificial Sequence
  Description of Artificial Sequence: Synthetic oligonucleotide
ggcuucuauucuaacaggc

SEQ ID NO: 1261028 - RNA, 19 nt, Artificial Sequence
  Description of Artificial Sequence: Synthetic oligonucleotide
gacuaaggcuucuauucua

SEQ ID NO: 1261029 - RNA, 19 nt, Artificial Sequence
  Description of Artificial Sequence: Synthetic oligonucleotide
ggcaagacgggugugguug

SEQ ID NO: 1261030 - RNA, 19 nt, Artificial Sequence
  Description of Artificial Sequence: Synthetic oligonucleotide
aggcaggggcauucagagc

SEQ ID NO: 1261031 - RNA, 19 nt, Artificial Sequence
  Description of Artificial Sequence: Synthetic oligonucleotide
cuucgucagagucccuggc

SEQ ID NO: 1261032 - RNA, 19 nt, Artificial Sequence
  Description of Artificial Sequence: Synthetic oligonucleotide
aagccugguccugaguggu

SEQ ID NO: 1261033 - RNA, 19 nt, Artificial Sequence
  Description of Artificial Sequence: Synthetic oligonucleotide
gggcacgguucacacaucg

SEQ ID NO: 1261034 - RNA, 19 nt, Artificial Sequence
  Description of Artificial Sequence: Synthetic oligonucleotide
caguugucagagagaggcc

SEQ ID NO: 1261035 - RNA, 19 nt, Artificial Sequence
  Description of Artificial Sequence: Synthetic oligonucleotide
gagggagugacuaaggcuu

SEQ ID NO: 1261036 - RNA, 19 nt, Artificial Sequence
  Description of Artificial Sequence: Synthetic oligonucleotide
gcauucagagccacagugg

SEQ ID NO: 1261037 - RNA, 19 nt, Artificial Sequence
  Description of Artificial Sequence: Synthetic oligonucleotide
cacacaugaugggaaggag

SEQ ID NO: 1261038 - RNA, 19 nt, Artificial Sequence
  Description of Artificial Sequence: Synthetic oligonucleotide
ggcacaggauccuugacaa

SEQ ID NO: 1261039 - RNA, 19 nt, Artificial Sequence
  Description of Artificial Sequence: Synthetic oligonucleotide
acuaaggcuucuauucuaa

SEQ ID NO: 1261040 - RNA, 19 nt, Artificial Sequence
  Description of Artificial Sequence: Synthetic oligonucleotide
aucguccagagaaacagau

SEQ ID NO: 1261041 - RNA, 19 nt, Artificial Sequence
  Description of Artificial Sequence: Synthetic oligonucleotide
gccacugggaccccuagug

SEQ ID NO: 1261042 - RNA, 19 nt, Artificial Sequence
  Description of Artificial Sequence: Synthetic oligonucleotide
aggucugccucacccuuug

SEQ ID NO: 1261043 - RNA, 19 nt, Artificial Sequence
  Description of Artificial Sequence: Synthetic oligonucleotide
ccaguaucggaacuccacc

SEQ ID NO: 1261044 - RNA, 19 nt, Artificial Sequence
  Description of Artificial Sequence: Synthetic oligonucleotide
caauacucugcauccucca

SEQ ID NO: 1261045 - RNA, 19 nt, Artificial Sequence
  Description of Artificial Sequence: Synthetic oligonucleotide
aucggaacuccaccuugca

SEQ ID NO: 1261046 - RNA, 19 nt, Artificial Sequence
  Description of Artificial Sequence: Synthetic oligonucleotide
uaucgacagggguggggug

SEQ ID NO: 1261047 - RNA, 19 nt, Artificial Sequence
  Description of Artificial Sequence: Synthetic oligonucleotide
gcuaaaggcccugggagag

SEQ ID NO: 1261048 - RNA, 19 nt, Artificial Sequence
  Description of Artificial Sequence: Synthetic oligonucleotide
aggccggugucauguauga

SEQ ID NO: 1261049 - RNA, 19 nt, Artificial Sequence
  Description of Artificial Sequence: Synthetic oligonucleotide
uuauacucacugggaggca

SEQ ID NO: 1261050 - RNA, 19 nt, Artificial Sequence
  Description of Artificial Sequence: Synthetic oligonucleotide
acaggauccuugacaaugu

SEQ ID NO: 1261051 - RNA, 19 nt, Artificial Sequence
  Description of Artificial Sequence: Synthetic oligonucleotide
cuauucuaacaggccuggg

SEQ ID NO: 1261052 - RNA, 19 nt, Artificial Sequence
  Description of Artificial Sequence: Synthetic oligonucleotide
ggcauugaggcucaguccu

SEQ ID NO: 1261053 - RNA, 19 nt, Artificial Sequence
  Description of Artificial Sequence: Synthetic oligonucleotide
acagcauggggugggguca

SEQ ID NO: 1261054 - RNA, 19 nt, Artificial Sequence
  Description of Artificial Sequence: Synthetic oligonucleotide
gcacgguucacacaucguc

SEQ ID NO: 1261055 - RNA, 19 nt, Artificial Sequence
  Description of Artificial Sequence: Synthetic oligonucleotide
cuaacaggccugggguggg

SEQ ID NO: 1261056 - RNA, 19 nt, Artificial Sequence
  Description of Artificial Sequence: Synthetic oligonucleotide
agacuugagcgagguuugg

SEQ ID NO: 1261057 - RNA, 19 nt, Artificial Sequence
  Description of Artificial Sequence: Synthetic oligonucleotide
cccgucucaccaucuaugg

SEQ ID NO: 1261058 - RNA, 19 nt, Artificial Sequence
  Description of Artificial Sequence: Synthetic oligonucleotide
ggcaauacucugcauccuc

SEQ ID NO: 1261059 - RNA, 19 nt, Artificial Sequence
  Description of Artificial Sequence: Synthetic oligonucleotide
cacaucguccagagaaaca

SEQ ID NO: 1261060 - RNA, 19 nt, Artificial Sequence
  Description of Artificial Sequence: Synthetic oligonucleotide
cuaggacuguggaugugga

SEQ ID NO: 1261061 - RNA, 19 nt, Artificial Sequence
  Description of Artificial Sequence: Synthetic oligonucleotide
ugcccgucucaccaucuau

SEQ ID NO: 1261062 - RNA, 19 nt, Artificial Sequence
  Description of Artificial Sequence: Synthetic oligonucleotide
ccccgaugagucuugacug

SEQ ID NO: 1261063 - RNA, 19 nt, Artificial Sequence
  Description of Artificial Sequence: Synthetic oligonucleotide
caaggacgacacgggaggg

SEQ ID NO: 1261064 - RNA, 19 nt, Artificial Sequence
  Description of Artificial Sequence: Synthetic oligonucleotide
gaggcacaggauccuugac

SEQ ID NO: 1261065 - RNA, 19 nt, Artificial Sequence
  Description of Artificial Sequence: Synthetic oligonucleotide
ccggugucauguaugaauc

SEQ ID NO: 1261066 - RNA, 19 nt, Artificial Sequence
  Description of Artificial Sequence: Synthetic oligonucleotide
cccaguaucggaacuccac

SEQ ID NO: 1261067 - RNA, 19 nt, Artificial Sequence
  Description of Artificial Sequence: Synthetic oligonucleotide
ugaggucauuugaguucca

SEQ ID NO: 1261068 - RNA, 19 nt, Artificial Sequence
  Description of Artificial Sequence: Synthetic oligonucleotide
uuauugcagguggccugag

SEQ ID NO: 1261069 - RNA, 19 nt, Artificial Sequence
  Description of Artificial Sequence: Synthetic oligonucleotide
gaccccgccccauggacuc

SEQ ID NO: 1261070 - RNA, 19 nt, Artificial Sequence
  Description of Artificial Sequence: Synthetic oligonucleotide
ugccggugggcccgcacca

SEQ ID NO: 1261071 - RNA, 19 nt, Artificial Sequence
  Description of Artificial Sequence: Synthetic oligonucleotide
agauaucgacagggguggg

SEQ ID NO: 1261072 - RNA, 19 nt, Artificial Sequence
  Description of Artificial Sequence: Synthetic oligonucleotide
caucguccagagaaacaga

SEQ ID NO: 1261073 - RNA, 19 nt, Artificial Sequence
  Description of Artificial Sequence: Synthetic oligonucleotide
caguagcggcucuggauuc

SEQ ID NO: 1261074 - RNA, 19 nt, Artificial Sequence
  Description of Artificial Sequence: Synthetic oligonucleotide
cagaccccgccccauggac

SEQ ID NO: 1261075 - RNA, 19 nt, Artificial Sequence
  Description of Artificial Sequence: Synthetic oligonucleotide
uacgaauggccaggccuga

SEQ ID NO: 1261076 - RNA, 19 nt, Artificial Sequence
  Description of Artificial Sequence: Synthetic oligonucleotide
cacacaucguccagagaaa

SEQ ID NO: 1261077 - RNA, 19 nt, Artificial Sequence
  Description of Artificial Sequence: Synthetic oligonucleotide
gguuacgaauggccaggcc

SEQ ID NO: 1261078 - RNA, 19 nt, Artificial Sequence
  Description of Artificial Sequence: Synthetic oligonucleotide
ggcuaaaggcccugggaga

SEQ ID NO: 1261079 - RNA, 19 nt, Artificial Sequence
  Description of Artificial Sequence: Synthetic oligonucleotide
cgcuuagaggaccuugagg

SEQ ID NO: 1261080 - RNA, 19 nt, Artificial Sequence
  Description of Artificial Sequence: Synthetic oligonucleotide
ugccccaguaucggaacuc

SEQ ID NO: 1261081 - RNA, 19 nt, Artificial Sequence
  Description of Artificial Sequence: Synthetic oligonucleotide
gugucggaggggcuggcuc

SEQ ID NO: 1261082 - RNA, 19 nt, Artificial Sequence
  Description of Artificial Sequence: Synthetic oligonucleotide
caguaucggaacuccaccu

SEQ ID NO: 1261083 - RNA, 19 nt, Artificial Sequence
  Description of Artificial Sequence: Synthetic oligonucleotide
cucagagguugcuccagaa

SEQ ID NO: 1261084 - RNA, 19 nt, Artificial Sequence
  Description of Artificial Sequence: Synthetic oligonucleotide
gagugacuaaggcuucuau

SEQ ID NO: 1261085 - RNA, 19 nt, Artificial Sequence
  Description of Artificial Sequence: Synthetic oligonucleotide
gacugccccaguaucggaa

SEQ ID NO: 1261086 - RNA, 19 nt, Artificial Sequence
  Description of Artificial Sequence: Synthetic oligonucleotide
aucacucgccgcaggccgg

SEQ ID NO: 1261087 - RNA, 19 nt, Artificial Sequence
  Description of Artificial Sequence: Synthetic oligonucleotide
ugggaccccuaguggggca

SEQ ID NO: 1261088 - RNA, 19 nt, Artificial Sequence
  Description of Artificial Sequence: Synthetic oligonucleotide
ggaaggagccgcuucuugu

SEQ ID NO: 1261089 - RNA, 19 nt, Artificial Sequence
  Description of Artificial Sequence: Synthetic oligonucleotide
gucugccucacccuuuggu

SEQ ID NO: 1261090 - RNA, 19 nt, Artificial Sequence
  Description of Artificial Sequence: Synthetic oligonucleotide
ugugucggaggggcuggcu

SEQ ID NO: 1261091 - RNA, 19 nt, Artificial Sequence
  Description of Artificial Sequence: Synthetic oligonucleotide
guggauguggagggaguga

SEQ ID NO: 1261092 - RNA, 19 nt, Artificial Sequence
  Description of Artificial Sequence: Synthetic oligonucleotide
ggugcuucucccaauggcu

SEQ ID NO: 1261093 - RNA, 19 nt, Artificial Sequence
  Description of Artificial Sequence: Synthetic oligonucleotide
acucgccgcaggccggugu

SEQ ID NO: 1261094 - RNA, 19 nt, Artificial Sequence
  Description of Artificial Sequence: Synthetic oligonucleotide
caagacgggugugguugag

SEQ ID NO: 1261095 - RNA, 19 nt, Artificial Sequence
  Description of Artificial Sequence: Synthetic oligonucleotide
gccggugucauguaugaau

SEQ ID NO: 1261096 - RNA, 19 nt, Artificial Sequence
  Description of Artificial Sequence: Synthetic oligonucleotide
ggcugaggcaagacgggug

SEQ ID NO: 1261097 - RNA, 19 nt, Artificial Sequence
  Description of Artificial Sequence: Synthetic oligonucleotide
gauggcauugaggcucagu

SEQ ID NO: 1261098 - RNA, 19 nt, Artificial Sequence
  Description of Artificial Sequence: Synthetic oligonucleotide
guccuaggacuguggaugu

SEQ ID NO: 1261099 - RNA, 19 nt, Artificial Sequence
  Description of Artificial Sequence: Synthetic oligonucleotide
aggcaagacgggugugguu

SEQ ID NO: 1261100 - RNA, 19 nt, Artificial Sequence
  Description of Artificial Sequence: Synthetic oligonucleotide
gaccccuaguggggcagug

SEQ ID NO: 1261101 - RNA, 19 nt, Artificial Sequence
  Description of Artificial Sequence: Synthetic oligonucleotide
gagcagacuugagcgaggu

SEQ ID NO: 1261102 - RNA, 19 nt, Artificial Sequence
  Description of Artificial Sequence: Synthetic oligonucleotide
gcccgucucaccaucuaug

SEQ ID NO: 1261103 - RNA, 19 nt, Artificial Sequence
  Description of Artificial Sequence: Synthetic oligonucleotide
gcugaggcaagacgggugu

SEQ ID NO: 1261104 - RNA, 19 nt, Artificial Sequence
  Description of Artificial Sequence: Synthetic oligonucleotide
agaccccgccccauggacu

SEQ ID NO: 1261105 - RNA, 19 nt, Artificial Sequence
  Description of Artificial Sequence: Synthetic oligonucleotide
agcagacuugagcgagguu

SEQ ID NO: 1261106 - RNA, 19 nt, Artificial Sequence
  Description of Artificial Sequence: Synthetic oligonucleotide
cugaggcaagacgggugug

SEQ ID NO: 1261107 - RNA, 19 nt, Artificial Sequence
  Description of Artificial Sequence: Synthetic oligonucleotide
ucguugcacagguccucuu

SEQ ID NO: 1261108 - RNA, 19 nt, Artificial Sequence
  Description of Artificial Sequence: Synthetic oligonucleotide
ucacucgccgcaggccggu

SEQ ID NO: 1261109 - RNA, 19 nt, Artificial Sequence
  Description of Artificial Sequence: Synthetic oligonucleotide
guagcggcucuggauucuc

SEQ ID NO: 1261110 - RNA, 19 nt, Artificial Sequence
  Description of Artificial Sequence: Synthetic oligonucleotide
ccgucucaccaucuauggc

SEQ ID NO: 1261111 - RNA, 19 nt, Artificial Sequence
  Description of Artificial Sequence: Synthetic oligonucleotide
cucacccuuugguuacgaa

SEQ ID NO: 1261112 - RNA, 19 nt, Artificial Sequence
  Description of Artificial Sequence: Synthetic oligonucleotide
cccuuugguuacgaauggc

SEQ ID NO: 1261113 - RNA, 19 nt, Artificial Sequence
  Description of Artificial Sequence: Synthetic oligonucleotide
caggggcauucagagccac

SEQ ID NO: 1261114 - RNA, 19 nt, Artificial Sequence
  Description of Artificial Sequence: Synthetic oligonucleotide
caguucucggauguucucu

SEQ ID NO: 1261115 - RNA, 19 nt, Artificial Sequence
  Description of Artificial Sequence: Synthetic oligonucleotide
ccucgauccaguugucaga

SEQ ID NO: 1261116 - RNA, 19 nt, Artificial Sequence
  Description of Artificial Sequence: Synthetic oligonucleotide
gguggaccacugcuucuuc

SEQ ID NO: 1261117 - RNA, 19 nt, Artificial Sequence
  Description of Artificial Sequence: Synthetic oligonucleotide
ccgcuuagaggaccuugag

SEQ ID NO: 1261118 - RNA, 19 nt, Artificial Sequence
  Description of Artificial Sequence: Synthetic oligonucleotide
gguuggguucuuugcugaa

SEQ ID NO: 1261119 - RNA, 19 nt, Artificial Sequence
  Description of Artificial Sequence: Synthetic oligonucleotide
ggguucuuugcugaauccu

SEQ ID NO: 1261120 - RNA, 19 nt, Artificial Sequence
  Description of Artificial Sequence: Synthetic oligonucleotide
gcccgcaccaucacucgcc

SEQ ID NO: 1261121 - RNA, 19 nt, Artificial Sequence
  Description of Artificial Sequence: Synthetic oligonucleotide
gcaagacgggugugguuga

SEQ ID NO: 1261122 - RNA, 19 nt, Artificial Sequence
  Description of Artificial Sequence: Synthetic oligonucleotide
ccucuugugcaucgaagaa

SEQ ID NO: 1261123 - RNA, 19 nt, Artificial Sequence
  Description of Artificial Sequence: Synthetic oligonucleotide
ggacagcauaagcuguacu

SEQ ID NO: 1261124 - RNA, 19 nt, Artificial Sequence
  Description of Artificial Sequence: Synthetic oligonucleotide
cccgcuuagaggaccuuga

SEQ ID NO: 1261125 - RNA, 19 nt, Artificial Sequence
  Description of Artificial Sequence: Synthetic oligonucleotide
accccgccccauggacucc

SEQ ID NO: 1261126 - RNA, 19 nt, Artificial Sequence
  Description of Artificial Sequence: Synthetic oligonucleotide
cgcaccaucacucgccgca

SEQ ID NO: 1261127 - RNA, 19 nt, Artificial Sequence
  Description of Artificial Sequence: Synthetic oligonucleotide
cagugauugucggccagua

SEQ ID NO: 1261128 - RNA, 19 nt, Artificial Sequence
  Description of Artificial Sequence: Synthetic oligonucleotide
ggacuccccauugcugcug

SEQ ID NO: 1261129 - RNA, 19 nt, Artificial Sequence
  Description of Artificial Sequence: Synthetic oligonucleotide
gggaccccuaguggggcag

SEQ ID NO: 1261130 - RNA, 19 nt, Artificial Sequence
  Description of Artificial Sequence: Synthetic oligonucleotide
cccgaugagucuugacuga

SEQ ID NO: 1261131 - RNA, 19 nt, Artificial Sequence
  Description of Artificial Sequence: Synthetic oligonucleotide
aggggcauucagagccaca

SEQ ID NO: 1261132 - RNA, 19 nt, Artificial Sequence
  Description of Artificial Sequence: Synthetic oligonucleotide
gcuccccgcuuagaggacc

SEQ ID NO: 1261133 - RNA, 19 nt, Artificial Sequence
  Description of Artificial Sequence: Synthetic oligonucleotide
ggacugccccaguaucgga

SEQ ID NO: 1261134 - RNA, 19 nt, Artificial Sequence
  Description of Artificial Sequence: Synthetic oligonucleotide
ggugggcccgcaccaucac

SEQ ID NO: 1261135 - RNA, 19 nt, Artificial Sequence
  Description of Artificial Sequence: Synthetic oligonucleotide
cuaguggggcagugauugu

SEQ ID NO: 1261136 - RNA, 19 nt, Artificial Sequence
  Description of Artificial Sequence: Synthetic oligonucleotide
ggcugcccgucucaccauc

SEQ ID NO: 1261137 - RNA, 19 nt, Artificial Sequence
  Description of Artificial Sequence: Synthetic oligonucleotide
ccuuuauugcagguggccu

SEQ ID NO: 1261138 - RNA, 19 nt, Artificial Sequence
  Description of Artificial Sequence: Synthetic oligonucleotide
ggaauagcuuggggucuuc

SEQ ID NO: 1261139 - RNA, 19 nt, Artificial Sequence
  Description of Artificial Sequence: Synthetic oligonucleotide
cucguugcacagguccucu

SEQ ID NO: 1261140 - RNA, 19 nt, Artificial Sequence
  Description of Artificial Sequence: Synthetic oligonucleotide
ccaguagcggcucuggauu

SEQ ID NO: 1261141 - RNA, 19 nt, Artificial Sequence
  Description of Artificial Sequence: Synthetic oligonucleotide
ccccgcuuagaggaccuug

SEQ ID NO: 1261142 - RNA, 19 nt, Artificial Sequence
  Description of Artificial Sequence: Synthetic oligonucleotide
cgguucacacaucguccag

SEQ ID NO: 1261143 - RNA, 19 nt, Artificial Sequence
  Description of Artificial Sequence: Synthetic oligonucleotide
cuccccgcuuagaggaccu

SEQ ID NO: 1261144 - RNA, 19 nt, Artificial Sequence
  Description of Artificial Sequence: Synthetic oligonucleotide
gugggcccgcaccaucacu

SEQ ID NO: 1261145 - RNA, 19 nt, Artificial Sequence
  Description of Artificial Sequence: Synthetic oligonucleotide
cugcccgucucaccaucua

SEQ ID NO: 1261146 - RNA, 19 nt, Artificial Sequence
  Description of Artificial Sequence: Synthetic oligonucleotide
gguuggugcuggauggcau

SEQ ID NO: 1261147 - RNA, 19 nt, Artificial Sequence
  Description of Artificial Sequence: Synthetic oligonucleotide
gcagugauugucggccagu

SEQ ID NO: 1261148 - RNA, 19 nt, Artificial Sequence
  Description of Artificial Sequence: Synthetic oligonucleotide
ccccaguaucggaacucca

SEQ ID NO: 1261149 - RNA, 19 nt, Artificial Sequence
  Description of Artificial Sequence: Synthetic oligonucleotide
uccccgcuuagaggaccuu

SEQ ID NO: 1261150 - RNA, 19 nt, Artificial Sequence
  Description of Artificial Sequence: Synthetic oligonucleotide
ggauguggagggagugacu

SEQ ID NO: 1261151 - RNA, 19 nt, Artificial Sequence
  Description of Artificial Sequence: Synthetic oligonucleotide
ccgcaccaucacucgccgc

SEQ ID NO: 1261152 - RNA, 19 nt, Artificial Sequence
  Description of Artificial Sequence: Synthetic oligonucleotide
ggucaggggcacgguucac

SEQ ID NO: 1261153 - RNA, 19 nt, Artificial Sequence
  Description of Artificial Sequence: Synthetic oligonucleotide
gcaggccggugucauguau

SEQ ID NO: 1261154 - RNA, 19 nt, Artificial Sequence
  Description of Artificial Sequence: Synthetic oligonucleotide
ggcacgguucacacaucgu

SEQ ID NO: 1261155 - RNA, 19 nt, Artificial Sequence
  Description of Artificial Sequence: Synthetic oligonucleotide
ggcuccccgcuuagaggac

SEQ ID NO: 1261156 - RNA, 19 nt, Artificial Sequence
  Description of Artificial Sequence: Synthetic oligonucleotide
gagagccccaggggacuau

SEQ ID NO: 1261157 - RNA, 19 nt, Artificial Sequence
  Description of Artificial Sequence: Synthetic oligonucleotide
ggccacugggaccccuagu

SEQ ID NO: 1261158 - RNA, 19 nt, Artificial Sequence
  Description of Artificial Sequence: Synthetic oligonucleotide
ccccgccccauggacuccc

SEQ ID NO: 1261159 - RNA, 19 nt, Artificial Sequence
  Description of Artificial Sequence: Synthetic oligonucleotide
cccuuuccaguucucggau

SEQ ID NO: 1261160 - RNA, 19 nt, Artificial Sequence
  Description of Artificial Sequence: Synthetic oligonucleotide
gcacaggauccuugacaau

SEQ ID NO: 1261161 - RNA, 19 nt, Artificial Sequence
  Description of Artificial Sequence: Synthetic oligonucleotide
gggagagaccaagcccacu

SEQ ID NO: 1261162 - RNA, 19 nt, Artificial Sequence
  Description of Artificial Sequence: Synthetic oligonucleotide
ggagagccccaggggacua

SEQ ID NO: 1261163 - RNA, 19 nt, Artificial Sequence
  Description of Artificial Sequence: Synthetic oligonucleotide
ggggcacgguucacacauc

SEQ ID NO: 1261164 - RNA, 19 nt, Artificial Sequence
  Description of Artificial Sequence: Synthetic oligonucleotide
ccucacccuuugguuacga

SEQ ID NO: 1261165 - RNA, 19 nt, Artificial Sequence
  Description of Artificial Sequence: Synthetic oligonucleotide
cccgccccauggacucccc

SEQ ID NO: 1261166 - RNA, 19 nt, Artificial Sequence
  Description of Artificial Sequence: Synthetic oligonucleotide
ggccggugucauguaugaa

SEQ ID NO: 1261167 - RNA, 19 nt, Artificial Sequence
  Description of Artificial Sequence: Synthetic oligonucleotide
ccgcaggccggugucaugu

SEQ ID NO: 1261168 - RNA, 19 nt, Artificial Sequence
  Description of Artificial Sequence: Synthetic oligonucleotide
ccgaugagucuugacugau

SEQ ID NO: 1261169 - RNA, 19 nt, Artificial Sequence
  Description of Artificial Sequence: Synthetic oligonucleotide
ggaccccuaguggggcagu

SEQ ID NO: 1261170 - RNA, 19 nt, Artificial Sequence
  Description of Artificial Sequence: Synthetic oligonucleotide
ccgccccauggacucccca

SEQ ID NO: 1261171 - RNA, 19 nt, Artificial Sequence
  Description of Artificial Sequence: Synthetic oligonucleotide
ggccugccggugggcccgc

SEQ ID NO: 1261172 - RNA, 19 nt, Artificial Sequence
  Description of Artificial Sequence: Synthetic oligonucleotide
cccuggcaauacucugcau

SEQ ID NO: 1261173 - RNA, 19 nt, Artificial Sequence
  Description of Artificial Sequence: Synthetic oligonucleotide
cgcaggccggugucaugua

SEQ ID NO: 1261174 - RNA, 19 nt, Artificial Sequence
  Description of Artificial Sequence: Synthetic oligonucleotide
gccggugggcccgcaccau

SEQ ID NO: 1261175 - RNA, 19 nt, Artificial Sequence
  Description of Artificial Sequence: Synthetic oligonucleotide
auagagucgaccuucagcc

SEQ ID NO: 1261176 - RNA, 19 nt, Artificial Sequence
  Description of Artificial Sequence: Synthetic oligonucleotide
aauuguuacugguaauucc

SEQ ID NO: 1261177 - RNA, 19 nt, Artificial Sequence
  Description of Artificial Sequence: Synthetic oligonucleotide
ucugaaaggacuuucagca

SEQ ID NO: 1261178 - RNA, 19 nt, Artificial Sequence
  Description of Artificial Sequence: Synthetic oligonucleotide
aauacucuuucaccagucc

SEQ ID NO: 1261179 - RNA, 19 nt, Artificial Sequence
  Description of Artificial Sequence: Synthetic oligonucleotide
ugugguuagaagcuucucg

SEQ ID NO: 1261180 - RNA, 19 nt, Artificial Sequence
  Description of Artificial Sequence: Synthetic oligonucleotide
auauccuccauucccaugg

SEQ ID NO: 1261181 - RNA, 19 nt, Artificial Sequence
  Description of Artificial Sequence: Synthetic oligonucleotide
auuguuacugguaauuccc

SEQ ID NO: 1261182 - RNA, 19 nt, Artificial Sequence
  Description of Artificial Sequence: Synthetic oligonucleotide
aggucgaucaaccagaaga

SEQ ID NO: 1261183 - RNA, 19 nt, Artificial Sequence
  Description of Artificial Sequence: Synthetic oligonucleotide
uauugauccaccuacaguu

SEQ ID NO: 1261184 - RNA, 19 nt, Artificial Sequence
  Description of Artificial Sequence: Synthetic oligonucleotide
uuuauugauccaccuacag

SEQ ID NO: 1261185 - RNA, 19 nt, Artificial Sequence
  Description of Artificial Sequence: Synthetic oligonucleotide
ucgaucaaccagaagauga

SEQ ID NO: 1261186 - RNA, 19 nt, Artificial Sequence
  Description of Artificial Sequence: Synthetic oligonucleotide
uuacuuugcauucuuuuga

SEQ ID NO: 1261187 - RNA, 19 nt, Artificial Sequence
  Description of Artificial Sequence: Synthetic oligonucleotide
uuacugguaauucccacag

SEQ ID NO: 1261188 - RNA, 19 nt, Artificial Sequence
  Description of Artificial Sequence: Synthetic oligonucleotide
aaagaggcucguaacaugg

SEQ ID NO: 1261189 - RNA, 19 nt, Artificial Sequence
  Description of Artificial Sequence: Synthetic oligonucleotide
ugacuguugucucggaugg

SEQ ID NO: 1261190 - RNA, 19 nt, Artificial Sequence
  Description of Artificial Sequence: Synthetic oligonucleotide
uaucuggcggaucauuucg

SEQ ID NO: 1261191 - RNA, 19 nt, Artificial Sequence
  Description of Artificial Sequence: Synthetic oligonucleotide
gaagcuucucgccugagag

SEQ ID NO: 1261192 - RNA, 19 nt, Artificial Sequence
  Description of Artificial Sequence: Synthetic oligonucleotide
ugagcaaagccacagagua

SEQ ID NO: 1261193 - RNA, 19 nt, Artificial Sequence
  Description of Artificial Sequence: Synthetic oligonucleotide
agauucaugggccagaaua

SEQ ID NO: 1261194 - RNA, 19 nt, Artificial Sequence
  Description of Artificial Sequence: Synthetic oligonucleotide
  modified_base (2)..(2): a, c, u, g, unknown or other
gngucccucccacagaucg

SEQ ID NO: 1261195 - RNA, 19 nt, Artificial Sequence
  Description of Artificial Sequence: Synthetic oligonucleotide
gaugggauguggucaagcg

SEQ ID NO: 1261196 - RNA, 19 nt, Artificial Sequence
  Description of Artificial Sequence: Synthetic oligonucleotide
ucgaagaacaacuucuggu

SEQ ID NO: 1261197 - RNA, 19 nt, Artificial Sequence
  Description of Artificial Sequence: Synthetic oligonucleotide
gaugggauggaaaggaugc

SEQ ID NO: 1261198 - RNA, 19 nt, Artificial Sequence
  Description of Artificial Sequence: Synthetic oligonucleotide
gaugaggccaucucgaauc

SEQ ID NO: 1261199 - RNA, 19 nt, Artificial Sequence
  Description of Artificial Sequence: Synthetic oligonucleotide
ucuuuugaaaaugucuuca

SEQ ID NO: 1261200 - RNA, 19 nt, Artificial Sequence
  Description of Artificial Sequence: Synthetic oligonucleotide
aucaaccagaagaugaggc

SEQ ID NO: 1261201 - RNA, 19 nt, Artificial Sequence
  Description of Artificial Sequence: Synthetic oligonucleotide
cucguaacaugguugaggc

SEQ ID NO: 1261202 - RNA, 19 nt, Artificial Sequence
  Description of Artificial Sequence: Synthetic oligonucleotide
uccaccuacaguuuuagau

SEQ ID NO: 1261203 - RNA, 19 nt, Artificial Sequence
  Description of Artificial Sequence: Synthetic oligonucleotide
uuauugauccaccuacagu

SEQ ID NO: 1261204 - RNA, 19 nt, Artificial Sequence
  Description of Artificial Sequence: Synthetic oligonucleotide
agugaauuguuacugguaa

SEQ ID NO: 1261205 - RNA, 19 nt, Artificial Sequence
  Description of Artificial Sequence: Synthetic oligonucleotide
ugguaauucccacagcaga

SEQ ID NO: 1261206 - RNA, 19 nt, Artificial Sequence
  Description of Artificial Sequence: Synthetic oligonucleotide
aguaaugggacauccuuca

SEQ ID NO: 1261207 - RNA, 19 nt, Artificial Sequence
  Description of Artificial Sequence: Synthetic oligonucleotide
uucuguaucccgaacuuac

SEQ ID NO: 1261208 - RNA, 19 nt, Artificial Sequence
  Description of Artificial Sequence: Synthetic oligonucleotide
ucgaccuucagccagggau

SEQ ID NO: 1261209 - RNA, 19 nt, Artificial Sequence
  Description of Artificial Sequence: Synthetic oligonucleotide
gaaaucucggcugucgggg

SEQ ID NO: 1261210 - RNA, 19 nt, Artificial Sequence
  Description of Artificial Sequence: Synthetic oligonucleotide
gaaguccacacugugagcc

SEQ ID NO: 1261211 - RNA, 19 nt, Artificial Sequence
  Description of Artificial Sequence: Synthetic oligonucleotide
uacuccaauguguagucag

SEQ ID NO: 1261212 - RNA, 19 nt, Artificial Sequence
  Description of Artificial Sequence: Synthetic oligonucleotide
auucccauggcucuggccu

SEQ ID NO: 1261213 - RNA, 19 nt, Artificial Sequence
  Description of Artificial Sequence: Synthetic oligonucleotide
gauccuuccggauuaucag

SEQ ID NO: 1261214 - RNA, 19 nt, Artificial Sequence
  Description of Artificial Sequence: Synthetic oligonucleotide
aauucagauucaugggcca

SEQ ID NO: 1261215 - RNA, 19 nt, Artificial Sequence
  Description of Artificial Sequence: Synthetic oligonucleotide
auucacauacggcuguauc

SEQ ID NO: 1261216 - RNA, 19 nt, Artificial Sequence
  Description of Artificial Sequence: Synthetic oligonucleotide
ucucauaauccagggaagg

SEQ ID NO: 1261217 - RNA, 19 nt, Artificial Sequence
  Description of Artificial Sequence: Synthetic oligonucleotide
ucugguuacugaagaggcg

SEQ ID NO: 1261218 - RNA, 19 nt, Artificial Sequence
  Description of Artificial Sequence: Synthetic oligonucleotide
uucucauaauccagggaag

SEQ ID NO: 1261219 - RNA, 19 nt, Artificial Sequence
  Description of Artificial Sequence: Synthetic oligonucleotide
acaguuuuagauaauggcu

SEQ ID NO: 1261220 - RNA, 19 nt, Artificial Sequence
  Description of Artificial Sequence: Synthetic oligonucleotide
  modified_base (6)..(6): a, c, u, g, unknown or other
gaaggngucccucccacag

SEQ ID NO: 1261221 - RNA, 19 nt, Artificial Sequence
  Description of Artificial Sequence: Synthetic oligonucleotide
guaucccgaacuuacacug

SEQ ID NO: 1261222 - RNA, 19 nt, Artificial Sequence
  Description of Artificial Sequence: Synthetic oligonucleotide
caggauauccuccauuccc

SEQ ID NO: 1261223 - RNA, 19 nt, Artificial Sequence
  Description of Artificial Sequence: Synthetic oligonucleotide
aucgaagaacaacuucugg

SEQ ID NO: 1261224 - RNA, 19 nt, Artificial Sequence
  Description of Artificial Sequence: Synthetic oligonucleotide
uucccaaguacucuguggu

SEQ ID NO: 1261225 - RNA, 19 nt, Artificial Sequence
  Description of Artificial Sequence: Synthetic oligonucleotide
uucggcauugccuucuuug

SEQ ID NO: 1261226 - RNA, 19 nt, Artificial Sequence
  Description of Artificial Sequence: Synthetic oligonucleotide
uaaugggacauccuucaac

SEQ ID NO: 1261227 - RNA, 19 nt, Artificial Sequence
  Description of Artificial Sequence: Synthetic oligonucleotide
guuuucauggccaaggaga

SEQ ID NO: 1261228 - RNA, 19 nt, Artificial Sequence
  Description of Artificial Sequence: Synthetic oligonucleotide
ucaucaucggauucaagaa

SEQ ID NO: 1261229 - RNA, 19 nt, Artificial Sequence
  Description of Artificial Sequence: Synthetic oligonucleotide
cucggauggagcuggaagg

SEQ ID NO: 1261230 - RNA, 19 nt, Artificial Sequence
  Description of Artificial Sequence: Synthetic oligonucleotide
uguucugggcaagauagag

SEQ ID NO: 1261231 - RNA, 19 nt, Artificial Sequence
  Description of Artificial Sequence: Synthetic oligonucleotide
  modified_base (2)..(2): a, c, u, g, unknown or other
unaucaucuugccacugac

SEQ ID NO: 1261232 - RNA, 19 nt, Artificial Sequence
  Description of Artificial Sequence: Synthetic oligonucleotide
gauuaucagugacuuggag

SEQ ID NO: 1261233 - RNA, 19 nt, Artificial Sequence
  Description of Artificial Sequence: Synthetic oligonucleotide
ucauaauccagggaaggca

SEQ ID NO: 1261234 - RNA, 19 nt, Artificial Sequence
  Description of Artificial Sequence: Synthetic oligonucleotide
gaagcaucgcaggauaucc

SEQ ID NO: 1261235 - RNA, 19 nt, Artificial Sequence
  Description of Artificial Sequence: Synthetic oligonucleotide
ucccacagaucgaagaaca

SEQ ID NO: 1261236 - RNA, 19 nt, Artificial Sequence
  Description of Artificial Sequence: Synthetic oligonucleotide
agaaaucucggcugucggg

SEQ ID NO: 1261237 - RNA, 19 nt, Artificial Sequence
  Description of Artificial Sequence: Synthetic oligonucleotide
agaucgaagaacaacuucu

SEQ ID NO: 1261238 - RNA, 19 nt, Artificial Sequence
  Description of Artificial Sequence: Synthetic oligonucleotide
ugcugauauaggcuugcag

SEQ ID NO: 1261239 - RNA, 19 nt, Artificial Sequence
  Description of Artificial Sequence: Synthetic oligonucleotide
  modified_base (10)..(10): a, c, u, g, unknown or other
ucgaggggunaucaucuug

SEQ ID NO: 1261240 - RNA, 19 nt, Artificial Sequence
  Description of Artificial Sequence: Synthetic oligonucleotide
uguaucccgaacuuacacu

SEQ ID NO: 1261241 - RNA, 19 nt, Artificial Sequence
  Description of Artificial Sequence: Synthetic oligonucleotide
aacaugguugaggccgucc

SEQ ID NO: 1261242 - RNA, 19 nt, Artificial Sequence
  Description of Artificial Sequence: Synthetic oligonucleotide
  modified_base (6)..(6): a, c, u, g, unknown or other
ggggunaucaucuugccac

SEQ ID NO: 1261243 - RNA, 19 nt, Artificial Sequence
  Description of Artificial Sequence: Synthetic oligonucleotide
aguacucugugguuagaag

SEQ ID NO: 1261244 - RNA, 19 nt, Artificial Sequence
  Description of Artificial Sequence: Synthetic oligonucleotide
agccuggccauguacugcc

SEQ ID NO: 1261245 - RNA, 19 nt, Artificial Sequence
  Description of Artificial Sequence: Synthetic oligonucleotide
ucauugcugauauaggcuu

SEQ ID NO: 1261246 - RNA, 19 nt, Artificial Sequence
  Description of Artificial Sequence: Synthetic oligonucleotide
aacuucucagguaccaaag

SEQ ID NO: 1261247 - RNA, 19 nt, Artificial Sequence
  Description of Artificial Sequence: Synthetic oligonucleotide
aguguuggucaugauuccc

SEQ ID NO: 1261248 - RNA, 19 nt, Artificial Sequence
  Description of Artificial Sequence: Synthetic oligonucleotide
aucauuucggcauugccuu

SEQ ID NO: 1261249 - RNA, 19 nt, Artificial Sequence
  Description of Artificial Sequence: Synthetic oligonucleotide
caaguaauucagauucaug

SEQ ID NO: 1261250 - RNA, 19 nt, Artificial Sequence
  Description of Artificial Sequence: Synthetic oligonucleotide
uucagcacgagcccugcca

SEQ ID NO: 1261251 - RNA, 19 nt, Artificial Sequence
  Description of Artificial Sequence: Synthetic oligonucleotide
gagguucaugagcaaagcc

SEQ ID NO: 1261252 - RNA, 19 nt, Artificial Sequence
  Description of Artificial Sequence: Synthetic oligonucleotide
  modified_base (11)..(11): a, c, u, g, unknown or other
agcuggaaggngucccucc

SEQ ID NO: 1261253 - RNA, 19 nt, Artificial Sequence
  Description of Artificial Sequence: Synthetic oligonucleotide
uaucccgaacuuacacugg

SEQ ID NO: 1261254 - RNA, 19 nt, Artificial Sequence
  Description of Artificial Sequence: Synthetic oligonucleotide
ggauucaagaacaccaucc

SEQ ID NO: 1261255 - RNA, 19 nt, Artificial Sequence
  Description of Artificial Sequence: Synthetic oligonucleotide
cauguacugccgcacagcc

SEQ ID NO: 1261256 - RNA, 19 nt, Artificial Sequence
  Description of Artificial Sequence: Synthetic oligonucleotide
aucccgaacuuacacuggg

SEQ ID NO: 1261257 - RNA, 19 nt, Artificial Sequence
  Description of Artificial Sequence: Synthetic oligonucleotide
ggauggaugggauggaaag

SEQ ID NO: 1261258 - RNA, 19 nt, Artificial Sequence
  Description of Artificial Sequence: Synthetic oligonucleotide
cugacuguugucucggaug

SEQ ID NO: 1261259 - RNA, 19 nt, Artificial Sequence
  Description of Artificial Sequence: Synthetic oligonucleotide
auucucacgagugaugaca

SEQ ID NO: 1261260 - RNA, 19 nt, Artificial Sequence
  Description of Artificial Sequence: Synthetic oligonucleotide
agacucccgauucuguauc

SEQ ID NO: 1261261 - RNA, 19 nt, Artificial Sequence
  Description of Artificial Sequence: Synthetic oligonucleotide
uuguuacugguaauuccca

SEQ ID NO: 1261262 - RNA, 19 nt, Artificial Sequence
  Description of Artificial Sequence: Synthetic oligonucleotide
gugacaauccaagagguca

SEQ ID NO: 1261263 - RNA, 19 nt, Artificial Sequence
  Description of Artificial Sequence: Synthetic oligonucleotide
acgauccucugguuguggc

SEQ ID NO: 1261264 - RNA, 19 nt, Artificial Sequence
  Description of Artificial Sequence: Synthetic oligonucleotide
augaacucuaucuggcgga

SEQ ID NO: 1261265 - RNA, 19 nt, Artificial Sequence
  Description of Artificial Sequence: Synthetic oligonucleotide
gaauuguuacugguaauuc

SEQ ID NO: 1261266 - RNA, 19 nt, Artificial Sequence
  Description of Artificial Sequence: Synthetic oligonucleotide
caucaucggauucaagaac

SEQ ID NO: 1261267 - RNA, 19 nt, Artificial Sequence
  Description of Artificial Sequence: Synthetic oligonucleotide
uacugaagaggcgacgcag

SEQ ID NO: 1261268 - RNA, 19 nt, Artificial Sequence
  Description of Artificial Sequence: Synthetic oligonucleotide
agguucaugagcaaagcca

SEQ ID NO: 1261269 - RNA, 19 nt, Artificial Sequence
  Description of Artificial Sequence: Synthetic oligonucleotide
caagauagagucgaccuuc

SEQ ID NO: 1261270 - RNA, 19 nt, Artificial Sequence
  Description of Artificial Sequence: Synthetic oligonucleotide
uccaauguguagucagaca

SEQ ID NO: 1261271 - RNA, 19 nt, Artificial Sequence
  Description of Artificial Sequence: Synthetic oligonucleotide
guggcugugacaauccaag

SEQ ID NO: 1261272 - RNA, 19 nt, Artificial Sequence
  Description of Artificial Sequence: Synthetic oligonucleotide
aucaucggauucaagaaca

SEQ ID NO: 1261273 - RNA, 19 nt, Artificial Sequence
  Description of Artificial Sequence: Synthetic oligonucleotide
acuguugucucggauggag

SEQ ID NO: 1261274 - RNA, 19 nt, Artificial Sequence
  Description of Artificial Sequence: Synthetic oligonucleotide
ucuguaucccgaacuuaca

SEQ ID NO: 1261275 - RNA, 19 nt, Artificial Sequence
  Description of Artificial Sequence: Synthetic oligonucleotide
uagugaauuguuacuggua

SEQ ID NO: 1261276 - RNA, 19 nt, Artificial Sequence
  Description of Artificial Sequence: Synthetic oligonucleotide
gaucgaagaacaacuucug

SEQ ID NO: 1261277 - RNA, 19 nt, Artificial Sequence
  Description of Artificial Sequence: Synthetic oligonucleotide
uuagaagcuucucgccuga

SEQ ID NO: 1261278 - RNA, 19 nt, Artificial Sequence
  Description of Artificial Sequence: Synthetic oligonucleotide
agaaggucgaucaaccaga

SEQ ID NO: 1261279 - RNA, 19 nt, Artificial Sequence
  Description of Artificial Sequence: Synthetic oligonucleotide
uuccggauuaucagugacu

SEQ ID NO: 1261280 - RNA, 19 nt, Artificial Sequence
  Description of Artificial Sequence: Synthetic oligonucleotide
uggucaagcgccagcgcag

SEQ ID NO: 1261281 - RNA, 19 nt, Artificial Sequence
  Description of Artificial Sequence: Synthetic oligonucleotide
caguaagucuucagaauuc

SEQ ID NO: 1261282 - RNA, 19 nt, Artificial Sequence
  Description of Artificial Sequence: Synthetic oligonucleotide
uaggcuugcaggacugucu

SEQ ID NO: 1261283 - RNA, 19 nt, Artificial Sequence
  Description of Artificial Sequence: Synthetic oligonucleotide
caaagaggcucguaacaug

SEQ ID NO: 1261284 - RNA, 19 nt, Artificial Sequence
  Description of Artificial Sequence: Synthetic oligonucleotide
agaguacuccaauguguag

SEQ ID NO: 1261285 - RNA, 19 nt, Artificial Sequence
  Description of Artificial Sequence: Synthetic oligonucleotide
cuguaucccgaacuuacac

SEQ ID NO: 1261286 - RNA, 19 nt, Artificial Sequence
  Description of Artificial Sequence: Synthetic oligonucleotide
gauauaggcuugcaggacu

SEQ ID NO: 1261287 - RNA, 19 nt, Artificial Sequence
  Description of Artificial Sequence: Synthetic oligonucleotide
acauucucacgagugauga

SEQ ID NO: 1261288 - RNA, 19 nt, Artificial Sequence
  Description of Artificial Sequence: Synthetic oligonucleotide
aggcuugcaggacugucuc

SEQ ID NO: 1261289 - RNA, 19 nt, Artificial Sequence
  Description of Artificial Sequence: Synthetic oligonucleotide
  modified_base (7)..(7): a, c, u, g, unknown or other
aggggunaucaucuugcca

SEQ ID NO: 1261290 - RNA, 19 nt, Artificial Sequence
  Description of Artificial Sequence: Synthetic oligonucleotide
guaucucaugguuuucaug

SEQ ID NO: 1261291 - RNA, 19 nt, Artificial Sequence
  Description of Artificial Sequence: Synthetic oligonucleotide
ggcugugacaauccaagag

SEQ ID NO: 1261292 - RNA, 19 nt, Artificial Sequence
  Description of Artificial Sequence: Synthetic oligonucleotide
agaauucagcugcuugaug

SEQ ID NO: 1261293 - RNA, 19 nt, Artificial Sequence
  Description of Artificial Sequence: Synthetic oligonucleotide
uuucaccaguccaaguaau

SEQ ID NO: 1261294 - RNA, 19 nt, Artificial Sequence
  Description of Artificial Sequence: Synthetic oligonucleotide
uguggcugugacaauccaa

SEQ ID NO: 1261295 - RNA, 19 nt, Artificial Sequence
  Description of Artificial Sequence: Synthetic oligonucleotide
cucauaauccagggaaggc

SEQ ID NO: 1261296 - RNA, 19 nt, Artificial Sequence
  Description of Artificial Sequence: Synthetic oligonucleotide
uucaagcggucacugcccc

SEQ ID NO: 1261297 - RNA, 19 nt, Artificial Sequence
  Description of Artificial Sequence: Synthetic oligonucleotide
ucacauacggcuguaucuc

SEQ ID NO: 1261298 - RNA, 19 nt, Artificial Sequence
  Description of Artificial Sequence: Synthetic oligonucleotide
acagaguacuccaaugugu

SEQ ID NO: 1261299 - RNA, 19 nt, Artificial Sequence
  Description of Artificial Sequence: Synthetic oligonucleotide
ugcaacaagaaggcuuuca

SEQ ID NO: 1261300 - RNA, 19 nt, Artificial Sequence
  Description of Artificial Sequence: Synthetic oligonucleotide
auguggucaagcgccagcg

SEQ ID NO: 1261301 - RNA, 19 nt, Artificial Sequence
  Description of Artificial Sequence: Synthetic oligonucleotide
gaggcucguaacaugguug

SEQ ID NO: 1261302 - RNA, 19 nt, Artificial Sequence
  Description of Artificial Sequence: Synthetic oligonucleotide
ucuggcggaucauuucggc

SEQ ID NO: 1261303 - RNA, 19 nt, Artificial Sequence
  Description of Artificial Sequence: Synthetic oligonucleotide
ucaucggauucaagaacac

SEQ ID NO: 1261304 - RNA, 19 nt, Artificial Sequence
  Description of Artificial Sequence: Synthetic oligonucleotide
ucggcauugccuucuuuga

SEQ ID NO: 1261305 - RNA, 19 nt, Artificial Sequence
  Description of Artificial Sequence: Synthetic oligonucleotide
ugugacaauccaagagguc

SEQ ID NO: 1261306 - RNA, 19 nt, Artificial Sequence
  Description of Artificial Sequence: Synthetic oligonucleotide
cucccgauucuguaucccg

SEQ ID NO: 1261307 - RNA, 19 nt, Artificial Sequence
  Description of Artificial Sequence: Synthetic oligonucleotide
caugggccagaauaucccc

SEQ ID NO: 1261308 - RNA, 19 nt, Artificial Sequence
  Description of Artificial Sequence: Synthetic oligonucleotide
ucaccaguccaaguaauuc

SEQ ID NO: 1261309 - RNA, 19 nt, Artificial Sequence
  Description of Artificial Sequence: Synthetic oligonucleotide
aaggucgaucaaccagaag

SEQ ID NO: 1261310 - RNA, 19 nt, Artificial Sequence
  Description of Artificial Sequence: Synthetic oligonucleotide
cacagaucgaagaacaacu

SEQ ID NO: 1261311 - RNA, 19 nt, Artificial Sequence
  Description of Artificial Sequence: Synthetic oligonucleotide
uggcggaucauuucggcau

SEQ ID NO: 1261312 - RNA, 19 nt, Artificial Sequence
  Description of Artificial Sequence: Synthetic oligonucleotide
uuuagcacacauguucuuu

SEQ ID NO: 1261313 - RNA, 19 nt, Artificial Sequence
  Description of Artificial Sequence: Synthetic oligonucleotide
cggauuaucagugacuugg

SEQ ID NO: 1261314 - RNA, 19 nt, Artificial Sequence
  Description of Artificial Sequence: Synthetic oligonucleotide
agauccuuccggauuauca

SEQ ID NO: 1261315 - RNA, 19 nt, Artificial Sequence
  Description of Artificial Sequence: Synthetic oligonucleotide
cuuccggauuaucagugac

SEQ ID NO: 1261316 - RNA, 19 nt, Artificial Sequence
  Description of Artificial Sequence: Synthetic oligonucleotide
  modified_base (3)..(3): a, c, u, g, unknown or other
gunaucaucuugccacuga

SEQ ID NO: 1261317 - RNA, 19 nt, Artificial Sequence
  Description of Artificial Sequence: Synthetic oligonucleotide
guaccaaagaggcucguaa

SEQ ID NO: 1261318 - RNA, 19 nt, Artificial Sequence
  Description of Artificial Sequence: Synthetic oligonucleotide
ugauauaggcuugcaggac

SEQ ID NO: 1261319 - RNA, 19 nt, Artificial Sequence
  Description of Artificial Sequence: Synthetic oligonucleotide
gaucauuucggcauugccu

SEQ ID NO: 1261320 - RNA, 19 nt, Artificial Sequence
  Description of Artificial Sequence: Synthetic oligonucleotide
uggaguccuucuuuauuga

SEQ ID NO: 1261321 - RNA, 19 nt, Artificial Sequence
  Description of Artificial Sequence: Synthetic oligonucleotide
ucccgauucuguaucccga

SEQ ID NO: 1261322 - RNA, 19 nt, Artificial Sequence
  Description of Artificial Sequence: Synthetic oligonucleotide
cucgaaucauugcugucug

SEQ ID NO: 1261323 - RNA, 19 nt, Artificial Sequence
  Description of Artificial Sequence: Synthetic oligonucleotide
  modified_base (8)..(8): a, c, u, g, unknown or other
gaggggunaucaucuugcc

SEQ ID NO: 1261324 - RNA, 19 nt, Artificial Sequence
  Description of Artificial Sequence: Synthetic oligonucleotide
aggcucguaacaugguuga

SEQ ID NO: 1261325 - RNA, 19 nt, Artificial Sequence
  Description of Artificial Sequence: Synthetic oligonucleotide
aaucucggcugucggggcu

SEQ ID NO: 1261326 - RNA, 19 nt, Artificial Sequence
  Description of Artificial Sequence: Synthetic oligonucleotide
uccggauuaucagugacuu

SEQ ID NO: 1261327 - RNA, 19 nt, Artificial Sequence
  Description of Artificial Sequence: Synthetic oligonucleotide
uguuggucaugauucccaa

SEQ ID NO: 1261328 - RNA, 19 nt, Artificial Sequence
  Description of Artificial Sequence: Synthetic oligonucleotide
cauugcugauauaggcuug

SEQ ID NO: 1261329 - RNA, 19 nt, Artificial Sequence
  Description of Artificial Sequence: Synthetic oligonucleotide
cagguaccaaagaggcucg

SEQ ID NO: 1261330 - RNA, 19 nt, Artificial Sequence
  Description of Artificial Sequence: Synthetic oligonucleotide
  modified_base (16)..(16): a, c, u, g, unknown or other
gauggagcuggaaggnguc

SEQ ID NO: 1261331 - RNA, 19 nt, Artificial Sequence
  Description of Artificial Sequence: Synthetic oligonucleotide
uugaggccgucccaggccu

SEQ ID NO: 1261332 - RNA, 19 nt, Artificial Sequence
  Description of Artificial Sequence: Synthetic oligonucleotide
  modified_base (4)..(4): a, c, u, g, unknown or other
aggngucccucccacagau

SEQ ID NO: 1261333 - RNA, 19 nt, Artificial Sequence
  Description of Artificial Sequence: Synthetic oligonucleotide
agaggcgacgcagacgcuc

SEQ ID NO: 1261334 - RNA, 19 nt, Artificial Sequence
  Description of Artificial Sequence: Synthetic oligonucleotide
uacugguaauucccacagc

SEQ ID NO: 1261335 - RNA, 19 nt, Artificial Sequence
  Description of Artificial Sequence: Synthetic oligonucleotide
  modified_base (5)..(5): a, c, u, g, unknown or other
aaggngucccucccacaga

SEQ ID NO: 1261336 - RNA, 19 nt, Artificial Sequence
  Description of Artificial Sequence: Synthetic oligonucleotide
acggcuguaucucaugguu

SEQ ID NO: 1261337 - RNA, 19 nt, Artificial Sequence
  Description of Artificial Sequence: Synthetic oligonucleotide
gaaaggacuuucagcacga

SEQ ID NO: 1261338 - RNA, 19 nt, Artificial Sequence
  Description of Artificial Sequence: Synthetic oligonucleotide
cauacggcuguaucucaug

SEQ ID NO: 1261339 - RNA, 19 nt, Artificial Sequence
  Description of Artificial Sequence: Synthetic oligonucleotide
uagacucccgauucuguau

SEQ ID NO: 1261340 - RNA, 19 nt, Artificial Sequence
  Description of Artificial Sequence: Synthetic oligonucleotide
caucggauucaagaacacc

SEQ ID NO: 1261341 - RNA, 19 nt, Artificial Sequence
  Description of Artificial Sequence: Synthetic oligonucleotide
gguucaugagcaaagccac

SEQ ID NO: 1261342 - RNA, 19 nt, Artificial Sequence
  Description of Artificial Sequence: Synthetic oligonucleotide
agaagcuucucgccugaga

SEQ ID NO: 1261343 - RNA, 19 nt, Artificial Sequence
  Description of Artificial Sequence: Synthetic oligonucleotide
uucccaguguuggucauga

SEQ ID NO: 1261344 - RNA, 19 nt, Artificial Sequence
  Description of Artificial Sequence: Synthetic oligonucleotide
acucccgauucuguauccc

SEQ ID NO: 1261345 - RNA, 19 nt, Artificial Sequence
  Description of Artificial Sequence: Synthetic oligonucleotide
ucaagcgccagcgcagagc

SEQ ID NO: 1261346 - RNA, 19 nt, Artificial Sequence
  Description of Artificial Sequence: Synthetic oligonucleotide
  modified_base (12)..(12): a, c, u, g, unknown or other
acucgaggggunaucaucu

SEQ ID NO: 1261347 - RNA, 19 nt, Artificial Sequence
  Description of Artificial Sequence: Synthetic oligonucleotide
auucagauucaugggccag

SEQ ID NO: 1261348 - RNA, 19 nt, Artificial Sequence
  Description of Artificial Sequence: Synthetic oligonucleotide
gcucguaacaugguugagg

SEQ ID NO: 1261349 - RNA, 19 nt, Artificial Sequence
  Description of Artificial Sequence: Synthetic oligonucleotide
uucaccaguccaaguaauu

SEQ ID NO: 1261350 - RNA, 19 nt, Artificial Sequence
  Description of Artificial Sequence: Synthetic oligonucleotide
ggaucauuucggcauugcc

SEQ ID NO: 1261351 - RNA, 19 nt, Artificial Sequence
  Description of Artificial Sequence: Synthetic oligonucleotide
uguggucaagcgccagcgc

SEQ ID NO: 1261352 - RNA, 19 nt, Artificial Sequence
  Description of Artificial Sequence: Synthetic oligonucleotide
ucccgaacuuacacugggc

SEQ ID NO: 1261353 - RNA, 19 nt, Artificial Sequence
  Description of Artificial Sequence: Synthetic oligonucleotide
cucugugguuagaagcuuc

SEQ ID NO: 1261354 - RNA, 19 nt, Artificial Sequence
  Description of Artificial Sequence: Synthetic oligonucleotide
  modified_base (19)..(19): a, c, u, g, unknown or other
ucggauggagcuggaaggn

SEQ ID NO: 1261355 - RNA, 19 nt, Artificial Sequence
  Description of Artificial Sequence: Synthetic oligonucleotide
uggccaaggagaucugaaa

SEQ ID NO: 1261356 - RNA, 19 nt, Artificial Sequence
  Description of Artificial Sequence: Synthetic oligonucleotide
uucuuugaugaagcaucgc

SEQ ID NO: 1261357 - RNA, 19 nt, Artificial Sequence
  Description of Artificial Sequence: Synthetic oligonucleotide
ugccgcaucugguuacuga

SEQ ID NO: 1261358 - RNA, 19 nt, Artificial Sequence
  Description of Artificial Sequence: Synthetic oligonucleotide
ucguaacaugguugaggcc

SEQ ID NO: 1261359 - RNA, 19 nt, Artificial Sequence
  Description of Artificial Sequence: Synthetic oligonucleotide
ucgaaucauugcugucugc

SEQ ID NO: 1261360 - RNA, 19 nt, Artificial Sequence
  Description of Artificial Sequence: Synthetic oligonucleotide
uacggcuguaucucauggu

SEQ ID NO: 1261361 - RNA, 19 nt, Artificial Sequence
  Description of Artificial Sequence: Synthetic oligonucleotide
agaggcucguaacaugguu

SEQ ID NO: 1261362 - RNA, 19 nt, Artificial Sequence
  Description of Artificial Sequence: Synthetic oligonucleotide
acgagugaugacauccuug

SEQ ID NO: 1261363 - RNA, 19 nt, Artificial Sequence
  Description of Artificial Sequence: Synthetic oligonucleotide
cuccaauguguagucagac

SEQ ID NO: 1261364 - RNA, 19 nt, Artificial Sequence
  Description of Artificial Sequence: Synthetic oligonucleotide
caaccagaagaugaggcca

SEQ ID NO: 1261365 - RNA, 19 nt, Artificial Sequence
  Description of Artificial Sequence: Synthetic oligonucleotide
ccauagugaauuguuacug

SEQ ID NO: 1261366 - RNA, 19 nt, Artificial Sequence
  Description of Artificial Sequence: Synthetic oligonucleotide
acugacuguugucucggau

SEQ ID NO: 1261367 - RNA, 19 nt, Artificial Sequence
  Description of Artificial Sequence: Synthetic oligonucleotide
agucagacaggcagucggg

SEQ ID NO: 1261368 - RNA, 19 nt, Artificial Sequence
  Description of Artificial Sequence: Synthetic oligonucleotide
aacuuacacugggcacccc

SEQ ID NO: 1261369 - RNA, 19 nt, Artificial Sequence
  Description of Artificial Sequence: Synthetic oligonucleotide
gcagaaaucucggcugucg

SEQ ID NO: 1261370 - RNA, 19 nt, Artificial Sequence
  Description of Artificial Sequence: Synthetic oligonucleotide
  modified_base (9)..(9): a, c, u, g, unknown or other
cgaggggunaucaucuugc

SEQ ID NO: 1261371 - RNA, 19 nt, Artificial Sequence
  Description of Artificial Sequence: Synthetic oligonucleotide
gagucgaccuucagccagg

SEQ ID NO: 1261372 - RNA, 19 nt, Artificial Sequence
  Description of Artificial Sequence: Synthetic oligonucleotide
uggggcugaaucaguuccu

SEQ ID NO: 1261373 - RNA, 19 nt, Artificial Sequence
  Description of Artificial Sequence: Synthetic oligonucleotide
uuacacugggcaccccguc

SEQ ID NO: 1261374 - RNA, 19 nt, Artificial Sequence
  Description of Artificial Sequence: Synthetic oligonucleotide
cagaguacuccaaugugua

SEQ ID NO: 1261375 - RNA, 19 nt, Artificial Sequence
  Description of Artificial Sequence: Synthetic oligonucleotide
uuucagcacgagcccugcc

SEQ ID NO: 1261376 - RNA, 19 nt, Artificial Sequence
  Description of Artificial Sequence: Synthetic oligonucleotide
  modified_base (10)..(10): a, c, u, g, unknown or other
gcuggaaggngucccuccc

SEQ ID NO: 1261377 - RNA, 19 nt, Artificial Sequence
  Description of Artificial Sequence: Synthetic oligonucleotide
ggcaagauagagucgaccu

SEQ ID NO: 1261378 - RNA, 19 nt, Artificial Sequence
  Description of Artificial Sequence: Synthetic oligonucleotide
uggcugugacaauccaaga

SEQ ID NO: 1261379 - RNA, 19 nt, Artificial Sequence
  Description of Artificial Sequence: Synthetic oligonucleotide
cauucucacgagugaugac

SEQ ID NO: 1261380 - RNA, 19 nt, Artificial Sequence
  Description of Artificial Sequence: Synthetic oligonucleotide
caccuuuguguucugggca

SEQ ID NO: 1261381 - RNA, 19 nt, Artificial Sequence
  Description of Artificial Sequence: Synthetic oligonucleotide
ggccuugugaaguccacac

SEQ ID NO: 1261382 - RNA, 19 nt, Artificial Sequence
  Description of Artificial Sequence: Synthetic oligonucleotide
aucuggcggaucauuucgg

SEQ ID NO: 1261383 - RNA, 19 nt, Artificial Sequence
  Description of Artificial Sequence: Synthetic oligonucleotide
accuggccggcccuuuccg

SEQ ID NO: 1261384 - RNA, 19 nt, Artificial Sequence
  Description of Artificial Sequence: Synthetic oligonucleotide
ggacuuucagcacgagccc

SEQ ID NO: 1261385 - RNA, 19 nt, Artificial Sequence
  Description of Artificial Sequence: Synthetic oligonucleotide
gucgaucaaccagaagaug

SEQ ID NO: 1261386 - RNA, 19 nt, Artificial Sequence
  Description of Artificial Sequence: Synthetic oligonucleotide
ugggcaagauagagucgac

SEQ ID NO: 1261387 - RNA, 19 nt, Artificial Sequence
  Description of Artificial Sequence: Synthetic oligonucleotide
cucgcucuuggagugcagc

SEQ ID NO: 1261388 - RNA, 19 nt, Artificial Sequence
  Description of Artificial Sequence: Synthetic oligonucleotide
caucgcaggauauccucca

SEQ ID NO: 1261389 - RNA, 19 nt, Artificial Sequence
  Description of Artificial Sequence: Synthetic oligonucleotide
ccaucucgaaucauugcug

SEQ ID NO: 1261390 - RNA, 19 nt, Artificial Sequence
  Description of Artificial Sequence: Synthetic oligonucleotide
acgcagacgcucugcaggu

SEQ ID NO: 1261391 - RNA, 19 nt, Artificial Sequence
  Description of Artificial Sequence: Synthetic oligonucleotide
agcagaaaucucggcuguc

SEQ ID NO: 1261392 - RNA, 19 nt, Artificial Sequence
  Description of Artificial Sequence: Synthetic oligonucleotide
guguuggucaugauuccca

SEQ ID NO: 1261393 - RNA, 19 nt, Artificial Sequence
  Description of Artificial Sequence: Synthetic oligonucleotide
aagcaucgcaggauauccu

SEQ ID NO: 1261394 - RNA, 19 nt, Artificial Sequence
  Description of Artificial Sequence: Synthetic oligonucleotide
ucgcaggauauccuccauu

SEQ ID NO: 1261395 - RNA, 19 nt, Artificial Sequence
  Description of Artificial Sequence: Synthetic oligonucleotide
caccccgucccuguggccg

SEQ ID NO: 1261396 - RNA, 19 nt, Artificial Sequence
  Description of Artificial Sequence: Synthetic oligonucleotide
acugaagaggcgacgcaga

SEQ ID NO: 1261397 - RNA, 19 nt, Artificial Sequence
  Description of Artificial Sequence: Synthetic oligonucleotide
cuguaucucaugguuuuca

SEQ ID NO: 1261398 - RNA, 19 nt, Artificial Sequence
  Description of Artificial Sequence: Synthetic oligonucleotide
guugucucggauggagcug

SEQ ID NO: 1261399 - RNA, 19 nt, Artificial Sequence
  Description of Artificial Sequence: Synthetic oligonucleotide
gggaaggcaguaaugggac

SEQ ID NO: 1261400 - RNA, 19 nt, Artificial Sequence
  Description of Artificial Sequence: Synthetic oligonucleotide
cucugccgcaucugguuac

SEQ ID NO: 1261401 - RNA, 19 nt, Artificial Sequence
  Description of Artificial Sequence: Synthetic oligonucleotide
cuucuuuauugauccaccu

SEQ ID NO: 1261402 - RNA, 19 nt, Artificial Sequence
  Description of Artificial Sequence: Synthetic oligonucleotide
ucauuucggcauugccuuc

SEQ ID NO: 1261403 - RNA, 19 nt, Artificial Sequence
  Description of Artificial Sequence: Synthetic oligonucleotide
aagaggcucguaacauggu

SEQ ID NO: 1261404 - RNA, 19 nt, Artificial Sequence
  Description of Artificial Sequence: Synthetic oligonucleotide
uauaggcuugcaggacugu

SEQ ID NO: 1261405 - RNA, 19 nt, Artificial Sequence
  Description of Artificial Sequence: Synthetic oligonucleotide
  modified_base (4)..(4): a, c, u, g, unknown or other
ggunaucaucuugccacug

SEQ ID NO: 1261406 - RNA, 19 nt, Artificial Sequence
  Description of Artificial Sequence: Synthetic oligonucleotide
acuccaauguguagucaga

SEQ ID NO: 1261407 - RNA, 19 nt, Artificial Sequence
  Description of Artificial Sequence: Synthetic oligonucleotide
cuguggccgaccaggggug

SEQ ID NO: 1261408 - RNA, 19 nt, Artificial Sequence
  Description of Artificial Sequence: Synthetic oligonucleotide
cagccucgcucuuggagug

SEQ ID NO: 1261409 - RNA, 19 nt, Artificial Sequence
  Description of Artificial Sequence: Synthetic oligonucleotide
uccccacuccacugcacac

SEQ ID NO: 1261410 - RNA, 19 nt, Artificial Sequence
  Description of Artificial Sequence: Synthetic oligonucleotide
uccgcccgugccuucccag

SEQ ID NO: 1261411 - RNA, 19 nt, Artificial Sequence
  Description of Artificial Sequence: Synthetic oligonucleotide
gguuagaagcuucucgccu

SEQ ID NO: 1261412 - RNA, 19 nt, Artificial Sequence
  Description of Artificial Sequence: Synthetic oligonucleotide
auccaccuacaguuuuaga

SEQ ID NO: 1261413 - RNA, 19 nt, Artificial Sequence
  Description of Artificial Sequence: Synthetic oligonucleotide
ucccucccacagaucgaag

SEQ ID NO: 1261414 - RNA, 19 nt, Artificial Sequence
  Description of Artificial Sequence: Synthetic oligonucleotide
uuuccgcccgugccuuccc

SEQ ID NO: 1261415 - RNA, 19 nt, Artificial Sequence
  Description of Artificial Sequence: Synthetic oligonucleotide
accagaagaugaggccauc

SEQ ID NO: 1261416 - RNA, 19 nt, Artificial Sequence
  Description of Artificial Sequence: Synthetic oligonucleotide
cuggcggaucauuucggca

SEQ ID NO: 1261417 - RNA, 19 nt, Artificial Sequence
  Description of Artificial Sequence: Synthetic oligonucleotide
gcuuucaagcggucacugc

SEQ ID NO: 1261418 - RNA, 19 nt, Artificial Sequence
  Description of Artificial Sequence: Synthetic oligonucleotide
cacauacggcuguaucuca

SEQ ID NO: 1261419 - RNA, 19 nt, Artificial Sequence
  Description of Artificial Sequence: Synthetic oligonucleotide
ggcuccauucacauacggc

SEQ ID NO: 1261420 - RNA, 19 nt, Artificial Sequence
  Description of Artificial Sequence: Synthetic oligonucleotide
uuguccaggucagcuucca

SEQ ID NO: 1261421 - RNA, 19 nt, Artificial Sequence
  Description of Artificial Sequence: Synthetic oligonucleotide
ccacagaucgaagaacaac

SEQ ID NO: 1261422 - RNA, 19 nt, Artificial Sequence
  Description of Artificial Sequence: Synthetic oligonucleotide
gcagacgcucugcagguac

SEQ ID NO: 1261423 - RNA, 19 nt, Artificial Sequence
  Description of Artificial Sequence: Synthetic oligonucleotide
ccgaacuuacacugggcac

SEQ ID NO: 1261424 - RNA, 19 nt, Artificial Sequence
  Description of Artificial Sequence: Synthetic oligonucleotide
augggauggaaaggaugcu

SEQ ID NO: 1261425 - RNA, 19 nt, Artificial Sequence
  Description of Artificial Sequence: Synthetic oligonucleotide
cacgauccucugguugugg

SEQ ID NO: 1261426 - RNA, 19 nt, Artificial Sequence
  Description of Artificial Sequence: Synthetic oligonucleotide
gaaggucgaucaaccagaa

SEQ ID NO: 1261427 - RNA, 19 nt, Artificial Sequence
  Description of Artificial Sequence: Synthetic oligonucleotide
auugauccaccuacaguuu

SEQ ID NO: 1261428 - RNA, 19 nt, Artificial Sequence
  Description of Artificial Sequence: Synthetic oligonucleotide
cagucgggguccuucagaa

SEQ ID NO: 1261429 - RNA, 19 nt, Artificial Sequence
  Description of Artificial Sequence: Synthetic oligonucleotide
cuucacggugucuucaaau

SEQ ID NO: 1261430 - RNA, 19 nt, Artificial Sequence
  Description of Artificial Sequence: Synthetic oligonucleotide
guaaugggacauccuucaa

SEQ ID NO: 1261431 - RNA, 19 nt, Artificial Sequence
  Description of Artificial Sequence: Synthetic oligonucleotide
caagaggucauugcugaua

SEQ ID NO: 1261432 - RNA, 19 nt, Artificial Sequence
  Description of Artificial Sequence: Synthetic oligonucleotide
ucugccgcaucugguuacu

SEQ ID NO: 1261433 - RNA, 19 nt, Artificial Sequence
  Description of Artificial Sequence: Synthetic oligonucleotide
auggccaaggagaucugaa

SEQ ID NO: 1261434 - RNA, 19 nt, Artificial Sequence
  Description of Artificial Sequence: Synthetic oligonucleotide
aucgcaggauauccuccau

SEQ ID NO: 1261435 - RNA, 19 nt, Artificial Sequence
  Description of Artificial Sequence: Synthetic oligonucleotide
gggcaagauagagucgacc

SEQ ID NO: 1261436 - RNA, 19 nt, Artificial Sequence
  Description of Artificial Sequence: Synthetic oligonucleotide
gggcugaaucaguuccucc

SEQ ID NO: 1261437 - RNA, 19 nt, Artificial Sequence
  Description of Artificial Sequence: Synthetic oligonucleotide
guacagggcuccauucaca

SEQ ID NO: 1261438 - RNA, 19 nt, Artificial Sequence
  Description of Artificial Sequence: Synthetic oligonucleotide
acauacggcuguaucucau

SEQ ID NO: 1261439 - RNA, 19 nt, Artificial Sequence
  Description of Artificial Sequence: Synthetic oligonucleotide
ggcccuuuccgcccgugcc

SEQ ID NO: 1261440 - RNA, 19 nt, Artificial Sequence
  Description of Artificial Sequence: Synthetic oligonucleotide
agcggucacugccccaaau

SEQ ID NO: 1261441 - RNA, 19 nt, Artificial Sequence
  Description of Artificial Sequence: Synthetic oligonucleotide
accauccaguaagucuuca

SEQ ID NO: 1261442 - RNA, 19 nt, Artificial Sequence
  Description of Artificial Sequence: Synthetic oligonucleotide
  modified_base (9)..(9): a, c, u, g, unknown or other
cuggaaggngucccuccca

SEQ ID NO: 1261443 - RNA, 19 nt, Artificial Sequence
  Description of Artificial Sequence: Synthetic oligonucleotide
  modified_base (7)..(7): a, c, u, g, unknown or other
ggaaggngucccucccaca

SEQ ID NO: 1261444 - RNA, 19 nt, Artificial Sequence
  Description of Artificial Sequence: Synthetic oligonucleotide
gcaucgcaggauauccucc

SEQ ID NO: 1261445 - RNA, 19 nt, Artificial Sequence
  Description of Artificial Sequence: Synthetic oligonucleotide
aggccuugugaaguccaca

SEQ ID NO: 1261446 - RNA, 19 nt, Artificial Sequence
  Description of Artificial Sequence: Synthetic oligonucleotide
gcaguaaugggacauccuu

SEQ ID NO: 1261447 - RNA, 19 nt, Artificial Sequence
  Description of Artificial Sequence: Synthetic oligonucleotide
gacuuucagcacgagcccu

SEQ ID NO: 1261448 - RNA, 19 nt, Artificial Sequence
  Description of Artificial Sequence: Synthetic oligonucleotide
cccgaacuuacacugggca

SEQ ID NO: 1261449 - RNA, 19 nt, Artificial Sequence
  Description of Artificial Sequence: Synthetic oligonucleotide
cuuacacugggcaccccgu

SEQ ID NO: 1261450 - RNA, 19 nt, Artificial Sequence
  Description of Artificial Sequence: Synthetic oligonucleotide
ggcaccccgucccuguggc

SEQ ID NO: 1261451 - RNA, 19 nt, Artificial Sequence
  Description of Artificial Sequence: Synthetic oligonucleotide
guacuccaauguguaguca

SEQ ID NO: 1261452 - RNA, 19 nt, Artificial Sequence
  Description of Artificial Sequence: Synthetic oligonucleotide
agcacgagcccugccacuu

SEQ ID NO: 1261453 - RNA, 19 nt, Artificial Sequence
  Description of Artificial Sequence: Synthetic oligonucleotide
ggauuaucagugacuugga

SEQ ID NO: 1261454 - RNA, 19 nt, Artificial Sequence
  Description of Artificial Sequence: Synthetic oligonucleotide
ccgacgcagggcuccaucc

SEQ ID NO: 1261455 - RNA, 19 nt, Artificial Sequence
  Description of Artificial Sequence: Synthetic oligonucleotide
  modified_base (14)..(14): a, c, u, g, unknown or other
guacucgaggggunaucau

SEQ ID NO: 1261456 - RNA, 19 nt, Artificial Sequence
  Description of Artificial Sequence: Synthetic oligonucleotide
ccagcgcagagccugcaac

SEQ ID NO: 1261457 - RNA, 19 nt, Artificial Sequence
  Description of Artificial Sequence: Synthetic oligonucleotide
gcggucacugccccaaauc

SEQ ID NO: 1261458 - RNA, 19 nt, Artificial Sequence
  Description of Artificial Sequence: Synthetic oligonucleotide
gaggccgucccaggccuug

SEQ ID NO: 1261459 - RNA, 19 nt, Artificial Sequence
  Description of Artificial Sequence: Synthetic oligonucleotide
aagcggucacugccccaaa

SEQ ID NO: 1261460 - RNA, 19 nt, Artificial Sequence
  Description of Artificial Sequence: Synthetic oligonucleotide
caaggacauucucacgagu

SEQ ID NO: 1261461 - RNA, 19 nt, Artificial Sequence
  Description of Artificial Sequence: Synthetic oligonucleotide
gaggccaucucgaaucauu

SEQ ID NO: 1261462 - RNA, 19 nt, Artificial Sequence
  Description of Artificial Sequence: Synthetic oligonucleotide
uguggccgaccagggguga

SEQ ID NO: 1261463 - RNA, 19 nt, Artificial Sequence
  Description of Artificial Sequence: Synthetic oligonucleotide
ggugacgggccgacgcagg

SEQ ID NO: 1261464 - RNA, 19 nt, Artificial Sequence
  Description of Artificial Sequence: Synthetic oligonucleotide
cugccccaaaucaaauccu

SEQ ID NO: 1261465 - RNA, 19 nt, Artificial Sequence
  Description of Artificial Sequence: Synthetic oligonucleotide
ggauggaaaggaugcugua

SEQ ID NO: 1261466 - RNA, 19 nt, Artificial Sequence
  Description of Artificial Sequence: Synthetic oligonucleotide
ccgcaucugguuacugaag

SEQ ID NO: 1261467 - RNA, 19 nt, Artificial Sequence
  Description of Artificial Sequence: Synthetic oligonucleotide
gucccucccacagaucgaa

SEQ ID NO: 1261468 - RNA, 19 nt, Artificial Sequence
  Description of Artificial Sequence: Synthetic oligonucleotide
gcgcagagccugcaacaag

SEQ ID NO: 1261469 - RNA, 19 nt, Artificial Sequence
  Description of Artificial Sequence: Synthetic oligonucleotide
cugcuugaugaugaacucu

SEQ ID NO: 1261470 - RNA, 19 nt, Artificial Sequence
  Description of Artificial Sequence: Synthetic oligonucleotide
cauuucggcauugccuucu

SEQ ID NO: 1261471 - RNA, 19 nt, Artificial Sequence
  Description of Artificial Sequence: Synthetic oligonucleotide
ggcuguaucucaugguuuu

SEQ ID NO: 1261472 - RNA, 19 nt, Artificial Sequence
  Description of Artificial Sequence: Synthetic oligonucleotide
acgagcccugccacuuuag

SEQ ID NO: 1261473 - RNA, 19 nt, Artificial Sequence
  Description of Artificial Sequence: Synthetic oligonucleotide
ugguuguggcugugacaau

SEQ ID NO: 1261474 - RNA, 19 nt, Artificial Sequence
  Description of Artificial Sequence: Synthetic oligonucleotide
gcagucgggguccuucaga

SEQ ID NO: 1261475 - RNA, 19 nt, Artificial Sequence
  Description of Artificial Sequence: Synthetic oligonucleotide
agccugcaacaagaaggcu

SEQ ID NO: 1261476 - RNA, 19 nt, Artificial Sequence
  Description of Artificial Sequence: Synthetic oligonucleotide
cccauagugaauuguuacu

SEQ ID NO: 1261477 - RNA, 19 nt, Artificial Sequence
  Description of Artificial Sequence: Synthetic oligonucleotide
guaacaugguugaggccgu

SEQ ID NO: 1261478 - RNA, 19 nt, Artificial Sequence
  Description of Artificial Sequence: Synthetic oligonucleotide
ggccgaccaggggugacgg

SEQ ID NO: 1261479 - RNA, 19 nt, Artificial Sequence
  Description of Artificial Sequence: Synthetic oligonucleotide
ccgauucuguaucccgaac

SEQ ID NO: 1261480 - RNA, 19 nt, Artificial Sequence
  Description of Artificial Sequence: Synthetic oligonucleotide
cuucacggauggaugggau

SEQ ID NO: 1261481 - RNA, 19 nt, Artificial Sequence
  Description of Artificial Sequence: Synthetic oligonucleotide
guguagucagacaggcagu

SEQ ID NO: 1261482 - RNA, 19 nt, Artificial Sequence
  Description of Artificial Sequence: Synthetic oligonucleotide
cagcagaaaucucggcugu

SEQ ID NO: 1261483 - RNA, 19 nt, Artificial Sequence
  Description of Artificial Sequence: Synthetic oligonucleotide
ggucacugccccaaaucaa

SEQ ID NO: 1261484 - RNA, 19 nt, Artificial Sequence
  Description of Artificial Sequence: Synthetic oligonucleotide
agguaccaaagaggcucgu

SEQ ID NO: 1261485 - RNA, 19 nt, Artificial Sequence
  Description of Artificial Sequence: Synthetic oligonucleotide
caaguacucugugguuaga

SEQ ID NO: 1261486 - RNA, 19 nt, Artificial Sequence
  Description of Artificial Sequence: Synthetic oligonucleotide
accccgucccuguggccga

SEQ ID NO: 1261487 - RNA, 19 nt, Artificial Sequence
  Description of Artificial Sequence: Synthetic oligonucleotide
ccggauuaucagugacuug

SEQ ID NO: 1261488 - RNA, 19 nt, Artificial Sequence
  Description of Artificial Sequence: Synthetic oligonucleotide
ggcucguaacaugguugag

SEQ ID NO: 1261489 - RNA, 19 nt, Artificial Sequence
  Description of Artificial Sequence: Synthetic oligonucleotide
ggaguccuucuuuauugau

SEQ ID NO: 1261490 - RNA, 19 nt, Artificial Sequence
  Description of Artificial Sequence: Synthetic oligonucleotide
cuugcaggacugucucccu

SEQ ID NO: 1261491 - RNA, 19 nt, Artificial Sequence
  Description of Artificial Sequence: Synthetic oligonucleotide
ggcgacgcagacgcucugc

SEQ ID NO: 1261492 - RNA, 19 nt, Artificial Sequence
  Description of Artificial Sequence: Synthetic oligonucleotide
gcgccugaggcugaacuuc

SEQ ID NO: 1261493 - RNA, 19 nt, Artificial Sequence
  Description of Artificial Sequence: Synthetic oligonucleotide
gggugacgggccgacgcag

SEQ ID NO: 1261494 - RNA, 19 nt, Artificial Sequence
  Description of Artificial Sequence: Synthetic oligonucleotide
cggucacugccccaaauca

SEQ ID NO: 1261495 - RNA, 19 nt, Artificial Sequence
  Description of Artificial Sequence: Synthetic oligonucleotide
gcuguaucucaugguuuuc

SEQ ID NO: 1261496 - RNA, 19 nt, Artificial Sequence
  Description of Artificial Sequence: Synthetic oligonucleotide
gguaccaaagaggcucgua

SEQ ID NO: 1261497 - RNA, 19 nt, Artificial Sequence
  Description of Artificial Sequence: Synthetic oligonucleotide
ccuuccggauuaucaguga

SEQ ID NO: 1261498 - RNA, 19 nt, Artificial Sequence
  Description of Artificial Sequence: Synthetic oligonucleotide
ugaggccgucccaggccuu

SEQ ID NO: 1261499 - RNA, 19 nt, Artificial Sequence
  Description of Artificial Sequence: Synthetic oligonucleotide
gcaagauagagucgaccuu

SEQ ID NO: 1261500 - RNA, 19 nt, Artificial Sequence
  Description of Artificial Sequence: Synthetic oligonucleotide
gacaauccaagaggucauu

SEQ ID NO: 1261501 - RNA, 19 nt, Artificial Sequence
  Description of Artificial Sequence: Synthetic oligonucleotide
ccccacuccacugcacacc

SEQ ID NO: 1261502 - RNA, 19 nt, Artificial Sequence
  Description of Artificial Sequence: Synthetic oligonucleotide
gcccugccacuuuagcaca

SEQ ID NO: 1261503 - RNA, 19 nt, Artificial Sequence
  Description of Artificial Sequence: Synthetic oligonucleotide
caccagauccuuccggauu

SEQ ID NO: 1261504 - RNA, 19 nt, Artificial Sequence
  Description of Artificial Sequence: Synthetic oligonucleotide
cacgagcccugccacuuua

SEQ ID NO: 1261505 - RNA, 19 nt, Artificial Sequence
  Description of Artificial Sequence: Synthetic oligonucleotide
caggggugacgggccgacg

SEQ ID NO: 1261506 - RNA, 19 nt, Artificial Sequence
  Description of Artificial Sequence: Synthetic oligonucleotide
gccugcaacaagaaggcuu

SEQ ID NO: 1261507 - RNA, 19 nt, Artificial Sequence
  Description of Artificial Sequence: Synthetic oligonucleotide
cgauucuguaucccgaacu

SEQ ID NO: 1261508 - RNA, 19 nt, Artificial Sequence
  Description of Artificial Sequence: Synthetic oligonucleotide
ggggugacgggccgacgca

SEQ ID NO: 1261509 - RNA, 19 nt, Artificial Sequence
  Description of Artificial Sequence: Synthetic oligonucleotide
cugccgcaucugguuacug

SEQ ID NO: 1261510 - RNA, 19 nt, Artificial Sequence
  Description of Artificial Sequence: Synthetic oligonucleotide
  modified_base (18)..(18): a, c, u, g, unknown or other
gcagguacucgagggguna

SEQ ID NO: 1261511 - RNA, 19 nt, Artificial Sequence
  Description of Artificial Sequence: Synthetic oligonucleotide
gcggaucauuucggcauug

SEQ ID NO: 1261512 - RNA, 19 nt, Artificial Sequence
  Description of Artificial Sequence: Synthetic oligonucleotide
ggucaagcgccagcgcaga

SEQ ID NO: 1261513 - RNA, 19 nt, Artificial Sequence
  Description of Artificial Sequence: Synthetic oligonucleotide
gccgucccaggccuuguga

SEQ ID NO: 1261514 - RNA, 19 nt, Artificial Sequence
  Description of Artificial Sequence: Synthetic oligonucleotide
cccaggccuugugaagucc

SEQ ID NO: 1261515 - RNA, 19 nt, Artificial Sequence
  Description of Artificial Sequence: Synthetic oligonucleotide
ccaaguaauucagauucau

SEQ ID NO: 1261516 - RNA, 19 nt, Artificial Sequence
  Description of Artificial Sequence: Synthetic oligonucleotide
gcucugccgcaucugguua

SEQ ID NO: 1261517 - RNA, 19 nt, Artificial Sequence
  Description of Artificial Sequence: Synthetic oligonucleotide
cccugccacuuuagcacac

SEQ ID NO: 1261518 - RNA, 19 nt, Artificial Sequence
  Description of Artificial Sequence: Synthetic oligonucleotide
cccgauucuguaucccgaa

SEQ ID NO: 1261519 - RNA, 19 nt, Artificial Sequence
  Description of Artificial Sequence: Synthetic oligonucleotide
gccgaccaggggugacggg

SEQ ID NO: 1261520 - RNA, 19 nt, Artificial Sequence
  Description of Artificial Sequence: Synthetic oligonucleotide
gccuugugaaguccacacu

SEQ ID NO: 1261521 - RNA, 19 nt, Artificial Sequence
  Description of Artificial Sequence: Synthetic oligonucleotide
cggaucauuucggcauugc

SEQ ID NO: 1261522 - RNA, 19 nt, Artificial Sequence
  Description of Artificial Sequence: Synthetic oligonucleotide
gccgacgcagggcuccauc

SEQ ID NO: 1261523 - RNA, 19 nt, Artificial Sequence
  Description of Artificial Sequence: Synthetic oligonucleotide
cauucacauacggcuguau

SEQ ID NO: 1261524 - RNA, 19 nt, Artificial Sequence
  Description of Artificial Sequence: Synthetic oligonucleotide
cccacagaucgaagaacaa

SEQ ID NO: 1261525 - RNA, 19 nt, Artificial Sequence
  Description of Artificial Sequence: Synthetic oligonucleotide
ggcaguaaugggacauccu

SEQ ID NO: 1261526 - RNA, 19 nt, Artificial Sequence
  Description of Artificial Sequence: Synthetic oligonucleotide
cugggcaccccgucccugu

SEQ ID NO: 1261527 - RNA, 19 nt, Artificial Sequence
  Description of Artificial Sequence: Synthetic oligonucleotide
ggccgucccaggccuugug

SEQ ID NO: 1261528 - RNA, 19 nt, Artificial Sequence
  Description of Artificial Sequence: Synthetic oligonucleotide
ggcucugccgcaucugguu

SEQ ID NO: 1261529 - RNA, 19 nt, Artificial Sequence
  Description of Artificial Sequence: Synthetic oligonucleotide
agugggcgccugaggcuga

SEQ ID NO: 1261530 - RNA, 19 nt, Artificial Sequence
  Description of Artificial Sequence: Synthetic oligonucleotide
cccaguguuggucaugauu

SEQ ID NO: 1261531 - RNA, 19 nt, Artificial Sequence
  Description of Artificial Sequence: Synthetic oligonucleotide
ccgucccaggccuugugaa

SEQ ID NO: 1261532 - RNA, 19 nt, Artificial Sequence
  Description of Artificial Sequence: Synthetic oligonucleotide
  modified_base (3)..(3): a, c, u, g, unknown or other
ggngucccucccacagauc

SEQ ID NO: 1261533 - RNA, 19 nt, Artificial Sequence
  Description of Artificial Sequence: Synthetic oligonucleotide
aggccgucccaggccuugu

SEQ ID NO: 1261534 - RNA, 19 nt, Artificial Sequence
  Description of Artificial Sequence: Synthetic oligonucleotide
  modified_base (11)..(11): a, c, u, g, unknown or other
cucgaggggunaucaucuu

SEQ ID NO: 1261535 - RNA, 19 nt, Artificial Sequence
  Description of Artificial Sequence: Synthetic oligonucleotide
cagauucaugggccagaau

SEQ ID NO: 1261536 - RNA, 19 nt, Artificial Sequence
  Description of Artificial Sequence: Synthetic oligonucleotide
ccgugccuucccaguguug

SEQ ID NO: 1261537 - RNA, 19 nt, Artificial Sequence
  Description of Artificial Sequence: Synthetic oligonucleotide
gcugucggggcugcgcucu

SEQ ID NO: 1261538 - RNA, 19 nt, Artificial Sequence
  Description of Artificial Sequence: Synthetic oligonucleotide
ccgcacagccucgcucuug

SEQ ID NO: 1261539 - RNA, 19 nt, Artificial Sequence
  Description of Artificial Sequence: Synthetic oligonucleotide
  modified_base (17)..(17): a, c, u, g, unknown or other
cagguacucgaggggunau

SEQ ID NO: 1261540 - RNA, 19 nt, Artificial Sequence
  Description of Artificial Sequence: Synthetic oligonucleotide
cggcccuuuccgcccgugc

SEQ ID NO: 1261541 - RNA, 19 nt, Artificial Sequence
  Description of Artificial Sequence: Synthetic oligonucleotide
ccauucacauacggcugua

SEQ ID NO: 1261542 - RNA, 19 nt, Artificial Sequence
  Description of Artificial Sequence: Synthetic oligonucleotide
cccgucccuguggccgacc

SEQ ID NO: 1261543 - RNA, 19 nt, Artificial Sequence
  Description of Artificial Sequence: Synthetic oligonucleotide
gggccgacgcagggcucca

SEQ ID NO: 1261544 - RNA, 19 nt, Artificial Sequence
  Description of Artificial Sequence: Synthetic oligonucleotide
ccggcccuuuccgcccgug

SEQ ID NO: 1261545 - RNA, 19 nt, Artificial Sequence
  Description of Artificial Sequence: Synthetic oligonucleotide
ccccgucccuguggccgac

SEQ ID NO: 1261546 - RNA, 19 nt, Artificial Sequence
  Description of Artificial Sequence: Synthetic oligonucleotide
gccgcacagccucgcucuu

SEQ ID NO: 1261547 - RNA, 19 nt, Artificial Sequence
  Description of Artificial Sequence: Synthetic oligonucleotide
cgcagacgcucugcaggua

SEQ ID NO: 1261548 - RNA, 19 nt, Artificial Sequence
  Description of Artificial Sequence: Synthetic oligonucleotide
gccggcccuuuccgcccgu

SEQ ID NO: 1261549 - RNA, 19 nt, Artificial Sequence
  Description of Artificial Sequence: Synthetic oligonucleotide
  modified_base (1)..(1): a, c, u, g, unknown or other
ngucccucccacagaucga

SEQ ID NO: 1261550 - RNA, 19 nt, Artificial Sequence
  Description of Artificial Sequence: Synthetic oligonucleotide
aauaccaugucguagaaac

SEQ ID NO: 1261551 - RNA, 19 nt, Artificial Sequence
  Description of Artificial Sequence: Synthetic oligonucleotide
aaagacuucucguugaggc

SEQ ID NO: 1261552 - RNA, 19 nt, Artificial Sequence
  Description of Artificial Sequence: Synthetic oligonucleotide
agugguaaagguuaaaggc

SEQ ID NO: 1261553 - RNA, 19 nt, Artificial Sequence
  Description of Artificial Sequence: Synthetic oligonucleotide
uuagaaaagaccaauaaac

SEQ ID NO: 1261554 - RNA, 19 nt, Artificial Sequence
  Description of Artificial Sequence: Synthetic oligonucleotide
uauacaauuagaaaagacc

SEQ ID NO: 1261555 - RNA, 19 nt, Artificial Sequence
  Description of Artificial Sequence: Synthetic oligonucleotide
aauauuuacgauuacauuu

SEQ ID NO: 1261556 - RNA, 19 nt, Artificial Sequence
  Description of Artificial Sequence: Synthetic oligonucleotide
agaaaagaccaauaaaccc

SEQ ID NO: 1261557 - RNA, 19 nt, Artificial Sequence
  Description of Artificial Sequence: Synthetic oligonucleotide
ucacauuacauucaggccg

SEQ ID NO: 1261558 - RNA, 19 nt, Artificial Sequence
  Description of Artificial Sequence: Synthetic oligonucleotide
aaaauuaccccuugggccg

SEQ ID NO: 1261559 - RNA, 19 nt, Artificial Sequence
  Description of Artificial Sequence: Synthetic oligonucleotide
uuuuaguuagccauaacag

SEQ ID NO: 1261560 - RNA, 19 nt, Artificial Sequence
  Description of Artificial Sequence: Synthetic oligonucleotide
cuugcuauaucuuaaauac

SEQ ID NO: 1261561 - RNA, 19 nt, Artificial Sequence
  Description of Artificial Sequence: Synthetic oligonucleotide
aaagguuaaaggcugagug

SEQ ID NO: 1261562 - RNA, 19 nt, Artificial Sequence
  Description of Artificial Sequence: Synthetic oligonucleotide
aaacccacuuauuagugcc

SEQ ID NO: 1261563 - RNA, 19 nt, Artificial Sequence
  Description of Artificial Sequence: Synthetic oligonucleotide
aacgggucgauccaaacgc

SEQ ID NO: 1261564 - RNA, 19 nt, Artificial Sequence
  Description of Artificial Sequence: Synthetic oligonucleotide
ugcaucuaaacccugaucc

SEQ ID NO: 1261565 - RNA, 19 nt, Artificial Sequence
  Description of Artificial Sequence: Synthetic oligonucleotide
aagagcagagguuugcugc

SEQ ID NO: 1261566 - RNA, 19 nt, Artificial Sequence
  Description of Artificial Sequence: Synthetic oligonucleotide
uaaauuuagugcuacuugg

SEQ ID NO: 1261567 - RNA, 19 nt, Artificial Sequence
  Description of Artificial Sequence: Synthetic oligonucleotide
uuuaagcuaaaauucaagc

SEQ ID NO: 1261568 - RNA, 19 nt, Artificial Sequence
  Description of Artificial Sequence: Synthetic oligonucleotide
uuaguuagccauaacaggc

SEQ ID NO: 1261569 - RNA, 19 nt, Artificial Sequence
  Description of Artificial Sequence: Synthetic oligonucleotide
ucuuaaauacuguaagagg

SEQ ID NO: 1261570 - RNA, 19 nt, Artificial Sequence
  Description of Artificial Sequence: Synthetic oligonucleotide
uauacagucaguauaaaau

SEQ ID NO: 1261571 - RNA, 19 nt, Artificial Sequence
  Description of Artificial Sequence: Synthetic oligonucleotide
gauccaaacgcuaagaucc

SEQ ID NO: 1261572 - RNA, 19 nt, Artificial Sequence
  Description of Artificial Sequence: Synthetic oligonucleotide
acuuguacgauacauguuc

SEQ ID NO: 1261573 - RNA, 19 nt, Artificial Sequence
  Description of Artificial Sequence: Synthetic oligonucleotide
ugcuauaucuuaaauacug

SEQ ID NO: 1261574 - RNA, 19 nt, Artificial Sequence
  Description of Artificial Sequence: Synthetic oligonucleotide
uuuaguuagccauaacagg

SEQ ID NO: 1261575 - RNA, 19 nt, Artificial Sequence
  Description of Artificial Sequence: Synthetic oligonucleotide
uuaagcuaaaauucaagcc

SEQ ID NO: 1261576 - RNA, 19 nt, Artificial Sequence
  Description of Artificial Sequence: Synthetic oligonucleotide
auaucuuaaauacuguaag

SEQ ID NO: 1261577 - RNA, 19 nt, Artificial Sequence
  Description of Artificial Sequence: Synthetic oligonucleotide
aaauccuguacacaauuuc

SEQ ID NO: 1261578 - RNA, 19 nt, Artificial Sequence
  Description of Artificial Sequence: Synthetic oligonucleotide
acaacaugaaagcugcugc

SEQ ID NO: 1261579 - RNA, 19 nt, Artificial Sequence
  Description of Artificial Sequence: Synthetic oligonucleotide
uauauauauccucugauau

SEQ ID NO: 1261580 - RNA, 19 nt, Artificial Sequence
  Description of Artificial Sequence: Synthetic oligonucleotide
uacgauuacauuuucuucc

SEQ ID NO: 1261581 - RNA, 19 nt, Artificial Sequence
  Description of Artificial Sequence: Synthetic oligonucleotide
uagaaaagaccaauaaacc

SEQ ID NO: 1261582 - RNA, 19 nt, Artificial Sequence
  Description of Artificial Sequence: Synthetic oligonucleotide
uuugguagagccaaacuug

SEQ ID NO: 1261583 - RNA, 19 nt, Artificial Sequence
  Description of Artificial Sequence: Synthetic oligonucleotide
uacuaaauuaaauuauaca

SEQ ID NO: 1261584 - RNA, 19 nt, Artificial Sequence
  Description of Artificial Sequence: Synthetic oligonucleotide
ugcauuuuaacuuguacga

SEQ ID NO: 1261585 - RNA, 19 nt, Artificial Sequence
  Description of Artificial Sequence: Synthetic oligonucleotide
uuaaauacuguaagaggcc

SEQ ID NO: 1261586 - RNA, 19 nt, Artificial Sequence
  Description of Artificial Sequence: Synthetic oligonucleotide
aauuaauauuuacgauuac

SEQ ID NO: 1261587 - RNA, 19 nt, Artificial Sequence
  Description of Artificial Sequence: Synthetic oligonucleotide
uguauccuuacuauaagcu

SEQ ID NO: 1261588 - RNA, 19 nt, Artificial Sequence
  Description of Artificial Sequence: Synthetic oligonucleotide
aauguauccuuacuauaag

SEQ ID NO: 1261589 - RNA, 19 nt, Artificial Sequence
  Description of Artificial Sequence: Synthetic oligonucleotide
acauagagcaccuucacug

SEQ ID NO: 1261590 - RNA, 19 nt, Artificial Sequence
  Description of Artificial Sequence: Synthetic oligonucleotide
accucaaacgggucgaucc

SEQ ID NO: 1261591 - RNA, 19 nt, Artificial Sequence
  Description of Artificial Sequence: Synthetic oligonucleotide
auguauccuuacuauaagc

SEQ ID NO: 1261592 - RNA, 19 nt, Artificial Sequence
  Description of Artificial Sequence: Synthetic oligonucleotide
aguaugaaauaauaaauuu

SEQ ID NO: 1261593 - RNA, 19 nt, Artificial Sequence
  Description of Artificial Sequence: Synthetic oligonucleotide
aaacgggucgauccaaacg

SEQ ID NO: 1261594 - RNA, 19 nt, Artificial Sequence
  Description of Artificial Sequence: Synthetic oligonucleotide
aagacuucucguugaggcc

SEQ ID NO: 1261595 - RNA, 19 nt, Artificial Sequence
  Description of Artificial Sequence: Synthetic oligonucleotide
aaauucaagccaucuacga

SEQ ID NO: 1261596 - RNA, 19 nt, Artificial Sequence
  Description of Artificial Sequence: Synthetic oligonucleotide
ugguaggaaaccucaaacg

SEQ ID NO: 1261597 - RNA, 19 nt, Artificial Sequence
  Description of Artificial Sequence: Synthetic oligonucleotide
uaacuuguacgauacaugu

SEQ ID NO: 1261598 - RNA, 19 nt, Artificial Sequence
  Description of Artificial Sequence: Synthetic oligonucleotide
acuuaugggcaugaaaacc

SEQ ID NO: 1261599 - RNA, 19 nt, Artificial Sequence
  Description of Artificial Sequence: Synthetic oligonucleotide
uuuagugcuacuuggauuu

SEQ ID NO: 1261600 - RNA, 19 nt, Artificial Sequence
  Description of Artificial Sequence: Synthetic oligonucleotide
aaauuaauauuuacgauua

SEQ ID NO: 1261601 - RNA, 19 nt, Artificial Sequence
  Description of Artificial Sequence: Synthetic oligonucleotide
uuuacgauuacauuuucuu

SEQ ID NO: 1261602 - RNA, 19 nt, Artificial Sequence
  Description of Artificial Sequence: Synthetic oligonucleotide
auaguugaugucuuuaaga

SEQ ID NO: 1261603 - RNA, 19 nt, Artificial Sequence
  Description of Artificial Sequence: Synthetic oligonucleotide
agaaaugcaauaccauguc

SEQ ID NO: 1261604 - RNA, 19 nt, Artificial Sequence
  Description of Artificial Sequence: Synthetic oligonucleotide
guagagccaaacuuggugg

SEQ ID NO: 1261605 - RNA, 19 nt, Artificial Sequence
  Description of Artificial Sequence: Synthetic oligonucleotide
uuuucaccaauuugguagg

SEQ ID NO: 1261606 - RNA, 19 nt, Artificial Sequence
  Description of Artificial Sequence: Synthetic oligonucleotide
uacugcauguuauuuaagc

SEQ ID NO: 1261607 - RNA, 19 nt, Artificial Sequence
  Description of Artificial Sequence: Synthetic oligonucleotide
uucagaauaguugaugucu

SEQ ID NO: 1261608 - RNA, 19 nt, Artificial Sequence
  Description of Artificial Sequence: Synthetic oligonucleotide
uuuucaggguaccagugcc

SEQ ID NO: 1261609 - RNA, 19 nt, Artificial Sequence
  Description of Artificial Sequence: Synthetic oligonucleotide
aaacgcuaagauccugugg

SEQ ID NO: 1261610 - RNA, 19 nt, Artificial Sequence
  Description of Artificial Sequence: Synthetic oligonucleotide
uuuugguagagccaaacuu

SEQ ID NO: 1261611 - RNA, 19 nt, Artificial Sequence
  Description of Artificial Sequence: Synthetic oligonucleotide
gguaggaaaccucaaacgg

SEQ ID NO: 1261612 - RNA, 19 nt, Artificial Sequence
  Description of Artificial Sequence: Synthetic oligonucleotide
aucuacgaaagacuucucg

SEQ ID NO: 1261613 - RNA, 19 nt, Artificial Sequence
  Description of Artificial Sequence: Synthetic oligonucleotide
augucuuuaagauggauau

SEQ ID NO: 1261614 - RNA, 19 nt, Artificial Sequence
  Description of Artificial Sequence: Synthetic oligonucleotide
ugcauguuauuuaagcuaa

SEQ ID NO: 1261615 - RNA, 19 nt, Artificial Sequence
  Description of Artificial Sequence: Synthetic oligonucleotide
aaaugcaauaccaugucgu

SEQ ID NO: 1261616 - RNA, 19 nt, Artificial Sequence
  Description of Artificial Sequence: Synthetic oligonucleotide
uguacacaauuucagaaua

SEQ ID NO: 1261617 - RNA, 19 nt, Artificial Sequence
  Description of Artificial Sequence: Synthetic oligonucleotide
agaaguacgcgcuaccuug

SEQ ID NO: 1261618 - RNA, 19 nt, Artificial Sequence
  Description of Artificial Sequence: Synthetic oligonucleotide
accaauuugguaggaaacc

SEQ ID NO: 1261619 - RNA, 19 nt, Artificial Sequence
  Description of Artificial Sequence: Synthetic oligonucleotide
aauuuagugcuacuuggau

SEQ ID NO: 1261620 - RNA, 19 nt, Artificial Sequence
  Description of Artificial Sequence: Synthetic oligonucleotide
ucuacgaaagacuucucgu

SEQ ID NO: 1261621 - RNA, 19 nt, Artificial Sequence
  Description of Artificial Sequence: Synthetic oligonucleotide
uuaagaagucuuucaagcu

SEQ ID NO: 1261622 - RNA, 19 nt, Artificial Sequence
  Description of Artificial Sequence: Synthetic oligonucleotide
uauauauccucugauauuu

SEQ ID NO: 1261623 - RNA, 19 nt, Artificial Sequence
  Description of Artificial Sequence: Synthetic oligonucleotide
uucacauuacauucaggcc

SEQ ID NO: 1261624 - RNA, 19 nt, Artificial Sequence
  Description of Artificial Sequence: Synthetic oligonucleotide
ugauuggagaaguacgcgc

SEQ ID NO: 1261625 - RNA, 19 nt, Artificial Sequence
  Description of Artificial Sequence: Synthetic oligonucleotide
uacgaaagacuucucguug

SEQ ID NO: 1261626 - RNA, 19 nt, Artificial Sequence
  Description of Artificial Sequence: Synthetic oligonucleotide
uaguugaugucuuuaagau

SEQ ID NO: 1261627 - RNA, 19 nt, Artificial Sequence
  Description of Artificial Sequence: Synthetic oligonucleotide
aauucaagccaucuacgaa

SEQ ID NO: 1261628 - RNA, 19 nt, Artificial Sequence
  Description of Artificial Sequence: Synthetic oligonucleotide
uauccuuacuauaagcuuu

SEQ ID NO: 1261629 - RNA, 19 nt, Artificial Sequence
  Description of Artificial Sequence: Synthetic oligonucleotide
cagugguaaagguuaaagg

SEQ ID NO: 1261630 - RNA, 19 nt, Artificial Sequence
  Description of Artificial Sequence: Synthetic oligonucleotide
aauuugguaggaaaccuca

SEQ ID NO: 1261631 - RNA, 19 nt, Artificial Sequence
  Description of Artificial Sequence: Synthetic oligonucleotide
uacagucaguauaaaauaa

SEQ ID NO: 1261632 - RNA, 19 nt, Artificial Sequence
  Description of Artificial Sequence: Synthetic oligonucleotide
auucaagccaucuacgaaa

SEQ ID NO: 1261633 - RNA, 19 nt, Artificial Sequence
  Description of Artificial Sequence: Synthetic oligonucleotide
uugaauguauccuuacuau

SEQ ID NO: 1261634 - RNA, 19 nt, Artificial Sequence
  Description of Artificial Sequence: Synthetic oligonucleotide
uucaagccaucuacgaaag

SEQ ID NO: 1261635 - RNA, 19 nt, Artificial Sequence
  Description of Artificial Sequence: Synthetic oligonucleotide
acugcauguuauuuaagcu

SEQ ID NO: 1261636 - RNA, 19 nt, Artificial Sequence
  Description of Artificial Sequence: Synthetic oligonucleotide
aaggcauuacuguacugga

SEQ ID NO: 1261637 - RNA, 19 nt, Artificial Sequence
  Description of Artificial Sequence: Synthetic oligonucleotide
cugguuagaauacugcaug

SEQ ID NO: 1261638 - RNA, 19 nt, Artificial Sequence
  Description of Artificial Sequence: Synthetic oligonucleotide
aacccugauccuuuguaug

SEQ ID NO: 1261639 - RNA, 19 nt, Artificial Sequence
  Description of Artificial Sequence: Synthetic oligonucleotide
uaaacccacuuauuagugc

SEQ ID NO: 1261640 - RNA, 19 nt, Artificial Sequence
  Description of Artificial Sequence: Synthetic oligonucleotide
ucguucacauuacauucag

SEQ ID NO: 1261641 - RNA, 19 nt, Artificial Sequence
  Description of Artificial Sequence: Synthetic oligonucleotide
uguaaccaagcuugaaugu

SEQ ID NO: 1261642 - RNA, 19 nt, Artificial Sequence
  Description of Artificial Sequence: Synthetic oligonucleotide
uuugguaggaaaccucaaa

SEQ ID NO: 1261643 - RNA, 19 nt, Artificial Sequence
  Description of Artificial Sequence: Synthetic oligonucleotide
guaggaaaccucaaacggg

SEQ ID NO: 1261644 - RNA, 19 nt, Artificial Sequence
  Description of Artificial Sequence: Synthetic oligonucleotide
auacagagagugcauggag

SEQ ID NO: 1261645 - RNA, 19 nt, Artificial Sequence
  Description of Artificial Sequence: Synthetic oligonucleotide
uuacgauuacauuuucuuc

SEQ ID NO: 1261646 - RNA, 19 nt, Artificial Sequence
  Description of Artificial Sequence: Synthetic oligonucleotide
aaugcaauaccaugucgua

SEQ ID NO: 1261647 - RNA, 19 nt, Artificial Sequence
  Description of Artificial Sequence: Synthetic oligonucleotide
ucuggguuaaagcuguuuu

SEQ ID NO: 1261648 - RNA, 19 nt, Artificial Sequence
  Description of Artificial Sequence: Synthetic oligonucleotide
auauccucugauauuuuac

SEQ ID NO: 1261649 - RNA, 19 nt, Artificial Sequence
  Description of Artificial Sequence: Synthetic oligonucleotide
aauaauaaauuuagugcua

SEQ ID NO: 1261650 - RNA, 19 nt, Artificial Sequence
  Description of Artificial Sequence: Synthetic oligonucleotide
uggcagauugccucgaaca

SEQ ID NO: 1261651 - RNA, 19 nt, Artificial Sequence
  Description of Artificial Sequence: Synthetic oligonucleotide
ugcugguuagaauacugca

SEQ ID NO: 1261652 - RNA, 19 nt, Artificial Sequence
  Description of Artificial Sequence: Synthetic oligonucleotide
uguauggcuuuucagggua

SEQ ID NO: 1261653 - RNA, 19 nt, Artificial Sequence
  Description of Artificial Sequence: Synthetic oligonucleotide
agguugauuggagaaguac

SEQ ID NO: 1261654 - RNA, 19 nt, Artificial Sequence
  Description of Artificial Sequence: Synthetic oligonucleotide
ucaagucugcauagcugcg

SEQ ID NO: 1261655 - RNA, 19 nt, Artificial Sequence
  Description of Artificial Sequence: Synthetic oligonucleotide
ucaccaauuugguaggaaa

SEQ ID NO: 1261656 - RNA, 19 nt, Artificial Sequence
  Description of Artificial Sequence: Synthetic oligonucleotide
guacuaaauuaaauuauac

SEQ ID NO: 1261657 - RNA, 19 nt, Artificial Sequence
  Description of Artificial Sequence: Synthetic oligonucleotide
aaacccugauccuuuguau

SEQ ID NO: 1261658 - RNA, 19 nt, Artificial Sequence
  Description of Artificial Sequence: Synthetic oligonucleotide
aacaugaaagcugcugcug

SEQ ID NO: 1261659 - RNA, 19 nt, Artificial Sequence
  Description of Artificial Sequence: Synthetic oligonucleotide
gauccuguggcagauugcc

SEQ ID NO: 1261660 - RNA, 19 nt, Artificial Sequence
  Description of Artificial Sequence: Synthetic oligonucleotide
uuaugggcaugaaaaccug

SEQ ID NO: 1261661 - RNA, 19 nt, Artificial Sequence
  Description of Artificial Sequence: Synthetic oligonucleotide
gaggccgggucacuuaugg

SEQ ID NO: 1261662 - RNA, 19 nt, Artificial Sequence
  Description of Artificial Sequence: Synthetic oligonucleotide
uaguuagccauaacaggcu

SEQ ID NO: 1261663 - RNA, 19 nt, Artificial Sequence
  Description of Artificial Sequence: Synthetic oligonucleotide
acagagagugcauggagga

SEQ ID NO: 1261664 - RNA, 19 nt, Artificial Sequence
  Description of Artificial Sequence: Synthetic oligonucleotide
gaccgaagggaggugaugg

SEQ ID NO: 1261665 - RNA, 19 nt, Artificial Sequence
  Description of Artificial Sequence: Synthetic oligonucleotide
cuaccuugcugcuacgccc

SEQ ID NO: 1261666 - RNA, 19 nt, Artificial Sequence
  Description of Artificial Sequence: Synthetic oligonucleotide
uaaacccugauccuuugua

SEQ ID NO: 1261667 - RNA, 19 nt, Artificial Sequence
  Description of Artificial Sequence: Synthetic oligonucleotide
uguacgauacauguucuuc

SEQ ID NO: 1261668 - RNA, 19 nt, Artificial Sequence
  Description of Artificial Sequence: Synthetic oligonucleotide
uccucugauauuuuacaaa

SEQ ID NO: 1261669 - RNA, 19 nt, Artificial Sequence
  Description of Artificial Sequence: Synthetic oligonucleotide
ggaaaccucaaacgggucg

SEQ ID NO: 1261670 - RNA, 19 nt, Artificial Sequence
  Description of Artificial Sequence: Synthetic oligonucleotide
agcagagguuugcugcugc

SEQ ID NO: 1261671 - RNA, 19 nt, Artificial Sequence
  Description of Artificial Sequence: Synthetic oligonucleotide
uccuguacacaauuucaga

SEQ ID NO: 1261672 - RNA, 19 nt, Artificial Sequence
  Description of Artificial Sequence: Synthetic oligonucleotide
guuagaauacugcauguua

SEQ ID NO: 1261673 - RNA, 19 nt, Artificial Sequence
  Description of Artificial Sequence: Synthetic oligonucleotide
uugcuauaucuuaaauacu

SEQ ID NO: 1261674 - RNA, 19 nt, Artificial Sequence
  Description of Artificial Sequence: Synthetic oligonucleotide
uaugcaucuaaacccugau

SEQ ID NO: 1261675 - RNA, 19 nt, Artificial Sequence
  Description of Artificial Sequence: Synthetic oligonucleotide
uguccuugcuauaucuuaa

SEQ ID NO: 1261676 - RNA, 19 nt, Artificial Sequence
  Description of Artificial Sequence: Synthetic oligonucleotide
uaccaugucguagaaacaa

SEQ ID NO: 1261677 - RNA, 19 nt, Artificial Sequence
  Description of Artificial Sequence: Synthetic oligonucleotide
uauuuacgauuacauuuuc

SEQ ID NO: 1261678 - RNA, 19 nt, Artificial Sequence
  Description of Artificial Sequence: Synthetic oligonucleotide
caccaauuugguaggaaac

SEQ ID NO: 1261679 - RNA, 19 nt, Artificial Sequence
  Description of Artificial Sequence: Synthetic oligonucleotide
guacgcgcuaccuugcugc

SEQ ID NO: 1261680 - RNA, 19 nt, Artificial Sequence
  Description of Artificial Sequence: Synthetic oligonucleotide
aguuagccauaacaggcug

SEQ ID NO: 1261681 - RNA, 19 nt, Artificial Sequence
  Description of Artificial Sequence: Synthetic oligonucleotide
agccauaacaggcuggaau

SEQ ID NO: 1261682 - RNA, 19 nt, Artificial Sequence
  Description of Artificial Sequence: Synthetic oligonucleotide
ugacacgucuccugggaag

SEQ ID NO: 1261683 - RNA, 19 nt, Artificial Sequence
  Description of Artificial Sequence: Synthetic oligonucleotide
augcaucuaaacccugauc

SEQ ID NO: 1261684 - RNA, 19 nt, Artificial Sequence
  Description of Artificial Sequence: Synthetic oligonucleotide
uguugacacgucuccuggg

SEQ ID NO: 1261685 - RNA, 19 nt, Artificial Sequence
  Description of Artificial Sequence: Synthetic oligonucleotide
uucuccccgacauguaugc

SEQ ID NO: 1261686 - RNA, 19 nt, Artificial Sequence
  Description of Artificial Sequence: Synthetic oligonucleotide
acgauuacauuuucuucca

SEQ ID NO: 1261687 - RNA, 19 nt, Artificial Sequence
  Description of Artificial Sequence: Synthetic oligonucleotide
uguaugcaucuaaacccug

SEQ ID NO: 1261688 - RNA, 19 nt, Artificial Sequence
  Description of Artificial Sequence: Synthetic oligonucleotide
cuugguuggcaaaugaaaa

SEQ ID NO: 1261689 - RNA, 19 nt, Artificial Sequence
  Description of Artificial Sequence: Synthetic oligonucleotide
cuguaagaggccauaucug

SEQ ID NO: 1261690 - RNA, 19 nt, Artificial Sequence
  Description of Artificial Sequence: Synthetic oligonucleotide
ucguugaggccuccguagg

SEQ ID NO: 1261691 - RNA, 19 nt, Artificial Sequence
  Description of Artificial Sequence: Synthetic oligonucleotide
uccaaaccacucucuuugg

SEQ ID NO: 1261692 - RNA, 19 nt, Artificial Sequence
  Description of Artificial Sequence: Synthetic oligonucleotide
agaccaauaaacccacuua

SEQ ID NO: 1261693 - RNA, 19 nt, Artificial Sequence
  Description of Artificial Sequence: Synthetic oligonucleotide
aaauguugacacgucuccu

SEQ ID NO: 1261694 - RNA, 19 nt, Artificial Sequence
  Description of Artificial Sequence: Synthetic oligonucleotide
auaaacccacuuauuagug

SEQ ID NO: 1261695 - RNA, 19 nt, Artificial Sequence
  Description of Artificial Sequence: Synthetic oligonucleotide
uagagccaaacuugguggc

SEQ ID NO: 1261696 - RNA, 19 nt, Artificial Sequence
  Description of Artificial Sequence: Synthetic oligonucleotide
gaugucuuuaagauggaua

SEQ ID NO: 1261697 - RNA, 19 nt, Artificial Sequence
  Description of Artificial Sequence: Synthetic oligonucleotide
cucguugaggccuccguag

SEQ ID NO: 1261698 - RNA, 19 nt, Artificial Sequence
  Description of Artificial Sequence: Synthetic oligonucleotide
auauuuacgauuacauuuu

SEQ ID NO: 1261699 - RNA, 19 nt, Artificial Sequence
  Description of Artificial Sequence: Synthetic oligonucleotide
cuuaugggcaugaaaaccu

SEQ ID NO: 1261700 - RNA, 19 nt, Artificial Sequence
  Description of Artificial Sequence: Synthetic oligonucleotide
ucgauccaaacgcuaagau

SEQ ID NO: 1261701 - RNA, 19 nt, Artificial Sequence
  Description of Artificial Sequence: Synthetic oligonucleotide
ggucguucacauuacauuc

SEQ ID NO: 1261702 - RNA, 19 nt, Artificial Sequence
  Description of Artificial Sequence: Synthetic oligonucleotide
acgaaagacuucucguuga

SEQ ID NO: 1261703 - RNA, 19 nt, Artificial Sequence
  Description of Artificial Sequence: Synthetic oligonucleotide
ucuaaacccugauccuuug

SEQ ID NO: 1261704 - RNA, 19 nt, Artificial Sequence
  Description of Artificial Sequence: Synthetic oligonucleotide
cacuuaugggcaugaaaac

SEQ ID NO: 1261705 - RNA, 19 nt, Artificial Sequence
  Description of Artificial Sequence: Synthetic oligonucleotide
uucaggaggucguucacau

SEQ ID NO: 1261706 - RNA, 19 nt, Artificial Sequence
  Description of Artificial Sequence: Synthetic oligonucleotide
agguuaaggggccuuggca

SEQ ID NO: 1261707 - RNA, 19 nt, Artificial Sequence
  Description of Artificial Sequence: Synthetic oligonucleotide
cauuuuaacuuguacgaua

SEQ ID NO: 1261708 - RNA, 19 nt, Artificial Sequence
  Description of Artificial Sequence: Synthetic oligonucleotide
uugaggccuccguaggccg

SEQ ID NO: 1261709 - RNA, 19 nt, Artificial Sequence
  Description of Artificial Sequence: Synthetic oligonucleotide
ugggccucuggguuaaagc

SEQ ID NO: 1261710 - RNA, 19 nt, Artificial Sequence
  Description of Artificial Sequence: Synthetic oligonucleotide
ggcauugggagaaagagca

SEQ ID NO: 1261711 - RNA, 19 nt, Artificial Sequence
  Description of Artificial Sequence: Synthetic oligonucleotide
guaggccgcaaacacauca

SEQ ID NO: 1261712 - RNA, 19 nt, Artificial Sequence
  Description of Artificial Sequence: Synthetic oligonucleotide
ugcccuucauacuucuucu

SEQ ID NO: 1261713 - RNA, 19 nt, Artificial Sequence
  Description of Artificial Sequence: Synthetic oligonucleotide
cucgcauccauucucauua

SEQ ID NO: 1261714 - RNA, 19 nt, Artificial Sequence
  Description of Artificial Sequence: Synthetic oligonucleotide
aggucguucacauuacauu

SEQ ID NO: 1261715 - RNA, 19 nt, Artificial Sequence
  Description of Artificial Sequence: Synthetic oligonucleotide
uagaauacugcauguuauu

SEQ ID NO: 1261716 - RNA, 19 nt, Artificial Sequence
  Description of Artificial Sequence: Synthetic oligonucleotide
cauuacuguacuggagagg

SEQ ID NO: 1261717 - RNA, 19 nt, Artificial Sequence
  Description of Artificial Sequence: Synthetic oligonucleotide
guaaagguuaaaggcugag

SEQ ID NO: 1261718 - RNA, 19 nt, Artificial Sequence
  Description of Artificial Sequence: Synthetic oligonucleotide
guuagccauaacaggcugg

SEQ ID NO: 1261719 - RNA, 19 nt, Artificial Sequence
  Description of Artificial Sequence: Synthetic oligonucleotide
caaacgcuaagauccugug

SEQ ID NO: 1261720 - RNA, 19 nt, Artificial Sequence
  Description of Artificial Sequence: Synthetic oligonucleotide
guaagaggccauaucugag

SEQ ID NO: 1261721 - RNA, 19 nt, Artificial Sequence
  Description of Artificial Sequence: Synthetic oligonucleotide
uuaccccuugggccgaugc

SEQ ID NO: 1261722 - RNA, 19 nt, Artificial Sequence
  Description of Artificial Sequence: Synthetic oligonucleotide
uccuugcuauaucuuaaau

SEQ ID NO: 1261723 - RNA, 19 nt, Artificial Sequence
  Description of Artificial Sequence: Synthetic oligonucleotide
gagguuaaggggccuuggc

SEQ ID NO: 1261724 - RNA, 19 nt, Artificial Sequence
  Description of Artificial Sequence: Synthetic oligonucleotide
gaaaccucaaacgggucga

SEQ ID NO: 1261725 - RNA, 19 nt, Artificial Sequence
  Description of Artificial Sequence: Synthetic oligonucleotide
uccguaggccgcaaacaca

SEQ ID NO: 1261726 - RNA, 19 nt, Artificial Sequence
  Description of Artificial Sequence: Synthetic oligonucleotide
gaccggggcaugaagguag

SEQ ID NO: 1261727 - RNA, 19 nt, Artificial Sequence
  Description of Artificial Sequence: Synthetic oligonucleotide
uuugcugcugcugcugcug

SEQ ID NO: 1261728 - RNA, 19 nt, Artificial Sequence
  Description of Artificial Sequence: Synthetic oligonucleotide
auguccuugcuauaucuua

SEQ ID NO: 1261729 - RNA, 19 nt, Artificial Sequence
  Description of Artificial Sequence: Synthetic oligonucleotide
uuguccaacucgcauccau

SEQ ID NO: 1261730 - RNA, 19 nt, Artificial Sequence
  Description of Artificial Sequence: Synthetic oligonucleotide
auagagcaccuucacuggu

SEQ ID NO: 1261731 - RNA, 19 nt, Artificial Sequence
  Description of Artificial Sequence: Synthetic oligonucleotide
agaauacugcauguuauuu

SEQ ID NO: 1261732 - RNA, 19 nt, Artificial Sequence
  Description of Artificial Sequence: Synthetic oligonucleotide
auguaugcaucuaaacccu

SEQ ID NO: 1261733 - RNA, 19 nt, Artificial Sequence
  Description of Artificial Sequence: Synthetic oligonucleotide
ucugcauagcugcgcuacc

SEQ ID NO: 1261734 - RNA, 19 nt, Artificial Sequence
  Description of Artificial Sequence: Synthetic oligonucleotide
uagagcaccuucacugguc

SEQ ID NO: 1261735 - RNA, 19 nt, Artificial Sequence
  Description of Artificial Sequence: Synthetic oligonucleotide
ucaaacgggucgauccaaa

SEQ ID NO: 1261736 - RNA, 19 nt, Artificial Sequence
  Description of Artificial Sequence: Synthetic oligonucleotide
aguggaccggggcaugaag

SEQ ID NO: 1261737 - RNA, 19 nt, Artificial Sequence
  Description of Artificial Sequence: Synthetic oligonucleotide
uuacauucaggccgagguu

SEQ ID NO: 1261738 - RNA, 19 nt, Artificial Sequence
  Description of Artificial Sequence: Synthetic oligonucleotide
aaccucaaacgggucgauc

SEQ ID NO: 1261739 - RNA, 19 nt, Artificial Sequence
  Description of Artificial Sequence: Synthetic oligonucleotide
uuaaggggccuuggcauug

SEQ ID NO: 1261740 - RNA, 19 nt, Artificial Sequence
  Description of Artificial Sequence: Synthetic oligonucleotide
gcagugguaaagguuaaag

SEQ ID NO: 1261741 - RNA, 19 nt, Artificial Sequence
  Description of Artificial Sequence: Synthetic oligonucleotide
uucucguugaggccuccgu

SEQ ID NO: 1261742 - RNA, 19 nt, Artificial Sequence
  Description of Artificial Sequence: Synthetic oligonucleotide
cagucaguauaaaauaacu

SEQ ID NO: 1261743 - RNA, 19 nt, Artificial Sequence
  Description of Artificial Sequence: Synthetic oligonucleotide
cugggaagcuuauuguaca

SEQ ID NO: 1261744 - RNA, 19 nt, Artificial Sequence
  Description of Artificial Sequence: Synthetic oligonucleotide
cacauuacauucaggccga

SEQ ID NO: 1261745 - RNA, 19 nt, Artificial Sequence
  Description of Artificial Sequence: Synthetic oligonucleotide
uccccgacauguaugcauc

SEQ ID NO: 1261746 - RNA, 19 nt, Artificial Sequence
  Description of Artificial Sequence: Synthetic oligonucleotide
cuccguaggccgcaaacac

SEQ ID NO: 1261747 - RNA, 19 nt, Artificial Sequence
  Description of Artificial Sequence: Synthetic oligonucleotide
guugacacgucuccuggga

SEQ ID NO: 1261748 - RNA, 19 nt, Artificial Sequence
  Description of Artificial Sequence: Synthetic oligonucleotide
caaacgggucgauccaaac

SEQ ID NO: 1261749 - RNA, 19 nt, Artificial Sequence
  Description of Artificial Sequence: Synthetic oligonucleotide
caggaggucguucacauua

SEQ ID NO: 1261750 - RNA, 19 nt, Artificial Sequence
  Description of Artificial Sequence: Synthetic oligonucleotide
aaguacgcgcuaccuugcu

SEQ ID NO: 1261751 - RNA, 19 nt, Artificial Sequence
  Description of Artificial Sequence: Synthetic oligonucleotide
aguacgcgcuaccuugcug

SEQ ID NO: 1261752 - RNA, 19 nt, Artificial Sequence
  Description of Artificial Sequence: Synthetic oligonucleotide
gaguauacuuuaaaauaua

SEQ ID NO: 1261753 - RNA, 19 nt, Artificial Sequence
  Description of Artificial Sequence: Synthetic oligonucleotide
guacgauacauguucuucu

SEQ ID NO: 1261754 - RNA, 19 nt, Artificial Sequence
  Description of Artificial Sequence: Synthetic oligonucleotide
uggaccggggcaugaaggu

SEQ ID NO: 1261755 - RNA, 19 nt, Artificial Sequence
  Description of Artificial Sequence: Synthetic oligonucleotide
gucacuuaugggcaugaaa

SEQ ID NO: 1261756 - RNA, 19 nt, Artificial Sequence
  Description of Artificial Sequence: Synthetic oligonucleotide
ugcugucacagaucacugu

SEQ ID NO: 1261757 - RNA, 19 nt, Artificial Sequence
  Description of Artificial Sequence: Synthetic oligonucleotide
uaggccgcaaacacaucaa

SEQ ID NO: 1261758 - RNA, 19 nt, Artificial Sequence
  Description of Artificial Sequence: Synthetic oligonucleotide
cagcagagugaccgaaggg

SEQ ID NO: 1261759 - RNA, 19 nt, Artificial Sequence
  Description of Artificial Sequence: Synthetic oligonucleotide
ucucguugaggccuccgua

SEQ ID NO: 1261760 - RNA, 19 nt, Artificial Sequence
  Description of Artificial Sequence: Synthetic oligonucleotide
cuuauuguacaaguaugaa

SEQ ID NO: 1261761 - RNA, 19 nt, Artificial Sequence
  Description of Artificial Sequence: Synthetic oligonucleotide
caagucugcauagcugcgc

SEQ ID NO: 1261762 - RNA, 19 nt, Artificial Sequence
  Description of Artificial Sequence: Synthetic oligonucleotide
uguccaacucgcauccauu

SEQ ID NO: 1261763 - RNA, 19 nt, Artificial Sequence
  Description of Artificial Sequence: Synthetic oligonucleotide
gaaguacgcgcuaccuugc

SEQ ID NO: 1261764 - RNA, 19 nt, Artificial Sequence
  Description of Artificial Sequence: Synthetic oligonucleotide
guccaacucgcauccauuc

SEQ ID NO: 1261765 - RNA, 19 nt, Artificial Sequence
  Description of Artificial Sequence: Synthetic oligonucleotide
ucauuuugguagagccaaa

SEQ ID NO: 1261766 - RNA, 19 nt, Artificial Sequence
  Description of Artificial Sequence: Synthetic oligonucleotide
caaaggcauuacuguacug

SEQ ID NO: 1261767 - RNA, 19 nt, Artificial Sequence
  Description of Artificial Sequence: Synthetic oligonucleotide
gcuuauuguacaaguauga

SEQ ID NO: 1261768 - RNA, 19 nt, Artificial Sequence
  Description of Artificial Sequence: Synthetic oligonucleotide
ccgcuauucuucauuuugg

SEQ ID NO: 1261769 - RNA, 19 nt, Artificial Sequence
  Description of Artificial Sequence: Synthetic oligonucleotide
uuguacgauacauguucuu

SEQ ID NO: 1261770 - RNA, 19 nt, Artificial Sequence
  Description of Artificial Sequence: Synthetic oligonucleotide
uugcugcugcugcugcugc

SEQ ID NO: 1261771 - RNA, 19 nt, Artificial Sequence
  Description of Artificial Sequence: Synthetic oligonucleotide
uccaaacgcuaagauccug

SEQ ID NO: 1261772 - RNA, 19 nt, Artificial Sequence
  Description of Artificial Sequence: Synthetic oligonucleotide
cauacagagagugcaugga

SEQ ID NO: 1261773 - RNA, 19 nt, Artificial Sequence
  Description of Artificial Sequence: Synthetic oligonucleotide
guaaccaagcuugaaugua

SEQ ID NO: 1261774 - RNA, 19 nt, Artificial Sequence
  Description of Artificial Sequence: Synthetic oligonucleotide
aggaggucguucacauuac

SEQ ID NO: 1261775 - RNA, 19 nt, Artificial Sequence
  Description of Artificial Sequence: Synthetic oligonucleotide
aaauuaccccuugggccga

SEQ ID NO: 1261776 - RNA, 19 nt, Artificial Sequence
  Description of Artificial Sequence: Synthetic oligonucleotide
aacuuguacgauacauguu

SEQ ID NO: 1261777 - RNA, 19 nt, Artificial Sequence
  Description of Artificial Sequence: Synthetic oligonucleotide
guaugcaucuaaacccuga

SEQ ID NO: 1261778 - RNA, 19 nt, Artificial Sequence
  Description of Artificial Sequence: Synthetic oligonucleotide
cccgcuauucuucauuuug

SEQ ID NO: 1261779 - RNA, 19 nt, Artificial Sequence
  Description of Artificial Sequence: Synthetic oligonucleotide
guauccuuacuauaagcuu

SEQ ID NO: 1261780 - RNA, 19 nt, Artificial Sequence
  Description of Artificial Sequence: Synthetic oligonucleotide
gcuaccuugcugcuacgcc

SEQ ID NO: 1261781 - RNA, 19 nt, Artificial Sequence
  Description of Artificial Sequence: Synthetic oligonucleotide
uaccccuugggccgaugca

SEQ ID NO: 1261782 - RNA, 19 nt, Artificial Sequence
  Description of Artificial Sequence: Synthetic oligonucleotide
caacucgcauccauucuca

SEQ ID NO: 1261783 - RNA, 19 nt, Artificial Sequence
  Description of Artificial Sequence: Synthetic oligonucleotide
uggagguuaaggggccuug

SEQ ID NO: 1261784 - RNA, 19 nt, Artificial Sequence
  Description of Artificial Sequence: Synthetic oligonucleotide
auacugcauguuauuuaag

SEQ ID NO: 1261785 - RNA, 19 nt, Artificial Sequence
  Description of Artificial Sequence: Synthetic oligonucleotide
gucguagaaacaauauaua

SEQ ID NO: 1261786 - RNA, 19 nt, Artificial Sequence
  Description of Artificial Sequence: Synthetic oligonucleotide
acgcuaagauccuguggca

SEQ ID NO: 1261787 - RNA, 19 nt, Artificial Sequence
  Description of Artificial Sequence: Synthetic oligonucleotide
auagcugcgcuaccacaaa

SEQ ID NO: 1261788 - RNA, 19 nt, Artificial Sequence
  Description of Artificial Sequence: Synthetic oligonucleotide
uggagaggauuggagguua

SEQ ID NO: 1261789 - RNA, 19 nt, Artificial Sequence
  Description of Artificial Sequence: Synthetic oligonucleotide
uguggcagauugccucgaa

SEQ ID NO: 1261790 - RNA, 19 nt, Artificial Sequence
  Description of Artificial Sequence: Synthetic oligonucleotide
uuacuguacuggagaggau

SEQ ID NO: 1261791 - RNA, 19 nt, Artificial Sequence
  Description of Artificial Sequence: Synthetic oligonucleotide
guggcagauugccucgaac

SEQ ID NO: 1261792 - RNA, 19 nt, Artificial Sequence
  Description of Artificial Sequence: Synthetic oligonucleotide
acucgcauccauucucauu

SEQ ID NO: 1261793 - RNA, 19 nt, Artificial Sequence
  Description of Artificial Sequence: Synthetic oligonucleotide
cuuguacgauacauguucu

SEQ ID NO: 1261794 - RNA, 19 nt, Artificial Sequence
  Description of Artificial Sequence: Synthetic oligonucleotide
ugaccgaagggaggugaug

SEQ ID NO: 1261795 - RNA, 19 nt, Artificial Sequence
  Description of Artificial Sequence: Synthetic oligonucleotide
gugcuugguuggcaaauga

SEQ ID NO: 1261796 - RNA, 19 nt, Artificial Sequence
  Description of Artificial Sequence: Synthetic oligonucleotide
gucguucacauuacauuca

SEQ ID NO: 1261797 - RNA, 19 nt, Artificial Sequence
  Description of Artificial Sequence: Synthetic oligonucleotide
gucgauccaaacgcuaaga

SEQ ID NO: 1261798 - RNA, 19 nt, Artificial Sequence
  Description of Artificial Sequence: Synthetic oligonucleotide
ugucuuuaagauggauauu

SEQ ID NO: 1261799 - RNA, 19 nt, Artificial Sequence
  Description of Artificial Sequence: Synthetic oligonucleotide
uggcugcugcugcugcugc

SEQ ID NO: 1261800 - RNA, 19 nt, Artificial Sequence
  Description of Artificial Sequence: Synthetic oligonucleotide
gaaagagcagagguuugcu

SEQ ID NO: 1261801 - RNA, 19 nt, Artificial Sequence
  Description of Artificial Sequence: Synthetic oligonucleotide
accuugcugcuacgcccgc

SEQ ID NO: 1261802 - RNA, 19 nt, Artificial Sequence
  Description of Artificial Sequence: Synthetic oligonucleotide
agccaucuacgaaagacuu

SEQ ID NO: 1261803 - RNA, 19 nt, Artificial Sequence
  Description of Artificial Sequence: Synthetic oligonucleotide
aucuaaacccugauccuuu

SEQ ID NO: 1261804 - RNA, 19 nt, Artificial Sequence
  Description of Artificial Sequence: Synthetic oligonucleotide
ccaacucgcauccauucuc

SEQ ID NO: 1261805 - RNA, 19 nt, Artificial Sequence
  Description of Artificial Sequence: Synthetic oligonucleotide
cugcugcugcugcugcugg

SEQ ID NO: 1261806 - RNA, 19 nt, Artificial Sequence
  Description of Artificial Sequence: Synthetic oligonucleotide
caucuacgaaagacuucuc

SEQ ID NO: 1261807 - RNA, 19 nt, Artificial Sequence
  Description of Artificial Sequence: Synthetic oligonucleotide
ugaguggaccggggcauga

SEQ ID NO: 1261808 - RNA, 19 nt, Artificial Sequence
  Description of Artificial Sequence: Synthetic oligonucleotide
gguuaaggggccuuggcau

SEQ ID NO: 1261809 - RNA, 19 nt, Artificial Sequence
  Description of Artificial Sequence: Synthetic oligonucleotide
aggaggccgggucacuuau

SEQ ID NO: 1261810 - RNA, 19 nt, Artificial Sequence
  Description of Artificial Sequence: Synthetic oligonucleotide
auuugguaggaaaccucaa

SEQ ID NO: 1261811 - RNA, 19 nt, Artificial Sequence
  Description of Artificial Sequence: Synthetic oligonucleotide
ccagcccauacagagagug

SEQ ID NO: 1261812 - RNA, 19 nt, Artificial Sequence
  Description of Artificial Sequence: Synthetic oligonucleotide
cuucucguugaggccuccg

SEQ ID NO: 1261813 - RNA, 19 nt, Artificial Sequence
  Description of Artificial Sequence: Synthetic oligonucleotide
ugcugcugcugcugcuggc

SEQ ID NO: 1261814 - RNA, 19 nt, Artificial Sequence
  Description of Artificial Sequence: Synthetic oligonucleotide
cgauccaaacgcuaagauc

SEQ ID NO: 1261815 - RNA, 19 nt, Artificial Sequence
  Description of Artificial Sequence: Synthetic oligonucleotide
uacgcgcuaccuugcugcu

SEQ ID NO: 1261816 - RNA, 19 nt, Artificial Sequence
  Description of Artificial Sequence: Synthetic oligonucleotide
cuacgaaagacuucucguu

SEQ ID NO: 1261817 - RNA, 19 nt, Artificial Sequence
  Description of Artificial Sequence: Synthetic oligonucleotide
ugcugcugcugcugcugug

SEQ ID NO: 1261818 - RNA, 19 nt, Artificial Sequence
  Description of Artificial Sequence: Synthetic oligonucleotide
cugcugcugcugcugcugc

SEQ ID NO: 1261819 - RNA, 19 nt, Artificial Sequence
  Description of Artificial Sequence: Synthetic oligonucleotide
gggccgaugcauuuuaacu

SEQ ID NO: 1261820 - RNA, 19 nt, Artificial Sequence
  Description of Artificial Sequence: Synthetic oligonucleotide
acauucaggccgagguuga

SEQ ID NO: 1261821 - RNA, 19 nt, Artificial Sequence
  Description of Artificial Sequence: Synthetic oligonucleotide
acccacuuauuagugccaa

SEQ ID NO: 1261822 - RNA, 19 nt, Artificial Sequence
  Description of Artificial Sequence: Synthetic oligonucleotide
gcugcuacgcccgcuauuc

SEQ ID NO: 1261823 - RNA, 19 nt, Artificial Sequence
  Description of Artificial Sequence: Synthetic oligonucleotide
gagaaguacgcgcuaccuu

SEQ ID NO: 1261824 - RNA, 19 nt, Artificial Sequence
  Description of Artificial Sequence: Synthetic oligonucleotide
ugcugcuacgcccgcuauu

SEQ ID NO: 1261825 - RNA, 19 nt, Artificial Sequence
  Description of Artificial Sequence: Synthetic oligonucleotide
uccuuacuauaagcuuuaa

SEQ ID NO: 1261826 - RNA, 19 nt, Artificial Sequence
  Description of Artificial Sequence: Synthetic oligonucleotide
ucgcauccauucucauuau

SEQ ID NO: 1261827 - RNA, 19 nt, Artificial Sequence
  Description of Artificial Sequence: Synthetic oligonucleotide
gccauaucugagaguauac

SEQ ID NO: 1261828 - RNA, 19 nt, Artificial Sequence
  Description of Artificial Sequence: Synthetic oligonucleotide
ugcugcugcugcugcugcu

SEQ ID NO: 1261829 - RNA, 19 nt, Artificial Sequence
  Description of Artificial Sequence: Synthetic oligonucleotide
acgcccgcuauucuucauu

SEQ ID NO: 1261830 - RNA, 19 nt, Artificial Sequence
  Description of Artificial Sequence: Synthetic oligonucleotide
cacauagagcaccuucacu

SEQ ID NO: 1261831 - RNA, 19 nt, Artificial Sequence
  Description of Artificial Sequence: Synthetic oligonucleotide
cuugcugcuacgcccgcua

SEQ ID NO: 1261832 - RNA, 19 nt, Artificial Sequence
  Description of Artificial Sequence: Synthetic oligonucleotide
aggccgagguugauuggag

SEQ ID NO: 1261833 - RNA, 19 nt, Artificial Sequence
  Description of Artificial Sequence: Synthetic oligonucleotide
acauuacauucaggccgag

SEQ ID NO: 1261834 - RNA, 19 nt, Artificial Sequence
  Description of Artificial Sequence: Synthetic oligonucleotide
caugaagguagggcugaca

SEQ ID NO: 1261835 - RNA, 19 nt, Artificial Sequence
  Description of Artificial Sequence: Synthetic oligonucleotide
cugcauagcugcgcuacca

SEQ ID NO: 1261836 - RNA, 19 nt, Artificial Sequence
  Description of Artificial Sequence: Synthetic oligonucleotide
ccaucuacgaaagacuucu

SEQ ID NO: 1261837 - RNA, 19 nt, Artificial Sequence
  Description of Artificial Sequence: Synthetic oligonucleotide
gugcuacuuggauuuucaa

SEQ ID NO: 1261838 - RNA, 19 nt, Artificial Sequence
  Description of Artificial Sequence: Synthetic oligonucleotide
gccauaacaggcuggaauu

SEQ ID NO: 1261839 - RNA, 19 nt, Artificial Sequence
  Description of Artificial Sequence: Synthetic oligonucleotide
ucuccccgacauguaugca

SEQ ID NO: 1261840 - RNA, 19 nt, Artificial Sequence
  Description of Artificial Sequence: Synthetic oligonucleotide
gcuauaucuuaaauacugu

SEQ ID NO: 1261841 - RNA, 19 nt, Artificial Sequence
  Description of Artificial Sequence: Synthetic oligonucleotide
uuagugcuacuuggauuuu

SEQ ID NO: 1261842 - RNA, 19 nt, Artificial Sequence
  Description of Artificial Sequence: Synthetic oligonucleotide
cuacgcccgcuauucuuca

SEQ ID NO: 1261843 - RNA, 19 nt, Artificial Sequence
  Description of Artificial Sequence: Synthetic oligonucleotide
accggggcaugaagguagg

SEQ ID NO: 1261844 - RNA, 19 nt, Artificial Sequence
  Description of Artificial Sequence: Synthetic oligonucleotide
caggccgagguugauugga

SEQ ID NO: 1261845 - RNA, 19 nt, Artificial Sequence
  Description of Artificial Sequence: Synthetic oligonucleotide
ggcaugaagguagggcuga

SEQ ID NO: 1261846 - RNA, 19 nt, Artificial Sequence
  Description of Artificial Sequence: Synthetic oligonucleotide
ggaugcuuguucaaucacu

SEQ ID NO: 1261847 - RNA, 19 nt, Artificial Sequence
  Description of Artificial Sequence: Synthetic oligonucleotide
guuaaggggccuuggcauu

SEQ ID NO: 1261848 - RNA, 19 nt, Artificial Sequence
  Description of Artificial Sequence: Synthetic oligonucleotide
gccuccguaggccgcaaac

SEQ ID NO: 1261849 - RNA, 19 nt, Artificial Sequence
  Description of Artificial Sequence: Synthetic oligonucleotide
gcuacgcccgcuauucuuc

SEQ ID NO: 1261850 - RNA, 19 nt, Artificial Sequence
  Description of Artificial Sequence: Synthetic oligonucleotide
gaggaggccgggucacuua

SEQ ID NO: 1261851 - RNA, 19 nt, Artificial Sequence
  Description of Artificial Sequence: Synthetic oligonucleotide
cuaaacccugauccuuugu

SEQ ID NO: 1261852 - RNA, 19 nt, Artificial Sequence
  Description of Artificial Sequence: Synthetic oligonucleotide
acgggucgauccaaacgcu

SEQ ID NO: 1261853 - RNA, 19 nt, Artificial Sequence
  Description of Artificial Sequence: Synthetic oligonucleotide
gcaauaccaugucguagaa

SEQ ID NO: 1261854 - RNA, 19 nt, Artificial Sequence
  Description of Artificial Sequence: Synthetic oligonucleotide
caauaccaugucguagaaa

SEQ ID NO: 1261855 - RNA, 19 nt, Artificial Sequence
  Description of Artificial Sequence: Synthetic oligonucleotide
aauuaccccuugggccgau

SEQ ID NO: 1261856 - RNA, 19 nt, Artificial Sequence
  Description of Artificial Sequence: Synthetic oligonucleotide
cucaaacgggucgauccaa

SEQ ID NO: 1261857 - RNA, 19 nt, Artificial Sequence
  Description of Artificial Sequence: Synthetic oligonucleotide
cuccccgacauguaugcau

SEQ ID NO: 1261858 - RNA, 19 nt, Artificial Sequence
  Description of Artificial Sequence: Synthetic oligonucleotide
cgcgcuaccuugcugcuac

SEQ ID NO: 1261859 - RNA, 19 nt, Artificial Sequence
  Description of Artificial Sequence: Synthetic oligonucleotide
uacgcccgcuauucuucau

SEQ ID NO: 1261860 - RNA, 19 nt, Artificial Sequence
  Description of Artificial Sequence: Synthetic oligonucleotide
gcugcugcugcugcugcug

SEQ ID NO: 1261861 - RNA, 19 nt, Artificial Sequence
  Description of Artificial Sequence: Synthetic oligonucleotide
caucuaaacccugauccuu

SEQ ID NO: 1261862 - RNA, 19 nt, Artificial Sequence
  Description of Artificial Sequence: Synthetic oligonucleotide
auuaccccuugggccgaug

SEQ ID NO: 1261863 - RNA, 19 nt, Artificial Sequence
  Description of Artificial Sequence: Synthetic oligonucleotide
cagaauaguugaugucuuu

SEQ ID NO: 1261864 - RNA, 19 nt, Artificial Sequence
  Description of Artificial Sequence: Synthetic oligonucleotide
gggucgauccaaacgcuaa

SEQ ID NO: 1261865 - RNA, 19 nt, Artificial Sequence
  Description of Artificial Sequence: Synthetic oligonucleotide
acgucuccugggaagcuua

SEQ ID NO: 1261866 - RNA, 19 nt, Artificial Sequence
  Description of Artificial Sequence: Synthetic oligonucleotide
ggacacugaggaggccggg

SEQ ID NO: 1261867 - RNA, 19 nt, Artificial Sequence
  Description of Artificial Sequence: Synthetic oligonucleotide
gccaucuacgaaagacuuc

SEQ ID NO: 1261868 - RNA, 19 nt, Artificial Sequence
  Description of Artificial Sequence: Synthetic oligonucleotide
gccgggucacuuaugggca

SEQ ID NO: 1261869 - RNA, 19 nt, Artificial Sequence
  Description of Artificial Sequence: Synthetic oligonucleotide
gguuagaauacugcauguu

SEQ ID NO: 1261870 - RNA, 19 nt, Artificial Sequence
  Description of Artificial Sequence: Synthetic oligonucleotide
cagagagugcauggaggaa

SEQ ID NO: 1261871 - RNA, 19 nt, Artificial Sequence
  Description of Artificial Sequence: Synthetic oligonucleotide
ccucaaacgggucgaucca

SEQ ID NO: 1261872 - RNA, 19 nt, Artificial Sequence
  Description of Artificial Sequence: Synthetic oligonucleotide
gcauuuuaacuuguacgau

SEQ ID NO: 1261873 - RNA, 19 nt, Artificial Sequence
  Description of Artificial Sequence: Synthetic oligonucleotide
gaguggaccggggcaugaa

SEQ ID NO: 1261874 - RNA, 19 nt, Artificial Sequence
  Description of Artificial Sequence: Synthetic oligonucleotide
gggucacuuaugggcauga

SEQ ID NO: 1261875 - RNA, 19 nt, Artificial Sequence
  Description of Artificial Sequence: Synthetic oligonucleotide
cagugcccuucauacuucu

SEQ ID NO: 1261876 - RNA, 19 nt, Artificial Sequence
  Description of Artificial Sequence: Synthetic oligonucleotide
cuuguccaacucgcaucca

SEQ ID NO: 1261877 - RNA, 19 nt, Artificial Sequence
  Description of Artificial Sequence: Synthetic oligonucleotide
ccguaggccgcaaacacau

SEQ ID NO: 1261878 - RNA, 19 nt, Artificial Sequence
  Description of Artificial Sequence: Synthetic oligonucleotide
ccauaucugagaguauacu

SEQ ID NO: 1261879 - RNA, 19 nt, Artificial Sequence
  Description of Artificial Sequence: Synthetic oligonucleotide
gggagaaagagcagagguu

SEQ ID NO: 1261880 - RNA, 19 nt, Artificial Sequence
  Description of Artificial Sequence: Synthetic oligonucleotide
gcauguuauuuaagcuaaa

SEQ ID NO: 1261881 - RNA, 19 nt, Artificial Sequence
  Description of Artificial Sequence: Synthetic oligonucleotide
ggcagugguaaagguuaaa

SEQ ID NO: 1261882 - RNA, 19 nt, Artificial Sequence
  Description of Artificial Sequence: Synthetic oligonucleotide
ccacuuauuagugccaauu

SEQ ID NO: 1261883 - RNA, 19 nt, Artificial Sequence
  Description of Artificial Sequence: Synthetic oligonucleotide
gcgcuaccuugcugcuacg

SEQ ID NO: 1261884 - RNA, 19 nt, Artificial Sequence
  Description of Artificial Sequence: Synthetic oligonucleotide
gcaugaagguagggcugac

SEQ ID NO: 1261885 - RNA, 19 nt, Artificial Sequence
  Description of Artificial Sequence: Synthetic oligonucleotide
ggagaggauuggagguuaa

SEQ ID NO: 1261886 - RNA, 19 nt, Artificial Sequence
  Description of Artificial Sequence: Synthetic oligonucleotide
cuggagaggauuggagguu

SEQ ID NO: 1261887 - RNA, 19 nt, Artificial Sequence
  Description of Artificial Sequence: Synthetic oligonucleotide
ggaggccgggucacuuaug

SEQ ID NO: 1261888 - RNA, 19 nt, Artificial Sequence
  Description of Artificial Sequence: Synthetic oligonucleotide
gcagagguuugcugcugcu

SEQ ID NO: 1261889 - RNA, 19 nt, Artificial Sequence
  Description of Artificial Sequence: Synthetic oligonucleotide
ggucacuuaugggcaugaa

SEQ ID NO: 1261890 - RNA, 19 nt, Artificial Sequence
  Description of Artificial Sequence: Synthetic oligonucleotide
cugcugcugcugcugcugu

SEQ ID NO: 1261891 - RNA, 19 nt, Artificial Sequence
  Description of Artificial Sequence: Synthetic oligonucleotide
cgaugcauuuuaacuugua

SEQ ID NO: 1261892 - RNA, 19 nt, Artificial Sequence
  Description of Artificial Sequence: Synthetic oligonucleotide
ccgaugcauuuuaacuugu

SEQ ID NO: 1261893 - RNA, 19 nt, Artificial Sequence
  Description of Artificial Sequence: Synthetic oligonucleotide
ggaccggggcaugaaggua

SEQ ID NO: 1261894 - RNA, 19 nt, Artificial Sequence
  Description of Artificial Sequence: Synthetic oligonucleotide
ccggggcaugaagguaggg

SEQ ID NO: 1261895 - RNA, 19 nt, Artificial Sequence
  Description of Artificial Sequence: Synthetic oligonucleotide
cugcuacgcccgcuauucu

SEQ ID NO: 1261896 - RNA, 19 nt, Artificial Sequence
  Description of Artificial Sequence: Synthetic oligonucleotide
cguaggccgcaaacacauc

SEQ ID NO: 1261897 - RNA, 19 nt, Artificial Sequence
  Description of Artificial Sequence: Synthetic oligonucleotide
cauucaggccgagguugau

SEQ ID NO: 1261898 - RNA, 19 nt, Artificial Sequence
  Description of Artificial Sequence: Synthetic oligonucleotide
ggcugcugcugcugcugcu

SEQ ID NO: 1261899 - RNA, 19 nt, Artificial Sequence
  Description of Artificial Sequence: Synthetic oligonucleotide
cccgacauguaugcaucua

SEQ ID NO: 1261900 - RNA, 19 nt, Artificial Sequence
  Description of Artificial Sequence: Synthetic oligonucleotide
gcccauacagagagugcau

SEQ ID NO: 1261901 - RNA, 19 nt, Artificial Sequence
  Description of Artificial Sequence: Synthetic oligonucleotide
cgggucgauccaaacgcua

SEQ ID NO: 1261902 - RNA, 19 nt, Artificial Sequence
  Description of Artificial Sequence: Synthetic oligonucleotide
ggccuccguaggccgcaaa

SEQ ID NO: 1261903 - RNA, 19 nt, Artificial Sequence
  Description of Artificial Sequence: Synthetic oligonucleotide
gcccgcuauucuucauuuu

SEQ ID NO: 1261904 - RNA, 19 nt, Artificial Sequence
  Description of Artificial Sequence: Synthetic oligonucleotide
cgcccgcuauucuucauuu

SEQ ID NO: 1261905 - RNA, 19 nt, Artificial Sequence
  Description of Artificial Sequence: Synthetic oligonucleotide
cccuugggccgaugcauuu

SEQ ID NO: 1261906 - RNA, 19 nt, Artificial Sequence
  Description of Artificial Sequence: Synthetic oligonucleotide
ccgggucacuuaugggcau

SEQ ID NO: 1261907 - RNA, 19 nt, Artificial Sequence
  Description of Artificial Sequence: Synthetic oligonucleotide
ccccuugggccgaugcauu

SEQ ID NO: 1261908 - RNA, 19 nt, Artificial Sequence
  Description of Artificial Sequence: Synthetic oligonucleotide
ccuugggccgaugcauuuu

SEQ ID NO: 1261909 - RNA, 19 nt, Artificial Sequence
  Description of Artificial Sequence: Synthetic oligonucleotide
cgcauccauucucauuauu

SEQ ID NO: 1261910 - RNA, 19 nt, Artificial Sequence
  Description of Artificial Sequence: Synthetic oligonucleotide
auaauggcuaauuagugcc

SEQ ID NO: 1261911 - RNA, 19 nt, Artificial Sequence
  Description of Artificial Sequence: Synthetic oligonucleotide
cuauagaagaaccagacgg

SEQ ID NO: 1261912 - RNA, 19 nt, Artificial Sequence
  Description of Artificial Sequence: Synthetic oligonucleotide
ugauacaaaguccugaucc

SEQ ID NO: 1261913 - RNA, 19 nt, Artificial Sequence
  Description of Artificial Sequence: Synthetic oligonucleotide
aauggugucuccaauauuc

SEQ ID NO: 1261914 - RNA, 19 nt, Artificial Sequence
  Description of Artificial Sequence: Synthetic oligonucleotide
uauagaagaaccagacggg

SEQ ID NO: 1261915 - RNA, 19 nt, Artificial Sequence
  Description of Artificial Sequence: Synthetic oligonucleotide
acuuauguuagagugaggg

SEQ ID NO: 1261916 - RNA, 19 nt, Artificial Sequence
  Description of Artificial Sequence: Synthetic oligonucleotide
uaauuagugccaaacagga

SEQ ID NO: 1261917 - RNA, 19 nt, Artificial Sequence
  Description of Artificial Sequence: Synthetic oligonucleotide
gaagcaucgauccuugggg

SEQ ID NO: 1261918 - RNA, 19 nt, Artificial Sequence
  Description of Artificial Sequence: Synthetic oligonucleotide
gaaggugaagcaucgaucc

SEQ ID NO: 1261919 - RNA, 19 nt, Artificial Sequence
  Description of Artificial Sequence: Synthetic oligonucleotide
uguggugaauacaugagca

SEQ ID NO: 1261920 - RNA, 19 nt, Artificial Sequence
  Description of Artificial Sequence: Synthetic oligonucleotide
gugaacuuauguuagagug

SEQ ID NO: 1261921 - RNA, 19 nt, Artificial Sequence
  Description of Artificial Sequence: Synthetic oligonucleotide
aacaggggucaccugauac

SEQ ID NO: 1261922 - RNA, 19 nt, Artificial Sequence
  Description of Artificial Sequence: Synthetic oligonucleotide
ugaagcaucgauccuuggg

SEQ ID NO: 1261923 - RNA, 19 nt, Artificial Sequence
  Description of Artificial Sequence: Synthetic oligonucleotide
caucaauccuacuugagag

SEQ ID NO: 1261924 - RNA, 19 nt, Artificial Sequence
  Description of Artificial Sequence: Synthetic oligonucleotide
uuauguuagagugagggac

SEQ ID NO: 1261925 - RNA, 19 nt, Artificial Sequence
  Description of Artificial Sequence: Synthetic oligonucleotide
uucaugacagcacggauca

SEQ ID NO: 1261926 - RNA, 19 nt, Artificial Sequence
  Description of Artificial Sequence: Synthetic oligonucleotide
ucaucaucgcuagagacgg

SEQ ID NO: 1261927 - RNA, 19 nt, Artificial Sequence
  Description of Artificial Sequence: Synthetic oligonucleotide
aacgugcucagcugggacc

SEQ ID NO: 1261928 - RNA, 19 nt, Artificial Sequence
  Description of Artificial Sequence: Synthetic oligonucleotide
uggcaaacaggcaaacugg

SEQ ID NO: 1261929 - RNA, 19 nt, Artificial Sequence
  Description of Artificial Sequence: Synthetic oligonucleotide
agguuugggacagagaaac

SEQ ID NO: 1261930 - RNA, 19 nt, Artificial Sequence
  Description of Artificial Sequence: Synthetic oligonucleotide
gaacuuauguuagagugag

SEQ ID NO: 1261931 - RNA, 19 nt, Artificial Sequence
  Description of Artificial Sequence: Synthetic oligonucleotide
uuuucugcccauaaaugac

SEQ ID NO: 1261932 - RNA, 19 nt, Artificial Sequence
  Description of Artificial Sequence: Synthetic oligonucleotide
ugauggccggugaagaacg

SEQ ID NO: 1261933 - RNA, 19 nt, Artificial Sequence
  Description of Artificial Sequence: Synthetic oligonucleotide
gauacaaaguccugauccc

SEQ ID NO: 1261934 - RNA, 19 nt, Artificial Sequence
  Description of Artificial Sequence: Synthetic oligonucleotide
uccagguuuggcaaacagg

SEQ ID NO: 1261935 - RNA, 19 nt, Artificial Sequence
  Description of Artificial Sequence: Synthetic oligonucleotide
ucacuuguagcauuggggu

SEQ ID NO: 1261936 - RNA, 19 nt, Artificial Sequence
  Description of Artificial Sequence: Synthetic oligonucleotide
ugaagaacgcugaaacagc

SEQ ID NO: 1261937 - RNA, 19 nt, Artificial Sequence
  Description of Artificial Sequence: Synthetic oligonucleotide
ugaacuuauguuagaguga

SEQ ID NO: 1261938 - RNA, 19 nt, Artificial Sequence
  Description of Artificial Sequence: Synthetic oligonucleotide
gaagcgagcggaauguucg

SEQ ID NO: 1261939 - RNA, 19 nt, Artificial Sequence
  Description of Artificial Sequence: Synthetic oligonucleotide
uucuacacccgcuacucgg

SEQ ID NO: 1261940 - RNA, 19 nt, Artificial Sequence
  Description of Artificial Sequence: Synthetic oligonucleotide
augacugauaaucuccuug

SEQ ID NO: 1261941 - RNA, 19 nt, Artificial Sequence
  Description of Artificial Sequence: Synthetic oligonucleotide
aaagugguuaacagggguc

SEQ ID NO: 1261942 - RNA, 19 nt, Artificial Sequence
  Description of Artificial Sequence: Synthetic oligonucleotide
aguaucaguggcuccuccc

SEQ ID NO: 1261943 - RNA, 19 nt, Artificial Sequence
  Description of Artificial Sequence: Synthetic oligonucleotide
acuugagagguagaugugc

SEQ ID NO: 1261944 - RNA, 19 nt, Artificial Sequence
  Description of Artificial Sequence: Synthetic oligonucleotide
uauguuagagugagggaca

SEQ ID NO: 1261945 - RNA, 19 nt, Artificial Sequence
  Description of Artificial Sequence: Synthetic oligonucleotide
ugcaaucaugccuacagac

SEQ ID NO: 1261946 - RNA, 19 nt, Artificial Sequence
  Description of Artificial Sequence: Synthetic oligonucleotide
cuugucaucaucgcuagag

SEQ ID NO: 1261947 - RNA, 19 nt, Artificial Sequence
  Description of Artificial Sequence: Synthetic oligonucleotide
uugucgaugagccgcagug

SEQ ID NO: 1261948 - RNA, 19 nt, Artificial Sequence
  Description of Artificial Sequence: Synthetic oligonucleotide
gcuaauuagugccaaacag

SEQ ID NO: 1261949 - RNA, 19 nt, Artificial Sequence
  Description of Artificial Sequence: Synthetic oligonucleotide
ugugucacgggacaucucu

SEQ ID NO: 1261950 - RNA, 19 nt, Artificial Sequence
  Description of Artificial Sequence: Synthetic oligonucleotide
uggaugugaacuuauguua

SEQ ID NO: 1261951 - RNA, 19 nt, Artificial Sequence
  Description of Artificial Sequence: Synthetic oligonucleotide
agcacggaucacuuguagc

SEQ ID NO: 1261952 - RNA, 19 nt, Artificial Sequence
  Description of Artificial Sequence: Synthetic oligonucleotide
aucacuuguagcauugggg

SEQ ID NO: 1261953 - RNA, 19 nt, Artificial Sequence
  Description of Artificial Sequence: Synthetic oligonucleotide
uggagguccacacaucagu

SEQ ID NO: 1261954 - RNA, 19 nt, Artificial Sequence
  Description of Artificial Sequence: Synthetic oligonucleotide
guuaacaggggucaccuga

SEQ ID NO: 1261955 - RNA, 19 nt, Artificial Sequence
  Description of Artificial Sequence: Synthetic oligonucleotide
uagaugugcuggccaaugg

SEQ ID NO: 1261956 - RNA, 19 nt, Artificial Sequence
  Description of Artificial Sequence: Synthetic oligonucleotide
aauacaugagcagcaggca

SEQ ID NO: 1261957 - RNA, 19 nt, Artificial Sequence
  Description of Artificial Sequence: Synthetic oligonucleotide
gucaucaucgcuagagacg

SEQ ID NO: 1261958 - RNA, 19 nt, Artificial Sequence
  Description of Artificial Sequence: Synthetic oligonucleotide
caggauacaacaucaccug

SEQ ID NO: 1261959 - RNA, 19 nt, Artificial Sequence
  Description of Artificial Sequence: Synthetic oligonucleotide
auggucccugaucaucucc

SEQ ID NO: 1261960 - RNA, 19 nt, Artificial Sequence
  Description of Artificial Sequence: Synthetic oligonucleotide
agaaggugaagcaucgauc

SEQ ID NO: 1261961 - RNA, 19 nt, Artificial Sequence
  Description of Artificial Sequence: Synthetic oligonucleotide
agguuuggcaaacaggcaa

SEQ ID NO: 1261962 - RNA, 19 nt, Artificial Sequence
  Description of Artificial Sequence: Synthetic oligonucleotide
uguguguguguguaugugu

SEQ ID NO: 1261963 - RNA, 19 nt, Artificial Sequence
  Description of Artificial Sequence: Synthetic oligonucleotide
agaugugcuggggugaagg

SEQ ID NO: 1261964 - RNA, 19 nt, Artificial Sequence
  Description of Artificial Sequence: Synthetic oligonucleotide
aagugguuaacagggguca

SEQ ID NO: 1261965 - RNA, 19 nt, Artificial Sequence
  Description of Artificial Sequence: Synthetic oligonucleotide
uaauggcuaauuagugcca

SEQ ID NO: 1261966 - RNA, 19 nt, Artificial Sequence
  Description of Artificial Sequence: Synthetic oligonucleotide
augugaacuuauguuagag

SEQ ID NO: 1261967 - RNA, 19 nt, Artificial Sequence
  Description of Artificial Sequence: Synthetic oligonucleotide
caaagagcagguagcacac

SEQ ID NO: 1261968 - RNA, 19 nt, Artificial Sequence
  Description of Artificial Sequence: Synthetic oligonucleotide
agcaggaaacuugggaugg

SEQ ID NO: 1261969 - RNA, 19 nt, Artificial Sequence
  Description of Artificial Sequence: Synthetic oligonucleotide
aucaucgcuagagacgggg

SEQ ID NO: 1261970 - RNA, 19 nt, Artificial Sequence
  Description of Artificial Sequence: Synthetic oligonucleotide
aucuccucguucacgaagc

SEQ ID NO: 1261971 - RNA, 19 nt, Artificial Sequence
  Description of Artificial Sequence: Synthetic oligonucleotide
ugucaugacugauaaucuc

SEQ ID NO: 1261972 - RNA, 19 nt, Artificial Sequence
  Description of Artificial Sequence: Synthetic oligonucleotide
ucucucuccucucucuccc

SEQ ID NO: 1261973 - RNA, 19 nt, Artificial Sequence
  Description of Artificial Sequence: Synthetic oligonucleotide
agagcuugaagcgagcgga

SEQ ID NO: 1261974 - RNA, 19 nt, Artificial Sequence
  Description of Artificial Sequence: Synthetic oligonucleotide
aaucaugccuacagacuuc

SEQ ID NO: 1261975 - RNA, 19 nt, Artificial Sequence
  Description of Artificial Sequence: Synthetic oligonucleotide
ucuacacccgcuacucggc

SEQ ID NO: 1261976 - RNA, 19 nt, Artificial Sequence
  Description of Artificial Sequence: Synthetic oligonucleotide
aagcaucgauccuuggggu

SEQ ID NO: 1261977 - RNA, 19 nt, Artificial Sequence
  Description of Artificial Sequence: Synthetic oligonucleotide
ggccgaaugaccaaguucc

SEQ ID NO: 1261978 - RNA, 19 nt, Artificial Sequence
  Description of Artificial Sequence: Synthetic oligonucleotide
ugcccauaaaugacuaaaa

SEQ ID NO: 1261979 - RNA, 19 nt, Artificial Sequence
  Description of Artificial Sequence: Synthetic oligonucleotide
uggcuguaguuccagacau

SEQ ID NO: 1261980 - RNA, 19 nt, Artificial Sequence
  Description of Artificial Sequence: Synthetic oligonucleotide
gugugugugugugucacgg

SEQ ID NO: 1261981 - RNA, 19 nt, Artificial Sequence
  Description of Artificial Sequence: Synthetic oligonucleotide
gucaccugauacaaagucc

SEQ ID NO: 1261982 - RNA, 19 nt, Artificial Sequence
  Description of Artificial Sequence: Synthetic oligonucleotide
uuaacaggggucaccugau

SEQ ID NO: 1261983 - RNA, 19 nt, Artificial Sequence
  Description of Artificial Sequence: Synthetic oligonucleotide
ugugugugugugucacggg

SEQ ID NO: 1261984 - RNA, 19 nt, Artificial Sequence
  Description of Artificial Sequence: Synthetic oligonucleotide
auagaagaaccagacggga

SEQ ID NO: 1261985 - RNA, 19 nt, Artificial Sequence
  Description of Artificial Sequence: Synthetic oligonucleotide
ucaggccgaagcaggaugu

SEQ ID NO: 1261986 - RNA, 19 nt, Artificial Sequence
  Description of Artificial Sequence: Synthetic oligonucleotide
aauggcuaauuagugccaa

SEQ ID NO: 1261987 - RNA, 19 nt, Artificial Sequence
  Description of Artificial Sequence: Synthetic oligonucleotide
gaaagugguuaacaggggu

SEQ ID NO: 1261988 - RNA, 19 nt, Artificial Sequence
  Description of Artificial Sequence: Synthetic oligonucleotide
uguguguguguguguaugu

SEQ ID NO: 1261989 - RNA, 19 nt, Artificial Sequence
  Description of Artificial Sequence: Synthetic oligonucleotide
ucucucuccucucucuccu

SEQ ID NO: 1261990 - RNA, 19 nt, Artificial Sequence
  Description of Artificial Sequence: Synthetic oligonucleotide
ugugugugugugugucacg

SEQ ID NO: 1261991 - RNA, 19 nt, Artificial Sequence
  Description of Artificial Sequence: Synthetic oligonucleotide
ugucacgggacaucucuga

SEQ ID NO: 1261992 - RNA, 19 nt, Artificial Sequence
  Description of Artificial Sequence: Synthetic oligonucleotide
guaugugugugugugugug

SEQ ID NO: 1261993 - RNA, 19 nt, Artificial Sequence
  Description of Artificial Sequence: Synthetic oligonucleotide
ugguuaacaggggucaccu

SEQ ID NO: 1261994 - RNA, 19 nt, Artificial Sequence
  Description of Artificial Sequence: Synthetic oligonucleotide
uccucucucucucuccucu

SEQ ID NO: 1261995 - RNA, 19 nt, Artificial Sequence
  Description of Artificial Sequence: Synthetic oligonucleotide
aaucggaagcgccgugugu

SEQ ID NO: 1261996 - RNA, 19 nt, Artificial Sequence
  Description of Artificial Sequence: Synthetic oligonucleotide
uguguguguaugugugugu

SEQ ID NO: 1261997 - RNA, 19 nt, Artificial Sequence
  Description of Artificial Sequence: Synthetic oligonucleotide
agccuauacagaaaguggu

SEQ ID NO: 1261998 - RNA, 19 nt, Artificial Sequence
  Description of Artificial Sequence: Synthetic oligonucleotide
guguguaugugugugugug

SEQ ID NO: 1261999 - RNA, 19 nt, Artificial Sequence
  Description of Artificial Sequence: Synthetic oligonucleotide
ggaugugaacuuauguuag

SEQ ID NO: 1262000 - RNA, 19 nt, Artificial Sequence
  Description of Artificial Sequence: Synthetic oligonucleotide
ucuccucucucucucuccu

SEQ ID NO: 1262001 - RNA, 19 nt, Artificial Sequence
  Description of Artificial Sequence: Synthetic oligonucleotide
cuuauguuagagugaggga

SEQ ID NO: 1262002 - RNA, 19 nt, Artificial Sequence
  Description of Artificial Sequence: Synthetic oligonucleotide
uguaugugugugugugugu

SEQ ID NO: 1262003 - RNA, 19 nt, Artificial Sequence
  Description of Artificial Sequence: Synthetic oligonucleotide
ugucgaugagccgcagugg

SEQ ID NO: 1262004 - RNA, 19 nt, Artificial Sequence
  Description of Artificial Sequence: Synthetic oligonucleotide
gaaucggaagcgccgugug

SEQ ID NO: 1262005 - RNA, 19 nt, Artificial Sequence
  Description of Artificial Sequence: Synthetic oligonucleotide
uguguaugugugugugugu

SEQ ID NO: 1262006 - RNA, 19 nt, Artificial Sequence
  Description of Artificial Sequence: Synthetic oligonucleotide
ugguucuacacccgcuacu

SEQ ID NO: 1262007 - RNA, 19 nt, Artificial Sequence
  Description of Artificial Sequence: Synthetic oligonucleotide
guauuagcaaaguuuuacu

SEQ ID NO: 1262008 - RNA, 19 nt, Artificial Sequence
  Description of Artificial Sequence: Synthetic oligonucleotide
cucaacgugcucagcuggg

SEQ ID NO: 1262009 - RNA, 19 nt, Artificial Sequence
  Description of Artificial Sequence: Synthetic oligonucleotide
uguguguguguaugugugu

SEQ ID NO: 1262010 - RNA, 19 nt, Artificial Sequence
  Description of Artificial Sequence: Synthetic oligonucleotide
uacacccgcuacucggccg

SEQ ID NO: 1262011 - RNA, 19 nt, Artificial Sequence
  Description of Artificial Sequence: Synthetic oligonucleotide
gacagcacggaucacuugu

SEQ ID NO: 1262012 - RNA, 19 nt, Artificial Sequence
  Description of Artificial Sequence: Synthetic oligonucleotide
gaaacuugggauggguauc

SEQ ID NO: 1262013 - RNA, 19 nt, Artificial Sequence
  Description of Artificial Sequence: Synthetic oligonucleotide
uguguguaugugugugugu

SEQ ID NO: 1262014 - RNA, 19 nt, Artificial Sequence
  Description of Artificial Sequence: Synthetic oligonucleotide
agcggaauguucguuccuc

SEQ ID NO: 1262015 - RNA, 19 nt, Artificial Sequence
  Description of Artificial Sequence: Synthetic oligonucleotide
guguaugugugugugugug

SEQ ID NO: 1262016 - RNA, 19 nt, Artificial Sequence
  Description of Artificial Sequence: Synthetic oligonucleotide
gcugcgugguucuacaccc

SEQ ID NO: 1262017 - RNA, 19 nt, Artificial Sequence
  Description of Artificial Sequence: Synthetic oligonucleotide
uaguauuagcaaaguuuua

SEQ ID NO: 1262018 - RNA, 19 nt, Artificial Sequence
  Description of Artificial Sequence: Synthetic oligonucleotide
ucucuccucucucuccucu

SEQ ID NO: 1262019 - RNA, 19 nt, Artificial Sequence
  Description of Artificial Sequence: Synthetic oligonucleotide
ucucucuccucucucucuc

SEQ ID NO: 1262020 - RNA, 19 nt, Artificial Sequence
  Description of Artificial Sequence: Synthetic oligonucleotide
aacuuauguuagagugagg

SEQ ID NO: 1262021 - RNA, 19 nt, Artificial Sequence
  Description of Artificial Sequence: Synthetic oligonucleotide
agggcgaaucggaagcgcc

SEQ ID NO: 1262022 - RNA, 19 nt, Artificial Sequence
  Description of Artificial Sequence: Synthetic oligonucleotide
cuagcucaggccgaagcag

SEQ ID NO: 1262023 - RNA, 19 nt, Artificial Sequence
  Description of Artificial Sequence: Synthetic oligonucleotide
guucuacacccgcuacucg

SEQ ID NO: 1262024 - RNA, 19 nt, Artificial Sequence
  Description of Artificial Sequence: Synthetic oligonucleotide
guguguguguguaugugug

SEQ ID NO: 1262025 - RNA, 19 nt, Artificial Sequence
  Description of Artificial Sequence: Synthetic oligonucleotide
uaugugugugugugugugu

SEQ ID NO: 1262026 - RNA, 19 nt, Artificial Sequence
  Description of Artificial Sequence: Synthetic oligonucleotide
uguguguguguguguguca

SEQ ID NO: 1262027 - RNA, 19 nt, Artificial Sequence
  Description of Artificial Sequence: Synthetic oligonucleotide
cacgggacaucucugauaa

SEQ ID NO: 1262028 - RNA, 19 nt, Artificial Sequence
  Description of Artificial Sequence: Synthetic oligonucleotide
agcaucgauccuuggggug

SEQ ID NO: 1262029 - RNA, 19 nt, Artificial Sequence
  Description of Artificial Sequence: Synthetic oligonucleotide
agcgccgugugucaugacu

SEQ ID NO: 1262030 - RNA, 19 nt, Artificial Sequence
  Description of Artificial Sequence: Synthetic oligonucleotide
augugugugugugugugug

SEQ ID NO: 1262031 - RNA, 19 nt, Artificial Sequence
  Description of Artificial Sequence: Synthetic oligonucleotide
aacgcugaaacagcuucau

SEQ ID NO: 1262032 - RNA, 19 nt, Artificial Sequence
  Description of Artificial Sequence: Synthetic oligonucleotide
caucaguaucaguggcucc

SEQ ID NO: 1262033 - RNA, 19 nt, Artificial Sequence
  Description of Artificial Sequence: Synthetic oligonucleotide
cucaggccgaagcaggaug

SEQ ID NO: 1262034 - RNA, 19 nt, Artificial Sequence
  Description of Artificial Sequence: Synthetic oligonucleotide
ucuccucucucuccucucu

SEQ ID NO: 1262035 - RNA, 19 nt, Artificial Sequence
  Description of Artificial Sequence: Synthetic oligonucleotide
cucucucuccucucucucc

SEQ ID NO: 1262036 - RNA, 19 nt, Artificial Sequence
  Description of Artificial Sequence: Synthetic oligonucleotide
guguguguguaugugugug

SEQ ID NO: 1262037 - RNA, 19 nt, Artificial Sequence
  Description of Artificial Sequence: Synthetic oligonucleotide
cucucugugugugugugug

SEQ ID NO: 1262038 - RNA, 19 nt, Artificial Sequence
  Description of Artificial Sequence: Synthetic oligonucleotide
gugugugugugucacggga

SEQ ID NO: 1262039 - RNA, 19 nt, Artificial Sequence
  Description of Artificial Sequence: Synthetic oligonucleotide
gcacggaucacuuguagca

SEQ ID NO: 1262040 - RNA, 19 nt, Artificial Sequence
  Description of Artificial Sequence: Synthetic oligonucleotide
caguguggucauuuggguc

SEQ ID NO: 1262041 - RNA, 19 nt, Artificial Sequence
  Description of Artificial Sequence: Synthetic oligonucleotide
cacggauggcgaauuuccc

SEQ ID NO: 1262042 - RNA, 19 nt, Artificial Sequence
  Description of Artificial Sequence: Synthetic oligonucleotide
guguguguaugugugugug

SEQ ID NO: 1262043 - RNA, 19 nt, Artificial Sequence
  Description of Artificial Sequence: Synthetic oligonucleotide
ccuacagacuucacugucc

SEQ ID NO: 1262044 - RNA, 19 nt, Artificial Sequence
  Description of Artificial Sequence: Synthetic oligonucleotide
gggauggguauccuugaag

SEQ ID NO: 1262045 - RNA, 19 nt, Artificial Sequence
  Description of Artificial Sequence: Synthetic oligonucleotide
ugugugugugugugugugu

SEQ ID NO: 1262046 - RNA, 19 nt, Artificial Sequence
  Description of Artificial Sequence: Synthetic oligonucleotide
aguccacgaagcccuuguc

SEQ ID NO: 1262047 - RNA, 19 nt, Artificial Sequence
  Description of Artificial Sequence: Synthetic oligonucleotide
ucucucucuccucucucuc

SEQ ID NO: 1262048 - RNA, 19 nt, Artificial Sequence
  Description of Artificial Sequence: Synthetic oligonucleotide
gcucaacgugcucagcugg

SEQ ID NO: 1262049 - RNA, 19 nt, Artificial Sequence
  Description of Artificial Sequence: Synthetic oligonucleotide
ucugugugugugugugugu

SEQ ID NO: 1262050 - RNA, 19 nt, Artificial Sequence
  Description of Artificial Sequence: Synthetic oligonucleotide
cucugugugugugugugug

SEQ ID NO: 1262051 - RNA, 19 nt, Artificial Sequence
  Description of Artificial Sequence: Synthetic oligonucleotide
uguagggccgaaugaccaa

SEQ ID NO: 1262052 - RNA, 19 nt, Artificial Sequence
  Description of Artificial Sequence: Synthetic oligonucleotide
agcgagguuugggacagag

SEQ ID NO: 1262053 - RNA, 19 nt, Artificial Sequence
  Description of Artificial Sequence: Synthetic oligonucleotide
ucucucucccucucucugu

SEQ ID NO: 1262054 - RNA, 19 nt, Artificial Sequence
  Description of Artificial Sequence: Synthetic oligonucleotide
guauggaugugaacuuaug

SEQ ID NO: 1262055 - RNA, 19 nt, Artificial Sequence
  Description of Artificial Sequence: Synthetic oligonucleotide
uccucucucuccucucucu

SEQ ID NO: 1262056 - RNA, 19 nt, Artificial Sequence
  Description of Artificial Sequence: Synthetic oligonucleotide
guguguguguguguguaug

SEQ ID NO: 1262057 - RNA, 19 nt, Artificial Sequence
  Description of Artificial Sequence: Synthetic oligonucleotide
cugugugugugugugugug

SEQ ID NO: 1262058 - RNA, 19 nt, Artificial Sequence
  Description of Artificial Sequence: Synthetic oligonucleotide
cucuccucucucucucucc

SEQ ID NO: 1262059 - RNA, 19 nt, Artificial Sequence
  Description of Artificial Sequence: Synthetic oligonucleotide
uccucucucucccucucuc

SEQ ID NO: 1262060 - RNA, 19 nt, Artificial Sequence
  Description of Artificial Sequence: Synthetic oligonucleotide
aagcgagcggaauguucgu

SEQ ID NO: 1262061 - RNA, 19 nt, Artificial Sequence
  Description of Artificial Sequence: Synthetic oligonucleotide
gugugugugugugugugug

SEQ ID NO: 1262062 - RNA, 19 nt, Artificial Sequence
  Description of Artificial Sequence: Synthetic oligonucleotide
ucacgggacaucucugaua

SEQ ID NO: 1262063 - RNA, 19 nt, Artificial Sequence
  Description of Artificial Sequence: Synthetic oligonucleotide
ggauggguauccuugaagu

SEQ ID NO: 1262064 - RNA, 19 nt, Artificial Sequence
  Description of Artificial Sequence: Synthetic oligonucleotide
ucucucucucuccucucuc

SEQ ID NO: 1262065 - RNA, 19 nt, Artificial Sequence
  Description of Artificial Sequence: Synthetic oligonucleotide
ucucuccucucucucucuc

SEQ ID NO: 1262066 - RNA, 19 nt, Artificial Sequence
  Description of Artificial Sequence: Synthetic oligonucleotide
gguggagguccacacauca

SEQ ID NO: 1262067 - RNA, 19 nt, Artificial Sequence
  Description of Artificial Sequence: Synthetic oligonucleotide
cucucucucccucucucug

SEQ ID NO: 1262068 - RNA, 19 nt, Artificial Sequence
  Description of Artificial Sequence: Synthetic oligonucleotide
uuccucuagcucaggccga

SEQ ID NO: 1262069 - RNA, 19 nt, Artificial Sequence
  Description of Artificial Sequence: Synthetic oligonucleotide
gaagaacgcugaaacagcu

SEQ ID NO: 1262070 - RNA, 19 nt, Artificial Sequence
  Description of Artificial Sequence: Synthetic oligonucleotide
ucucuccucucucucccuc

SEQ ID NO: 1262071 - RNA, 19 nt, Artificial Sequence
  Description of Artificial Sequence: Synthetic oligonucleotide
gcaucgauccuuggggugg

SEQ ID NO: 1262072 - RNA, 19 nt, Artificial Sequence
  Description of Artificial Sequence: Synthetic oligonucleotide
caucaggugcuuuguccac

SEQ ID NO: 1262073 - RNA, 19 nt, Artificial Sequence
  Description of Artificial Sequence: Synthetic oligonucleotide
ugggguggcccacacgcuc

SEQ ID NO: 1262074 - RNA, 19 nt, Artificial Sequence
  Description of Artificial Sequence: Synthetic oligonucleotide
gugguuaacaggggucacc

SEQ ID NO: 1262075 - RNA, 19 nt, Artificial Sequence
  Description of Artificial Sequence: Synthetic oligonucleotide
uguguguguguguguguau

SEQ ID NO: 1262076 - RNA, 19 nt, Artificial Sequence
  Description of Artificial Sequence: Synthetic oligonucleotide
ucaacgugcucagcuggga

SEQ ID NO: 1262077 - RNA, 19 nt, Artificial Sequence
  Description of Artificial Sequence: Synthetic oligonucleotide
gugaagcaucgauccuugg

SEQ ID NO: 1262078 - RNA, 19 nt, Artificial Sequence
  Description of Artificial Sequence: Synthetic oligonucleotide
ugcacggauggcgaauuuc

SEQ ID NO: 1262079 - RNA, 19 nt, Artificial Sequence
  Description of Artificial Sequence: Synthetic oligonucleotide
caacgugcucagcugggac

SEQ ID NO: 1262080 - RNA, 19 nt, Artificial Sequence
  Description of Artificial Sequence: Synthetic oligonucleotide
caguaucaguggcuccucc

SEQ ID NO: 1262081 - RNA, 19 nt, Artificial Sequence
  Description of Artificial Sequence: Synthetic oligonucleotide
cacgaagcccuugucauca

SEQ ID NO: 1262082 - RNA, 19 nt, Artificial Sequence
  Description of Artificial Sequence: Synthetic oligonucleotide
gugugugugugugugucac

SEQ ID NO: 1262083 - RNA, 19 nt, Artificial Sequence
  Description of Artificial Sequence: Synthetic oligonucleotide
caccacgcggcucaacgug

SEQ ID NO: 1262084 - RNA, 19 nt, Artificial Sequence
  Description of Artificial Sequence: Synthetic oligonucleotide
guagaccagcagcccauug

SEQ ID NO: 1262085 - RNA, 19 nt, Artificial Sequence
  Description of Artificial Sequence: Synthetic oligonucleotide
guguguguguguguaugug

SEQ ID NO: 1262086 - RNA, 19 nt, Artificial Sequence
  Description of Artificial Sequence: Synthetic oligonucleotide
ucucucugugugugugugu

SEQ ID NO: 1262087 - RNA, 19 nt, Artificial Sequence
  Description of Artificial Sequence: Synthetic oligonucleotide
ucucugugugugugugugu

SEQ ID NO: 1262088 - RNA, 19 nt, Artificial Sequence
  Description of Artificial Sequence: Synthetic oligonucleotide
acgcugaaacagcuucaug

SEQ ID NO: 1262089 - RNA, 19 nt, Artificial Sequence
  Description of Artificial Sequence: Synthetic oligonucleotide
guaguuccagacaucaggu

SEQ ID NO: 1262090 - RNA, 19 nt, Artificial Sequence
  Description of Artificial Sequence: Synthetic oligonucleotide
cuacacccgcuacucggcc

SEQ ID NO: 1262091 - RNA, 19 nt, Artificial Sequence
  Description of Artificial Sequence: Synthetic oligonucleotide
caaucaugccuacagacuu

SEQ ID NO: 1262092 - RNA, 19 nt, Artificial Sequence
  Description of Artificial Sequence: Synthetic oligonucleotide
ucuccucucucucccucuc

SEQ ID NO: 1262093 - RNA, 19 nt, Artificial Sequence
  Description of Artificial Sequence: Synthetic oligonucleotide
gugguucuacacccgcuac

SEQ ID NO: 1262094 - RNA, 19 nt, Artificial Sequence
  Description of Artificial Sequence: Synthetic oligonucleotide
cucucucugugugugugug

SEQ ID NO: 1262095 - RNA, 19 nt, Artificial Sequence
  Description of Artificial Sequence: Synthetic oligonucleotide
ucgauccuugggguggccc

SEQ ID NO: 1262096 - RNA, 19 nt, Artificial Sequence
  Description of Artificial Sequence: Synthetic oligonucleotide
gaagcgccgugugucauga

SEQ ID NO: 1262097 - RNA, 19 nt, Artificial Sequence
  Description of Artificial Sequence: Synthetic oligonucleotide
caccugauacaaaguccug

SEQ ID NO: 1262098 - RNA, 19 nt, Artificial Sequence
  Description of Artificial Sequence: Synthetic oligonucleotide
gcacggauggcgaauuucc

SEQ ID NO: 1262099 - RNA, 19 nt, Artificial Sequence
  Description of Artificial Sequence: Synthetic oligonucleotide
acggaucacuuguagcauu

SEQ ID NO: 1262100 - RNA, 19 nt, Artificial Sequence
  Description of Artificial Sequence: Synthetic oligonucleotide
ggugaagcaucgauccuug

SEQ ID NO: 1262101 - RNA, 19 nt, Artificial Sequence
  Description of Artificial Sequence: Synthetic oligonucleotide
guguguguguguguguguc

SEQ ID NO: 1262102 - RNA, 19 nt, Artificial Sequence
  Description of Artificial Sequence: Synthetic oligonucleotide
ggaauucaauggugucucc

SEQ ID NO: 1262103 - RNA, 19 nt, Artificial Sequence
  Description of Artificial Sequence: Synthetic oligonucleotide
gguguagggccgaaugacc

SEQ ID NO: 1262104 - RNA, 19 nt, Artificial Sequence
  Description of Artificial Sequence: Synthetic oligonucleotide
ccaucaauccuacuugaga

SEQ ID NO: 1262105 - RNA, 19 nt, Artificial Sequence
  Description of Artificial Sequence: Synthetic oligonucleotide
caucaucgcuagagacggg

SEQ ID NO: 1262106 - RNA, 19 nt, Artificial Sequence
  Description of Artificial Sequence: Synthetic oligonucleotide
cuugaagcgagcggaaugu

SEQ ID NO: 1262107 - RNA, 19 nt, Artificial Sequence
  Description of Artificial Sequence: Synthetic oligonucleotide
ggaaacuugggauggguau

SEQ ID NO: 1262108 - RNA, 19 nt, Artificial Sequence
  Description of Artificial Sequence: Synthetic oligonucleotide
ucaugccuacagacuucac

SEQ ID NO: 1262109 - RNA, 19 nt, Artificial Sequence
  Description of Artificial Sequence: Synthetic oligonucleotide
cugucucccacaagaggca

SEQ ID NO: 1262110 - RNA, 19 nt, Artificial Sequence
  Description of Artificial Sequence: Synthetic oligonucleotide
cacgcuccagguuuggcaa

SEQ ID NO: 1262111 - RNA, 19 nt, Artificial Sequence
  Description of Artificial Sequence: Synthetic oligonucleotide
ucugcacggauggcgaauu

SEQ ID NO: 1262112 - RNA, 19 nt, Artificial Sequence
  Description of Artificial Sequence: Synthetic oligonucleotide
ggcucaacgugcucagcug

SEQ ID NO: 1262113 - RNA, 19 nt, Artificial Sequence
  Description of Artificial Sequence: Synthetic oligonucleotide
uguuagagugagggacagu

SEQ ID NO: 1262114 - RNA, 19 nt, Artificial Sequence
  Description of Artificial Sequence: Synthetic oligonucleotide
aaggcagggcgaaucggaa

SEQ ID NO: 1262115 - RNA, 19 nt, Artificial Sequence
  Description of Artificial Sequence: Synthetic oligonucleotide
ccugacaacaggguuggac

SEQ ID NO: 1262116 - RNA, 19 nt, Artificial Sequence
  Description of Artificial Sequence: Synthetic oligonucleotide
cacggggucugucucccac

SEQ ID NO: 1262117 - RNA, 19 nt, Artificial Sequence
  Description of Artificial Sequence: Synthetic oligonucleotide
gucgcugcgugguucuaca

SEQ ID NO: 1262118 - RNA, 19 nt, Artificial Sequence
  Description of Artificial Sequence: Synthetic oligonucleotide
ggaucacuuguagcauugg

SEQ ID NO: 1262119 - RNA, 19 nt, Artificial Sequence
  Description of Artificial Sequence: Synthetic oligonucleotide
gggccgaaugaccaaguuc

SEQ ID NO: 1262120 - RNA, 19 nt, Artificial Sequence
  Description of Artificial Sequence: Synthetic oligonucleotide
aucauggguggagguccac

SEQ ID NO: 1262121 - RNA, 19 nt, Artificial Sequence
  Description of Artificial Sequence: Synthetic oligonucleotide
gauggccggugaagaacgc

SEQ ID NO: 1262122 - RNA, 19 nt, Artificial Sequence
  Description of Artificial Sequence: Synthetic oligonucleotide
cagaaggugaagcaucgau

SEQ ID NO: 1262123 - RNA, 19 nt, Artificial Sequence
  Description of Artificial Sequence: Synthetic oligonucleotide
gugucaugacugauaaucu

SEQ ID NO: 1262124 - RNA, 19 nt, Artificial Sequence
  Description of Artificial Sequence: Synthetic oligonucleotide
ggguguagggccgaaugac

SEQ ID NO: 1262125 - RNA, 19 nt, Artificial Sequence
  Description of Artificial Sequence: Synthetic oligonucleotide
ccagagcuugaagcgagcg

SEQ ID NO: 1262126 - RNA, 19 nt, Artificial Sequence
  Description of Artificial Sequence: Synthetic oligonucleotide
aggaaacuugggaugggua

SEQ ID NO: 1262127 - RNA, 19 nt, Artificial Sequence
  Description of Artificial Sequence: Synthetic oligonucleotide
acggggucugucucccaca

SEQ ID NO: 1262128 - RNA, 19 nt, Artificial Sequence
  Description of Artificial Sequence: Synthetic oligonucleotide
caucgauccuugggguggc

SEQ ID NO: 1262129 - RNA, 19 nt, Artificial Sequence
  Description of Artificial Sequence: Synthetic oligonucleotide
cagggcgaaucggaagcgc

SEQ ID NO: 1262130 - RNA, 19 nt, Artificial Sequence
  Description of Artificial Sequence: Synthetic oligonucleotide
cucuccucucucuccucuc

SEQ ID NO: 1262131 - RNA, 19 nt, Artificial Sequence
  Description of Artificial Sequence: Synthetic oligonucleotide
gggcgaaucggaagcgccg

SEQ ID NO: 1262132 - RNA, 19 nt, Artificial Sequence
  Description of Artificial Sequence: Synthetic oligonucleotide
gguuaacaggggucaccug

SEQ ID NO: 1262133 - RNA, 19 nt, Artificial Sequence
  Description of Artificial Sequence: Synthetic oligonucleotide
agggccgaaugaccaaguu

SEQ ID NO: 1262134 - RNA, 19 nt, Artificial Sequence
  Description of Artificial Sequence: Synthetic oligonucleotide
auggccggugaagaacgcu

SEQ ID NO: 1262135 - RNA, 19 nt, Artificial Sequence
  Description of Artificial Sequence: Synthetic oligonucleotide
gcgagcggaauguucguuc

SEQ ID NO: 1262136 - RNA, 19 nt, Artificial Sequence
  Description of Artificial Sequence: Synthetic oligonucleotide
gugucacgggacaucucug

SEQ ID NO: 1262137 - RNA, 19 nt, Artificial Sequence
  Description of Artificial Sequence: Synthetic oligonucleotide
ggaagcgccgugugucaug

SEQ ID NO: 1262138 - RNA, 19 nt, Artificial Sequence
  Description of Artificial Sequence: Synthetic oligonucleotide
cgagcggaauguucguucc

SEQ ID NO: 1262139 - RNA, 19 nt, Artificial Sequence
  Description of Artificial Sequence: Synthetic oligonucleotide
ucgcugcgugguucuacac

SEQ ID NO: 1262140 - RNA, 19 nt, Artificial Sequence
  Description of Artificial Sequence: Synthetic oligonucleotide
gugugugugugugugugua

SEQ ID NO: 1262141 - RNA, 19 nt, Artificial Sequence
  Description of Artificial Sequence: Synthetic oligonucleotide
cuccucucucuccucucuc

SEQ ID NO: 1262142 - RNA, 19 nt, Artificial Sequence
  Description of Artificial Sequence: Synthetic oligonucleotide
ccuccugcaaucaugccua

SEQ ID NO: 1262143 - RNA, 19 nt, Artificial Sequence
  Description of Artificial Sequence: Synthetic oligonucleotide
agugccgggcacggggucu

SEQ ID NO: 1262144 - RNA, 19 nt, Artificial Sequence
  Description of Artificial Sequence: Synthetic oligonucleotide
gcaggaaacuugggauggg

SEQ ID NO: 1262145 - RNA, 19 nt, Artificial Sequence
  Description of Artificial Sequence: Synthetic oligonucleotide
ugagccgcaguggguacuu

SEQ ID NO: 1262146 - RNA, 19 nt, Artificial Sequence
  Description of Artificial Sequence: Synthetic oligonucleotide
acccgcuacucggccggcc

SEQ ID NO: 1262147 - RNA, 19 nt, Artificial Sequence
  Description of Artificial Sequence: Synthetic oligonucleotide
cucucuccucucucuccuc

SEQ ID NO: 1262148 - RNA, 19 nt, Artificial Sequence
  Description of Artificial Sequence: Synthetic oligonucleotide
ucccucucucucucuccuc

SEQ ID NO: 1262149 - RNA, 19 nt, Artificial Sequence
  Description of Artificial Sequence: Synthetic oligonucleotide
cuccugcaaucaugccuac

SEQ ID NO: 1262150 - RNA, 19 nt, Artificial Sequence
  Description of Artificial Sequence: Synthetic oligonucleotide
cuccucucucucucuccuc

SEQ ID NO: 1262151 - RNA, 19 nt, Artificial Sequence
  Description of Artificial Sequence: Synthetic oligonucleotide
gcgccgugugucaugacug

SEQ ID NO: 1262152 - RNA, 19 nt, Artificial Sequence
  Description of Artificial Sequence: Synthetic oligonucleotide
cccggaauucaaugguguc

SEQ ID NO: 1262153 - RNA, 19 nt, Artificial Sequence
  Description of Artificial Sequence: Synthetic oligonucleotide
gcaaucaugccuacagacu

SEQ ID NO: 1262154 - RNA, 19 nt, Artificial Sequence
  Description of Artificial Sequence: Synthetic oligonucleotide
cucucucucuccucucucu

SEQ ID NO: 1262155 - RNA, 19 nt, Artificial Sequence
  Description of Artificial Sequence: Synthetic oligonucleotide
gcggaauguucguuccuca

SEQ ID NO: 1262156 - RNA, 19 nt, Artificial Sequence
  Description of Artificial Sequence: Synthetic oligonucleotide
ggggugauaccugucccuc

SEQ ID NO: 1262157 - RNA, 19 nt, Artificial Sequence
  Description of Artificial Sequence: Synthetic oligonucleotide
ccaaguucccaucaauccu

SEQ ID NO: 1262158 - RNA, 19 nt, Artificial Sequence
  Description of Artificial Sequence: Synthetic oligonucleotide
ccucccucucucucucucc

SEQ ID NO: 1262159 - RNA, 19 nt, Artificial Sequence
  Description of Artificial Sequence: Synthetic oligonucleotide
gagcuugaagcgagcggaa

SEQ ID NO: 1262160 - RNA, 19 nt, Artificial Sequence
  Description of Artificial Sequence: Synthetic oligonucleotide
cgcugcgugguucuacacc

SEQ ID NO: 1262161 - RNA, 19 nt, Artificial Sequence
  Description of Artificial Sequence: Synthetic oligonucleotide
gagcggaauguucguuccu

SEQ ID NO: 1262162 - RNA, 19 nt, Artificial Sequence
  Description of Artificial Sequence: Synthetic oligonucleotide
cucucucuccucucucucu

SEQ ID NO: 1262163 - RNA, 19 nt, Artificial Sequence
  Description of Artificial Sequence: Synthetic oligonucleotide
acagcacggaucacuugua

SEQ ID NO: 1262164 - RNA, 19 nt, Artificial Sequence
  Description of Artificial Sequence: Synthetic oligonucleotide
agcgagcggaauguucguu

SEQ ID NO: 1262165 - RNA, 19 nt, Artificial Sequence
  Description of Artificial Sequence: Synthetic oligonucleotide
cccgcuacucggccggccg

SEQ ID NO: 1262166 - RNA, 19 nt, Artificial Sequence
  Description of Artificial Sequence: Synthetic oligonucleotide
ucccucccucucucucucu

SEQ ID NO: 1262167 - RNA, 19 nt, Artificial Sequence
  Description of Artificial Sequence: Synthetic oligonucleotide
gucacgggacaucucugau

SEQ ID NO: 1262168 - RNA, 19 nt, Artificial Sequence
  Description of Artificial Sequence: Synthetic oligonucleotide
auccuacuugagagguaga

SEQ ID NO: 1262169 - RNA, 19 nt, Artificial Sequence
  Description of Artificial Sequence: Synthetic oligonucleotide
cucucucucucuccucucu

SEQ ID NO: 1262170 - RNA, 19 nt, Artificial Sequence
  Description of Artificial Sequence: Synthetic oligonucleotide
gguuugggacagagaaaca

SEQ ID NO: 1262171 - RNA, 19 nt, Artificial Sequence
  Description of Artificial Sequence: Synthetic oligonucleotide
gccccggaauucaauggug

SEQ ID NO: 1262172 - RNA, 19 nt, Artificial Sequence
  Description of Artificial Sequence: Synthetic oligonucleotide
ggaaggcccaagaugugcu

SEQ ID NO: 1262173 - RNA, 19 nt, Artificial Sequence
  Description of Artificial Sequence: Synthetic oligonucleotide
caugacugauaaucuccuu

SEQ ID NO: 1262174 - RNA, 19 nt, Artificial Sequence
  Description of Artificial Sequence: Synthetic oligonucleotide
cugaucccaaaggccccuc

SEQ ID NO: 1262175 - RNA, 19 nt, Artificial Sequence
  Description of Artificial Sequence: Synthetic oligonucleotide
gcgaaucggaagcgccgug

SEQ ID NO: 1262176 - RNA, 19 nt, Artificial Sequence
  Description of Artificial Sequence: Synthetic oligonucleotide
ggccccggaauucaauggu

SEQ ID NO: 1262177 - RNA, 19 nt, Artificial Sequence
  Description of Artificial Sequence: Synthetic oligonucleotide
ccucucucuccucucucuc

SEQ ID NO: 1262178 - RNA, 19 nt, Artificial Sequence
  Description of Artificial Sequence: Synthetic oligonucleotide
acgggacaucucugauaau

SEQ ID NO: 1262179 - RNA, 19 nt, Artificial Sequence
  Description of Artificial Sequence: Synthetic oligonucleotide
cucccucucucucucuccu

SEQ ID NO: 1262180 - RNA, 19 nt, Artificial Sequence
  Description of Artificial Sequence: Synthetic oligonucleotide
cucuccucucucucccucu

SEQ ID NO: 1262181 - RNA, 19 nt, Artificial Sequence
  Description of Artificial Sequence: Synthetic oligonucleotide
cacgcggcucaacgugcuc

SEQ ID NO: 1262182 - RNA, 19 nt, Artificial Sequence
  Description of Artificial Sequence: Synthetic oligonucleotide
cgaaugaccaaguucccau

SEQ ID NO: 1262183 - RNA, 19 nt, Artificial Sequence
  Description of Artificial Sequence: Synthetic oligonucleotide
ccccaguauggaugugaac

SEQ ID NO: 1262184 - RNA, 19 nt, Artificial Sequence
  Description of Artificial Sequence: Synthetic oligonucleotide
gcugggaccccaugguggu

SEQ ID NO: 1262185 - RNA, 19 nt, Artificial Sequence
  Description of Artificial Sequence: Synthetic oligonucleotide
ccgaaugaccaaguuccca

SEQ ID NO: 1262186 - RNA, 19 nt, Artificial Sequence
  Description of Artificial Sequence: Synthetic oligonucleotide
aggggucaccugauacaaa

SEQ ID NO: 1262187 - RNA, 19 nt, Artificial Sequence
  Description of Artificial Sequence: Synthetic oligonucleotide
cucucuccucucucucucu

SEQ ID NO: 1262188 - RNA, 19 nt, Artificial Sequence
  Description of Artificial Sequence: Synthetic oligonucleotide
cugggaccccaugguggug

SEQ ID NO: 1262189 - RNA, 19 nt, Artificial Sequence
  Description of Artificial Sequence: Synthetic oligonucleotide
gugccgggcacggggucug

SEQ ID NO: 1262190 - RNA, 19 nt, Artificial Sequence
  Description of Artificial Sequence: Synthetic oligonucleotide
ccucucucucucuccucuc

SEQ ID NO: 1262191 - RNA, 19 nt, Artificial Sequence
  Description of Artificial Sequence: Synthetic oligonucleotide
cacggaucacuuguagcau

SEQ ID NO: 1262192 - RNA, 19 nt, Artificial Sequence
  Description of Artificial Sequence: Synthetic oligonucleotide
gugugucaugacugauaau

SEQ ID NO: 1262193 - RNA, 19 nt, Artificial Sequence
  Description of Artificial Sequence: Synthetic oligonucleotide
ccggaauucaauggugucu

SEQ ID NO: 1262194 - RNA, 19 nt, Artificial Sequence
  Description of Artificial Sequence: Synthetic oligonucleotide
uguggucauuuggguccuu

SEQ ID NO: 1262195 - RNA, 19 nt, Artificial Sequence
  Description of Artificial Sequence: Synthetic oligonucleotide
cccucccucucucucucuc

SEQ ID NO: 1262196 - RNA, 19 nt, Artificial Sequence
  Description of Artificial Sequence: Synthetic oligonucleotide
cgauccuugggguggccca

SEQ ID NO: 1262197 - RNA, 19 nt, Artificial Sequence
  Description of Artificial Sequence: Synthetic oligonucleotide
cucucuccucucucucccu

SEQ ID NO: 1262198 - RNA, 19 nt, Artificial Sequence
  Description of Artificial Sequence: Synthetic oligonucleotide
ccccggaauucaauggugu

SEQ ID NO: 1262199 - RNA, 19 nt, Artificial Sequence
  Description of Artificial Sequence: Synthetic oligonucleotide
gcgagguuugggacagaga

SEQ ID NO: 1262200 - RNA, 19 nt, Artificial Sequence
  Description of Artificial Sequence: Synthetic oligonucleotide
ggcgaaucggaagcgccgu

SEQ ID NO: 1262201 - RNA, 19 nt, Artificial Sequence
  Description of Artificial Sequence: Synthetic oligonucleotide
ccggugaagaacgcugaaa

SEQ ID NO: 1262202 - RNA, 19 nt, Artificial Sequence
  Description of Artificial Sequence: Synthetic oligonucleotide
cuccucucucucccucucu

SEQ ID NO: 1262203 - RNA, 19 nt, Artificial Sequence
  Description of Artificial Sequence: Synthetic oligonucleotide
ccgcuacucggccggccgc

SEQ ID NO: 1262204 - RNA, 19 nt, Artificial Sequence
  Description of Artificial Sequence: Synthetic oligonucleotide
cacccgcuacucggccggc

SEQ ID NO: 1262205 - RNA, 19 nt, Artificial Sequence
  Description of Artificial Sequence: Synthetic oligonucleotide
gcaccacgcggcucaacgu

SEQ ID NO: 1262206 - RNA, 19 nt, Artificial Sequence
  Description of Artificial Sequence: Synthetic oligonucleotide
cccucucucucucuccucu

SEQ ID NO: 1262207 - RNA, 19 nt, Artificial Sequence
  Description of Artificial Sequence: Synthetic oligonucleotide
cgggcacggggucugucuc

SEQ ID NO: 1262208 - RNA, 19 nt, Artificial Sequence
  Description of Artificial Sequence: Synthetic oligonucleotide
cggauggcgaauuucccuu

SEQ ID NO: 1262209 - RNA, 19 nt, Artificial Sequence
  Description of Artificial Sequence: Synthetic oligonucleotide
ccucucucucccucucucu

SEQ ID NO: 1262210 - RNA, 19 nt, Artificial Sequence
  Description of Artificial Sequence: Synthetic oligonucleotide
gccgcaguggguacuugau

SEQ ID NO: 1262211 - RNA, 19 nt, Artificial Sequence
  Description of Artificial Sequence: Synthetic oligonucleotide
cgagggugauggccgguga

SEQ ID NO: 1262212 - RNA, 19 nt, Artificial Sequence
  Description of Artificial Sequence: Synthetic oligonucleotide
gcgugguucuacacccgcu

SEQ ID NO: 1262213 - RNA, 19 nt, Artificial Sequence
  Description of Artificial Sequence: Synthetic oligonucleotide
cugcacggauggcgaauuu

SEQ ID NO: 1262214 - RNA, 19 nt, Artificial Sequence
  Description of Artificial Sequence: Synthetic oligonucleotide
caggguucucgagggugau

SEQ ID NO: 1262215 - RNA, 19 nt, Artificial Sequence
  Description of Artificial Sequence: Synthetic oligonucleotide
gcacggggucugucuccca

SEQ ID NO: 1262216 - RNA, 19 nt, Artificial Sequence
  Description of Artificial Sequence: Synthetic oligonucleotide
cgaaucggaagcgccgugu

SEQ ID NO: 1262217 - RNA, 19 nt, Artificial Sequence
  Description of Artificial Sequence: Synthetic oligonucleotide
ccgggcacggggucugucu

SEQ ID NO: 1262218 - RNA, 19 nt, Artificial Sequence
  Description of Artificial Sequence: Synthetic oligonucleotide
cgcuacucggccggccgcu

SEQ ID NO: 1262219 - RNA, 19 nt, Artificial Sequence
  Description of Artificial Sequence: Synthetic oligonucleotide
aaugacacucuuuugggac

SEQ ID NO: 1262220 - RNA, 19 nt, Artificial Sequence
  Description of Artificial Sequence: Synthetic oligonucleotide
auuagcauaaccugaggcc

SEQ ID NO: 1262221 - RNA, 19 nt, Artificial Sequence
  Description of Artificial Sequence: Synthetic oligonucleotide
uguaaauccggucacaagc

SEQ ID NO: 1262222 - RNA, 19 nt, Artificial Sequence
  Description of Artificial Sequence: Synthetic oligonucleotide
uaaguaguaaucacgaugu

SEQ ID NO: 1262223 - RNA, 19 nt, Artificial Sequence
  Description of Artificial Sequence: Synthetic oligonucleotide
ugagcuugguaacagaucc

SEQ ID NO: 1262224 - RNA, 19 nt, Artificial Sequence
  Description of Artificial Sequence: Synthetic oligonucleotide
auccaauaugauucgagcc

SEQ ID NO: 1262225 - RNA, 19 nt, Artificial Sequence
  Description of Artificial Sequence: Synthetic oligonucleotide
uccaauaugauucgagccc

SEQ ID NO: 1262226 - RNA, 19 nt, Artificial Sequence
  Description of Artificial Sequence: Synthetic oligonucleotide
ucaugcaauaaacaaugag

SEQ ID NO: 1262227 - RNA, 19 nt, Artificial Sequence
  Description of Artificial Sequence: Synthetic oligonucleotide
cuuauuugggccaucgcgg

SEQ ID NO: 1262228 - RNA, 19 nt, Artificial Sequence
  Description of Artificial Sequence: Synthetic oligonucleotide
aagcacgugccauuaagac

SEQ ID NO: 1262229 - RNA, 19 nt, Artificial Sequence
  Description of Artificial Sequence: Synthetic oligonucleotide
guaaguaguaaucacgaug

SEQ ID NO: 1262230 - RNA, 19 nt, Artificial Sequence
  Description of Artificial Sequence: Synthetic oligonucleotide
cuacuugaagcaaaggugc

SEQ ID NO: 1262231 - RNA, 19 nt, Artificial Sequence
  Description of Artificial Sequence: Synthetic oligonucleotide
cuucguuucucuuaccucg

SEQ ID NO: 1262232 - RNA, 19 nt, Artificial Sequence
  Description of Artificial Sequence: Synthetic oligonucleotide
gaacucaucaaauggggag

SEQ ID NO: 1262233 - RNA, 19 nt, Artificial Sequence
  Description of Artificial Sequence: Synthetic oligonucleotide
uguacaacgacaucuuucu

SEQ ID NO: 1262234 - RNA, 19 nt, Artificial Sequence
  Description of Artificial Sequence: Synthetic oligonucleotide
cagauugaguccaacaccg

SEQ ID NO: 1262235 - RNA, 19 nt, Artificial Sequence
  Description of Artificial Sequence: Synthetic oligonucleotide
agugcuaccacuugcagca

SEQ ID NO: 1262236 - RNA, 19 nt, Artificial Sequence
  Description of Artificial Sequence: Synthetic oligonucleotide
uguccuacucuguaaaucc

SEQ ID NO: 1262237 - RNA, 19 nt, Artificial Sequence
  Description of Artificial Sequence: Synthetic oligonucleotide
ucuuuagccagcacgaagu

SEQ ID NO: 1262238 - RNA, 19 nt, Artificial Sequence
  Description of Artificial Sequence: Synthetic oligonucleotide
auguagagaguacuuuugc

SEQ ID NO: 1262239 - RNA, 19 nt, Artificial Sequence
  Description of Artificial Sequence: Synthetic oligonucleotide
auaugauucgagcccagac

SEQ ID NO: 1262240 - RNA, 19 nt, Artificial Sequence
  Description of Artificial Sequence: Synthetic oligonucleotide
uuuaagaagcagacggacc

SEQ ID NO: 1262241 - RNA, 19 nt, Artificial Sequence
  Description of Artificial Sequence: Synthetic oligonucleotide
  modified_base (7)..(7): a, c, u, g, unknown or other
cuuuagnuaggacugaaga

SEQ ID NO: 1262242 - RNA, 19 nt, Artificial Sequence
  Description of Artificial Sequence: Synthetic oligonucleotide
uauguagagaguacuuuug

SEQ ID NO: 1262243 - RNA, 19 nt, Artificial Sequence
  Description of Artificial Sequence: Synthetic oligonucleotide
  modified_base (4)..(4): a, c, u, g, unknown or other
uccngugccacucuaguga

SEQ ID NO: 1262244 - RNA, 19 nt, Artificial Sequence
  Description of Artificial Sequence: Synthetic oligonucleotide
gagcuuguagcuuacacac

SEQ ID NO: 1262245 - RNA, 19 nt, Artificial Sequence
  Description of Artificial Sequence: Synthetic oligonucleotide
gagaagucgaguuuggaca

SEQ ID NO: 1262246 - RNA, 19 nt, Artificial Sequence
  Description of Artificial Sequence: Synthetic oligonucleotide
  modified_base (4)..(4): a, c, u, g, unknown or other
uagnuaggacugaagagcu

SEQ ID NO: 1262247 - RNA, 19 nt, Artificial Sequence
  Description of Artificial Sequence: Synthetic oligonucleotide
uuagcauaaccugaggccc

SEQ ID NO: 1262248 - RNA, 19 nt, Artificial Sequence
  Description of Artificial Sequence: Synthetic oligonucleotide
ugaagcacgugccauuaag

SEQ ID NO: 1262249 - RNA, 19 nt, Artificial Sequence
  Description of Artificial Sequence: Synthetic oligonucleotide
aaugagaaacaggaauauc

SEQ ID NO: 1262250 - RNA, 19 nt, Artificial Sequence
  Description of Artificial Sequence: Synthetic oligonucleotide
uguaggaaucuccuuggcc

SEQ ID NO: 1262251 - RNA, 19 nt, Artificial Sequence
  Description of Artificial Sequence: Synthetic oligonucleotide
cauuguaggaaucuccuug

SEQ ID NO: 1262252 - RNA, 19 nt, Artificial Sequence
  Description of Artificial Sequence: Synthetic oligonucleotide
auaaacaaugagaaacagg

SEQ ID NO: 1262253 - RNA, 19 nt, Artificial Sequence
  Description of Artificial Sequence: Synthetic oligonucleotide
uguaagaucuucucuucca

SEQ ID NO: 1262254 - RNA, 19 nt, Artificial Sequence
  Description of Artificial Sequence: Synthetic oligonucleotide
agagaguacuuuugcuugc

SEQ ID NO: 1262255 - RNA, 19 nt, Artificial Sequence
  Description of Artificial Sequence: Synthetic oligonucleotide
cauccaauaugauucgagc

SEQ ID NO: 1262256 - RNA, 19 nt, Artificial Sequence
  Description of Artificial Sequence: Synthetic oligonucleotide
uccuacucuguaaauccgg

SEQ ID NO: 1262257 - RNA, 19 nt, Artificial Sequence
  Description of Artificial Sequence: Synthetic oligonucleotide
gauugaguccaacaccgcc

SEQ ID NO: 1262258 - RNA, 19 nt, Artificial Sequence
  Description of Artificial Sequence: Synthetic oligonucleotide
agugacagcccaccgggcc

SEQ ID NO: 1262259 - RNA, 19 nt, Artificial Sequence
  Description of Artificial Sequence: Synthetic oligonucleotide
gacgaaccuguguacaacg

SEQ ID NO: 1262260 - RNA, 19 nt, Artificial Sequence
  Description of Artificial Sequence: Synthetic oligonucleotide
uucacuucguuucucuuac

SEQ ID NO: 1262261 - RNA, 19 nt, Artificial Sequence
  Description of Artificial Sequence: Synthetic oligonucleotide
aagucgcauguguucgucc

SEQ ID NO: 1262262 - RNA, 19 nt, Artificial Sequence
  Description of Artificial Sequence: Synthetic oligonucleotide
  modified_base (8)..(8): a, c, u, g, unknown or other
ucuuuagnuaggacugaag

SEQ ID NO: 1262263 - RNA, 19 nt, Artificial Sequence
  Description of Artificial Sequence: Synthetic oligonucleotide
ugagcuuguagcuuacaca

SEQ ID NO: 1262264 - RNA, 19 nt, Artificial Sequence
  Description of Artificial Sequence: Synthetic oligonucleotide
ucucuuaccucguucuucc

SEQ ID NO: 1262265 - RNA, 19 nt, Artificial Sequence
  Description of Artificial Sequence: Synthetic oligonucleotide
ucuuuaagaagcagacgga

SEQ ID NO: 1262266 - RNA, 19 nt, Artificial Sequence
  Description of Artificial Sequence: Synthetic oligonucleotide
uguagagaguacuuuugcu

SEQ ID NO: 1262267 - RNA, 19 nt, Artificial Sequence
  Description of Artificial Sequence: Synthetic oligonucleotide
ucuuaccucguucuuccag

SEQ ID NO: 1262268 - RNA, 19 nt, Artificial Sequence
  Description of Artificial Sequence: Synthetic oligonucleotide
ucgaggauucuucacauua

SEQ ID NO: 1262269 - RNA, 19 nt, Artificial Sequence
  Description of Artificial Sequence: Synthetic oligonucleotide
caaauggggagcaucggag

SEQ ID NO: 1262270 - RNA, 19 nt, Artificial Sequence
  Description of Artificial Sequence: Synthetic oligonucleotide
gagauuagcauaaccugag

SEQ ID NO: 1262271 - RNA, 19 nt, Artificial Sequence
  Description of Artificial Sequence: Synthetic oligonucleotide
uggaugucuggacucgagg

SEQ ID NO: 1262272 - RNA, 19 nt, Artificial Sequence
  Description of Artificial Sequence: Synthetic oligonucleotide
ugaacucaucaaaugggga

SEQ ID NO: 1262273 - RNA, 19 nt, Artificial Sequence
  Description of Artificial Sequence: Synthetic oligonucleotide
ugaccuggcaagauuguca

SEQ ID NO: 1262274 - RNA, 19 nt, Artificial Sequence
  Description of Artificial Sequence: Synthetic oligonucleotide
ucacagacgaaccugugua

SEQ ID NO: 1262275 - RNA, 19 nt, Artificial Sequence
  Description of Artificial Sequence: Synthetic oligonucleotide
aguaguaaucacgauguca

SEQ ID NO: 1262276 - RNA, 19 nt, Artificial Sequence
  Description of Artificial Sequence: Synthetic oligonucleotide
guaaucacgaugucauaug

SEQ ID NO: 1262277 - RNA, 19 nt, Artificial Sequence
  Description of Artificial Sequence: Synthetic oligonucleotide
agcucugucgggucuaggg

SEQ ID NO: 1262278 - RNA, 19 nt, Artificial Sequence
  Description of Artificial Sequence: Synthetic oligonucleotide
aaguaguaaucacgauguc

SEQ ID NO: 1262279 - RNA, 19 nt, Artificial Sequence
  Description of Artificial Sequence: Synthetic oligonucleotide
aaauggggagcaucggaga

SEQ ID NO: 1262280 - RNA, 19 nt, Artificial Sequence
  Description of Artificial Sequence: Synthetic oligonucleotide
  modified_base (2)..(2): a, c, u, g, unknown or other
gnuaggacugaagagcuga

SEQ ID NO: 1262281 - RNA, 19 nt, Artificial Sequence
  Description of Artificial Sequence: Synthetic oligonucleotide
agucgcauguguucguccg

SEQ ID NO: 1262282 - RNA, 19 nt, Artificial Sequence
  Description of Artificial Sequence: Synthetic oligonucleotide
gacgccagucuuuaagaag

SEQ ID NO: 1262283 - RNA, 19 nt, Artificial Sequence
  Description of Artificial Sequence: Synthetic oligonucleotide
  modified_base (11)..(11): a, c, u, g, unknown or other
gucucuuuagnuaggacug

SEQ ID NO: 1262284 - RNA, 19 nt, Artificial Sequence
  Description of Artificial Sequence: Synthetic oligonucleotide
agauuagcauaaccugagg

SEQ ID NO: 1262285 - RNA, 19 nt, Artificial Sequence
  Description of Artificial Sequence: Synthetic oligonucleotide
ugaaaggaccuguuuuggc

SEQ ID NO: 1262286 - RNA, 19 nt, Artificial Sequence
  Description of Artificial Sequence: Synthetic oligonucleotide
ucuagggccgacuucagua

SEQ ID NO: 1262287 - RNA, 19 nt, Artificial Sequence
  Description of Artificial Sequence: Synthetic oligonucleotide
uaccacggaguccucaugc

SEQ ID NO: 1262288 - RNA, 19 nt, Artificial Sequence
  Description of Artificial Sequence: Synthetic oligonucleotide
cuuuaagaagcagacggac

SEQ ID NO: 1262289 - RNA, 19 nt, Artificial Sequence
  Description of Artificial Sequence: Synthetic oligonucleotide
gguagagauagauucugag

SEQ ID NO: 1262290 - RNA, 19 nt, Artificial Sequence
  Description of Artificial Sequence: Synthetic oligonucleotide
accuguuuuggccaagucu

SEQ ID NO: 1262291 - RNA, 19 nt, Artificial Sequence
  Description of Artificial Sequence: Synthetic oligonucleotide
acucuuuugggacccuggg

SEQ ID NO: 1262292 - RNA, 19 nt, Artificial Sequence
  Description of Artificial Sequence: Synthetic oligonucleotide
ucggagaaacuucauuagu

SEQ ID NO: 1262293 - RNA, 19 nt, Artificial Sequence
  Description of Artificial Sequence: Synthetic oligonucleotide
ucugucgggucuagggccg

SEQ ID NO: 1262294 - RNA, 19 nt, Artificial Sequence
  Description of Artificial Sequence: Synthetic oligonucleotide
caaagucagagcacugagc

SEQ ID NO: 1262295 - RNA, 19 nt, Artificial Sequence
  Description of Artificial Sequence: Synthetic oligonucleotide
gcuguaaguaguaaucacg

SEQ ID NO: 1262296 - RNA, 19 nt, Artificial Sequence
  Description of Artificial Sequence: Synthetic oligonucleotide
uccaacaccgccagccaag

SEQ ID NO: 1262297 - RNA, 19 nt, Artificial Sequence
  Description of Artificial Sequence: Synthetic oligonucleotide
aauggggagcaucggagaa

SEQ ID NO: 1262298 - RNA, 19 nt, Artificial Sequence
  Description of Artificial Sequence: Synthetic oligonucleotide
ccuuauuugggccaucgcg

SEQ ID NO: 1262299 - RNA, 19 nt, Artificial Sequence
  Description of Artificial Sequence: Synthetic oligonucleotide
cagacuacuugaagcaaag

SEQ ID NO: 1262300 - RNA, 19 nt, Artificial Sequence
  Description of Artificial Sequence: Synthetic oligonucleotide
uuauuugggccaucgcgga

SEQ ID NO: 1262301 - RNA, 19 nt, Artificial Sequence
  Description of Artificial Sequence: Synthetic oligonucleotide
ggguccaugguagagauag

SEQ ID NO: 1262302 - RNA, 19 nt, Artificial Sequence
  Description of Artificial Sequence: Synthetic oligonucleotide
augauucgagcccagacua

SEQ ID NO: 1262303 - RNA, 19 nt, Artificial Sequence
  Description of Artificial Sequence: Synthetic oligonucleotide
agcuugguaacagauccuc

SEQ ID NO: 1262304 - RNA, 19 nt, Artificial Sequence
  Description of Artificial Sequence: Synthetic oligonucleotide
cuuagugcucuuucgugug

SEQ ID NO: 1262305 - RNA, 19 nt, Artificial Sequence
  Description of Artificial Sequence: Synthetic oligonucleotide
gacccaaugcuucggacac

SEQ ID NO: 1262306 - RNA, 19 nt, Artificial Sequence
  Description of Artificial Sequence: Synthetic oligonucleotide
gacucgaggauucuucaca

SEQ ID NO: 1262307 - RNA, 19 nt, Artificial Sequence
  Description of Artificial Sequence: Synthetic oligonucleotide
cacguagaagcucuuuccc

SEQ ID NO: 1262308 - RNA, 19 nt, Artificial Sequence
  Description of Artificial Sequence: Synthetic oligonucleotide
acgaagucgcauguguucg

SEQ ID NO: 1262309 - RNA, 19 nt, Artificial Sequence
  Description of Artificial Sequence: Synthetic oligonucleotide
uccgagaagucgaguuugg

SEQ ID NO: 1262310 - RNA, 19 nt, Artificial Sequence
  Description of Artificial Sequence: Synthetic oligonucleotide
agcacgugccauuaagaca

SEQ ID NO: 1262311 - RNA, 19 nt, Artificial Sequence
  Description of Artificial Sequence: Synthetic oligonucleotide
uccagugcauguccagaag

SEQ ID NO: 1262312 - RNA, 19 nt, Artificial Sequence
  Description of Artificial Sequence: Synthetic oligonucleotide
guaacagauccuccagacc

SEQ ID NO: 1262313 - RNA, 19 nt, Artificial Sequence
  Description of Artificial Sequence: Synthetic oligonucleotide
gguaacagauccuccagac

SEQ ID NO: 1262314 - RNA, 19 nt, Artificial Sequence
  Description of Artificial Sequence: Synthetic oligonucleotide
ucacauuaugagcuucauc

SEQ ID NO: 1262315 - RNA, 19 nt, Artificial Sequence
  Description of Artificial Sequence: Synthetic oligonucleotide
uguaaguaguaaucacgau

SEQ ID NO: 1262316 - RNA, 19 nt, Artificial Sequence
  Description of Artificial Sequence: Synthetic oligonucleotide
acaaacggugggugauggc

SEQ ID NO: 1262317 - RNA, 19 nt, Artificial Sequence
  Description of Artificial Sequence: Synthetic oligonucleotide
cugagcuuguagcuuacac

SEQ ID NO: 1262318 - RNA, 19 nt, Artificial Sequence
  Description of Artificial Sequence: Synthetic oligonucleotide
ucccuuauuugggccaucg

SEQ ID NO: 1262319 - RNA, 19 nt, Artificial Sequence
  Description of Artificial Sequence: Synthetic oligonucleotide
agaagucgaguuuggacaa

SEQ ID NO: 1262320 - RNA, 19 nt, Artificial Sequence
  Description of Artificial Sequence: Synthetic oligonucleotide
acguggacggugcuggguc

SEQ ID NO: 1262321 - RNA, 19 nt, Artificial Sequence
  Description of Artificial Sequence: Synthetic oligonucleotide
  modified_base (10)..(10): a, c, u, g, unknown or other
ucucuuuagnuaggacuga

SEQ ID NO: 1262322 - RNA, 19 nt, Artificial Sequence
  Description of Artificial Sequence: Synthetic oligonucleotide
uuguaggaaucuccuuggc

SEQ ID NO: 1262323 - RNA, 19 nt, Artificial Sequence
  Description of Artificial Sequence: Synthetic oligonucleotide
ucaaccugacucuuccaaa

SEQ ID NO: 1262324 - RNA, 19 nt, Artificial Sequence
  Description of Artificial Sequence: Synthetic oligonucleotide
uggaguaagucaguccgug

SEQ ID NO: 1262325 - RNA, 19 nt, Artificial Sequence
  Description of Artificial Sequence: Synthetic oligonucleotide
agucgcagaagcugggaca

SEQ ID NO: 1262326 - RNA, 19 nt, Artificial Sequence
  Description of Artificial Sequence: Synthetic oligonucleotide
agccaagagggagauuagc

SEQ ID NO: 1262327 - RNA, 19 nt, Artificial Sequence
  Description of Artificial Sequence: Synthetic oligonucleotide
aagacaaacggugggugau

SEQ ID NO: 1262328 - RNA, 19 nt, Artificial Sequence
  Description of Artificial Sequence: Synthetic oligonucleotide
cgaguuuggacaaagucag

SEQ ID NO: 1262329 - RNA, 19 nt, Artificial Sequence
  Description of Artificial Sequence: Synthetic oligonucleotide
  modified_base (15)..(15): a, c, u, g, unknown or other
ucgugucucuuuagnuagg

SEQ ID NO: 1262330 - RNA, 19 nt, Artificial Sequence
  Description of Artificial Sequence: Synthetic oligonucleotide
guucguccggcacacguag

SEQ ID NO: 1262331 - RNA, 19 nt, Artificial Sequence
  Description of Artificial Sequence: Synthetic oligonucleotide
cuagggccgacuucaguag

SEQ ID NO: 1262332 - RNA, 19 nt, Artificial Sequence
  Description of Artificial Sequence: Synthetic oligonucleotide
  modified_base (7)..(7): a, c, u, g, unknown or other
aacuccngugccacucuag

SEQ ID NO: 1262333 - RNA, 19 nt, Artificial Sequence
  Description of Artificial Sequence: Synthetic oligonucleotide
uggacucgaggauucuuca

SEQ ID NO: 1262334 - RNA, 19 nt, Artificial Sequence
  Description of Artificial Sequence: Synthetic oligonucleotide
acgacaucuuucuccuguc

SEQ ID NO: 1262335 - RNA, 19 nt, Artificial Sequence
  Description of Artificial Sequence: Synthetic oligonucleotide
ggauuaucagggcuuuucc

SEQ ID NO: 1262336 - RNA, 19 nt, Artificial Sequence
  Description of Artificial Sequence: Synthetic oligonucleotide
acguagaagcucuuucccu

SEQ ID NO: 1262337 - RNA, 19 nt, Artificial Sequence
  Description of Artificial Sequence: Synthetic oligonucleotide
auugaguccaacaccgcca

SEQ ID NO: 1262338 - RNA, 19 nt, Artificial Sequence
  Description of Artificial Sequence: Synthetic oligonucleotide
uuaccucguucuuccagug

SEQ ID NO: 1262339 - RNA, 19 nt, Artificial Sequence
  Description of Artificial Sequence: Synthetic oligonucleotide
cagcgagcagggcagaccc

SEQ ID NO: 1262340 - RNA, 19 nt, Artificial Sequence
  Description of Artificial Sequence: Synthetic oligonucleotide
cuggacucgaggauucuuc

SEQ ID NO: 1262341 - RNA, 19 nt, Artificial Sequence
  Description of Artificial Sequence: Synthetic oligonucleotide
  modified_base (6)..(6): a, c, u, g, unknown or other
acuccngugccacucuagu

SEQ ID NO: 1262342 - RNA, 19 nt, Artificial Sequence
  Description of Artificial Sequence: Synthetic oligonucleotide
gagaguacuuuugcuugcc

SEQ ID NO: 1262343 - RNA, 19 nt, Artificial Sequence
  Description of Artificial Sequence: Synthetic oligonucleotide
aucaaauggggagcaucgg

SEQ ID NO: 1262344 - RNA, 19 nt, Artificial Sequence
  Description of Artificial Sequence: Synthetic oligonucleotide
aggucugcugcagcggagc

SEQ ID NO: 1262345 - RNA, 19 nt, Artificial Sequence
  Description of Artificial Sequence: Synthetic oligonucleotide
agacuacuugaagcaaagg

SEQ ID NO: 1262346 - RNA, 19 nt, Artificial Sequence
  Description of Artificial Sequence: Synthetic oligonucleotide
auguguucguccggcacac

SEQ ID NO: 1262347 - RNA, 19 nt, Artificial Sequence
  Description of Artificial Sequence: Synthetic oligonucleotide
aaccuguguacaacgacau

SEQ ID NO: 1262348 - RNA, 19 nt, Artificial Sequence
  Description of Artificial Sequence: Synthetic oligonucleotide
agauugaguccaacaccgc

SEQ ID NO: 1262349 - RNA, 19 nt, Artificial Sequence
  Description of Artificial Sequence: Synthetic oligonucleotide
cgaugucauauguagagag

SEQ ID NO: 1262350 - RNA, 19 nt, Artificial Sequence
  Description of Artificial Sequence: Synthetic oligonucleotide
guguacaacgacaucuuuc

SEQ ID NO: 1262351 - RNA, 19 nt, Artificial Sequence
  Description of Artificial Sequence: Synthetic oligonucleotide
uucucuuaccucguucuuc

SEQ ID NO: 1262352 - RNA, 19 nt, Artificial Sequence
  Description of Artificial Sequence: Synthetic oligonucleotide
cuuucccuuauuugggcca

SEQ ID NO: 1262353 - RNA, 19 nt, Artificial Sequence
  Description of Artificial Sequence: Synthetic oligonucleotide
gccgauuucuguugggucc

SEQ ID NO: 1262354 - RNA, 19 nt, Artificial Sequence
  Description of Artificial Sequence: Synthetic oligonucleotide
gaagcacgugccauuaaga

SEQ ID NO: 1262355 - RNA, 19 nt, Artificial Sequence
  Description of Artificial Sequence: Synthetic oligonucleotide
uauuugggccaucgcggac

SEQ ID NO: 1262356 - RNA, 19 nt, Artificial Sequence
  Description of Artificial Sequence: Synthetic oligonucleotide
uucugaguuuguugcuugu

SEQ ID NO: 1262357 - RNA, 19 nt, Artificial Sequence
  Description of Artificial Sequence: Synthetic oligonucleotide
gacaggacgaggccuucac

SEQ ID NO: 1262358 - RNA, 19 nt, Artificial Sequence
  Description of Artificial Sequence: Synthetic oligonucleotide
ucuuucguguguugucaaa

SEQ ID NO: 1262359 - RNA, 19 nt, Artificial Sequence
  Description of Artificial Sequence: Synthetic oligonucleotide
cacagacgaaccuguguac

SEQ ID NO: 1262360 - RNA, 19 nt, Artificial Sequence
  Description of Artificial Sequence: Synthetic oligonucleotide
ucguccggcacacguagaa

SEQ ID NO: 1262361 - RNA, 19 nt, Artificial Sequence
  Description of Artificial Sequence: Synthetic oligonucleotide
ugccacucuagugaaugga

SEQ ID NO: 1262362 - RNA, 19 nt, Artificial Sequence
  Description of Artificial Sequence: Synthetic oligonucleotide
ccuugaccuggcaagauug

SEQ ID NO: 1262363 - RNA, 19 nt, Artificial Sequence
  Description of Artificial Sequence: Synthetic oligonucleotide
acagacgaaccuguguaca

SEQ ID NO: 1262364 - RNA, 19 nt, Artificial Sequence
  Description of Artificial Sequence: Synthetic oligonucleotide
cccgggagugguuaaaugc

SEQ ID NO: 1262365 - RNA, 19 nt, Artificial Sequence
  Description of Artificial Sequence: Synthetic oligonucleotide
agugcucuuucguguguug

SEQ ID NO: 1262366 - RNA, 19 nt, Artificial Sequence
  Description of Artificial Sequence: Synthetic oligonucleotide
guccuacucuguaaauccg

SEQ ID NO: 1262367 - RNA, 19 nt, Artificial Sequence
  Description of Artificial Sequence: Synthetic oligonucleotide
ggagauuagcauaaccuga

SEQ ID NO: 1262368 - RNA, 19 nt, Artificial Sequence
  Description of Artificial Sequence: Synthetic oligonucleotide
gacaggacguggacggugc

SEQ ID NO: 1262369 - RNA, 19 nt, Artificial Sequence
  Description of Artificial Sequence: Synthetic oligonucleotide
gucaaccugacucuuccaa

SEQ ID NO: 1262370 - RNA, 19 nt, Artificial Sequence
  Description of Artificial Sequence: Synthetic oligonucleotide
aacagauccuccagacccu

SEQ ID NO: 1262371 - RNA, 19 nt, Artificial Sequence
  Description of Artificial Sequence: Synthetic oligonucleotide
cuuuagccagcacgaaguc

SEQ ID NO: 1262372 - RNA, 19 nt, Artificial Sequence
  Description of Artificial Sequence: Synthetic oligonucleotide
uccccucacagacgaaccu

SEQ ID NO: 1262373 - RNA, 19 nt, Artificial Sequence
  Description of Artificial Sequence: Synthetic oligonucleotide
cuccgagaagucgaguuug

SEQ ID NO: 1262374 - RNA, 19 nt, Artificial Sequence
  Description of Artificial Sequence: Synthetic oligonucleotide
ggcaagauugucaaccuga

SEQ ID NO: 1262375 - RNA, 19 nt, Artificial Sequence
  Description of Artificial Sequence: Synthetic oligonucleotide
  modified_base (5)..(5): a, c, u, g, unknown or other
cuccngugccacucuagug

SEQ ID NO: 1262376 - RNA, 19 nt, Artificial Sequence
  Description of Artificial Sequence: Synthetic oligonucleotide
uguucguccggcacacgua

SEQ ID NO: 1262377 - RNA, 19 nt, Artificial Sequence
  Description of Artificial Sequence: Synthetic oligonucleotide
ggacccugggccuuuucgg

SEQ ID NO: 1262378 - RNA, 19 nt, Artificial Sequence
  Description of Artificial Sequence: Synthetic oligonucleotide
ggcuguaaguaguaaucac

SEQ ID NO: 1262379 - RNA, 19 nt, Artificial Sequence
  Description of Artificial Sequence: Synthetic oligonucleotide
cauguguucguccggcaca

SEQ ID NO: 1262380 - RNA, 19 nt, Artificial Sequence
  Description of Artificial Sequence: Synthetic oligonucleotide
agagggagauuagcauaac

SEQ ID NO: 1262381 - RNA, 19 nt, Artificial Sequence
  Description of Artificial Sequence: Synthetic oligonucleotide
gucgcauguguucguccgg

SEQ ID NO: 1262382 - RNA, 19 nt, Artificial Sequence
  Description of Artificial Sequence: Synthetic oligonucleotide
  modified_base (8)..(8): a, c, u, g, unknown or other
aaacuccngugccacucua

SEQ ID NO: 1262383 - RNA, 19 nt, Artificial Sequence
  Description of Artificial Sequence: Synthetic oligonucleotide
agcccaccgggccugagcu

SEQ ID NO: 1262384 - RNA, 19 nt, Artificial Sequence
  Description of Artificial Sequence: Synthetic oligonucleotide
ucgcauguguucguccggc

SEQ ID NO: 1262385 - RNA, 19 nt, Artificial Sequence
  Description of Artificial Sequence: Synthetic oligonucleotide
ccgggagugguuaaaugcc

SEQ ID NO: 1262386 - RNA, 19 nt, Artificial Sequence
  Description of Artificial Sequence: Synthetic oligonucleotide
gacggacccaaugcuucgg

SEQ ID NO: 1262387 - RNA, 19 nt, Artificial Sequence
  Description of Artificial Sequence: Synthetic oligonucleotide
ugggccuuuucggauugcc

SEQ ID NO: 1262388 - RNA, 19 nt, Artificial Sequence
  Description of Artificial Sequence: Synthetic oligonucleotide
acgugccauuaagacaaac

SEQ ID NO: 1262389 - RNA, 19 nt, Artificial Sequence
  Description of Artificial Sequence: Synthetic oligonucleotide
uucacauuaugagcuucau

SEQ ID NO: 1262390 - RNA, 19 nt, Artificial Sequence
  Description of Artificial Sequence: Synthetic oligonucleotide
gggacccugggccuuuucg

SEQ ID NO: 1262391 - RNA, 19 nt, Artificial Sequence
  Description of Artificial Sequence: Synthetic oligonucleotide
uaguaaucacgaugucaua

SEQ ID NO: 1262392 - RNA, 19 nt, Artificial Sequence
  Description of Artificial Sequence: Synthetic oligonucleotide
gacccugggccuuuucgga

SEQ ID NO: 1262393 - RNA, 19 nt, Artificial Sequence
  Description of Artificial Sequence: Synthetic oligonucleotide
accacggaguccucaugca

SEQ ID NO: 1262394 - RNA, 19 nt, Artificial Sequence
  Description of Artificial Sequence: Synthetic oligonucleotide
gacgaggccuucacucucc

SEQ ID NO: 1262395 - RNA, 19 nt, Artificial Sequence
  Description of Artificial Sequence: Synthetic oligonucleotide
gaagucgcauguguucguc

SEQ ID NO: 1262396 - RNA, 19 nt, Artificial Sequence
  Description of Artificial Sequence: Synthetic oligonucleotide
gggauugacagagccauca

SEQ ID NO: 1262397 - RNA, 19 nt, Artificial Sequence
  Description of Artificial Sequence: Synthetic oligonucleotide
guaaauccggucacaagcu

SEQ ID NO: 1262398 - RNA, 19 nt, Artificial Sequence
  Description of Artificial Sequence: Synthetic oligonucleotide
gcggacgccagucuuuaag

SEQ ID NO: 1262399 - RNA, 19 nt, Artificial Sequence
  Description of Artificial Sequence: Synthetic oligonucleotide
agggccgacuucaguaggg

SEQ ID NO: 1262400 - RNA, 19 nt, Artificial Sequence
  Description of Artificial Sequence: Synthetic oligonucleotide
uuucccuuauuugggccau

SEQ ID NO: 1262401 - RNA, 19 nt, Artificial Sequence
  Description of Artificial Sequence: Synthetic oligonucleotide
cgagaagucgaguuuggac

SEQ ID NO: 1262402 - RNA, 19 nt, Artificial Sequence
  Description of Artificial Sequence: Synthetic oligonucleotide
cagccaagagggagauuag

SEQ ID NO: 1262403 - RNA, 19 nt, Artificial Sequence
  Description of Artificial Sequence: Synthetic oligonucleotide
gauucgagcccagacuacu

SEQ ID NO: 1262404 - RNA, 19 nt, Artificial Sequence
  Description of Artificial Sequence: Synthetic oligonucleotide
gggguuccagugcaugucc

SEQ ID NO: 1262405 - RNA, 19 nt, Artificial Sequence
  Description of Artificial Sequence: Synthetic oligonucleotide
gcucugucgggucuagggc

SEQ ID NO: 1262406 - RNA, 19 nt, Artificial Sequence
  Description of Artificial Sequence: Synthetic oligonucleotide
acggaguccucaugcaaua

SEQ ID NO: 1262407 - RNA, 19 nt, Artificial Sequence
  Description of Artificial Sequence: Synthetic oligonucleotide
gaccuguuuuggccaaguc

SEQ ID NO: 1262408 - RNA, 19 nt, Artificial Sequence
  Description of Artificial Sequence: Synthetic oligonucleotide
  modified_base (3)..(3): a, c, u, g, unknown or other
agnuaggacugaagagcug

SEQ ID NO: 1262409 - RNA, 19 nt, Artificial Sequence
  Description of Artificial Sequence: Synthetic oligonucleotide
gugagcuugguaacagauc

SEQ ID NO: 1262410 - RNA, 19 nt, Artificial Sequence
  Description of Artificial Sequence: Synthetic oligonucleotide
gcccagacuacuugaagca

SEQ ID NO: 1262411 - RNA, 19 nt, Artificial Sequence
  Description of Artificial Sequence: Synthetic oligonucleotide
ucgggucuagggccgacuu

SEQ ID NO: 1262412 - RNA, 19 nt, Artificial Sequence
  Description of Artificial Sequence: Synthetic oligonucleotide
acggacccaaugcuucgga

SEQ ID NO: 1262413 - RNA, 19 nt, Artificial Sequence
  Description of Artificial Sequence: Synthetic oligonucleotide
ggugauggcuccgagaagu

SEQ ID NO: 1262414 - RNA, 19 nt, Artificial Sequence
  Description of Artificial Sequence: Synthetic oligonucleotide
uucguccggcacacguaga

SEQ ID NO: 1262415 - RNA, 19 nt, Artificial Sequence
  Description of Artificial Sequence: Synthetic oligonucleotide
ugggauugacagagccauc

SEQ ID NO: 1262416 - RNA, 19 nt, Artificial Sequence
  Description of Artificial Sequence: Synthetic oligonucleotide
guacaacgacaucuuucuc

SEQ ID NO: 1262417 - RNA, 19 nt, Artificial Sequence
  Description of Artificial Sequence: Synthetic oligonucleotide
caaacggugggugauggcu

SEQ ID NO: 1262418 - RNA, 19 nt, Artificial Sequence
  Description of Artificial Sequence: Synthetic oligonucleotide
cagcagagaagacaccuua

SEQ ID NO: 1262419 - RNA, 19 nt, Artificial Sequence
  Description of Artificial Sequence: Synthetic oligonucleotide
gccaagagggagauuagca

SEQ ID NO: 1262420 - RNA, 19 nt, Artificial Sequence
  Description of Artificial Sequence: Synthetic oligonucleotide
uggcggagucgcagaagcu

SEQ ID NO: 1262421 - RNA, 19 nt, Artificial Sequence
  Description of Artificial Sequence: Synthetic oligonucleotide
ggcggagucgcagaagcug

SEQ ID NO: 1262422 - RNA, 19 nt, Artificial Sequence
  Description of Artificial Sequence: Synthetic oligonucleotide
gcggagucgcagaagcugg

SEQ ID NO: 1262423 - RNA, 19 nt, Artificial Sequence
  Description of Artificial Sequence: Synthetic oligonucleotide
ugguccacugagagacaau

SEQ ID NO: 1262424 - RNA, 19 nt, Artificial Sequence
  Description of Artificial Sequence: Synthetic oligonucleotide
  modified_base (13)..(13): a, c, u, g, unknown or other
gugucucuuuagnuaggac

SEQ ID NO: 1262425 - RNA, 19 nt, Artificial Sequence
  Description of Artificial Sequence: Synthetic oligonucleotide
acuggcggagucgcagaag

SEQ ID NO: 1262426 - RNA, 19 nt, Artificial Sequence
  Description of Artificial Sequence: Synthetic oligonucleotide
gaggucugcugcagcggag

SEQ ID NO: 1262427 - RNA, 19 nt, Artificial Sequence
  Description of Artificial Sequence: Synthetic oligonucleotide
uguguucguccggcacacg

SEQ ID NO: 1262428 - RNA, 19 nt, Artificial Sequence
  Description of Artificial Sequence: Synthetic oligonucleotide
uggauucagcgagcagggc

SEQ ID NO: 1262429 - RNA, 19 nt, Artificial Sequence
  Description of Artificial Sequence: Synthetic oligonucleotide
gcaagauugucaaccugac

SEQ ID NO: 1262430 - RNA, 19 nt, Artificial Sequence
  Description of Artificial Sequence: Synthetic oligonucleotide
gagggguuccagugcaugu

SEQ ID NO: 1262431 - RNA, 19 nt, Artificial Sequence
  Description of Artificial Sequence: Synthetic oligonucleotide
  modified_base (9)..(9): a, c, u, g, unknown or other
cucuuuagnuaggacugaa

SEQ ID NO: 1262432 - RNA, 19 nt, Artificial Sequence
  Description of Artificial Sequence: Synthetic oligonucleotide
gugggugauggcuccgaga

SEQ ID NO: 1262433 - RNA, 19 nt, Artificial Sequence
  Description of Artificial Sequence: Synthetic oligonucleotide
gggucuagggccgacuuca

SEQ ID NO: 1262434 - RNA, 19 nt, Artificial Sequence
  Description of Artificial Sequence: Synthetic oligonucleotide
acgaaccuguguacaacga

SEQ ID NO: 1262435 - RNA, 19 nt, Artificial Sequence
  Description of Artificial Sequence: Synthetic oligonucleotide
gcauguguucguccggcac

SEQ ID NO: 1262436 - RNA, 19 nt, Artificial Sequence
  Description of Artificial Sequence: Synthetic oligonucleotide
cauauguagagaguacuuu

SEQ ID NO: 1262437 - RNA, 19 nt, Artificial Sequence
  Description of Artificial Sequence: Synthetic oligonucleotide
uucagcgagcagggcagac

SEQ ID NO: 1262438 - RNA, 19 nt, Artificial Sequence
  Description of Artificial Sequence: Synthetic oligonucleotide
caaugagaaacaggaauau

SEQ ID NO: 1262439 - RNA, 19 nt, Artificial Sequence
  Description of Artificial Sequence: Synthetic oligonucleotide
guguucguccggcacacgu

SEQ ID NO: 1262440 - RNA, 19 nt, Artificial Sequence
  Description of Artificial Sequence: Synthetic oligonucleotide
ggacucgaggauucuucac

SEQ ID NO: 1262441 - RNA, 19 nt, Artificial Sequence
  Description of Artificial Sequence: Synthetic oligonucleotide
ccgggccugagcuuguagc

SEQ ID NO: 1262442 - RNA, 19 nt, Artificial Sequence
  Description of Artificial Sequence: Synthetic oligonucleotide
aagacaccuuagugcucuu

SEQ ID NO: 1262443 - RNA, 19 nt, Artificial Sequence
  Description of Artificial Sequence: Synthetic oligonucleotide
cuggcaagauugucaaccu

SEQ ID NO: 1262444 - RNA, 19 nt, Artificial Sequence
  Description of Artificial Sequence: Synthetic oligonucleotide
cagucagauugaguccaac

SEQ ID NO: 1262445 - RNA, 19 nt, Artificial Sequence
  Description of Artificial Sequence: Synthetic oligonucleotide
acccugggccuuuucggau

SEQ ID NO: 1262446 - RNA, 19 nt, Artificial Sequence
  Description of Artificial Sequence: Synthetic oligonucleotide
uuuugggacccugggccuu

SEQ ID NO: 1262447 - RNA, 19 nt, Artificial Sequence
  Description of Artificial Sequence: Synthetic oligonucleotide
caacaccgccagccaagag

SEQ ID NO: 1262448 - RNA, 19 nt, Artificial Sequence
  Description of Artificial Sequence: Synthetic oligonucleotide
caccuugaagcacgugcca

SEQ ID NO: 1262449 - RNA, 19 nt, Artificial Sequence
  Description of Artificial Sequence: Synthetic oligonucleotide
  modified_base (19)..(19): a, c, u, g, unknown or other
gccuucgugucucuuuagn

SEQ ID NO: 1262450 - RNA, 19 nt, Artificial Sequence
  Description of Artificial Sequence: Synthetic oligonucleotide
gcucuuucguguguuguca

SEQ ID NO: 1262451 - RNA, 19 nt, Artificial Sequence
  Description of Artificial Sequence: Synthetic oligonucleotide
cuugaccuggcaagauugu

SEQ ID NO: 1262452 - RNA, 19 nt, Artificial Sequence
  Description of Artificial Sequence: Synthetic oligonucleotide
ccagacuacuugaagcaaa

SEQ ID NO: 1262453 - RNA, 19 nt, Artificial Sequence
  Description of Artificial Sequence: Synthetic oligonucleotide
gagcaccggggcacacugg

SEQ ID NO: 1262454 - RNA, 19 nt, Artificial Sequence
  Description of Artificial Sequence: Synthetic oligonucleotide
cacggaguccucaugcaau

SEQ ID NO: 1262455 - RNA, 19 nt, Artificial Sequence
  Description of Artificial Sequence: Synthetic oligonucleotide
uggacggugcugggucuca

SEQ ID NO: 1262456 - RNA, 19 nt, Artificial Sequence
  Description of Artificial Sequence: Synthetic oligonucleotide
aggaccuguuuuggccaag

SEQ ID NO: 1262457 - RNA, 19 nt, Artificial Sequence
  Description of Artificial Sequence: Synthetic oligonucleotide
gaagucgaguuuggacaaa

SEQ ID NO: 1262458 - RNA, 19 nt, Artificial Sequence
  Description of Artificial Sequence: Synthetic oligonucleotide
ggacgccagucuuuaagaa

SEQ ID NO: 1262459 - RNA, 19 nt, Artificial Sequence
  Description of Artificial Sequence: Synthetic oligonucleotide
cagcggagcaccggggcac

SEQ ID NO: 1262460 - RNA, 19 nt, Artificial Sequence
  Description of Artificial Sequence: Synthetic oligonucleotide
ggacgaggccuucacucuc

SEQ ID NO: 1262461 - RNA, 19 nt, Artificial Sequence
  Description of Artificial Sequence: Synthetic oligonucleotide
cuguguacaacgacaucuu

SEQ ID NO: 1262462 - RNA, 19 nt, Artificial Sequence
  Description of Artificial Sequence: Synthetic oligonucleotide
uuugggacccugggccuuu

SEQ ID NO: 1262463 - RNA, 19 nt, Artificial Sequence
  Description of Artificial Sequence: Synthetic oligonucleotide
gggagugguuaaaugccuc

SEQ ID NO: 1262464 - RNA, 19 nt, Artificial Sequence
  Description of Artificial Sequence: Synthetic oligonucleotide
auucgagcccagacuacuu

SEQ ID NO: 1262465 - RNA, 19 nt, Artificial Sequence
  Description of Artificial Sequence: Synthetic oligonucleotide
  modified_base (9)..(9): a, c, u, g, unknown or other
caaacuccngugccacucu

SEQ ID NO: 1262466 - RNA, 19 nt, Artificial Sequence
  Description of Artificial Sequence: Synthetic oligonucleotide
ccuuagugcucuuucgugu

SEQ ID NO: 1262467 - RNA, 19 nt, Artificial Sequence
  Description of Artificial Sequence: Synthetic oligonucleotide
cccuuauuugggccaucgc

SEQ ID NO: 1262468 - RNA, 19 nt, Artificial Sequence
  Description of Artificial Sequence: Synthetic oligonucleotide
cucuuaccucguucuucca

SEQ ID NO: 1262469 - RNA, 19 nt, Artificial Sequence
  Description of Artificial Sequence: Synthetic oligonucleotide
ucgcggacgccagucuuua

SEQ ID NO: 1262470 - RNA, 19 nt, Artificial Sequence
  Description of Artificial Sequence: Synthetic oligonucleotide
agacaccuuagugcucuuu

SEQ ID NO: 1262471 - RNA, 19 nt, Artificial Sequence
  Description of Artificial Sequence: Synthetic oligonucleotide
ccagaaggcuguaaguagu

SEQ ID NO: 1262472 - RNA, 19 nt, Artificial Sequence
  Description of Artificial Sequence: Synthetic oligonucleotide
ggaaucuccuuggccagaa

SEQ ID NO: 1262473 - RNA, 19 nt, Artificial Sequence
  Description of Artificial Sequence: Synthetic oligonucleotide
ggguuccagugacagccca

SEQ ID NO: 1262474 - RNA, 19 nt, Artificial Sequence
  Description of Artificial Sequence: Synthetic oligonucleotide
cugagaugcccuccacacu

SEQ ID NO: 1262475 - RNA, 19 nt, Artificial Sequence
  Description of Artificial Sequence: Synthetic oligonucleotide
acccaaugcuucggacacu

SEQ ID NO: 1262476 - RNA, 19 nt, Artificial Sequence
  Description of Artificial Sequence: Synthetic oligonucleotide
  modified_base (14)..(14): a, c, u, g, unknown or other
cgugucucuuuagnuagga

SEQ ID NO: 1262477 - RNA, 19 nt, Artificial Sequence
  Description of Artificial Sequence: Synthetic oligonucleotide
aucgcggacgccagucuuu

SEQ ID NO: 1262478 - RNA, 19 nt, Artificial Sequence
  Description of Artificial Sequence: Synthetic oligonucleotide
ccuacucuguaaauccggu

SEQ ID NO: 1262479 - RNA, 19 nt, Artificial Sequence
  Description of Artificial Sequence: Synthetic oligonucleotide
gcaucggagaaacuucauu

SEQ ID NO: 1262480 - RNA, 19 nt, Artificial Sequence
  Description of Artificial Sequence: Synthetic oligonucleotide
  modified_base (3)..(3): a, c, u, g, unknown or other
ccngugccacucuagugaa

SEQ ID NO: 1262481 - RNA, 19 nt, Artificial Sequence
  Description of Artificial Sequence: Synthetic oligonucleotide
cccaccgggccugagcuug

SEQ ID NO: 1262482 - RNA, 19 nt, Artificial Sequence
  Description of Artificial Sequence: Synthetic oligonucleotide
ccccgggagugguuaaaug

SEQ ID NO: 1262483 - RNA, 19 nt, Artificial Sequence
  Description of Artificial Sequence: Synthetic oligonucleotide
ggucuagggccgacuucag

SEQ ID NO: 1262484 - RNA, 19 nt, Artificial Sequence
  Description of Artificial Sequence: Synthetic oligonucleotide
ggccgacuucaguagggaa

SEQ ID NO: 1262485 - RNA, 19 nt, Artificial Sequence
  Description of Artificial Sequence: Synthetic oligonucleotide
ggacugaagagcugaccuu

SEQ ID NO: 1262486 - RNA, 19 nt, Artificial Sequence
  Description of Artificial Sequence: Synthetic oligonucleotide
gccaucaaugguggaguaa

SEQ ID NO: 1262487 - RNA, 19 nt, Artificial Sequence
  Description of Artificial Sequence: Synthetic oligonucleotide
cggacccaaugcuucggac

SEQ ID NO: 1262488 - RNA, 19 nt, Artificial Sequence
  Description of Artificial Sequence: Synthetic oligonucleotide
ccgauuucuguugggucca

SEQ ID NO: 1262489 - RNA, 19 nt, Artificial Sequence
  Description of Artificial Sequence: Synthetic oligonucleotide
ggacggugcugggucucag

SEQ ID NO: 1262490 - RNA, 19 nt, Artificial Sequence
  Description of Artificial Sequence: Synthetic oligonucleotide
cucgaggauucuucacauu

SEQ ID NO: 1262491 - RNA, 19 nt, Artificial Sequence
  Description of Artificial Sequence: Synthetic oligonucleotide
gggccgacuucaguaggga

SEQ ID NO: 1262492 - RNA, 19 nt, Artificial Sequence
  Description of Artificial Sequence: Synthetic oligonucleotide
cacgugccauuaagacaaa

SEQ ID NO: 1262493 - RNA, 19 nt, Artificial Sequence
  Description of Artificial Sequence: Synthetic oligonucleotide
gcuccgagaagucgaguuu

SEQ ID NO: 1262494 - RNA, 19 nt, Artificial Sequence
  Description of Artificial Sequence: Synthetic oligonucleotide
gacacucuuuugggacccu

SEQ ID NO: 1262495 - RNA, 19 nt, Artificial Sequence
  Description of Artificial Sequence: Synthetic oligonucleotide
ccacggaguccucaugcaa

SEQ ID NO: 1262496 - RNA, 19 nt, Artificial Sequence
  Description of Artificial Sequence: Synthetic oligonucleotide
caucgcggacgccagucuu

SEQ ID NO: 1262497 - RNA, 19 nt, Artificial Sequence
  Description of Artificial Sequence: Synthetic oligonucleotide
ggaccuguuuuggccaagu

SEQ ID NO: 1262498 - RNA, 19 nt, Artificial Sequence
  Description of Artificial Sequence: Synthetic oligonucleotide
cccagacuacuugaagcaa

SEQ ID NO: 1262499 - RNA, 19 nt, Artificial Sequence
  Description of Artificial Sequence: Synthetic oligonucleotide
ccacucuagugaauggauu

SEQ ID NO: 1262500 - RNA, 19 nt, Artificial Sequence
  Description of Artificial Sequence: Synthetic oligonucleotide
ccgagaagucgaguuugga

SEQ ID NO: 1262501 - RNA, 19 nt, Artificial Sequence
  Description of Artificial Sequence: Synthetic oligonucleotide
gucgggucuagggccgacu

SEQ ID NO: 1262502 - RNA, 19 nt, Artificial Sequence
  Description of Artificial Sequence: Synthetic oligonucleotide
  modified_base (2)..(2): a, c, u, g, unknown or other
cngugccacucuagugaau

SEQ ID NO: 1262503 - RNA, 19 nt, Artificial Sequence
  Description of Artificial Sequence: Synthetic oligonucleotide
cugucgggucuagggccga

SEQ ID NO: 1262504 - RNA, 19 nt, Artificial Sequence
  Description of Artificial Sequence: Synthetic oligonucleotide
cggcacacguagaagcucu

SEQ ID NO: 1262505 - RNA, 19 nt, Artificial Sequence
  Description of Artificial Sequence: Synthetic oligonucleotide
cgggucuagggccgacuuc

SEQ ID NO: 1262506 - RNA, 19 nt, Artificial Sequence
  Description of Artificial Sequence: Synthetic oligonucleotide
gguucccuccagucagauu

SEQ ID NO: 1262507 - RNA, 19 nt, Artificial Sequence
  Description of Artificial Sequence: Synthetic oligonucleotide
cccuccagucagauugagu

SEQ ID NO: 1262508 - RNA, 19 nt, Artificial Sequence
  Description of Artificial Sequence: Synthetic oligonucleotide
cgcauguguucguccggca

SEQ ID NO: 1262509 - RNA, 19 nt, Artificial Sequence
  Description of Artificial Sequence: Synthetic oligonucleotide
cgaagucgcauguguucgu

SEQ ID NO: 1262510 - RNA, 19 nt, Artificial Sequence
  Description of Artificial Sequence: Synthetic oligonucleotide
ccaucgcggacgccagucu

SEQ ID NO: 1262511 - RNA, 19 nt, Artificial Sequence
  Description of Artificial Sequence: Synthetic oligonucleotide
cguggacggugcugggucu

SEQ ID NO: 1262512 - RNA, 19 nt, Artificial Sequence
  Description of Artificial Sequence: Synthetic oligonucleotide
caccgggccugagcuugua

SEQ ID NO: 1262513 - RNA, 19 nt, Artificial Sequence
  Description of Artificial Sequence: Synthetic oligonucleotide
ggcacacguagaagcucuu

SEQ ID NO: 1262514 - RNA, 19 nt, Artificial Sequence
  Description of Artificial Sequence: Synthetic oligonucleotide
cgcggacgccagucuuuaa

SEQ ID NO: 1262515 - RNA, 19 nt, Artificial Sequence
  Description of Artificial Sequence: Synthetic oligonucleotide
gcccaccgggccugagcuu

SEQ ID NO: 1262516 - RNA, 19 nt, Artificial Sequence
  Description of Artificial Sequence: Synthetic oligonucleotide
  modified_base (1)..(1): a, c, u, g, unknown or other
ngugccacucuagugaaug

SEQ ID NO: 1262517 - RNA, 19 nt, Artificial Sequence
  Description of Artificial Sequence: Synthetic oligonucleotide
aacugaauaauucuugagc

SEQ ID NO: 1262518 - RNA, 19 nt, Artificial Sequence
  Description of Artificial Sequence: Synthetic oligonucleotide
auuauuugagacuugauuc

SEQ ID NO: 1262519 - RNA, 19 nt, Artificial Sequence
  Description of Artificial Sequence: Synthetic oligonucleotide
uugaauauacucaagaaug

SEQ ID NO: 1262520 - RNA, 19 nt, Artificial Sequence
  Description of Artificial Sequence: Synthetic oligonucleotide
acugaauaauucuugagcc

SEQ ID NO: 1262521 - RNA, 19 nt, Artificial Sequence
  Description of Artificial Sequence: Synthetic oligonucleotide
cuauguaucauaaagcagg

SEQ ID NO: 1262522 - RNA, 19 nt, Artificial Sequence
  Description of Artificial Sequence: Synthetic oligonucleotide
aaagcuucggaccacaauc

SEQ ID NO: 1262523 - RNA, 19 nt, Artificial Sequence
  Description of Artificial Sequence: Synthetic oligonucleotide
aacaaaguccuauaaccgc

SEQ ID NO: 1262524 - RNA, 19 nt, Artificial Sequence
  Description of Artificial Sequence: Synthetic oligonucleotide
cauuucuagaccaauaugg

SEQ ID NO: 1262525 - RNA, 19 nt, Artificial Sequence
  Description of Artificial Sequence: Synthetic oligonucleotide
uaugaagacaaccuagugg

SEQ ID NO: 1262526 - RNA, 19 nt, Artificial Sequence
  Description of Artificial Sequence: Synthetic oligonucleotide
aauggugagaccuccaagg

SEQ ID NO: 1262527 - RNA, 19 nt, Artificial Sequence
  Description of Artificial Sequence: Synthetic oligonucleotide
aaaugccauagacacaucc

SEQ ID NO: 1262528 - RNA, 19 nt, Artificial Sequence
  Description of Artificial Sequence: Synthetic oligonucleotide
acaucuauaauacuagagg

SEQ ID NO: 1262529 - RNA, 19 nt, Artificial Sequence
  Description of Artificial Sequence: Synthetic oligonucleotide
uauauauauauuuauauuu

SEQ ID NO: 1262530 - RNA, 19 nt, Artificial Sequence
  Description of Artificial Sequence: Synthetic oligonucleotide
aaccaaaucaccauguuac

SEQ ID NO: 1262531 - RNA, 19 nt, Artificial Sequence
  Description of Artificial Sequence: Synthetic oligonucleotide
uguaaucaaacccacguag

SEQ ID NO: 1262532 - RNA, 19 nt, Artificial Sequence
  Description of Artificial Sequence: Synthetic oligonucleotide
uuagagaauacuuuauuag

SEQ ID NO: 1262533 - RNA, 19 nt, Artificial Sequence
  Description of Artificial Sequence: Synthetic oligonucleotide
uauauauauauauuuauau

SEQ ID NO: 1262534 - RNA, 19 nt, Artificial Sequence
  Description of Artificial Sequence: Synthetic oligonucleotide
aauacuagaggauacaauu

SEQ ID NO: 1262535 - RNA, 19 nt, Artificial Sequence
  Description of Artificial Sequence: Synthetic oligonucleotide
auuguguucaaccaaauca

SEQ ID NO: 1262536 - RNA, 19 nt, Artificial Sequence
  Description of Artificial Sequence: Synthetic oligonucleotide
uauauauguauauauauau

SEQ ID NO: 1262537 - RNA, 19 nt, Artificial Sequence
  Description of Artificial Sequence: Synthetic oligonucleotide
uauauguauauauauauau

SEQ ID NO: 1262538 - RNA, 19 nt, Artificial Sequence
  Description of Artificial Sequence: Synthetic oligonucleotide
uauguuaugcaucaauagc

SEQ ID NO: 1262539 - RNA, 19 nt, Artificial Sequence
  Description of Artificial Sequence: Synthetic oligonucleotide
auagauagggauuggaauc

SEQ ID NO: 1262540 - RNA, 19 nt, Artificial Sequence
  Description of Artificial Sequence: Synthetic oligonucleotide
aguucaacauuucuagacc

SEQ ID NO: 1262541 - RNA, 19 nt, Artificial Sequence
  Description of Artificial Sequence: Synthetic oligonucleotide
accagaaagaaccacagag

SEQ ID NO: 1262542 - RNA, 19 nt, Artificial Sequence
  Description of Artificial Sequence: Synthetic oligonucleotide
aagacaaccuaguggagac

SEQ ID NO: 1262543 - RNA, 19 nt, Artificial Sequence
  Description of Artificial Sequence: Synthetic oligonucleotide
auuauauauguauauauau

SEQ ID NO: 1262544 - RNA, 19 nt, Artificial Sequence
  Description of Artificial Sequence: Synthetic oligonucleotide
uauguauauauauauauuu

SEQ ID NO: 1262545 - RNA, 19 nt, Artificial Sequence
  Description of Artificial Sequence: Synthetic oligonucleotide
uguagagacauccagcaca

SEQ ID NO: 1262546 - RNA, 19 nt, Artificial Sequence
  Description of Artificial Sequence: Synthetic oligonucleotide
aaaauaaggcuaccucuac

SEQ ID NO: 1262547 - RNA, 19 nt, Artificial Sequence
  Description of Artificial Sequence: Synthetic oligonucleotide
uacuauguaucauaaagca

SEQ ID NO: 1262548 - RNA, 19 nt, Artificial Sequence
  Description of Artificial Sequence: Synthetic oligonucleotide
cugguugcgaucuauaagg

SEQ ID NO: 1262549 - RNA, 19 nt, Artificial Sequence
  Description of Artificial Sequence: Synthetic oligonucleotide
uaaauuagcuucucaauca

SEQ ID NO: 1262550 - RNA, 19 nt, Artificial Sequence
  Description of Artificial Sequence: Synthetic oligonucleotide
uacuuuauuguguucaacc

SEQ ID NO: 1262551 - RNA, 19 nt, Artificial Sequence
  Description of Artificial Sequence: Synthetic oligonucleotide
caaauguuauguuugaaug

SEQ ID NO: 1262552 - RNA, 19 nt, Artificial Sequence
  Description of Artificial Sequence: Synthetic oligonucleotide
aaaauaacaagcugaccgu

SEQ ID NO: 1262553 - RNA, 19 nt, Artificial Sequence
  Description of Artificial Sequence: Synthetic oligonucleotide
uguauauauauauauuuau

SEQ ID NO: 1262554 - RNA, 19 nt, Artificial Sequence
  Description of Artificial Sequence: Synthetic oligonucleotide
agaagcagaagccaaaugu

SEQ ID NO: 1262555 - RNA, 19 nt, Artificial Sequence
  Description of Artificial Sequence: Synthetic oligonucleotide
cuugauucuacuuuuccag

SEQ ID NO: 1262556 - RNA, 19 nt, Artificial Sequence
  Description of Artificial Sequence: Synthetic oligonucleotide
aagguugaauugaagaaac

SEQ ID NO: 1262557 - RNA, 19 nt, Artificial Sequence
  Description of Artificial Sequence: Synthetic oligonucleotide
aauagcaguauguuaugca

SEQ ID NO: 1262558 - RNA, 19 nt, Artificial Sequence
  Description of Artificial Sequence: Synthetic oligonucleotide
aauguugcucauuugaaua

SEQ ID NO: 1262559 - RNA, 19 nt, Artificial Sequence
  Description of Artificial Sequence: Synthetic oligonucleotide
aauguuauguuugaauggu

SEQ ID NO: 1262560 - RNA, 19 nt, Artificial Sequence
  Description of Artificial Sequence: Synthetic oligonucleotide
aaaggcauuauuugagacu

SEQ ID NO: 1262561 - RNA, 19 nt, Artificial Sequence
  Description of Artificial Sequence: Synthetic oligonucleotide
uuauauauguauauauaua

SEQ ID NO: 1262562 - RNA, 19 nt, Artificial Sequence
  Description of Artificial Sequence: Synthetic oligonucleotide
cuacuauguaucauaaagc

SEQ ID NO: 1262563 - RNA, 19 nt, Artificial Sequence
  Description of Artificial Sequence: Synthetic oligonucleotide
agagacauccagcacacuc

SEQ ID NO: 1262564 - RNA, 19 nt, Artificial Sequence
  Description of Artificial Sequence: Synthetic oligonucleotide
uguaccagaaagaaccaca

SEQ ID NO: 1262565 - RNA, 19 nt, Artificial Sequence
  Description of Artificial Sequence: Synthetic oligonucleotide
uuuaauacagugcguuacc

SEQ ID NO: 1262566 - RNA, 19 nt, Artificial Sequence
  Description of Artificial Sequence: Synthetic oligonucleotide
uugaauugaagaaacugaa

SEQ ID NO: 1262567 - RNA, 19 nt, Artificial Sequence
  Description of Artificial Sequence: Synthetic oligonucleotide
aacccacguagauaagacc

SEQ ID NO: 1262568 - RNA, 19 nt, Artificial Sequence
  Description of Artificial Sequence: Synthetic oligonucleotide
ugaauaauucuugagccug

SEQ ID NO: 1262569 - RNA, 19 nt, Artificial Sequence
  Description of Artificial Sequence: Synthetic oligonucleotide
guauguuaugcaucaauag

SEQ ID NO: 1262570 - RNA, 19 nt, Artificial Sequence
  Description of Artificial Sequence: Synthetic oligonucleotide
aucaaacccacguagauaa

SEQ ID NO: 1262571 - RNA, 19 nt, Artificial Sequence
  Description of Artificial Sequence: Synthetic oligonucleotide
gaucuauaagguugaauug

SEQ ID NO: 1262572 - RNA, 19 nt, Artificial Sequence
  Description of Artificial Sequence: Synthetic oligonucleotide
auauauauauauuuauauu

SEQ ID NO: 1262573 - RNA, 19 nt, Artificial Sequence
  Description of Artificial Sequence: Synthetic oligonucleotide
uacucaagaaugcugacau

SEQ ID NO: 1262574 - RNA, 19 nt, Artificial Sequence
  Description of Artificial Sequence: Synthetic oligonucleotide
aaguugacagcacagcuaa

SEQ ID NO: 1262575 - RNA, 19 nt, Artificial Sequence
  Description of Artificial Sequence: Synthetic oligonucleotide
auuucuagaccaauauggc

SEQ ID NO: 1262576 - RNA, 19 nt, Artificial Sequence
  Description of Artificial Sequence: Synthetic oligonucleotide
uccuacaucuauaauacua

SEQ ID NO: 1262577 - RNA, 19 nt, Artificial Sequence
  Description of Artificial Sequence: Synthetic oligonucleotide
uagacugcuuugcauaaag

SEQ ID NO: 1262578 - RNA, 19 nt, Artificial Sequence
  Description of Artificial Sequence: Synthetic oligonucleotide
uuaaucaucugcucacuca

SEQ ID NO: 1262579 - RNA, 19 nt, Artificial Sequence
  Description of Artificial Sequence: Synthetic oligonucleotide
ugcucauuugaauauacuc

SEQ ID NO: 1262580 - RNA, 19 nt, Artificial Sequence
  Description of Artificial Sequence: Synthetic oligonucleotide
guugcgaucuauaagguug

SEQ ID NO: 1262581 - RNA, 19 nt, Artificial Sequence
  Description of Artificial Sequence: Synthetic oligonucleotide
aaguugggauagcuguacc

SEQ ID NO: 1262582 - RNA, 19 nt, Artificial Sequence
  Description of Artificial Sequence: Synthetic oligonucleotide
uccaaaguugacagcacag

SEQ ID NO: 1262583 - RNA, 19 nt, Artificial Sequence
  Description of Artificial Sequence: Synthetic oligonucleotide
cuuucaagcccagaaaugc

SEQ ID NO: 1262584 - RNA, 19 nt, Artificial Sequence
  Description of Artificial Sequence: Synthetic oligonucleotide
aaagaccaauaauagcagu

SEQ ID NO: 1262585 - RNA, 19 nt, Artificial Sequence
  Description of Artificial Sequence: Synthetic oligonucleotide
aaaguccuauaaccgcugg

SEQ ID NO: 1262586 - RNA, 19 nt, Artificial Sequence
  Description of Artificial Sequence: Synthetic oligonucleotide
uaaagcagguacaagcuau

SEQ ID NO: 1262587 - RNA, 19 nt, Artificial Sequence
  Description of Artificial Sequence: Synthetic oligonucleotide
uggauucauaugaagacaa

SEQ ID NO: 1262588 - RNA, 19 nt, Artificial Sequence
  Description of Artificial Sequence: Synthetic oligonucleotide
auuuuacauucacagaggu

SEQ ID NO: 1262589 - RNA, 19 nt, Artificial Sequence
  Description of Artificial Sequence: Synthetic oligonucleotide
cuggguauugaauaaauga

SEQ ID NO: 1262590 - RNA, 19 nt, Artificial Sequence
  Description of Artificial Sequence: Synthetic oligonucleotide
cuauaauacuagaggauac

SEQ ID NO: 1262591 - RNA, 19 nt, Artificial Sequence
  Description of Artificial Sequence: Synthetic oligonucleotide
caucuauaauacuagagga

SEQ ID NO: 1262592 - RNA, 19 nt, Artificial Sequence
  Description of Artificial Sequence: Synthetic oligonucleotide
agaccuuacauauuuaaua

SEQ ID NO: 1262593 - RNA, 19 nt, Artificial Sequence
  Description of Artificial Sequence: Synthetic oligonucleotide
uacaagcuauuuuacauuc

SEQ ID NO: 1262594 - RNA, 19 nt, Artificial Sequence
  Description of Artificial Sequence: Synthetic oligonucleotide
ugagacuugauucuacuuu

SEQ ID NO: 1262595 - RNA, 19 nt, Artificial Sequence
  Description of Artificial Sequence: Synthetic oligonucleotide
uguacaaugccaacucaac

SEQ ID NO: 1262596 - RNA, 19 nt, Artificial Sequence
  Description of Artificial Sequence: Synthetic oligonucleotide
ucggaccacaaucaaaaca

SEQ ID NO: 1262597 - RNA, 19 nt, Artificial Sequence
  Description of Artificial Sequence: Synthetic oligonucleotide
aacggauguuggcugagag

SEQ ID NO: 1262598 - RNA, 19 nt, Artificial Sequence
  Description of Artificial Sequence: Synthetic oligonucleotide
uauguaucauaaagcaggu

SEQ ID NO: 1262599 - RNA, 19 nt, Artificial Sequence
  Description of Artificial Sequence: Synthetic oligonucleotide
ucuauaagguugaauugaa

SEQ ID NO: 1262600 - RNA, 19 nt, Artificial Sequence
  Description of Artificial Sequence: Synthetic oligonucleotide
agcaguauguuaugcauca

SEQ ID NO: 1262601 - RNA, 19 nt, Artificial Sequence
  Description of Artificial Sequence: Synthetic oligonucleotide
ugacaucaccauuuaauca

SEQ ID NO: 1262602 - RNA, 19 nt, Artificial Sequence
  Description of Artificial Sequence: Synthetic oligonucleotide
uaagaccuuacauauuuaa

SEQ ID NO: 1262603 - RNA, 19 nt, Artificial Sequence
  Description of Artificial Sequence: Synthetic oligonucleotide
agaucaguuauuacuguac

SEQ ID NO: 1262604 - RNA, 19 nt, Artificial Sequence
  Description of Artificial Sequence: Synthetic oligonucleotide
uuucuagaccaauauggcu

SEQ ID NO: 1262605 - RNA, 19 nt, Artificial Sequence
  Description of Artificial Sequence: Synthetic oligonucleotide
aaauuaaguucaacauuuc

SEQ ID NO: 1262606 - RNA, 19 nt, Artificial Sequence
  Description of Artificial Sequence: Synthetic oligonucleotide
uucauaugaagacaaccua

SEQ ID NO: 1262607 - RNA, 19 nt, Artificial Sequence
  Description of Artificial Sequence: Synthetic oligonucleotide
guagauaagaccuuacaua

SEQ ID NO: 1262608 - RNA, 19 nt, Artificial Sequence
  Description of Artificial Sequence: Synthetic oligonucleotide
uaauacagugcguuacccc

SEQ ID NO: 1262609 - RNA, 19 nt, Artificial Sequence
  Description of Artificial Sequence: Synthetic oligonucleotide
auguuaugcaucaauagca

SEQ ID NO: 1262610 - RNA, 19 nt, Artificial Sequence
  Description of Artificial Sequence: Synthetic oligonucleotide
uugcauaaaggcugguugc

SEQ ID NO: 1262611 - RNA, 19 nt, Artificial Sequence
  Description of Artificial Sequence: Synthetic oligonucleotide
auucauaugaagacaaccu

SEQ ID NO: 1262612 - RNA, 19 nt, Artificial Sequence
  Description of Artificial Sequence: Synthetic oligonucleotide
gaaagaaccacagagggcu

SEQ ID NO: 1262613 - RNA, 19 nt, Artificial Sequence
  Description of Artificial Sequence: Synthetic oligonucleotide
aacacgguaaacugggaua

SEQ ID NO: 1262614 - RNA, 19 nt, Artificial Sequence
  Description of Artificial Sequence: Synthetic oligonucleotide
caagcuauuuuacauucac

SEQ ID NO: 1262615 - RNA, 19 nt, Artificial Sequence
  Description of Artificial Sequence: Synthetic oligonucleotide
uuucaagcccagaaaugcc

SEQ ID NO: 1262616 - RNA, 19 nt, Artificial Sequence
  Description of Artificial Sequence: Synthetic oligonucleotide
uccuauaaccgcuggauuc

SEQ ID NO: 1262617 - RNA, 19 nt, Artificial Sequence
  Description of Artificial Sequence: Synthetic oligonucleotide
guugaauugaagaaacuga

SEQ ID NO: 1262618 - RNA, 19 nt, Artificial Sequence
  Description of Artificial Sequence: Synthetic oligonucleotide
accauuuaaucaucugcuc

SEQ ID NO: 1262619 - RNA, 19 nt, Artificial Sequence
  Description of Artificial Sequence: Synthetic oligonucleotide
ucuguuacucuugugguac

SEQ ID NO: 1262620 - RNA, 19 nt, Artificial Sequence
  Description of Artificial Sequence: Synthetic oligonucleotide
uaagguugaauugaagaaa

SEQ ID NO: 1262621 - RNA, 19 nt, Artificial Sequence
  Description of Artificial Sequence: Synthetic oligonucleotide
uacaauuugaaaggcauua

SEQ ID NO: 1262622 - RNA, 19 nt, Artificial Sequence
  Description of Artificial Sequence: Synthetic oligonucleotide
auaugaagacaaccuagug

SEQ ID NO: 1262623 - RNA, 19 nt, Artificial Sequence
  Description of Artificial Sequence: Synthetic oligonucleotide
uuauguuugaauggugaga

SEQ ID NO: 1262624 - RNA, 19 nt, Artificial Sequence
  Description of Artificial Sequence: Synthetic oligonucleotide
acucuuagauaggauuucc

SEQ ID NO: 1262625 - RNA, 19 nt, Artificial Sequence
  Description of Artificial Sequence: Synthetic oligonucleotide
uaaagcacggucacuacua

SEQ ID NO: 1262626 - RNA, 19 nt, Artificial Sequence
  Description of Artificial Sequence: Synthetic oligonucleotide
auaaccgcuggauucauau

SEQ ID NO: 1262627 - RNA, 19 nt, Artificial Sequence
  Description of Artificial Sequence: Synthetic oligonucleotide
auauacucaagaaugcuga

SEQ ID NO: 1262628 - RNA, 19 nt, Artificial Sequence
  Description of Artificial Sequence: Synthetic oligonucleotide
aaaccguuauuaaauaaau

SEQ ID NO: 1262629 - RNA, 19 nt, Artificial Sequence
  Description of Artificial Sequence: Synthetic oligonucleotide
auaauagcaguauguuaug

SEQ ID NO: 1262630 - RNA, 19 nt, Artificial Sequence
  Description of Artificial Sequence: Synthetic oligonucleotide
uuaauacagugcguuaccc

SEQ ID NO: 1262631 - RNA, 19 nt, Artificial Sequence
  Description of Artificial Sequence: Synthetic oligonucleotide
aucuauaagguugaauuga

SEQ ID NO: 1262632 - RNA, 19 nt, Artificial Sequence
  Description of Artificial Sequence: Synthetic oligonucleotide
acaagccuuggcaaguucc

SEQ ID NO: 1262633 - RNA, 19 nt, Artificial Sequence
  Description of Artificial Sequence: Synthetic oligonucleotide
ucuuagauaggauuuccuu

SEQ ID NO: 1262634 - RNA, 19 nt, Artificial Sequence
  Description of Artificial Sequence: Synthetic oligonucleotide
uuuaaucaucugcucacuc

SEQ ID NO: 1262635 - RNA, 19 nt, Artificial Sequence
  Description of Artificial Sequence: Synthetic oligonucleotide
acacgguaaacugggauac

SEQ ID NO: 1262636 - RNA, 19 nt, Artificial Sequence
  Description of Artificial Sequence: Synthetic oligonucleotide
ucuugugguaccuggcacc

SEQ ID NO: 1262637 - RNA, 19 nt, Artificial Sequence
  Description of Artificial Sequence: Synthetic oligonucleotide
guugacagcacagcuaaag

SEQ ID NO: 1262638 - RNA, 19 nt, Artificial Sequence
  Description of Artificial Sequence: Synthetic oligonucleotide
agaaagaaccacagagggc

SEQ ID NO: 1262639 - RNA, 19 nt, Artificial Sequence
  Description of Artificial Sequence: Synthetic oligonucleotide
ucauuugaacaaaauugua

SEQ ID NO: 1262640 - RNA, 19 nt, Artificial Sequence
  Description of Artificial Sequence: Synthetic oligonucleotide
aauuagcuucucaaucauc

SEQ ID NO: 1262641 - RNA, 19 nt, Artificial Sequence
  Description of Artificial Sequence: Synthetic oligonucleotide
auucucuccaugaacauca

SEQ ID NO: 1262642 - RNA, 19 nt, Artificial Sequence
  Description of Artificial Sequence: Synthetic oligonucleotide
ugauaaagcacggucacua

SEQ ID NO: 1262643 - RNA, 19 nt, Artificial Sequence
  Description of Artificial Sequence: Synthetic oligonucleotide
accaauauggcuguuaauu

SEQ ID NO: 1262644 - RNA, 19 nt, Artificial Sequence
  Description of Artificial Sequence: Synthetic oligonucleotide
ucacuacuauguaucauaa

SEQ ID NO: 1262645 - RNA, 19 nt, Artificial Sequence
  Description of Artificial Sequence: Synthetic oligonucleotide
ucacuagcggcacacuucu

SEQ ID NO: 1262646 - RNA, 19 nt, Artificial Sequence
  Description of Artificial Sequence: Synthetic oligonucleotide
accaauaauagcaguaugu

SEQ ID NO: 1262647 - RNA, 19 nt, Artificial Sequence
  Description of Artificial Sequence: Synthetic oligonucleotide
agugcguuaccccuguaca

SEQ ID NO: 1262648 - RNA, 19 nt, Artificial Sequence
  Description of Artificial Sequence: Synthetic oligonucleotide
agaaacacacucuuagaua

SEQ ID NO: 1262649 - RNA, 19 nt, Artificial Sequence
  Description of Artificial Sequence: Synthetic oligonucleotide
aaaacagcacaguucuguu

SEQ ID NO: 1262650 - RNA, 19 nt, Artificial Sequence
  Description of Artificial Sequence: Synthetic oligonucleotide
auguuugaauggugagacc

SEQ ID NO: 1262651 - RNA, 19 nt, Artificial Sequence
  Description of Artificial Sequence: Synthetic oligonucleotide
auucuugagccugggaaac

SEQ ID NO: 1262652 - RNA, 19 nt, Artificial Sequence
  Description of Artificial Sequence: Synthetic oligonucleotide
gagccaaucgugcaugcug

SEQ ID NO: 1262653 - RNA, 19 nt, Artificial Sequence
  Description of Artificial Sequence: Synthetic oligonucleotide
acuauguaucauaaagcag

SEQ ID NO: 1262654 - RNA, 19 nt, Artificial Sequence
  Description of Artificial Sequence: Synthetic oligonucleotide
gaccaauaauagcaguaug

SEQ ID NO: 1262655 - RNA, 19 nt, Artificial Sequence
  Description of Artificial Sequence: Synthetic oligonucleotide
gguugaauugaagaaacug

SEQ ID NO: 1262656 - RNA, 19 nt, Artificial Sequence
  Description of Artificial Sequence: Synthetic oligonucleotide
auaaagcacggucacuacu

SEQ ID NO: 1262657 - RNA, 19 nt, Artificial Sequence
  Description of Artificial Sequence: Synthetic oligonucleotide
guuaugcaucaauagcagc

SEQ ID NO: 1262658 - RNA, 19 nt, Artificial Sequence
  Description of Artificial Sequence: Synthetic oligonucleotide
acaagcugaccguaaauaa

SEQ ID NO: 1262659 - RNA, 19 nt, Artificial Sequence
  Description of Artificial Sequence: Synthetic oligonucleotide
ggauagcuguaccagaaag

SEQ ID NO: 1262660 - RNA, 19 nt, Artificial Sequence
  Description of Artificial Sequence: Synthetic oligonucleotide
aacaagcugaccguaaaua

SEQ ID NO: 1262661 - RNA, 19 nt, Artificial Sequence
  Description of Artificial Sequence: Synthetic oligonucleotide
uaucauaaagcagguacaa

SEQ ID NO: 1262662 - RNA, 19 nt, Artificial Sequence
  Description of Artificial Sequence: Synthetic oligonucleotide
ccuacaucuauaauacuag

SEQ ID NO: 1262663 - RNA, 19 nt, Artificial Sequence
  Description of Artificial Sequence: Synthetic oligonucleotide
acggucacuacuauguauc

SEQ ID NO: 1262664 - RNA, 19 nt, Artificial Sequence
  Description of Artificial Sequence: Synthetic oligonucleotide
acuagcggcacacuucuga

SEQ ID NO: 1262665 - RNA, 19 nt, Artificial Sequence
  Description of Artificial Sequence: Synthetic oligonucleotide
gaugcugaccuugcagugg

SEQ ID NO: 1262666 - RNA, 19 nt, Artificial Sequence
  Description of Artificial Sequence: Synthetic oligonucleotide
agcggcacacuucugagga

SEQ ID NO: 1262667 - RNA, 19 nt, Artificial Sequence
  Description of Artificial Sequence: Synthetic oligonucleotide
aagcugaccguaaauaaaa

SEQ ID NO: 1262668 - RNA, 19 nt, Artificial Sequence
  Description of Artificial Sequence: Synthetic oligonucleotide
gauaggauuuccuuucacu

SEQ ID NO: 1262669 - RNA, 19 nt, Artificial Sequence
  Description of Artificial Sequence: Synthetic oligonucleotide
uagauagggauuggaaucu

SEQ ID NO: 1262670 - RNA, 19 nt, Artificial Sequence
  Description of Artificial Sequence: Synthetic oligonucleotide
caaccuaguggagacaagc

SEQ ID NO: 1262671 - RNA, 19 nt, Artificial Sequence
  Description of Artificial Sequence: Synthetic oligonucleotide
aagaccaauaauagcagua

SEQ ID NO: 1262672 - RNA, 19 nt, Artificial Sequence
  Description of Artificial Sequence: Synthetic oligonucleotide
ucuugagccugggaaacag

SEQ ID NO: 1262673 - RNA, 19 nt, Artificial Sequence
  Description of Artificial Sequence: Synthetic oligonucleotide
uucaacauuucuagaccaa

SEQ ID NO: 1262674 - RNA, 19 nt, Artificial Sequence
  Description of Artificial Sequence: Synthetic oligonucleotide
ccaguuagcaucauuuuac

SEQ ID NO: 1262675 - RNA, 19 nt, Artificial Sequence
  Description of Artificial Sequence: Synthetic oligonucleotide
aagaaggggagaucaguua

SEQ ID NO: 1262676 - RNA, 19 nt, Artificial Sequence
  Description of Artificial Sequence: Synthetic oligonucleotide
cacuucugaggauucauuc

SEQ ID NO: 1262677 - RNA, 19 nt, Artificial Sequence
  Description of Artificial Sequence: Synthetic oligonucleotide
gauaaagcacggucacuac

SEQ ID NO: 1262678 - RNA, 19 nt, Artificial Sequence
  Description of Artificial Sequence: Synthetic oligonucleotide
uuguaaucaaacccacgua

SEQ ID NO: 1262679 - RNA, 19 nt, Artificial Sequence
  Description of Artificial Sequence: Synthetic oligonucleotide
aaucgugcaugcuggguau

SEQ ID NO: 1262680 - RNA, 19 nt, Artificial Sequence
  Description of Artificial Sequence: Synthetic oligonucleotide
aguugggauagcuguacca

SEQ ID NO: 1262681 - RNA, 19 nt, Artificial Sequence
  Description of Artificial Sequence: Synthetic oligonucleotide
ugacagcacagcuaaaguu

SEQ ID NO: 1262682 - RNA, 19 nt, Artificial Sequence
  Description of Artificial Sequence: Synthetic oligonucleotide
caucugcucacucauccag

SEQ ID NO: 1262683 - RNA, 19 nt, Artificial Sequence
  Description of Artificial Sequence: Synthetic oligonucleotide
ggugagaccuccaaggaag

SEQ ID NO: 1262684 - RNA, 19 nt, Artificial Sequence
  Description of Artificial Sequence: Synthetic oligonucleotide
aaaugaaagaaugccccua

SEQ ID NO: 1262685 - RNA, 19 nt, Artificial Sequence
  Description of Artificial Sequence: Synthetic oligonucleotide
acagagguaugacacagua

SEQ ID NO: 1262686 - RNA, 19 nt, Artificial Sequence
  Description of Artificial Sequence: Synthetic oligonucleotide
auaauacuagaggauacaa

SEQ ID NO: 1262687 - RNA, 19 nt, Artificial Sequence
  Description of Artificial Sequence: Synthetic oligonucleotide
acguagauaagaccuuaca

SEQ ID NO: 1262688 - RNA, 19 nt, Artificial Sequence
  Description of Artificial Sequence: Synthetic oligonucleotide
uugcgaucuauaagguuga

SEQ ID NO: 1262689 - RNA, 19 nt, Artificial Sequence
  Description of Artificial Sequence: Synthetic oligonucleotide
guaccagaaagaaccacag

SEQ ID NO: 1262690 - RNA, 19 nt, Artificial Sequence
  Description of Artificial Sequence: Synthetic oligonucleotide
ccaaguagugcuucaaagc

SEQ ID NO: 1262691 - RNA, 19 nt, Artificial Sequence
  Description of Artificial Sequence: Synthetic oligonucleotide
agaccaauauggcuguuaa

SEQ ID NO: 1262692 - RNA, 19 nt, Artificial Sequence
  Description of Artificial Sequence: Synthetic oligonucleotide
auaacaagcugaccguaaa

SEQ ID NO: 1262693 - RNA, 19 nt, Artificial Sequence
  Description of Artificial Sequence: Synthetic oligonucleotide
guauauauauauauuuaua

SEQ ID NO: 1262694 - RNA, 19 nt, Artificial Sequence
  Description of Artificial Sequence: Synthetic oligonucleotide
cucugauaaagcacgguca

SEQ ID NO: 1262695 - RNA, 19 nt, Artificial Sequence
  Description of Artificial Sequence: Synthetic oligonucleotide
cagagggcccaaaggaugg

SEQ ID NO: 1262696 - RNA, 19 nt, Artificial Sequence
  Description of Artificial Sequence: Synthetic oligonucleotide
uacauucacagagguauga

SEQ ID NO: 1262697 - RNA, 19 nt, Artificial Sequence
  Description of Artificial Sequence: Synthetic oligonucleotide
aaguccuauaaccgcugga

SEQ ID NO: 1262698 - RNA, 19 nt, Artificial Sequence
  Description of Artificial Sequence: Synthetic oligonucleotide
gauagacugcuuugcauaa

SEQ ID NO: 1262699 - RNA, 19 nt, Artificial Sequence
  Description of Artificial Sequence: Synthetic oligonucleotide
aauaacaagcugaccguaa

SEQ ID NO: 1262700 - RNA, 19 nt, Artificial Sequence
  Description of Artificial Sequence: Synthetic oligonucleotide
uaccccuguacaaauggaa

SEQ ID NO: 1262701 - RNA, 19 nt, Artificial Sequence
  Description of Artificial Sequence: Synthetic oligonucleotide
ugcuggguauugaauaaau

SEQ ID NO: 1262702 - RNA, 19 nt, Artificial Sequence
  Description of Artificial Sequence: Synthetic oligonucleotide
aaucaaacccacguagaua

SEQ ID NO: 1262703 - RNA, 19 nt, Artificial Sequence
  Description of Artificial Sequence: Synthetic oligonucleotide
gucacuacuauguaucaua

SEQ ID NO: 1262704 - RNA, 19 nt, Artificial Sequence
  Description of Artificial Sequence: Synthetic oligonucleotide
caguggggcauagauaggg

SEQ ID NO: 1262705 - RNA, 19 nt, Artificial Sequence
  Description of Artificial Sequence: Synthetic oligonucleotide
auggaggagccaaucgugc

SEQ ID NO: 1262706 - RNA, 19 nt, Artificial Sequence
  Description of Artificial Sequence: Synthetic oligonucleotide
ugccaacucaacacgguaa

SEQ ID NO: 1262707 - RNA, 19 nt, Artificial Sequence
  Description of Artificial Sequence: Synthetic oligonucleotide
acccacguagauaagaccu

SEQ ID NO: 1262708 - RNA, 19 nt, Artificial Sequence
  Description of Artificial Sequence: Synthetic oligonucleotide
auauguauauauauauauu

SEQ ID NO: 1262709 - RNA, 19 nt, Artificial Sequence
  Description of Artificial Sequence: Synthetic oligonucleotide
aguauguuaugcaucaaua

SEQ ID NO: 1262710 - RNA, 19 nt, Artificial Sequence
  Description of Artificial Sequence: Synthetic oligonucleotide
aaauaacaagcugaccgua

SEQ ID NO: 1262711 - RNA, 19 nt, Artificial Sequence
  Description of Artificial Sequence: Synthetic oligonucleotide
guacaaugccaacucaaca

SEQ ID NO: 1262712 - RNA, 19 nt, Artificial Sequence
  Description of Artificial Sequence: Synthetic oligonucleotide
uuaccccuguacaaaugga

SEQ ID NO: 1262713 - RNA, 19 nt, Artificial Sequence
  Description of Artificial Sequence: Synthetic oligonucleotide
aagaccuuacauauuuaau

SEQ ID NO: 1262714 - RNA, 19 nt, Artificial Sequence
  Description of Artificial Sequence: Synthetic oligonucleotide
auguauauauauauauuua

SEQ ID NO: 1262715 - RNA, 19 nt, Artificial Sequence
  Description of Artificial Sequence: Synthetic oligonucleotide
gaaguugggauagcuguac

SEQ ID NO: 1262716 - RNA, 19 nt, Artificial Sequence
  Description of Artificial Sequence: Synthetic oligonucleotide
acaaaguccuauaaccgcu

SEQ ID NO: 1262717 - RNA, 19 nt, Artificial Sequence
  Description of Artificial Sequence: Synthetic oligonucleotide
gauagggauuggaaucugc

SEQ ID NO: 1262718 - RNA, 19 nt, Artificial Sequence
  Description of Artificial Sequence: Synthetic oligonucleotide
acaagcaagaccucaccuu

SEQ ID NO: 1262719 - RNA, 19 nt, Artificial Sequence
  Description of Artificial Sequence: Synthetic oligonucleotide
uaacaagcugaccguaaau

SEQ ID NO: 1262720 - RNA, 19 nt, Artificial Sequence
  Description of Artificial Sequence: Synthetic oligonucleotide
aggggagaucaguuauuac

SEQ ID NO: 1262721 - RNA, 19 nt, Artificial Sequence
  Description of Artificial Sequence: Synthetic oligonucleotide
aucauaaagcagguacaag

SEQ ID NO: 1262722 - RNA, 19 nt, Artificial Sequence
  Description of Artificial Sequence: Synthetic oligonucleotide
cuagcggcacacuucugag

SEQ ID NO: 1262723 - RNA, 19 nt, Artificial Sequence
  Description of Artificial Sequence: Synthetic oligonucleotide
cuaguggagacaagcaaga

SEQ ID NO: 1262724 - RNA, 19 nt, Artificial Sequence
  Description of Artificial Sequence: Synthetic oligonucleotide
aagcacggucacuacuaug

SEQ ID NO: 1262725 - RNA, 19 nt, Artificial Sequence
  Description of Artificial Sequence: Synthetic oligonucleotide
ugcagucauuugaacaaaa

SEQ ID NO: 1262726 - RNA, 19 nt, Artificial Sequence
  Description of Artificial Sequence: Synthetic oligonucleotide
aaugccaacucaacacggu

SEQ ID NO: 1262727 - RNA, 19 nt, Artificial Sequence
  Description of Artificial Sequence: Synthetic oligonucleotide
aggagccaaucgugcaugc

SEQ ID NO: 1262728 - RNA, 19 nt, Artificial Sequence
  Description of Artificial Sequence: Synthetic oligonucleotide
aaagcacggucacuacuau

SEQ ID NO: 1262729 - RNA, 19 nt, Artificial Sequence
  Description of Artificial Sequence: Synthetic oligonucleotide
ugcugaacggauguuggcu

SEQ ID NO: 1262730 - RNA, 19 nt, Artificial Sequence
  Description of Artificial Sequence: Synthetic oligonucleotide
guaucauaaagcagguaca

SEQ ID NO: 1262731 - RNA, 19 nt, Artificial Sequence
  Description of Artificial Sequence: Synthetic oligonucleotide
auaauucuugagccuggga

SEQ ID NO: 1262732 - RNA, 19 nt, Artificial Sequence
  Description of Artificial Sequence: Synthetic oligonucleotide
cauucacagagguaugaca

SEQ ID NO: 1262733 - RNA, 19 nt, Artificial Sequence
  Description of Artificial Sequence: Synthetic oligonucleotide
auauauguauauauauaua

SEQ ID NO: 1262734 - RNA, 19 nt, Artificial Sequence
  Description of Artificial Sequence: Synthetic oligonucleotide
aagcaagaccucaccuuac

SEQ ID NO: 1262735 - RNA, 19 nt, Artificial Sequence
  Description of Artificial Sequence: Synthetic oligonucleotide
auaaggcuaccucuaccca

SEQ ID NO: 1262736 - RNA, 19 nt, Artificial Sequence
  Description of Artificial Sequence: Synthetic oligonucleotide
caaaguccuauaaccgcug

SEQ ID NO: 1262737 - RNA, 19 nt, Artificial Sequence
  Description of Artificial Sequence: Synthetic oligonucleotide
uuguagagacauccagcac

SEQ ID NO: 1262738 - RNA, 19 nt, Artificial Sequence
  Description of Artificial Sequence: Synthetic oligonucleotide
uaccagaaagaaccacaga

SEQ ID NO: 1262739 - RNA, 19 nt, Artificial Sequence
  Description of Artificial Sequence: Synthetic oligonucleotide
cuagaggauacaauuugaa

SEQ ID NO: 1262740 - RNA, 19 nt, Artificial Sequence
  Description of Artificial Sequence: Synthetic oligonucleotide
aguccuauaaccgcuggau

SEQ ID NO: 1262741 - RNA, 19 nt, Artificial Sequence
  Description of Artificial Sequence: Synthetic oligonucleotide
auacucaagaaugcugaca

SEQ ID NO: 1262742 - RNA, 19 nt, Artificial Sequence
  Description of Artificial Sequence: Synthetic oligonucleotide
agaccaauaauagcaguau

SEQ ID NO: 1262743 - RNA, 19 nt, Artificial Sequence
  Description of Artificial Sequence: Synthetic oligonucleotide
acuagaggauacaauuuga

SEQ ID NO: 1262744 - RNA, 19 nt, Artificial Sequence
  Description of Artificial Sequence: Synthetic oligonucleotide
caaguagugcuucaaagcu

SEQ ID NO: 1262745 - RNA, 19 nt, Artificial Sequence
  Description of Artificial Sequence: Synthetic oligonucleotide
accuuaccaacaugucauc

SEQ ID NO: 1262746 - RNA, 19 nt, Artificial Sequence
  Description of Artificial Sequence: Synthetic oligonucleotide
guaugacacaguacugucc

SEQ ID NO: 1262747 - RNA, 19 nt, Artificial Sequence
  Description of Artificial Sequence: Synthetic oligonucleotide
accuaguggagacaagcaa

SEQ ID NO: 1262748 - RNA, 19 nt, Artificial Sequence
  Description of Artificial Sequence: Synthetic oligonucleotide
aucaguuauuacuguacuu

SEQ ID NO: 1262749 - RNA, 19 nt, Artificial Sequence
  Description of Artificial Sequence: Synthetic oligonucleotide
ucaaacccacguagauaag

SEQ ID NO: 1262750 - RNA, 19 nt, Artificial Sequence
  Description of Artificial Sequence: Synthetic oligonucleotide
uggugagaccuccaaggaa

SEQ ID NO: 1262751 - RNA, 19 nt, Artificial Sequence
  Description of Artificial Sequence: Synthetic oligonucleotide
acuuucaagcccagaaaug

SEQ ID NO: 1262752 - RNA, 19 nt, Artificial Sequence
  Description of Artificial Sequence: Synthetic oligonucleotide
agaccuccaaggaaggaag

SEQ ID NO: 1262753 - RNA, 19 nt, Artificial Sequence
  Description of Artificial Sequence: Synthetic oligonucleotide
agccaaucgugcaugcugg

SEQ ID NO: 1262754 - RNA, 19 nt, Artificial Sequence
  Description of Artificial Sequence: Synthetic oligonucleotide
gagaucaguuauuacugua

SEQ ID NO: 1262755 - RNA, 19 nt, Artificial Sequence
  Description of Artificial Sequence: Synthetic oligonucleotide
auggugagaccuccaagga

SEQ ID NO: 1262756 - RNA, 19 nt, Artificial Sequence
  Description of Artificial Sequence: Synthetic oligonucleotide
accaaaucaccauguuaca

SEQ ID NO: 1262757 - RNA, 19 nt, Artificial Sequence
  Description of Artificial Sequence: Synthetic oligonucleotide
ugguugcgaucuauaaggu

SEQ ID NO: 1262758 - RNA, 19 nt, Artificial Sequence
  Description of Artificial Sequence: Synthetic oligonucleotide
aaccuaguggagacaagca

SEQ ID NO: 1262759 - RNA, 19 nt, Artificial Sequence
  Description of Artificial Sequence: Synthetic oligonucleotide
cuacaucuauaauacuaga

SEQ ID NO: 1262760 - RNA, 19 nt, Artificial Sequence
  Description of Artificial Sequence: Synthetic oligonucleotide
uagcggcacacuucugagg

SEQ ID NO: 1262761 - RNA, 19 nt, Artificial Sequence
  Description of Artificial Sequence: Synthetic oligonucleotide
ccaaagaacacaagccuug

SEQ ID NO: 1262762 - RNA, 19 nt, Artificial Sequence
  Description of Artificial Sequence: Synthetic oligonucleotide
aagcuucggaccacaauca

SEQ ID NO: 1262763 - RNA, 19 nt, Artificial Sequence
  Description of Artificial Sequence: Synthetic oligonucleotide
auuuaaucaucugcucacu

SEQ ID NO: 1262764 - RNA, 19 nt, Artificial Sequence
  Description of Artificial Sequence: Synthetic oligonucleotide
aguuagcaucauuuuacuu

SEQ ID NO: 1262765 - RNA, 19 nt, Artificial Sequence
  Description of Artificial Sequence: Synthetic oligonucleotide
aaggggagaucaguuauua

SEQ ID NO: 1262766 - RNA, 19 nt, Artificial Sequence
  Description of Artificial Sequence: Synthetic oligonucleotide
guagagacauccagcacac

SEQ ID NO: 1262767 - RNA, 19 nt, Artificial Sequence
  Description of Artificial Sequence: Synthetic oligonucleotide
uggggcauagauagggauu

SEQ ID NO: 1262768 - RNA, 19 nt, Artificial Sequence
  Description of Artificial Sequence: Synthetic oligonucleotide
guaaucaaacccacguaga

SEQ ID NO: 1262769 - RNA, 19 nt, Artificial Sequence
  Description of Artificial Sequence: Synthetic oligonucleotide
cauagauagggauuggaau

SEQ ID NO: 1262770 - RNA, 19 nt, Artificial Sequence
  Description of Artificial Sequence: Synthetic oligonucleotide
uggaggagccaaucgugca

SEQ ID NO: 1262771 - RNA, 19 nt, Artificial Sequence
  Description of Artificial Sequence: Synthetic oligonucleotide
cugggauagacugcuuugc

SEQ ID NO: 1262772 - RNA, 19 nt, Artificial Sequence
  Description of Artificial Sequence: Synthetic oligonucleotide
cauuauuugagacuugauu

SEQ ID NO: 1262773 - RNA, 19 nt, Artificial Sequence
  Description of Artificial Sequence: Synthetic oligonucleotide
ucaacacgguaaacuggga

SEQ ID NO: 1262774 - RNA, 19 nt, Artificial Sequence
  Description of Artificial Sequence: Synthetic oligonucleotide
uacagugcguuaccccugu

SEQ ID NO: 1262775 - RNA, 19 nt, Artificial Sequence
  Description of Artificial Sequence: Synthetic oligonucleotide
uucuguuacucuuguggua

SEQ ID NO: 1262776 - RNA, 19 nt, Artificial Sequence
  Description of Artificial Sequence: Synthetic oligonucleotide
agcagguacaagcuauuuu

SEQ ID NO: 1262777 - RNA, 19 nt, Artificial Sequence
  Description of Artificial Sequence: Synthetic oligonucleotide
gcugguugcgaucuauaag

SEQ ID NO: 1262778 - RNA, 19 nt, Artificial Sequence
  Description of Artificial Sequence: Synthetic oligonucleotide
cuugagccugggaaacagc

SEQ ID NO: 1262779 - RNA, 19 nt, Artificial Sequence
  Description of Artificial Sequence: Synthetic oligonucleotide
agaugccaaguagugcuuc

SEQ ID NO: 1262780 - RNA, 19 nt, Artificial Sequence
  Description of Artificial Sequence: Synthetic oligonucleotide
cacagcuaaaguuuccaaa

SEQ ID NO: 1262781 - RNA, 19 nt, Artificial Sequence
  Description of Artificial Sequence: Synthetic oligonucleotide
cucuugugguaccuggcac

SEQ ID NO: 1262782 - RNA, 19 nt, Artificial Sequence
  Description of Artificial Sequence: Synthetic oligonucleotide
ggagaugccaaguagugcu

SEQ ID NO: 1262783 - RNA, 19 nt, Artificial Sequence
  Description of Artificial Sequence: Synthetic oligonucleotide
gacaaccuaguggagacaa

SEQ ID NO: 1262784 - RNA, 19 nt, Artificial Sequence
  Description of Artificial Sequence: Synthetic oligonucleotide
cacguagauaagaccuuac

SEQ ID NO: 1262785 - RNA, 19 nt, Artificial Sequence
  Description of Artificial Sequence: Synthetic oligonucleotide
gugcuucaaagcuucggac

SEQ ID NO: 1262786 - RNA, 19 nt, Artificial Sequence
  Description of Artificial Sequence: Synthetic oligonucleotide
uaaccgcuggauucauaug

SEQ ID NO: 1262787 - RNA, 19 nt, Artificial Sequence
  Description of Artificial Sequence: Synthetic oligonucleotide
cuguacaaugccaacucaa

SEQ ID NO: 1262788 - RNA, 19 nt, Artificial Sequence
  Description of Artificial Sequence: Synthetic oligonucleotide
gcuauuuuacauucacaga

SEQ ID NO: 1262789 - RNA, 19 nt, Artificial Sequence
  Description of Artificial Sequence: Synthetic oligonucleotide
uguuacucuugugguaccu

SEQ ID NO: 1262790 - RNA, 19 nt, Artificial Sequence
  Description of Artificial Sequence: Synthetic oligonucleotide
cuuagauaggauuuccuuu

SEQ ID NO: 1262791 - RNA, 19 nt, Artificial Sequence
  Description of Artificial Sequence: Synthetic oligonucleotide
caagaccucaccuuaccaa

SEQ ID NO: 1262792 - RNA, 19 nt, Artificial Sequence
  Description of Artificial Sequence: Synthetic oligonucleotide
gacaagcaagaccucaccu

SEQ ID NO: 1262793 - RNA, 19 nt, Artificial Sequence
  Description of Artificial Sequence: Synthetic oligonucleotide
acaauuugaaaggcauuau

SEQ ID NO: 1262794 - RNA, 19 nt, Artificial Sequence
  Description of Artificial Sequence: Synthetic oligonucleotide
aguuauuacuguacuuuau

SEQ ID NO: 1262795 - RNA, 19 nt, Artificial Sequence
  Description of Artificial Sequence: Synthetic oligonucleotide
ugcguuaccccuguacaaa

SEQ ID NO: 1262796 - RNA, 19 nt, Artificial Sequence
  Description of Artificial Sequence: Synthetic oligonucleotide
ggggagaucaguuauuacu

SEQ ID NO: 1262797 - RNA, 19 nt, Artificial Sequence
  Description of Artificial Sequence: Synthetic oligonucleotide
uucggaccacaaucaaaac

SEQ ID NO: 1262798 - RNA, 19 nt, Artificial Sequence
  Description of Artificial Sequence: Synthetic oligonucleotide
acggauguuggcugagaga

SEQ ID NO: 1262799 - RNA, 19 nt, Artificial Sequence
  Description of Artificial Sequence: Synthetic oligonucleotide
gagacuugauucuacuuuu

SEQ ID NO: 1262800 - RNA, 19 nt, Artificial Sequence
  Description of Artificial Sequence: Synthetic oligonucleotide
cuggauucauaugaagaca

SEQ ID NO: 1262801 - RNA, 19 nt, Artificial Sequence
  Description of Artificial Sequence: Synthetic oligonucleotide
gaggagccaaucgugcaug

SEQ ID NO: 1262802 - RNA, 19 nt, Artificial Sequence
  Description of Artificial Sequence: Synthetic oligonucleotide
ggauagacugcuuugcaua

SEQ ID NO: 1262803 - RNA, 19 nt, Artificial Sequence
  Description of Artificial Sequence: Synthetic oligonucleotide
cagugcguuaccccuguac

SEQ ID NO: 1262804 - RNA, 19 nt, Artificial Sequence
  Description of Artificial Sequence: Synthetic oligonucleotide
acacaguacuguccuacau

SEQ ID NO: 1262805 - RNA, 19 nt, Artificial Sequence
  Description of Artificial Sequence: Synthetic oligonucleotide
auacuagaggauacaauuu

SEQ ID NO: 1262806 - RNA, 19 nt, Artificial Sequence
  Description of Artificial Sequence: Synthetic oligonucleotide
cuguuacucuugugguacc

SEQ ID NO: 1262807 - RNA, 19 nt, Artificial Sequence
  Description of Artificial Sequence: Synthetic oligonucleotide
cugcugaacggauguuggc

SEQ ID NO: 1262808 - RNA, 19 nt, Artificial Sequence
  Description of Artificial Sequence: Synthetic oligonucleotide
ggggcauagauagggauug

SEQ ID NO: 1262809 - RNA, 19 nt, Artificial Sequence
  Description of Artificial Sequence: Synthetic oligonucleotide
caagcaagaccucaccuua

SEQ ID NO: 1262810 - RNA, 19 nt, Artificial Sequence
  Description of Artificial Sequence: Synthetic oligonucleotide
gcugggauagacugcuuug

SEQ ID NO: 1262811 - RNA, 19 nt, Artificial Sequence
  Description of Artificial Sequence: Synthetic oligonucleotide
uauaaccgcuggauucaua

SEQ ID NO: 1262812 - RNA, 19 nt, Artificial Sequence
  Description of Artificial Sequence: Synthetic oligonucleotide
uagaccaauauggcuguua

SEQ ID NO: 1262813 - RNA, 19 nt, Artificial Sequence
  Description of Artificial Sequence: Synthetic oligonucleotide
ccauuuaaucaucugcuca

SEQ ID NO: 1262814 - RNA, 19 nt, Artificial Sequence
  Description of Artificial Sequence: Synthetic oligonucleotide
gugagaccuccaaggaagg

SEQ ID NO: 1262815 - RNA, 19 nt, Artificial Sequence
  Description of Artificial Sequence: Synthetic oligonucleotide
guacuuuauuguguucaac

SEQ ID NO: 1262816 - RNA, 19 nt, Artificial Sequence
  Description of Artificial Sequence: Synthetic oligonucleotide
agacauccagcacacucuu

SEQ ID NO: 1262817 - RNA, 19 nt, Artificial Sequence
  Description of Artificial Sequence: Synthetic oligonucleotide
aaagcagguacaagcuauu

SEQ ID NO: 1262818 - RNA, 19 nt, Artificial Sequence
  Description of Artificial Sequence: Synthetic oligonucleotide
augccaacucaacacggua

SEQ ID NO: 1262819 - RNA, 19 nt, Artificial Sequence
  Description of Artificial Sequence: Synthetic oligonucleotide
ggcauuauuugagacuuga

SEQ ID NO: 1262820 - RNA, 19 nt, Artificial Sequence
  Description of Artificial Sequence: Synthetic oligonucleotide
cacucuuagauaggauuuc

SEQ ID NO: 1262821 - RNA, 19 nt, Artificial Sequence
  Description of Artificial Sequence: Synthetic oligonucleotide
uaguggagacaagcaagac

SEQ ID NO: 1262822 - RNA, 19 nt, Artificial Sequence
  Description of Artificial Sequence: Synthetic oligonucleotide
acaagcuauuuuacauuca

SEQ ID NO: 1262823 - RNA, 19 nt, Artificial Sequence
  Description of Artificial Sequence: Synthetic oligonucleotide
accucaccuuaccaacaug

SEQ ID NO: 1262824 - RNA, 19 nt, Artificial Sequence
  Description of Artificial Sequence: Synthetic oligonucleotide
ugcugaccuugcagugggg

SEQ ID NO: 1262825 - RNA, 19 nt, Artificial Sequence
  Description of Artificial Sequence: Synthetic oligonucleotide
cacacucuuagauaggauu

SEQ ID NO: 1262826 - RNA, 19 nt, Artificial Sequence
  Description of Artificial Sequence: Synthetic oligonucleotide
uucuugagccugggaaaca

SEQ ID NO: 1262827 - RNA, 19 nt, Artificial Sequence
  Description of Artificial Sequence: Synthetic oligonucleotide
agauagggauuggaaucug

SEQ ID NO: 1262828 - RNA, 19 nt, Artificial Sequence
  Description of Artificial Sequence: Synthetic oligonucleotide
aagcagguacaagcuauuu

SEQ ID NO: 1262829 - RNA, 19 nt, Artificial Sequence
  Description of Artificial Sequence: Synthetic oligonucleotide
auauggcuguuaauuucug

SEQ ID NO: 1262830 - RNA, 19 nt, Artificial Sequence
  Description of Artificial Sequence: Synthetic oligonucleotide
gguauugaauaaaugacuu

SEQ ID NO: 1262831 - RNA, 19 nt, Artificial Sequence
  Description of Artificial Sequence: Synthetic oligonucleotide
acgguaaacugggauacuu

SEQ ID NO: 1262832 - RNA, 19 nt, Artificial Sequence
  Description of Artificial Sequence: Synthetic oligonucleotide
uccuuucacuagcggcaca

SEQ ID NO: 1262833 - RNA, 19 nt, Artificial Sequence
  Description of Artificial Sequence: Synthetic oligonucleotide
cuaccucuacccagcacca

SEQ ID NO: 1262834 - RNA, 19 nt, Artificial Sequence
  Description of Artificial Sequence: Synthetic oligonucleotide
gcaugcuggguauugaaua

SEQ ID NO: 1262835 - RNA, 19 nt, Artificial Sequence
  Description of Artificial Sequence: Synthetic oligonucleotide
ggguauugaauaaaugacu

SEQ ID NO: 1262836 - RNA, 19 nt, Artificial Sequence
  Description of Artificial Sequence: Synthetic oligonucleotide
agcuucggaccacaaucaa

SEQ ID NO: 1262837 - RNA, 19 nt, Artificial Sequence
  Description of Artificial Sequence: Synthetic oligonucleotide
agguugaauugaagaaacu

SEQ ID NO: 1262838 - RNA, 19 nt, Artificial Sequence
  Description of Artificial Sequence: Synthetic oligonucleotide
gcuggguauugaauaaaug

SEQ ID NO: 1262839 - RNA, 19 nt, Artificial Sequence
  Description of Artificial Sequence: Synthetic oligonucleotide
uggagacaagcaagaccuc

SEQ ID NO: 1262840 - RNA, 19 nt, Artificial Sequence
  Description of Artificial Sequence: Synthetic oligonucleotide
cugaacggauguuggcuga

SEQ ID NO: 1262841 - RNA, 19 nt, Artificial Sequence
  Description of Artificial Sequence: Synthetic oligonucleotide
caguucuguuacucuugug

SEQ ID NO: 1262842 - RNA, 19 nt, Artificial Sequence
  Description of Artificial Sequence: Synthetic oligonucleotide
cuucaaagcuucggaccac

SEQ ID NO: 1262843 - RNA, 19 nt, Artificial Sequence
  Description of Artificial Sequence: Synthetic oligonucleotide
ccuccaaggaaggaaggag

SEQ ID NO: 1262844 - RNA, 19 nt, Artificial Sequence
  Description of Artificial Sequence: Synthetic oligonucleotide
cucuuagauaggauuuccu

SEQ ID NO: 1262845 - RNA, 19 nt, Artificial Sequence
  Description of Artificial Sequence: Synthetic oligonucleotide
cauaaaggcugguugcgau

SEQ ID NO: 1262846 - RNA, 19 nt, Artificial Sequence
  Description of Artificial Sequence: Synthetic oligonucleotide
cgaucuauaagguugaauu

SEQ ID NO: 1262847 - RNA, 19 nt, Artificial Sequence
  Description of Artificial Sequence: Synthetic oligonucleotide
caguauguuaugcaucaau

SEQ ID NO: 1262848 - RNA, 19 nt, Artificial Sequence
  Description of Artificial Sequence: Synthetic oligonucleotide
gcagagggcccaaaggaug

SEQ ID NO: 1262849 - RNA, 19 nt, Artificial Sequence
  Description of Artificial Sequence: Synthetic oligonucleotide
acaaccuaguggagacaag

SEQ ID NO: 1262850 - RNA, 19 nt, Artificial Sequence
  Description of Artificial Sequence: Synthetic oligonucleotide
auaagaccuuacauauuua

SEQ ID NO: 1262851 - RNA, 19 nt, Artificial Sequence
  Description of Artificial Sequence: Synthetic oligonucleotide
gcugacaucaccauuuaau

SEQ ID NO: 1262852 - RNA, 19 nt, Artificial Sequence
  Description of Artificial Sequence: Synthetic oligonucleotide
agcagagggcccaaaggau

SEQ ID NO: 1262853 - RNA, 19 nt, Artificial Sequence
  Description of Artificial Sequence: Synthetic oligonucleotide
gugcguuaccccuguacaa

SEQ ID NO: 1262854 - RNA, 19 nt, Artificial Sequence
  Description of Artificial Sequence: Synthetic oligonucleotide
caguuagcaucauuuuacu

SEQ ID NO: 1262855 - RNA, 19 nt, Artificial Sequence
  Description of Artificial Sequence: Synthetic oligonucleotide
gcauagauagggauuggaa

SEQ ID NO: 1262856 - RNA, 19 nt, Artificial Sequence
  Description of Artificial Sequence: Synthetic oligonucleotide
auagacugcuuugcauaaa

SEQ ID NO: 1262857 - RNA, 19 nt, Artificial Sequence
  Description of Artificial Sequence: Synthetic oligonucleotide
gcaagaccucaccuuacca

SEQ ID NO: 1262858 - RNA, 19 nt, Artificial Sequence
  Description of Artificial Sequence: Synthetic oligonucleotide
augcuggguauugaauaaa

SEQ ID NO: 1262859 - RNA, 19 nt, Artificial Sequence
  Description of Artificial Sequence: Synthetic oligonucleotide
gggauuggaaucugcugaa

SEQ ID NO: 1262860 - RNA, 19 nt, Artificial Sequence
  Description of Artificial Sequence: Synthetic oligonucleotide
ggcauagauagggauugga

SEQ ID NO: 1262861 - RNA, 19 nt, Artificial Sequence
  Description of Artificial Sequence: Synthetic oligonucleotide
caaguuccuggugcuggac

SEQ ID NO: 1262862 - RNA, 19 nt, Artificial Sequence
  Description of Artificial Sequence: Synthetic oligonucleotide
ccuuucacuagcggcacac

SEQ ID NO: 1262863 - RNA, 19 nt, Artificial Sequence
  Description of Artificial Sequence: Synthetic oligonucleotide
gaacggauguuggcugaga

SEQ ID NO: 1262864 - RNA, 19 nt, Artificial Sequence
  Description of Artificial Sequence: Synthetic oligonucleotide
gggcccaaaggaugguaug

SEQ ID NO: 1262865 - RNA, 19 nt, Artificial Sequence
  Description of Artificial Sequence: Synthetic oligonucleotide
auguaucauaaagcaggua

SEQ ID NO: 1262866 - RNA, 19 nt, Artificial Sequence
  Description of Artificial Sequence: Synthetic oligonucleotide
gaaaugccauagacacauc

SEQ ID NO: 1262867 - RNA, 19 nt, Artificial Sequence
  Description of Artificial Sequence: Synthetic oligonucleotide
caacacgguaaacugggau

SEQ ID NO: 1262868 - RNA, 19 nt, Artificial Sequence
  Description of Artificial Sequence: Synthetic oligonucleotide
ugcgaucuauaagguugaa

SEQ ID NO: 1262869 - RNA, 19 nt, Artificial Sequence
  Description of Artificial Sequence: Synthetic oligonucleotide
accgcuggauucauaugaa

SEQ ID NO: 1262870 - RNA, 19 nt, Artificial Sequence
  Description of Artificial Sequence: Synthetic oligonucleotide
ccuauaaccgcuggauuca

SEQ ID NO: 1262871 - RNA, 19 nt, Artificial Sequence
  Description of Artificial Sequence: Synthetic oligonucleotide
guggggcauagauagggau

SEQ ID NO: 1262872 - RNA, 19 nt, Artificial Sequence
  Description of Artificial Sequence: Synthetic oligonucleotide
guacuguccuacaucuaua

SEQ ID NO: 1262873 - RNA, 19 nt, Artificial Sequence
  Description of Artificial Sequence: Synthetic oligonucleotide
aggcauuauuugagacuug

SEQ ID NO: 1262874 - RNA, 19 nt, Artificial Sequence
  Description of Artificial Sequence: Synthetic oligonucleotide
cacggucacuacuauguau

SEQ ID NO: 1262875 - RNA, 19 nt, Artificial Sequence
  Description of Artificial Sequence: Synthetic oligonucleotide
gggcauagauagggauugg

SEQ ID NO: 1262876 - RNA, 19 nt, Artificial Sequence
  Description of Artificial Sequence: Synthetic oligonucleotide
gcacagcuaaaguuuccaa

SEQ ID NO: 1262877 - RNA, 19 nt, Artificial Sequence
  Description of Artificial Sequence: Synthetic oligonucleotide
gggauagacugcuuugcau

SEQ ID NO: 1262878 - RNA, 19 nt, Artificial Sequence
  Description of Artificial Sequence: Synthetic oligonucleotide
cacuagcggcacacuucug

SEQ ID NO: 1262879 - RNA, 19 nt, Artificial Sequence
  Description of Artificial Sequence: Synthetic oligonucleotide
cuuugcauaaaggcugguu

SEQ ID NO: 1262880 - RNA, 19 nt, Artificial Sequence
  Description of Artificial Sequence: Synthetic oligonucleotide
gggauagcuguaccagaaa

SEQ ID NO: 1262881 - RNA, 19 nt, Artificial Sequence
  Description of Artificial Sequence: Synthetic oligonucleotide
cugcagucauuugaacaaa

SEQ ID NO: 1262882 - RNA, 19 nt, Artificial Sequence
  Description of Artificial Sequence: Synthetic oligonucleotide
guccuauaaccgcuggauu

SEQ ID NO: 1262883 - RNA, 19 nt, Artificial Sequence
  Description of Artificial Sequence: Synthetic oligonucleotide
gaaggggagaucaguuauu

SEQ ID NO: 1262884 - RNA, 19 nt, Artificial Sequence
  Description of Artificial Sequence: Synthetic oligonucleotide
cguuaccccuguacaaaug

SEQ ID NO: 1262885 - RNA, 19 nt, Artificial Sequence
  Description of Artificial Sequence: Synthetic oligonucleotide
accuugcaguggggcauag

SEQ ID NO: 1262886 - RNA, 19 nt, Artificial Sequence
  Description of Artificial Sequence: Synthetic oligonucleotide
cugggaaguugggauagcu

SEQ ID NO: 1262887 - RNA, 19 nt, Artificial Sequence
  Description of Artificial Sequence: Synthetic oligonucleotide
gcuucggaccacaaucaaa

SEQ ID NO: 1262888 - RNA, 19 nt, Artificial Sequence
  Description of Artificial Sequence: Synthetic oligonucleotide
gguugcgaucuauaagguu

SEQ ID NO: 1262889 - RNA, 19 nt, Artificial Sequence
  Description of Artificial Sequence: Synthetic oligonucleotide
ccaauaauagcaguauguu

SEQ ID NO: 1262890 - RNA, 19 nt, Artificial Sequence
  Description of Artificial Sequence: Synthetic oligonucleotide
aguugacagcacagcuaaa

SEQ ID NO: 1262891 - RNA, 19 nt, Artificial Sequence
  Description of Artificial Sequence: Synthetic oligonucleotide
gccugguuggaagcccugc

SEQ ID NO: 1262892 - RNA, 19 nt, Artificial Sequence
  Description of Artificial Sequence: Synthetic oligonucleotide
acagugcguuaccccugua

SEQ ID NO: 1262893 - RNA, 19 nt, Artificial Sequence
  Description of Artificial Sequence: Synthetic oligonucleotide
gaccuugcaguggggcaua

SEQ ID NO: 1262894 - RNA, 19 nt, Artificial Sequence
  Description of Artificial Sequence: Synthetic oligonucleotide
gagaugccaaguagugcuu

SEQ ID NO: 1262895 - RNA, 19 nt, Artificial Sequence
  Description of Artificial Sequence: Synthetic oligonucleotide
aucgugcaugcuggguauu

SEQ ID NO: 1262896 - RNA, 19 nt, Artificial Sequence
  Description of Artificial Sequence: Synthetic oligonucleotide
cggucacuacuauguauca

SEQ ID NO: 1262897 - RNA, 19 nt, Artificial Sequence
  Description of Artificial Sequence: Synthetic oligonucleotide
gcguuaccccuguacaaau

SEQ ID NO: 1262898 - RNA, 19 nt, Artificial Sequence
  Description of Artificial Sequence: Synthetic oligonucleotide
gcauuauuugagacuugau

SEQ ID NO: 1262899 - RNA, 19 nt, Artificial Sequence
  Description of Artificial Sequence: Synthetic oligonucleotide
gcgaucuauaagguugaau

SEQ ID NO: 1262900 - RNA, 19 nt, Artificial Sequence
  Description of Artificial Sequence: Synthetic oligonucleotide
ggccugguuggaagcccug

SEQ ID NO: 1262901 - RNA, 19 nt, Artificial Sequence
  Description of Artificial Sequence: Synthetic oligonucleotide
cacgguaaacugggauacu

SEQ ID NO: 1262902 - RNA, 19 nt, Artificial Sequence
  Description of Artificial Sequence: Synthetic oligonucleotide
ccugguuggaagcccugcu

SEQ ID NO: 1262903 - RNA, 19 nt, Artificial Sequence
  Description of Artificial Sequence: Synthetic oligonucleotide
ccccaaacucagcugggcu

SEQ ID NO: 1262904 - RNA, 19 nt, Artificial Sequence
  Description of Artificial Sequence: Synthetic oligonucleotide
ccccuaaaacaaaguccua

SEQ ID NO: 1262905 - RNA, 19 nt, Artificial Sequence
  Description of Artificial Sequence: Synthetic oligonucleotide
cgugcaugcuggguauuga

SEQ ID NO: 1262906 - RNA, 19 nt, Artificial Sequence
  Description of Artificial Sequence: Synthetic oligonucleotide
cgguaaacugggauacuuu

SEQ ID NO: 1262907 - RNA, 19 nt, Artificial Sequence
  Description of Artificial Sequence: Synthetic oligonucleotide
aguaauugguuccugaagc

SEQ ID NO: 1262908 - RNA, 19 nt, Artificial Sequence
  Description of Artificial Sequence: Synthetic oligonucleotide
uauauauauauuuauauuu

SEQ ID NO: 1262909 - RNA, 19 nt, Artificial Sequence
  Description of Artificial Sequence: Synthetic oligonucleotide
uauauauauauauuuauau

SEQ ID NO: 1262910 - RNA, 19 nt, Artificial Sequence
  Description of Artificial Sequence: Synthetic oligonucleotide
acauuguuggcauaaaggg

SEQ ID NO: 1262911 - RNA, 19 nt, Artificial Sequence
  Description of Artificial Sequence: Synthetic oligonucleotide
uauauauauauauauuuau

SEQ ID NO: 1262912 - RNA, 19 nt, Artificial Sequence
  Description of Artificial Sequence: Synthetic oligonucleotide
agugagaccugcuacuugc

SEQ ID NO: 1262913 - RNA, 19 nt, Artificial Sequence
  Description of Artificial Sequence: Synthetic oligonucleotide
ucuucgaccacucugcgcc

SEQ ID NO: 1262914 - RNA, 19 nt, Artificial Sequence
  Description of Artificial Sequence: Synthetic oligonucleotide
ugugccaugacucucugca

SEQ ID NO: 1262915 - RNA, 19 nt, Artificial Sequence
  Description of Artificial Sequence: Synthetic oligonucleotide
ugccuugauacuaggaugg

SEQ ID NO: 1262916 - RNA, 19 nt, Artificial Sequence
  Description of Artificial Sequence: Synthetic oligonucleotide
aacugaaggcuccagccac

SEQ ID NO: 1262917 - RNA, 19 nt, Artificial Sequence
  Description of Artificial Sequence: Synthetic oligonucleotide
ugaaccuagcaacaggugc

SEQ ID NO: 1262918 - RNA, 19 nt, Artificial Sequence
  Description of Artificial Sequence: Synthetic oligonucleotide
caaagcaacuuucagcugg

SEQ ID NO: 1262919 - RNA, 19 nt, Artificial Sequence
  Description of Artificial Sequence: Synthetic oligonucleotide
uuggggaugaggcauuugg

SEQ ID NO: 1262920 - RNA, 19 nt, Artificial Sequence
  Description of Artificial Sequence: Synthetic oligonucleotide
accacaaucacagguaagc

SEQ ID NO: 1262921 - RNA, 19 nt, Artificial Sequence
  Description of Artificial Sequence: Synthetic oligonucleotide
acaaacucacauucggugg

SEQ ID NO: 1262922 - RNA, 19 nt, Artificial Sequence
  Description of Artificial Sequence: Synthetic oligonucleotide
uacuaggauggcuugauug

SEQ ID NO: 1262923 - RNA, 19 nt, Artificial Sequence
  Description of Artificial Sequence: Synthetic oligonucleotide
agagccguggcuccaaagc

SEQ ID NO: 1262924 - RNA, 19 nt, Artificial Sequence
  Description of Artificial Sequence: Synthetic oligonucleotide
ucggaaguccaccaaaccc

SEQ ID NO: 1262925 - RNA, 19 nt, Artificial Sequence
  Description of Artificial Sequence: Synthetic oligonucleotide
auauauauauauuuauauu

SEQ ID NO: 1262926 - RNA, 19 nt, Artificial Sequence
  Description of Artificial Sequence: Synthetic oligonucleotide
acaauugggucaaagaaag

SEQ ID NO: 1262927 - RNA, 19 nt, Artificial Sequence
  Description of Artificial Sequence: Synthetic oligonucleotide
uuugguaucugggaguugc

SEQ ID NO: 1262928 - RNA, 19 nt, Artificial Sequence
  Description of Artificial Sequence: Synthetic oligonucleotide
cucagcucgagacacaacc

SEQ ID NO: 1262929 - RNA, 19 nt, Artificial Sequence
  Description of Artificial Sequence: Synthetic oligonucleotide
ugaucauucgacuccggcc

SEQ ID NO: 1262930 - RNA, 19 nt, Artificial Sequence
  Description of Artificial Sequence: Synthetic oligonucleotide
cauacagagggucauggag

SEQ ID NO: 1262931 - RNA, 19 nt, Artificial Sequence
  Description of Artificial Sequence: Synthetic oligonucleotide
cuuugaguacgccagggcc

SEQ ID NO: 1262932 - RNA, 19 nt, Artificial Sequence
  Description of Artificial Sequence: Synthetic oligonucleotide
auugaaucgaagaagggcu

SEQ ID NO: 1262933 - RNA, 19 nt, Artificial Sequence
  Description of Artificial Sequence: Synthetic oligonucleotide
agaacaauugggucaaaga

SEQ ID NO: 1262934 - RNA, 19 nt, Artificial Sequence
  Description of Artificial Sequence: Synthetic oligonucleotide
agguaagcuccccacaaac

SEQ ID NO: 1262935 - RNA, 19 nt, Artificial Sequence
  Description of Artificial Sequence: Synthetic oligonucleotide
ugauagacuggcaggaacu

SEQ ID NO: 1262936 - RNA, 19 nt, Artificial Sequence
  Description of Artificial Sequence: Synthetic oligonucleotide
agaacuuugaguacgccag

SEQ ID NO: 1262937 - RNA, 19 nt, Artificial Sequence
  Description of Artificial Sequence: Synthetic oligonucleotide
aaagauucucagcucgaga

SEQ ID NO: 1262938 - RNA, 19 nt, Artificial Sequence
  Description of Artificial Sequence: Synthetic oligonucleotide
acuuugaguacgccagggc

SEQ ID NO: 1262939 - RNA, 19 nt, Artificial Sequence
  Description of Artificial Sequence: Synthetic oligonucleotide
cacaaacucacauucggug

SEQ ID NO: 1262940 - RNA, 19 nt, Artificial Sequence
  Description of Artificial Sequence: Synthetic oligonucleotide
gucuuuguacagcaggcgg

SEQ ID NO: 1262941 - RNA, 19 nt, Artificial Sequence
  Description of Artificial Sequence: Synthetic oligonucleotide
ucgaagaagggcuccaaug

SEQ ID NO: 1262942 - RNA, 19 nt, Artificial Sequence
  Description of Artificial Sequence: Synthetic oligonucleotide
aacuuugaguacgccaggg

SEQ ID NO: 1262943 - RNA, 19 nt, Artificial Sequence
  Description of Artificial Sequence: Synthetic oligonucleotide
agccacagaacuuugagua

SEQ ID NO: 1262944 - RNA, 19 nt, Artificial Sequence
  Description of Artificial Sequence: Synthetic oligonucleotide
guagguagguacugaaaag

SEQ ID NO: 1262945 - RNA, 19 nt, Artificial Sequence
  Description of Artificial Sequence: Synthetic oligonucleotide
ucugggaguugcuucgagg

SEQ ID NO: 1262946 - RNA, 19 nt, Artificial Sequence
  Description of Artificial Sequence: Synthetic oligonucleotide
cugggaguugcuucgaggc

SEQ ID NO: 1262947 - RNA, 19 nt, Artificial Sequence
  Description of Artificial Sequence: Synthetic oligonucleotide
auacagagggucauggagg

SEQ ID NO: 1262948 - RNA, 19 nt, Artificial Sequence
  Description of Artificial Sequence: Synthetic oligonucleotide
gaggcauuugguaucuggg

SEQ ID NO: 1262949 - RNA, 19 nt, Artificial Sequence
  Description of Artificial Sequence: Synthetic oligonucleotide
uccccacaaacucacauuc

SEQ ID NO: 1262950 - RNA, 19 nt, Artificial Sequence
  Description of Artificial Sequence: Synthetic oligonucleotide
caaacucacauucgguggc

SEQ ID NO: 1262951 - RNA, 19 nt, Artificial Sequence
  Description of Artificial Sequence: Synthetic oligonucleotide
uuucggaaguccaccaaac

SEQ ID NO: 1262952 - RNA, 19 nt, Artificial Sequence
  Description of Artificial Sequence: Synthetic oligonucleotide
gagaccugcuacuugcagc

SEQ ID NO: 1262953 - RNA, 19 nt, Artificial Sequence
  Description of Artificial Sequence: Synthetic oligonucleotide
ugcaagggccacauuucgg

SEQ ID NO: 1262954 - RNA, 19 nt, Artificial Sequence
  Description of Artificial Sequence: Synthetic oligonucleotide
ucuuggcugaucauucgac

SEQ ID NO: 1262955 - RNA, 19 nt, Artificial Sequence
  Description of Artificial Sequence: Synthetic oligonucleotide
aacccgucuuuguacagca

SEQ ID NO: 1262956 - RNA, 19 nt, Artificial Sequence
  Description of Artificial Sequence: Synthetic oligonucleotide
uucggaaguccaccaaacc

SEQ ID NO: 1262957 - RNA, 19 nt, Artificial Sequence
  Description of Artificial Sequence: Synthetic oligonucleotide
auauauauauauauuuaua

SEQ ID NO: 1262958 - RNA, 19 nt, Artificial Sequence
  Description of Artificial Sequence: Synthetic oligonucleotide
guaagcuccccacaaacuc

SEQ ID NO: 1262959 - RNA, 19 nt, Artificial Sequence
  Description of Artificial Sequence: Synthetic oligonucleotide
gauucucagcucgagacac

SEQ ID NO: 1262960 - RNA, 19 nt, Artificial Sequence
  Description of Artificial Sequence: Synthetic oligonucleotide
gcugguaguguccagacug

SEQ ID NO: 1262961 - RNA, 19 nt, Artificial Sequence
  Description of Artificial Sequence: Synthetic oligonucleotide
aaauaguaccugaggccac

SEQ ID NO: 1262962 - RNA, 19 nt, Artificial Sequence
  Description of Artificial Sequence: Synthetic oligonucleotide
uugauacuaggauggcuug

SEQ ID NO: 1262963 - RNA, 19 nt, Artificial Sequence
  Description of Artificial Sequence: Synthetic oligonucleotide
uaucggaugaggacaggcu

SEQ ID NO: 1262964 - RNA, 19 nt, Artificial Sequence
  Description of Artificial Sequence: Synthetic oligonucleotide
accucuucgaccacucugc

SEQ ID NO: 1262965 - RNA, 19 nt, Artificial Sequence
  Description of Artificial Sequence: Synthetic oligonucleotide
guaggguaggccucuggcg

SEQ ID NO: 1262966 - RNA, 19 nt, Artificial Sequence
  Description of Artificial Sequence: Synthetic oligonucleotide
gaacuuugaguacgccagg

SEQ ID NO: 1262967 - RNA, 19 nt, Artificial Sequence
  Description of Artificial Sequence: Synthetic oligonucleotide
gaaagauucucagcucgag

SEQ ID NO: 1262968 - RNA, 19 nt, Artificial Sequence
  Description of Artificial Sequence: Synthetic oligonucleotide
ugagaccugcuacuugcag

SEQ ID NO: 1262969 - RNA, 19 nt, Artificial Sequence
  Description of Artificial Sequence: Synthetic oligonucleotide
gagacacaaccuuggguag

SEQ ID NO: 1262970 - RNA, 19 nt, Artificial Sequence
  Description of Artificial Sequence: Synthetic oligonucleotide
cacaaucacagguaagcuc

SEQ ID NO: 1262971 - RNA, 19 nt, Artificial Sequence
  Description of Artificial Sequence: Synthetic oligonucleotide
acacggauccgaaggaagc

SEQ ID NO: 1262972 - RNA, 19 nt, Artificial Sequence
  Description of Artificial Sequence: Synthetic oligonucleotide
gaucauucgacuccggccu

SEQ ID NO: 1262973 - RNA, 19 nt, Artificial Sequence
  Description of Artificial Sequence: Synthetic oligonucleotide
uucgacuccggccuggcuc

SEQ ID NO: 1262974 - RNA, 19 nt, Artificial Sequence
  Description of Artificial Sequence: Synthetic oligonucleotide
ccugguuugaacuucagca

SEQ ID NO: 1262975 - RNA, 19 nt, Artificial Sequence
  Description of Artificial Sequence: Synthetic oligonucleotide
ugggcaaaugccucuuggc

SEQ ID NO: 1262976 - RNA, 19 nt, Artificial Sequence
  Description of Artificial Sequence: Synthetic oligonucleotide
cagaccaagaaccccguug

SEQ ID NO: 1262977 - RNA, 19 nt, Artificial Sequence
  Description of Artificial Sequence: Synthetic oligonucleotide
cugauagacuggcaggaac

SEQ ID NO: 1262978 - RNA, 19 nt, Artificial Sequence
  Description of Artificial Sequence: Synthetic oligonucleotide
cugaucauucgacuccggc

SEQ ID NO: 1262979 - RNA, 19 nt, Artificial Sequence
  Description of Artificial Sequence: Synthetic oligonucleotide
ucagcucgagacacaaccu

SEQ ID NO: 1262980 - RNA, 19 nt, Artificial Sequence
  Description of Artificial Sequence: Synthetic oligonucleotide
uggcuugauugaaucgaag

SEQ ID NO: 1262981 - RNA, 19 nt, Artificial Sequence
  Description of Artificial Sequence: Synthetic oligonucleotide
uucgguggcuggaaugccc

SEQ ID NO: 1262982 - RNA, 19 nt, Artificial Sequence
  Description of Artificial Sequence: Synthetic oligonucleotide
cauucgguggcuggaaugc

SEQ ID NO: 1262983 - RNA, 19 nt, Artificial Sequence
  Description of Artificial Sequence: Synthetic oligonucleotide
cacagaacuuugaguacgc

SEQ ID NO: 1262984 - RNA, 19 nt, Artificial Sequence
  Description of Artificial Sequence: Synthetic oligonucleotide
ugggguaucggaugaggac

SEQ ID NO: 1262985 - RNA, 19 nt, Artificial Sequence
  Description of Artificial Sequence: Synthetic oligonucleotide
aaagggugggguccuuacu

SEQ ID NO: 1262986 - RNA, 19 nt, Artificial Sequence
  Description of Artificial Sequence: Synthetic oligonucleotide
acauucgguggcuggaaug

SEQ ID NO: 1262987 - RNA, 19 nt, Artificial Sequence
  Description of Artificial Sequence: Synthetic oligonucleotide
gaaccuagcaacaggugca

SEQ ID NO: 1262988 - RNA, 19 nt, Artificial Sequence
  Description of Artificial Sequence: Synthetic oligonucleotide
cugggcaaaugccucuugg

SEQ ID NO: 1262989 - RNA, 19 nt, Artificial Sequence
  Description of Artificial Sequence: Synthetic oligonucleotide
caaagucguggcagcaggg

SEQ ID NO: 1262990 - RNA, 19 nt, Artificial Sequence
  Description of Artificial Sequence: Synthetic oligonucleotide
uguacagcaggcggucagg

SEQ ID NO: 1262991 - RNA, 19 nt, Artificial Sequence
  Description of Artificial Sequence: Synthetic oligonucleotide
agacuguugggguaucgga

SEQ ID NO: 1262992 - RNA, 19 nt, Artificial Sequence
  Description of Artificial Sequence: Synthetic oligonucleotide
uaaagggugggguccuuac

SEQ ID NO: 1262993 - RNA, 19 nt, Artificial Sequence
  Description of Artificial Sequence: Synthetic oligonucleotide
uccuuacucuccucggggc

SEQ ID NO: 1262994 - RNA, 19 nt, Artificial Sequence
  Description of Artificial Sequence: Synthetic oligonucleotide
gugcaagggccacauuucg

SEQ ID NO: 1262995 - RNA, 19 nt, Artificial Sequence
  Description of Artificial Sequence: Synthetic oligonucleotide
cuuuccauacagaggguca

SEQ ID NO: 1262996 - RNA, 19 nt, Artificial Sequence
  Description of Artificial Sequence: Synthetic oligonucleotide
cuucggaccucuucgacca

SEQ ID NO: 1262997 - RNA, 19 nt, Artificial Sequence
  Description of Artificial Sequence: Synthetic oligonucleotide
accccguuguggcauacag

SEQ ID NO: 1262998 - RNA, 19 nt, Artificial Sequence
  Description of Artificial Sequence: Synthetic oligonucleotide
uggggaugaggcauuuggu

SEQ ID NO: 1262999 - RNA, 19 nt, Artificial Sequence
  Description of Artificial Sequence: Synthetic oligonucleotide
gcaaagucguggcagcagg

SEQ ID NO: 1263000 - RNA, 19 nt, Artificial Sequence
  Description of Artificial Sequence: Synthetic oligonucleotide
agggcaguggggcugcuug

SEQ ID NO: 1263001 - RNA, 19 nt, Artificial Sequence
  Description of Artificial Sequence: Synthetic oligonucleotide
ugaacccgucuuuguacag

SEQ ID NO: 1263002 - RNA, 19 nt, Artificial Sequence
  Description of Artificial Sequence: Synthetic oligonucleotide
guaucggaugaggacaggc

SEQ ID NO: 1263003 - RNA, 19 nt, Artificial Sequence
  Description of Artificial Sequence: Synthetic oligonucleotide
ccgaacacggauccgaagg

SEQ ID NO: 1263004 - RNA, 19 nt, Artificial Sequence
  Description of Artificial Sequence: Synthetic oligonucleotide
aaguaacugaaggcuccag

SEQ ID NO: 1263005 - RNA, 19 nt, Artificial Sequence
  Description of Artificial Sequence: Synthetic oligonucleotide
cagaacaauugggucaaag

SEQ ID NO: 1263006 - RNA, 19 nt, Artificial Sequence
  Description of Artificial Sequence: Synthetic oligonucleotide
gcuugcacagucccguugg

SEQ ID NO: 1263007 - RNA, 19 nt, Artificial Sequence
  Description of Artificial Sequence: Synthetic oligonucleotide
ugcaaagucguggcagcag

SEQ ID NO: 1263008 - RNA, 19 nt, Artificial Sequence
  Description of Artificial Sequence: Synthetic oligonucleotide
accccugcgaugaaggcuc

SEQ ID NO: 1263009 - RNA, 19 nt, Artificial Sequence
  Description of Artificial Sequence: Synthetic oligonucleotide
ggcuugauugaaucgaaga

SEQ ID NO: 1263010 - RNA, 19 nt, Artificial Sequence
  Description of Artificial Sequence: Synthetic oligonucleotide
guugcuucgaggcuugugu

SEQ ID NO: 1263011 - RNA, 19 nt, Artificial Sequence
  Description of Artificial Sequence: Synthetic oligonucleotide
ugauacuaggauggcuuga

SEQ ID NO: 1263012 - RNA, 19 nt, Artificial Sequence
  Description of Artificial Sequence: Synthetic oligonucleotide
ugcgaugaaggcuccuggu

SEQ ID NO: 1263013 - RNA, 19 nt, Artificial Sequence
  Description of Artificial Sequence: Synthetic oligonucleotide
ugggucaugccuugauacu

SEQ ID NO: 1263014 - RNA, 19 nt, Artificial Sequence
  Description of Artificial Sequence: Synthetic oligonucleotide
uccggccuggcucugcccc

SEQ ID NO: 1263015 - RNA, 19 nt, Artificial Sequence
  Description of Artificial Sequence: Synthetic oligonucleotide
cugcgaugaaggcuccugg

SEQ ID NO: 1263016 - RNA, 19 nt, Artificial Sequence
  Description of Artificial Sequence: Synthetic oligonucleotide
ugcugaacccgucuuugua

SEQ ID NO: 1263017 - RNA, 19 nt, Artificial Sequence
  Description of Artificial Sequence: Synthetic oligonucleotide
uugagguguaggguaggcc

SEQ ID NO: 1263018 - RNA, 19 nt, Artificial Sequence
  Description of Artificial Sequence: Synthetic oligonucleotide
cccguuguggcauacaguc

SEQ ID NO: 1263019 - RNA, 19 nt, Artificial Sequence
  Description of Artificial Sequence: Synthetic oligonucleotide
gguaucugggaguugcuuc

SEQ ID NO: 1263020 - RNA, 19 nt, Artificial Sequence
  Description of Artificial Sequence: Synthetic oligonucleotide
gcucagaccaagaaccccg

SEQ ID NO: 1263021 - RNA, 19 nt, Artificial Sequence
  Description of Artificial Sequence: Synthetic oligonucleotide
ugcgccgagaggcuggguc

SEQ ID NO: 1263022 - RNA, 19 nt, Artificial Sequence
  Description of Artificial Sequence: Synthetic oligonucleotide
gcggcucagaccaagaacc

SEQ ID NO: 1263023 - RNA, 19 nt, Artificial Sequence
  Description of Artificial Sequence: Synthetic oligonucleotide
aagaaccccguuguggcau

SEQ ID NO: 1263024 - RNA, 19 nt, Artificial Sequence
  Description of Artificial Sequence: Synthetic oligonucleotide
uggcauaaagggugggguc

SEQ ID NO: 1263025 - RNA, 19 nt, Artificial Sequence
  Description of Artificial Sequence: Synthetic oligonucleotide
agguagguacugaaaagcu

SEQ ID NO: 1263026 - RNA, 19 nt, Artificial Sequence
  Description of Artificial Sequence: Synthetic oligonucleotide
gaacccgucuuuguacagc

SEQ ID NO: 1263027 - RNA, 19 nt, Artificial Sequence
  Description of Artificial Sequence: Synthetic oligonucleotide
acaggcaccccugcgauga

SEQ ID NO: 1263028 - RNA, 19 nt, Artificial Sequence
  Description of Artificial Sequence: Synthetic oligonucleotide
gcuugauugaaucgaagaa

SEQ ID NO: 1263029 - RNA, 19 nt, Artificial Sequence
  Description of Artificial Sequence: Synthetic oligonucleotide
ucauucgacuccggccugg

SEQ ID NO: 1263030 - RNA, 19 nt, Artificial Sequence
  Description of Artificial Sequence: Synthetic oligonucleotide
ugggaguugcuucgaggcu

SEQ ID NO: 1263031 - RNA, 19 nt, Artificial Sequence
  Description of Artificial Sequence: Synthetic oligonucleotide
agacacgggguugaggugu

SEQ ID NO: 1263032 - RNA, 19 nt, Artificial Sequence
  Description of Artificial Sequence: Synthetic oligonucleotide
cagacuguugggguaucgg

SEQ ID NO: 1263033 - RNA, 19 nt, Artificial Sequence
  Description of Artificial Sequence: Synthetic oligonucleotide
gggguccuuacucuccucg

SEQ ID NO: 1263034 - RNA, 19 nt, Artificial Sequence
  Description of Artificial Sequence: Synthetic oligonucleotide
agcagaacaauugggucaa

SEQ ID NO: 1263035 - RNA, 19 nt, Artificial Sequence
  Description of Artificial Sequence: Synthetic oligonucleotide
aggugcucagucauccuuc

SEQ ID NO: 1263036 - RNA, 19 nt, Artificial Sequence
  Description of Artificial Sequence: Synthetic oligonucleotide
ucgacuccggccuggcucu

SEQ ID NO: 1263037 - RNA, 19 nt, Artificial Sequence
  Description of Artificial Sequence: Synthetic oligonucleotide
uuguggcauacagucuucc

SEQ ID NO: 1263038 - RNA, 19 nt, Artificial Sequence
  Description of Artificial Sequence: Synthetic oligonucleotide
cuuuguacagcaggcgguc

SEQ ID NO: 1263039 - RNA, 19 nt, Artificial Sequence
  Description of Artificial Sequence: Synthetic oligonucleotide
cucuucgaccacucugcgc

SEQ ID NO: 1263040 - RNA, 19 nt, Artificial Sequence
  Description of Artificial Sequence: Synthetic oligonucleotide
uccuucggaccucuucgac

SEQ ID NO: 1263041 - RNA, 19 nt, Artificial Sequence
  Description of Artificial Sequence: Synthetic oligonucleotide
ggcauaaaggguggggucc

SEQ ID NO: 1263042 - RNA, 19 nt, Artificial Sequence
  Description of Artificial Sequence: Synthetic oligonucleotide
cauuguuggcauaaagggu

SEQ ID NO: 1263043 - RNA, 19 nt, Artificial Sequence
  Description of Artificial Sequence: Synthetic oligonucleotide
ccuccuucggaccucuucg

SEQ ID NO: 1263044 - RNA, 19 nt, Artificial Sequence
  Description of Artificial Sequence: Synthetic oligonucleotide
accacucugcgccgagagg

SEQ ID NO: 1263045 - RNA, 19 nt, Artificial Sequence
  Description of Artificial Sequence: Synthetic oligonucleotide
uguccagacuguuggggua

SEQ ID NO: 1263046 - RNA, 19 nt, Artificial Sequence
  Description of Artificial Sequence: Synthetic oligonucleotide
uccccgaacacggauccga

SEQ ID NO: 1263047 - RNA, 19 nt, Artificial Sequence
  Description of Artificial Sequence: Synthetic oligonucleotide
gcugaacccgucuuuguac

SEQ ID NO: 1263048 - RNA, 19 nt, Artificial Sequence
  Description of Artificial Sequence: Synthetic oligonucleotide
cacggauccgaaggaagcc

SEQ ID NO: 1263049 - RNA, 19 nt, Artificial Sequence
  Description of Artificial Sequence: Synthetic oligonucleotide
agcucgagacacaaccuug

SEQ ID NO: 1263050 - RNA, 19 nt, Artificial Sequence
  Description of Artificial Sequence: Synthetic oligonucleotide
agaaguucuggaacucaca

SEQ ID NO: 1263051 - RNA, 19 nt, Artificial Sequence
  Description of Artificial Sequence: Synthetic oligonucleotide
cugaacccgucuuuguaca

SEQ ID NO: 1263052 - RNA, 19 nt, Artificial Sequence
  Description of Artificial Sequence: Synthetic oligonucleotide
guugagguguaggguaggc

SEQ ID NO: 1263053 - RNA, 19 nt, Artificial Sequence
  Description of Artificial Sequence: Synthetic oligonucleotide
cucugcgccgagaggcugg

SEQ ID NO: 1263054 - RNA, 19 nt, Artificial Sequence
  Description of Artificial Sequence: Synthetic oligonucleotide
uguugggguaucggaugag

SEQ ID NO: 1263055 - RNA, 19 nt, Artificial Sequence
  Description of Artificial Sequence: Synthetic oligonucleotide
ggaugaggcauuugguauc

SEQ ID NO: 1263056 - RNA, 19 nt, Artificial Sequence
  Description of Artificial Sequence: Synthetic oligonucleotide
caugccuugauacuaggau

SEQ ID NO: 1263057 - RNA, 19 nt, Artificial Sequence
  Description of Artificial Sequence: Synthetic oligonucleotide
uuccauacagagggucaug

SEQ ID NO: 1263058 - RNA, 19 nt, Artificial Sequence
  Description of Artificial Sequence: Synthetic oligonucleotide
aucauucgacuccggccug

SEQ ID NO: 1263059 - RNA, 19 nt, Artificial Sequence
  Description of Artificial Sequence: Synthetic oligonucleotide
aggcccucuguccccgaac

SEQ ID NO: 1263060 - RNA, 19 nt, Artificial Sequence
  Description of Artificial Sequence: Synthetic oligonucleotide
ucgaccacucugcgccgag

SEQ ID NO: 1263061 - RNA, 19 nt, Artificial Sequence
  Description of Artificial Sequence: Synthetic oligonucleotide
ugaggugcucagucauccu

SEQ ID NO: 1263062 - RNA, 19 nt, Artificial Sequence
  Description of Artificial Sequence: Synthetic oligonucleotide
cuucgaccacucugcgccg

SEQ ID NO: 1263063 - RNA, 19 nt, Artificial Sequence
  Description of Artificial Sequence: Synthetic oligonucleotide
cauguagccaggggacagc

SEQ ID NO: 1263064 - RNA, 19 nt, Artificial Sequence
  Description of Artificial Sequence: Synthetic oligonucleotide
cagggcggggugaaccuag

SEQ ID NO: 1263065 - RNA, 19 nt, Artificial Sequence
  Description of Artificial Sequence: Synthetic oligonucleotide
ccuucggaccucuucgacc

SEQ ID NO: 1263066 - RNA, 19 nt, Artificial Sequence
  Description of Artificial Sequence: Synthetic oligonucleotide
ugaaggcuccagccacugu

SEQ ID NO: 1263067 - RNA, 19 nt, Artificial Sequence
  Description of Artificial Sequence: Synthetic oligonucleotide
cacgggguugagguguagg

SEQ ID NO: 1263068 - RNA, 19 nt, Artificial Sequence
  Description of Artificial Sequence: Synthetic oligonucleotide
gugaaccuagcaacaggug

SEQ ID NO: 1263069 - RNA, 19 nt, Artificial Sequence
  Description of Artificial Sequence: Synthetic oligonucleotide
accugcuacuugcagccau

SEQ ID NO: 1263070 - RNA, 19 nt, Artificial Sequence
  Description of Artificial Sequence: Synthetic oligonucleotide
cuguccccgaacacggauc

SEQ ID NO: 1263071 - RNA, 19 nt, Artificial Sequence
  Description of Artificial Sequence: Synthetic oligonucleotide
ugaggaucugagagcugua

SEQ ID NO: 1263072 - RNA, 19 nt, Artificial Sequence
  Description of Artificial Sequence: Synthetic oligonucleotide
gauacuaggauggcuugau

SEQ ID NO: 1263073 - RNA, 19 nt, Artificial Sequence
  Description of Artificial Sequence: Synthetic oligonucleotide
aguugcuucgaggcuugug

SEQ ID NO: 1263074 - RNA, 19 nt, Artificial Sequence
  Description of Artificial Sequence: Synthetic oligonucleotide
ggguccuuacucuccucgg

SEQ ID NO: 1263075 - RNA, 19 nt, Artificial Sequence
  Description of Artificial Sequence: Synthetic oligonucleotide
ggucaugccuugauacuag

SEQ ID NO: 1263076 - RNA, 19 nt, Artificial Sequence
  Description of Artificial Sequence: Synthetic oligonucleotide
agcagggcggggugaaccu

SEQ ID NO: 1263077 - RNA, 19 nt, Artificial Sequence
  Description of Artificial Sequence: Synthetic oligonucleotide
gaugaggcauuugguaucu

SEQ ID NO: 1263078 - RNA, 19 nt, Artificial Sequence
  Description of Artificial Sequence: Synthetic oligonucleotide
ggugcugaacccgucuuug

SEQ ID NO: 1263079 - RNA, 19 nt, Artificial Sequence
  Description of Artificial Sequence: Synthetic oligonucleotide
uacgccagggccccuccau

SEQ ID NO: 1263080 - RNA, 19 nt, Artificial Sequence
  Description of Artificial Sequence: Synthetic oligonucleotide
uggugcugaacccgucuuu

SEQ ID NO: 1263081 - RNA, 19 nt, Artificial Sequence
  Description of Artificial Sequence: Synthetic oligonucleotide
ggcugcuagugcaagggcc

SEQ ID NO: 1263082 - RNA, 19 nt, Artificial Sequence
  Description of Artificial Sequence: Synthetic oligonucleotide
gggguaucggaugaggaca

SEQ ID NO: 1263083 - RNA, 19 nt, Artificial Sequence
  Description of Artificial Sequence: Synthetic oligonucleotide
acggauccgaaggaagcca

SEQ ID NO: 1263084 - RNA, 19 nt, Artificial Sequence
  Description of Artificial Sequence: Synthetic oligonucleotide
ucugcgccgagaggcuggg

SEQ ID NO: 1263085 - RNA, 19 nt, Artificial Sequence
  Description of Artificial Sequence: Synthetic oligonucleotide
cugcuacuugcagccaugc

SEQ ID NO: 1263086 - RNA, 19 nt, Artificial Sequence
  Description of Artificial Sequence: Synthetic oligonucleotide
auacuaggauggcuugauu

SEQ ID NO: 1263087 - RNA, 19 nt, Artificial Sequence
  Description of Artificial Sequence: Synthetic oligonucleotide
ugccucuuggcugaucauu

SEQ ID NO: 1263088 - RNA, 19 nt, Artificial Sequence
  Description of Artificial Sequence: Synthetic oligonucleotide
ggcggcucagaccaagaac

SEQ ID NO: 1263089 - RNA, 19 nt, Artificial Sequence
  Description of Artificial Sequence: Synthetic oligonucleotide
ccuagcaacaggugcagga

SEQ ID NO: 1263090 - RNA, 19 nt, Artificial Sequence
  Description of Artificial Sequence: Synthetic oligonucleotide
uacagcaggcggucagguc

SEQ ID NO: 1263091 - RNA, 19 nt, Artificial Sequence
  Description of Artificial Sequence: Synthetic oligonucleotide
caaggcggcucagaccaag

SEQ ID NO: 1263092 - RNA, 19 nt, Artificial Sequence
  Description of Artificial Sequence: Synthetic oligonucleotide
cagagccguggcuccaaag

SEQ ID NO: 1263093 - RNA, 19 nt, Artificial Sequence
  Description of Artificial Sequence: Synthetic oligonucleotide
cagacacgggguugaggug

SEQ ID NO: 1263094 - RNA, 19 nt, Artificial Sequence
  Description of Artificial Sequence: Synthetic oligonucleotide
accuagcaacaggugcagg

SEQ ID NO: 1263095 - RNA, 19 nt, Artificial Sequence
  Description of Artificial Sequence: Synthetic oligonucleotide
ggugaaccuagcaacaggu

SEQ ID NO: 1263096 - RNA, 19 nt, Artificial Sequence
  Description of Artificial Sequence: Synthetic oligonucleotide
caggcaccgaaagauucuc

SEQ ID NO: 1263097 - RNA, 19 nt, Artificial Sequence
  Description of Artificial Sequence: Synthetic oligonucleotide
augcaaagucguggcagca

SEQ ID NO: 1263098 - RNA, 19 nt, Artificial Sequence
  Description of Artificial Sequence: Synthetic oligonucleotide
gugccaugacucucugcac

SEQ ID NO: 1263099 - RNA, 19 nt, Artificial Sequence
  Description of Artificial Sequence: Synthetic oligonucleotide
gacacaaccuuggguaggu

SEQ ID NO: 1263100 - RNA, 19 nt, Artificial Sequence
  Description of Artificial Sequence: Synthetic oligonucleotide
cguagguagguacugaaaa

SEQ ID NO: 1263101 - RNA, 19 nt, Artificial Sequence
  Description of Artificial Sequence: Synthetic oligonucleotide
cccucuguccccgaacacg

SEQ ID NO: 1263102 - RNA, 19 nt, Artificial Sequence
  Description of Artificial Sequence: Synthetic oligonucleotide
acagucccguuggccaggg

SEQ ID NO: 1263103 - RNA, 19 nt, Artificial Sequence
  Description of Artificial Sequence: Synthetic oligonucleotide
cauucgacuccggccuggc

SEQ ID NO: 1263104 - RNA, 19 nt, Artificial Sequence
  Description of Artificial Sequence: Synthetic oligonucleotide
auaaagggugggguccuua

SEQ ID NO: 1263105 - RNA, 19 nt, Artificial Sequence
  Description of Artificial Sequence: Synthetic oligonucleotide
auucgacuccggccuggcu

SEQ ID NO: 1263106 - RNA, 19 nt, Artificial Sequence
  Description of Artificial Sequence: Synthetic oligonucleotide
gaggugcucagucauccuu

SEQ ID NO: 1263107 - RNA, 19 nt, Artificial Sequence
  Description of Artificial Sequence: Synthetic oligonucleotide
uucgaccacucugcgccga

SEQ ID NO: 1263108 - RNA, 19 nt, Artificial Sequence
  Description of Artificial Sequence: Synthetic oligonucleotide
ggcucagaccaagaacccc

SEQ ID NO: 1263109 - RNA, 19 nt, Artificial Sequence
  Description of Artificial Sequence: Synthetic oligonucleotide
acgccagggccccuccaug

SEQ ID NO: 1263110 - RNA, 19 nt, Artificial Sequence
  Description of Artificial Sequence: Synthetic oligonucleotide
guagcccuccuucggaccu

SEQ ID NO: 1263111 - RNA, 19 nt, Artificial Sequence
  Description of Artificial Sequence: Synthetic oligonucleotide
gcgugaggcccucuguccc

SEQ ID NO: 1263112 - RNA, 19 nt, Artificial Sequence
  Description of Artificial Sequence: Synthetic oligonucleotide
aaccccguuguggcauaca

SEQ ID NO: 1263113 - RNA, 19 nt, Artificial Sequence
  Description of Artificial Sequence: Synthetic oligonucleotide
ggcguagguagguacugaa

SEQ ID NO: 1263114 - RNA, 19 nt, Artificial Sequence
  Description of Artificial Sequence: Synthetic oligonucleotide
gguaucggaugaggacagg

SEQ ID NO: 1263115 - RNA, 19 nt, Artificial Sequence
  Description of Artificial Sequence: Synthetic oligonucleotide
agggcggggugaaccuagc

SEQ ID NO: 1263116 - RNA, 19 nt, Artificial Sequence
  Description of Artificial Sequence: Synthetic oligonucleotide
cuccuucggaccucuucga

SEQ ID NO: 1263117 - RNA, 19 nt, Artificial Sequence
  Description of Artificial Sequence: Synthetic oligonucleotide
ggaguugcuucgaggcuug

SEQ ID NO: 1263118 - RNA, 19 nt, Artificial Sequence
  Description of Artificial Sequence: Synthetic oligonucleotide
gggucauggagggagaagu

SEQ ID NO: 1263119 - RNA, 19 nt, Artificial Sequence
  Description of Artificial Sequence: Synthetic oligonucleotide
ggauccgaaggaagccaag

SEQ ID NO: 1263120 - RNA, 19 nt, Artificial Sequence
  Description of Artificial Sequence: Synthetic oligonucleotide
acucugcgccgagaggcug

SEQ ID NO: 1263121 - RNA, 19 nt, Artificial Sequence
  Description of Artificial Sequence: Synthetic oligonucleotide
ccucuucgaccacucugcg

SEQ ID NO: 1263122 - RNA, 19 nt, Artificial Sequence
  Description of Artificial Sequence: Synthetic oligonucleotide
gcaaagcucggcaugcaaa

SEQ ID NO: 1263123 - RNA, 19 nt, Artificial Sequence
  Description of Artificial Sequence: Synthetic oligonucleotide
agaaccccguuguggcaua

SEQ ID NO: 1263124 - RNA, 19 nt, Artificial Sequence
  Description of Artificial Sequence: Synthetic oligonucleotide
gggcugcuagugcaagggc

SEQ ID NO: 1263125 - RNA, 19 nt, Artificial Sequence
  Description of Artificial Sequence: Synthetic oligonucleotide
ggcaugcaaagucguggca

SEQ ID NO: 1263126 - RNA, 19 nt, Artificial Sequence
  Description of Artificial Sequence: Synthetic oligonucleotide
cggcaugcaaagucguggc

SEQ ID NO: 1263127 - RNA, 19 nt, Artificial Sequence
  Description of Artificial Sequence: Synthetic oligonucleotide
cacgaugcugcagggcuga

SEQ ID NO: 1263128 - RNA, 19 nt, Artificial Sequence
  Description of Artificial Sequence: Synthetic oligonucleotide
gugagaccugcuacuugca

SEQ ID NO: 1263129 - RNA, 19 nt, Artificial Sequence
  Description of Artificial Sequence: Synthetic oligonucleotide
gggucaugccuugauacua

SEQ ID NO: 1263130 - RNA, 19 nt, Artificial Sequence
  Description of Artificial Sequence: Synthetic oligonucleotide
gguaagcuccccacaaacu

SEQ ID NO: 1263131 - RNA, 19 nt, Artificial Sequence
  Description of Artificial Sequence: Synthetic oligonucleotide
gcucagucauccuucugcu

SEQ ID NO: 1263132 - RNA, 19 nt, Artificial Sequence
  Description of Artificial Sequence: Synthetic oligonucleotide
agccaugcgaagggccaga

SEQ ID NO: 1263133 - RNA, 19 nt, Artificial Sequence
  Description of Artificial Sequence: Synthetic oligonucleotide
gcugaucauucgacuccgg

SEQ ID NO: 1263134 - RNA, 19 nt, Artificial Sequence
  Description of Artificial Sequence: Synthetic oligonucleotide
gaaccccguuguggcauac

SEQ ID NO: 1263135 - RNA, 19 nt, Artificial Sequence
  Description of Artificial Sequence: Synthetic oligonucleotide
uccagacuguugggguauc

SEQ ID NO: 1263136 - RNA, 19 nt, Artificial Sequence
  Description of Artificial Sequence: Synthetic oligonucleotide
augaggcauuugguaucug

SEQ ID NO: 1263137 - RNA, 19 nt, Artificial Sequence
  Description of Artificial Sequence: Synthetic oligonucleotide
ggggcguagguagguacug

SEQ ID NO: 1263138 - RNA, 19 nt, Artificial Sequence
  Description of Artificial Sequence: Synthetic oligonucleotide
cuccggccuggcucugccc

SEQ ID NO: 1263139 - RNA, 19 nt, Artificial Sequence
  Description of Artificial Sequence: Synthetic oligonucleotide
cccgaacacggauccgaag

SEQ ID NO: 1263140 - RNA, 19 nt, Artificial Sequence
  Description of Artificial Sequence: Synthetic oligonucleotide
gcaccccugcgaugaaggc

SEQ ID NO: 1263141 - RNA, 19 nt, Artificial Sequence
  Description of Artificial Sequence: Synthetic oligonucleotide
cugugagccacagaacuuu

SEQ ID NO: 1263142 - RNA, 19 nt, Artificial Sequence
  Description of Artificial Sequence: Synthetic oligonucleotide
ccgagaggcugggucaugc

SEQ ID NO: 1263143 - RNA, 19 nt, Artificial Sequence
  Description of Artificial Sequence: Synthetic oligonucleotide
cuccccacaaacucacauu

SEQ ID NO: 1263144 - RNA, 19 nt, Artificial Sequence
  Description of Artificial Sequence: Synthetic oligonucleotide
ccuccugagguagcccucc

SEQ ID NO: 1263145 - RNA, 19 nt, Artificial Sequence
  Description of Artificial Sequence: Synthetic oligonucleotide
cgaaagauucucagcucga

SEQ ID NO: 1263146 - RNA, 19 nt, Artificial Sequence
  Description of Artificial Sequence: Synthetic oligonucleotide
ggcuuccaggcgugaggcc

SEQ ID NO: 1263147 - RNA, 19 nt, Artificial Sequence
  Description of Artificial Sequence: Synthetic oligonucleotide
ccaccacaaucacagguaa

SEQ ID NO: 1263148 - RNA, 19 nt, Artificial Sequence
  Description of Artificial Sequence: Synthetic oligonucleotide
guacagcaggcggucaggu

SEQ ID NO: 1263149 - RNA, 19 nt, Artificial Sequence
  Description of Artificial Sequence: Synthetic oligonucleotide
cggcucagaccaagaaccc

SEQ ID NO: 1263150 - RNA, 19 nt, Artificial Sequence
  Description of Artificial Sequence: Synthetic oligonucleotide
gaccugcuacuugcagcca

SEQ ID NO: 1263151 - RNA, 19 nt, Artificial Sequence
  Description of Artificial Sequence: Synthetic oligonucleotide
gcgccgagaggcuggguca

SEQ ID NO: 1263152 - RNA, 19 nt, Artificial Sequence
  Description of Artificial Sequence: Synthetic oligonucleotide
agcccuccuucggaccucu

SEQ ID NO: 1263153 - RNA, 19 nt, Artificial Sequence
  Description of Artificial Sequence: Synthetic oligonucleotide
cccuccuucggaccucuuc

SEQ ID NO: 1263154 - RNA, 19 nt, Artificial Sequence
  Description of Artificial Sequence: Synthetic oligonucleotide
gccaugcgaagggccagag

SEQ ID NO: 1263155 - RNA, 19 nt, Artificial Sequence
  Description of Artificial Sequence: Synthetic oligonucleotide
cgaacacggauccgaagga

SEQ ID NO: 1263156 - RNA, 19 nt, Artificial Sequence
  Description of Artificial Sequence: Synthetic oligonucleotide
ccacaaacucacauucggu

SEQ ID NO: 1263157 - RNA, 19 nt, Artificial Sequence
  Description of Artificial Sequence: Synthetic oligonucleotide
gguguaggguaggccucug

SEQ ID NO: 1263158 - RNA, 19 nt, Artificial Sequence
  Description of Artificial Sequence: Synthetic oligonucleotide
guccagacuguugggguau

SEQ ID NO: 1263159 - RNA, 19 nt, Artificial Sequence
  Description of Artificial Sequence: Synthetic oligonucleotide
gcuagugcaagggccacau

SEQ ID NO: 1263160 - RNA, 19 nt, Artificial Sequence
  Description of Artificial Sequence: Synthetic oligonucleotide
cacauucgguggcuggaau

SEQ ID NO: 1263161 - RNA, 19 nt, Artificial Sequence
  Description of Artificial Sequence: Synthetic oligonucleotide
gcguagguagguacugaaa

SEQ ID NO: 1263162 - RNA, 19 nt, Artificial Sequence
  Description of Artificial Sequence: Synthetic oligonucleotide
gggaguugcuucgaggcuu

SEQ ID NO: 1263163 - RNA, 19 nt, Artificial Sequence
  Description of Artificial Sequence: Synthetic oligonucleotide
gcgaugaaggcuccugguu

SEQ ID NO: 1263164 - RNA, 19 nt, Artificial Sequence
  Description of Artificial Sequence: Synthetic oligonucleotide
ggauggugcugaacccguc

SEQ ID NO: 1263165 - RNA, 19 nt, Artificial Sequence
  Description of Artificial Sequence: Synthetic oligonucleotide
ccccauguccauguagcca

SEQ ID NO: 1263166 - RNA, 19 nt, Artificial Sequence
  Description of Artificial Sequence: Synthetic oligonucleotide
cguuguggcauacagucuu

SEQ ID NO: 1263167 - RNA, 19 nt, Artificial Sequence
  Description of Artificial Sequence: Synthetic oligonucleotide
gggcguagguagguacuga

SEQ ID NO: 1263168 - RNA, 19 nt, Artificial Sequence
  Description of Artificial Sequence: Synthetic oligonucleotide
gcauaaagggugggguccu

SEQ ID NO: 1263169 - RNA, 19 nt, Artificial Sequence
  Description of Artificial Sequence: Synthetic oligonucleotide
gcccucuguccccgaacac

SEQ ID NO: 1263170 - RNA, 19 nt, Artificial Sequence
  Description of Artificial Sequence: Synthetic oligonucleotide
cuccaaugacaggcaccga

SEQ ID NO: 1263171 - RNA, 19 nt, Artificial Sequence
  Description of Artificial Sequence: Synthetic oligonucleotide
ggucauggagggagaaguu

SEQ ID NO: 1263172 - RNA, 19 nt, Artificial Sequence
  Description of Artificial Sequence: Synthetic oligonucleotide
gaguugcuucgaggcuugu

SEQ ID NO: 1263173 - RNA, 19 nt, Artificial Sequence
  Description of Artificial Sequence: Synthetic oligonucleotide
ccccgaacacggauccgaa

SEQ ID NO: 1263174 - RNA, 19 nt, Artificial Sequence
  Description of Artificial Sequence: Synthetic oligonucleotide
ccguuguggcauacagucu

SEQ ID NO: 1263175 - RNA, 19 nt, Artificial Sequence
  Description of Artificial Sequence: Synthetic oligonucleotide
gccgagaggcugggucaug

SEQ ID NO: 1263176 - RNA, 19 nt, Artificial Sequence
  Description of Artificial Sequence: Synthetic oligonucleotide
cuagugcaagggccacauu

SEQ ID NO: 1263177 - RNA, 19 nt, Artificial Sequence
  Description of Artificial Sequence: Synthetic oligonucleotide
caggcaccccugcgaugaa

SEQ ID NO: 1263178 - RNA, 19 nt, Artificial Sequence
  Description of Artificial Sequence: Synthetic oligonucleotide
ccccguuguggcauacagu

SEQ ID NO: 1263179 - RNA, 19 nt, Artificial Sequence
  Description of Artificial Sequence: Synthetic oligonucleotide
gcagaacaauugggucaaa

SEQ ID NO: 1263180 - RNA, 19 nt, Artificial Sequence
  Description of Artificial Sequence: Synthetic oligonucleotide
caaaugccucuuggcugau

SEQ ID NO: 1263181 - RNA, 19 nt, Artificial Sequence
  Description of Artificial Sequence: Synthetic oligonucleotide
gcagggcggggugaaccua

SEQ ID NO: 1263182 - RNA, 19 nt, Artificial Sequence
  Description of Artificial Sequence: Synthetic oligonucleotide
ccguggcuccaaagcaacu

SEQ ID NO: 1263183 - RNA, 19 nt, Artificial Sequence
  Description of Artificial Sequence: Synthetic oligonucleotide
gcaaggcggcucagaccaa

SEQ ID NO: 1263184 - RNA, 19 nt, Artificial Sequence
  Description of Artificial Sequence: Synthetic oligonucleotide
cgaccacucugcgccgaga

SEQ ID NO: 1263185 - RNA, 19 nt, Artificial Sequence
  Description of Artificial Sequence: Synthetic oligonucleotide
ccaugacucucugcacauu

SEQ ID NO: 1263186 - RNA, 19 nt, Artificial Sequence
  Description of Artificial Sequence: Synthetic oligonucleotide
cugcgccgagaggcugggu

SEQ ID NO: 1263187 - RNA, 19 nt, Artificial Sequence
  Description of Artificial Sequence: Synthetic oligonucleotide
cgacuccggccuggcucug

SEQ ID NO: 1263188 - RNA, 19 nt, Artificial Sequence
  Description of Artificial Sequence: Synthetic oligonucleotide
cgccgagaggcugggucau

SEQ ID NO: 1263189 - RNA, 19 nt, Artificial Sequence
  Description of Artificial Sequence: Synthetic oligonucleotide
gcccuccuucggaccucuu

SEQ ID NO: 1263190 - RNA, 19 nt, Artificial Sequence
  Description of Artificial Sequence: Synthetic oligonucleotide
aauaagcugaucuugacgc

SEQ ID NO: 1263191 - RNA, 19 nt, Artificial Sequence
  Description of Artificial Sequence: Synthetic oligonucleotide
aaaauaacuggguauuugc

SEQ ID NO: 1263192 - RNA, 19 nt, Artificial Sequence
  Description of Artificial Sequence: Synthetic oligonucleotide
uuugcaucaaccaucaagg

SEQ ID NO: 1263193 - RNA, 19 nt, Artificial Sequence
  Description of Artificial Sequence: Synthetic oligonucleotide
aagaggguugguuagaauc

SEQ ID NO: 1263194 - RNA, 19 nt, Artificial Sequence
  Description of Artificial Sequence: Synthetic oligonucleotide
aauguacguaaucacacag

SEQ ID NO: 1263195 - RNA, 19 nt, Artificial Sequence
  Description of Artificial Sequence: Synthetic oligonucleotide
aaauccagauuuucuuucc

SEQ ID NO: 1263196 - RNA, 19 nt, Artificial Sequence
  Description of Artificial Sequence: Synthetic oligonucleotide
augaccucggcacugaugc

SEQ ID NO: 1263197 - RNA, 19 nt, Artificial Sequence
  Description of Artificial Sequence: Synthetic oligonucleotide
ugacuugucacccuuaagc

SEQ ID NO: 1263198 - RNA, 19 nt, Artificial Sequence
  Description of Artificial Sequence: Synthetic oligonucleotide
gauuugaauaccuucgcag

SEQ ID NO: 1263199 - RNA, 19 nt, Artificial Sequence
  Description of Artificial Sequence: Synthetic oligonucleotide
uuugauuuuagaagcagga

SEQ ID NO: 1263200 - RNA, 19 nt, Artificial Sequence
  Description of Artificial Sequence: Synthetic oligonucleotide
aagagcaauaucuggaaug

SEQ ID NO: 1263201 - RNA, 19 nt, Artificial Sequence
  Description of Artificial Sequence: Synthetic oligonucleotide
cauaagagcacucuuaaac

SEQ ID NO: 1263202 - RNA, 19 nt, Artificial Sequence
  Description of Artificial Sequence: Synthetic oligonucleotide
uuaacagaagguuauccag

SEQ ID NO: 1263203 - RNA, 19 nt, Artificial Sequence
  Description of Artificial Sequence: Synthetic oligonucleotide
aacuuugccacaauguaac

SEQ ID NO: 1263204 - RNA, 19 nt, Artificial Sequence
  Description of Artificial Sequence: Synthetic oligonucleotide
auuugaauaccuucgcagg

SEQ ID NO: 1263205 - RNA, 19 nt, Artificial Sequence
  Description of Artificial Sequence: Synthetic oligonucleotide
uugacagacuuucugaccc

SEQ ID NO: 1263206 - RNA, 19 nt, Artificial Sequence
  Description of Artificial Sequence: Synthetic oligonucleotide
aaauaacuggguauuugcc

SEQ ID NO: 1263207 - RNA, 19 nt, Artificial Sequence
  Description of Artificial Sequence: Synthetic oligonucleotide
gaauaagcugaucuugacg

SEQ ID NO: 1263208 - RNA, 19 nt, Artificial Sequence
  Description of Artificial Sequence: Synthetic oligonucleotide
aaugggaucagcuccacau

SEQ ID NO: 1263209 - RNA, 19 nt, Artificial Sequence
  Description of Artificial Sequence: Synthetic oligonucleotide
auaucaagaaggugcauag

SEQ ID NO: 1263210 - RNA, 19 nt, Artificial Sequence
  Description of Artificial Sequence: Synthetic oligonucleotide
aguuuuaucugguucaaga

SEQ ID NO: 1263211 - RNA, 19 nt, Artificial Sequence
  Description of Artificial Sequence: Synthetic oligonucleotide
auaacuggguauuugccuc

SEQ ID NO: 1263212 - RNA, 19 nt, Artificial Sequence
  Description of Artificial Sequence: Synthetic oligonucleotide
aggugucaauuucaaaucc

SEQ ID NO: 1263213 - RNA, 19 nt, Artificial Sequence
  Description of Artificial Sequence: Synthetic oligonucleotide
ccagguaucacgaagagcc

SEQ ID NO: 1263214 - RNA, 19 nt, Artificial Sequence
  Description of Artificial Sequence: Synthetic oligonucleotide
aagagccaaauccacuuuc

SEQ ID NO: 1263215 - RNA, 19 nt, Artificial Sequence
  Description of Artificial Sequence: Synthetic oligonucleotide
acggaacuuguccugaacc

SEQ ID NO: 1263216 - RNA, 19 nt, Artificial Sequence
  Description of Artificial Sequence: Synthetic oligonucleotide
ugcaucaaccaucaaggag

SEQ ID NO: 1263217 - RNA, 19 nt, Artificial Sequence
  Description of Artificial Sequence: Synthetic oligonucleotide
gagcgcaugacucugacug

SEQ ID NO: 1263218 - RNA, 19 nt, Artificial Sequence
  Description of Artificial Sequence: Synthetic oligonucleotide
agaauguacguaaucacac

SEQ ID NO: 1263219 - RNA, 19 nt, Artificial Sequence
  Description of Artificial Sequence: Synthetic oligonucleotide
caaaaucagauuugaauac

SEQ ID NO: 1263220 - RNA, 19 nt, Artificial Sequence
  Description of Artificial Sequence: Synthetic oligonucleotide
gaauuugacagacuuucug

SEQ ID NO: 1263221 - RNA, 19 nt, Artificial Sequence
  Description of Artificial Sequence: Synthetic oligonucleotide
ugaauaccuucgcaggugg

SEQ ID NO: 1263222 - RNA, 19 nt, Artificial Sequence
  Description of Artificial Sequence: Synthetic oligonucleotide
aguguugaguucuuacagg

SEQ ID NO: 1263223 - RNA, 19 nt, Artificial Sequence
  Description of Artificial Sequence: Synthetic oligonucleotide
ucuuagauuuuccccaucu

SEQ ID NO: 1263224 - RNA, 19 nt, Artificial Sequence
  Description of Artificial Sequence: Synthetic oligonucleotide
ucgucaaucagacucugca

SEQ ID NO: 1263225 - RNA, 19 nt, Artificial Sequence
  Description of Artificial Sequence: Synthetic oligonucleotide
guacugggcaaacuuaugg

SEQ ID NO: 1263226 - RNA, 19 nt, Artificial Sequence
  Description of Artificial Sequence: Synthetic oligonucleotide
gaagaauaagcugaucuug

SEQ ID NO: 1263227 - RNA, 19 nt, Artificial Sequence
  Description of Artificial Sequence: Synthetic oligonucleotide
augacacucagguacaucu

SEQ ID NO: 1263228 - RNA, 19 nt, Artificial Sequence
  Description of Artificial Sequence: Synthetic oligonucleotide
augaauccauguuuuguac

SEQ ID NO: 1263229 - RNA, 19 nt, Artificial Sequence
  Description of Artificial Sequence: Synthetic oligonucleotide
ugcauggacacucucguca

SEQ ID NO: 1263230 - RNA, 19 nt, Artificial Sequence
  Description of Artificial Sequence: Synthetic oligonucleotide
agaauaagcugaucuugac

SEQ ID NO: 1263231 - RNA, 19 nt, Artificial Sequence
  Description of Artificial Sequence: Synthetic oligonucleotide
uguauagcacugcuuucgg

SEQ ID NO: 1263232 - RNA, 19 nt, Artificial Sequence
  Description of Artificial Sequence: Synthetic oligonucleotide
ucugacaucuuuagcauaa

SEQ ID NO: 1263233 - RNA, 19 nt, Artificial Sequence
  Description of Artificial Sequence: Synthetic oligonucleotide
aacagaagguuauccaggu

SEQ ID NO: 1263234 - RNA, 19 nt, Artificial Sequence
  Description of Artificial Sequence: Synthetic oligonucleotide
ugcucuuagauuuucccca

SEQ ID NO: 1263235 - RNA, 19 nt, Artificial Sequence
  Description of Artificial Sequence: Synthetic oligonucleotide
aauugcaugaauccauguu

SEQ ID NO: 1263236 - RNA, 19 nt, Artificial Sequence
  Description of Artificial Sequence: Synthetic oligonucleotide
caauguaacuucuggacac

SEQ ID NO: 1263237 - RNA, 19 nt, Artificial Sequence
  Description of Artificial Sequence: Synthetic oligonucleotide
uuugaauaccuucgcaggu

SEQ ID NO: 1263238 - RNA, 19 nt, Artificial Sequence
  Description of Artificial Sequence: Synthetic oligonucleotide
uauagcacugcuuucggaa

SEQ ID NO: 1263239 - RNA, 19 nt, Artificial Sequence
  Description of Artificial Sequence: Synthetic oligonucleotide
ugaauugcaugaauccaug

SEQ ID NO: 1263240 - RNA, 19 nt, Artificial Sequence
  Description of Artificial Sequence: Synthetic oligonucleotide
acaaaagucugcugugccg

SEQ ID NO: 1263241 - RNA, 19 nt, Artificial Sequence
  Description of Artificial Sequence: Synthetic oligonucleotide
uccacgaucacguaccagu

SEQ ID NO: 1263242 - RNA, 19 nt, Artificial Sequence
  Description of Artificial Sequence: Synthetic oligonucleotide
uggaugaauugcaugaauc

SEQ ID NO: 1263243 - RNA, 19 nt, Artificial Sequence
  Description of Artificial Sequence: Synthetic oligonucleotide
auugcaugaauccauguuu

SEQ ID NO: 1263244 - RNA, 19 nt, Artificial Sequence
  Description of Artificial Sequence: Synthetic oligonucleotide
uuucuugcgauuuccacuc

SEQ ID NO: 1263245 - RNA, 19 nt, Artificial Sequence
  Description of Artificial Sequence: Synthetic oligonucleotide
agaaaggcuguauagcacu

SEQ ID NO: 1263246 - RNA, 19 nt, Artificial Sequence
  Description of Artificial Sequence: Synthetic oligonucleotide
guaaguguccaugaccucg

SEQ ID NO: 1263247 - RNA, 19 nt, Artificial Sequence
  Description of Artificial Sequence: Synthetic oligonucleotide
gacguaaguguccaugacc

SEQ ID NO: 1263248 - RNA, 19 nt, Artificial Sequence
  Description of Artificial Sequence: Synthetic oligonucleotide
cugaaucuccucaugacac

SEQ ID NO: 1263249 - RNA, 19 nt, Artificial Sequence
  Description of Artificial Sequence: Synthetic oligonucleotide
cauguuuuguacugguggc

SEQ ID NO: 1263250 - RNA, 19 nt, Artificial Sequence
  Description of Artificial Sequence: Synthetic oligonucleotide
aucaagaaggugcauagau

SEQ ID NO: 1263251 - RNA, 19 nt, Artificial Sequence
  Description of Artificial Sequence: Synthetic oligonucleotide
aacggaacuuguccugaac

SEQ ID NO: 1263252 - RNA, 19 nt, Artificial Sequence
  Description of Artificial Sequence: Synthetic oligonucleotide
aauuagccaguguugaguu

SEQ ID NO: 1263253 - RNA, 19 nt, Artificial Sequence
  Description of Artificial Sequence: Synthetic oligonucleotide
aauaccuucgcagguggag

SEQ ID NO: 1263254 - RNA, 19 nt, Artificial Sequence
  Description of Artificial Sequence: Synthetic oligonucleotide
ugaucuugacgcaagucgu

SEQ ID NO: 1263255 - RNA, 19 nt, Artificial Sequence
  Description of Artificial Sequence: Synthetic oligonucleotide
aguucuuacaggcucuuga

SEQ ID NO: 1263256 - RNA, 19 nt, Artificial Sequence
  Description of Artificial Sequence: Synthetic oligonucleotide
gcucuugauaucaagaagg

SEQ ID NO: 1263257 - RNA, 19 nt, Artificial Sequence
  Description of Artificial Sequence: Synthetic oligonucleotide
ucugacagguccaaacgga

SEQ ID NO: 1263258 - RNA, 19 nt, Artificial Sequence
  Description of Artificial Sequence: Synthetic oligonucleotide
caagaauguacguaaucac

SEQ ID NO: 1263259 - RNA, 19 nt, Artificial Sequence
  Description of Artificial Sequence: Synthetic oligonucleotide
uucuuugccgagauuuaag

SEQ ID NO: 1263260 - RNA, 19 nt, Artificial Sequence
  Description of Artificial Sequence: Synthetic oligonucleotide
auagcacugcuuucggaac

SEQ ID NO: 1263261 - RNA, 19 nt, Artificial Sequence
  Description of Artificial Sequence: Synthetic oligonucleotide
aacaaaccuucuuugccga

SEQ ID NO: 1263262 - RNA, 19 nt, Artificial Sequence
  Description of Artificial Sequence: Synthetic oligonucleotide
aaaucagauuugaauaccu

SEQ ID NO: 1263263 - RNA, 19 nt, Artificial Sequence
  Description of Artificial Sequence: Synthetic oligonucleotide
uguaaggugucaauuucaa

SEQ ID NO: 1263264 - RNA, 19 nt, Artificial Sequence
  Description of Artificial Sequence: Synthetic oligonucleotide
uggcuaacaccuuguaagg

SEQ ID NO: 1263265 - RNA, 19 nt, Artificial Sequence
  Description of Artificial Sequence: Synthetic oligonucleotide
cagaauuugacagacuuuc

SEQ ID NO: 1263266 - RNA, 19 nt, Artificial Sequence
  Description of Artificial Sequence: Synthetic oligonucleotide
uccaagcaaugcuugaagc

SEQ ID NO: 1263267 - RNA, 19 nt, Artificial Sequence
  Description of Artificial Sequence: Synthetic oligonucleotide
ggaugaauugcaugaaucc

SEQ ID NO: 1263268 - RNA, 19 nt, Artificial Sequence
  Description of Artificial Sequence: Synthetic oligonucleotide
guuaacagaagguuaucca

SEQ ID NO: 1263269 - RNA, 19 nt, Artificial Sequence
  Description of Artificial Sequence: Synthetic oligonucleotide
cugcauguagugcacagcc

SEQ ID NO: 1263270 - RNA, 19 nt, Artificial Sequence
  Description of Artificial Sequence: Synthetic oligonucleotide
aacuuauggaucugcucca

SEQ ID NO: 1263271 - RNA, 19 nt, Artificial Sequence
  Description of Artificial Sequence: Synthetic oligonucleotide
uacugggccagguaucacg

SEQ ID NO: 1263272 - RNA, 19 nt, Artificial Sequence
  Description of Artificial Sequence: Synthetic oligonucleotide
aaguaauuagccaguguug

SEQ ID NO: 1263273 - RNA, 19 nt, Artificial Sequence
  Description of Artificial Sequence: Synthetic oligonucleotide
cucggcccaagauauaucc

SEQ ID NO: 1263274 - RNA, 19 nt, Artificial Sequence
  Description of Artificial Sequence: Synthetic oligonucleotide
uugcucuuagauuuucccc

SEQ ID NO: 1263275 - RNA, 19 nt, Artificial Sequence
  Description of Artificial Sequence: Synthetic oligonucleotide
ugucaauuucaaauccaga

SEQ ID NO: 1263276 - RNA, 19 nt, Artificial Sequence
  Description of Artificial Sequence: Synthetic oligonucleotide
ugaaccuugacuguccuuc

SEQ ID NO: 1263277 - RNA, 19 nt, Artificial Sequence
  Description of Artificial Sequence: Synthetic oligonucleotide
aucacguaccaguauaagu

SEQ ID NO: 1263278 - RNA, 19 nt, Artificial Sequence
  Description of Artificial Sequence: Synthetic oligonucleotide
gucuccaacuccaagaaug

SEQ ID NO: 1263279 - RNA, 19 nt, Artificial Sequence
  Description of Artificial Sequence: Synthetic oligonucleotide
acuccaagaauguacguaa

SEQ ID NO: 1263280 - RNA, 19 nt, Artificial Sequence
  Description of Artificial Sequence: Synthetic oligonucleotide
uaauuagccaguguugagu

SEQ ID NO: 1263281 - RNA, 19 nt, Artificial Sequence
  Description of Artificial Sequence: Synthetic oligonucleotide
aagaauaagcugaucuuga

SEQ ID NO: 1263282 - RNA, 19 nt, Artificial Sequence
  Description of Artificial Sequence: Synthetic oligonucleotide
agaggcuuuggaucucggc

SEQ ID NO: 1263283 - RNA, 19 nt, Artificial Sequence
  Description of Artificial Sequence: Synthetic oligonucleotide
agaagguuauccaggugcc

SEQ ID NO: 1263284 - RNA, 19 nt, Artificial Sequence
  Description of Artificial Sequence: Synthetic oligonucleotide
caguguugaguucuuacag

SEQ ID NO: 1263285 - RNA, 19 nt, Artificial Sequence
  Description of Artificial Sequence: Synthetic oligonucleotide
uuauuuucaccuguggcuc

SEQ ID NO: 1263286 - RNA, 19 nt, Artificial Sequence
  Description of Artificial Sequence: Synthetic oligonucleotide
cuuguaaggugucaauuuc

SEQ ID NO: 1263287 - RNA, 19 nt, Artificial Sequence
  Description of Artificial Sequence: Synthetic oligonucleotide
agauauauccaaaaucuau

SEQ ID NO: 1263288 - RNA, 19 nt, Artificial Sequence
  Description of Artificial Sequence: Synthetic oligonucleotide
guccaaacggaacuugucc

SEQ ID NO: 1263289 - RNA, 19 nt, Artificial Sequence
  Description of Artificial Sequence: Synthetic oligonucleotide
agugcauggacacucucgu

SEQ ID NO: 1263290 - RNA, 19 nt, Artificial Sequence
  Description of Artificial Sequence: Synthetic oligonucleotide
gacuugucacccuuaagca

SEQ ID NO: 1263291 - RNA, 19 nt, Artificial Sequence
  Description of Artificial Sequence: Synthetic oligonucleotide
gaugaauugcaugaaucca

SEQ ID NO: 1263292 - RNA, 19 nt, Artificial Sequence
  Description of Artificial Sequence: Synthetic oligonucleotide
uaugcuucccuccguguca

SEQ ID NO: 1263293 - RNA, 19 nt, Artificial Sequence
  Description of Artificial Sequence: Synthetic oligonucleotide
uacaucucaugagucuucg

SEQ ID NO: 1263294 - RNA, 19 nt, Artificial Sequence
  Description of Artificial Sequence: Synthetic oligonucleotide
ugggccagguaucacgaag

SEQ ID NO: 1263295 - RNA, 19 nt, Artificial Sequence
  Description of Artificial Sequence: Synthetic oligonucleotide
uccaagaauguacguaauc

SEQ ID NO: 1263296 - RNA, 19 nt, Artificial Sequence
  Description of Artificial Sequence: Synthetic oligonucleotide
uaaucacacaguagccagc

SEQ ID NO: 1263297 - RNA, 19 nt, Artificial Sequence
  Description of Artificial Sequence: Synthetic oligonucleotide
gauuuccacucucucguug

SEQ ID NO: 1263298 - RNA, 19 nt, Artificial Sequence
  Description of Artificial Sequence: Synthetic oligonucleotide
gaugccauuggguccaguc

SEQ ID NO: 1263299 - RNA, 19 nt, Artificial Sequence
  Description of Artificial Sequence: Synthetic oligonucleotide
ucgcuuggggcauauuucc

SEQ ID NO: 1263300 - RNA, 19 nt, Artificial Sequence
  Description of Artificial Sequence: Synthetic oligonucleotide
uugccgagauuuaagcacu

SEQ ID NO: 1263301 - RNA, 19 nt, Artificial Sequence
  Description of Artificial Sequence: Synthetic oligonucleotide
aaguucuguaugcuucccu

SEQ ID NO: 1263302 - RNA, 19 nt, Artificial Sequence
  Description of Artificial Sequence: Synthetic oligonucleotide
uuacaggcucuugauauca

SEQ ID NO: 1263303 - RNA, 19 nt, Artificial Sequence
  Description of Artificial Sequence: Synthetic oligonucleotide
gaauguacguaaucacaca

SEQ ID NO: 1263304 - RNA, 19 nt, Artificial Sequence
  Description of Artificial Sequence: Synthetic oligonucleotide
acguaaucacacaguagcc

SEQ ID NO: 1263305 - RNA, 19 nt, Artificial Sequence
  Description of Artificial Sequence: Synthetic oligonucleotide
ccucaugacacucagguac

SEQ ID NO: 1263306 - RNA, 19 nt, Artificial Sequence
  Description of Artificial Sequence: Synthetic oligonucleotide
cuugacgcaagucgucucc

SEQ ID NO: 1263307 - RNA, 19 nt, Artificial Sequence
  Description of Artificial Sequence: Synthetic oligonucleotide
uggcugaaucuccucauga

SEQ ID NO: 1263308 - RNA, 19 nt, Artificial Sequence
  Description of Artificial Sequence: Synthetic oligonucleotide
uugaauaccuucgcaggug

SEQ ID NO: 1263309 - RNA, 19 nt, Artificial Sequence
  Description of Artificial Sequence: Synthetic oligonucleotide
gauuuucuuuccguagcag

SEQ ID NO: 1263310 - RNA, 19 nt, Artificial Sequence
  Description of Artificial Sequence: Synthetic oligonucleotide
uccauguuuuguacuggug

SEQ ID NO: 1263311 - RNA, 19 nt, Artificial Sequence
  Description of Artificial Sequence: Synthetic oligonucleotide
agcuuuugacguaaguguc

SEQ ID NO: 1263312 - RNA, 19 nt, Artificial Sequence
  Description of Artificial Sequence: Synthetic oligonucleotide
augacucugacugacuugu

SEQ ID NO: 1263313 - RNA, 19 nt, Artificial Sequence
  Description of Artificial Sequence: Synthetic oligonucleotide
uuucggaacucuugguacu

SEQ ID NO: 1263314 - RNA, 19 nt, Artificial Sequence
  Description of Artificial Sequence: Synthetic oligonucleotide
cauguagugcacagccucc

SEQ ID NO: 1263315 - RNA, 19 nt, Artificial Sequence
  Description of Artificial Sequence: Synthetic oligonucleotide
ucucgcuuggggcauauuu

SEQ ID NO: 1263316 - RNA, 19 nt, Artificial Sequence
  Description of Artificial Sequence: Synthetic oligonucleotide
uugcaugaauccauguuuu

SEQ ID NO: 1263317 - RNA, 19 nt, Artificial Sequence
  Description of Artificial Sequence: Synthetic oligonucleotide
acguaaguguccaugaccu

SEQ ID NO: 1263318 - RNA, 19 nt, Artificial Sequence
  Description of Artificial Sequence: Synthetic oligonucleotide
uggaucucggcccaagaua

SEQ ID NO: 1263319 - RNA, 19 nt, Artificial Sequence
  Description of Artificial Sequence: Synthetic oligonucleotide
aacuccaagaauguacgua

SEQ ID NO: 1263320 - RNA, 19 nt, Artificial Sequence
  Description of Artificial Sequence: Synthetic oligonucleotide
agguacaucucaugagucu

SEQ ID NO: 1263321 - RNA, 19 nt, Artificial Sequence
  Description of Artificial Sequence: Synthetic oligonucleotide
gagauuuaagcacuggcau

SEQ ID NO: 1263322 - RNA, 19 nt, Artificial Sequence
  Description of Artificial Sequence: Synthetic oligonucleotide
agcuaucuauuucugcaga

SEQ ID NO: 1263323 - RNA, 19 nt, Artificial Sequence
  Description of Artificial Sequence: Synthetic oligonucleotide
uccagucucgcuuggggca

SEQ ID NO: 1263324 - RNA, 19 nt, Artificial Sequence
  Description of Artificial Sequence: Synthetic oligonucleotide
ugcaugaauccauguuuug

SEQ ID NO: 1263325 - RNA, 19 nt, Artificial Sequence
  Description of Artificial Sequence: Synthetic oligonucleotide
uaacuggguauuugccucc

SEQ ID NO: 1263326 - RNA, 19 nt, Artificial Sequence
  Description of Artificial Sequence: Synthetic oligonucleotide
acugcucgcucugugugcc

SEQ ID NO: 1263327 - RNA, 19 nt, Artificial Sequence
  Description of Artificial Sequence: Synthetic oligonucleotide
caucucaugagucuucgga

SEQ ID NO: 1263328 - RNA, 19 nt, Artificial Sequence
  Description of Artificial Sequence: Synthetic oligonucleotide
cugggcaaacuuauggauc

SEQ ID NO: 1263329 - RNA, 19 nt, Artificial Sequence
  Description of Artificial Sequence: Synthetic oligonucleotide
cuaucuauuucugcagaac

SEQ ID NO: 1263330 - RNA, 19 nt, Artificial Sequence
  Description of Artificial Sequence: Synthetic oligonucleotide
gaaggugcauagaucuugc

SEQ ID NO: 1263331 - RNA, 19 nt, Artificial Sequence
  Description of Artificial Sequence: Synthetic oligonucleotide
uuuggaucucggcccaaga

SEQ ID NO: 1263332 - RNA, 19 nt, Artificial Sequence
  Description of Artificial Sequence: Synthetic oligonucleotide
uggcucuaauggcaauggg

SEQ ID NO: 1263333 - RNA, 19 nt, Artificial Sequence
  Description of Artificial Sequence: Synthetic oligonucleotide
auuuuagaagcaggaggag

SEQ ID NO: 1263334 - RNA, 19 nt, Artificial Sequence
  Description of Artificial Sequence: Synthetic oligonucleotide
ucuuacugggccagguauc

SEQ ID NO: 1263335 - RNA, 19 nt, Artificial Sequence
  Description of Artificial Sequence: Synthetic oligonucleotide
ugacagguccaaacggaac

SEQ ID NO: 1263336 - RNA, 19 nt, Artificial Sequence
  Description of Artificial Sequence: Synthetic oligonucleotide
uaucacgaagagccaaauc

SEQ ID NO: 1263337 - RNA, 19 nt, Artificial Sequence
  Description of Artificial Sequence: Synthetic oligonucleotide
uagaaucugggagcuaucu

SEQ ID NO: 1263338 - RNA, 19 nt, Artificial Sequence
  Description of Artificial Sequence: Synthetic oligonucleotide
aggcucuugauaucaagaa

SEQ ID NO: 1263339 - RNA, 19 nt, Artificial Sequence
  Description of Artificial Sequence: Synthetic oligonucleotide
gaucacguaccaguauaag

SEQ ID NO: 1263340 - RNA, 19 nt, Artificial Sequence
  Description of Artificial Sequence: Synthetic oligonucleotide
cacugaugccauugggucc

SEQ ID NO: 1263341 - RNA, 19 nt, Artificial Sequence
  Description of Artificial Sequence: Synthetic oligonucleotide
uuuaagcacuggcauccaa

SEQ ID NO: 1263342 - RNA, 19 nt, Artificial Sequence
  Description of Artificial Sequence: Synthetic oligonucleotide
uuggaucucggcccaagau

SEQ ID NO: 1263343 - RNA, 19 nt, Artificial Sequence
  Description of Artificial Sequence: Synthetic oligonucleotide
ugggagcuaucuauuucug

SEQ ID NO: 1263344 - RNA, 19 nt, Artificial Sequence
  Description of Artificial Sequence: Synthetic oligonucleotide
uuaaacaguguggcugucu

SEQ ID NO: 1263345 - RNA, 19 nt, Artificial Sequence
  Description of Artificial Sequence: Synthetic oligonucleotide
auaagcugaucuugacgca

SEQ ID NO: 1263346 - RNA, 19 nt, Artificial Sequence
  Description of Artificial Sequence: Synthetic oligonucleotide
gacagguccaaacggaacu

SEQ ID NO: 1263347 - RNA, 19 nt, Artificial Sequence
  Description of Artificial Sequence: Synthetic oligonucleotide
uucuuacaggcucuugaua

SEQ ID NO: 1263348 - RNA, 19 nt, Artificial Sequence
  Description of Artificial Sequence: Synthetic oligonucleotide
aacaccuuguaagguguca

SEQ ID NO: 1263349 - RNA, 19 nt, Artificial Sequence
  Description of Artificial Sequence: Synthetic oligonucleotide
acgaucacguaccaguaua

SEQ ID NO: 1263350 - RNA, 19 nt, Artificial Sequence
  Description of Artificial Sequence: Synthetic oligonucleotide
gaagguuauccaggugccg

SEQ ID NO: 1263351 - RNA, 19 nt, Artificial Sequence
  Description of Artificial Sequence: Synthetic oligonucleotide
ggcucuugauaucaagaag

SEQ ID NO: 1263352 - RNA, 19 nt, Artificial Sequence
  Description of Artificial Sequence: Synthetic oligonucleotide
guggcucuaauggcaaugg

SEQ ID NO: 1263353 - RNA, 19 nt, Artificial Sequence
  Description of Artificial Sequence: Synthetic oligonucleotide
agaggguugguuagaaucu

SEQ ID NO: 1263354 - RNA, 19 nt, Artificial Sequence
  Description of Artificial Sequence: Synthetic oligonucleotide
cucgcuuggggcauauuuc

SEQ ID NO: 1263355 - RNA, 19 nt, Artificial Sequence
  Description of Artificial Sequence: Synthetic oligonucleotide
agcagggagcgcaugacuc

SEQ ID NO: 1263356 - RNA, 19 nt, Artificial Sequence
  Description of Artificial Sequence: Synthetic oligonucleotide
ucuugcgauuuccacucuc

SEQ ID NO: 1263357 - RNA, 19 nt, Artificial Sequence
  Description of Artificial Sequence: Synthetic oligonucleotide
gacgcaagucgucuccaug

SEQ ID NO: 1263358 - RNA, 19 nt, Artificial Sequence
  Description of Artificial Sequence: Synthetic oligonucleotide
ucugcauguagugcacagc

SEQ ID NO: 1263359 - RNA, 19 nt, Artificial Sequence
  Description of Artificial Sequence: Synthetic oligonucleotide
uugcaucaaccaucaagga

SEQ ID NO: 1263360 - RNA, 19 nt, Artificial Sequence
  Description of Artificial Sequence: Synthetic oligonucleotide
ugcauguagugcacagccu

SEQ ID NO: 1263361 - RNA, 19 nt, Artificial Sequence
  Description of Artificial Sequence: Synthetic oligonucleotide
uuagaaucugggagcuauc

SEQ ID NO: 1263362 - RNA, 19 nt, Artificial Sequence
  Description of Artificial Sequence: Synthetic oligonucleotide
ugguuagaaucugggagcu

SEQ ID NO: 1263363 - RNA, 19 nt, Artificial Sequence
  Description of Artificial Sequence: Synthetic oligonucleotide
guacguaaucacacaguag

SEQ ID NO: 1263364 - RNA, 19 nt, Artificial Sequence
  Description of Artificial Sequence: Synthetic oligonucleotide
uuauccaggugccggucuc

SEQ ID NO: 1263365 - RNA, 19 nt, Artificial Sequence
  Description of Artificial Sequence: Synthetic oligonucleotide
cagccgguccacaaaaguc

SEQ ID NO: 1263366 - RNA, 19 nt, Artificial Sequence
  Description of Artificial Sequence: Synthetic oligonucleotide
uguaacuucuggacaccuu

SEQ ID NO: 1263367 - RNA, 19 nt, Artificial Sequence
  Description of Artificial Sequence: Synthetic oligonucleotide
uggggcauauuuccugaaa

SEQ ID NO: 1263368 - RNA, 19 nt, Artificial Sequence
  Description of Artificial Sequence: Synthetic oligonucleotide
auguuugcaucaaccauca

SEQ ID NO: 1263369 - RNA, 19 nt, Artificial Sequence
  Description of Artificial Sequence: Synthetic oligonucleotide
uaucaagaaggugcauaga

SEQ ID NO: 1263370 - RNA, 19 nt, Artificial Sequence
  Description of Artificial Sequence: Synthetic oligonucleotide
ugacacucagguacaucuc

SEQ ID NO: 1263371 - RNA, 19 nt, Artificial Sequence
  Description of Artificial Sequence: Synthetic oligonucleotide
uucggaacucuugguacug

SEQ ID NO: 1263372 - RNA, 19 nt, Artificial Sequence
  Description of Artificial Sequence: Synthetic oligonucleotide
ucggcccaagauauaucca

SEQ ID NO: 1263373 - RNA, 19 nt, Artificial Sequence
  Description of Artificial Sequence: Synthetic oligonucleotide
cuccucaugacacucaggu

SEQ ID NO: 1263374 - RNA, 19 nt, Artificial Sequence
  Description of Artificial Sequence: Synthetic oligonucleotide
cuggguauuugccuccauc

SEQ ID NO: 1263375 - RNA, 19 nt, Artificial Sequence
  Description of Artificial Sequence: Synthetic oligonucleotide
uucccuccgugucaagaac

SEQ ID NO: 1263376 - RNA, 19 nt, Artificial Sequence
  Description of Artificial Sequence: Synthetic oligonucleotide
cacucucucguuguacugc

SEQ ID NO: 1263377 - RNA, 19 nt, Artificial Sequence
  Description of Artificial Sequence: Synthetic oligonucleotide
ucguuguacugccuucauc

SEQ ID NO: 1263378 - RNA, 19 nt, Artificial Sequence
  Description of Artificial Sequence: Synthetic oligonucleotide
agacaaaacuuugccacaa

SEQ ID NO: 1263379 - RNA, 19 nt, Artificial Sequence
  Description of Artificial Sequence: Synthetic oligonucleotide
aaucuccucaugacacuca

SEQ ID NO: 1263380 - RNA, 19 nt, Artificial Sequence
  Description of Artificial Sequence: Synthetic oligonucleotide
caccuguggcucuaauggc

SEQ ID NO: 1263381 - RNA, 19 nt, Artificial Sequence
  Description of Artificial Sequence: Synthetic oligonucleotide
ugacugacuugucacccuu

SEQ ID NO: 1263382 - RNA, 19 nt, Artificial Sequence
  Description of Artificial Sequence: Synthetic oligonucleotide
ccgagauuuaagcacuggc

SEQ ID NO: 1263383 - RNA, 19 nt, Artificial Sequence
  Description of Artificial Sequence: Synthetic oligonucleotide
aucuugacgcaagucgucu

SEQ ID NO: 1263384 - RNA, 19 nt, Artificial Sequence
  Description of Artificial Sequence: Synthetic oligonucleotide
gguaugauuccucuuauuu

SEQ ID NO: 1263385 - RNA, 19 nt, Artificial Sequence
  Description of Artificial Sequence: Synthetic oligonucleotide
ucuugacgcaagucgucuc

SEQ ID NO: 1263386 - RNA, 19 nt, Artificial Sequence
  Description of Artificial Sequence: Synthetic oligonucleotide
gaggguugguuagaaucug

SEQ ID NO: 1263387 - RNA, 19 nt, Artificial Sequence
  Description of Artificial Sequence: Synthetic oligonucleotide
gacagacuuucugacccug

SEQ ID NO: 1263388 - RNA, 19 nt, Artificial Sequence
  Description of Artificial Sequence: Synthetic oligonucleotide
ugccgagauuuaagcacug

SEQ ID NO: 1263389 - RNA, 19 nt, Artificial Sequence
  Description of Artificial Sequence: Synthetic oligonucleotide
aggguugguuagaaucugg

SEQ ID NO: 1263390 - RNA, 19 nt, Artificial Sequence
  Description of Artificial Sequence: Synthetic oligonucleotide
ugucucugguaugauuccu

SEQ ID NO: 1263391 - RNA, 19 nt, Artificial Sequence
  Description of Artificial Sequence: Synthetic oligonucleotide
cguuguacugccuucauca

SEQ ID NO: 1263392 - RNA, 19 nt, Artificial Sequence
  Description of Artificial Sequence: Synthetic oligonucleotide
gcauguagugcacagccuc

SEQ ID NO: 1263393 - RNA, 19 nt, Artificial Sequence
  Description of Artificial Sequence: Synthetic oligonucleotide
cucaugacacucagguaca

SEQ ID NO: 1263394 - RNA, 19 nt, Artificial Sequence
  Description of Artificial Sequence: Synthetic oligonucleotide
uaacaccuuguaagguguc

SEQ ID NO: 1263395 - RNA, 19 nt, Artificial Sequence
  Description of Artificial Sequence: Synthetic oligonucleotide
cuaauggcaaugggaucag

SEQ ID NO: 1263396 - RNA, 19 nt, Artificial Sequence
  Description of Artificial Sequence: Synthetic oligonucleotide
acccugaaccuugacuguc

SEQ ID NO: 1263397 - RNA, 19 nt, Artificial Sequence
  Description of Artificial Sequence: Synthetic oligonucleotide
ccaagaauguacguaauca

SEQ ID NO: 1263398 - RNA, 19 nt, Artificial Sequence
  Description of Artificial Sequence: Synthetic oligonucleotide
agagccaaauccacuuuca

SEQ ID NO: 1263399 - RNA, 19 nt, Artificial Sequence
  Description of Artificial Sequence: Synthetic oligonucleotide
uucggaucucucugcugug

SEQ ID NO: 1263400 - RNA, 19 nt, Artificial Sequence
  Description of Artificial Sequence: Synthetic oligonucleotide
agaauuugacagacuuucu

SEQ ID NO: 1263401 - RNA, 19 nt, Artificial Sequence
  Description of Artificial Sequence: Synthetic oligonucleotide
gaauugcaugaauccaugu

SEQ ID NO: 1263402 - RNA, 19 nt, Artificial Sequence
  Description of Artificial Sequence: Synthetic oligonucleotide
aaucugggagcuaucuauu

SEQ ID NO: 1263403 - RNA, 19 nt, Artificial Sequence
  Description of Artificial Sequence: Synthetic oligonucleotide
auaccuucgcagguggaga

SEQ ID NO: 1263404 - RNA, 19 nt, Artificial Sequence
  Description of Artificial Sequence: Synthetic oligonucleotide
ggcauaagagcacucuuaa

SEQ ID NO: 1263405 - RNA, 19 nt, Artificial Sequence
  Description of Artificial Sequence: Synthetic oligonucleotide
aucucggcccaagauauau

SEQ ID NO: 1263406 - RNA, 19 nt, Artificial Sequence
  Description of Artificial Sequence: Synthetic oligonucleotide
gguugguuagaaucuggga

SEQ ID NO: 1263407 - RNA, 19 nt, Artificial Sequence
  Description of Artificial Sequence: Synthetic oligonucleotide
gcuuggggcauauuuccug

SEQ ID NO: 1263408 - RNA, 19 nt, Artificial Sequence
  Description of Artificial Sequence: Synthetic oligonucleotide
gaucuugacgcaagucguc

SEQ ID NO: 1263409 - RNA, 19 nt, Artificial Sequence
  Description of Artificial Sequence: Synthetic oligonucleotide
cugggagcuaucuauuucu

SEQ ID NO: 1263410 - RNA, 19 nt, Artificial Sequence
  Description of Artificial Sequence: Synthetic oligonucleotide
gggagcuaucuauuucugc

SEQ ID NO: 1263411 - RNA, 19 nt, Artificial Sequence
  Description of Artificial Sequence: Synthetic oligonucleotide
guaaggugucaauuucaaa

SEQ ID NO: 1263412 - RNA, 19 nt, Artificial Sequence
  Description of Artificial Sequence: Synthetic oligonucleotide
ggcaaacuuauggaucugc

SEQ ID NO: 1263413 - RNA, 19 nt, Artificial Sequence
  Description of Artificial Sequence: Synthetic oligonucleotide
cuucggaucucucugcugu

SEQ ID NO: 1263414 - RNA, 19 nt, Artificial Sequence
  Description of Artificial Sequence: Synthetic oligonucleotide
guauagcacugcuuucgga

SEQ ID NO: 1263415 - RNA, 19 nt, Artificial Sequence
  Description of Artificial Sequence: Synthetic oligonucleotide
ucucggcccaagauauauc

SEQ ID NO: 1263416 - RNA, 19 nt, Artificial Sequence
  Description of Artificial Sequence: Synthetic oligonucleotide
cacguaccaguauaaguaa

SEQ ID NO: 1263417 - RNA, 19 nt, Artificial Sequence
  Description of Artificial Sequence: Synthetic oligonucleotide
cucucguuguacugccuuc

SEQ ID NO: 1263418 - RNA, 19 nt, Artificial Sequence
  Description of Artificial Sequence: Synthetic oligonucleotide
cugguucaagagcaauauc

SEQ ID NO: 1263419 - RNA, 19 nt, Artificial Sequence
  Description of Artificial Sequence: Synthetic oligonucleotide
agcacagcuuuugacguaa

SEQ ID NO: 1263420 - RNA, 19 nt, Artificial Sequence
  Description of Artificial Sequence: Synthetic oligonucleotide
cuuacugggccagguauca

SEQ ID NO: 1263421 - RNA, 19 nt, Artificial Sequence
  Description of Artificial Sequence: Synthetic oligonucleotide
uguccaugagagagaugau

SEQ ID NO: 1263422 - RNA, 19 nt, Artificial Sequence
  Description of Artificial Sequence: Synthetic oligonucleotide
aacuggguauuugccucca

SEQ ID NO: 1263423 - RNA, 19 nt, Artificial Sequence
  Description of Artificial Sequence: Synthetic oligonucleotide
uugacgcaagucgucucca

SEQ ID NO: 1263424 - RNA, 19 nt, Artificial Sequence
  Description of Artificial Sequence: Synthetic oligonucleotide
guauuugccuccaucuucu

SEQ ID NO: 1263425 - RNA, 19 nt, Artificial Sequence
  Description of Artificial Sequence: Synthetic oligonucleotide
ugguaugauuccucuuauu

SEQ ID NO: 1263426 - RNA, 19 nt, Artificial Sequence
  Description of Artificial Sequence: Synthetic oligonucleotide
acaguuuuaucugguucaa

SEQ ID NO: 1263427 - RNA, 19 nt, Artificial Sequence
  Description of Artificial Sequence: Synthetic oligonucleotide
ggcucuaauggcaauggga

SEQ ID NO: 1263428 - RNA, 19 nt, Artificial Sequence
  Description of Artificial Sequence: Synthetic oligonucleotide
ggggcauauuuccugaaaa

SEQ ID NO: 1263429 - RNA, 19 nt, Artificial Sequence
  Description of Artificial Sequence: Synthetic oligonucleotide
guuuuguacugguggcuaa

SEQ ID NO: 1263430 - RNA, 19 nt, Artificial Sequence
  Description of Artificial Sequence: Synthetic oligonucleotide
ucggaacucuugguacugc

SEQ ID NO: 1263431 - RNA, 19 nt, Artificial Sequence
  Description of Artificial Sequence: Synthetic oligonucleotide
agcgcaugacucugacuga

SEQ ID NO: 1263432 - RNA, 19 nt, Artificial Sequence
  Description of Artificial Sequence: Synthetic oligonucleotide
uauccaggugccggucucc

SEQ ID NO: 1263433 - RNA, 19 nt, Artificial Sequence
  Description of Artificial Sequence: Synthetic oligonucleotide
ucuccaguacugggcaaac

SEQ ID NO: 1263434 - RNA, 19 nt, Artificial Sequence
  Description of Artificial Sequence: Synthetic oligonucleotide
uucuugcgauuuccacucu

SEQ ID NO: 1263435 - RNA, 19 nt, Artificial Sequence
  Description of Artificial Sequence: Synthetic oligonucleotide
cuugcgauuuccacucucu

SEQ ID NO: 1263436 - RNA, 19 nt, Artificial Sequence
  Description of Artificial Sequence: Synthetic oligonucleotide
caucaaccaucaaggagaa

SEQ ID NO: 1263437 - RNA, 19 nt, Artificial Sequence
  Description of Artificial Sequence: Synthetic oligonucleotide
cgagauuuaagcacuggca

SEQ ID NO: 1263438 - RNA, 19 nt, Artificial Sequence
  Description of Artificial Sequence: Synthetic oligonucleotide
gucuccaagcaaugcuuga

SEQ ID NO: 1263439 - RNA, 19 nt, Artificial Sequence
  Description of Artificial Sequence: Synthetic oligonucleotide
ugauaucaagaaggugcau

SEQ ID NO: 1263440 - RNA, 19 nt, Artificial Sequence
  Description of Artificial Sequence: Synthetic oligonucleotide
ugccacccauuccuucuac

SEQ ID NO: 1263441 - RNA, 19 nt, Artificial Sequence
  Description of Artificial Sequence: Synthetic oligonucleotide
uuggggcauauuuccugaa

SEQ ID NO: 1263442 - RNA, 19 nt, Artificial Sequence
  Description of Artificial Sequence: Synthetic oligonucleotide
caaacggaacuuguccuga

SEQ ID NO: 1263443 - RNA, 19 nt, Artificial Sequence
  Description of Artificial Sequence: Synthetic oligonucleotide
cucgcucugugugccaccc

SEQ ID NO: 1263444 - RNA, 19 nt, Artificial Sequence
  Description of Artificial Sequence: Synthetic oligonucleotide
cuucccuccgugucaagaa

SEQ ID NO: 1263445 - RNA, 19 nt, Artificial Sequence
  Description of Artificial Sequence: Synthetic oligonucleotide
guucuuacaggcucuugau

SEQ ID NO: 1263446 - RNA, 19 nt, Artificial Sequence
  Description of Artificial Sequence: Synthetic oligonucleotide
agguccaaacggaacuugu

SEQ ID NO: 1263447 - RNA, 19 nt, Artificial Sequence
  Description of Artificial Sequence: Synthetic oligonucleotide
cucuuagauuuuccccauc

SEQ ID NO: 1263448 - RNA, 19 nt, Artificial Sequence
  Description of Artificial Sequence: Synthetic oligonucleotide
aggcauaagagcacucuua

SEQ ID NO: 1263449 - RNA, 19 nt, Artificial Sequence
  Description of Artificial Sequence: Synthetic oligonucleotide
ugaccucggcacugaugcc

SEQ ID NO: 1263450 - RNA, 19 nt, Artificial Sequence
  Description of Artificial Sequence: Synthetic oligonucleotide
gcuaucuauuucugcagaa

SEQ ID NO: 1263451 - RNA, 19 nt, Artificial Sequence
  Description of Artificial Sequence: Synthetic oligonucleotide
gucacccuuaagcaaggcu

SEQ ID NO: 1263452 - RNA, 19 nt, Artificial Sequence
  Description of Artificial Sequence: Synthetic oligonucleotide
aucaaccaucaaggagaac

SEQ ID NO: 1263453 - RNA, 19 nt, Artificial Sequence
  Description of Artificial Sequence: Synthetic oligonucleotide
uguuugcaucaaccaucaa

SEQ ID NO: 1263454 - RNA, 19 nt, Artificial Sequence
  Description of Artificial Sequence: Synthetic oligonucleotide
gguccacaaaagucugcug

SEQ ID NO: 1263455 - RNA, 19 nt, Artificial Sequence
  Description of Artificial Sequence: Synthetic oligonucleotide
ccaguguugaguucuuaca

SEQ ID NO: 1263456 - RNA, 19 nt, Artificial Sequence
  Description of Artificial Sequence: Synthetic oligonucleotide
ggcuguauagcacugcuuu

SEQ ID NO: 1263457 - RNA, 19 nt, Artificial Sequence
  Description of Artificial Sequence: Synthetic oligonucleotide
ugacgcaagucgucuccau

SEQ ID NO: 1263458 - RNA, 19 nt, Artificial Sequence
  Description of Artificial Sequence: Synthetic oligonucleotide
aacuuguccugaaccuuuu

SEQ ID NO: 1263459 - RNA, 19 nt, Artificial Sequence
  Description of Artificial Sequence: Synthetic oligonucleotide
cuugaagccucucauucuu

SEQ ID NO: 1263460 - RNA, 19 nt, Artificial Sequence
  Description of Artificial Sequence: Synthetic oligonucleotide
cuucuuugccgagauuuaa

SEQ ID NO: 1263461 - RNA, 19 nt, Artificial Sequence
  Description of Artificial Sequence: Synthetic oligonucleotide
uccccaucugaaacuucuu

SEQ ID NO: 1263462 - RNA, 19 nt, Artificial Sequence
  Description of Artificial Sequence: Synthetic oligonucleotide
cuuaaacaguguggcuguc

SEQ ID NO: 1263463 - RNA, 19 nt, Artificial Sequence
  Description of Artificial Sequence: Synthetic oligonucleotide
gaauaccuucgcaggugga

SEQ ID NO: 1263464 - RNA, 19 nt, Artificial Sequence
  Description of Artificial Sequence: Synthetic oligonucleotide
guuauccaggugccggucu

SEQ ID NO: 1263465 - RNA, 19 nt, Artificial Sequence
  Description of Artificial Sequence: Synthetic oligonucleotide
cucucgucaaucagacucu

SEQ ID NO: 1263466 - RNA, 19 nt, Artificial Sequence
  Description of Artificial Sequence: Synthetic oligonucleotide
acagacuuucugacccuga

SEQ ID NO: 1263467 - RNA, 19 nt, Artificial Sequence
  Description of Artificial Sequence: Synthetic oligonucleotide
cccugaaccuugacugucc

SEQ ID NO: 1263468 - RNA, 19 nt, Artificial Sequence
  Description of Artificial Sequence: Synthetic oligonucleotide
cugugccgccagcagggag

SEQ ID NO: 1263469 - RNA, 19 nt, Artificial Sequence
  Description of Artificial Sequence: Synthetic oligonucleotide
cagguaucacgaagagcca

SEQ ID NO: 1263470 - RNA, 19 nt, Artificial Sequence
  Description of Artificial Sequence: Synthetic oligonucleotide
cagggagcgcaugacucug

SEQ ID NO: 1263471 - RNA, 19 nt, Artificial Sequence
  Description of Artificial Sequence: Synthetic oligonucleotide
ccuucgcagguggagaaag

SEQ ID NO: 1263472 - RNA, 19 nt, Artificial Sequence
  Description of Artificial Sequence: Synthetic oligonucleotide
uuuucaccuguggcucuaa

SEQ ID NO: 1263473 - RNA, 19 nt, Artificial Sequence
  Description of Artificial Sequence: Synthetic oligonucleotide
gccgagauuuaagcacugg

SEQ ID NO: 1263474 - RNA, 19 nt, Artificial Sequence
  Description of Artificial Sequence: Synthetic oligonucleotide
gcccaagauauauccaaaa

SEQ ID NO: 1263475 - RNA, 19 nt, Artificial Sequence
  Description of Artificial Sequence: Synthetic oligonucleotide
gaagaggguugguuagaau

SEQ ID NO: 1263476 - RNA, 19 nt, Artificial Sequence
  Description of Artificial Sequence: Synthetic oligonucleotide
auuuucaccuguggcucua

SEQ ID NO: 1263477 - RNA, 19 nt, Artificial Sequence
  Description of Artificial Sequence: Synthetic oligonucleotide
ccaggugccggucuccaac

SEQ ID NO: 1263478 - RNA, 19 nt, Artificial Sequence
  Description of Artificial Sequence: Synthetic oligonucleotide
gacccugaaccuugacugu

SEQ ID NO: 1263479 - RNA, 19 nt, Artificial Sequence
  Description of Artificial Sequence: Synthetic oligonucleotide
ggaagaguuugccuguuuu

SEQ ID NO: 1263480 - RNA, 19 nt, Artificial Sequence
  Description of Artificial Sequence: Synthetic oligonucleotide
gguccaaacggaacuuguc

SEQ ID NO: 1263481 - RNA, 19 nt, Artificial Sequence
  Description of Artificial Sequence: Synthetic oligonucleotide
cuuggcugaaucuccucau

SEQ ID NO: 1263482 - RNA, 19 nt, Artificial Sequence
  Description of Artificial Sequence: Synthetic oligonucleotide
cugacuggaugaauugcau

SEQ ID NO: 1263483 - RNA, 19 nt, Artificial Sequence
  Description of Artificial Sequence: Synthetic oligonucleotide
cuccacgaucacguaccag

SEQ ID NO: 1263484 - RNA, 19 nt, Artificial Sequence
  Description of Artificial Sequence: Synthetic oligonucleotide
ccggucuccaacuccaaga

SEQ ID NO: 1263485 - RNA, 19 nt, Artificial Sequence
  Description of Artificial Sequence: Synthetic oligonucleotide
acuggguauuugccuccau

SEQ ID NO: 1263486 - RNA, 19 nt, Artificial Sequence
  Description of Artificial Sequence: Synthetic oligonucleotide
gccagguaucacgaagagc

SEQ ID NO: 1263487 - RNA, 19 nt, Artificial Sequence
  Description of Artificial Sequence: Synthetic oligonucleotide
gcauaagagcacucuuaaa

SEQ ID NO: 1263488 - RNA, 19 nt, Artificial Sequence
  Description of Artificial Sequence: Synthetic oligonucleotide
ucgcucugugugccaccca

SEQ ID NO: 1263489 - RNA, 19 nt, Artificial Sequence
  Description of Artificial Sequence: Synthetic oligonucleotide
gucuucggaucucucugcu

SEQ ID NO: 1263490 - RNA, 19 nt, Artificial Sequence
  Description of Artificial Sequence: Synthetic oligonucleotide
cguaaucacacaguagcca

SEQ ID NO: 1263491 - RNA, 19 nt, Artificial Sequence
  Description of Artificial Sequence: Synthetic oligonucleotide
ccugaucuucacacuccac

SEQ ID NO: 1263492 - RNA, 19 nt, Artificial Sequence
  Description of Artificial Sequence: Synthetic oligonucleotide
gggccagguaucacgaaga

SEQ ID NO: 1263493 - RNA, 19 nt, Artificial Sequence
  Description of Artificial Sequence: Synthetic oligonucleotide
cugguaugauuccucuuau

SEQ ID NO: 1263494 - RNA, 19 nt, Artificial Sequence
  Description of Artificial Sequence: Synthetic oligonucleotide
cacagcuuuugacguaagu

SEQ ID NO: 1263495 - RNA, 19 nt, Artificial Sequence
  Description of Artificial Sequence: Synthetic oligonucleotide
ggcuuuggaucucggccca

SEQ ID NO: 1263496 - RNA, 19 nt, Artificial Sequence
  Description of Artificial Sequence: Synthetic oligonucleotide
cuuucugacccugaaccuu

SEQ ID NO: 1263497 - RNA, 19 nt, Artificial Sequence
  Description of Artificial Sequence: Synthetic oligonucleotide
caacuccaagaauguacgu

SEQ ID NO: 1263498 - RNA, 19 nt, Artificial Sequence
  Description of Artificial Sequence: Synthetic oligonucleotide
ccgguccacaaaagucugc

SEQ ID NO: 1263499 - RNA, 19 nt, Artificial Sequence
  Description of Artificial Sequence: Synthetic oligonucleotide
gacugacuugucacccuua

SEQ ID NO: 1263500 - RNA, 19 nt, Artificial Sequence
  Description of Artificial Sequence: Synthetic oligonucleotide
guaucacgaagagccaaau

SEQ ID NO: 1263501 - RNA, 19 nt, Artificial Sequence
  Description of Artificial Sequence: Synthetic oligonucleotide
gccgguccacaaaagucug

SEQ ID NO: 1263502 - RNA, 19 nt, Artificial Sequence
  Description of Artificial Sequence: Synthetic oligonucleotide
ccuuguaaggugucaauuu

SEQ ID NO: 1263503 - RNA, 19 nt, Artificial Sequence
  Description of Artificial Sequence: Synthetic oligonucleotide
ccagcacagcuuuugacgu

SEQ ID NO: 1263504 - RNA, 19 nt, Artificial Sequence
  Description of Artificial Sequence: Synthetic oligonucleotide
ggaucucucugcugugugu

SEQ ID NO: 1263505 - RNA, 19 nt, Artificial Sequence
  Description of Artificial Sequence: Synthetic oligonucleotide
cugacaucuuuagcauaaa

SEQ ID NO: 1263506 - RNA, 19 nt, Artificial Sequence
  Description of Artificial Sequence: Synthetic oligonucleotide
cccaagauauauccaaaau

SEQ ID NO: 1263507 - RNA, 19 nt, Artificial Sequence
  Description of Artificial Sequence: Synthetic oligonucleotide
caggcauaagagcacucuu

SEQ ID NO: 1263508 - RNA, 19 nt, Artificial Sequence
  Description of Artificial Sequence: Synthetic oligonucleotide
accuucgcagguggagaaa

SEQ ID NO: 1263509 - RNA, 19 nt, Artificial Sequence
  Description of Artificial Sequence: Synthetic oligonucleotide
agucucgcuuggggcauau

SEQ ID NO: 1263510 - RNA, 19 nt, Artificial Sequence
  Description of Artificial Sequence: Synthetic oligonucleotide
cagcacagcuuuugacgua

SEQ ID NO: 1263511 - RNA, 19 nt, Artificial Sequence
  Description of Artificial Sequence: Synthetic oligonucleotide
gggcaaacuuauggaucug

SEQ ID NO: 1263512 - RNA, 19 nt, Artificial Sequence
  Description of Artificial Sequence: Synthetic oligonucleotide
cacacuccacgaucacgua

SEQ ID NO: 1263513 - RNA, 19 nt, Artificial Sequence
  Description of Artificial Sequence: Synthetic oligonucleotide
gaucucggcccaagauaua

SEQ ID NO: 1263514 - RNA, 19 nt, Artificial Sequence
  Description of Artificial Sequence: Synthetic oligonucleotide
ggcuaacaccuuguaaggu

SEQ ID NO: 1263515 - RNA, 19 nt, Artificial Sequence
  Description of Artificial Sequence: Synthetic oligonucleotide
cacgaucacguaccaguau

SEQ ID NO: 1263516 - RNA, 19 nt, Artificial Sequence
  Description of Artificial Sequence: Synthetic oligonucleotide
cggcccaagauauauccaa

SEQ ID NO: 1263517 - RNA, 19 nt, Artificial Sequence
  Description of Artificial Sequence: Synthetic oligonucleotide
gcagggagcgcaugacucu

SEQ ID NO: 1263518 - RNA, 19 nt, Artificial Sequence
  Description of Artificial Sequence: Synthetic oligonucleotide
gcucuuagauuuuccccau

SEQ ID NO: 1263519 - RNA, 19 nt, Artificial Sequence
  Description of Artificial Sequence: Synthetic oligonucleotide
cguaaguguccaugaccuc

SEQ ID NO: 1263520 - RNA, 19 nt, Artificial Sequence
  Description of Artificial Sequence: Synthetic oligonucleotide
gagcaauaucuggaauguu

SEQ ID NO: 1263521 - RNA, 19 nt, Artificial Sequence
  Description of Artificial Sequence: Synthetic oligonucleotide
cgaucacguaccaguauaa

SEQ ID NO: 1263522 - RNA, 19 nt, Artificial Sequence
  Description of Artificial Sequence: Synthetic oligonucleotide
gcaaugggaucagcuccac

SEQ ID NO: 1263523 - RNA, 19 nt, Artificial Sequence
  Description of Artificial Sequence: Synthetic oligonucleotide
ggguauuugccuccaucuu

SEQ ID NO: 1263524 - RNA, 19 nt, Artificial Sequence
  Description of Artificial Sequence: Synthetic oligonucleotide
gcacagcuuuugacguaag

SEQ ID NO: 1263525 - RNA, 19 nt, Artificial Sequence
  Description of Artificial Sequence: Synthetic oligonucleotide
cucguuguacugccuucau

SEQ ID NO: 1263526 - RNA, 19 nt, Artificial Sequence
  Description of Artificial Sequence: Synthetic oligonucleotide
ccacgaucacguaccagua

SEQ ID NO: 1263527 - RNA, 19 nt, Artificial Sequence
  Description of Artificial Sequence: Synthetic oligonucleotide
ggagcgcaugacucugacu

SEQ ID NO: 1263528 - RNA, 19 nt, Artificial Sequence
  Description of Artificial Sequence: Synthetic oligonucleotide
cagguggagaaaggcugua

SEQ ID NO: 1263529 - RNA, 19 nt, Artificial Sequence
  Description of Artificial Sequence: Synthetic oligonucleotide
cugcucgcucugugugcca

SEQ ID NO: 1263530 - RNA, 19 nt, Artificial Sequence
  Description of Artificial Sequence: Synthetic oligonucleotide
ccuccgugucaagaacuuc

SEQ ID NO: 1263531 - RNA, 19 nt, Artificial Sequence
  Description of Artificial Sequence: Synthetic oligonucleotide
cugaaccuugacuguccuu

SEQ ID NO: 1263532 - RNA, 19 nt, Artificial Sequence
  Description of Artificial Sequence: Synthetic oligonucleotide
gguuagaaucugggagcua

SEQ ID NO: 1263533 - RNA, 19 nt, Artificial Sequence
  Description of Artificial Sequence: Synthetic oligonucleotide
gcaagucgucuccaugcuu

SEQ ID NO: 1263534 - RNA, 19 nt, Artificial Sequence
  Description of Artificial Sequence: Synthetic oligonucleotide
ccugaaccuugacuguccu

SEQ ID NO: 1263535 - RNA, 19 nt, Artificial Sequence
  Description of Artificial Sequence: Synthetic oligonucleotide
cgucaaucagacucugcau

SEQ ID NO: 1263536 - RNA, 19 nt, Artificial Sequence
  Description of Artificial Sequence: Synthetic oligonucleotide
cccuccgugucaagaacuu

SEQ ID NO: 1263537 - RNA, 19 nt, Artificial Sequence
  Description of Artificial Sequence: Synthetic oligonucleotide
cagucucgcuuggggcaua

SEQ ID NO: 1263538 - RNA, 19 nt, Artificial Sequence
  Description of Artificial Sequence: Synthetic oligonucleotide
gucucgcuuggggcauauu

SEQ ID NO: 1263539 - RNA, 19 nt, Artificial Sequence
  Description of Artificial Sequence: Synthetic oligonucleotide
ccaugaccucggcacugau

SEQ ID NO: 1263540 - RNA, 19 nt, Artificial Sequence
  Description of Artificial Sequence: Synthetic oligonucleotide
ccucggcacugaugccauu

SEQ ID NO: 1263541 - RNA, 19 nt, Artificial Sequence
  Description of Artificial Sequence: Synthetic oligonucleotide
uauaggaucgaacauaucc

SEQ ID NO: 1263542 - RNA, 19 nt, Artificial Sequence
  Description of Artificial Sequence: Synthetic oligonucleotide
aaugacuuaaguaggaggc

SEQ ID NO: 1263543 - RNA, 19 nt, Artificial Sequence
  Description of Artificial Sequence: Synthetic oligonucleotide
gauuagaauaaucacuagg

SEQ ID NO: 1263544 - RNA, 19 nt, Artificial Sequence
  Description of Artificial Sequence: Synthetic oligonucleotide
auaucagugauauugcuuc

SEQ ID NO: 1263545 - RNA, 19 nt, Artificial Sequence
  Description of Artificial Sequence: Synthetic oligonucleotide
uuugcauuacuuugaaugg

SEQ ID NO: 1263546 - RNA, 19 nt, Artificial Sequence
  Description of Artificial Sequence: Synthetic oligonucleotide
uuagagaugaggaacugag

SEQ ID NO: 1263547 - RNA, 19 nt, Artificial Sequence
  Description of Artificial Sequence: Synthetic oligonucleotide
uuuuaacucgcucacaucu

SEQ ID NO: 1263548 - RNA, 19 nt, Artificial Sequence
  Description of Artificial Sequence: Synthetic oligonucleotide
gauagugcugcuuucacag

SEQ ID NO: 1263549 - RNA, 19 nt, Artificial Sequence
  Description of Artificial Sequence: Synthetic oligonucleotide
aaauagucucccaauaugg

SEQ ID NO: 1263550 - RNA, 19 nt, Artificial Sequence
  Description of Artificial Sequence: Synthetic oligonucleotide
uacgaugacaucuuuagug

SEQ ID NO: 1263551 - RNA, 19 nt, Artificial Sequence
  Description of Artificial Sequence: Synthetic oligonucleotide
ucagucauggguaaauucc

SEQ ID NO: 1263552 - RNA, 19 nt, Artificial Sequence
  Description of Artificial Sequence: Synthetic oligonucleotide
uacaggauucauuauagcc

SEQ ID NO: 1263553 - RNA, 19 nt, Artificial Sequence
  Description of Artificial Sequence: Synthetic oligonucleotide
gaaugacuuaaguaggagg

SEQ ID NO: 1263554 - RNA, 19 nt, Artificial Sequence
  Description of Artificial Sequence: Synthetic oligonucleotide
aaggcaaggagucugagau

SEQ ID NO: 1263555 - RNA, 19 nt, Artificial Sequence
  Description of Artificial Sequence: Synthetic oligonucleotide
uuaaguaggaggccugacg

SEQ ID NO: 1263556 - RNA, 19 nt, Artificial Sequence
  Description of Artificial Sequence: Synthetic oligonucleotide
ugucccagcaauaucagug

SEQ ID NO: 1263557 - RNA, 19 nt, Artificial Sequence
  Description of Artificial Sequence: Synthetic oligonucleotide
uuuauggagauuagaauaa

SEQ ID NO: 1263558 - RNA, 19 nt, Artificial Sequence
  Description of Artificial Sequence: Synthetic oligonucleotide
ugauauugcuuccacaagu

SEQ ID NO: 1263559 - RNA, 19 nt, Artificial Sequence
  Description of Artificial Sequence: Synthetic oligonucleotide
aauagucucccaauauggc

SEQ ID NO: 1263560 - RNA, 19 nt, Artificial Sequence
  Description of Artificial Sequence: Synthetic oligonucleotide
auuagaauaaucacuagga

SEQ ID NO: 1263561 - RNA, 19 nt, Artificial Sequence
  Description of Artificial Sequence: Synthetic oligonucleotide
aaagggauuuaaaacgggg

SEQ ID NO: 1263562 - RNA, 19 nt, Artificial Sequence
  Description of Artificial Sequence: Synthetic oligonucleotide
ugagcagccaucuauguac

SEQ ID NO: 1263563 - RNA, 19 nt, Artificial Sequence
  Description of Artificial Sequence: Synthetic oligonucleotide
auguacggacuccugaugc

SEQ ID NO: 1263564 - RNA, 19 nt, Artificial Sequence
  Description of Artificial Sequence: Synthetic oligonucleotide
aacugugucuauaggaucg

SEQ ID NO: 1263565 - RNA, 19 nt, Artificial Sequence
  Description of Artificial Sequence: Synthetic oligonucleotide
uuagaauaaucacuaggac

SEQ ID NO: 1263566 - RNA, 19 nt, Artificial Sequence
  Description of Artificial Sequence: Synthetic oligonucleotide
uaaagggauuuaaaacggg

SEQ ID NO: 1263567 - RNA, 19 nt, Artificial Sequence
  Description of Artificial Sequence: Synthetic oligonucleotide
cuuuggaagauccaaguug

SEQ ID NO: 1263568 - RNA, 19 nt, Artificial Sequence
  Description of Artificial Sequence: Synthetic oligonucleotide
uuuaaaacggggauccuuc

SEQ ID NO: 1263569 - RNA, 19 nt, Artificial Sequence
  Description of Artificial Sequence: Synthetic oligonucleotide
aguugaucgauagaccacc

SEQ ID NO: 1263570 - RNA, 19 nt, Artificial Sequence
  Description of Artificial Sequence: Synthetic oligonucleotide
ucugcaagaggugacaugc

SEQ ID NO: 1263571 - RNA, 19 nt, Artificial Sequence
  Description of Artificial Sequence: Synthetic oligonucleotide
aaaacggggauccuuccug

SEQ ID NO: 1263572 - RNA, 19 nt, Artificial Sequence
  Description of Artificial Sequence: Synthetic oligonucleotide
caaguguuuguuuauggag

SEQ ID NO: 1263573 - RNA, 19 nt, Artificial Sequence
  Description of Artificial Sequence: Synthetic oligonucleotide
aacuuuggaagauccaagu

SEQ ID NO: 1263574 - RNA, 19 nt, Artificial Sequence
  Description of Artificial Sequence: Synthetic oligonucleotide
agugauauugcuuccacaa

SEQ ID NO: 1263575 - RNA, 19 nt, Artificial Sequence
  Description of Artificial Sequence: Synthetic oligonucleotide
uuucuaauuggugagcagc

SEQ ID NO: 1263576 - RNA, 19 nt, Artificial Sequence
  Description of Artificial Sequence: Synthetic oligonucleotide
aagcucuaaaggcugcuuc

SEQ ID NO: 1263577 - RNA, 19 nt, Artificial Sequence
  Description of Artificial Sequence: Synthetic oligonucleotide
ugaagcuucaggagaauga

SEQ ID NO: 1263578 - RNA, 19 nt, Artificial Sequence
  Description of Artificial Sequence: Synthetic oligonucleotide
guuauacucucccaaacug

SEQ ID NO: 1263579 - RNA, 19 nt, Artificial Sequence
  Description of Artificial Sequence: Synthetic oligonucleotide
ugaucgauagaccaccuaa

SEQ ID NO: 1263580 - RNA, 19 nt, Artificial Sequence
  Description of Artificial Sequence: Synthetic oligonucleotide
uagugcugcuuucacaggg

SEQ ID NO: 1263581 - RNA, 19 nt, Artificial Sequence
  Description of Artificial Sequence: Synthetic oligonucleotide
ucagcucuaaaauagucuc

SEQ ID NO: 1263582 - RNA, 19 nt, Artificial Sequence
  Description of Artificial Sequence: Synthetic oligonucleotide
aggaagcaaacuuuggaag

SEQ ID NO: 1263583 - RNA, 19 nt, Artificial Sequence
  Description of Artificial Sequence: Synthetic oligonucleotide
uugaagugcaauuggugag

SEQ ID NO: 1263584 - RNA, 19 nt, Artificial Sequence
  Description of Artificial Sequence: Synthetic oligonucleotide
ucuauaggaucgaacauau

SEQ ID NO: 1263585 - RNA, 19 nt, Artificial Sequence
  Description of Artificial Sequence: Synthetic oligonucleotide
guuuauggagauuagaaua

SEQ ID NO: 1263586 - RNA, 19 nt, Artificial Sequence
  Description of Artificial Sequence: Synthetic oligonucleotide
uucuaauuggugagcagcc

SEQ ID NO: 1263587 - RNA, 19 nt, Artificial Sequence
  Description of Artificial Sequence: Synthetic oligonucleotide
ugagaaaguggguaaagaa

SEQ ID NO: 1263588 - RNA, 19 nt, Artificial Sequence
  Description of Artificial Sequence: Synthetic oligonucleotide
ucaacugugucuauaggau

SEQ ID NO: 1263589 - RNA, 19 nt, Artificial Sequence
  Description of Artificial Sequence: Synthetic oligonucleotide
ucacuguugcuauuaaggc

SEQ ID NO: 1263590 - RNA, 19 nt, Artificial Sequence
  Description of Artificial Sequence: Synthetic oligonucleotide
uuaacucgcucacaucucc

SEQ ID NO: 1263591 - RNA, 19 nt, Artificial Sequence
  Description of Artificial Sequence: Synthetic oligonucleotide
agccaguugaucgauagac

SEQ ID NO: 1263592 - RNA, 19 nt, Artificial Sequence
  Description of Artificial Sequence: Synthetic oligonucleotide
ugcauuuuaacucgcucac

SEQ ID NO: 1263593 - RNA, 19 nt, Artificial Sequence
  Description of Artificial Sequence: Synthetic oligonucleotide
uccaaguugagccggcucc

SEQ ID NO: 1263594 - RNA, 19 nt, Artificial Sequence
  Description of Artificial Sequence: Synthetic oligonucleotide
accaccuaaauuucccugg

SEQ ID NO: 1263595 - RNA, 19 nt, Artificial Sequence
  Description of Artificial Sequence: Synthetic oligonucleotide
uggggcuagaagaaaacug

SEQ ID NO: 1263596 - RNA, 19 nt, Artificial Sequence
  Description of Artificial Sequence: Synthetic oligonucleotide
cuuggauuggugauuccgg

SEQ ID NO: 1263597 - RNA, 19 nt, Artificial Sequence
  Description of Artificial Sequence: Synthetic oligonucleotide
aucgaacauauccacagug

SEQ ID NO: 1263598 - RNA, 19 nt, Artificial Sequence
  Description of Artificial Sequence: Synthetic oligonucleotide
uaugagaguuuucaauacu

SEQ ID NO: 1263599 - RNA, 19 nt, Artificial Sequence
  Description of Artificial Sequence: Synthetic oligonucleotide
uguuuauggagauuagaau

SEQ ID NO: 1263600 - RNA, 19 nt, Artificial Sequence
  Description of Artificial Sequence: Synthetic oligonucleotide
gguacgaugacaucuuuag

SEQ ID NO: 1263601 - RNA, 19 nt, Artificial Sequence
  Description of Artificial Sequence: Synthetic oligonucleotide
uuauacucucccaaacugu

SEQ ID NO: 1263602 - RNA, 19 nt, Artificial Sequence
  Description of Artificial Sequence: Synthetic oligonucleotide
cuauuaaggcacuggcugg

SEQ ID NO: 1263603 - RNA, 19 nt, Artificial Sequence
  Description of Artificial Sequence: Synthetic oligonucleotide
uagaccaccuaaauuuccc

SEQ ID NO: 1263604 - RNA, 19 nt, Artificial Sequence
  Description of Artificial Sequence: Synthetic oligonucleotide
cuuugaauggggcuagaag

SEQ ID NO: 1263605 - RNA, 19 nt, Artificial Sequence
  Description of Artificial Sequence: Synthetic oligonucleotide
aaacggggauccuuccugg

SEQ ID NO: 1263606 - RNA, 19 nt, Artificial Sequence
  Description of Artificial Sequence: Synthetic oligonucleotide
acauaugagaguuuucaau

SEQ ID NO: 1263607 - RNA, 19 nt, Artificial Sequence
  Description of Artificial Sequence: Synthetic oligonucleotide
aguuuccgguguuauuugc

SEQ ID NO: 1263608 - RNA, 19 nt, Artificial Sequence
  Description of Artificial Sequence: Synthetic oligonucleotide
uguucgagaaugacuuaag

SEQ ID NO: 1263609 - RNA, 19 nt, Artificial Sequence
  Description of Artificial Sequence: Synthetic oligonucleotide
gugucuauaggaucgaaca

SEQ ID NO: 1263610 - RNA, 19 nt, Artificial Sequence
  Description of Artificial Sequence: Synthetic oligonucleotide
gaugaaucuccucuggguc

SEQ ID NO: 1263611 - RNA, 19 nt, Artificial Sequence
  Description of Artificial Sequence: Synthetic oligonucleotide
auuauagccaguugaucga

SEQ ID NO: 1263612 - RNA, 19 nt, Artificial Sequence
  Description of Artificial Sequence: Synthetic oligonucleotide
gcuauuaaggcacuggcug

SEQ ID NO: 1263613 - RNA, 19 nt, Artificial Sequence
  Description of Artificial Sequence: Synthetic oligonucleotide
accuaaauuucccuggagu

SEQ ID NO: 1263614 - RNA, 19 nt, Artificial Sequence
  Description of Artificial Sequence: Synthetic oligonucleotide
cuugaagugcaauugguga

SEQ ID NO: 1263615 - RNA, 19 nt, Artificial Sequence
  Description of Artificial Sequence: Synthetic oligonucleotide
gcuagaagaaaacuguccc

SEQ ID NO: 1263616 - RNA, 19 nt, Artificial Sequence
  Description of Artificial Sequence: Synthetic oligonucleotide
ucaauacugaaggcaaucc

SEQ ID NO: 1263617 - RNA, 19 nt, Artificial Sequence
  Description of Artificial Sequence: Synthetic oligonucleotide
gucucaaggggugaaaggg

SEQ ID NO: 1263618 - RNA, 19 nt, Artificial Sequence
  Description of Artificial Sequence: Synthetic oligonucleotide
ggaucgaacauauccacag

SEQ ID NO: 1263619 - RNA, 19 nt, Artificial Sequence
  Description of Artificial Sequence: Synthetic oligonucleotide
ugugucuauaggaucgaac

SEQ ID NO: 1263620 - RNA, 19 nt, Artificial Sequence
  Description of Artificial Sequence: Synthetic oligonucleotide
ucgaacauauccacagugu

SEQ ID NO: 1263621 - RNA, 19 nt, Artificial Sequence
  Description of Artificial Sequence: Synthetic oligonucleotide
gagauuagaauaaucacua

SEQ ID NO: 1263622 - RNA, 19 nt, Artificial Sequence
  Description of Artificial Sequence: Synthetic oligonucleotide
uaguuauacucucccaaac

SEQ ID NO: 1263623 - RNA, 19 nt, Artificial Sequence
  Description of Artificial Sequence: Synthetic oligonucleotide
cauaugaagcuucaggaga

SEQ ID NO: 1263624 - RNA, 19 nt, Artificial Sequence
  Description of Artificial Sequence: Synthetic oligonucleotide
gacgaugaaucuccucugg

SEQ ID NO: 1263625 - RNA, 19 nt, Artificial Sequence
  Description of Artificial Sequence: Synthetic oligonucleotide
guugcuauuaaggcacugg

SEQ ID NO: 1263626 - RNA, 19 nt, Artificial Sequence
  Description of Artificial Sequence: Synthetic oligonucleotide
acgaugacaucuuuaguga

SEQ ID NO: 1263627 - RNA, 19 nt, Artificial Sequence
  Description of Artificial Sequence: Synthetic oligonucleotide
agaaaguggguaaagaaau

SEQ ID NO: 1263628 - RNA, 19 nt, Artificial Sequence
  Description of Artificial Sequence: Synthetic oligonucleotide
uacucggaggacuuccagg

SEQ ID NO: 1263629 - RNA, 19 nt, Artificial Sequence
  Description of Artificial Sequence: Synthetic oligonucleotide
agucucaaggggugaaagg

SEQ ID NO: 1263630 - RNA, 19 nt, Artificial Sequence
  Description of Artificial Sequence: Synthetic oligonucleotide
guggguaaagaaauagcgg

SEQ ID NO: 1263631 - RNA, 19 nt, Artificial Sequence
  Description of Artificial Sequence: Synthetic oligonucleotide
uguuccauaugaagcuuca

SEQ ID NO: 1263632 - RNA, 19 nt, Artificial Sequence
  Description of Artificial Sequence: Synthetic oligonucleotide
cauaugagaguuuucaaua

SEQ ID NO: 1263633 - RNA, 19 nt, Artificial Sequence
  Description of Artificial Sequence: Synthetic oligonucleotide
uuggugagcagccaucuau

SEQ ID NO: 1263634 - RNA, 19 nt, Artificial Sequence
  Description of Artificial Sequence: Synthetic oligonucleotide
uauuugcauuuuaacucgc

SEQ ID NO: 1263635 - RNA, 19 nt, Artificial Sequence
  Description of Artificial Sequence: Synthetic oligonucleotide
gggaugaagcucuaaaggc

SEQ ID NO: 1263636 - RNA, 19 nt, Artificial Sequence
  Description of Artificial Sequence: Synthetic oligonucleotide
uauguacggacuccugaug

SEQ ID NO: 1263637 - RNA, 19 nt, Artificial Sequence
  Description of Artificial Sequence: Synthetic oligonucleotide
auagaccaccuaaauuucc

SEQ ID NO: 1263638 - RNA, 19 nt, Artificial Sequence
  Description of Artificial Sequence: Synthetic oligonucleotide
ucuaaaggcugcuuccccu

SEQ ID NO: 1263639 - RNA, 19 nt, Artificial Sequence
  Description of Artificial Sequence: Synthetic oligonucleotide
aagggauuuaaaacgggga

SEQ ID NO: 1263640 - RNA, 19 nt, Artificial Sequence
  Description of Artificial Sequence: Synthetic oligonucleotide
agcggucaaggccuggggc

SEQ ID NO: 1263641 - RNA, 19 nt, Artificial Sequence
  Description of Artificial Sequence: Synthetic oligonucleotide
acgaugaaucuccucuggg

SEQ ID NO: 1263642 - RNA, 19 nt, Artificial Sequence
  Description of Artificial Sequence: Synthetic oligonucleotide
uuucccuggaguugguagc

SEQ ID NO: 1263643 - RNA, 19 nt, Artificial Sequence
  Description of Artificial Sequence: Synthetic oligonucleotide
agaggguacgaugacaucu

SEQ ID NO: 1263644 - RNA, 19 nt, Artificial Sequence
  Description of Artificial Sequence: Synthetic oligonucleotide
cagucauggguaaauuccc

SEQ ID NO: 1263645 - RNA, 19 nt, Artificial Sequence
  Description of Artificial Sequence: Synthetic oligonucleotide
caaggggugaaagggaucc

SEQ ID NO: 1263646 - RNA, 19 nt, Artificial Sequence
  Description of Artificial Sequence: Synthetic oligonucleotide
auuacuuugaauggggcua

SEQ ID NO: 1263647 - RNA, 19 nt, Artificial Sequence
  Description of Artificial Sequence: Synthetic oligonucleotide
cuaaauuucccuggaguug

SEQ ID NO: 1263648 - RNA, 19 nt, Artificial Sequence
  Description of Artificial Sequence: Synthetic oligonucleotide
uggguaaauucccauuauc

SEQ ID NO: 1263649 - RNA, 19 nt, Artificial Sequence
  Description of Artificial Sequence: Synthetic oligonucleotide
ugucuauaggaucgaacau

SEQ ID NO: 1263650 - RNA, 19 nt, Artificial Sequence
  Description of Artificial Sequence: Synthetic oligonucleotide
aagaaauagcgggugggcu

SEQ ID NO: 1263651 - RNA, 19 nt, Artificial Sequence
  Description of Artificial Sequence: Synthetic oligonucleotide
gguaaauucccauuaucca

SEQ ID NO: 1263652 - RNA, 19 nt, Artificial Sequence
  Description of Artificial Sequence: Synthetic oligonucleotide
ucggaggacuuccaggaga

SEQ ID NO: 1263653 - RNA, 19 nt, Artificial Sequence
  Description of Artificial Sequence: Synthetic oligonucleotide
agacgucacuuccagccac

SEQ ID NO: 1263654 - RNA, 19 nt, Artificial Sequence
  Description of Artificial Sequence: Synthetic oligonucleotide
acuaaagacucgccacauc

SEQ ID NO: 1263655 - RNA, 19 nt, Artificial Sequence
  Description of Artificial Sequence: Synthetic oligonucleotide
gaaauagcgggugggcuag

SEQ ID NO: 1263656 - RNA, 19 nt, Artificial Sequence
  Description of Artificial Sequence: Synthetic oligonucleotide
ucgauagaccaccuaaauu

SEQ ID NO: 1263657 - RNA, 19 nt, Artificial Sequence
  Description of Artificial Sequence: Synthetic oligonucleotide
ugacuuaaguaggaggccu

SEQ ID NO: 1263658 - RNA, 19 nt, Artificial Sequence
  Description of Artificial Sequence: Synthetic oligonucleotide
uuuaacucgcucacaucuc

SEQ ID NO: 1263659 - RNA, 19 nt, Artificial Sequence
  Description of Artificial Sequence: Synthetic oligonucleotide
auaggaucgaacauaucca

SEQ ID NO: 1263660 - RNA, 19 nt, Artificial Sequence
  Description of Artificial Sequence: Synthetic oligonucleotide
ucguccgccgccaggaaag

SEQ ID NO: 1263661 - RNA, 19 nt, Artificial Sequence
  Description of Artificial Sequence: Synthetic oligonucleotide
uuacuuugaauggggcuag

SEQ ID NO: 1263662 - RNA, 19 nt, Artificial Sequence
  Description of Artificial Sequence: Synthetic oligonucleotide
uaaaacggggauccuuccu

SEQ ID NO: 1263663 - RNA, 19 nt, Artificial Sequence
  Description of Artificial Sequence: Synthetic oligonucleotide
guagcuuucugucccagca

SEQ ID NO: 1263664 - RNA, 19 nt, Artificial Sequence
  Description of Artificial Sequence: Synthetic oligonucleotide
uagucucccaauauggcuu

SEQ ID NO: 1263665 - RNA, 19 nt, Artificial Sequence
  Description of Artificial Sequence: Synthetic oligonucleotide
uccgccgccaggaaagcag

SEQ ID NO: 1263666 - RNA, 19 nt, Artificial Sequence
  Description of Artificial Sequence: Synthetic oligonucleotide
gagaaaguggguaaagaaa

SEQ ID NO: 1263667 - RNA, 19 nt, Artificial Sequence
  Description of Artificial Sequence: Synthetic oligonucleotide
cuuuguggauuuaaagaca

SEQ ID NO: 1263668 - RNA, 19 nt, Artificial Sequence
  Description of Artificial Sequence: Synthetic oligonucleotide
ugaagugcaauuggugaga

SEQ ID NO: 1263669 - RNA, 19 nt, Artificial Sequence
  Description of Artificial Sequence: Synthetic oligonucleotide
aguuucuaauuggugagca

SEQ ID NO: 1263670 - RNA, 19 nt, Artificial Sequence
  Description of Artificial Sequence: Synthetic oligonucleotide
cauucaguucccagguggc

SEQ ID NO: 1263671 - RNA, 19 nt, Artificial Sequence
  Description of Artificial Sequence: Synthetic oligonucleotide
uggugagcagccaucuaug

SEQ ID NO: 1263672 - RNA, 19 nt, Artificial Sequence
  Description of Artificial Sequence: Synthetic oligonucleotide
uaauuggugagcagccauc

SEQ ID NO: 1263673 - RNA, 19 nt, Artificial Sequence
  Description of Artificial Sequence: Synthetic oligonucleotide
aggagauugguccguggag

SEQ ID NO: 1263674 - RNA, 19 nt, Artificial Sequence
  Description of Artificial Sequence: Synthetic oligonucleotide
gaccaccuaaauuucccug

SEQ ID NO: 1263675 - RNA, 19 nt, Artificial Sequence
  Description of Artificial Sequence: Synthetic oligonucleotide
uaucagugauauugcuucc

SEQ ID NO: 1263676 - RNA, 19 nt, Artificial Sequence
  Description of Artificial Sequence: Synthetic oligonucleotide
ggcaaguguuuguuuaugg

SEQ ID NO: 1263677 - RNA, 19 nt, Artificial Sequence
  Description of Artificial Sequence: Synthetic oligonucleotide
aaguugagccggcucccuc

SEQ ID NO: 1263678 - RNA, 19 nt, Artificial Sequence
  Description of Artificial Sequence: Synthetic oligonucleotide
caagucugcguguuauagc

SEQ ID NO: 1263679 - RNA, 19 nt, Artificial Sequence
  Description of Artificial Sequence: Synthetic oligonucleotide
agcgucuuccaacagcacu

SEQ ID NO: 1263680 - RNA, 19 nt, Artificial Sequence
  Description of Artificial Sequence: Synthetic oligonucleotide
uuucacagggcagaauacu

SEQ ID NO: 1263681 - RNA, 19 nt, Artificial Sequence
  Description of Artificial Sequence: Synthetic oligonucleotide
aacucgcucacaucuccca

SEQ ID NO: 1263682 - RNA, 19 nt, Artificial Sequence
  Description of Artificial Sequence: Synthetic oligonucleotide
agugacaacuaaagacucg

SEQ ID NO: 1263683 - RNA, 19 nt, Artificial Sequence
  Description of Artificial Sequence: Synthetic oligonucleotide
uuggugagaaaguggguaa

SEQ ID NO: 1263684 - RNA, 19 nt, Artificial Sequence
  Description of Artificial Sequence: Synthetic oligonucleotide
ugacgaugaaucuccucug

SEQ ID NO: 1263685 - RNA, 19 nt, Artificial Sequence
  Description of Artificial Sequence: Synthetic oligonucleotide
gugauauugcuuccacaag

SEQ ID NO: 1263686 - RNA, 19 nt, Artificial Sequence
  Description of Artificial Sequence: Synthetic oligonucleotide
uccucuguucugagagugg

SEQ ID NO: 1263687 - RNA, 19 nt, Artificial Sequence
  Description of Artificial Sequence: Synthetic oligonucleotide
gaacauauccacaguguca

SEQ ID NO: 1263688 - RNA, 19 nt, Artificial Sequence
  Description of Artificial Sequence: Synthetic oligonucleotide
uucaguucccagguggccc

SEQ ID NO: 1263689 - RNA, 19 nt, Artificial Sequence
  Description of Artificial Sequence: Synthetic oligonucleotide
agucucccaauauggcuuc

SEQ ID NO: 1263690 - RNA, 19 nt, Artificial Sequence
  Description of Artificial Sequence: Synthetic oligonucleotide
aucuguucgagaaugacuu

SEQ ID NO: 1263691 - RNA, 19 nt, Artificial Sequence
  Description of Artificial Sequence: Synthetic oligonucleotide
agucugacaagcagcauug

SEQ ID NO: 1263692 - RNA, 19 nt, Artificial Sequence
  Description of Artificial Sequence: Synthetic oligonucleotide
aucgauagaccaccuaaau

SEQ ID NO: 1263693 - RNA, 19 nt, Artificial Sequence
  Description of Artificial Sequence: Synthetic oligonucleotide
uuggauuggugauuccggu

SEQ ID NO: 1263694 - RNA, 19 nt, Artificial Sequence
  Description of Artificial Sequence: Synthetic oligonucleotide
agggauccgcaucagugag

SEQ ID NO: 1263695 - RNA, 19 nt, Artificial Sequence
  Description of Artificial Sequence: Synthetic oligonucleotide
auagugcugcuuucacagg

SEQ ID NO: 1263696 - RNA, 19 nt, Artificial Sequence
  Description of Artificial Sequence: Synthetic oligonucleotide
gguaaagaaauagcgggug

SEQ ID NO: 1263697 - RNA, 19 nt, Artificial Sequence
  Description of Artificial Sequence: Synthetic oligonucleotide
agaaauagcgggugggcua

SEQ ID NO: 1263698 - RNA, 19 nt, Artificial Sequence
  Description of Artificial Sequence: Synthetic oligonucleotide
gauagaccaccuaaauuuc

SEQ ID NO: 1263699 - RNA, 19 nt, Artificial Sequence
  Description of Artificial Sequence: Synthetic oligonucleotide
uacucucccaaacuguauu

SEQ ID NO: 1263700 - RNA, 19 nt, Artificial Sequence
  Description of Artificial Sequence: Synthetic oligonucleotide
cacuagcucuuucucagag

SEQ ID NO: 1263701 - RNA, 19 nt, Artificial Sequence
  Description of Artificial Sequence: Synthetic oligonucleotide
acaugcacauaugagaguu

SEQ ID NO: 1263702 - RNA, 19 nt, Artificial Sequence
  Description of Artificial Sequence: Synthetic oligonucleotide
cuuucagcgucuuccaaca

SEQ ID NO: 1263703 - RNA, 19 nt, Artificial Sequence
  Description of Artificial Sequence: Synthetic oligonucleotide
cagcucuaaaauagucucc

SEQ ID NO: 1263704 - RNA, 19 nt, Artificial Sequence
  Description of Artificial Sequence: Synthetic oligonucleotide
uggauagugcugcuuucac

SEQ ID NO: 1263705 - RNA, 19 nt, Artificial Sequence
  Description of Artificial Sequence: Synthetic oligonucleotide
acuaggacuuuuaaaggga

SEQ ID NO: 1263706 - RNA, 19 nt, Artificial Sequence
  Description of Artificial Sequence: Synthetic oligonucleotide
aaggacuggcaaguguuug

SEQ ID NO: 1263707 - RNA, 19 nt, Artificial Sequence
  Description of Artificial Sequence: Synthetic oligonucleotide
uaacucgcucacaucuccc

SEQ ID NO: 1263708 - RNA, 19 nt, Artificial Sequence
  Description of Artificial Sequence: Synthetic oligonucleotide
uuugugugacagacauggc

SEQ ID NO: 1263709 - RNA, 19 nt, Artificial Sequence
  Description of Artificial Sequence: Synthetic oligonucleotide
ggcaaggagucugagaugc

SEQ ID NO: 1263710 - RNA, 19 nt, Artificial Sequence
  Description of Artificial Sequence: Synthetic oligonucleotide
uuuccgguguuauuugcau

SEQ ID NO: 1263711 - RNA, 19 nt, Artificial Sequence
  Description of Artificial Sequence: Synthetic oligonucleotide
uguuauagccacuguccau

SEQ ID NO: 1263712 - RNA, 19 nt, Artificial Sequence
  Description of Artificial Sequence: Synthetic oligonucleotide
uuauccaagugcucucauc

SEQ ID NO: 1263713 - RNA, 19 nt, Artificial Sequence
  Description of Artificial Sequence: Synthetic oligonucleotide
uccuacuugaagugcaauu

SEQ ID NO: 1263714 - RNA, 19 nt, Artificial Sequence
  Description of Artificial Sequence: Synthetic oligonucleotide
gagucucaaggggugaaag

SEQ ID NO: 1263715 - RNA, 19 nt, Artificial Sequence
  Description of Artificial Sequence: Synthetic oligonucleotide
gaguuuccgguguuauuug

SEQ ID NO: 1263716 - RNA, 19 nt, Artificial Sequence
  Description of Artificial Sequence: Synthetic oligonucleotide
cagugacaacuaaagacuc

SEQ ID NO: 1263717 - RNA, 19 nt, Artificial Sequence
  Description of Artificial Sequence: Synthetic oligonucleotide
cccacugacaaaaucaguc

SEQ ID NO: 1263718 - RNA, 19 nt, Artificial Sequence
  Description of Artificial Sequence: Synthetic oligonucleotide
cagccaucuauguacggac

SEQ ID NO: 1263719 - RNA, 19 nt, Artificial Sequence
  Description of Artificial Sequence: Synthetic oligonucleotide
uacggacuccugaugcuug

SEQ ID NO: 1263720 - RNA, 19 nt, Artificial Sequence
  Description of Artificial Sequence: Synthetic oligonucleotide
auccaaguugagccggcuc

SEQ ID NO: 1263721 - RNA, 19 nt, Artificial Sequence
  Description of Artificial Sequence: Synthetic oligonucleotide
ggaagcaaacuuuggaaga

SEQ ID NO: 1263722 - RNA, 19 nt, Artificial Sequence
  Description of Artificial Sequence: Synthetic oligonucleotide
aacuaaagacucgccacau

SEQ ID NO: 1263723 - RNA, 19 nt, Artificial Sequence
  Description of Artificial Sequence: Synthetic oligonucleotide
ucauggguaaauucccauu

SEQ ID NO: 1263724 - RNA, 19 nt, Artificial Sequence
  Description of Artificial Sequence: Synthetic oligonucleotide
gcaauuggugagaaagugg

SEQ ID NO: 1263725 - RNA, 19 nt, Artificial Sequence
  Description of Artificial Sequence: Synthetic oligonucleotide
ucuaauuggugagcagcca

SEQ ID NO: 1263726 - RNA, 19 nt, Artificial Sequence
  Description of Artificial Sequence: Synthetic oligonucleotide
augaagcucuaaaggcugc

SEQ ID NO: 1263727 - RNA, 19 nt, Artificial Sequence
  Description of Artificial Sequence: Synthetic oligonucleotide
ugacuuugugugacagaca

SEQ ID NO: 1263728 - RNA, 19 nt, Artificial Sequence
  Description of Artificial Sequence: Synthetic oligonucleotide
caguugaucgauagaccac

SEQ ID NO: 1263729 - RNA, 19 nt, Artificial Sequence
  Description of Artificial Sequence: Synthetic oligonucleotide
cucccauucacauccaaaa

SEQ ID NO: 1263730 - RNA, 19 nt, Artificial Sequence
  Description of Artificial Sequence: Synthetic oligonucleotide
cuaguuauacucucccaaa

SEQ ID NO: 1263731 - RNA, 19 nt, Artificial Sequence
  Description of Artificial Sequence: Synthetic oligonucleotide
caagugcucucaucaacug

SEQ ID NO: 1263732 - RNA, 19 nt, Artificial Sequence
  Description of Artificial Sequence: Synthetic oligonucleotide
uaaaggcugcuuccccuca

SEQ ID NO: 1263733 - RNA, 19 nt, Artificial Sequence
  Description of Artificial Sequence: Synthetic oligonucleotide
auuuaaaacggggauccuu

SEQ ID NO: 1263734 - RNA, 19 nt, Artificial Sequence
  Description of Artificial Sequence: Synthetic oligonucleotide
uuucagcgucuuccaacag

SEQ ID NO: 1263735 - RNA, 19 nt, Artificial Sequence
  Description of Artificial Sequence: Synthetic oligonucleotide
uagcgggugggcuaguuau

SEQ ID NO: 1263736 - RNA, 19 nt, Artificial Sequence
  Description of Artificial Sequence: Synthetic oligonucleotide
agaccaccuaaauuucccu

SEQ ID NO: 1263737 - RNA, 19 nt, Artificial Sequence
  Description of Artificial Sequence: Synthetic oligonucleotide
guuuguuuauggagauuag

SEQ ID NO: 1263738 - RNA, 19 nt, Artificial Sequence
  Description of Artificial Sequence: Synthetic oligonucleotide
aguugagccggcucccucu

SEQ ID NO: 1263739 - RNA, 19 nt, Artificial Sequence
  Description of Artificial Sequence: Synthetic oligonucleotide
auaugaagcuucaggagaa

SEQ ID NO: 1263740 - RNA, 19 nt, Artificial Sequence
  Description of Artificial Sequence: Synthetic oligonucleotide
guguuauagccacugucca

SEQ ID NO: 1263741 - RNA, 19 nt, Artificial Sequence
  Description of Artificial Sequence: Synthetic oligonucleotide
aauuggugagaaagugggu

SEQ ID NO: 1263742 - RNA, 19 nt, Artificial Sequence
  Description of Artificial Sequence: Synthetic oligonucleotide
uuauggagauuagaauaau

SEQ ID NO: 1263743 - RNA, 19 nt, Artificial Sequence
  Description of Artificial Sequence: Synthetic oligonucleotide
ugcacauaugagaguuuuc

SEQ ID NO: 1263744 - RNA, 19 nt, Artificial Sequence
  Description of Artificial Sequence: Synthetic oligonucleotide
gcuuggauuggugauuccg

SEQ ID NO: 1263745 - RNA, 19 nt, Artificial Sequence
  Description of Artificial Sequence: Synthetic oligonucleotide
ucacguccgggcgagcgcg

SEQ ID NO: 1263746 - RNA, 19 nt, Artificial Sequence
  Description of Artificial Sequence: Synthetic oligonucleotide
ucccaauauggcuuccaaa

SEQ ID NO: 1263747 - RNA, 19 nt, Artificial Sequence
  Description of Artificial Sequence: Synthetic oligonucleotide
ugagccggcucccucucca

SEQ ID NO: 1263748 - RNA, 19 nt, Artificial Sequence
  Description of Artificial Sequence: Synthetic oligonucleotide
ugucccucaagagauucuc

SEQ ID NO: 1263749 - RNA, 19 nt, Artificial Sequence
  Description of Artificial Sequence: Synthetic oligonucleotide
ggcuagaagaaaacugucc

SEQ ID NO: 1263750 - RNA, 19 nt, Artificial Sequence
  Description of Artificial Sequence: Synthetic oligonucleotide
caacuaaagacucgccaca

SEQ ID NO: 1263751 - RNA, 19 nt, Artificial Sequence
  Description of Artificial Sequence: Synthetic oligonucleotide
gaauggggcuagaagaaaa

SEQ ID NO: 1263752 - RNA, 19 nt, Artificial Sequence
  Description of Artificial Sequence: Synthetic oligonucleotide
ucccacugacaaaaucagu

SEQ ID NO: 1263753 - RNA, 19 nt, Artificial Sequence
  Description of Artificial Sequence: Synthetic oligonucleotide
acggggauccuuccuggag

SEQ ID NO: 1263754 - RNA, 19 nt, Artificial Sequence
  Description of Artificial Sequence: Synthetic oligonucleotide
ggagauuagaauaaucacu

SEQ ID NO: 1263755 - RNA, 19 nt, Artificial Sequence
  Description of Artificial Sequence: Synthetic oligonucleotide
cagggagaggguacgauga

SEQ ID NO: 1263756 - RNA, 19 nt, Artificial Sequence
  Description of Artificial Sequence: Synthetic oligonucleotide
aagacucgccacaucuuca

SEQ ID NO: 1263757 - RNA, 19 nt, Artificial Sequence
  Description of Artificial Sequence: Synthetic oligonucleotide
uucuucacguccgggcgag

SEQ ID NO: 1263758 - RNA, 19 nt, Artificial Sequence
  Description of Artificial Sequence: Synthetic oligonucleotide
gcuaguuauacucucccaa

SEQ ID NO: 1263759 - RNA, 19 nt, Artificial Sequence
  Description of Artificial Sequence: Synthetic oligonucleotide
uaggacuuuuaaagggauu

SEQ ID NO: 1263760 - RNA, 19 nt, Artificial Sequence
  Description of Artificial Sequence: Synthetic oligonucleotide
uucacguccgggcgagcgc

SEQ ID NO: 1263761 - RNA, 19 nt, Artificial Sequence
  Description of Artificial Sequence: Synthetic oligonucleotide
cuucacguccgggcgagcg

SEQ ID NO: 1263762 - RNA, 19 nt, Artificial Sequence
  Description of Artificial Sequence: Synthetic oligonucleotide
cacuacucggaggacuucc

SEQ ID NO: 1263763 - RNA, 19 nt, Artificial Sequence
  Description of Artificial Sequence: Synthetic oligonucleotide
agaccaguuucuaauuggu

SEQ ID NO: 1263764 - RNA, 19 nt, Artificial Sequence
  Description of Artificial Sequence: Synthetic oligonucleotide
ugaauggggcuagaagaaa

SEQ ID NO: 1263765 - RNA, 19 nt, Artificial Sequence
  Description of Artificial Sequence: Synthetic oligonucleotide
uuauagccaguugaucgau

SEQ ID NO: 1263766 - RNA, 19 nt, Artificial Sequence
  Description of Artificial Sequence: Synthetic oligonucleotide
uugaucgauagaccaccua

SEQ ID NO: 1263767 - RNA, 19 nt, Artificial Sequence
  Description of Artificial Sequence: Synthetic oligonucleotide
gguccguggagucaucagc

SEQ ID NO: 1263768 - RNA, 19 nt, Artificial Sequence
  Description of Artificial Sequence: Synthetic oligonucleotide
gcacauaugagaguuuuca

SEQ ID NO: 1263769 - RNA, 19 nt, Artificial Sequence
  Description of Artificial Sequence: Synthetic oligonucleotide
gucuauaggaucgaacaua

SEQ ID NO: 1263770 - RNA, 19 nt, Artificial Sequence
  Description of Artificial Sequence: Synthetic oligonucleotide
uauagccaguugaucgaua

SEQ ID NO: 1263771 - RNA, 19 nt, Artificial Sequence
  Description of Artificial Sequence: Synthetic oligonucleotide
gagcggucaaggccugggg

SEQ ID NO: 1263772 - RNA, 19 nt, Artificial Sequence
  Description of Artificial Sequence: Synthetic oligonucleotide
ggugaaagggauccgcauc

SEQ ID NO: 1263773 - RNA, 19 nt, Artificial Sequence
  Description of Artificial Sequence: Synthetic oligonucleotide
ggagaaugaaauguaaacu

SEQ ID NO: 1263774 - RNA, 19 nt, Artificial Sequence
  Description of Artificial Sequence: Synthetic oligonucleotide
gagcgcgcaggcucguccg

SEQ ID NO: 1263775 - RNA, 19 nt, Artificial Sequence
  Description of Artificial Sequence: Synthetic oligonucleotide
aacggggauccuuccugga

SEQ ID NO: 1263776 - RNA, 19 nt, Artificial Sequence
  Description of Artificial Sequence: Synthetic oligonucleotide
ccacaucuuuaucuguucg

SEQ ID NO: 1263777 - RNA, 19 nt, Artificial Sequence
  Description of Artificial Sequence: Synthetic oligonucleotide
cauuacuuugaauggggcu

SEQ ID NO: 1263778 - RNA, 19 nt, Artificial Sequence
  Description of Artificial Sequence: Synthetic oligonucleotide
caccuaaauuucccuggag

SEQ ID NO: 1263779 - RNA, 19 nt, Artificial Sequence
  Description of Artificial Sequence: Synthetic oligonucleotide
gauuggugauuccgguaga

SEQ ID NO: 1263780 - RNA, 19 nt, Artificial Sequence
  Description of Artificial Sequence: Synthetic oligonucleotide
auggggcuagaagaaaacu

SEQ ID NO: 1263781 - RNA, 19 nt, Artificial Sequence
  Description of Artificial Sequence: Synthetic oligonucleotide
gaucgauagaccaccuaaa

SEQ ID NO: 1263782 - RNA, 19 nt, Artificial Sequence
  Description of Artificial Sequence: Synthetic oligonucleotide
ccaguugaucgauagacca

SEQ ID NO: 1263783 - RNA, 19 nt, Artificial Sequence
  Description of Artificial Sequence: Synthetic oligonucleotide
cuacucggaggacuuccag

SEQ ID NO: 1263784 - RNA, 19 nt, Artificial Sequence
  Description of Artificial Sequence: Synthetic oligonucleotide
gauccuuccuggaguuucc

SEQ ID NO: 1263785 - RNA, 19 nt, Artificial Sequence
  Description of Artificial Sequence: Synthetic oligonucleotide
acuuaaguaggaggccuga

SEQ ID NO: 1263786 - RNA, 19 nt, Artificial Sequence
  Description of Artificial Sequence: Synthetic oligonucleotide
aagugcaauuggugagaaa

SEQ ID NO: 1263787 - RNA, 19 nt, Artificial Sequence
  Description of Artificial Sequence: Synthetic oligonucleotide
accauucaguucccaggug

SEQ ID NO: 1263788 - RNA, 19 nt, Artificial Sequence
  Description of Artificial Sequence: Synthetic oligonucleotide
augcacauaugagaguuuu

SEQ ID NO: 1263789 - RNA, 19 nt, Artificial Sequence
  Description of Artificial Sequence: Synthetic oligonucleotide
cacauaugagaguuuucaa

SEQ ID NO: 1263790 - RNA, 19 nt, Artificial Sequence
  Description of Artificial Sequence: Synthetic oligonucleotide
ucccauagcccaggaagca

SEQ ID NO: 1263791 - RNA, 19 nt, Artificial Sequence
  Description of Artificial Sequence: Synthetic oligonucleotide
aggagaccaguuucuaauu

SEQ ID NO: 1263792 - RNA, 19 nt, Artificial Sequence
  Description of Artificial Sequence: Synthetic oligonucleotide
cagcauugcauuucucaga

SEQ ID NO: 1263793 - RNA, 19 nt, Artificial Sequence
  Description of Artificial Sequence: Synthetic oligonucleotide
aggaaagcaggggugucca

SEQ ID NO: 1263794 - RNA, 19 nt, Artificial Sequence
  Description of Artificial Sequence: Synthetic oligonucleotide
gaaaguggguaaagaaaua

SEQ ID NO: 1263795 - RNA, 19 nt, Artificial Sequence
  Description of Artificial Sequence: Synthetic oligonucleotide
cacuagacugacuuugugu

SEQ ID NO: 1263796 - RNA, 19 nt, Artificial Sequence
  Description of Artificial Sequence: Synthetic oligonucleotide
accuugagucucaaggggu

SEQ ID NO: 1263797 - RNA, 19 nt, Artificial Sequence
  Description of Artificial Sequence: Synthetic oligonucleotide
uucccagguggcccucucc

SEQ ID NO: 1263798 - RNA, 19 nt, Artificial Sequence
  Description of Artificial Sequence: Synthetic oligonucleotide
ucuguucgagaaugacuua

SEQ ID NO: 1263799 - RNA, 19 nt, Artificial Sequence
  Description of Artificial Sequence: Synthetic oligonucleotide
cuauaggaucgaacauauc

SEQ ID NO: 1263800 - RNA, 19 nt, Artificial Sequence
  Description of Artificial Sequence: Synthetic oligonucleotide
aggcaaggagucugagaug

SEQ ID NO: 1263801 - RNA, 19 nt, Artificial Sequence
  Description of Artificial Sequence: Synthetic oligonucleotide
guucgagaaugacuuaagu

SEQ ID NO: 1263802 - RNA, 19 nt, Artificial Sequence
  Description of Artificial Sequence: Synthetic oligonucleotide
agucauggguaaauuccca

SEQ ID NO: 1263803 - RNA, 19 nt, Artificial Sequence
  Description of Artificial Sequence: Synthetic oligonucleotide
cuuucugcaagaggugaca

SEQ ID NO: 1263804 - RNA, 19 nt, Artificial Sequence
  Description of Artificial Sequence: Synthetic oligonucleotide
guagcuuuguggauuuaaa

SEQ ID NO: 1263805 - RNA, 19 nt, Artificial Sequence
  Description of Artificial Sequence: Synthetic oligonucleotide
guuuccgguguuauuugca

SEQ ID NO: 1263806 - RNA, 19 nt, Artificial Sequence
  Description of Artificial Sequence: Synthetic oligonucleotide
ggccugacgaugaaucucc

SEQ ID NO: 1263807 - RNA, 19 nt, Artificial Sequence
  Description of Artificial Sequence: Synthetic oligonucleotide
uccgcggagcggucaaggc

SEQ ID NO: 1263808 - RNA, 19 nt, Artificial Sequence
  Description of Artificial Sequence: Synthetic oligonucleotide
cuccugaugcuuggauugg

SEQ ID NO: 1263809 - RNA, 19 nt, Artificial Sequence
  Description of Artificial Sequence: Synthetic oligonucleotide
gaagugcaauuggugagaa

SEQ ID NO: 1263810 - RNA, 19 nt, Artificial Sequence
  Description of Artificial Sequence: Synthetic oligonucleotide
uauccacgggcuccuuuau

SEQ ID NO: 1263811 - RNA, 19 nt, Artificial Sequence
  Description of Artificial Sequence: Synthetic oligonucleotide
aggaucgaacauauccaca

SEQ ID NO: 1263812 - RNA, 19 nt, Artificial Sequence
  Description of Artificial Sequence: Synthetic oligonucleotide
caggagauugguccgugga

SEQ ID NO: 1263813 - RNA, 19 nt, Artificial Sequence
  Description of Artificial Sequence: Synthetic oligonucleotide
gaucgaacauauccacagu

SEQ ID NO: 1263814 - RNA, 19 nt, Artificial Sequence
  Description of Artificial Sequence: Synthetic oligonucleotide
ggauagugcugcuuucaca

SEQ ID NO: 1263815 - RNA, 19 nt, Artificial Sequence
  Description of Artificial Sequence: Synthetic oligonucleotide
cuguucgagaaugacuuaa

SEQ ID NO: 1263816 - RNA, 19 nt, Artificial Sequence
  Description of Artificial Sequence: Synthetic oligonucleotide
uccacaagucugcguguua

SEQ ID NO: 1263817 - RNA, 19 nt, Artificial Sequence
  Description of Artificial Sequence: Synthetic oligonucleotide
gguagaacuuguuccauau

SEQ ID NO: 1263818 - RNA, 19 nt, Artificial Sequence
  Description of Artificial Sequence: Synthetic oligonucleotide
gagaggguacgaugacauc

SEQ ID NO: 1263819 - RNA, 19 nt, Artificial Sequence
  Description of Artificial Sequence: Synthetic oligonucleotide
uuccgguguuauuugcauu

SEQ ID NO: 1263820 - RNA, 19 nt, Artificial Sequence
  Description of Artificial Sequence: Synthetic oligonucleotide
gacaugcacauaugagagu

SEQ ID NO: 1263821 - RNA, 19 nt, Artificial Sequence
  Description of Artificial Sequence: Synthetic oligonucleotide
caugcucaguccagggaga

SEQ ID NO: 1263822 - RNA, 19 nt, Artificial Sequence
  Description of Artificial Sequence: Synthetic oligonucleotide
gcauuacuuugaauggggc

SEQ ID NO: 1263823 - RNA, 19 nt, Artificial Sequence
  Description of Artificial Sequence: Synthetic oligonucleotide
guaggaggccugacgauga

SEQ ID NO: 1263824 - RNA, 19 nt, Artificial Sequence
  Description of Artificial Sequence: Synthetic oligonucleotide
acucgcucacaucucccau

SEQ ID NO: 1263825 - RNA, 19 nt, Artificial Sequence
  Description of Artificial Sequence: Synthetic oligonucleotide
agauugguccguggaguca

SEQ ID NO: 1263826 - RNA, 19 nt, Artificial Sequence
  Description of Artificial Sequence: Synthetic oligonucleotide
ccuugagucucaaggggug

SEQ ID NO: 1263827 - RNA, 19 nt, Artificial Sequence
  Description of Artificial Sequence: Synthetic oligonucleotide
gcggucaaggccuggggcc

SEQ ID NO: 1263828 - RNA, 19 nt, Artificial Sequence
  Description of Artificial Sequence: Synthetic oligonucleotide
uccugaugcuuggauuggu

SEQ ID NO: 1263829 - RNA, 19 nt, Artificial Sequence
  Description of Artificial Sequence: Synthetic oligonucleotide
auagcgggugggcuaguua

SEQ ID NO: 1263830 - RNA, 19 nt, Artificial Sequence
  Description of Artificial Sequence: Synthetic oligonucleotide
cuaauuggugagcagccau

SEQ ID NO: 1263831 - RNA, 19 nt, Artificial Sequence
  Description of Artificial Sequence: Synthetic oligonucleotide
cgaacauauccacaguguc

SEQ ID NO: 1263832 - RNA, 19 nt, Artificial Sequence
  Description of Artificial Sequence: Synthetic oligonucleotide
aauagcgggugggcuaguu

SEQ ID NO: 1263833 - RNA, 19 nt, Artificial Sequence
  Description of Artificial Sequence: Synthetic oligonucleotide
uggaguuuccgguguuauu

SEQ ID NO: 1263834 - RNA, 19 nt, Artificial Sequence
  Description of Artificial Sequence: Synthetic oligonucleotide
cuauguacggacuccugau

SEQ ID NO: 1263835 - RNA, 19 nt, Artificial Sequence
  Description of Artificial Sequence: Synthetic oligonucleotide
ggauccgcaucagugagga

SEQ ID NO: 1263836 - RNA, 19 nt, Artificial Sequence
  Description of Artificial Sequence: Synthetic oligonucleotide
cuaggacuuuuaaagggau

SEQ ID NO: 1263837 - RNA, 19 nt, Artificial Sequence
  Description of Artificial Sequence: Synthetic oligonucleotide
aucuauguacggacuccug

SEQ ID NO: 1263838 - RNA, 19 nt, Artificial Sequence
  Description of Artificial Sequence: Synthetic oligonucleotide
cgauagaccaccuaaauuu

SEQ ID NO: 1263839 - RNA, 19 nt, Artificial Sequence
  Description of Artificial Sequence: Synthetic oligonucleotide
gcugcuuucacagggcaga

SEQ ID NO: 1263840 - RNA, 19 nt, Artificial Sequence
  Description of Artificial Sequence: Synthetic oligonucleotide
gucccucaagagauucucc

SEQ ID NO: 1263841 - RNA, 19 nt, Artificial Sequence
  Description of Artificial Sequence: Synthetic oligonucleotide
gccaucuauguacggacuc

SEQ ID NO: 1263842 - RNA, 19 nt, Artificial Sequence
  Description of Artificial Sequence: Synthetic oligonucleotide
cuccgcggagcggucaagg

SEQ ID NO: 1263843 - RNA, 19 nt, Artificial Sequence
  Description of Artificial Sequence: Synthetic oligonucleotide
auuggugagcagccaucua

SEQ ID NO: 1263844 - RNA, 19 nt, Artificial Sequence
  Description of Artificial Sequence: Synthetic oligonucleotide
uuccacaagucugcguguu

SEQ ID NO: 1263845 - RNA, 19 nt, Artificial Sequence
  Description of Artificial Sequence: Synthetic oligonucleotide
ggagcggucaaggccuggg

SEQ ID NO: 1263846 - RNA, 19 nt, Artificial Sequence
  Description of Artificial Sequence: Synthetic oligonucleotide
gacuccugaugcuuggauu

SEQ ID NO: 1263847 - RNA, 19 nt, Artificial Sequence
  Description of Artificial Sequence: Synthetic oligonucleotide
auauggcuuccaaauuaaa

SEQ ID NO: 1263848 - RNA, 19 nt, Artificial Sequence
  Description of Artificial Sequence: Synthetic oligonucleotide
gcucuaaaggcugcuuccc

SEQ ID NO: 1263849 - RNA, 19 nt, Artificial Sequence
  Description of Artificial Sequence: Synthetic oligonucleotide
cuucuucacguccgggcga

SEQ ID NO: 1263850 - RNA, 19 nt, Artificial Sequence
  Description of Artificial Sequence: Synthetic oligonucleotide
gucauggguaaauucccau

SEQ ID NO: 1263851 - RNA, 19 nt, Artificial Sequence
  Description of Artificial Sequence: Synthetic oligonucleotide
agccggcucccucuccaag

SEQ ID NO: 1263852 - RNA, 19 nt, Artificial Sequence
  Description of Artificial Sequence: Synthetic oligonucleotide
ggcuaguuauacucuccca

SEQ ID NO: 1263853 - RNA, 19 nt, Artificial Sequence
  Description of Artificial Sequence: Synthetic oligonucleotide
gauugguccguggagucau

SEQ ID NO: 1263854 - RNA, 19 nt, Artificial Sequence
  Description of Artificial Sequence: Synthetic oligonucleotide
gccaguugaucgauagacc

SEQ ID NO: 1263855 - RNA, 19 nt, Artificial Sequence
  Description of Artificial Sequence: Synthetic oligonucleotide
acuacucggaggacuucca

SEQ ID NO: 1263856 - RNA, 19 nt, Artificial Sequence
  Description of Artificial Sequence: Synthetic oligonucleotide
guacgaugacaucuuuagu

SEQ ID NO: 1263857 - RNA, 19 nt, Artificial Sequence
  Description of Artificial Sequence: Synthetic oligonucleotide
uacuuugaauggggcuaga

SEQ ID NO: 1263858 - RNA, 19 nt, Artificial Sequence
  Description of Artificial Sequence: Synthetic oligonucleotide
auacucucccaaacuguau

SEQ ID NO: 1263859 - RNA, 19 nt, Artificial Sequence
  Description of Artificial Sequence: Synthetic oligonucleotide
agccaucuauguacggacu

SEQ ID NO: 1263860 - RNA, 19 nt, Artificial Sequence
  Description of Artificial Sequence: Synthetic oligonucleotide
aggcucguccgccgccagg

SEQ ID NO: 1263861 - RNA, 19 nt, Artificial Sequence
  Description of Artificial Sequence: Synthetic oligonucleotide
aggguacgaugacaucuuu

SEQ ID NO: 1263862 - RNA, 19 nt, Artificial Sequence
  Description of Artificial Sequence: Synthetic oligonucleotide
cucaucaacugugucuaua

SEQ ID NO: 1263863 - RNA, 19 nt, Artificial Sequence
  Description of Artificial Sequence: Synthetic oligonucleotide
ggaguuuccgguguuauuu

SEQ ID NO: 1263864 - RNA, 19 nt, Artificial Sequence
  Description of Artificial Sequence: Synthetic oligonucleotide
ggaaagcagggguguccag

SEQ ID NO: 1263865 - RNA, 19 nt, Artificial Sequence
  Description of Artificial Sequence: Synthetic oligonucleotide
aaauagcgggugggcuagu

SEQ ID NO: 1263866 - RNA, 19 nt, Artificial Sequence
  Description of Artificial Sequence: Synthetic oligonucleotide
gccgccaggaaagcagggg

SEQ ID NO: 1263867 - RNA, 19 nt, Artificial Sequence
  Description of Artificial Sequence: Synthetic oligonucleotide
guccgggcgagcgcgcagg

SEQ ID NO: 1263868 - RNA, 19 nt, Artificial Sequence
  Description of Artificial Sequence: Synthetic oligonucleotide
cucgcucacaucucccaua

SEQ ID NO: 1263869 - RNA, 19 nt, Artificial Sequence
  Description of Artificial Sequence: Synthetic oligonucleotide
gauccgcaucagugaggac

SEQ ID NO: 1263870 - RNA, 19 nt, Artificial Sequence
  Description of Artificial Sequence: Synthetic oligonucleotide
ggagauugguccguggagu

SEQ ID NO: 1263871 - RNA, 19 nt, Artificial Sequence
  Description of Artificial Sequence: Synthetic oligonucleotide
cagcgucuuccaacagcac

SEQ ID NO: 1263872 - RNA, 19 nt, Artificial Sequence
  Description of Artificial Sequence: Synthetic oligonucleotide
ccaagugcucucaucaacu

SEQ ID NO: 1263873 - RNA, 19 nt, Artificial Sequence
  Description of Artificial Sequence: Synthetic oligonucleotide
caucuauguacggacuccu

SEQ ID NO: 1263874 - RNA, 19 nt, Artificial Sequence
  Description of Artificial Sequence: Synthetic oligonucleotide
aacugucccucaagagauu

SEQ ID NO: 1263875 - RNA, 19 nt, Artificial Sequence
  Description of Artificial Sequence: Synthetic oligonucleotide
cacgggcuccuuuauccaa

SEQ ID NO: 1263876 - RNA, 19 nt, Artificial Sequence
  Description of Artificial Sequence: Synthetic oligonucleotide
acgucacuuccagccacca

SEQ ID NO: 1263877 - RNA, 19 nt, Artificial Sequence
  Description of Artificial Sequence: Synthetic oligonucleotide
ggguaaagaaauagcgggu

SEQ ID NO: 1263878 - RNA, 19 nt, Artificial Sequence
  Description of Artificial Sequence: Synthetic oligonucleotide
ccaaguugagccggcuccc

SEQ ID NO: 1263879 - RNA, 19 nt, Artificial Sequence
  Description of Artificial Sequence: Synthetic oligonucleotide
cuggcaaguguuuguuuau

SEQ ID NO: 1263880 - RNA, 19 nt, Artificial Sequence
  Description of Artificial Sequence: Synthetic oligonucleotide
guugaucgauagaccaccu

SEQ ID NO: 1263881 - RNA, 19 nt, Artificial Sequence
  Description of Artificial Sequence: Synthetic oligonucleotide
gcauuuuaacucgcucaca

SEQ ID NO: 1263882 - RNA, 19 nt, Artificial Sequence
  Description of Artificial Sequence: Synthetic oligonucleotide
gaggguacgaugacaucuu

SEQ ID NO: 1263883 - RNA, 19 nt, Artificial Sequence
  Description of Artificial Sequence: Synthetic oligonucleotide
ggugauuccgguagaacuu

SEQ ID NO: 1263884 - RNA, 19 nt, Artificial Sequence
  Description of Artificial Sequence: Synthetic oligonucleotide
gauccaaguugagccggcu

SEQ ID NO: 1263885 - RNA, 19 nt, Artificial Sequence
  Description of Artificial Sequence: Synthetic oligonucleotide
cccucaugcucaguccagg

SEQ ID NO: 1263886 - RNA, 19 nt, Artificial Sequence
  Description of Artificial Sequence: Synthetic oligonucleotide
ggggugaaagggauccgca

SEQ ID NO: 1263887 - RNA, 19 nt, Artificial Sequence
  Description of Artificial Sequence: Synthetic oligonucleotide
gcgggugggcuaguuauac

SEQ ID NO: 1263888 - RNA, 19 nt, Artificial Sequence
  Description of Artificial Sequence: Synthetic oligonucleotide
gcgucuuccaacagcacua

SEQ ID NO: 1263889 - RNA, 19 nt, Artificial Sequence
  Description of Artificial Sequence: Synthetic oligonucleotide
ucuucacguccgggcgagc

SEQ ID NO: 1263890 - RNA, 19 nt, Artificial Sequence
  Description of Artificial Sequence: Synthetic oligonucleotide
ccgccgccaggaaagcagg

SEQ ID NO: 1263891 - RNA, 19 nt, Artificial Sequence
  Description of Artificial Sequence: Synthetic oligonucleotide
ccaccuaaauuucccugga

SEQ ID NO: 1263892 - RNA, 19 nt, Artificial Sequence
  Description of Artificial Sequence: Synthetic oligonucleotide
ccggcucccucuccaagag

SEQ ID NO: 1263893 - RNA, 19 nt, Artificial Sequence
  Description of Artificial Sequence: Synthetic oligonucleotide
cacguccgggcgagcgcgc

SEQ ID NO: 1263894 - RNA, 19 nt, Artificial Sequence
  Description of Artificial Sequence: Synthetic oligonucleotide
ggugggcuaguuauacucu

SEQ ID NO: 1263895 - RNA, 19 nt, Artificial Sequence
  Description of Artificial Sequence: Synthetic oligonucleotide
gccggcucccucuccaaga

SEQ ID NO: 1263896 - RNA, 19 nt, Artificial Sequence
  Description of Artificial Sequence: Synthetic oligonucleotide
cuauuucuacaggauucau

SEQ ID NO: 1263897 - RNA, 19 nt, Artificial Sequence
  Description of Artificial Sequence: Synthetic oligonucleotide
gcacuagcucuuucucaga

SEQ ID NO: 1263898 - RNA, 19 nt, Artificial Sequence
  Description of Artificial Sequence: Synthetic oligonucleotide
ccccucaugcucaguccag

SEQ ID NO: 1263899 - RNA, 19 nt, Artificial Sequence
  Description of Artificial Sequence: Synthetic oligonucleotide
cugugucuauaggaucgaa

SEQ ID NO: 1263900 - RNA, 19 nt, Artificial Sequence
  Description of Artificial Sequence: Synthetic oligonucleotide
caugcacauaugagaguuu

SEQ ID NO: 1263901 - RNA, 19 nt, Artificial Sequence
  Description of Artificial Sequence: Synthetic oligonucleotide
ggguacgaugacaucuuua

SEQ ID NO: 1263902 - RNA, 19 nt, Artificial Sequence
  Description of Artificial Sequence: Synthetic oligonucleotide
gagccggcucccucuccaa

SEQ ID NO: 1263903 - RNA, 19 nt, Artificial Sequence
  Description of Artificial Sequence: Synthetic oligonucleotide
gggcgagcgcgcaggcucg

SEQ ID NO: 1263904 - RNA, 19 nt, Artificial Sequence
  Description of Artificial Sequence: Synthetic oligonucleotide
cgaugaaucuccucugggu

SEQ ID NO: 1263905 - RNA, 19 nt, Artificial Sequence
  Description of Artificial Sequence: Synthetic oligonucleotide
gggcagaauacugcuuucu

SEQ ID NO: 1263906 - RNA, 19 nt, Artificial Sequence
  Description of Artificial Sequence: Synthetic oligonucleotide
agcgggugggcuaguuaua

SEQ ID NO: 1263907 - RNA, 19 nt, Artificial Sequence
  Description of Artificial Sequence: Synthetic oligonucleotide
ggcacuagacugacuuugu

SEQ ID NO: 1263908 - RNA, 19 nt, Artificial Sequence
  Description of Artificial Sequence: Synthetic oligonucleotide
ccaauauggcuuccaaauu

SEQ ID NO: 1263909 - RNA, 19 nt, Artificial Sequence
  Description of Artificial Sequence: Synthetic oligonucleotide
caaguugagccggcucccu

SEQ ID NO: 1263910 - RNA, 19 nt, Artificial Sequence
  Description of Artificial Sequence: Synthetic oligonucleotide
ccagcacuacucggaggac

SEQ ID NO: 1263911 - RNA, 19 nt, Artificial Sequence
  Description of Artificial Sequence: Synthetic oligonucleotide
ccguggagucaucagcucu

SEQ ID NO: 1263912 - RNA, 19 nt, Artificial Sequence
  Description of Artificial Sequence: Synthetic oligonucleotide
ccucuguucugagaguggu

SEQ ID NO: 1263913 - RNA, 19 nt, Artificial Sequence
  Description of Artificial Sequence: Synthetic oligonucleotide
cgccgccaggaaagcaggg

SEQ ID NO: 1263914 - RNA, 19 nt, Artificial Sequence
  Description of Artificial Sequence: Synthetic oligonucleotide
caucuggauagugcugcuu

SEQ ID NO: 1263915 - RNA, 19 nt, Artificial Sequence
  Description of Artificial Sequence: Synthetic oligonucleotide
ccacaagucugcguguuau

SEQ ID NO: 1263916 - RNA, 19 nt, Artificial Sequence
  Description of Artificial Sequence: Synthetic oligonucleotide
cgguguuauuugcauuuua

SEQ ID NO: 1263917 - RNA, 19 nt, Artificial Sequence
  Description of Artificial Sequence: Synthetic oligonucleotide
cgcaggcucguccgccgcc

SEQ ID NO: 1263918 - RNA, 19 nt, Artificial Sequence
  Description of Artificial Sequence: Synthetic oligonucleotide
gcaaggagucugagaugcu

SEQ ID NO: 1263919 - RNA, 19 nt, Artificial Sequence
  Description of Artificial Sequence: Synthetic oligonucleotide
gcggagcggucaaggccug

SEQ ID NO: 1263920 - RNA, 19 nt, Artificial Sequence
  Description of Artificial Sequence: Synthetic oligonucleotide
cccaggagaccaguuucua

SEQ ID NO: 1263921 - RNA, 19 nt, Artificial Sequence
  Description of Artificial Sequence: Synthetic oligonucleotide
cguccgggcgagcgcgcag

SEQ ID NO: 1263922 - RNA, 19 nt, Artificial Sequence
  Description of Artificial Sequence: Synthetic oligonucleotide
cggagcggucaaggccugg

SEQ ID NO: 1263923 - RNA, 19 nt, Artificial Sequence
  Description of Artificial Sequence: Synthetic oligonucleotide
ccgguagaacuuguuccau

SEQ ID NO: 1263924 - RNA, 19 nt, Artificial Sequence
  Description of Artificial Sequence: Synthetic oligonucleotide
ccgguguuauuugcauuuu

SEQ ID NO: 1263925 - RNA, 19 nt, Artificial Sequence
  Description of Artificial Sequence: Synthetic oligonucleotide
aauaaauacgucucuacgg

SEQ ID NO: 1263926 - RNA, 19 nt, Artificial Sequence
  Description of Artificial Sequence: Synthetic oligonucleotide
acuguuaauauucaggcac

SEQ ID NO: 1263927 - RNA, 19 nt, Artificial Sequence
  Description of Artificial Sequence: Synthetic oligonucleotide
aaauagagcaccuuuaaca

SEQ ID NO: 1263928 - RNA, 19 nt, Artificial Sequence
  Description of Artificial Sequence: Synthetic oligonucleotide
aauacaagacacuuuauca

SEQ ID NO: 1263929 - RNA, 19 nt, Artificial Sequence
  Description of Artificial Sequence: Synthetic oligonucleotide
aaauacaagacacuuuauc

SEQ ID NO: 1263930 - RNA, 19 nt, Artificial Sequence
  Description of Artificial Sequence: Synthetic oligonucleotide
acuaccaacagguucagcc

SEQ ID NO: 1263931 - RNA, 19 nt, Artificial Sequence
  Description of Artificial Sequence: Synthetic oligonucleotide
auaaaacuacuguacaucc

SEQ ID NO: 1263932 - RNA, 19 nt, Artificial Sequence
  Description of Artificial Sequence: Synthetic oligonucleotide
uuuacaauccuacagcccc

SEQ ID NO: 1263933 - RNA, 19 nt, Artificial Sequence
  Description of Artificial Sequence: Synthetic oligonucleotide
acacuguuaauauucaggc

SEQ ID NO: 1263934 - RNA, 19 nt, Artificial Sequence
  Description of Artificial Sequence: Synthetic oligonucleotide
aaugucguugggcagggcc

SEQ ID NO: 1263935 - RNA, 19 nt, Artificial Sequence
  Description of Artificial Sequence: Synthetic oligonucleotide
aaaauagagcaccuuuaac

SEQ ID NO: 1263936 - RNA, 19 nt, Artificial Sequence
  Description of Artificial Sequence: Synthetic oligonucleotide
aaccguguuagccagcagc

SEQ ID NO: 1263937 - RNA, 19 nt, Artificial Sequence
  Description of Artificial Sequence: Synthetic oligonucleotide
aagacaauacaaacaaacc

SEQ ID NO: 1263938 - RNA, 19 nt, Artificial Sequence
  Description of Artificial Sequence: Synthetic oligonucleotide
agaaccagaacucauuccg

SEQ ID NO: 1263939 - RNA, 19 nt, Artificial Sequence
  Description of Artificial Sequence: Synthetic oligonucleotide
uguuccugcaaauaaauac

SEQ ID NO: 1263940 - RNA, 19 nt, Artificial Sequence
  Description of Artificial Sequence: Synthetic oligonucleotide
aauacaaacaaaccguguu

SEQ ID NO: 1263941 - RNA, 19 nt, Artificial Sequence
  Description of Artificial Sequence: Synthetic oligonucleotide
accuuuaacauuaaaguac

SEQ ID NO: 1263942 - RNA, 19 nt, Artificial Sequence
  Description of Artificial Sequence: Synthetic oligonucleotide
agaauguuaaauacaagac

SEQ ID NO: 1263943 - RNA, 19 nt, Artificial Sequence
  Description of Artificial Sequence: Synthetic oligonucleotide
uugucgaagaaucaguucu

SEQ ID NO: 1263944 - RNA, 19 nt, Artificial Sequence
  Description of Artificial Sequence: Synthetic oligonucleotide
aauagagcaccuuuaacau

SEQ ID NO: 1263945 - RNA, 19 nt, Artificial Sequence
  Description of Artificial Sequence: Synthetic oligonucleotide
uguggaaauaaaacuacug

SEQ ID NO: 1263946 - RNA, 19 nt, Artificial Sequence
  Description of Artificial Sequence: Synthetic oligonucleotide
uuugaguuaguguuaaacu

SEQ ID NO: 1263947 - RNA, 19 nt, Artificial Sequence
  Description of Artificial Sequence: Synthetic oligonucleotide
ugaagugacuaccaacagg

SEQ ID NO: 1263948 - RNA, 19 nt, Artificial Sequence
  Description of Artificial Sequence: Synthetic oligonucleotide
acaaguuaggguuaaauaa

SEQ ID NO: 1263949 - RNA, 19 nt, Artificial Sequence
  Description of Artificial Sequence: Synthetic oligonucleotide
aguguuaaacuucagggcu

SEQ ID NO: 1263950 - RNA, 19 nt, Artificial Sequence
  Description of Artificial Sequence: Synthetic oligonucleotide
ucucaucggacaauguucg

SEQ ID NO: 1263951 - RNA, 19 nt, Artificial Sequence
  Description of Artificial Sequence: Synthetic oligonucleotide
aguggugcugaauagaaug

SEQ ID NO: 1263952 - RNA, 19 nt, Artificial Sequence
  Description of Artificial Sequence: Synthetic oligonucleotide
aaguuaggguuaaauaagc

SEQ ID NO: 1263953 - RNA, 19 nt, Artificial Sequence
  Description of Artificial Sequence: Synthetic oligonucleotide
cugaauagaaugucguugg

SEQ ID NO: 1263954 - RNA, 19 nt, Artificial Sequence
  Description of Artificial Sequence: Synthetic oligonucleotide
cauagaacgaaaacuuccg

SEQ ID NO: 1263955 - RNA, 19 nt, Artificial Sequence
  Description of Artificial Sequence: Synthetic oligonucleotide
auacaagacacuuuaucag

SEQ ID NO: 1263956 - RNA, 19 nt, Artificial Sequence
  Description of Artificial Sequence: Synthetic oligonucleotide
agugacuaccaacagguuc

SEQ ID NO: 1263957 - RNA, 19 nt, Artificial Sequence
  Description of Artificial Sequence: Synthetic oligonucleotide
auaaauacgucucuacggu

SEQ ID NO: 1263958 - RNA, 19 nt, Artificial Sequence
  Description of Artificial Sequence: Synthetic oligonucleotide
agaacgaaaacuuccgucu

SEQ ID NO: 1263959 - RNA, 19 nt, Artificial Sequence
  Description of Artificial Sequence: Synthetic oligonucleotide
aacaaaccguguuagccag

SEQ ID NO: 1263960 - RNA, 19 nt, Artificial Sequence
  Description of Artificial Sequence: Synthetic oligonucleotide
gaagaaucaguucuagcug

SEQ ID NO: 1263961 - RNA, 19 nt, Artificial Sequence
  Description of Artificial Sequence: Synthetic oligonucleotide
uuggacuuauccgauaagg

SEQ ID NO: 1263962 - RNA, 19 nt, Artificial Sequence
  Description of Artificial Sequence: Synthetic oligonucleotide
aaagcaaacuacucauuga

SEQ ID NO: 1263963 - RNA, 19 nt, Artificial Sequence
  Description of Artificial Sequence: Synthetic oligonucleotide
aauguucgguacaaugacc

SEQ ID NO: 1263964 - RNA, 19 nt, Artificial Sequence
  Description of Artificial Sequence: Synthetic oligonucleotide
ucuuauugcuaugauagug

SEQ ID NO: 1263965 - RNA, 19 nt, Artificial Sequence
  Description of Artificial Sequence: Synthetic oligonucleotide
aauacgucucuacgguaac

SEQ ID NO: 1263966 - RNA, 19 nt, Artificial Sequence
  Description of Artificial Sequence: Synthetic oligonucleotide
ugaguuaguguuaaacuuc

SEQ ID NO: 1263967 - RNA, 19 nt, Artificial Sequence
  Description of Artificial Sequence: Synthetic oligonucleotide
ucgaaggucggucugaagu

SEQ ID NO: 1263968 - RNA, 19 nt, Artificial Sequence
  Description of Artificial Sequence: Synthetic oligonucleotide
uauugcuaugauagugugg

SEQ ID NO: 1263969 - RNA, 19 nt, Artificial Sequence
  Description of Artificial Sequence: Synthetic oligonucleotide
gacuuauccgauaaggacc

SEQ ID NO: 1263970 - RNA, 19 nt, Artificial Sequence
  Description of Artificial Sequence: Synthetic oligonucleotide
auacagugcaggugaaacc

SEQ ID NO: 1263971 - RNA, 19 nt, Artificial Sequence
  Description of Artificial Sequence: Synthetic oligonucleotide
aaucagaacacuguuaaua

SEQ ID NO: 1263972 - RNA, 19 nt, Artificial Sequence
  Description of Artificial Sequence: Synthetic oligonucleotide
uccgauaaggacccgucgg

SEQ ID NO: 1263973 - RNA, 19 nt, Artificial Sequence
  Description of Artificial Sequence: Synthetic oligonucleotide
aacgaaaacuuccgucuuc

SEQ ID NO: 1263974 - RNA, 19 nt, Artificial Sequence
  Description of Artificial Sequence: Synthetic oligonucleotide
ugaagaaccacucggugaa

SEQ ID NO: 1263975 - RNA, 19 nt, Artificial Sequence
  Description of Artificial Sequence: Synthetic oligonucleotide
uaguguuaaacuucagggc

SEQ ID NO: 1263976 - RNA, 19 nt, Artificial Sequence
  Description of Artificial Sequence: Synthetic oligonucleotide
uucgguacaaugaccuccg

SEQ ID NO: 1263977 - RNA, 19 nt, Artificial Sequence
  Description of Artificial Sequence: Synthetic oligonucleotide
acuuauccgauaaggaccc

SEQ ID NO: 1263978 - RNA, 19 nt, Artificial Sequence
  Description of Artificial Sequence: Synthetic oligonucleotide
uuuguuccugcaaauaaau

SEQ ID NO: 1263979 - RNA, 19 nt, Artificial Sequence
  Description of Artificial Sequence: Synthetic oligonucleotide
gaaguugucgaagaaucag

SEQ ID NO: 1263980 - RNA, 19 nt, Artificial Sequence
  Description of Artificial Sequence: Synthetic oligonucleotide
aaacuacucauugaaguga

SEQ ID NO: 1263981 - RNA, 19 nt, Artificial Sequence
  Description of Artificial Sequence: Synthetic oligonucleotide
aacuacucauugaagugac

SEQ ID NO: 1263982 - RNA, 19 nt, Artificial Sequence
  Description of Artificial Sequence: Synthetic oligonucleotide
caaacuacucauugaagug

SEQ ID NO: 1263983 - RNA, 19 nt, Artificial Sequence
  Description of Artificial Sequence: Synthetic oligonucleotide
uucgagaacuggcaaagga

SEQ ID NO: 1263984 - RNA, 19 nt, Artificial Sequence
  Description of Artificial Sequence: Synthetic oligonucleotide
aauccuacagccccgcuau

SEQ ID NO: 1263985 - RNA, 19 nt, Artificial Sequence
  Description of Artificial Sequence: Synthetic oligonucleotide
acaugucugauuaucugcc

SEQ ID NO: 1263986 - RNA, 19 nt, Artificial Sequence
  Description of Artificial Sequence: Synthetic oligonucleotide
ugcaaauaaauacgucucu

SEQ ID NO: 1263987 - RNA, 19 nt, Artificial Sequence
  Description of Artificial Sequence: Synthetic oligonucleotide
guaacuacaagaaagcaaa

SEQ ID NO: 1263988 - RNA, 19 nt, Artificial Sequence
  Description of Artificial Sequence: Synthetic oligonucleotide
uuauugcuaugauagugug

SEQ ID NO: 1263989 - RNA, 19 nt, Artificial Sequence
  Description of Artificial Sequence: Synthetic oligonucleotide
uuaagcuuucuugucaaug

SEQ ID NO: 1263990 - RNA, 19 nt, Artificial Sequence
  Description of Artificial Sequence: Synthetic oligonucleotide
uccacuaaggggcuaucag

SEQ ID NO: 1263991 - RNA, 19 nt, Artificial Sequence
  Description of Artificial Sequence: Synthetic oligonucleotide
uugaguuaguguuaaacuu

SEQ ID NO: 1263992 - RNA, 19 nt, Artificial Sequence
  Description of Artificial Sequence: Synthetic oligonucleotide
caaucuaaccccguggccg

SEQ ID NO: 1263993 - RNA, 19 nt, Artificial Sequence
  Description of Artificial Sequence: Synthetic oligonucleotide
aacuacuguacauccaaaa

SEQ ID NO: 1263994 - RNA, 19 nt, Artificial Sequence
  Description of Artificial Sequence: Synthetic oligonucleotide
acugcacccuucuuauugc

SEQ ID NO: 1263995 - RNA, 19 nt, Artificial Sequence
  Description of Artificial Sequence: Synthetic oligonucleotide
ugguuaagcuuucuuguca

SEQ ID NO: 1263996 - RNA, 19 nt, Artificial Sequence
  Description of Artificial Sequence: Synthetic oligonucleotide
ggugggaccaaucuaaccc

SEQ ID NO: 1263997 - RNA, 19 nt, Artificial Sequence
  Description of Artificial Sequence: Synthetic oligonucleotide
uggacuuauccgauaagga

SEQ ID NO: 1263998 - RNA, 19 nt, Artificial Sequence
  Description of Artificial Sequence: Synthetic oligonucleotide
uguuaauauucaggcaccg

SEQ ID NO: 1263999 - RNA, 19 nt, Artificial Sequence
  Description of Artificial Sequence: Synthetic oligonucleotide
uucccaguuaguguggagg

SEQ ID NO: 1264000 - RNA, 19 nt, Artificial Sequence
  Description of Artificial Sequence: Synthetic oligonucleotide
acgaaaacuuccgucuucc

SEQ ID NO: 1264001 - RNA, 19 nt, Artificial Sequence
  Description of Artificial Sequence: Synthetic oligonucleotide
uacgguaacagcguuugag

SEQ ID NO: 1264002 - RNA, 19 nt, Artificial Sequence
  Description of Artificial Sequence: Synthetic oligonucleotide
uaaaacuacuguacaucca

SEQ ID NO: 1264003 - RNA, 19 nt, Artificial Sequence
  Description of Artificial Sequence: Synthetic oligonucleotide
agcugguuaagcuuucuug

SEQ ID NO: 1264004 - RNA, 19 nt, Artificial Sequence
  Description of Artificial Sequence: Synthetic oligonucleotide
ucuacgguaacagcguuug

SEQ ID NO: 1264005 - RNA, 19 nt, Artificial Sequence
  Description of Artificial Sequence: Synthetic oligonucleotide
ucagcagaguaacuacaag

SEQ ID NO: 1264006 - RNA, 19 nt, Artificial Sequence
  Description of Artificial Sequence: Synthetic oligonucleotide
uagaacgaaaacuuccguc

SEQ ID NO: 1264007 - RNA, 19 nt, Artificial Sequence
  Description of Artificial Sequence: Synthetic oligonucleotide
uuacaauccuacagccccg

SEQ ID NO: 1264008 - RNA, 19 nt, Artificial Sequence
  Description of Artificial Sequence: Synthetic oligonucleotide
aaggacccgucggagaacc

SEQ ID NO: 1264009 - RNA, 19 nt, Artificial Sequence
  Description of Artificial Sequence: Synthetic oligonucleotide
uugaagugacuaccaacag

SEQ ID NO: 1264010 - RNA, 19 nt, Artificial Sequence
  Description of Artificial Sequence: Synthetic oligonucleotide
cuguuaauauucaggcacc

SEQ ID NO: 1264011 - RNA, 19 nt, Artificial Sequence
  Description of Artificial Sequence: Synthetic oligonucleotide
ucccaguuaguguggaggg

SEQ ID NO: 1264012 - RNA, 19 nt, Artificial Sequence
  Description of Artificial Sequence: Synthetic oligonucleotide
guaacagcguuugaguuag

SEQ ID NO: 1264013 - RNA, 19 nt, Artificial Sequence
  Description of Artificial Sequence: Synthetic oligonucleotide
ugaaguugucgaagaauca

SEQ ID NO: 1264014 - RNA, 19 nt, Artificial Sequence
  Description of Artificial Sequence: Synthetic oligonucleotide
acuuuaucagaguuucugu

SEQ ID NO: 1264015 - RNA, 19 nt, Artificial Sequence
  Description of Artificial Sequence: Synthetic oligonucleotide
uaugauaguguggcugugg

SEQ ID NO: 1264016 - RNA, 19 nt, Artificial Sequence
  Description of Artificial Sequence: Synthetic oligonucleotide
auuaucugccuccguauug

SEQ ID NO: 1264017 - RNA, 19 nt, Artificial Sequence
  Description of Artificial Sequence: Synthetic oligonucleotide
caaaggaagagccccuccg

SEQ ID NO: 1264018 - RNA, 19 nt, Artificial Sequence
  Description of Artificial Sequence: Synthetic oligonucleotide
uuccugcaaauaaauacgu

SEQ ID NO: 1264019 - RNA, 19 nt, Artificial Sequence
  Description of Artificial Sequence: Synthetic oligonucleotide
cuaaggggcuaucaggaag

SEQ ID NO: 1264020 - RNA, 19 nt, Artificial Sequence
  Description of Artificial Sequence: Synthetic oligonucleotide
ucgagaacuggcaaaggaa

SEQ ID NO: 1264021 - RNA, 19 nt, Artificial Sequence
  Description of Artificial Sequence: Synthetic oligonucleotide
aaacgcucgugcagcaucc

SEQ ID NO: 1264022 - RNA, 19 nt, Artificial Sequence
  Description of Artificial Sequence: Synthetic oligonucleotide
acaagaaagcaaacuacuc

SEQ ID NO: 1264023 - RNA, 19 nt, Artificial Sequence
  Description of Artificial Sequence: Synthetic oligonucleotide
aucaguucuagcugguuga

SEQ ID NO: 1264024 - RNA, 19 nt, Artificial Sequence
  Description of Artificial Sequence: Synthetic oligonucleotide
caauguucgguacaaugac

SEQ ID NO: 1264025 - RNA, 19 nt, Artificial Sequence
  Description of Artificial Sequence: Synthetic oligonucleotide
gaagugacuaccaacaggu

SEQ ID NO: 1264026 - RNA, 19 nt, Artificial Sequence
  Description of Artificial Sequence: Synthetic oligonucleotide
aggugcauccaugaacugc

SEQ ID NO: 1264027 - RNA, 19 nt, Artificial Sequence
  Description of Artificial Sequence: Synthetic oligonucleotide
uaauauucaggcaccguuu

SEQ ID NO: 1264028 - RNA, 19 nt, Artificial Sequence
  Description of Artificial Sequence: Synthetic oligonucleotide
cucucaucggacaauguuc

SEQ ID NO: 1264029 - RNA, 19 nt, Artificial Sequence
  Description of Artificial Sequence: Synthetic oligonucleotide
aacucauuccguaggcuuc

SEQ ID NO: 1264030 - RNA, 19 nt, Artificial Sequence
  Description of Artificial Sequence: Synthetic oligonucleotide
uucagcagaguaacuacaa

SEQ ID NO: 1264031 - RNA, 19 nt, Artificial Sequence
  Description of Artificial Sequence: Synthetic oligonucleotide
aggugggaccaaucuaacc

SEQ ID NO: 1264032 - RNA, 19 nt, Artificial Sequence
  Description of Artificial Sequence: Synthetic oligonucleotide
cacacuuggacuuauccga

SEQ ID NO: 1264033 - RNA, 19 nt, Artificial Sequence
  Description of Artificial Sequence: Synthetic oligonucleotide
ugcgauucuuccugcagcc

SEQ ID NO: 1264034 - RNA, 19 nt, Artificial Sequence
  Description of Artificial Sequence: Synthetic oligonucleotide
ccauagaacgaaaacuucc

SEQ ID NO: 1264035 - RNA, 19 nt, Artificial Sequence
  Description of Artificial Sequence: Synthetic oligonucleotide
aaauacgucucuacgguaa

SEQ ID NO: 1264036 - RNA, 19 nt, Artificial Sequence
  Description of Artificial Sequence: Synthetic oligonucleotide
acaauacaaacaaaccgug

SEQ ID NO: 1264037 - RNA, 19 nt, Artificial Sequence
  Description of Artificial Sequence: Synthetic oligonucleotide
uacgucucuacgguaacag

SEQ ID NO: 1264038 - RNA, 19 nt, Artificial Sequence
  Description of Artificial Sequence: Synthetic oligonucleotide
aaucuaaccccguggccgu

SEQ ID NO: 1264039 - RNA, 19 nt, Artificial Sequence
  Description of Artificial Sequence: Synthetic oligonucleotide
acagacuuagcaucucugu

SEQ ID NO: 1264040 - RNA, 19 nt, Artificial Sequence
  Description of Artificial Sequence: Synthetic oligonucleotide
aacagcguuugaguuagug

SEQ ID NO: 1264041 - RNA, 19 nt, Artificial Sequence
  Description of Artificial Sequence: Synthetic oligonucleotide
cuugccaccggugggaucc

SEQ ID NO: 1264042 - RNA, 19 nt, Artificial Sequence
  Description of Artificial Sequence: Synthetic oligonucleotide
acaauguucgguacaauga

SEQ ID NO: 1264043 - RNA, 19 nt, Artificial Sequence
  Description of Artificial Sequence: Synthetic oligonucleotide
gauugacucugucuucagc

SEQ ID NO: 1264044 - RNA, 19 nt, Artificial Sequence
  Description of Artificial Sequence: Synthetic oligonucleotide
ugggaccaaucuaaccccg

SEQ ID NO: 1264045 - RNA, 19 nt, Artificial Sequence
  Description of Artificial Sequence: Synthetic oligonucleotide
acagcguuugaguuagugu

SEQ ID NO: 1264046 - RNA, 19 nt, Artificial Sequence
  Description of Artificial Sequence: Synthetic oligonucleotide
ucgaagaaucaguucuagc

SEQ ID NO: 1264047 - RNA, 19 nt, Artificial Sequence
  Description of Artificial Sequence: Synthetic oligonucleotide
auagaacgaaaacuuccgu

SEQ ID NO: 1264048 - RNA, 19 nt, Artificial Sequence
  Description of Artificial Sequence: Synthetic oligonucleotide
gacguguugaguuucugaa

SEQ ID NO: 1264049 - RNA, 19 nt, Artificial Sequence
  Description of Artificial Sequence: Synthetic oligonucleotide
cauuaaaguacaugucuga

SEQ ID NO: 1264050 - RNA, 19 nt, Artificial Sequence
  Description of Artificial Sequence: Synthetic oligonucleotide
auaaggacccgucggagaa

SEQ ID NO: 1264051 - RNA, 19 nt, Artificial Sequence
  Description of Artificial Sequence: Synthetic oligonucleotide
guucccauagaacgaaaac

SEQ ID NO: 1264052 - RNA, 19 nt, Artificial Sequence
  Description of Artificial Sequence: Synthetic oligonucleotide
uucaggcaccguuuguucc

SEQ ID NO: 1264053 - RNA, 19 nt, Artificial Sequence
  Description of Artificial Sequence: Synthetic oligonucleotide
acuuggacuuauccgauaa

SEQ ID NO: 1264054 - RNA, 19 nt, Artificial Sequence
  Description of Artificial Sequence: Synthetic oligonucleotide
agguucagccauuuacaag

SEQ ID NO: 1264055 - RNA, 19 nt, Artificial Sequence
  Description of Artificial Sequence: Synthetic oligonucleotide
ucaggggacucuagugggg

SEQ ID NO: 1264056 - RNA, 19 nt, Artificial Sequence
  Description of Artificial Sequence: Synthetic oligonucleotide
accaaaucauauaaaauua

SEQ ID NO: 1264057 - RNA, 19 nt, Artificial Sequence
  Description of Artificial Sequence: Synthetic oligonucleotide
ugauuaucugccuccguau

SEQ ID NO: 1264058 - RNA, 19 nt, Artificial Sequence
  Description of Artificial Sequence: Synthetic oligonucleotide
acuuacugcacccuucuua

SEQ ID NO: 1264059 - RNA, 19 nt, Artificial Sequence
  Description of Artificial Sequence: Synthetic oligonucleotide
guucgguacaaugaccucc

SEQ ID NO: 1264060 - RNA, 19 nt, Artificial Sequence
  Description of Artificial Sequence: Synthetic oligonucleotide
aucggacaauguucgguac

SEQ ID NO: 1264061 - RNA, 19 nt, Artificial Sequence
  Description of Artificial Sequence: Synthetic oligonucleotide
ggacuuauccgauaaggac

SEQ ID NO: 1264062 - RNA, 19 nt, Artificial Sequence
  Description of Artificial Sequence: Synthetic oligonucleotide
cuuuggauaggacguguug

SEQ ID NO: 1264063 - RNA, 19 nt, Artificial Sequence
  Description of Artificial Sequence: Synthetic oligonucleotide
auuaaaguacaugucugau

SEQ ID NO: 1264064 - RNA, 19 nt, Artificial Sequence
  Description of Artificial Sequence: Synthetic oligonucleotide
acgguaacagcguuugagu

SEQ ID NO: 1264065 - RNA, 19 nt, Artificial Sequence
  Description of Artificial Sequence: Synthetic oligonucleotide
cuucaaacgcucgugcagc

SEQ ID NO: 1264066 - RNA, 19 nt, Artificial Sequence
  Description of Artificial Sequence: Synthetic oligonucleotide
auccgauaaggacccgucg

SEQ ID NO: 1264067 - RNA, 19 nt, Artificial Sequence
  Description of Artificial Sequence: Synthetic oligonucleotide
uauccgauaaggacccguc

SEQ ID NO: 1264068 - RNA, 19 nt, Artificial Sequence
  Description of Artificial Sequence: Synthetic oligonucleotide
gugacuaccaacagguuca

SEQ ID NO: 1264069 - RNA, 19 nt, Artificial Sequence
  Description of Artificial Sequence: Synthetic oligonucleotide
gugaucgcuccccaggugc

SEQ ID NO: 1264070 - RNA, 19 nt, Artificial Sequence
  Description of Artificial Sequence: Synthetic oligonucleotide
aaccagaacucauuccgua

SEQ ID NO: 1264071 - RNA, 19 nt, Artificial Sequence
  Description of Artificial Sequence: Synthetic oligonucleotide
uacagccccgcuauuguac

SEQ ID NO: 1264072 - RNA, 19 nt, Artificial Sequence
  Description of Artificial Sequence: Synthetic oligonucleotide
aguacaugucugauuaucu

SEQ ID NO: 1264073 - RNA, 19 nt, Artificial Sequence
  Description of Artificial Sequence: Synthetic oligonucleotide
uccgggugagcucagucac

SEQ ID NO: 1264074 - RNA, 19 nt, Artificial Sequence
  Description of Artificial Sequence: Synthetic oligonucleotide
ucggacaauguucgguaca

SEQ ID NO: 1264075 - RNA, 19 nt, Artificial Sequence
  Description of Artificial Sequence: Synthetic oligonucleotide
cuuauugcuaugauagugu

SEQ ID NO: 1264076 - RNA, 19 nt, Artificial Sequence
  Description of Artificial Sequence: Synthetic oligonucleotide
gauaaggacccgucggaga

SEQ ID NO: 1264077 - RNA, 19 nt, Artificial Sequence
  Description of Artificial Sequence: Synthetic oligonucleotide
acuacuuacugcacccuuc

SEQ ID NO: 1264078 - RNA, 19 nt, Artificial Sequence
  Description of Artificial Sequence: Synthetic oligonucleotide
uuccguaggcuucccaugu

SEQ ID NO: 1264079 - RNA, 19 nt, Artificial Sequence
  Description of Artificial Sequence: Synthetic oligonucleotide
aacuacuuacugcacccuu

SEQ ID NO: 1264080 - RNA, 19 nt, Artificial Sequence
  Description of Artificial Sequence: Synthetic oligonucleotide
gcacacuuggacuuauccg

SEQ ID NO: 1264081 - RNA, 19 nt, Artificial Sequence
  Description of Artificial Sequence: Synthetic oligonucleotide
agcagaguaacuacaagaa

SEQ ID NO: 1264082 - RNA, 19 nt, Artificial Sequence
  Description of Artificial Sequence: Synthetic oligonucleotide
ggaguuguacacaggaucc

SEQ ID NO: 1264083 - RNA, 19 nt, Artificial Sequence
  Description of Artificial Sequence: Synthetic oligonucleotide
uucuuauugcuaugauagu

SEQ ID NO: 1264084 - RNA, 19 nt, Artificial Sequence
  Description of Artificial Sequence: Synthetic oligonucleotide
uguggagggugaucgcucc

SEQ ID NO: 1264085 - RNA, 19 nt, Artificial Sequence
  Description of Artificial Sequence: Synthetic oligonucleotide
aggcauaugcaucucuuaa

SEQ ID NO: 1264086 - RNA, 19 nt, Artificial Sequence
  Description of Artificial Sequence: Synthetic oligonucleotide
gcugaauagaaugucguug

SEQ ID NO: 1264087 - RNA, 19 nt, Artificial Sequence
  Description of Artificial Sequence: Synthetic oligonucleotide
gaaaacuuccgucuucccu

SEQ ID NO: 1264088 - RNA, 19 nt, Artificial Sequence
  Description of Artificial Sequence: Synthetic oligonucleotide
gugggaccaaucuaacccc

SEQ ID NO: 1264089 - RNA, 19 nt, Artificial Sequence
  Description of Artificial Sequence: Synthetic oligonucleotide
uccugcaaauaaauacguc

SEQ ID NO: 1264090 - RNA, 19 nt, Artificial Sequence
  Description of Artificial Sequence: Synthetic oligonucleotide
uaucagaguuucuguacaa

SEQ ID NO: 1264091 - RNA, 19 nt, Artificial Sequence
  Description of Artificial Sequence: Synthetic oligonucleotide
acucucaucggacaauguu

SEQ ID NO: 1264092 - RNA, 19 nt, Artificial Sequence
  Description of Artificial Sequence: Synthetic oligonucleotide
uaaauacgucucuacggua

SEQ ID NO: 1264093 - RNA, 19 nt, Artificial Sequence
  Description of Artificial Sequence: Synthetic oligonucleotide
gguugacuuucccaguuag

SEQ ID NO: 1264094 - RNA, 19 nt, Artificial Sequence
  Description of Artificial Sequence: Synthetic oligonucleotide
auuccguaggcuucccaug

SEQ ID NO: 1264095 - RNA, 19 nt, Artificial Sequence
  Description of Artificial Sequence: Synthetic oligonucleotide
acaaggcauaugcaucucu

SEQ ID NO: 1264096 - RNA, 19 nt, Artificial Sequence
  Description of Artificial Sequence: Synthetic oligonucleotide
ccaacuacuuacugcaccc

SEQ ID NO: 1264097 - RNA, 19 nt, Artificial Sequence
  Description of Artificial Sequence: Synthetic oligonucleotide
caugaacugcuugccaccg

SEQ ID NO: 1264098 - RNA, 19 nt, Artificial Sequence
  Description of Artificial Sequence: Synthetic oligonucleotide
uuguuccugcaaauaaaua

SEQ ID NO: 1264099 - RNA, 19 nt, Artificial Sequence
  Description of Artificial Sequence: Synthetic oligonucleotide
ugucgaagaaucaguucua

SEQ ID NO: 1264100 - RNA, 19 nt, Artificial Sequence
  Description of Artificial Sequence: Synthetic oligonucleotide
acuuccgucuucccuccuc

SEQ ID NO: 1264101 - RNA, 19 nt, Artificial Sequence
  Description of Artificial Sequence: Synthetic oligonucleotide
cuagcugguugacuuuccc

SEQ ID NO: 1264102 - RNA, 19 nt, Artificial Sequence
  Description of Artificial Sequence: Synthetic oligonucleotide
uuauccgauaaggacccgu

SEQ ID NO: 1264103 - RNA, 19 nt, Artificial Sequence
  Description of Artificial Sequence: Synthetic oligonucleotide
gcuaucaggaagcaucaac

SEQ ID NO: 1264104 - RNA, 19 nt, Artificial Sequence
  Description of Artificial Sequence: Synthetic oligonucleotide
uauucaggcaccguuuguu

SEQ ID NO: 1264105 - RNA, 19 nt, Artificial Sequence
  Description of Artificial Sequence: Synthetic oligonucleotide
agcaaacuacucauugaag

SEQ ID NO: 1264106 - RNA, 19 nt, Artificial Sequence
  Description of Artificial Sequence: Synthetic oligonucleotide
gaugccacccucuggucuc

SEQ ID NO: 1264107 - RNA, 19 nt, Artificial Sequence
  Description of Artificial Sequence: Synthetic oligonucleotide
cauacacucucaucggaca

SEQ ID NO: 1264108 - RNA, 19 nt, Artificial Sequence
  Description of Artificial Sequence: Synthetic oligonucleotide
uguuaaacuucagggcuuc

SEQ ID NO: 1264109 - RNA, 19 nt, Artificial Sequence
  Description of Artificial Sequence: Synthetic oligonucleotide
agauugacucugucuucag

SEQ ID NO: 1264110 - RNA, 19 nt, Artificial Sequence
  Description of Artificial Sequence: Synthetic oligonucleotide
cgucucuacgguaacagcg

SEQ ID NO: 1264111 - RNA, 19 nt, Artificial Sequence
  Description of Artificial Sequence: Synthetic oligonucleotide
guuaggguuaaauaagcuu

SEQ ID NO: 1264112 - RNA, 19 nt, Artificial Sequence
  Description of Artificial Sequence: Synthetic oligonucleotide
cuuggacuuauccgauaag

SEQ ID NO: 1264113 - RNA, 19 nt, Artificial Sequence
  Description of Artificial Sequence: Synthetic oligonucleotide
ucugauuaucugccuccgu

SEQ ID NO: 1264114 - RNA, 19 nt, Artificial Sequence
  Description of Artificial Sequence: Synthetic oligonucleotide
uccgguugcugcauacacu

SEQ ID NO: 1264115 - RNA, 19 nt, Artificial Sequence
  Description of Artificial Sequence: Synthetic oligonucleotide
aggugaaaccaaaucauau

SEQ ID NO: 1264116 - RNA, 19 nt, Artificial Sequence
  Description of Artificial Sequence: Synthetic oligonucleotide
uggggaaggcagauugacu

SEQ ID NO: 1264117 - RNA, 19 nt, Artificial Sequence
  Description of Artificial Sequence: Synthetic oligonucleotide
auauucaggcaccguuugu

SEQ ID NO: 1264118 - RNA, 19 nt, Artificial Sequence
  Description of Artificial Sequence: Synthetic oligonucleotide
uccuuucgaaggucggucu

SEQ ID NO: 1264119 - RNA, 19 nt, Artificial Sequence
  Description of Artificial Sequence: Synthetic oligonucleotide
aaccccguggccgugucug

SEQ ID NO: 1264120 - RNA, 19 nt, Artificial Sequence
  Description of Artificial Sequence: Synthetic oligonucleotide
aaaccguguuagccagcag

SEQ ID NO: 1264121 - RNA, 19 nt, Artificial Sequence
  Description of Artificial Sequence: Synthetic oligonucleotide
ccacuaaggggcuaucagg

SEQ ID NO: 1264122 - RNA, 19 nt, Artificial Sequence
  Description of Artificial Sequence: Synthetic oligonucleotide
uccuacagccccgcuauug

SEQ ID NO: 1264123 - RNA, 19 nt, Artificial Sequence
  Description of Artificial Sequence: Synthetic oligonucleotide
ugcugaauagaaugucguu

SEQ ID NO: 1264124 - RNA, 19 nt, Artificial Sequence
  Description of Artificial Sequence: Synthetic oligonucleotide
uggaguggugcugaauaga

SEQ ID NO: 1264125 - RNA, 19 nt, Artificial Sequence
  Description of Artificial Sequence: Synthetic oligonucleotide
agucuguuccgggugagcu

SEQ ID NO: 1264126 - RNA, 19 nt, Artificial Sequence
  Description of Artificial Sequence: Synthetic oligonucleotide
gagcaggguggguucuugg

SEQ ID NO: 1264127 - RNA, 19 nt, Artificial Sequence
  Description of Artificial Sequence: Synthetic oligonucleotide
ucggugaacuugcgcagcu

SEQ ID NO: 1264128 - RNA, 19 nt, Artificial Sequence
  Description of Artificial Sequence: Synthetic oligonucleotide
cuggucucuucaaacgcuc

SEQ ID NO: 1264129 - RNA, 19 nt, Artificial Sequence
  Description of Artificial Sequence: Synthetic oligonucleotide
ugaucgcuccccaggugca

SEQ ID NO: 1264130 - RNA, 19 nt, Artificial Sequence
  Description of Artificial Sequence: Synthetic oligonucleotide
cguguugaguuucugaaac

SEQ ID NO: 1264131 - RNA, 19 nt, Artificial Sequence
  Description of Artificial Sequence: Synthetic oligonucleotide
agcuucgagaacuggcaaa

SEQ ID NO: 1264132 - RNA, 19 nt, Artificial Sequence
  Description of Artificial Sequence: Synthetic oligonucleotide
cucaucggacaauguucgg

SEQ ID NO: 1264133 - RNA, 19 nt, Artificial Sequence
  Description of Artificial Sequence: Synthetic oligonucleotide
uacaauccuacagccccgc

SEQ ID NO: 1264134 - RNA, 19 nt, Artificial Sequence
  Description of Artificial Sequence: Synthetic oligonucleotide
aguguggagggugaucgcu

SEQ ID NO: 1264135 - RNA, 19 nt, Artificial Sequence
  Description of Artificial Sequence: Synthetic oligonucleotide
ucauuccguaggcuuccca

SEQ ID NO: 1264136 - RNA, 19 nt, Artificial Sequence
  Description of Artificial Sequence: Synthetic oligonucleotide
gguaguggcaucaggccag

SEQ ID NO: 1264137 - RNA, 19 nt, Artificial Sequence
  Description of Artificial Sequence: Synthetic oligonucleotide
uagcuagcugguuaagcuu

SEQ ID NO: 1264138 - RNA, 19 nt, Artificial Sequence
  Description of Artificial Sequence: Synthetic oligonucleotide
ucccuccauacagugcagg

SEQ ID NO: 1264139 - RNA, 19 nt, Artificial Sequence
  Description of Artificial Sequence: Synthetic oligonucleotide
cuacucauugaagugacua

SEQ ID NO: 1264140 - RNA, 19 nt, Artificial Sequence
  Description of Artificial Sequence: Synthetic oligonucleotide
cugauuaucugccuccgua

SEQ ID NO: 1264141 - RNA, 19 nt, Artificial Sequence
  Description of Artificial Sequence: Synthetic oligonucleotide
cuccgguugcugcauacac

SEQ ID NO: 1264142 - RNA, 19 nt, Artificial Sequence
  Description of Artificial Sequence: Synthetic oligonucleotide
cacuguuaauauucaggca

SEQ ID NO: 1264143 - RNA, 19 nt, Artificial Sequence
  Description of Artificial Sequence: Synthetic oligonucleotide
acuuagcaucucuguaggu

SEQ ID NO: 1264144 - RNA, 19 nt, Artificial Sequence
  Description of Artificial Sequence: Synthetic oligonucleotide
uccgucuucccuccuccac

SEQ ID NO: 1264145 - RNA, 19 nt, Artificial Sequence
  Description of Artificial Sequence: Synthetic oligonucleotide
uucgaaggucggucugaag

SEQ ID NO: 1264146 - RNA, 19 nt, Artificial Sequence
  Description of Artificial Sequence: Synthetic oligonucleotide
acgcucgugcagcauccac

SEQ ID NO: 1264147 - RNA, 19 nt, Artificial Sequence
  Description of Artificial Sequence: Synthetic oligonucleotide
aggcagugugcugugguag

SEQ ID NO: 1264148 - RNA, 19 nt, Artificial Sequence
  Description of Artificial Sequence: Synthetic oligonucleotide
aguugucgaagaaucaguu

SEQ ID NO: 1264149 - RNA, 19 nt, Artificial Sequence
  Description of Artificial Sequence: Synthetic oligonucleotide
gguugcugcauacacucuc

SEQ ID NO: 1264150 - RNA, 19 nt, Artificial Sequence
  Description of Artificial Sequence: Synthetic oligonucleotide
ccugcaaauaaauacgucu

SEQ ID NO: 1264151 - RNA, 19 nt, Artificial Sequence
  Description of Artificial Sequence: Synthetic oligonucleotide
acguguugaguuucugaaa

SEQ ID NO: 1264152 - RNA, 19 nt, Artificial Sequence
  Description of Artificial Sequence: Synthetic oligonucleotide
acuaaggggcuaucaggaa

SEQ ID NO: 1264153 - RNA, 19 nt, Artificial Sequence
  Description of Artificial Sequence: Synthetic oligonucleotide
gaacucauuccguaggcuu

SEQ ID NO: 1264154 - RNA, 19 nt, Artificial Sequence
  Description of Artificial Sequence: Synthetic oligonucleotide
ucggucugaaguugucgaa

SEQ ID NO: 1264155 - RNA, 19 nt, Artificial Sequence
  Description of Artificial Sequence: Synthetic oligonucleotide
gguuaagcuuucuugucaa

SEQ ID NO: 1264156 - RNA, 19 nt, Artificial Sequence
  Description of Artificial Sequence: Synthetic oligonucleotide
ucucuacgguaacagcguu

SEQ ID NO: 1264157 - RNA, 19 nt, Artificial Sequence
  Description of Artificial Sequence: Synthetic oligonucleotide
ugggauccacacacaggga

SEQ ID NO: 1264158 - RNA, 19 nt, Artificial Sequence
  Description of Artificial Sequence: Synthetic oligonucleotide
caucggacaauguucggua

SEQ ID NO: 1264159 - RNA, 19 nt, Artificial Sequence
  Description of Artificial Sequence: Synthetic oligonucleotide
acaaaccguguuagccagc

SEQ ID NO: 1264160 - RNA, 19 nt, Artificial Sequence
  Description of Artificial Sequence: Synthetic oligonucleotide
accguguuagccagcagca

SEQ ID NO: 1264161 - RNA, 19 nt, Artificial Sequence
  Description of Artificial Sequence: Synthetic oligonucleotide
cagauugacucugucuuca

SEQ ID NO: 1264162 - RNA, 19 nt, Artificial Sequence
  Description of Artificial Sequence: Synthetic oligonucleotide
uccauacagugcaggugaa

SEQ ID NO: 1264163 - RNA, 19 nt, Artificial Sequence
  Description of Artificial Sequence: Synthetic oligonucleotide
uuaacaaguuaggguuaaa

SEQ ID NO: 1264164 - RNA, 19 nt, Artificial Sequence
  Description of Artificial Sequence: Synthetic oligonucleotide
ggugggauccacacacagg

SEQ ID NO: 1264165 - RNA, 19 nt, Artificial Sequence
  Description of Artificial Sequence: Synthetic oligonucleotide
guggggaaggcagauugac

SEQ ID NO: 1264166 - RNA, 19 nt, Artificial Sequence
  Description of Artificial Sequence: Synthetic oligonucleotide
gaugaggagcagcuagcua

SEQ ID NO: 1264167 - RNA, 19 nt, Artificial Sequence
  Description of Artificial Sequence: Synthetic oligonucleotide
uacacucucaucggacaau

SEQ ID NO: 1264168 - RNA, 19 nt, Artificial Sequence
  Description of Artificial Sequence: Synthetic oligonucleotide
uugcuaugauaguguggcu

SEQ ID NO: 1264169 - RNA, 19 nt, Artificial Sequence
  Description of Artificial Sequence: Synthetic oligonucleotide
uuucgaaggucggucugaa

SEQ ID NO: 1264170 - RNA, 19 nt, Artificial Sequence
  Description of Artificial Sequence: Synthetic oligonucleotide
cuccuuucgaaggucgguc

SEQ ID NO: 1264171 - RNA, 19 nt, Artificial Sequence
  Description of Artificial Sequence: Synthetic oligonucleotide
ucgcuccccaggugcaucc

SEQ ID NO: 1264172 - RNA, 19 nt, Artificial Sequence
  Description of Artificial Sequence: Synthetic oligonucleotide
cagcguuugaguuaguguu

SEQ ID NO: 1264173 - RNA, 19 nt, Artificial Sequence
  Description of Artificial Sequence: Synthetic oligonucleotide
ugucguugggcagggccug

SEQ ID NO: 1264174 - RNA, 19 nt, Artificial Sequence
  Description of Artificial Sequence: Synthetic oligonucleotide
caaaccguguuagccagca

SEQ ID NO: 1264175 - RNA, 19 nt, Artificial Sequence
  Description of Artificial Sequence: Synthetic oligonucleotide
uccguggagacagguuccc

SEQ ID NO: 1264176 - RNA, 19 nt, Artificial Sequence
  Description of Artificial Sequence: Synthetic oligonucleotide
guuaguguggagggugauc

SEQ ID NO: 1264177 - RNA, 19 nt, Artificial Sequence
  Description of Artificial Sequence: Synthetic oligonucleotide
agccauuuacaaggcauau

SEQ ID NO: 1264178 - RNA, 19 nt, Artificial Sequence
  Description of Artificial Sequence: Synthetic oligonucleotide
cagguucagccauuuacaa

SEQ ID NO: 1264179 - RNA, 19 nt, Artificial Sequence
  Description of Artificial Sequence: Synthetic oligonucleotide
ggccgugucugguaguggc

SEQ ID NO: 1264180 - RNA, 19 nt, Artificial Sequence
  Description of Artificial Sequence: Synthetic oligonucleotide
ggcauaugcaucucuuaaa

SEQ ID NO: 1264181 - RNA, 19 nt, Artificial Sequence
  Description of Artificial Sequence: Synthetic oligonucleotide
agugcaggugaaaccaaau

SEQ ID NO: 1264182 - RNA, 19 nt, Artificial Sequence
  Description of Artificial Sequence: Synthetic oligonucleotide
gggacucuaguggggaagg

SEQ ID NO: 1264183 - RNA, 19 nt, Artificial Sequence
  Description of Artificial Sequence: Synthetic oligonucleotide
guuccgggugagcucaguc

SEQ ID NO: 1264184 - RNA, 19 nt, Artificial Sequence
  Description of Artificial Sequence: Synthetic oligonucleotide
ggaaggcagauugacucug

SEQ ID NO: 1264185 - RNA, 19 nt, Artificial Sequence
  Description of Artificial Sequence: Synthetic oligonucleotide
cucggugaacuugcgcagc

SEQ ID NO: 1264186 - RNA, 19 nt, Artificial Sequence
  Description of Artificial Sequence: Synthetic oligonucleotide
gcuagcuagcugguuaagc

SEQ ID NO: 1264187 - RNA, 19 nt, Artificial Sequence
  Description of Artificial Sequence: Synthetic oligonucleotide
ggcagauugacucugucuu

SEQ ID NO: 1264188 - RNA, 19 nt, Artificial Sequence
  Description of Artificial Sequence: Synthetic oligonucleotide
aaggggcuaucaggaagca

SEQ ID NO: 1264189 - RNA, 19 nt, Artificial Sequence
  Description of Artificial Sequence: Synthetic oligonucleotide
gagcuucgagaacuggcaa

SEQ ID NO: 1264190 - RNA, 19 nt, Artificial Sequence
  Description of Artificial Sequence: Synthetic oligonucleotide
uccacaaggugggaccaau

SEQ ID NO: 1264191 - RNA, 19 nt, Artificial Sequence
  Description of Artificial Sequence: Synthetic oligonucleotide
cuaugauaguguggcugug

SEQ ID NO: 1264192 - RNA, 19 nt, Artificial Sequence
  Description of Artificial Sequence: Synthetic oligonucleotide
ggacguguugaguuucuga

SEQ ID NO: 1264193 - RNA, 19 nt, Artificial Sequence
  Description of Artificial Sequence: Synthetic oligonucleotide
augucguugggcagggccu

SEQ ID NO: 1264194 - RNA, 19 nt, Artificial Sequence
  Description of Artificial Sequence: Synthetic oligonucleotide
auacgucucuacgguaaca

SEQ ID NO: 1264195 - RNA, 19 nt, Artificial Sequence
  Description of Artificial Sequence: Synthetic oligonucleotide
gauuaucugccuccguauu

SEQ ID NO: 1264196 - RNA, 19 nt, Artificial Sequence
  Description of Artificial Sequence: Synthetic oligonucleotide
ccaguuaguguggagggug

SEQ ID NO: 1264197 - RNA, 19 nt, Artificial Sequence
  Description of Artificial Sequence: Synthetic oligonucleotide
caguuaguguggaggguga

SEQ ID NO: 1264198 - RNA, 19 nt, Artificial Sequence
  Description of Artificial Sequence: Synthetic oligonucleotide
guaguggcaucaggccagg

SEQ ID NO: 1264199 - RNA, 19 nt, Artificial Sequence
  Description of Artificial Sequence: Synthetic oligonucleotide
gcagaguaacuacaagaaa

SEQ ID NO: 1264200 - RNA, 19 nt, Artificial Sequence
  Description of Artificial Sequence: Synthetic oligonucleotide
acaauccuacagccccgcu

SEQ ID NO: 1264201 - RNA, 19 nt, Artificial Sequence
  Description of Artificial Sequence: Synthetic oligonucleotide
uaucugccuccguauugau

SEQ ID NO: 1264202 - RNA, 19 nt, Artificial Sequence
  Description of Artificial Sequence: Synthetic oligonucleotide
cuuucgaaggucggucuga

SEQ ID NO: 1264203 - RNA, 19 nt, Artificial Sequence
  Description of Artificial Sequence: Synthetic oligonucleotide
cuuauccgauaaggacccg

SEQ ID NO: 1264204 - RNA, 19 nt, Artificial Sequence
  Description of Artificial Sequence: Synthetic oligonucleotide
ggaucccucgggcacucag

SEQ ID NO: 1264205 - RNA, 19 nt, Artificial Sequence
  Description of Artificial Sequence: Synthetic oligonucleotide
gucggagaaccagaacuca

SEQ ID NO: 1264206 - RNA, 19 nt, Artificial Sequence
  Description of Artificial Sequence: Synthetic oligonucleotide
cuucccauguugggagcag

SEQ ID NO: 1264207 - RNA, 19 nt, Artificial Sequence
  Description of Artificial Sequence: Synthetic oligonucleotide
ucaccuaggcaggcaggca

SEQ ID NO: 1264208 - RNA, 19 nt, Artificial Sequence
  Description of Artificial Sequence: Synthetic oligonucleotide
aucgcuccccaggugcauc

SEQ ID NO: 1264209 - RNA, 19 nt, Artificial Sequence
  Description of Artificial Sequence: Synthetic oligonucleotide
ucuaaccccguggccgugu

SEQ ID NO: 1264210 - RNA, 19 nt, Artificial Sequence
  Description of Artificial Sequence: Synthetic oligonucleotide
gcauacacucucaucggac

SEQ ID NO: 1264211 - RNA, 19 nt, Artificial Sequence
  Description of Artificial Sequence: Synthetic oligonucleotide
uccuccacuaaggggcuau

SEQ ID NO: 1264212 - RNA, 19 nt, Artificial Sequence
  Description of Artificial Sequence: Synthetic oligonucleotide
uuccgucuucccuccucca

SEQ ID NO: 1264213 - RNA, 19 nt, Artificial Sequence
  Description of Artificial Sequence: Synthetic oligonucleotide
gaagaaccacucggugaac

SEQ ID NO: 1264214 - RNA, 19 nt, Artificial Sequence
  Description of Artificial Sequence: Synthetic oligonucleotide
cuacuuacugcacccuucu

SEQ ID NO: 1264215 - RNA, 19 nt, Artificial Sequence
  Description of Artificial Sequence: Synthetic oligonucleotide
uacuuacugcacccuucuu

SEQ ID NO: 1264216 - RNA, 19 nt, Artificial Sequence
  Description of Artificial Sequence: Synthetic oligonucleotide
caauccuacagccccgcua

SEQ ID NO: 1264217 - RNA, 19 nt, Artificial Sequence
  Description of Artificial Sequence: Synthetic oligonucleotide
guuaauauucaggcaccgu

SEQ ID NO: 1264218 - RNA, 19 nt, Artificial Sequence
  Description of Artificial Sequence: Synthetic oligonucleotide
cagccauuuacaaggcaua

SEQ ID NO: 1264219 - RNA, 19 nt, Artificial Sequence
  Description of Artificial Sequence: Synthetic oligonucleotide
guggccgugucugguagug

SEQ ID NO: 1264220 - RNA, 19 nt, Artificial Sequence
  Description of Artificial Sequence: Synthetic oligonucleotide
gccucgcccacccugcucc

SEQ ID NO: 1264221 - RNA, 19 nt, Artificial Sequence
  Description of Artificial Sequence: Synthetic oligonucleotide
uaaggacccgucggagaac

SEQ ID NO: 1264222 - RNA, 19 nt, Artificial Sequence
  Description of Artificial Sequence: Synthetic oligonucleotide
ggugcauccaugaacugcu

SEQ ID NO: 1264223 - RNA, 19 nt, Artificial Sequence
  Description of Artificial Sequence: Synthetic oligonucleotide
uggccgugucugguagugg

SEQ ID NO: 1264224 - RNA, 19 nt, Artificial Sequence
  Description of Artificial Sequence: Synthetic oligonucleotide
agcuagcuagcugguuaag

SEQ ID NO: 1264225 - RNA, 19 nt, Artificial Sequence
  Description of Artificial Sequence: Synthetic oligonucleotide
gaggcagugugcuguggua

SEQ ID NO: 1264226 - RNA, 19 nt, Artificial Sequence
  Description of Artificial Sequence: Synthetic oligonucleotide
gcagcuagcuagcugguua

SEQ ID NO: 1264227 - RNA, 19 nt, Artificial Sequence
  Description of Artificial Sequence: Synthetic oligonucleotide
cauuccguaggcuucccau

SEQ ID NO: 1264228 - RNA, 19 nt, Artificial Sequence
  Description of Artificial Sequence: Synthetic oligonucleotide
gccauuuacaaggcauaug

SEQ ID NO: 1264229 - RNA, 19 nt, Artificial Sequence
  Description of Artificial Sequence: Synthetic oligonucleotide
cagaaagaugccacccucu

SEQ ID NO: 1264230 - RNA, 19 nt, Artificial Sequence
  Description of Artificial Sequence: Synthetic oligonucleotide
gugcugaauagaaugucgu

SEQ ID NO: 1264231 - RNA, 19 nt, Artificial Sequence
  Description of Artificial Sequence: Synthetic oligonucleotide
acuacucauugaagugacu

SEQ ID NO: 1264232 - RNA, 19 nt, Artificial Sequence
  Description of Artificial Sequence: Synthetic oligonucleotide
ucgguacaaugaccuccgu

SEQ ID NO: 1264233 - RNA, 19 nt, Artificial Sequence
  Description of Artificial Sequence: Synthetic oligonucleotide
gaaccagaacucauuccgu

SEQ ID NO: 1264234 - RNA, 19 nt, Artificial Sequence
  Description of Artificial Sequence: Synthetic oligonucleotide
ccgcauguugucuugccuc

SEQ ID NO: 1264235 - RNA, 19 nt, Artificial Sequence
  Description of Artificial Sequence: Synthetic oligonucleotide
caggugcauccaugaacug

SEQ ID NO: 1264236 - RNA, 19 nt, Artificial Sequence
  Description of Artificial Sequence: Synthetic oligonucleotide
cugguccccggaugaggag

SEQ ID NO: 1264237 - RNA, 19 nt, Artificial Sequence
  Description of Artificial Sequence: Synthetic oligonucleotide
ggacccgucggagaaccag

SEQ ID NO: 1264238 - RNA, 19 nt, Artificial Sequence
  Description of Artificial Sequence: Synthetic oligonucleotide
guggagggugaucgcuccc

SEQ ID NO: 1264239 - RNA, 19 nt, Artificial Sequence
  Description of Artificial Sequence: Synthetic oligonucleotide
agccccgcuauuguacaca

SEQ ID NO: 1264240 - RNA, 19 nt, Artificial Sequence
  Description of Artificial Sequence: Synthetic oligonucleotide
uccguaggcuucccauguu

SEQ ID NO: 1264241 - RNA, 19 nt, Artificial Sequence
  Description of Artificial Sequence: Synthetic oligonucleotide
gacccgucggagaaccaga

SEQ ID NO: 1264242 - RNA, 19 nt, Artificial Sequence
  Description of Artificial Sequence: Synthetic oligonucleotide
ggggacucuaguggggaag

SEQ ID NO: 1264243 - RNA, 19 nt, Artificial Sequence
  Description of Artificial Sequence: Synthetic oligonucleotide
aguuaguguggagggugau

SEQ ID NO: 1264244 - RNA, 19 nt, Artificial Sequence
  Description of Artificial Sequence: Synthetic oligonucleotide
aagugacuaccaacagguu

SEQ ID NO: 1264245 - RNA, 19 nt, Artificial Sequence
  Description of Artificial Sequence: Synthetic oligonucleotide
aacgcucgugcagcaucca

SEQ ID NO: 1264246 - RNA, 19 nt, Artificial Sequence
  Description of Artificial Sequence: Synthetic oligonucleotide
cguguuagccagcagcauc

SEQ ID NO: 1264247 - RNA, 19 nt, Artificial Sequence
  Description of Artificial Sequence: Synthetic oligonucleotide
caugucugauuaucugccu

SEQ ID NO: 1264248 - RNA, 19 nt, Artificial Sequence
  Description of Artificial Sequence: Synthetic oligonucleotide
caaggcauaugcaucucuu

SEQ ID NO: 1264249 - RNA, 19 nt, Artificial Sequence
  Description of Artificial Sequence: Synthetic oligonucleotide
gccccgcuauuguacacag

SEQ ID NO: 1264250 - RNA, 19 nt, Artificial Sequence
  Description of Artificial Sequence: Synthetic oligonucleotide
cugggcgguggcagucugc

SEQ ID NO: 1264251 - RNA, 19 nt, Artificial Sequence
  Description of Artificial Sequence: Synthetic oligonucleotide
guggugcugaauagaaugu

SEQ ID NO: 1264252 - RNA, 19 nt, Artificial Sequence
  Description of Artificial Sequence: Synthetic oligonucleotide
gucucuacgguaacagcgu

SEQ ID NO: 1264253 - RNA, 19 nt, Artificial Sequence
  Description of Artificial Sequence: Synthetic oligonucleotide
gguucccauagaacgaaaa

SEQ ID NO: 1264254 - RNA, 19 nt, Artificial Sequence
  Description of Artificial Sequence: Synthetic oligonucleotide
cagucuguuccgggugagc

SEQ ID NO: 1264255 - RNA, 19 nt, Artificial Sequence
  Description of Artificial Sequence: Synthetic oligonucleotide
ccuuucgaaggucggucug

SEQ ID NO: 1264256 - RNA, 19 nt, Artificial Sequence
  Description of Artificial Sequence: Synthetic oligonucleotide
cuccacuaaggggcuauca

SEQ ID NO: 1264257 - RNA, 19 nt, Artificial Sequence
  Description of Artificial Sequence: Synthetic oligonucleotide
cuaaccccguggccguguc

SEQ ID NO: 1264258 - RNA, 19 nt, Artificial Sequence
  Description of Artificial Sequence: Synthetic oligonucleotide
uguuccgggugagcucagu

SEQ ID NO: 1264259 - RNA, 19 nt, Artificial Sequence
  Description of Artificial Sequence: Synthetic oligonucleotide
ccgucggagaaccagaacu

SEQ ID NO: 1264260 - RNA, 19 nt, Artificial Sequence
  Description of Artificial Sequence: Synthetic oligonucleotide
ccuccauacagugcaggug

SEQ ID NO: 1264261 - RNA, 19 nt, Artificial Sequence
  Description of Artificial Sequence: Synthetic oligonucleotide
uaacagcguuugaguuagu

SEQ ID NO: 1264262 - RNA, 19 nt, Artificial Sequence
  Description of Artificial Sequence: Synthetic oligonucleotide
ggcaccguuuguuccugca

SEQ ID NO: 1264263 - RNA, 19 nt, Artificial Sequence
  Description of Artificial Sequence: Synthetic oligonucleotide
gguaggguggaguggugcu

SEQ ID NO: 1264264 - RNA, 19 nt, Artificial Sequence
  Description of Artificial Sequence: Synthetic oligonucleotide
cuacagccccgcuauugua

SEQ ID NO: 1264265 - RNA, 19 nt, Artificial Sequence
  Description of Artificial Sequence: Synthetic oligonucleotide
cagccgcauguugucuugc

SEQ ID NO: 1264266 - RNA, 19 nt, Artificial Sequence
  Description of Artificial Sequence: Synthetic oligonucleotide
gcuauuguacacagacuua

SEQ ID NO: 1264267 - RNA, 19 nt, Artificial Sequence
  Description of Artificial Sequence: Synthetic oligonucleotide
ggucucuucaaacgcucgu

SEQ ID NO: 1264268 - RNA, 19 nt, Artificial Sequence
  Description of Artificial Sequence: Synthetic oligonucleotide
cgaaaacuuccgucuuccc

SEQ ID NO: 1264269 - RNA, 19 nt, Artificial Sequence
  Description of Artificial Sequence: Synthetic oligonucleotide
cacuuggacuuauccgaua

SEQ ID NO: 1264270 - RNA, 19 nt, Artificial Sequence
  Description of Artificial Sequence: Synthetic oligonucleotide
cgguacaaugaccuccgug

SEQ ID NO: 1264271 - RNA, 19 nt, Artificial Sequence
  Description of Artificial Sequence: Synthetic oligonucleotide
ccgauaaggacccgucgga

SEQ ID NO: 1264272 - RNA, 19 nt, Artificial Sequence
  Description of Artificial Sequence: Synthetic oligonucleotide
cuacgguaacagcguuuga

SEQ ID NO: 1264273 - RNA, 19 nt, Artificial Sequence
  Description of Artificial Sequence: Synthetic oligonucleotide
gggaaggcagauugacucu

SEQ ID NO: 1264274 - RNA, 19 nt, Artificial Sequence
  Description of Artificial Sequence: Synthetic oligonucleotide
agagcaccuuuaacauuaa

SEQ ID NO: 1264275 - RNA, 19 nt, Artificial Sequence
  Description of Artificial Sequence: Synthetic oligonucleotide
gaaucaguucuagcugguu

SEQ ID NO: 1264276 - RNA, 19 nt, Artificial Sequence
  Description of Artificial Sequence: Synthetic oligonucleotide
ggaggcagugugcuguggu

SEQ ID NO: 1264277 - RNA, 19 nt, Artificial Sequence
  Description of Artificial Sequence: Synthetic oligonucleotide
aggggcuaucaggaagcau

SEQ ID NO: 1264278 - RNA, 19 nt, Artificial Sequence
  Description of Artificial Sequence: Synthetic oligonucleotide
gcguuugaguuaguguuaa

SEQ ID NO: 1264279 - RNA, 19 nt, Artificial Sequence
  Description of Artificial Sequence: Synthetic oligonucleotide
aucuaaccccguggccgug

SEQ ID NO: 1264280 - RNA, 19 nt, Artificial Sequence
  Description of Artificial Sequence: Synthetic oligonucleotide
cgcuauuguacacagacuu

SEQ ID NO: 1264281 - RNA, 19 nt, Artificial Sequence
  Description of Artificial Sequence: Synthetic oligonucleotide
agguucccauagaacgaaa

SEQ ID NO: 1264282 - RNA, 19 nt, Artificial Sequence
  Description of Artificial Sequence: Synthetic oligonucleotide
agcugggcgguggcagucu

SEQ ID NO: 1264283 - RNA, 19 nt, Artificial Sequence
  Description of Artificial Sequence: Synthetic oligonucleotide
gcaccguuuguuccugcaa

SEQ ID NO: 1264284 - RNA, 19 nt, Artificial Sequence
  Description of Artificial Sequence: Synthetic oligonucleotide
auccacaaggugggaccaa

SEQ ID NO: 1264285 - RNA, 19 nt, Artificial Sequence
  Description of Artificial Sequence: Synthetic oligonucleotide
cucuacgguaacagcguuu

SEQ ID NO: 1264286 - RNA, 19 nt, Artificial Sequence
  Description of Artificial Sequence: Synthetic oligonucleotide
cugcacccuucuuauugcu

SEQ ID NO: 1264287 - RNA, 19 nt, Artificial Sequence
  Description of Artificial Sequence: Synthetic oligonucleotide
cacucucaucggacaaugu

SEQ ID NO: 1264288 - RNA, 19 nt, Artificial Sequence
  Description of Artificial Sequence: Synthetic oligonucleotide
caacagguucagccauuua

SEQ ID NO: 1264289 - RNA, 19 nt, Artificial Sequence
  Description of Artificial Sequence: Synthetic oligonucleotide
accuccguggagacagguu

SEQ ID NO: 1264290 - RNA, 19 nt, Artificial Sequence
  Description of Artificial Sequence: Synthetic oligonucleotide
cccuccgguugcugcauac

SEQ ID NO: 1264291 - RNA, 19 nt, Artificial Sequence
  Description of Artificial Sequence: Synthetic oligonucleotide
gcugggcgguggcagucug

SEQ ID NO: 1264292 - RNA, 19 nt, Artificial Sequence
  Description of Artificial Sequence: Synthetic oligonucleotide
gguccccggaugaggagca

SEQ ID NO: 1264293 - RNA, 19 nt, Artificial Sequence
  Description of Artificial Sequence: Synthetic oligonucleotide
gggugaucgcuccccaggu

SEQ ID NO: 1264294 - RNA, 19 nt, Artificial Sequence
  Description of Artificial Sequence: Synthetic oligonucleotide
uugccaccggugggaucca

SEQ ID NO: 1264295 - RNA, 19 nt, Artificial Sequence
  Description of Artificial Sequence: Synthetic oligonucleotide
cccgucggagaaccagaac

SEQ ID NO: 1264296 - RNA, 19 nt, Artificial Sequence
  Description of Artificial Sequence: Synthetic oligonucleotide
ccuacagccccgcuauugu

SEQ ID NO: 1264297 - RNA, 19 nt, Artificial Sequence
  Description of Artificial Sequence: Synthetic oligonucleotide
ugccaccggugggauccac

SEQ ID NO: 1264298 - RNA, 19 nt, Artificial Sequence
  Description of Artificial Sequence: Synthetic oligonucleotide
cagugugcugugguagggu

SEQ ID NO: 1264299 - RNA, 19 nt, Artificial Sequence
  Description of Artificial Sequence: Synthetic oligonucleotide
cccuccauacagugcaggu

SEQ ID NO: 1264300 - RNA, 19 nt, Artificial Sequence
  Description of Artificial Sequence: Synthetic oligonucleotide
cggacaauguucgguacaa

SEQ ID NO: 1264301 - RNA, 19 nt, Artificial Sequence
  Description of Artificial Sequence: Synthetic oligonucleotide
gaucgcuccccaggugcau

SEQ ID NO: 1264302 - RNA, 19 nt, Artificial Sequence
  Description of Artificial Sequence: Synthetic oligonucleotide
ccucaggugcuggaccuca

SEQ ID NO: 1264303 - RNA, 19 nt, Artificial Sequence
  Description of Artificial Sequence: Synthetic oligonucleotide
aggaucccucgggcacuca

SEQ ID NO: 1264304 - RNA, 19 nt, Artificial Sequence
  Description of Artificial Sequence: Synthetic oligonucleotide
ccauacagugcaggugaaa

SEQ ID NO: 1264305 - RNA, 19 nt, Artificial Sequence
  Description of Artificial Sequence: Synthetic oligonucleotide
ccguuuguuccugcaaaua

SEQ ID NO: 1264306 - RNA, 19 nt, Artificial Sequence
  Description of Artificial Sequence: Synthetic oligonucleotide
gccaccggugggauccaca

SEQ ID NO: 1264307 - RNA, 19 nt, Artificial Sequence
  Description of Artificial Sequence: Synthetic oligonucleotide
gggaccaaucuaaccccgu

SEQ ID NO: 1264308 - RNA, 19 nt, Artificial Sequence
  Description of Artificial Sequence: Synthetic oligonucleotide
ccuccgguugcugcauaca

SEQ ID NO: 1264309 - RNA, 19 nt, Artificial Sequence
  Description of Artificial Sequence: Synthetic oligonucleotide
ggacaauguucgguacaau

SEQ ID NO: 1264310 - RNA, 19 nt, Artificial Sequence
  Description of Artificial Sequence: Synthetic oligonucleotide
cguuugaguuaguguuaaa

SEQ ID NO: 1264311 - RNA, 19 nt, Artificial Sequence
  Description of Artificial Sequence: Synthetic oligonucleotide
cugccuccguauugauuuu

SEQ ID NO: 1264312 - RNA, 19 nt, Artificial Sequence
  Description of Artificial Sequence: Synthetic oligonucleotide
ugccacccucuggucucuu

SEQ ID NO: 1264313 - RNA, 19 nt, Artificial Sequence
  Description of Artificial Sequence: Synthetic oligonucleotide
cgcccacccugcuccaguc

SEQ ID NO: 1264314 - RNA, 19 nt, Artificial Sequence
  Description of Artificial Sequence: Synthetic oligonucleotide
cccguggccgugucuggua

SEQ ID NO: 1264315 - RNA, 19 nt, Artificial Sequence
  Description of Artificial Sequence: Synthetic oligonucleotide
ccguggagacagguuccca

SEQ ID NO: 1264316 - RNA, 19 nt, Artificial Sequence
  Description of Artificial Sequence: Synthetic oligonucleotide
gcccacccugcuccagucu

SEQ ID NO: 1264317 - RNA, 19 nt, Artificial Sequence
  Description of Artificial Sequence: Synthetic oligonucleotide
cccaguuaguguggagggu

SEQ ID NO: 1264318 - RNA, 19 nt, Artificial Sequence
  Description of Artificial Sequence: Synthetic oligonucleotide
ccgugucugguaguggcau

SEQ ID NO: 1264319 - RNA, 19 nt, Artificial Sequence
  Description of Artificial Sequence: Synthetic oligonucleotide
cgguugcugcauacacucu

SEQ ID NO: 1264320 - RNA, 19 nt, Artificial Sequence
  Description of Artificial Sequence: Synthetic oligonucleotide
ccguguuagccagcagcau

SEQ ID NO: 1264321 - RNA, 19 nt, Artificial Sequence
  Description of Artificial Sequence: Synthetic oligonucleotide
cguggccgugucugguagu

SEQ ID NO: 1264322 - RNA, 19 nt, Artificial Sequence
  Description of Artificial Sequence: Synthetic oligonucleotide
ccccuccgguugcugcaua

SEQ ID NO: 1264323 - RNA, 19 nt, Artificial Sequence
  Description of Artificial Sequence: Synthetic oligonucleotide
ccgccucgcccacccugcu

SEQ ID NO: 1264324 - RNA, 19 nt, Artificial Sequence
  Description of Artificial Sequence: Synthetic oligonucleotide
aaaggaagguuccugauuc

SEQ ID NO: 1264325 - RNA, 19 nt, Artificial Sequence
  Description of Artificial Sequence: Synthetic oligonucleotide
uugccaaaguauaagaugg

SEQ ID NO: 1264326 - RNA, 19 nt, Artificial Sequence
  Description of Artificial Sequence: Synthetic oligonucleotide
uuuauugaacaacagauuu

SEQ ID NO: 1264327 - RNA, 19 nt, Artificial Sequence
  Description of Artificial Sequence: Synthetic oligonucleotide
uauaagaugguuuccagcu

SEQ ID NO: 1264328 - RNA, 19 nt, Artificial Sequence
  Description of Artificial Sequence: Synthetic oligonucleotide
guaguaaucaaacuuggcc

SEQ ID NO: 1264329 - RNA, 19 nt, Artificial Sequence
  Description of Artificial Sequence: Synthetic oligonucleotide
ugauuaaagaagccaagag

SEQ ID NO: 1264330 - RNA, 19 nt, Artificial Sequence
  Description of Artificial Sequence: Synthetic oligonucleotide
ugauucauacccacgauug

SEQ ID NO: 1264331 - RNA, 19 nt, Artificial Sequence
  Description of Artificial Sequence: Synthetic oligonucleotide
guucacaagauccacaacc

SEQ ID NO: 1264332 - RNA, 19 nt, Artificial Sequence
  Description of Artificial Sequence: Synthetic oligonucleotide
aaaaugucacuucgggagg

SEQ ID NO: 1264333 - RNA, 19 nt, Artificial Sequence
  Description of Artificial Sequence: Synthetic oligonucleotide
auucuuacccacccaagcc

SEQ ID NO: 1264334 - RNA, 19 nt, Artificial Sequence
  Description of Artificial Sequence: Synthetic oligonucleotide
gaagcgaacaacugcaugc

SEQ ID NO: 1264335 - RNA, 19 nt, Artificial Sequence
  Description of Artificial Sequence: Synthetic oligonucleotide
caagauaccagucaccagc

SEQ ID NO: 1264336 - RNA, 19 nt, Artificial Sequence
  Description of Artificial Sequence: Synthetic oligonucleotide
auugguaugcuuuguagag

SEQ ID NO: 1264337 - RNA, 19 nt, Artificial Sequence
  Description of Artificial Sequence: Synthetic oligonucleotide
cuuauagagggccuggucc

SEQ ID NO: 1264338 - RNA, 19 nt, Artificial Sequence
  Description of Artificial Sequence: Synthetic oligonucleotide
ugcauugauguucagucgc

SEQ ID NO: 1264339 - RNA, 19 nt, Artificial Sequence
  Description of Artificial Sequence: Synthetic oligonucleotide
gaagaggcuacuuccuucg

SEQ ID NO: 1264340 - RNA, 19 nt, Artificial Sequence
  Description of Artificial Sequence: Synthetic oligonucleotide
ugcuuuauugaacaacaga

SEQ ID NO: 1264341 - RNA, 19 nt, Artificial Sequence
  Description of Artificial Sequence: Synthetic oligonucleotide
ugagauagcuggaccaggg

SEQ ID NO: 1264342 - RNA, 19 nt, Artificial Sequence
  Description of Artificial Sequence: Synthetic oligonucleotide
agauccacaaccucgucag

SEQ ID NO: 1264343 - RNA, 19 nt, Artificial Sequence
  Description of Artificial Sequence: Synthetic oligonucleotide
uguugcacaaccucagcag

SEQ ID NO: 1264344 - RNA, 19 nt, Artificial Sequence
  Description of Artificial Sequence: Synthetic oligonucleotide
ugaguaguuggccuggucu

SEQ ID NO: 1264345 - RNA, 19 nt, Artificial Sequence
  Description of Artificial Sequence: Synthetic oligonucleotide
guagaguuguuccagaauc

SEQ ID NO: 1264346 - RNA, 19 nt, Artificial Sequence
  Description of Artificial Sequence: Synthetic oligonucleotide
auaacaggcauguaguaau

SEQ ID NO: 1264347 - RNA, 19 nt, Artificial Sequence
  Description of Artificial Sequence: Synthetic oligonucleotide
uggacuugaagaugagagg

SEQ ID NO: 1264348 - RNA, 19 nt, Artificial Sequence
  Description of Artificial Sequence: Synthetic oligonucleotide
uuggucaucugguagucag

SEQ ID NO: 1264349 - RNA, 19 nt, Artificial Sequence
  Description of Artificial Sequence: Synthetic oligonucleotide
gauuaaagaagccaagagu

SEQ ID NO: 1264350 - RNA, 19 nt, Artificial Sequence
  Description of Artificial Sequence: Synthetic oligonucleotide
ugaaugccacuuuucacag

SEQ ID NO: 1264351 - RNA, 19 nt, Artificial Sequence
  Description of Artificial Sequence: Synthetic oligonucleotide
uccugauucauacccacga

SEQ ID NO: 1264352 - RNA, 19 nt, Artificial Sequence
  Description of Artificial Sequence: Synthetic oligonucleotide
guggacuugaagaugagag

SEQ ID NO: 1264353 - RNA, 19 nt, Artificial Sequence
  Description of Artificial Sequence: Synthetic oligonucleotide
acaaacucguaggcgaucc

SEQ ID NO: 1264354 - RNA, 19 nt, Artificial Sequence
  Description of Artificial Sequence: Synthetic oligonucleotide
uucauucuuacccacccaa

SEQ ID NO: 1264355 - RNA, 19 nt, Artificial Sequence
  Description of Artificial Sequence: Synthetic oligonucleotide
uucuuacccacccaagcca

SEQ ID NO: 1264356 - RNA, 19 nt, Artificial Sequence
  Description of Artificial Sequence: Synthetic oligonucleotide
agugcauguuuucuuguag

SEQ ID NO: 1264357 - RNA, 19 nt, Artificial Sequence
  Description of Artificial Sequence: Synthetic oligonucleotide
agugucacagaguugugca

SEQ ID NO: 1264358 - RNA, 19 nt, Artificial Sequence
  Description of Artificial Sequence: Synthetic oligonucleotide
ucugaugguacuucuuaca

SEQ ID NO: 1264359 - RNA, 19 nt, Artificial Sequence
  Description of Artificial Sequence: Synthetic oligonucleotide
guagcguacuuccacauac

SEQ ID NO: 1264360 - RNA, 19 nt, Artificial Sequence
  Description of Artificial Sequence: Synthetic oligonucleotide
uucuugccaaaguauaaga

SEQ ID NO: 1264361 - RNA, 19 nt, Artificial Sequence
  Description of Artificial Sequence: Synthetic oligonucleotide
uucauacccacgauuggca

SEQ ID NO: 1264362 - RNA, 19 nt, Artificial Sequence
  Description of Artificial Sequence: Synthetic oligonucleotide
uuauugaacaacagauuuu

SEQ ID NO: 1264363 - RNA, 19 nt, Artificial Sequence
  Description of Artificial Sequence: Synthetic oligonucleotide
ucuuucuugaagcgaacaa

SEQ ID NO: 1264364 - RNA, 19 nt, Artificial Sequence
  Description of Artificial Sequence: Synthetic oligonucleotide
ucacagcucccucauaggc

SEQ ID NO: 1264365 - RNA, 19 nt, Artificial Sequence
  Description of Artificial Sequence: Synthetic oligonucleotide
aaagugcauguuuucuugu

SEQ ID NO: 1264366 - RNA, 19 nt, Artificial Sequence
  Description of Artificial Sequence: Synthetic oligonucleotide
aaaugucacuucgggaggg

SEQ ID NO: 1264367 - RNA, 19 nt, Artificial Sequence
  Description of Artificial Sequence: Synthetic oligonucleotide
cauucuuacccacccaagc

SEQ ID NO: 1264368 - RNA, 19 nt, Artificial Sequence
  Description of Artificial Sequence: Synthetic oligonucleotide
ggacuugaagaugagaggg

SEQ ID NO: 1264369 - RNA, 19 nt, Artificial Sequence
  Description of Artificial Sequence: Synthetic oligonucleotide
ucuuacccacccaagccag

SEQ ID NO: 1264370 - RNA, 19 nt, Artificial Sequence
  Description of Artificial Sequence: Synthetic oligonucleotide
uccguuuugggaucccagg

SEQ ID NO: 1264371 - RNA, 19 nt, Artificial Sequence
  Description of Artificial Sequence: Synthetic oligonucleotide
uugucuugaguacauccac

SEQ ID NO: 1264372 - RNA, 19 nt, Artificial Sequence
  Description of Artificial Sequence: Synthetic oligonucleotide
ucuccacaaacucguaggc

SEQ ID NO: 1264373 - RNA, 19 nt, Artificial Sequence
  Description of Artificial Sequence: Synthetic oligonucleotide
ucauucuuacccacccaag

SEQ ID NO: 1264374 - RNA, 19 nt, Artificial Sequence
  Description of Artificial Sequence: Synthetic oligonucleotide
uccacaaccucgucagggg

SEQ ID NO: 1264375 - RNA, 19 nt, Artificial Sequence
  Description of Artificial Sequence: Synthetic oligonucleotide
aggacucugauuaaagaag

SEQ ID NO: 1264376 - RNA, 19 nt, Artificial Sequence
  Description of Artificial Sequence: Synthetic oligonucleotide
ugcugcaagauaccaguca

SEQ ID NO: 1264377 - RNA, 19 nt, Artificial Sequence
  Description of Artificial Sequence: Synthetic oligonucleotide
ugagugaguaguuggccug

SEQ ID NO: 1264378 - RNA, 19 nt, Artificial Sequence
  Description of Artificial Sequence: Synthetic oligonucleotide
cuuucuugaagcgaacaac

SEQ ID NO: 1264379 - RNA, 19 nt, Artificial Sequence
  Description of Artificial Sequence: Synthetic oligonucleotide
cugaugguacuucuuacac

SEQ ID NO: 1264380 - RNA, 19 nt, Artificial Sequence
  Description of Artificial Sequence: Synthetic oligonucleotide
ucguaggcgauccuuuuga

SEQ ID NO: 1264381 - RNA, 19 nt, Artificial Sequence
  Description of Artificial Sequence: Synthetic oligonucleotide
auacccacgauuggcaagg

SEQ ID NO: 1264382 - RNA, 19 nt, Artificial Sequence
  Description of Artificial Sequence: Synthetic oligonucleotide
uagaguuguuccagaaucu

SEQ ID NO: 1264383 - RNA, 19 nt, Artificial Sequence
  Description of Artificial Sequence: Synthetic oligonucleotide
accgugugcugcaagauac

SEQ ID NO: 1264384 - RNA, 19 nt, Artificial Sequence
  Description of Artificial Sequence: Synthetic oligonucleotide
uuccugauucauacccacg

SEQ ID NO: 1264385 - RNA, 19 nt, Artificial Sequence
  Description of Artificial Sequence: Synthetic oligonucleotide
ucuggaaggaaugaaggua

SEQ ID NO: 1264386 - RNA, 19 nt, Artificial Sequence
  Description of Artificial Sequence: Synthetic oligonucleotide
uugaaagcgggcgucuggg

SEQ ID NO: 1264387 - RNA, 19 nt, Artificial Sequence
  Description of Artificial Sequence: Synthetic oligonucleotide
uguccaacccuguuugucu

SEQ ID NO: 1264388 - RNA, 19 nt, Artificial Sequence
  Description of Artificial Sequence: Synthetic oligonucleotide
uguagaguuguuccagaau

SEQ ID NO: 1264389 - RNA, 19 nt, Artificial Sequence
  Description of Artificial Sequence: Synthetic oligonucleotide
aguucaggagcaugugcuc

SEQ ID NO: 1264390 - RNA, 19 nt, Artificial Sequence
  Description of Artificial Sequence: Synthetic oligonucleotide
ugugagauagcuggaccag

SEQ ID NO: 1264391 - RNA, 19 nt, Artificial Sequence
  Description of Artificial Sequence: Synthetic oligonucleotide
cucgucaggggugacaucc

SEQ ID NO: 1264392 - RNA, 19 nt, Artificial Sequence
  Description of Artificial Sequence: Synthetic oligonucleotide
uucggucugguuccagggg

SEQ ID NO: 1264393 - RNA, 19 nt, Artificial Sequence
  Description of Artificial Sequence: Synthetic oligonucleotide
ugaguacauccacagccug

SEQ ID NO: 1264394 - RNA, 19 nt, Artificial Sequence
  Description of Artificial Sequence: Synthetic oligonucleotide
gugugugguagccaugucc

SEQ ID NO: 1264395 - RNA, 19 nt, Artificial Sequence
  Description of Artificial Sequence: Synthetic oligonucleotide
aacaacugcaugcuccguu

SEQ ID NO: 1264396 - RNA, 19 nt, Artificial Sequence
  Description of Artificial Sequence: Synthetic oligonucleotide
aaagcgggcgucugggcca

SEQ ID NO: 1264397 - RNA, 19 nt, Artificial Sequence
  Description of Artificial Sequence: Synthetic oligonucleotide
uuaaaggaagguuccugau

SEQ ID NO: 1264398 - RNA, 19 nt, Artificial Sequence
  Description of Artificial Sequence: Synthetic oligonucleotide
agaguuguuccagaaucuc

SEQ ID NO: 1264399 - RNA, 19 nt, Artificial Sequence
  Description of Artificial Sequence: Synthetic oligonucleotide
cuucuugccaaaguauaag

SEQ ID NO: 1264400 - RNA, 19 nt, Artificial Sequence
  Description of Artificial Sequence: Synthetic oligonucleotide
uucugaugguacuucuuac

SEQ ID NO: 1264401 - RNA, 19 nt, Artificial Sequence
  Description of Artificial Sequence: Synthetic oligonucleotide
ucuuauagagggccugguc

SEQ ID NO: 1264402 - RNA, 19 nt, Artificial Sequence
  Description of Artificial Sequence: Synthetic oligonucleotide
cuucggucugguuccaggg

SEQ ID NO: 1264403 - RNA, 19 nt, Artificial Sequence
  Description of Artificial Sequence: Synthetic oligonucleotide
gcgccugugagauagcugg

SEQ ID NO: 1264404 - RNA, 19 nt, Artificial Sequence
  Description of Artificial Sequence: Synthetic oligonucleotide
uuacccacccaagccagcg

SEQ ID NO: 1264405 - RNA, 19 nt, Artificial Sequence
  Description of Artificial Sequence: Synthetic oligonucleotide
guugaaagcgggcgucugg

SEQ ID NO: 1264406 - RNA, 19 nt, Artificial Sequence
  Description of Artificial Sequence: Synthetic oligonucleotide
cuucgauggucucaucacc

SEQ ID NO: 1264407 - RNA, 19 nt, Artificial Sequence
  Description of Artificial Sequence: Synthetic oligonucleotide
uaaucaaacuuggccagga

SEQ ID NO: 1264408 - RNA, 19 nt, Artificial Sequence
  Description of Artificial Sequence: Synthetic oligonucleotide
aaugaagguaagaguguca

SEQ ID NO: 1264409 - RNA, 19 nt, Artificial Sequence
  Description of Artificial Sequence: Synthetic oligonucleotide
uagccucuuauagagggcc

SEQ ID NO: 1264410 - RNA, 19 nt, Artificial Sequence
  Description of Artificial Sequence: Synthetic oligonucleotide
gucccguuuggucaucugg

SEQ ID NO: 1264411 - RNA, 19 nt, Artificial Sequence
  Description of Artificial Sequence: Synthetic oligonucleotide
cugcauugauguucagucg

SEQ ID NO: 1264412 - RNA, 19 nt, Artificial Sequence
  Description of Artificial Sequence: Synthetic oligonucleotide
ugucacagaguugugcaga

SEQ ID NO: 1264413 - RNA, 19 nt, Artificial Sequence
  Description of Artificial Sequence: Synthetic oligonucleotide
ucggucugguuccagggga

SEQ ID NO: 1264414 - RNA, 19 nt, Artificial Sequence
  Description of Artificial Sequence: Synthetic oligonucleotide
guaagagugucacagaguu

SEQ ID NO: 1264415 - RNA, 19 nt, Artificial Sequence
  Description of Artificial Sequence: Synthetic oligonucleotide
gauuggguccacuuuggaa

SEQ ID NO: 1264416 - RNA, 19 nt, Artificial Sequence
  Description of Artificial Sequence: Synthetic oligonucleotide
gauagcuggaccaggggca

SEQ ID NO: 1264417 - RNA, 19 nt, Artificial Sequence
  Description of Artificial Sequence: Synthetic oligonucleotide
ucgcuugaauucuuccuca

SEQ ID NO: 1264418 - RNA, 19 nt, Artificial Sequence
  Description of Artificial Sequence: Synthetic oligonucleotide
uuuagccuuaaaggaaggu

SEQ ID NO: 1264419 - RNA, 19 nt, Artificial Sequence
  Description of Artificial Sequence: Synthetic oligonucleotide
aagugcauguuuucuugua

SEQ ID NO: 1264420 - RNA, 19 nt, Artificial Sequence
  Description of Artificial Sequence: Synthetic oligonucleotide
gaauuggccagcaggugug

SEQ ID NO: 1264421 - RNA, 19 nt, Artificial Sequence
  Description of Artificial Sequence: Synthetic oligonucleotide
aaucaaacuuggccaggaa

SEQ ID NO: 1264422 - RNA, 19 nt, Artificial Sequence
  Description of Artificial Sequence: Synthetic oligonucleotide
uccccuucggucugguucc

SEQ ID NO: 1264423 - RNA, 19 nt, Artificial Sequence
  Description of Artificial Sequence: Synthetic oligonucleotide
acccuguuugucuugagua

SEQ ID NO: 1264424 - RNA, 19 nt, Artificial Sequence
  Description of Artificial Sequence: Synthetic oligonucleotide
aagauaccagucaccagcu

SEQ ID NO: 1264425 - RNA, 19 nt, Artificial Sequence
  Description of Artificial Sequence: Synthetic oligonucleotide
guugagugaguaguuggcc

SEQ ID NO: 1264426 - RNA, 19 nt, Artificial Sequence
  Description of Artificial Sequence: Synthetic oligonucleotide
uuguagaguuguuccagaa

SEQ ID NO: 1264427 - RNA, 19 nt, Artificial Sequence
  Description of Artificial Sequence: Synthetic oligonucleotide
guaaucaaacuuggccagg

SEQ ID NO: 1264428 - RNA, 19 nt, Artificial Sequence
  Description of Artificial Sequence: Synthetic oligonucleotide
gucgcuugaauucuuccuc

SEQ ID NO: 1264429 - RNA, 19 nt, Artificial Sequence
  Description of Artificial Sequence: Synthetic oligonucleotide
caguaaagcccaugucccg

SEQ ID NO: 1264430 - RNA, 19 nt, Artificial Sequence
  Description of Artificial Sequence: Synthetic oligonucleotide
uggacgguacggugaaugc

SEQ ID NO: 1264431 - RNA, 19 nt, Artificial Sequence
  Description of Artificial Sequence: Synthetic oligonucleotide
aagcgaacaacugcaugcu

SEQ ID NO: 1264432 - RNA, 19 nt, Artificial Sequence
  Description of Artificial Sequence: Synthetic oligonucleotide
cccacgauuggcaaggccc

SEQ ID NO: 1264433 - RNA, 19 nt, Artificial Sequence
  Description of Artificial Sequence: Synthetic oligonucleotide
guaggcgauccuuuugaug

SEQ ID NO: 1264434 - RNA, 19 nt, Artificial Sequence
  Description of Artificial Sequence: Synthetic oligonucleotide
ugccaaaguauaagauggu

SEQ ID NO: 1264435 - RNA, 19 nt, Artificial Sequence
  Description of Artificial Sequence: Synthetic oligonucleotide
uaacaggcauguaguaauc

SEQ ID NO: 1264436 - RNA, 19 nt, Artificial Sequence
  Description of Artificial Sequence: Synthetic oligonucleotide
ugcaugcuccguuuuggga

SEQ ID NO: 1264437 - RNA, 19 nt, Artificial Sequence
  Description of Artificial Sequence: Synthetic oligonucleotide
auguccaacccuguuuguc

SEQ ID NO: 1264438 - RNA, 19 nt, Artificial Sequence
  Description of Artificial Sequence: Synthetic oligonucleotide
cugauuaaagaagccaaga

SEQ ID NO: 1264439 - RNA, 19 nt, Artificial Sequence
  Description of Artificial Sequence: Synthetic oligonucleotide
acccacgauuggcaaggcc

SEQ ID NO: 1264440 - RNA, 19 nt, Artificial Sequence
  Description of Artificial Sequence: Synthetic oligonucleotide
gacgguacggugaaugcca

SEQ ID NO: 1264441 - RNA, 19 nt, Artificial Sequence
  Description of Artificial Sequence: Synthetic oligonucleotide
cugugagauagcuggacca

SEQ ID NO: 1264442 - RNA, 19 nt, Artificial Sequence
  Description of Artificial Sequence: Synthetic oligonucleotide
gaccacauucaccgugugc

SEQ ID NO: 1264443 - RNA, 19 nt, Artificial Sequence
  Description of Artificial Sequence: Synthetic oligonucleotide
uacggugaaugccacuuuu

SEQ ID NO: 1264444 - RNA, 19 nt, Artificial Sequence
  Description of Artificial Sequence: Synthetic oligonucleotide
uggacgugcagcucuacuu

SEQ ID NO: 1264445 - RNA, 19 nt, Artificial Sequence
  Description of Artificial Sequence: Synthetic oligonucleotide
agcgaacaacugcaugcuc

SEQ ID NO: 1264446 - RNA, 19 nt, Artificial Sequence
  Description of Artificial Sequence: Synthetic oligonucleotide
ugcagcccgcgauaacagg

SEQ ID NO: 1264447 - RNA, 19 nt, Artificial Sequence
  Description of Artificial Sequence: Synthetic oligonucleotide
uugaccccgaauucuugcu

SEQ ID NO: 1264448 - RNA, 19 nt, Artificial Sequence
  Description of Artificial Sequence: Synthetic oligonucleotide
gacgugcagcucuacuuug

SEQ ID NO: 1264449 - RNA, 19 nt, Artificial Sequence
  Description of Artificial Sequence: Synthetic oligonucleotide
ucauacccacgauuggcaa

SEQ ID NO: 1264450 - RNA, 19 nt, Artificial Sequence
  Description of Artificial Sequence: Synthetic oligonucleotide
acaagauccacaaccucgu

SEQ ID NO: 1264451 - RNA, 19 nt, Artificial Sequence
  Description of Artificial Sequence: Synthetic oligonucleotide
ggguugguggcgcauacag

SEQ ID NO: 1264452 - RNA, 19 nt, Artificial Sequence
  Description of Artificial Sequence: Synthetic oligonucleotide
uggcgcauacagcacagua

SEQ ID NO: 1264453 - RNA, 19 nt, Artificial Sequence
  Description of Artificial Sequence: Synthetic oligonucleotide
gauuggcaaggccccuggg

SEQ ID NO: 1264454 - RNA, 19 nt, Artificial Sequence
  Description of Artificial Sequence: Synthetic oligonucleotide
uagcguacuuccacauaca

SEQ ID NO: 1264455 - RNA, 19 nt, Artificial Sequence
  Description of Artificial Sequence: Synthetic oligonucleotide
uugguaugcuuuguagagu

SEQ ID NO: 1264456 - RNA, 19 nt, Artificial Sequence
  Description of Artificial Sequence: Synthetic oligonucleotide
cuuguugaaagcgggcguc

SEQ ID NO: 1264457 - RNA, 19 nt, Artificial Sequence
  Description of Artificial Sequence: Synthetic oligonucleotide
uguagcguacuuccacaua

SEQ ID NO: 1264458 - RNA, 19 nt, Artificial Sequence
  Description of Artificial Sequence: Synthetic oligonucleotide
cugcaugcuccguuuuggg

SEQ ID NO: 1264459 - RNA, 19 nt, Artificial Sequence
  Description of Artificial Sequence: Synthetic oligonucleotide
acauucaccgugugcugca

SEQ ID NO: 1264460 - RNA, 19 nt, Artificial Sequence
  Description of Artificial Sequence: Synthetic oligonucleotide
ggcuuguugaaagcgggcg

SEQ ID NO: 1264461 - RNA, 19 nt, Artificial Sequence
  Description of Artificial Sequence: Synthetic oligonucleotide
ggucucaucaccagccagg

SEQ ID NO: 1264462 - RNA, 19 nt, Artificial Sequence
  Description of Artificial Sequence: Synthetic oligonucleotide
gauccacaaccucgucagg

SEQ ID NO: 1264463 - RNA, 19 nt, Artificial Sequence
  Description of Artificial Sequence: Synthetic oligonucleotide
uugaagcgaacaacugcau

SEQ ID NO: 1264464 - RNA, 19 nt, Artificial Sequence
  Description of Artificial Sequence: Synthetic oligonucleotide
gucgucuguguugagugag

SEQ ID NO: 1264465 - RNA, 19 nt, Artificial Sequence
  Description of Artificial Sequence: Synthetic oligonucleotide
ggggauuggguccacuuug

SEQ ID NO: 1264466 - RNA, 19 nt, Artificial Sequence
  Description of Artificial Sequence: Synthetic oligonucleotide
cacaguauggaccggaccu

SEQ ID NO: 1264467 - RNA, 19 nt, Artificial Sequence
  Description of Artificial Sequence: Synthetic oligonucleotide
aaacucguaggcgauccuu

SEQ ID NO: 1264468 - RNA, 19 nt, Artificial Sequence
  Description of Artificial Sequence: Synthetic oligonucleotide
aggguggacuugaagauga

SEQ ID NO: 1264469 - RNA, 19 nt, Artificial Sequence
  Description of Artificial Sequence: Synthetic oligonucleotide
ugguagccauguccaaccc

SEQ ID NO: 1264470 - RNA, 19 nt, Artificial Sequence
  Description of Artificial Sequence: Synthetic oligonucleotide
ugaccccgaauucuugcuc

SEQ ID NO: 1264471 - RNA, 19 nt, Artificial Sequence
  Description of Artificial Sequence: Synthetic oligonucleotide
cacauucaccgugugcugc

SEQ ID NO: 1264472 - RNA, 19 nt, Artificial Sequence
  Description of Artificial Sequence: Synthetic oligonucleotide
cacauacaccacacccucc

SEQ ID NO: 1264473 - RNA, 19 nt, Artificial Sequence
  Description of Artificial Sequence: Synthetic oligonucleotide
gggucgucuguguugagug

SEQ ID NO: 1264474 - RNA, 19 nt, Artificial Sequence
  Description of Artificial Sequence: Synthetic oligonucleotide
agugugugguagccauguc

SEQ ID NO: 1264475 - RNA, 19 nt, Artificial Sequence
  Description of Artificial Sequence: Synthetic oligonucleotide
uuggguugguggcgcauac

SEQ ID NO: 1264476 - RNA, 19 nt, Artificial Sequence
  Description of Artificial Sequence: Synthetic oligonucleotide
cgcgauaacaggcauguag

SEQ ID NO: 1264477 - RNA, 19 nt, Artificial Sequence
  Description of Artificial Sequence: Synthetic oligonucleotide
cuuguaguagccucuuaua

SEQ ID NO: 1264478 - RNA, 19 nt, Artificial Sequence
  Description of Artificial Sequence: Synthetic oligonucleotide
agagggucgucuguguuga

SEQ ID NO: 1264479 - RNA, 19 nt, Artificial Sequence
  Description of Artificial Sequence: Synthetic oligonucleotide
uguugaaagcgggcgucug

SEQ ID NO: 1264480 - RNA, 19 nt, Artificial Sequence
  Description of Artificial Sequence: Synthetic oligonucleotide
cauggugccgagugugcac

SEQ ID NO: 1264481 - RNA, 19 nt, Artificial Sequence
  Description of Artificial Sequence: Synthetic oligonucleotide
aguacauccacagccuguu

SEQ ID NO: 1264482 - RNA, 19 nt, Artificial Sequence
  Description of Artificial Sequence: Synthetic oligonucleotide
aaugucacuucgggaggga

SEQ ID NO: 1264483 - RNA, 19 nt, Artificial Sequence
  Description of Artificial Sequence: Synthetic oligonucleotide
ugggcccuagccagaacac

SEQ ID NO: 1264484 - RNA, 19 nt, Artificial Sequence
  Description of Artificial Sequence: Synthetic oligonucleotide
gcgaacaacugcaugcucc

SEQ ID NO: 1264485 - RNA, 19 nt, Artificial Sequence
  Description of Artificial Sequence: Synthetic oligonucleotide
agcucccucauaggcuugc

SEQ ID NO: 1264486 - RNA, 19 nt, Artificial Sequence
  Description of Artificial Sequence: Synthetic oligonucleotide
caugcuccguuuugggauc

SEQ ID NO: 1264487 - RNA, 19 nt, Artificial Sequence
  Description of Artificial Sequence: Synthetic oligonucleotide
ucgucuguguugagugagu

SEQ ID NO: 1264488 - RNA, 19 nt, Artificial Sequence
  Description of Artificial Sequence: Synthetic oligonucleotide
ugagagggucgucuguguu

SEQ ID NO: 1264489 - RNA, 19 nt, Artificial Sequence
  Description of Artificial Sequence: Synthetic oligonucleotide
uuuggucaucugguaguca

SEQ ID NO: 1264490 - RNA, 19 nt, Artificial Sequence
  Description of Artificial Sequence: Synthetic oligonucleotide
aggcuugcacauguccugg

SEQ ID NO: 1264491 - RNA, 19 nt, Artificial Sequence
  Description of Artificial Sequence: Synthetic oligonucleotide
acggugaaugccacuuuuc

SEQ ID NO: 1264492 - RNA, 19 nt, Artificial Sequence
  Description of Artificial Sequence: Synthetic oligonucleotide
uugguggcgcauacagcac

SEQ ID NO: 1264493 - RNA, 19 nt, Artificial Sequence
  Description of Artificial Sequence: Synthetic oligonucleotide
auagcuggaccaggggcag

SEQ ID NO: 1264494 - RNA, 19 nt, Artificial Sequence
  Description of Artificial Sequence: Synthetic oligonucleotide
uacacagcuccaacaccuc

SEQ ID NO: 1264495 - RNA, 19 nt, Artificial Sequence
  Description of Artificial Sequence: Synthetic oligonucleotide
ucgggagggaaugucccug

SEQ ID NO: 1264496 - RNA, 19 nt, Artificial Sequence
  Description of Artificial Sequence: Synthetic oligonucleotide
cuuacccacccaagccagc

SEQ ID NO: 1264497 - RNA, 19 nt, Artificial Sequence
  Description of Artificial Sequence: Synthetic oligonucleotide
ucauaggcuugcacauguc

SEQ ID NO: 1264498 - RNA, 19 nt, Artificial Sequence
  Description of Artificial Sequence: Synthetic oligonucleotide
augguacuucuuacacagc

SEQ ID NO: 1264499 - RNA, 19 nt, Artificial Sequence
  Description of Artificial Sequence: Synthetic oligonucleotide
uucgggagggaaugucccu

SEQ ID NO: 1264500 - RNA, 19 nt, Artificial Sequence
  Description of Artificial Sequence: Synthetic oligonucleotide
cagccuguugcacaaccuc

SEQ ID NO: 1264501 - RNA, 19 nt, Artificial Sequence
  Description of Artificial Sequence: Synthetic oligonucleotide
uuguugaaagcgggcgucu

SEQ ID NO: 1264502 - RNA, 19 nt, Artificial Sequence
  Description of Artificial Sequence: Synthetic oligonucleotide
guaugcuuuguagaguugu

SEQ ID NO: 1264503 - RNA, 19 nt, Artificial Sequence
  Description of Artificial Sequence: Synthetic oligonucleotide
gugccgagugugcaccccg

SEQ ID NO: 1264504 - RNA, 19 nt, Artificial Sequence
  Description of Artificial Sequence: Synthetic oligonucleotide
agcauggacgguacgguga

SEQ ID NO: 1264505 - RNA, 19 nt, Artificial Sequence
  Description of Artificial Sequence: Synthetic oligonucleotide
cagcauggggccccaagac

SEQ ID NO: 1264506 - RNA, 19 nt, Artificial Sequence
  Description of Artificial Sequence: Synthetic oligonucleotide
aacucguaggcgauccuuu

SEQ ID NO: 1264507 - RNA, 19 nt, Artificial Sequence
  Description of Artificial Sequence: Synthetic oligonucleotide
ugcgcagccccuccacugu

SEQ ID NO: 1264508 - RNA, 19 nt, Artificial Sequence
  Description of Artificial Sequence: Synthetic oligonucleotide
cauccacaggcugaggcuc

SEQ ID NO: 1264509 - RNA, 19 nt, Artificial Sequence
  Description of Artificial Sequence: Synthetic oligonucleotide
cgaacaacugcaugcuccg

SEQ ID NO: 1264510 - RNA, 19 nt, Artificial Sequence
  Description of Artificial Sequence: Synthetic oligonucleotide
ccuucgauggucucaucac

SEQ ID NO: 1264511 - RNA, 19 nt, Artificial Sequence
  Description of Artificial Sequence: Synthetic oligonucleotide
cuucaggggaccugcccuc

SEQ ID NO: 1264512 - RNA, 19 nt, Artificial Sequence
  Description of Artificial Sequence: Synthetic oligonucleotide
cagcauggacgguacggug

SEQ ID NO: 1264513 - RNA, 19 nt, Artificial Sequence
  Description of Artificial Sequence: Synthetic oligonucleotide
guucaggagcaugugcuca

SEQ ID NO: 1264514 - RNA, 19 nt, Artificial Sequence
  Description of Artificial Sequence: Synthetic oligonucleotide
aucaccagccaggucgaug

SEQ ID NO: 1264515 - RNA, 19 nt, Artificial Sequence
  Description of Artificial Sequence: Synthetic oligonucleotide
acaccugaucagaggacag

SEQ ID NO: 1264516 - RNA, 19 nt, Artificial Sequence
  Description of Artificial Sequence: Synthetic oligonucleotide
guagccucuuauagagggc

SEQ ID NO: 1264517 - RNA, 19 nt, Artificial Sequence
  Description of Artificial Sequence: Synthetic oligonucleotide
augcuccguuuugggaucc

SEQ ID NO: 1264518 - RNA, 19 nt, Artificial Sequence
  Description of Artificial Sequence: Synthetic oligonucleotide
cuacuuugggcuuguugaa

SEQ ID NO: 1264519 - RNA, 19 nt, Artificial Sequence
  Description of Artificial Sequence: Synthetic oligonucleotide
aaccucgucaggggugaca

SEQ ID NO: 1264520 - RNA, 19 nt, Artificial Sequence
  Description of Artificial Sequence: Synthetic oligonucleotide
ugucccguuuggucaucug

SEQ ID NO: 1264521 - RNA, 19 nt, Artificial Sequence
  Description of Artificial Sequence: Synthetic oligonucleotide
ggaauuggccagcaggugu

SEQ ID NO: 1264522 - RNA, 19 nt, Artificial Sequence
  Description of Artificial Sequence: Synthetic oligonucleotide
gcagaccucaaagugcaug

SEQ ID NO: 1264523 - RNA, 19 nt, Artificial Sequence
  Description of Artificial Sequence: Synthetic oligonucleotide
ccugaucagaggacagacc

SEQ ID NO: 1264524 - RNA, 19 nt, Artificial Sequence
  Description of Artificial Sequence: Synthetic oligonucleotide
ccguuuugggaucccaggc

SEQ ID NO: 1264525 - RNA, 19 nt, Artificial Sequence
  Description of Artificial Sequence: Synthetic oligonucleotide
cugcgcagccccuccacug

SEQ ID NO: 1264526 - RNA, 19 nt, Artificial Sequence
  Description of Artificial Sequence: Synthetic oligonucleotide
gggauuggguccacuuugg

SEQ ID NO: 1264527 - RNA, 19 nt, Artificial Sequence
  Description of Artificial Sequence: Synthetic oligonucleotide
gcauacagcacaguaugga

SEQ ID NO: 1264528 - RNA, 19 nt, Artificial Sequence
  Description of Artificial Sequence: Synthetic oligonucleotide
ccuucggucugguuccagg

SEQ ID NO: 1264529 - RNA, 19 nt, Artificial Sequence
  Description of Artificial Sequence: Synthetic oligonucleotide
gcuguagcguacuuccaca

SEQ ID NO: 1264530 - RNA, 19 nt, Artificial Sequence
  Description of Artificial Sequence: Synthetic oligonucleotide
ccacgauuggcaaggcccc

SEQ ID NO: 1264531 - RNA, 19 nt, Artificial Sequence
  Description of Artificial Sequence: Synthetic oligonucleotide
cucccucauaggcuugcac

SEQ ID NO: 1264532 - RNA, 19 nt, Artificial Sequence
  Description of Artificial Sequence: Synthetic oligonucleotide
acucguaggcgauccuuuu

SEQ ID NO: 1264533 - RNA, 19 nt, Artificial Sequence
  Description of Artificial Sequence: Synthetic oligonucleotide
accucgucaggggugacau

SEQ ID NO: 1264534 - RNA, 19 nt, Artificial Sequence
  Description of Artificial Sequence: Synthetic oligonucleotide
acgguacggugaaugccac

SEQ ID NO: 1264535 - RNA, 19 nt, Artificial Sequence
  Description of Artificial Sequence: Synthetic oligonucleotide
ccguuuggucaucugguag

SEQ ID NO: 1264536 - RNA, 19 nt, Artificial Sequence
  Description of Artificial Sequence: Synthetic oligonucleotide
cccuguuugucuugaguac

SEQ ID NO: 1264537 - RNA, 19 nt, Artificial Sequence
  Description of Artificial Sequence: Synthetic oligonucleotide
caccucaggggaccaguug

SEQ ID NO: 1264538 - RNA, 19 nt, Artificial Sequence
  Description of Artificial Sequence: Synthetic oligonucleotide
cccgaauucuugcucuccc

SEQ ID NO: 1264539 - RNA, 19 nt, Artificial Sequence
  Description of Artificial Sequence: Synthetic oligonucleotide
ccaucuucaggggaccugc

SEQ ID NO: 1264540 - RNA, 19 nt, Artificial Sequence
  Description of Artificial Sequence: Synthetic oligonucleotide
ggacgguacggugaaugcc

SEQ ID NO: 1264541 - RNA, 19 nt, Artificial Sequence
  Description of Artificial Sequence: Synthetic oligonucleotide
gguucacaagauccacaac

SEQ ID NO: 1264542 - RNA, 19 nt, Artificial Sequence
  Description of Artificial Sequence: Synthetic oligonucleotide
gacuugaagaugagagggu

SEQ ID NO: 1264543 - RNA, 19 nt, Artificial Sequence
  Description of Artificial Sequence: Synthetic oligonucleotide
gcagcccgcgauaacaggc

SEQ ID NO: 1264544 - RNA, 19 nt, Artificial Sequence
  Description of Artificial Sequence: Synthetic oligonucleotide
acgauuggcaaggccccug

SEQ ID NO: 1264545 - RNA, 19 nt, Artificial Sequence
  Description of Artificial Sequence: Synthetic oligonucleotide
gcguacuuccacauacacc

SEQ ID NO: 1264546 - RNA, 19 nt, Artificial Sequence
  Description of Artificial Sequence: Synthetic oligonucleotide
cccagcauggacgguacgg

SEQ ID NO: 1264547 - RNA, 19 nt, Artificial Sequence
  Description of Artificial Sequence: Synthetic oligonucleotide
gugaguaguuggccugguc

SEQ ID NO: 1264548 - RNA, 19 nt, Artificial Sequence
  Description of Artificial Sequence: Synthetic oligonucleotide
aguauggaccggaccuuga

SEQ ID NO: 1264549 - RNA, 19 nt, Artificial Sequence
  Description of Artificial Sequence: Synthetic oligonucleotide
ugugggcuguagcguacuu

SEQ ID NO: 1264550 - RNA, 19 nt, Artificial Sequence
  Description of Artificial Sequence: Synthetic oligonucleotide
cugauucauacccacgauu

SEQ ID NO: 1264551 - RNA, 19 nt, Artificial Sequence
  Description of Artificial Sequence: Synthetic oligonucleotide
aguaguuggccuggucuuu

SEQ ID NO: 1264552 - RNA, 19 nt, Artificial Sequence
  Description of Artificial Sequence: Synthetic oligonucleotide
gaccuugaccccgaauucu

SEQ ID NO: 1264553 - RNA, 19 nt, Artificial Sequence
  Description of Artificial Sequence: Synthetic oligonucleotide
ucacuucgggagggaaugu

SEQ ID NO: 1264554 - RNA, 19 nt, Artificial Sequence
  Description of Artificial Sequence: Synthetic oligonucleotide
guucagucgcuugaauucu

SEQ ID NO: 1264555 - RNA, 19 nt, Artificial Sequence
  Description of Artificial Sequence: Synthetic oligonucleotide
cacaaacucguaggcgauc

SEQ ID NO: 1264556 - RNA, 19 nt, Artificial Sequence
  Description of Artificial Sequence: Synthetic oligonucleotide
ggaccggaccuugaccccg

SEQ ID NO: 1264557 - RNA, 19 nt, Artificial Sequence
  Description of Artificial Sequence: Synthetic oligonucleotide
gaguacauccacagccugu

SEQ ID NO: 1264558 - RNA, 19 nt, Artificial Sequence
  Description of Artificial Sequence: Synthetic oligonucleotide
ugugcaccccgguguugcu

SEQ ID NO: 1264559 - RNA, 19 nt, Artificial Sequence
  Description of Artificial Sequence: Synthetic oligonucleotide
cacuucgggagggaauguc

SEQ ID NO: 1264560 - RNA, 19 nt, Artificial Sequence
  Description of Artificial Sequence: Synthetic oligonucleotide
gaagcgagaggggcuuguc

SEQ ID NO: 1264561 - RNA, 19 nt, Artificial Sequence
  Description of Artificial Sequence: Synthetic oligonucleotide
cucagggaggaagcuugac

SEQ ID NO: 1264562 - RNA, 19 nt, Artificial Sequence
  Description of Artificial Sequence: Synthetic oligonucleotide
uggguugguggcgcauaca

SEQ ID NO: 1264563 - RNA, 19 nt, Artificial Sequence
  Description of Artificial Sequence: Synthetic oligonucleotide
gaccuggccacuccagggu

SEQ ID NO: 1264564 - RNA, 19 nt, Artificial Sequence
  Description of Artificial Sequence: Synthetic oligonucleotide
gguaugcuuuguagaguug

SEQ ID NO: 1264565 - RNA, 19 nt, Artificial Sequence
  Description of Artificial Sequence: Synthetic oligonucleotide
ccaagaguucaggagcaug

SEQ ID NO: 1264566 - RNA, 19 nt, Artificial Sequence
  Description of Artificial Sequence: Synthetic oligonucleotide
ggaaugaagguaagagugu

SEQ ID NO: 1264567 - RNA, 19 nt, Artificial Sequence
  Description of Artificial Sequence: Synthetic oligonucleotide
ggccccaugaccacauuca

SEQ ID NO: 1264568 - RNA, 19 nt, Artificial Sequence
  Description of Artificial Sequence: Synthetic oligonucleotide
gucacagaguugugcagau

SEQ ID NO: 1264569 - RNA, 19 nt, Artificial Sequence
  Description of Artificial Sequence: Synthetic oligonucleotide
augucacuucgggagggaa

SEQ ID NO: 1264570 - RNA, 19 nt, Artificial Sequence
  Description of Artificial Sequence: Synthetic oligonucleotide
agcccgcgauaacaggcau

SEQ ID NO: 1264571 - RNA, 19 nt, Artificial Sequence
  Description of Artificial Sequence: Synthetic oligonucleotide
agugugcaccccgguguug

SEQ ID NO: 1264572 - RNA, 19 nt, Artificial Sequence
  Description of Artificial Sequence: Synthetic oligonucleotide
aggcgccugugagauagcu

SEQ ID NO: 1264573 - RNA, 19 nt, Artificial Sequence
  Description of Artificial Sequence: Synthetic oligonucleotide
accuugaccccgaauucuu

SEQ ID NO: 1264574 - RNA, 19 nt, Artificial Sequence
  Description of Artificial Sequence: Synthetic oligonucleotide
gcccaugucccguuugguc

SEQ ID NO: 1264575 - RNA, 19 nt, Artificial Sequence
  Description of Artificial Sequence: Synthetic oligonucleotide
gccgaugacgcugcgcagc

SEQ ID NO: 1264576 - RNA, 19 nt, Artificial Sequence
  Description of Artificial Sequence: Synthetic oligonucleotide
agccucuuauagagggccu

SEQ ID NO: 1264577 - RNA, 19 nt, Artificial Sequence
  Description of Artificial Sequence: Synthetic oligonucleotide
ccuugaccccgaauucuug

SEQ ID NO: 1264578 - RNA, 19 nt, Artificial Sequence
  Description of Artificial Sequence: Synthetic oligonucleotide
uacccacgauuggcaaggc

SEQ ID NO: 1264579 - RNA, 19 nt, Artificial Sequence
  Description of Artificial Sequence: Synthetic oligonucleotide
uucagccugcgguggccau

SEQ ID NO: 1264580 - RNA, 19 nt, Artificial Sequence
  Description of Artificial Sequence: Synthetic oligonucleotide
gcgaugccucucuucuugc

SEQ ID NO: 1264581 - RNA, 19 nt, Artificial Sequence
  Description of Artificial Sequence: Synthetic oligonucleotide
augucccguuuggucaucu

SEQ ID NO: 1264582 - RNA, 19 nt, Artificial Sequence
  Description of Artificial Sequence: Synthetic oligonucleotide
ugcuccguuuugggauccc

SEQ ID NO: 1264583 - RNA, 19 nt, Artificial Sequence
  Description of Artificial Sequence: Synthetic oligonucleotide
cagcacaguauggaccgga

SEQ ID NO: 1264584 - RNA, 19 nt, Artificial Sequence
  Description of Artificial Sequence: Synthetic oligonucleotide
agcccggaagcgagagggg

SEQ ID NO: 1264585 - RNA, 19 nt, Artificial Sequence
  Description of Artificial Sequence: Synthetic oligonucleotide
gcgucugggccauggugcc

SEQ ID NO: 1264586 - RNA, 19 nt, Artificial Sequence
  Description of Artificial Sequence: Synthetic oligonucleotide
ggucgucuguguugaguga

SEQ ID NO: 1264587 - RNA, 19 nt, Artificial Sequence
  Description of Artificial Sequence: Synthetic oligonucleotide
gguacggugaaugccacuu

SEQ ID NO: 1264588 - RNA, 19 nt, Artificial Sequence
  Description of Artificial Sequence: Synthetic oligonucleotide
ccacauucaccgugugcug

SEQ ID NO: 1264589 - RNA, 19 nt, Artificial Sequence
  Description of Artificial Sequence: Synthetic oligonucleotide
gcuuguugaaagcgggcgu

SEQ ID NO: 1264590 - RNA, 19 nt, Artificial Sequence
  Description of Artificial Sequence: Synthetic oligonucleotide
cagauuccauccacaggcu

SEQ ID NO: 1264591 - RNA, 19 nt, Artificial Sequence
  Description of Artificial Sequence: Synthetic oligonucleotide
ccgugugcugcaagauacc

SEQ ID NO: 1264592 - RNA, 19 nt, Artificial Sequence
  Description of Artificial Sequence: Synthetic oligonucleotide
guggacgugcagcucuacu

SEQ ID NO: 1264593 - RNA, 19 nt, Artificial Sequence
  Description of Artificial Sequence: Synthetic oligonucleotide
gccugugagauagcuggac

SEQ ID NO: 1264594 - RNA, 19 nt, Artificial Sequence
  Description of Artificial Sequence: Synthetic oligonucleotide
cuguagcguacuuccacau

SEQ ID NO: 1264595 - RNA, 19 nt, Artificial Sequence
  Description of Artificial Sequence: Synthetic oligonucleotide
ucgcuucccgaggacucuc

SEQ ID NO: 1264596 - RNA, 19 nt, Artificial Sequence
  Description of Artificial Sequence: Synthetic oligonucleotide
ggaagguuccugauucaua

SEQ ID NO: 1264597 - RNA, 19 nt, Artificial Sequence
  Description of Artificial Sequence: Synthetic oligonucleotide
ccugcgguggccauuggua

SEQ ID NO: 1264598 - RNA, 19 nt, Artificial Sequence
  Description of Artificial Sequence: Synthetic oligonucleotide
ggucgcuucccgaggacuc

SEQ ID NO: 1264599 - RNA, 19 nt, Artificial Sequence
  Description of Artificial Sequence: Synthetic oligonucleotide
ugucugcugggagggcgau

SEQ ID NO: 1264600 - RNA, 19 nt, Artificial Sequence
  Description of Artificial Sequence: Synthetic oligonucleotide
gcggggucgcuucccgagg

SEQ ID NO: 1264601 - RNA, 19 nt, Artificial Sequence
  Description of Artificial Sequence: Synthetic oligonucleotide
ucagccugcgguggccauu

SEQ ID NO: 1264602 - RNA, 19 nt, Artificial Sequence
  Description of Artificial Sequence: Synthetic oligonucleotide
caggcgccugugagauagc

SEQ ID NO: 1264603 - RNA, 19 nt, Artificial Sequence
  Description of Artificial Sequence: Synthetic oligonucleotide
cuccccagcauggacggua

SEQ ID NO: 1264604 - RNA, 19 nt, Artificial Sequence
  Description of Artificial Sequence: Synthetic oligonucleotide
ugacgcugcgcagccccuc

SEQ ID NO: 1264605 - RNA, 19 nt, Artificial Sequence
  Description of Artificial Sequence: Synthetic oligonucleotide
gggcccuagccagaacacc

SEQ ID NO: 1264606 - RNA, 19 nt, Artificial Sequence
  Description of Artificial Sequence: Synthetic oligonucleotide
cgaugccucucuucuugcc

SEQ ID NO: 1264607 - RNA, 19 nt, Artificial Sequence
  Description of Artificial Sequence: Synthetic oligonucleotide
gguccgcgcuggcucggcg

SEQ ID NO: 1264608 - RNA, 19 nt, Artificial Sequence
  Description of Artificial Sequence: Synthetic oligonucleotide
aagcgggcgucugggccau

SEQ ID NO: 1264609 - RNA, 19 nt, Artificial Sequence
  Description of Artificial Sequence: Synthetic oligonucleotide
ggacgugcagcucuacuuu

SEQ ID NO: 1264610 - RNA, 19 nt, Artificial Sequence
  Description of Artificial Sequence: Synthetic oligonucleotide
ggccccugggcccuagcca

SEQ ID NO: 1264611 - RNA, 19 nt, Artificial Sequence
  Description of Artificial Sequence: Synthetic oligonucleotide
ggugccgagugugcacccc

SEQ ID NO: 1264612 - RNA, 19 nt, Artificial Sequence
  Description of Artificial Sequence: Synthetic oligonucleotide
gccauggugccgagugugc

SEQ ID NO: 1264613 - RNA, 19 nt, Artificial Sequence
  Description of Artificial Sequence: Synthetic oligonucleotide
ggguggacuugaagaugag

SEQ ID NO: 1264614 - RNA, 19 nt, Artificial Sequence
  Description of Artificial Sequence: Synthetic oligonucleotide
ggcccuagccagaacaccu

SEQ ID NO: 1264615 - RNA, 19 nt, Artificial Sequence
  Description of Artificial Sequence: Synthetic oligonucleotide
guccaacccuguuugucuu

SEQ ID NO: 1264616 - RNA, 19 nt, Artificial Sequence
  Description of Artificial Sequence: Synthetic oligonucleotide
ggcgcauacagcacaguau

SEQ ID NO: 1264617 - RNA, 19 nt, Artificial Sequence
  Description of Artificial Sequence: Synthetic oligonucleotide
gccauguccaacccuguuu

SEQ ID NO: 1264618 - RNA, 19 nt, Artificial Sequence
  Description of Artificial Sequence: Synthetic oligonucleotide
gaccggaccuugaccccga

SEQ ID NO: 1264619 - RNA, 19 nt, Artificial Sequence
  Description of Artificial Sequence: Synthetic oligonucleotide
ccccgaauucuugcucucc

SEQ ID NO: 1264620 - RNA, 19 nt, Artificial Sequence
  Description of Artificial Sequence: Synthetic oligonucleotide
caaacucguaggcgauccu

SEQ ID NO: 1264621 - RNA, 19 nt, Artificial Sequence
  Description of Artificial Sequence: Synthetic oligonucleotide
caggggauuggguccacuu

SEQ ID NO: 1264622 - RNA, 19 nt, Artificial Sequence
  Description of Artificial Sequence: Synthetic oligonucleotide
cucccugcagcccgcgaua

SEQ ID NO: 1264623 - RNA, 19 nt, Artificial Sequence
  Description of Artificial Sequence: Synthetic oligonucleotide
guacggugaaugccacuuu

SEQ ID NO: 1264624 - RNA, 19 nt, Artificial Sequence
  Description of Artificial Sequence: Synthetic oligonucleotide
ccggguccgcgcuggcucg

SEQ ID NO: 1264625 - RNA, 19 nt, Artificial Sequence
  Description of Artificial Sequence: Synthetic oligonucleotide
cauucaccgugugcugcaa

SEQ ID NO: 1264626 - RNA, 19 nt, Artificial Sequence
  Description of Artificial Sequence: Synthetic oligonucleotide
ggggucgcuucccgaggac

SEQ ID NO: 1264627 - RNA, 19 nt, Artificial Sequence
  Description of Artificial Sequence: Synthetic oligonucleotide
gcccgcgauaacaggcaug

SEQ ID NO: 1264628 - RNA, 19 nt, Artificial Sequence
  Description of Artificial Sequence: Synthetic oligonucleotide
cccgcgauaacaggcaugu

SEQ ID NO: 1264629 - RNA, 19 nt, Artificial Sequence
  Description of Artificial Sequence: Synthetic oligonucleotide
gcuccguuuugggauccca

SEQ ID NO: 1264630 - RNA, 19 nt, Artificial Sequence
  Description of Artificial Sequence: Synthetic oligonucleotide
cucaggggaccaguugggu

SEQ ID NO: 1264631 - RNA, 19 nt, Artificial Sequence
  Description of Artificial Sequence: Synthetic oligonucleotide
gggagggcgaugccucucu

SEQ ID NO: 1264632 - RNA, 19 nt, Artificial Sequence
  Description of Artificial Sequence: Synthetic oligonucleotide
gucgcuucccgaggacucu

SEQ ID NO: 1264633 - RNA, 19 nt, Artificial Sequence
  Description of Artificial Sequence: Synthetic oligonucleotide
cggaccuugaccccgaauu

SEQ ID NO: 1264634 - RNA, 19 nt, Artificial Sequence
  Description of Artificial Sequence: Synthetic oligonucleotide
gccuuaaaggaagguuccu

SEQ ID NO: 1264635 - RNA, 19 nt, Artificial Sequence
  Description of Artificial Sequence: Synthetic oligonucleotide
caacugcaugcuccguuuu

SEQ ID NO: 1264636 - RNA, 19 nt, Artificial Sequence
  Description of Artificial Sequence: Synthetic oligonucleotide
ccgaauucuugcucucccu

SEQ ID NO: 1264637 - RNA, 19 nt, Artificial Sequence
  Description of Artificial Sequence: Synthetic oligonucleotide
ggaagcgagaggggcuugu

SEQ ID NO: 1264638 - RNA, 19 nt, Artificial Sequence
  Description of Artificial Sequence: Synthetic oligonucleotide
cccaagacucuucauucuu

SEQ ID NO: 1264639 - RNA, 19 nt, Artificial Sequence
  Description of Artificial Sequence: Synthetic oligonucleotide
ccccaagacucuucauucu

SEQ ID NO: 1264640 - RNA, 19 nt, Artificial Sequence
  Description of Artificial Sequence: Synthetic oligonucleotide
ggcggcggggucgcuuccc

SEQ ID NO: 1264641 - RNA, 19 nt, Artificial Sequence
  Description of Artificial Sequence: Synthetic oligonucleotide
gggucgcuucccgaggacu

SEQ ID NO: 1264642 - RNA, 19 nt, Artificial Sequence
  Description of Artificial Sequence: Synthetic oligonucleotide
cacgauuggcaaggccccu

SEQ ID NO: 1264643 - RNA, 19 nt, Artificial Sequence
  Description of Artificial Sequence: Synthetic oligonucleotide
gcgauccuuuugauggccu

SEQ ID NO: 1264644 - RNA, 19 nt, Artificial Sequence
  Description of Artificial Sequence: Synthetic oligonucleotide
ccacaaccucgucaggggu

SEQ ID NO: 1264645 - RNA, 19 nt, Artificial Sequence
  Description of Artificial Sequence: Synthetic oligonucleotide
ccacaaacucguaggcgau

SEQ ID NO: 1264646 - RNA, 19 nt, Artificial Sequence
  Description of Artificial Sequence: Synthetic oligonucleotide
ccuagccagaacaccugau

SEQ ID NO: 1264647 - RNA, 19 nt, Artificial Sequence
  Description of Artificial Sequence: Synthetic oligonucleotide
gguggccauugguaugcuu

SEQ ID NO: 1264648 - RNA, 19 nt, Artificial Sequence
  Description of Artificial Sequence: Synthetic oligonucleotide
cggggucgcuucccgagga

SEQ ID NO: 1264649 - RNA, 19 nt, Artificial Sequence
  Description of Artificial Sequence: Synthetic oligonucleotide
cauggacgguacggugaau

SEQ ID NO: 1264650 - RNA, 19 nt, Artificial Sequence
  Description of Artificial Sequence: Synthetic oligonucleotide
ggucugguuccaggggauu

SEQ ID NO: 1264651 - RNA, 19 nt, Artificial Sequence
  Description of Artificial Sequence: Synthetic oligonucleotide
cguaggcgauccuuuugau

SEQ ID NO: 1264652 - RNA, 19 nt, Artificial Sequence
  Description of Artificial Sequence: Synthetic oligonucleotide
ccgcgcuggcucggcggcg

SEQ ID NO: 1264653 - RNA, 19 nt, Artificial Sequence
  Description of Artificial Sequence: Synthetic oligonucleotide
caucaccagccaggucgau

SEQ ID NO: 1264654 - RNA, 19 nt, Artificial Sequence
  Description of Artificial Sequence: Synthetic oligonucleotide
ggcagaccucaaagugcau

SEQ ID NO: 1264655 - RNA, 19 nt, Artificial Sequence
  Description of Artificial Sequence: Synthetic oligonucleotide
ccggaagcgagaggggcuu

SEQ ID NO: 1264656 - RNA, 19 nt, Artificial Sequence
  Description of Artificial Sequence: Synthetic oligonucleotide
cggucugguuccaggggau

SEQ ID NO: 1264657 - RNA, 19 nt, Artificial Sequence
  Description of Artificial Sequence: Synthetic oligonucleotide
cgguacggugaaugccacu

SEQ ID NO: 1264658 - RNA, 19 nt, Artificial Sequence
  Description of Artificial Sequence: Synthetic oligonucleotide
cggcggggucgcuucccga

SEQ ID NO: 1264659 - RNA, 19 nt, Artificial Sequence
  Description of Artificial Sequence: Synthetic oligonucleotide
ccccuucggucugguucca

SEQ ID NO: 1264660 - RNA, 19 nt, Artificial Sequence
  Description of Artificial Sequence: Synthetic oligonucleotide
cccaggcgccugugagaua

SEQ ID NO: 1264661 - RNA, 19 nt, Artificial Sequence
  Description of Artificial Sequence: Synthetic oligonucleotide
ccgcgauaacaggcaugua

SEQ ID NO: 1264662 - RNA, 19 nt, Artificial Sequence
  Description of Artificial Sequence: Synthetic oligonucleotide
cgggcgucugggccauggu

SEQ ID NO: 1264663 - RNA, 19 nt, Artificial Sequence
  Description of Artificial Sequence: Synthetic oligonucleotide
cgguggccauugguaugcu

SEQ ID NO: 1264664 - RNA, 19 nt, Artificial Sequence
  Description of Artificial Sequence: Synthetic oligonucleotide
auaauugggugacagagcc

SEQ ID NO: 1264665 - RNA, 19 nt, Artificial Sequence
  Description of Artificial Sequence: Synthetic oligonucleotide
aauuacgaggucuagucuc

SEQ ID NO: 1264666 - RNA, 19 nt, Artificial Sequence
  Description of Artificial Sequence: Synthetic oligonucleotide
agagaauguaauuacgagg

SEQ ID NO: 1264667 - RNA, 19 nt, Artificial Sequence
  Description of Artificial Sequence: Synthetic oligonucleotide
gaaauugcaugagugaugg

SEQ ID NO: 1264668 - RNA, 19 nt, Artificial Sequence
  Description of Artificial Sequence: Synthetic oligonucleotide
aauugggugacagagccac

SEQ ID NO: 1264669 - RNA, 19 nt, Artificial Sequence
  Description of Artificial Sequence: Synthetic oligonucleotide
agacuugacgaauucaugg

SEQ ID NO: 1264670 - RNA, 19 nt, Artificial Sequence
  Description of Artificial Sequence: Synthetic oligonucleotide
acuucaucguuccaaagcg

SEQ ID NO: 1264671 - RNA, 19 nt, Artificial Sequence
  Description of Artificial Sequence: Synthetic oligonucleotide
ucauaauugggugacagag

SEQ ID NO: 1264672 - RNA, 19 nt, Artificial Sequence
  Description of Artificial Sequence: Synthetic oligonucleotide
uaugcggggaugcagauca

SEQ ID NO: 1264673 - RNA, 19 nt, Artificial Sequence
  Description of Artificial Sequence: Synthetic oligonucleotide
uuauuugccagagagcaag

SEQ ID NO: 1264674 - RNA, 19 nt, Artificial Sequence
  Description of Artificial Sequence: Synthetic oligonucleotide
aaaagguaugucuccagca

SEQ ID NO: 1264675 - RNA, 19 nt, Artificial Sequence
  Description of Artificial Sequence: Synthetic oligonucleotide
ugaaagucaggcaccgucg

SEQ ID NO: 1264676 - RNA, 19 nt, Artificial Sequence
  Description of Artificial Sequence: Synthetic oligonucleotide
caaaccauuuauuugccag

SEQ ID NO: 1264677 - RNA, 19 nt, Artificial Sequence
  Description of Artificial Sequence: Synthetic oligonucleotide
ugaagugcugcucaggggu

SEQ ID NO: 1264678 - RNA, 19 nt, Artificial Sequence
  Description of Artificial Sequence: Synthetic oligonucleotide
uucgaaaucguuuuccagu

SEQ ID NO: 1264679 - RNA, 19 nt, Artificial Sequence
  Description of Artificial Sequence: Synthetic oligonucleotide
uggaaaucugccuaguugu

SEQ ID NO: 1264680 - RNA, 19 nt, Artificial Sequence
  Description of Artificial Sequence: Synthetic oligonucleotide
uaucccuccugccuuaagg

SEQ ID NO: 1264681 - RNA, 19 nt, Artificial Sequence
  Description of Artificial Sequence: Synthetic oligonucleotide
gacgaauucauggaggcag

SEQ ID NO: 1264682 - RNA, 19 nt, Artificial Sequence
  Description of Artificial Sequence: Synthetic oligonucleotide
guaauuacgaggucuaguc

SEQ ID NO: 1264683 - RNA, 19 nt, Artificial Sequence
  Description of Artificial Sequence: Synthetic oligonucleotide
aaaccauuuauuugccaga

SEQ ID NO: 1264684 - RNA, 19 nt, Artificial Sequence
  Description of Artificial Sequence: Synthetic oligonucleotide
aauucauggaggcagcgua

SEQ ID NO: 1264685 - RNA, 19 nt, Artificial Sequence
  Description of Artificial Sequence: Synthetic oligonucleotide
ucucucaccaaugagccag

SEQ ID NO: 1264686 - RNA, 19 nt, Artificial Sequence
  Description of Artificial Sequence: Synthetic oligonucleotide
uugacgaauucauggaggc

SEQ ID NO: 1264687 - RNA, 19 nt, Artificial Sequence
  Description of Artificial Sequence: Synthetic oligonucleotide
aagucaggcaccgucgugg

SEQ ID NO: 1264688 - RNA, 19 nt, Artificial Sequence
  Description of Artificial Sequence: Synthetic oligonucleotide
uuuagccgugcuuugcagg

SEQ ID NO: 1264689 - RNA, 19 nt, Artificial Sequence
  Description of Artificial Sequence: Synthetic oligonucleotide
ggagugaggaagcugaggg

SEQ ID NO: 1264690 - RNA, 19 nt, Artificial Sequence
  Description of Artificial Sequence: Synthetic oligonucleotide
aggucuagucuccugaaag

SEQ ID NO: 1264691 - RNA, 19 nt, Artificial Sequence
  Description of Artificial Sequence: Synthetic oligonucleotide
aagaagaugcccgcguccg

SEQ ID NO: 1264692 - RNA, 19 nt, Artificial Sequence
  Description of Artificial Sequence: Synthetic oligonucleotide
aaugagccagucagggucc

SEQ ID NO: 1264693 - RNA, 19 nt, Artificial Sequence
  Description of Artificial Sequence: Synthetic oligonucleotide
ugcuuagcugagaaguucc

SEQ ID NO: 1264694 - RNA, 19 nt, Artificial Sequence
  Description of Artificial Sequence: Synthetic oligonucleotide
uugucuacuucaucguucc

SEQ ID NO: 1264695 - RNA, 19 nt, Artificial Sequence
  Description of Artificial Sequence: Synthetic oligonucleotide
uguuguaucccuccugccu

SEQ ID NO: 1264696 - RNA, 19 nt, Artificial Sequence
  Description of Artificial Sequence: Synthetic oligonucleotide
caagguaaguggcagggcc

SEQ ID NO: 1264697 - RNA, 19 nt, Artificial Sequence
  Description of Artificial Sequence: Synthetic oligonucleotide
aggcagaagaaagaaugcc

SEQ ID NO: 1264698 - RNA, 19 nt, Artificial Sequence
  Description of Artificial Sequence: Synthetic oligonucleotide
aaaucguuuuccagucccc

SEQ ID NO: 1264699 - RNA, 19 nt, Artificial Sequence
  Description of Artificial Sequence: Synthetic oligonucleotide
caaugagccagucaggguc

SEQ ID NO: 1264700 - RNA, 19 nt, Artificial Sequence
  Description of Artificial Sequence: Synthetic oligonucleotide
aaauugcaugagugauggc

SEQ ID NO: 1264701 - RNA, 19 nt, Artificial Sequence
  Description of Artificial Sequence: Synthetic oligonucleotide
cauaauugggugacagagc

SEQ ID NO: 1264702 - RNA, 19 nt, Artificial Sequence
  Description of Artificial Sequence: Synthetic oligonucleotide
cauuggugacccucgaggg

SEQ ID NO: 1264703 - RNA, 19 nt, Artificial Sequence
  Description of Artificial Sequence: Synthetic oligonucleotide
gaaagaaugccaguuagaa

SEQ ID NO: 1264704 - RNA, 19 nt, Artificial Sequence
  Description of Artificial Sequence: Synthetic oligonucleotide
ucaaagugagcgucaagcu

SEQ ID NO: 1264705 - RNA, 19 nt, Artificial Sequence
  Description of Artificial Sequence: Synthetic oligonucleotide
gguaccacaggcauggugg

SEQ ID NO: 1264706 - RNA, 19 nt, Artificial Sequence
  Description of Artificial Sequence: Synthetic oligonucleotide
auuacgaggucuagucucc

SEQ ID NO: 1264707 - RNA, 19 nt, Artificial Sequence
  Description of Artificial Sequence: Synthetic oligonucleotide
uuccacucgagcacugggg

SEQ ID NO: 1264708 - RNA, 19 nt, Artificial Sequence
  Description of Artificial Sequence: Synthetic oligonucleotide
uuagccgugcuuugcaggc

SEQ ID NO: 1264709 - RNA, 19 nt, Artificial Sequence
  Description of Artificial Sequence: Synthetic oligonucleotide
gguaccaaauguuguaucc

SEQ ID NO: 1264710 - RNA, 19 nt, Artificial Sequence
  Description of Artificial Sequence: Synthetic oligonucleotide
uaauuacgaggucuagucu

SEQ ID NO: 1264711 - RNA, 19 nt, Artificial Sequence
  Description of Artificial Sequence: Synthetic oligonucleotide
cuucauaauugggugacag

SEQ ID NO: 1264712 - RNA, 19 nt, Artificial Sequence
  Description of Artificial Sequence: Synthetic oligonucleotide
uagaaauugcaugagugau

SEQ ID NO: 1264713 - RNA, 19 nt, Artificial Sequence
  Description of Artificial Sequence: Synthetic oligonucleotide
uguaauuacgaggucuagu

SEQ ID NO: 1264714 - RNA, 19 nt, Artificial Sequence
  Description of Artificial Sequence: Synthetic oligonucleotide
uaccaaauguuguaucccu

SEQ ID NO: 1264715 - RNA, 19 nt, Artificial Sequence
  Description of Artificial Sequence: Synthetic oligonucleotide
gacaaaccagccccugugg

SEQ ID NO: 1264716 - RNA, 19 nt, Artificial Sequence
  Description of Artificial Sequence: Synthetic oligonucleotide
gaagaagaugcccgcgucc

SEQ ID NO: 1264717 - RNA, 19 nt, Artificial Sequence
  Description of Artificial Sequence: Synthetic oligonucleotide
uuccaaagcgcagaggcgc

SEQ ID NO: 1264718 - RNA, 19 nt, Artificial Sequence
  Description of Artificial Sequence: Synthetic oligonucleotide
ugagcgucaagcucagucu

SEQ ID NO: 1264719 - RNA, 19 nt, Artificial Sequence
  Description of Artificial Sequence: Synthetic oligonucleotide
aaggcgccgguucugcagg

SEQ ID NO: 1264720 - RNA, 19 nt, Artificial Sequence
  Description of Artificial Sequence: Synthetic oligonucleotide
ugggaaaccuggaguaugc

SEQ ID NO: 1264721 - RNA, 19 nt, Artificial Sequence
  Description of Artificial Sequence: Synthetic oligonucleotide
ucgaaaucguuuuccaguc

SEQ ID NO: 1264722 - RNA, 19 nt, Artificial Sequence
  Description of Artificial Sequence: Synthetic oligonucleotide
guagugcccacaaaggugc

SEQ ID NO: 1264723 - RNA, 19 nt, Artificial Sequence
  Description of Artificial Sequence: Synthetic oligonucleotide
ggugaagugcugcucaggg

SEQ ID NO: 1264724 - RNA, 19 nt, Artificial Sequence
  Description of Artificial Sequence: Synthetic oligonucleotide
aauugugguaccaaauguu

SEQ ID NO: 1264725 - RNA, 19 nt, Artificial Sequence
  Description of Artificial Sequence: Synthetic oligonucleotide
gcguaggugguucacaugg

SEQ ID NO: 1264726 - RNA, 19 nt, Artificial Sequence
  Description of Artificial Sequence: Synthetic oligonucleotide
ugugucgguagcacugugc

SEQ ID NO: 1264727 - RNA, 19 nt, Artificial Sequence
  Description of Artificial Sequence: Synthetic oligonucleotide
cuucgaaaucguuuuccag

SEQ ID NO: 1264728 - RNA, 19 nt, Artificial Sequence
  Description of Artificial Sequence: Synthetic oligonucleotide
ugcuuggccgaauuucucc

SEQ ID NO: 1264729 - RNA, 19 nt, Artificial Sequence
  Description of Artificial Sequence: Synthetic oligonucleotide
agcaccccaauugugguac

SEQ ID NO: 1264730 - RNA, 19 nt, Artificial Sequence
  Description of Artificial Sequence: Synthetic oligonucleotide
ucuccuucgaaaucguuuu

SEQ ID NO: 1264731 - RNA, 19 nt, Artificial Sequence
  Description of Artificial Sequence: Synthetic oligonucleotide
gacuugacgaauucaugga

SEQ ID NO: 1264732 - RNA, 19 nt, Artificial Sequence
  Description of Artificial Sequence: Synthetic oligonucleotide
gaaaggggcugcuuagcug

SEQ ID NO: 1264733 - RNA, 19 nt, Artificial Sequence
  Description of Artificial Sequence: Synthetic oligonucleotide
ucccagacgcuucucagcu

SEQ ID NO: 1264734 - RNA, 19 nt, Artificial Sequence
  Description of Artificial Sequence: Synthetic oligonucleotide
auacccuccagcagaagac

SEQ ID NO: 1264735 - RNA, 19 nt, Artificial Sequence
  Description of Artificial Sequence: Synthetic oligonucleotide
aagaugcccgcguccgacg

SEQ ID NO: 1264736 - RNA, 19 nt, Artificial Sequence
  Description of Artificial Sequence: Synthetic oligonucleotide
aaagucaggcaccgucgug

SEQ ID NO: 1264737 - RNA, 19 nt, Artificial Sequence
  Description of Artificial Sequence: Synthetic oligonucleotide
uuuauuugccagagagcaa

SEQ ID NO: 1264738 - RNA, 19 nt, Artificial Sequence
  Description of Artificial Sequence: Synthetic oligonucleotide
cucuaaacagagugcugcc

SEQ ID NO: 1264739 - RNA, 19 nt, Artificial Sequence
  Description of Artificial Sequence: Synthetic oligonucleotide
gagccauucuguuguguag

SEQ ID NO: 1264740 - RNA, 19 nt, Artificial Sequence
  Description of Artificial Sequence: Synthetic oligonucleotide
cuuaagggagcugggaaac

SEQ ID NO: 1264741 - RNA, 19 nt, Artificial Sequence
  Description of Artificial Sequence: Synthetic oligonucleotide
agccauucuguuguguagg

SEQ ID NO: 1264742 - RNA, 19 nt, Artificial Sequence
  Description of Artificial Sequence: Synthetic oligonucleotide
gugagcgucaagcucaguc

SEQ ID NO: 1264743 - RNA, 19 nt, Artificial Sequence
  Description of Artificial Sequence: Synthetic oligonucleotide
uccacucgagcacuggggu

SEQ ID NO: 1264744 - RNA, 19 nt, Artificial Sequence
  Description of Artificial Sequence: Synthetic oligonucleotide
agaaauugcaugagugaug

SEQ ID NO: 1264745 - RNA, 19 nt, Artificial Sequence
  Description of Artificial Sequence: Synthetic oligonucleotide
agucaggcaccgucguggc

SEQ ID NO: 1264746 - RNA, 19 nt, Artificial Sequence
  Description of Artificial Sequence: Synthetic oligonucleotide
cuucaucguuccaaagcgc

SEQ ID NO: 1264747 - RNA, 19 nt, Artificial Sequence
  Description of Artificial Sequence: Synthetic oligonucleotide
guuccaaguaggugacagg

SEQ ID NO: 1264748 - RNA, 19 nt, Artificial Sequence
  Description of Artificial Sequence: Synthetic oligonucleotide
ugccaguuagaaauugcau

SEQ ID NO: 1264749 - RNA, 19 nt, Artificial Sequence
  Description of Artificial Sequence: Synthetic oligonucleotide
agaugcccgcguccgacgc

SEQ ID NO: 1264750 - RNA, 19 nt, Artificial Sequence
  Description of Artificial Sequence: Synthetic oligonucleotide
aaucguuuuccaguccccu

SEQ ID NO: 1264751 - RNA, 19 nt, Artificial Sequence
  Description of Artificial Sequence: Synthetic oligonucleotide
gaaguugcgcaagggagug

SEQ ID NO: 1264752 - RNA, 19 nt, Artificial Sequence
  Description of Artificial Sequence: Synthetic oligonucleotide
aucguuccaaagcgcagag

SEQ ID NO: 1264753 - RNA, 19 nt, Artificial Sequence
  Description of Artificial Sequence: Synthetic oligonucleotide
aguugcgcaagggagugag

SEQ ID NO: 1264754 - RNA, 19 nt, Artificial Sequence
  Description of Artificial Sequence: Synthetic oligonucleotide
ggugcugucugcccgagcc

SEQ ID NO: 1264755 - RNA, 19 nt, Artificial Sequence
  Description of Artificial Sequence: Synthetic oligonucleotide
uugcgcaagggagugagga

SEQ ID NO: 1264756 - RNA, 19 nt, Artificial Sequence
  Description of Artificial Sequence: Synthetic oligonucleotide
uccucuaaacagagugcug

SEQ ID NO: 1264757 - RNA, 19 nt, Artificial Sequence
  Description of Artificial Sequence: Synthetic oligonucleotide
ucuaaacagagugcugccu

SEQ ID NO: 1264758 - RNA, 19 nt, Artificial Sequence
  Description of Artificial Sequence: Synthetic oligonucleotide
ucgguagcacugugcauag

SEQ ID NO: 1264759 - RNA, 19 nt, Artificial Sequence
  Description of Artificial Sequence: Synthetic oligonucleotide
uugcaugagugauggcugc

SEQ ID NO: 1264760 - RNA, 19 nt, Artificial Sequence
  Description of Artificial Sequence: Synthetic oligonucleotide
gaaguuccaaguaggugac

SEQ ID NO: 1264761 - RNA, 19 nt, Artificial Sequence
  Description of Artificial Sequence: Synthetic oligonucleotide
acgaggucuagucuccuga

SEQ ID NO: 1264762 - RNA, 19 nt, Artificial Sequence
  Description of Artificial Sequence: Synthetic oligonucleotide
uaauugggugacagagcca

SEQ ID NO: 1264763 - RNA, 19 nt, Artificial Sequence
  Description of Artificial Sequence: Synthetic oligonucleotide
ugauuaguguuuucccaua

SEQ ID NO: 1264764 - RNA, 19 nt, Artificial Sequence
  Description of Artificial Sequence: Synthetic oligonucleotide
aacaggguuagcuccccua

SEQ ID NO: 1264765 - RNA, 19 nt, Artificial Sequence
  Description of Artificial Sequence: Synthetic oligonucleotide
ccagaacaggguuagcucc

SEQ ID NO: 1264766 - RNA, 19 nt, Artificial Sequence
  Description of Artificial Sequence: Synthetic oligonucleotide
ugguaccaaauguuguauc

SEQ ID NO: 1264767 - RNA, 19 nt, Artificial Sequence
  Description of Artificial Sequence: Synthetic oligonucleotide
auccgcucuguccaguucu

SEQ ID NO: 1264768 - RNA, 19 nt, Artificial Sequence
  Description of Artificial Sequence: Synthetic oligonucleotide
uugcgggucccacuggcug

SEQ ID NO: 1264769 - RNA, 19 nt, Artificial Sequence
  Description of Artificial Sequence: Synthetic oligonucleotide
ccucucucaccaaugagcc

SEQ ID NO: 1264770 - RNA, 19 nt, Artificial Sequence
  Description of Artificial Sequence: Synthetic oligonucleotide
cuuugcgggucccacuggc

SEQ ID NO: 1264771 - RNA, 19 nt, Artificial Sequence
  Description of Artificial Sequence: Synthetic oligonucleotide
ccaguuagaaauugcauga

SEQ ID NO: 1264772 - RNA, 19 nt, Artificial Sequence
  Description of Artificial Sequence: Synthetic oligonucleotide
ugcgggucccacuggcugg

SEQ ID NO: 1264773 - RNA, 19 nt, Artificial Sequence
  Description of Artificial Sequence: Synthetic oligonucleotide
ccaauugugguaccaaaug

SEQ ID NO: 1264774 - RNA, 19 nt, Artificial Sequence
  Description of Artificial Sequence: Synthetic oligonucleotide
accgucguggcuuuggcuu

SEQ ID NO: 1264775 - RNA, 19 nt, Artificial Sequence
  Description of Artificial Sequence: Synthetic oligonucleotide
agccagaacaggguuagcu

SEQ ID NO: 1264776 - RNA, 19 nt, Artificial Sequence
  Description of Artificial Sequence: Synthetic oligonucleotide
gugucgguagcacugugca

SEQ ID NO: 1264777 - RNA, 19 nt, Artificial Sequence
  Description of Artificial Sequence: Synthetic oligonucleotide
agcaugugucgguagcacu

SEQ ID NO: 1264778 - RNA, 19 nt, Artificial Sequence
  Description of Artificial Sequence: Synthetic oligonucleotide
ucuguuguguagguccuuc

SEQ ID NO: 1264779 - RNA, 19 nt, Artificial Sequence
  Description of Artificial Sequence: Synthetic oligonucleotide
uuaagggagcugggaaacc

SEQ ID NO: 1264780 - RNA, 19 nt, Artificial Sequence
  Description of Artificial Sequence: Synthetic oligonucleotide
cauaguagguugucugaga

SEQ ID NO: 1264781 - RNA, 19 nt, Artificial Sequence
  Description of Artificial Sequence: Synthetic oligonucleotide
ccugccuuaagggagcugg

SEQ ID NO: 1264782 - RNA, 19 nt, Artificial Sequence
  Description of Artificial Sequence: Synthetic oligonucleotide
agcuccccauuggugaccc

SEQ ID NO: 1264783 - RNA, 19 nt, Artificial Sequence
  Description of Artificial Sequence: Synthetic oligonucleotide
gccgagagaauguaauuac

SEQ ID NO: 1264784 - RNA, 19 nt, Artificial Sequence
  Description of Artificial Sequence: Synthetic oligonucleotide
ccgagagaauguaauuacg

SEQ ID NO: 1264785 - RNA, 19 nt, Artificial Sequence
  Description of Artificial Sequence: Synthetic oligonucleotide
acaggguuagcuccccuau

SEQ ID NO: 1264786 - RNA, 19 nt, Artificial Sequence
  Description of Artificial Sequence: Synthetic oligonucleotide
gccucguagucauagagca

SEQ ID NO: 1264787 - RNA, 19 nt, Artificial Sequence
  Description of Artificial Sequence: Synthetic oligonucleotide
gaugagcucaucagccaac

SEQ ID NO: 1264788 - RNA, 19 nt, Artificial Sequence
  Description of Artificial Sequence: Synthetic oligonucleotide
caaggcgccgguucugcag

SEQ ID NO: 1264789 - RNA, 19 nt, Artificial Sequence
  Description of Artificial Sequence: Synthetic oligonucleotide
ggacaaaccagccccugug

SEQ ID NO: 1264790 - RNA, 19 nt, Artificial Sequence
  Description of Artificial Sequence: Synthetic oligonucleotide
uccaaagcgcagaggcgcu

SEQ ID NO: 1264791 - RNA, 19 nt, Artificial Sequence
  Description of Artificial Sequence: Synthetic oligonucleotide
uuugcgggucccacuggcu

SEQ ID NO: 1264792 - RNA, 19 nt, Artificial Sequence
  Description of Artificial Sequence: Synthetic oligonucleotide
caauugugguaccaaaugu

SEQ ID NO: 1264793 - RNA, 19 nt, Artificial Sequence
  Description of Artificial Sequence: Synthetic oligonucleotide
gucuccagcagacaaggua

SEQ ID NO: 1264794 - RNA, 19 nt, Artificial Sequence
  Description of Artificial Sequence: Synthetic oligonucleotide
cuggaguaugcggggaugc

SEQ ID NO: 1264795 - RNA, 19 nt, Artificial Sequence
  Description of Artificial Sequence: Synthetic oligonucleotide
ugacgaauucauggaggca

SEQ ID NO: 1264796 - RNA, 19 nt, Artificial Sequence
  Description of Artificial Sequence: Synthetic oligonucleotide
gaguaugcggggaugcaga

SEQ ID NO: 1264797 - RNA, 19 nt, Artificial Sequence
  Description of Artificial Sequence: Synthetic oligonucleotide
uguguagguccuucauaau

SEQ ID NO: 1264798 - RNA, 19 nt, Artificial Sequence
  Description of Artificial Sequence: Synthetic oligonucleotide
cucgcugcugucagcugcc

SEQ ID NO: 1264799 - RNA, 19 nt, Artificial Sequence
  Description of Artificial Sequence: Synthetic oligonucleotide
uucucugcuuggccgaauu

SEQ ID NO: 1264800 - RNA, 19 nt, Artificial Sequence
  Description of Artificial Sequence: Synthetic oligonucleotide
ugaaguccauggcgcgccc

SEQ ID NO: 1264801 - RNA, 19 nt, Artificial Sequence
  Description of Artificial Sequence: Synthetic oligonucleotide
cugccuuaagggagcuggg

SEQ ID NO: 1264802 - RNA, 19 nt, Artificial Sequence
  Description of Artificial Sequence: Synthetic oligonucleotide
ucguuccaaagcgcagagg

SEQ ID NO: 1264803 - RNA, 19 nt, Artificial Sequence
  Description of Artificial Sequence: Synthetic oligonucleotide
aguaugcggggaugcagau

SEQ ID NO: 1264804 - RNA, 19 nt, Artificial Sequence
  Description of Artificial Sequence: Synthetic oligonucleotide
guuagcuccccuauccuaa

SEQ ID NO: 1264805 - RNA, 19 nt, Artificial Sequence
  Description of Artificial Sequence: Synthetic oligonucleotide
gcccgggugaagaagaugc

SEQ ID NO: 1264806 - RNA, 19 nt, Artificial Sequence
  Description of Artificial Sequence: Synthetic oligonucleotide
ucgagcacugggguugggc

SEQ ID NO: 1264807 - RNA, 19 nt, Artificial Sequence
  Description of Artificial Sequence: Synthetic oligonucleotide
agcguaggugguucacaug

SEQ ID NO: 1264808 - RNA, 19 nt, Artificial Sequence
  Description of Artificial Sequence: Synthetic oligonucleotide
aagugagcgucaagcucag

SEQ ID NO: 1264809 - RNA, 19 nt, Artificial Sequence
  Description of Artificial Sequence: Synthetic oligonucleotide
ugccuuaagggagcuggga

SEQ ID NO: 1264810 - RNA, 19 nt, Artificial Sequence
  Description of Artificial Sequence: Synthetic oligonucleotide
gagccagucaggguccaug

SEQ ID NO: 1264811 - RNA, 19 nt, Artificial Sequence
  Description of Artificial Sequence: Synthetic oligonucleotide
ugcgcaagggagugaggaa

SEQ ID NO: 1264812 - RNA, 19 nt, Artificial Sequence
  Description of Artificial Sequence: Synthetic oligonucleotide
gaggcgcuggccgagagaa

SEQ ID NO: 1264813 - RNA, 19 nt, Artificial Sequence
  Description of Artificial Sequence: Synthetic oligonucleotide
auucuguuguguagguccu

SEQ ID NO: 1264814 - RNA, 19 nt, Artificial Sequence
  Description of Artificial Sequence: Synthetic oligonucleotide
cuuggccgaauuucuccuc

SEQ ID NO: 1264815 - RNA, 19 nt, Artificial Sequence
  Description of Artificial Sequence: Synthetic oligonucleotide
ugcaugagugauggcugca

SEQ ID NO: 1264816 - RNA, 19 nt, Artificial Sequence
  Description of Artificial Sequence: Synthetic oligonucleotide
ggcuuugcgggucccacug

SEQ ID NO: 1264817 - RNA, 19 nt, Artificial Sequence
  Description of Artificial Sequence: Synthetic oligonucleotide
uggccgaauuucuccucug

SEQ ID NO: 1264818 - RNA, 19 nt, Artificial Sequence
  Description of Artificial Sequence: Synthetic oligonucleotide
ggaguaugcggggaugcag

SEQ ID NO: 1264819 - RNA, 19 nt, Artificial Sequence
  Description of Artificial Sequence: Synthetic oligonucleotide
uggccgagagaauguaauu

SEQ ID NO: 1264820 - RNA, 19 nt, Artificial Sequence
  Description of Artificial Sequence: Synthetic oligonucleotide
augugucgguagcacugug

SEQ ID NO: 1264821 - RNA, 19 nt, Artificial Sequence
  Description of Artificial Sequence: Synthetic oligonucleotide
ggccacucgaagcucuugc

SEQ ID NO: 1264822 - RNA, 19 nt, Artificial Sequence
  Description of Artificial Sequence: Synthetic oligonucleotide
agcuucugacaccuugauu

SEQ ID NO: 1264823 - RNA, 19 nt, Artificial Sequence
  Description of Artificial Sequence: Synthetic oligonucleotide
uggaguaugcggggaugca

SEQ ID NO: 1264824 - RNA, 19 nt, Artificial Sequence
  Description of Artificial Sequence: Synthetic oligonucleotide
gaggucuagucuccugaaa

SEQ ID NO: 1264825 - RNA, 19 nt, Artificial Sequence
  Description of Artificial Sequence: Synthetic oligonucleotide
gccgaauuucuccucugug

SEQ ID NO: 1264826 - RNA, 19 nt, Artificial Sequence
  Description of Artificial Sequence: Synthetic oligonucleotide
aaacagagugcugccucuu

SEQ ID NO: 1264827 - RNA, 19 nt, Artificial Sequence
  Description of Artificial Sequence: Synthetic oligonucleotide
ucaaggcgccgguucugca

SEQ ID NO: 1264828 - RNA, 19 nt, Artificial Sequence
  Description of Artificial Sequence: Synthetic oligonucleotide
ugcggggaugcagaucaga

SEQ ID NO: 1264829 - RNA, 19 nt, Artificial Sequence
  Description of Artificial Sequence: Synthetic oligonucleotide
guggaugaagucccgcucu

SEQ ID NO: 1264830 - RNA, 19 nt, Artificial Sequence
  Description of Artificial Sequence: Synthetic oligonucleotide
ugcuucggccauguacuga

SEQ ID NO: 1264831 - RNA, 19 nt, Artificial Sequence
  Description of Artificial Sequence: Synthetic oligonucleotide
gggacuuugcccuucuugu

SEQ ID NO: 1264832 - RNA, 19 nt, Artificial Sequence
  Description of Artificial Sequence: Synthetic oligonucleotide
cagggcuagcagaggggcc

SEQ ID NO: 1264833 - RNA, 19 nt, Artificial Sequence
  Description of Artificial Sequence: Synthetic oligonucleotide
gccagaacaggguuagcuc

SEQ ID NO: 1264834 - RNA, 19 nt, Artificial Sequence
  Description of Artificial Sequence: Synthetic oligonucleotide
uuguaucccuccugccuua

SEQ ID NO: 1264835 - RNA, 19 nt, Artificial Sequence
  Description of Artificial Sequence: Synthetic oligonucleotide
uggcgcgcccguccgcagg

SEQ ID NO: 1264836 - RNA, 19 nt, Artificial Sequence
  Description of Artificial Sequence: Synthetic oligonucleotide
guuguaucccuccugccuu

SEQ ID NO: 1264837 - RNA, 19 nt, Artificial Sequence
  Description of Artificial Sequence: Synthetic oligonucleotide
ugucgguagcacugugcau

SEQ ID NO: 1264838 - RNA, 19 nt, Artificial Sequence
  Description of Artificial Sequence: Synthetic oligonucleotide
gcgcaagggagugaggaag

SEQ ID NO: 1264839 - RNA, 19 nt, Artificial Sequence
  Description of Artificial Sequence: Synthetic oligonucleotide
cuuggugcugucugcccga

SEQ ID NO: 1264840 - RNA, 19 nt, Artificial Sequence
  Description of Artificial Sequence: Synthetic oligonucleotide
uagagcacccgggcuuugc

SEQ ID NO: 1264841 - RNA, 19 nt, Artificial Sequence
  Description of Artificial Sequence: Synthetic oligonucleotide
uagcuccccuauccuaaaa

SEQ ID NO: 1264842 - RNA, 19 nt, Artificial Sequence
  Description of Artificial Sequence: Synthetic oligonucleotide
guaucccuccugccuuaag

SEQ ID NO: 1264843 - RNA, 19 nt, Artificial Sequence
  Description of Artificial Sequence: Synthetic oligonucleotide
ggcgcuggccgagagaaug

SEQ ID NO: 1264844 - RNA, 19 nt, Artificial Sequence
  Description of Artificial Sequence: Synthetic oligonucleotide
ccagcagaagacgagucac

SEQ ID NO: 1264845 - RNA, 19 nt, Artificial Sequence
  Description of Artificial Sequence: Synthetic oligonucleotide
gaauucauggaggcagcgu

SEQ ID NO: 1264846 - RNA, 19 nt, Artificial Sequence
  Description of Artificial Sequence: Synthetic oligonucleotide
uuacgaggucuagucuccu

SEQ ID NO: 1264847 - RNA, 19 nt, Artificial Sequence
  Description of Artificial Sequence: Synthetic oligonucleotide
gcagaucagaagcagggcu

SEQ ID NO: 1264848 - RNA, 19 nt, Artificial Sequence
  Description of Artificial Sequence: Synthetic oligonucleotide
ggcugcuuagcugagaagu

SEQ ID NO: 1264849 - RNA, 19 nt, Artificial Sequence
  Description of Artificial Sequence: Synthetic oligonucleotide
uggccuucuuuagccgugc

SEQ ID NO: 1264850 - RNA, 19 nt, Artificial Sequence
  Description of Artificial Sequence: Synthetic oligonucleotide
ggagccauucuguugugua

SEQ ID NO: 1264851 - RNA, 19 nt, Artificial Sequence
  Description of Artificial Sequence: Synthetic oligonucleotide
cagcaugugucgguagcac

SEQ ID NO: 1264852 - RNA, 19 nt, Artificial Sequence
  Description of Artificial Sequence: Synthetic oligonucleotide
cagucugccucaggauccg

SEQ ID NO: 1264853 - RNA, 19 nt, Artificial Sequence
  Description of Artificial Sequence: Synthetic oligonucleotide
agccccuguggguaccaca

SEQ ID NO: 1264854 - RNA, 19 nt, Artificial Sequence
  Description of Artificial Sequence: Synthetic oligonucleotide
guugcgcaagggagugagg

SEQ ID NO: 1264855 - RNA, 19 nt, Artificial Sequence
  Description of Artificial Sequence: Synthetic oligonucleotide
cugugcauaguagguuguc

SEQ ID NO: 1264856 - RNA, 19 nt, Artificial Sequence
  Description of Artificial Sequence: Synthetic oligonucleotide
aaguugcgcaagggaguga

SEQ ID NO: 1264857 - RNA, 19 nt, Artificial Sequence
  Description of Artificial Sequence: Synthetic oligonucleotide
guaaguggcagggccugga

SEQ ID NO: 1264858 - RNA, 19 nt, Artificial Sequence
  Description of Artificial Sequence: Synthetic oligonucleotide
caggguuagcuccccuauc

SEQ ID NO: 1264859 - RNA, 19 nt, Artificial Sequence
  Description of Artificial Sequence: Synthetic oligonucleotide
ggucuagucuccugaaagu

SEQ ID NO: 1264860 - RNA, 19 nt, Artificial Sequence
  Description of Artificial Sequence: Synthetic oligonucleotide
gucacuucugccugccggu

SEQ ID NO: 1264861 - RNA, 19 nt, Artificial Sequence
  Description of Artificial Sequence: Synthetic oligonucleotide
guagguugucugagacuug

SEQ ID NO: 1264862 - RNA, 19 nt, Artificial Sequence
  Description of Artificial Sequence: Synthetic oligonucleotide
cuggccgagagaauguaau

SEQ ID NO: 1264863 - RNA, 19 nt, Artificial Sequence
  Description of Artificial Sequence: Synthetic oligonucleotide
caaaccagccccugugggu

SEQ ID NO: 1264864 - RNA, 19 nt, Artificial Sequence
  Description of Artificial Sequence: Synthetic oligonucleotide
gccuuaagggagcugggaa

SEQ ID NO: 1264865 - RNA, 19 nt, Artificial Sequence
  Description of Artificial Sequence: Synthetic oligonucleotide
uguaucccuccugccuuaa

SEQ ID NO: 1264866 - RNA, 19 nt, Artificial Sequence
  Description of Artificial Sequence: Synthetic oligonucleotide
agggagugaggaagcugag

SEQ ID NO: 1264867 - RNA, 19 nt, Artificial Sequence
  Description of Artificial Sequence: Synthetic oligonucleotide
gguuagcuccccuauccua

SEQ ID NO: 1264868 - RNA, 19 nt, Artificial Sequence
  Description of Artificial Sequence: Synthetic oligonucleotide
gcugcuucggccauguacu

SEQ ID NO: 1264869 - RNA, 19 nt, Artificial Sequence
  Description of Artificial Sequence: Synthetic oligonucleotide
ucucaccaaugagccaguc

SEQ ID NO: 1264870 - RNA, 19 nt, Artificial Sequence
  Description of Artificial Sequence: Synthetic oligonucleotide
ccgggugaagaagaugccc

SEQ ID NO: 1264871 - RNA, 19 nt, Artificial Sequence
  Description of Artificial Sequence: Synthetic oligonucleotide
ggaaaggggcugcuuagcu

SEQ ID NO: 1264872 - RNA, 19 nt, Artificial Sequence
  Description of Artificial Sequence: Synthetic oligonucleotide
gcaagcuguagacagugau

SEQ ID NO: 1264873 - RNA, 19 nt, Artificial Sequence
  Description of Artificial Sequence: Synthetic oligonucleotide
cagguucuguagugcccac

SEQ ID NO: 1264874 - RNA, 19 nt, Artificial Sequence
  Description of Artificial Sequence: Synthetic oligonucleotide
agccgccucuccuucgaaa

SEQ ID NO: 1264875 - RNA, 19 nt, Artificial Sequence
  Description of Artificial Sequence: Synthetic oligonucleotide
accccaauugugguaccaa

SEQ ID NO: 1264876 - RNA, 19 nt, Artificial Sequence
  Description of Artificial Sequence: Synthetic oligonucleotide
cagaggcgcuggccgagag

SEQ ID NO: 1264877 - RNA, 19 nt, Artificial Sequence
  Description of Artificial Sequence: Synthetic oligonucleotide
cucucucaccaaugagcca

SEQ ID NO: 1264878 - RNA, 19 nt, Artificial Sequence
  Description of Artificial Sequence: Synthetic oligonucleotide
ggccgagagaauguaauua

SEQ ID NO: 1264879 - RNA, 19 nt, Artificial Sequence
  Description of Artificial Sequence: Synthetic oligonucleotide
gcugugauagaaggaggga

SEQ ID NO: 1264880 - RNA, 19 nt, Artificial Sequence
  Description of Artificial Sequence: Synthetic oligonucleotide
guaugcggggaugcagauc

SEQ ID NO: 1264881 - RNA, 19 nt, Artificial Sequence
  Description of Artificial Sequence: Synthetic oligonucleotide
cgaaaucguuuuccagucc

SEQ ID NO: 1264882 - RNA, 19 nt, Artificial Sequence
  Description of Artificial Sequence: Synthetic oligonucleotide
uuguugccucucucaccaa

SEQ ID NO: 1264883 - RNA, 19 nt, Artificial Sequence
  Description of Artificial Sequence: Synthetic oligonucleotide
gggcugcuuagcugagaag

SEQ ID NO: 1264884 - RNA, 19 nt, Artificial Sequence
  Description of Artificial Sequence: Synthetic oligonucleotide
auugggugacagagccaca

SEQ ID NO: 1264885 - RNA, 19 nt, Artificial Sequence
  Description of Artificial Sequence: Synthetic oligonucleotide
caccgcccgggugaagaag

SEQ ID NO: 1264886 - RNA, 19 nt, Artificial Sequence
  Description of Artificial Sequence: Synthetic oligonucleotide
auggcgcgcccguccgcag

SEQ ID NO: 1264887 - RNA, 19 nt, Artificial Sequence
  Description of Artificial Sequence: Synthetic oligonucleotide
gcgccgguucugcaggagc

SEQ ID NO: 1264888 - RNA, 19 nt, Artificial Sequence
  Description of Artificial Sequence: Synthetic oligonucleotide
gcaccgucguggcuuuggc

SEQ ID NO: 1264889 - RNA, 19 nt, Artificial Sequence
  Description of Artificial Sequence: Synthetic oligonucleotide
gaagucccgcucugcugcu

SEQ ID NO: 1264890 - RNA, 19 nt, Artificial Sequence
  Description of Artificial Sequence: Synthetic oligonucleotide
cagcguaggugguucacau

SEQ ID NO: 1264891 - RNA, 19 nt, Artificial Sequence
  Description of Artificial Sequence: Synthetic oligonucleotide
ggagccgccucuccuucga

SEQ ID NO: 1264892 - RNA, 19 nt, Artificial Sequence
  Description of Artificial Sequence: Synthetic oligonucleotide
ugacccucgagggcaccuu

SEQ ID NO: 1264893 - RNA, 19 nt, Artificial Sequence
  Description of Artificial Sequence: Synthetic oligonucleotide
cauggcgcgcccguccgca

SEQ ID NO: 1264894 - RNA, 19 nt, Artificial Sequence
  Description of Artificial Sequence: Synthetic oligonucleotide
caccccaauugugguacca

SEQ ID NO: 1264895 - RNA, 19 nt, Artificial Sequence
  Description of Artificial Sequence: Synthetic oligonucleotide
gaggggccuggagccauuc

SEQ ID NO: 1264896 - RNA, 19 nt, Artificial Sequence
  Description of Artificial Sequence: Synthetic oligonucleotide
aguaggugacagggacuuu

SEQ ID NO: 1264897 - RNA, 19 nt, Artificial Sequence
  Description of Artificial Sequence: Synthetic oligonucleotide
caugugucgguagcacugu

SEQ ID NO: 1264898 - RNA, 19 nt, Artificial Sequence
  Description of Artificial Sequence: Synthetic oligonucleotide
ggggacaaaccagccccug

SEQ ID NO: 1264899 - RNA, 19 nt, Artificial Sequence
  Description of Artificial Sequence: Synthetic oligonucleotide
gcggggaugcagaucagaa

SEQ ID NO: 1264900 - RNA, 19 nt, Artificial Sequence
  Description of Artificial Sequence: Synthetic oligonucleotide
ugagccagucaggguccau

SEQ ID NO: 1264901 - RNA, 19 nt, Artificial Sequence
  Description of Artificial Sequence: Synthetic oligonucleotide
ccuucuuuagccgugcuuu

SEQ ID NO: 1264902 - RNA, 19 nt, Artificial Sequence
  Description of Artificial Sequence: Synthetic oligonucleotide
gcagcguaggugguucaca

SEQ ID NO: 1264903 - RNA, 19 nt, Artificial Sequence
  Description of Artificial Sequence: Synthetic oligonucleotide
gcguccaggucaaggcgcc

SEQ ID NO: 1264904 - RNA, 19 nt, Artificial Sequence
  Description of Artificial Sequence: Synthetic oligonucleotide
cgagggcaccuuucugucc

SEQ ID NO: 1264905 - RNA, 19 nt, Artificial Sequence
  Description of Artificial Sequence: Synthetic oligonucleotide
gggacaaaccagccccugu

SEQ ID NO: 1264906 - RNA, 19 nt, Artificial Sequence
  Description of Artificial Sequence: Synthetic oligonucleotide
ggcagcguaggugguucac

SEQ ID NO: 1264907 - RNA, 19 nt, Artificial Sequence
  Description of Artificial Sequence: Synthetic oligonucleotide
ugcaggcguccaggucaag

SEQ ID NO: 1264908 - RNA, 19 nt, Artificial Sequence
  Description of Artificial Sequence: Synthetic oligonucleotide
ucgcugcugucagcugccu

SEQ ID NO: 1264909 - RNA, 19 nt, Artificial Sequence
  Description of Artificial Sequence: Synthetic oligonucleotide
gccauucuguuguguaggu

SEQ ID NO: 1264910 - RNA, 19 nt, Artificial Sequence
  Description of Artificial Sequence: Synthetic oligonucleotide
agugagcgucaagcucagu

SEQ ID NO: 1264911 - RNA, 19 nt, Artificial Sequence
  Description of Artificial Sequence: Synthetic oligonucleotide
ggugguucacaugggugcu

SEQ ID NO: 1264912 - RNA, 19 nt, Artificial Sequence
  Description of Artificial Sequence: Synthetic oligonucleotide
ggguuagcuccccuauccu

SEQ ID NO: 1264913 - RNA, 19 nt, Artificial Sequence
  Description of Artificial Sequence: Synthetic oligonucleotide
ccuaguuguuucugcagau

SEQ ID NO: 1264914 - RNA, 19 nt, Artificial Sequence
  Description of Artificial Sequence: Synthetic oligonucleotide
guccgacgccagcuucuuc

SEQ ID NO: 1264915 - RNA, 19 nt, Artificial Sequence
  Description of Artificial Sequence: Synthetic oligonucleotide
ccgguucugcaggagccgc

SEQ ID NO: 1264916 - RNA, 19 nt, Artificial Sequence
  Description of Artificial Sequence: Synthetic oligonucleotide
ccgugcuuugcaggcgucc

SEQ ID NO: 1264917 - RNA, 19 nt, Artificial Sequence
  Description of Artificial Sequence: Synthetic oligonucleotide
gagccgccucuccuucgaa

SEQ ID NO: 1264918 - RNA, 19 nt, Artificial Sequence
  Description of Artificial Sequence: Synthetic oligonucleotide
ccgucguggcuuuggcuuc

SEQ ID NO: 1264919 - RNA, 19 nt, Artificial Sequence
  Description of Artificial Sequence: Synthetic oligonucleotide
cagcuucugacaccuugau

SEQ ID NO: 1264920 - RNA, 19 nt, Artificial Sequence
  Description of Artificial Sequence: Synthetic oligonucleotide
cacccgggcuuugcggguc

SEQ ID NO: 1264921 - RNA, 19 nt, Artificial Sequence
  Description of Artificial Sequence: Synthetic oligonucleotide
gccgccucuccuucgaaau

SEQ ID NO: 1264922 - RNA, 19 nt, Artificial Sequence
  Description of Artificial Sequence: Synthetic oligonucleotide
gacccucgagggcaccuuu

SEQ ID NO: 1264923 - RNA, 19 nt, Artificial Sequence
  Description of Artificial Sequence: Synthetic oligonucleotide
caccgucguggcuuuggcu

SEQ ID NO: 1264924 - RNA, 19 nt, Artificial Sequence
  Description of Artificial Sequence: Synthetic oligonucleotide
gcuagcagaggggccugga

SEQ ID NO: 1264925 - RNA, 19 nt, Artificial Sequence
  Description of Artificial Sequence: Synthetic oligonucleotide
gcuggccgagagaauguaa

SEQ ID NO: 1264926 - RNA, 19 nt, Artificial Sequence
  Description of Artificial Sequence: Synthetic oligonucleotide
ccaaagcgcagaggcgcug

SEQ ID NO: 1264927 - RNA, 19 nt, Artificial Sequence
  Description of Artificial Sequence: Synthetic oligonucleotide
ggugacccucgagggcacc

SEQ ID NO: 1264928 - RNA, 19 nt, Artificial Sequence
  Description of Artificial Sequence: Synthetic oligonucleotide
gugacccucgagggcaccu

SEQ ID NO: 1264929 - RNA, 19 nt, Artificial Sequence
  Description of Artificial Sequence: Synthetic oligonucleotide
ccaaugagccagucagggu

SEQ ID NO: 1264930 - RNA, 19 nt, Artificial Sequence
  Description of Artificial Sequence: Synthetic oligonucleotide
gucaggcaccgucguggcu

SEQ ID NO: 1264931 - RNA, 19 nt, Artificial Sequence
  Description of Artificial Sequence: Synthetic oligonucleotide
gguucacaugggugcugcu

SEQ ID NO: 1264932 - RNA, 19 nt, Artificial Sequence
  Description of Artificial Sequence: Synthetic oligonucleotide
gcugcuuagcugagaaguu

SEQ ID NO: 1264933 - RNA, 19 nt, Artificial Sequence
  Description of Artificial Sequence: Synthetic oligonucleotide
gcgcagaggcgcuggccga

SEQ ID NO: 1264934 - RNA, 19 nt, Artificial Sequence
  Description of Artificial Sequence: Synthetic oligonucleotide
cgugcuuugcaggcgucca

SEQ ID NO: 1264935 - RNA, 19 nt, Artificial Sequence
  Description of Artificial Sequence: Synthetic oligonucleotide
gcagaggcgcuggccgaga

SEQ ID NO: 1264936 - RNA, 19 nt, Artificial Sequence
  Description of Artificial Sequence: Synthetic oligonucleotide
aggcgcuggccgagagaau

SEQ ID NO: 1264937 - RNA, 19 nt, Artificial Sequence
  Description of Artificial Sequence: Synthetic oligonucleotide
ccccauuggugacccucga

SEQ ID NO: 1264938 - RNA, 19 nt, Artificial Sequence
  Description of Artificial Sequence: Synthetic oligonucleotide
cgcccgggugaagaagaug

SEQ ID NO: 1264939 - RNA, 19 nt, Artificial Sequence
  Description of Artificial Sequence: Synthetic oligonucleotide
caggcaccgucguggcuuu

SEQ ID NO: 1264940 - RNA, 19 nt, Artificial Sequence
  Description of Artificial Sequence: Synthetic oligonucleotide
gcguccgacgccagcuucu

SEQ ID NO: 1264941 - RNA, 19 nt, Artificial Sequence
  Description of Artificial Sequence: Synthetic oligonucleotide
gcgcuggccgagagaaugu

SEQ ID NO: 1264942 - RNA, 19 nt, Artificial Sequence
  Description of Artificial Sequence: Synthetic oligonucleotide
cccgggcuuugcggguccc

SEQ ID NO: 1264943 - RNA, 19 nt, Artificial Sequence
  Description of Artificial Sequence: Synthetic oligonucleotide
ggccuggaaaggggcugcu

SEQ ID NO: 1264944 - RNA, 19 nt, Artificial Sequence
  Description of Artificial Sequence: Synthetic oligonucleotide
ccgacgccagcuucuucau

SEQ ID NO: 1264945 - RNA, 19 nt, Artificial Sequence
  Description of Artificial Sequence: Synthetic oligonucleotide
ccgggcuuugcggguccca

SEQ ID NO: 1264946 - RNA, 19 nt, Artificial Sequence
  Description of Artificial Sequence: Synthetic oligonucleotide
cgcuggccgagagaaugua

SEQ ID NO: 1264947 - RNA, 19 nt, Artificial Sequence
  Description of Artificial Sequence: Synthetic oligonucleotide
cccagacgcuucucagcuu

SEQ ID NO: 1264948 - RNA, 19 nt, Artificial Sequence
  Description of Artificial Sequence: Synthetic oligonucleotide
cgucguggcuuuggcuucu

SEQ ID NO: 1264949 - RNA, 19 nt, Artificial Sequence
  Description of Artificial Sequence: Synthetic oligonucleotide
ccaggucaaggcgccgguu

SEQ ID NO: 1264950 - RNA, 19 nt, Artificial Sequence
  Description of Artificial Sequence: Synthetic oligonucleotide
cguccgacgccagcuucuu

SEQ ID NO: 1264951 - RNA, 19 nt, Artificial Sequence
  Description of Artificial Sequence: Synthetic oligonucleotide
uauauauauauauauaucc

SEQ ID NO: 1264952 - RNA, 19 nt, Artificial Sequence
  Description of Artificial Sequence: Synthetic oligonucleotide
aaagagugugguuucaucc

SEQ ID NO: 1264953 - RNA, 19 nt, Artificial Sequence
  Description of Artificial Sequence: Synthetic oligonucleotide
aauucacacacuuggaagc

SEQ ID NO: 1264954 - RNA, 19 nt, Artificial Sequence
  Description of Artificial Sequence: Synthetic oligonucleotide
uauauauauauauccaugg

SEQ ID NO: 1264955 - RNA, 19 nt, Artificial Sequence
  Description of Artificial Sequence: Synthetic oligonucleotide
uagaauuauagcaugaugc

SEQ ID NO: 1264956 - RNA, 19 nt, Artificial Sequence
  Description of Artificial Sequence: Synthetic oligonucleotide
uauauauauauauauauau

SEQ ID NO: 1264957 - RNA, 19 nt, Artificial Sequence
  Description of Artificial Sequence: Synthetic oligonucleotide
uggauaaugaaaauaaacu

SEQ ID NO: 1264958 - RNA, 19 nt, Artificial Sequence
  Description of Artificial Sequence: Synthetic oligonucleotide
ugcuauauaccaacgaugg

SEQ ID NO: 1264959 - RNA, 19 nt, Artificial Sequence
  Description of Artificial Sequence: Synthetic oligonucleotide
uuugacacaauauuguucu

SEQ ID NO: 1264960 - RNA, 19 nt, Artificial Sequence
  Description of Artificial Sequence: Synthetic oligonucleotide
auggucuucggcuugauac

SEQ ID NO: 1264961 - RNA, 19 nt, Artificial Sequence
  Description of Artificial Sequence: Synthetic oligonucleotide
gaagugaaauaccacaucc

SEQ ID NO: 1264962 - RNA, 19 nt, Artificial Sequence
  Description of Artificial Sequence: Synthetic oligonucleotide
uuuccuaguaaaauaagga

SEQ ID NO: 1264963 - RNA, 19 nt, Artificial Sequence
  Description of Artificial Sequence: Synthetic oligonucleotide
aauauuuaagacuggucca

SEQ ID NO: 1264964 - RNA, 19 nt, Artificial Sequence
  Description of Artificial Sequence: Synthetic oligonucleotide
cauaaauccacacuggcag

SEQ ID NO: 1264965 - RNA, 19 nt, Artificial Sequence
  Description of Artificial Sequence: Synthetic oligonucleotide
acuaacaguguuuugccac

SEQ ID NO: 1264966 - RNA, 19 nt, Artificial Sequence
  Description of Artificial Sequence: Synthetic oligonucleotide
aagagcuugaccuauguau

SEQ ID NO: 1264967 - RNA, 19 nt, Artificial Sequence
  Description of Artificial Sequence: Synthetic oligonucleotide
agaucacacacacacacac

SEQ ID NO: 1264968 - RNA, 19 nt, Artificial Sequence
  Description of Artificial Sequence: Synthetic oligonucleotide
auggacaacaucauaaggc

SEQ ID NO: 1264969 - RNA, 19 nt, Artificial Sequence
  Description of Artificial Sequence: Synthetic oligonucleotide
aaucgcaucacaaugcuag

SEQ ID NO: 1264970 - RNA, 19 nt, Artificial Sequence
  Description of Artificial Sequence: Synthetic oligonucleotide
aucacacacacacacacac

SEQ ID NO: 1264971 - RNA, 19 nt, Artificial Sequence
  Description of Artificial Sequence: Synthetic oligonucleotide
aucauaucuagucacauga

SEQ ID NO: 1264972 - RNA, 19 nt, Artificial Sequence
  Description of Artificial Sequence: Synthetic oligonucleotide
aauuauagcaugaugcuga

SEQ ID NO: 1264973 - RNA, 19 nt, Artificial Sequence
  Description of Artificial Sequence: Synthetic oligonucleotide
uuuaagacugguccaaccc

SEQ ID NO: 1264974 - RNA, 19 nt, Artificial Sequence
  Description of Artificial Sequence: Synthetic oligonucleotide
uauauauauauauauccau

SEQ ID NO: 1264975 - RNA, 19 nt, Artificial Sequence
  Description of Artificial Sequence: Synthetic oligonucleotide
uuagaauuauagcaugaug

SEQ ID NO: 1264976 - RNA, 19 nt, Artificial Sequence
  Description of Artificial Sequence: Synthetic oligonucleotide
aaaagagugugguuucauc

SEQ ID NO: 1264977 - RNA, 19 nt, Artificial Sequence
  Description of Artificial Sequence: Synthetic oligonucleotide
aggugcaacaacuuauggc

SEQ ID NO: 1264978 - RNA, 19 nt, Artificial Sequence
  Description of Artificial Sequence: Synthetic oligonucleotide
uagauaauucagaagcccc

SEQ ID NO: 1264979 - RNA, 19 nt, Artificial Sequence
  Description of Artificial Sequence: Synthetic oligonucleotide
auauauauauauauauauc

SEQ ID NO: 1264980 - RNA, 19 nt, Artificial Sequence
  Description of Artificial Sequence: Synthetic oligonucleotide
ucucaauucaguuguuagg

SEQ ID NO: 1264981 - RNA, 19 nt, Artificial Sequence
  Description of Artificial Sequence: Synthetic oligonucleotide
uaccugaucaaauagaguu

SEQ ID NO: 1264982 - RNA, 19 nt, Artificial Sequence
  Description of Artificial Sequence: Synthetic oligonucleotide
gauggacaacaucauaagg

SEQ ID NO: 1264983 - RNA, 19 nt, Artificial Sequence
  Description of Artificial Sequence: Synthetic oligonucleotide
aauggauggauaaugaaaa

SEQ ID NO: 1264984 - RNA, 19 nt, Artificial Sequence
  Description of Artificial Sequence: Synthetic oligonucleotide
ugugguuaugacauucucc

SEQ ID NO: 1264985 - RNA, 19 nt, Artificial Sequence
  Description of Artificial Sequence: Synthetic oligonucleotide
acauaaucaaaucgcauca

SEQ ID NO: 1264986 - RNA, 19 nt, Artificial Sequence
  Description of Artificial Sequence: Synthetic oligonucleotide
uucucaauucaguuguuag

SEQ ID NO: 1264987 - RNA, 19 nt, Artificial Sequence
  Description of Artificial Sequence: Synthetic oligonucleotide
caaauagaguucuuuauuc

SEQ ID NO: 1264988 - RNA, 19 nt, Artificial Sequence
  Description of Artificial Sequence: Synthetic oligonucleotide
uuagauaauucagaagccc

SEQ ID NO: 1264989 - RNA, 19 nt, Artificial Sequence
  Description of Artificial Sequence: Synthetic oligonucleotide
auauucaugcuuuaauggu

SEQ ID NO: 1264990 - RNA, 19 nt, Artificial Sequence
  Description of Artificial Sequence: Synthetic oligonucleotide
ucacucauaaucccagugc

SEQ ID NO: 1264991 - RNA, 19 nt, Artificial Sequence
  Description of Artificial Sequence: Synthetic oligonucleotide
acuugaaugccacagggcu

SEQ ID NO: 1264992 - RNA, 19 nt, Artificial Sequence
  Description of Artificial Sequence: Synthetic oligonucleotide
uucggcuugauacauaaau

SEQ ID NO: 1264993 - RNA, 19 nt, Artificial Sequence
  Description of Artificial Sequence: Synthetic oligonucleotide
uuaagacugguccaacccc

SEQ ID NO: 1264994 - RNA, 19 nt, Artificial Sequence
  Description of Artificial Sequence: Synthetic oligonucleotide
uggacaacaucauaaggca

SEQ ID NO: 1264995 - RNA, 19 nt, Artificial Sequence
  Description of Artificial Sequence: Synthetic oligonucleotide
ugugcuauauaccaacgau

SEQ ID NO: 1264996 - RNA, 19 nt, Artificial Sequence
  Description of Artificial Sequence: Synthetic oligonucleotide
cuugaaaguagguaguguc

SEQ ID NO: 1264997 - RNA, 19 nt, Artificial Sequence
  Description of Artificial Sequence: Synthetic oligonucleotide
uauucuagguuggauaacc

SEQ ID NO: 1264998 - RNA, 19 nt, Artificial Sequence
  Description of Artificial Sequence: Synthetic oligonucleotide
uucggugugcuauauacca

SEQ ID NO: 1264999 - RNA, 19 nt, Artificial Sequence
  Description of Artificial Sequence: Synthetic oligonucleotide
agcaguguucaauacauca

SEQ ID NO: 1265000 - RNA, 19 nt, Artificial Sequence
  Description of Artificial Sequence: Synthetic oligonucleotide
caauuuuaagcacgaagcc

SEQ ID NO: 1265001 - RNA, 19 nt, Artificial Sequence
  Description of Artificial Sequence: Synthetic oligonucleotide
guuguaccugaucaaauag

SEQ ID NO: 1265002 - RNA, 19 nt, Artificial Sequence
  Description of Artificial Sequence: Synthetic oligonucleotide
ucaucucuuguuaaauagc

SEQ ID NO: 1265003 - RNA, 19 nt, Artificial Sequence
  Description of Artificial Sequence: Synthetic oligonucleotide
uguaggugcaacaacuuau

SEQ ID NO: 1265004 - RNA, 19 nt, Artificial Sequence
  Description of Artificial Sequence: Synthetic oligonucleotide
uagcauuccauaauauucu

SEQ ID NO: 1265005 - RNA, 19 nt, Artificial Sequence
  Description of Artificial Sequence: Synthetic oligonucleotide
aauaccacauccuuccaua

SEQ ID NO: 1265006 - RNA, 19 nt, Artificial Sequence
  Description of Artificial Sequence: Synthetic oligonucleotide
auauauauauauauccaug

SEQ ID NO: 1265007 - RNA, 19 nt, Artificial Sequence
  Description of Artificial Sequence: Synthetic oligonucleotide
cauauuguauuuccaaaug

SEQ ID NO: 1265008 - RNA, 19 nt, Artificial Sequence
  Description of Artificial Sequence: Synthetic oligonucleotide
ucaacagacggaacuuggg

SEQ ID NO: 1265009 - RNA, 19 nt, Artificial Sequence
  Description of Artificial Sequence: Synthetic oligonucleotide
auauauauauauccaugga

SEQ ID NO: 1265010 - RNA, 19 nt, Artificial Sequence
  Description of Artificial Sequence: Synthetic oligonucleotide
uuccuaguaaaauaaggaa

SEQ ID NO: 1265011 - RNA, 19 nt, Artificial Sequence
  Description of Artificial Sequence: Synthetic oligonucleotide
uugaaaguagguaguguca

SEQ ID NO: 1265012 - RNA, 19 nt, Artificial Sequence
  Description of Artificial Sequence: Synthetic oligonucleotide
uauuccauggguaaauauu

SEQ ID NO: 1265013 - RNA, 19 nt, Artificial Sequence
  Description of Artificial Sequence: Synthetic oligonucleotide
cuaccuuacaagauggcug

SEQ ID NO: 1265014 - RNA, 19 nt, Artificial Sequence
  Description of Artificial Sequence: Synthetic oligonucleotide
auauauauauauauaucca

SEQ ID NO: 1265015 - RNA, 19 nt, Artificial Sequence
  Description of Artificial Sequence: Synthetic oligonucleotide
uucacucauaaucccagug

SEQ ID NO: 1265016 - RNA, 19 nt, Artificial Sequence
  Description of Artificial Sequence: Synthetic oligonucleotide
uuaagcacgaagccccaag

SEQ ID NO: 1265017 - RNA, 19 nt, Artificial Sequence
  Description of Artificial Sequence: Synthetic oligonucleotide
uccagaucauaucuaguca

SEQ ID NO: 1265018 - RNA, 19 nt, Artificial Sequence
  Description of Artificial Sequence: Synthetic oligonucleotide
gugguuaugacauucucca

SEQ ID NO: 1265019 - RNA, 19 nt, Artificial Sequence
  Description of Artificial Sequence: Synthetic oligonucleotide
uucucuuuaaacugauccu

SEQ ID NO: 1265020 - RNA, 19 nt, Artificial Sequence
  Description of Artificial Sequence: Synthetic oligonucleotide
cauggguaaauauuuaaga

SEQ ID NO: 1265021 - RNA, 19 nt, Artificial Sequence
  Description of Artificial Sequence: Synthetic oligonucleotide
uauucaugcuuuaauggua

SEQ ID NO: 1265022 - RNA, 19 nt, Artificial Sequence
  Description of Artificial Sequence: Synthetic oligonucleotide
auauagcagaaaguucugc

SEQ ID NO: 1265023 - RNA, 19 nt, Artificial Sequence
  Description of Artificial Sequence: Synthetic oligonucleotide
agauagcuaccuuacaaga

SEQ ID NO: 1265024 - RNA, 19 nt, Artificial Sequence
  Description of Artificial Sequence: Synthetic oligonucleotide
ugcuuuaaugguacuuugc

SEQ ID NO: 1265025 - RNA, 19 nt, Artificial Sequence
  Description of Artificial Sequence: Synthetic oligonucleotide
aguuguuaggguucggugu

SEQ ID NO: 1265026 - RNA, 19 nt, Artificial Sequence
  Description of Artificial Sequence: Synthetic oligonucleotide
uuguaccugaucaaauaga

SEQ ID NO: 1265027 - RNA, 19 nt, Artificial Sequence
  Description of Artificial Sequence: Synthetic oligonucleotide
auucaugcuuuaaugguac

SEQ ID NO: 1265028 - RNA, 19 nt, Artificial Sequence
  Description of Artificial Sequence: Synthetic oligonucleotide
aaaguuggacagaugaaga

SEQ ID NO: 1265029 - RNA, 19 nt, Artificial Sequence
  Description of Artificial Sequence: Synthetic oligonucleotide
agacgaauggucuucggcu

SEQ ID NO: 1265030 - RNA, 19 nt, Artificial Sequence
  Description of Artificial Sequence: Synthetic oligonucleotide
ucgccaauugucuauaaau

SEQ ID NO: 1265031 - RNA, 19 nt, Artificial Sequence
  Description of Artificial Sequence: Synthetic oligonucleotide
uauguauccucucuucauc

SEQ ID NO: 1265032 - RNA, 19 nt, Artificial Sequence
  Description of Artificial Sequence: Synthetic oligonucleotide
auauauauccauggagauc

SEQ ID NO: 1265033 - RNA, 19 nt, Artificial Sequence
  Description of Artificial Sequence: Synthetic oligonucleotide
ucauguuggugccaaguac

SEQ ID NO: 1265034 - RNA, 19 nt, Artificial Sequence
  Description of Artificial Sequence: Synthetic oligonucleotide
ugcugaggaguucaaauuc

SEQ ID NO: 1265035 - RNA, 19 nt, Artificial Sequence
  Description of Artificial Sequence: Synthetic oligonucleotide
ucaguuugacccaaagcuc

SEQ ID NO: 1265036 - RNA, 19 nt, Artificial Sequence
  Description of Artificial Sequence: Synthetic oligonucleotide
ggcucuugaaaguagguag

SEQ ID NO: 1265037 - RNA, 19 nt, Artificial Sequence
  Description of Artificial Sequence: Synthetic oligonucleotide
gaauuauagcaugaugcug

SEQ ID NO: 1265038 - RNA, 19 nt, Artificial Sequence
  Description of Artificial Sequence: Synthetic oligonucleotide
auaucuagucacaugacca

SEQ ID NO: 1265039 - RNA, 19 nt, Artificial Sequence
  Description of Artificial Sequence: Synthetic oligonucleotide
aaugauucccuuccaugaa

SEQ ID NO: 1265040 - RNA, 19 nt, Artificial Sequence
  Description of Artificial Sequence: Synthetic oligonucleotide
cacacacacacacacacac

SEQ ID NO: 1265041 - RNA, 19 nt, Artificial Sequence
  Description of Artificial Sequence: Synthetic oligonucleotide
ugaagugaaauaccacauc

SEQ ID NO: 1265042 - RNA, 19 nt, Artificial Sequence
  Description of Artificial Sequence: Synthetic oligonucleotide
uuguuaaauagcagccaca

SEQ ID NO: 1265043 - RNA, 19 nt, Artificial Sequence
  Description of Artificial Sequence: Synthetic oligonucleotide
agugaaauaccacauccuu

SEQ ID NO: 1265044 - RNA, 19 nt, Artificial Sequence
  Description of Artificial Sequence: Synthetic oligonucleotide
agggacauuuucuacaaau

SEQ ID NO: 1265045 - RNA, 19 nt, Artificial Sequence
  Description of Artificial Sequence: Synthetic oligonucleotide
auaccaacgauggacaaca

SEQ ID NO: 1265046 - RNA, 19 nt, Artificial Sequence
  Description of Artificial Sequence: Synthetic oligonucleotide
uugauacauaaauccacac

SEQ ID NO: 1265047 - RNA, 19 nt, Artificial Sequence
  Description of Artificial Sequence: Synthetic oligonucleotide
aguuuagcauuccauaaua

SEQ ID NO: 1265048 - RNA, 19 nt, Artificial Sequence
  Description of Artificial Sequence: Synthetic oligonucleotide
ccaaguucacucauaaucc

SEQ ID NO: 1265049 - RNA, 19 nt, Artificial Sequence
  Description of Artificial Sequence: Synthetic oligonucleotide
accuauguauccucucuuc

SEQ ID NO: 1265050 - RNA, 19 nt, Artificial Sequence
  Description of Artificial Sequence: Synthetic oligonucleotide
auuauagcaugaugcugag

SEQ ID NO: 1265051 - RNA, 19 nt, Artificial Sequence
  Description of Artificial Sequence: Synthetic oligonucleotide
ugaccuauguauccucucu

SEQ ID NO: 1265052 - RNA, 19 nt, Artificial Sequence
  Description of Artificial Sequence: Synthetic oligonucleotide
gccaauugucuauaaauag

SEQ ID NO: 1265053 - RNA, 19 nt, Artificial Sequence
  Description of Artificial Sequence: Synthetic oligonucleotide
gcuuaagacaaugaaauac

SEQ ID NO: 1265054 - RNA, 19 nt, Artificial Sequence
  Description of Artificial Sequence: Synthetic oligonucleotide
acacuggcagugucuaggc

SEQ ID NO: 1265055 - RNA, 19 nt, Artificial Sequence
  Description of Artificial Sequence: Synthetic oligonucleotide
augauucccuuccaugaag

SEQ ID NO: 1265056 - RNA, 19 nt, Artificial Sequence
  Description of Artificial Sequence: Synthetic oligonucleotide
uguuguaccugaucaaaua

SEQ ID NO: 1265057 - RNA, 19 nt, Artificial Sequence
  Description of Artificial Sequence: Synthetic oligonucleotide
ugguccaaccccaaucaug

SEQ ID NO: 1265058 - RNA, 19 nt, Artificial Sequence
  Description of Artificial Sequence: Synthetic oligonucleotide
ucggcuugauacauaaauc

SEQ ID NO: 1265059 - RNA, 19 nt, Artificial Sequence
  Description of Artificial Sequence: Synthetic oligonucleotide
uggucucgaagccagacau

SEQ ID NO: 1265060 - RNA, 19 nt, Artificial Sequence
  Description of Artificial Sequence: Synthetic oligonucleotide
guuguuaggguucggugug

SEQ ID NO: 1265061 - RNA, 19 nt, Artificial Sequence
  Description of Artificial Sequence: Synthetic oligonucleotide
ggagaucacacacacacac

SEQ ID NO: 1265062 - RNA, 19 nt, Artificial Sequence
  Description of Artificial Sequence: Synthetic oligonucleotide
agagcuugaccuauguauc

SEQ ID NO: 1265063 - RNA, 19 nt, Artificial Sequence
  Description of Artificial Sequence: Synthetic oligonucleotide
aucgcaucacaaugcuagc

SEQ ID NO: 1265064 - RNA, 19 nt, Artificial Sequence
  Description of Artificial Sequence: Synthetic oligonucleotide
gguuaugacauucuccaac

SEQ ID NO: 1265065 - RNA, 19 nt, Artificial Sequence
  Description of Artificial Sequence: Synthetic oligonucleotide
auauauauauauauauaua

SEQ ID NO: 1265066 - RNA, 19 nt, Artificial Sequence
  Description of Artificial Sequence: Synthetic oligonucleotide
gcuagcauauuguauuucc

SEQ ID NO: 1265067 - RNA, 19 nt, Artificial Sequence
  Description of Artificial Sequence: Synthetic oligonucleotide
agagugugguuucauccag

SEQ ID NO: 1265068 - RNA, 19 nt, Artificial Sequence
  Description of Artificial Sequence: Synthetic oligonucleotide
uaagcacgaagccccaaga

SEQ ID NO: 1265069 - RNA, 19 nt, Artificial Sequence
  Description of Artificial Sequence: Synthetic oligonucleotide
caauggauggauaaugaaa

SEQ ID NO: 1265070 - RNA, 19 nt, Artificial Sequence
  Description of Artificial Sequence: Synthetic oligonucleotide
accaacgauggacaacauc

SEQ ID NO: 1265071 - RNA, 19 nt, Artificial Sequence
  Description of Artificial Sequence: Synthetic oligonucleotide
ucacacacuuggaagcugu

SEQ ID NO: 1265072 - RNA, 19 nt, Artificial Sequence
  Description of Artificial Sequence: Synthetic oligonucleotide
gguucggugugcuauauac

SEQ ID NO: 1265073 - RNA, 19 nt, Artificial Sequence
  Description of Artificial Sequence: Synthetic oligonucleotide
gagcuugaccuauguaucc

SEQ ID NO: 1265074 - RNA, 19 nt, Artificial Sequence
  Description of Artificial Sequence: Synthetic oligonucleotide
ugguacuuugcugaggagu

SEQ ID NO: 1265075 - RNA, 19 nt, Artificial Sequence
  Description of Artificial Sequence: Synthetic oligonucleotide
ucguaguuguuguaccuga

SEQ ID NO: 1265076 - RNA, 19 nt, Artificial Sequence
  Description of Artificial Sequence: Synthetic oligonucleotide
uggauggauaaugaaaaua

SEQ ID NO: 1265077 - RNA, 19 nt, Artificial Sequence
  Description of Artificial Sequence: Synthetic oligonucleotide
ucaauucaguuguuagggu

SEQ ID NO: 1265078 - RNA, 19 nt, Artificial Sequence
  Description of Artificial Sequence: Synthetic oligonucleotide
aagugaaauaccacauccu

SEQ ID NO: 1265079 - RNA, 19 nt, Artificial Sequence
  Description of Artificial Sequence: Synthetic oligonucleotide
uaucuagucacaugaccau

SEQ ID NO: 1265080 - RNA, 19 nt, Artificial Sequence
  Description of Artificial Sequence: Synthetic oligonucleotide
agcacgaagccccaagaga

SEQ ID NO: 1265081 - RNA, 19 nt, Artificial Sequence
  Description of Artificial Sequence: Synthetic oligonucleotide
aguucacucauaaucccag

SEQ ID NO: 1265082 - RNA, 19 nt, Artificial Sequence
  Description of Artificial Sequence: Synthetic oligonucleotide
uucauguuggugccaagua

SEQ ID NO: 1265083 - RNA, 19 nt, Artificial Sequence
  Description of Artificial Sequence: Synthetic oligonucleotide
uaacuugggaagauagcua

SEQ ID NO: 1265084 - RNA, 19 nt, Artificial Sequence
  Description of Artificial Sequence: Synthetic oligonucleotide
uuguuguaccugaucaaau

SEQ ID NO: 1265085 - RNA, 19 nt, Artificial Sequence
  Description of Artificial Sequence: Synthetic oligonucleotide
aacgauggacaacaucaua

SEQ ID NO: 1265086 - RNA, 19 nt, Artificial Sequence
  Description of Artificial Sequence: Synthetic oligonucleotide
ucuugaaaguagguagugu

SEQ ID NO: 1265087 - RNA, 19 nt, Artificial Sequence
  Description of Artificial Sequence: Synthetic oligonucleotide
uuaggguucggugugcuau

SEQ ID NO: 1265088 - RNA, 19 nt, Artificial Sequence
  Description of Artificial Sequence: Synthetic oligonucleotide
uauaccaacgauggacaac

SEQ ID NO: 1265089 - RNA, 19 nt, Artificial Sequence
  Description of Artificial Sequence: Synthetic oligonucleotide
ggauggauaaugaaaauaa

SEQ ID NO: 1265090 - RNA, 19 nt, Artificial Sequence
  Description of Artificial Sequence: Synthetic oligonucleotide
auauucuagguuggauaac

SEQ ID NO: 1265091 - RNA, 19 nt, Artificial Sequence
  Description of Artificial Sequence: Synthetic oligonucleotide
gugcuauauaccaacgaug

SEQ ID NO: 1265092 - RNA, 19 nt, Artificial Sequence
  Description of Artificial Sequence: Synthetic oligonucleotide
cagugugccgaucuagagc

SEQ ID NO: 1265093 - RNA, 19 nt, Artificial Sequence
  Description of Artificial Sequence: Synthetic oligonucleotide
agguuggauaaccuuuugu

SEQ ID NO: 1265094 - RNA, 19 nt, Artificial Sequence
  Description of Artificial Sequence: Synthetic oligonucleotide
auauuuaagacugguccaa

SEQ ID NO: 1265095 - RNA, 19 nt, Artificial Sequence
  Description of Artificial Sequence: Synthetic oligonucleotide
caguuugacccaaagcuca

SEQ ID NO: 1265096 - RNA, 19 nt, Artificial Sequence
  Description of Artificial Sequence: Synthetic oligonucleotide
auaguacuuuuccaggcuu

SEQ ID NO: 1265097 - RNA, 19 nt, Artificial Sequence
  Description of Artificial Sequence: Synthetic oligonucleotide
acgagcaguguucaauaca

SEQ ID NO: 1265098 - RNA, 19 nt, Artificial Sequence
  Description of Artificial Sequence: Synthetic oligonucleotide
accugaucaaauagaguuc

SEQ ID NO: 1265099 - RNA, 19 nt, Artificial Sequence
  Description of Artificial Sequence: Synthetic oligonucleotide
guagccagugaaugauucc

SEQ ID NO: 1265100 - RNA, 19 nt, Artificial Sequence
  Description of Artificial Sequence: Synthetic oligonucleotide
acacaauauuguucucuug

SEQ ID NO: 1265101 - RNA, 19 nt, Artificial Sequence
  Description of Artificial Sequence: Synthetic oligonucleotide
uggucuucggcuugauaca

SEQ ID NO: 1265102 - RNA, 19 nt, Artificial Sequence
  Description of Artificial Sequence: Synthetic oligonucleotide
auuccauggguaaauauuu

SEQ ID NO: 1265103 - RNA, 19 nt, Artificial Sequence
  Description of Artificial Sequence: Synthetic oligonucleotide
ucacacacacacacacaca

SEQ ID NO: 1265104 - RNA, 19 nt, Artificial Sequence
  Description of Artificial Sequence: Synthetic oligonucleotide
cuugaaugccacagggcuc

SEQ ID NO: 1265105 - RNA, 19 nt, Artificial Sequence
  Description of Artificial Sequence: Synthetic oligonucleotide
ccauggguaaauauuuaag

SEQ ID NO: 1265106 - RNA, 19 nt, Artificial Sequence
  Description of Artificial Sequence: Synthetic oligonucleotide
uggagaucacacacacaca

SEQ ID NO: 1265107 - RNA, 19 nt, Artificial Sequence
  Description of Artificial Sequence: Synthetic oligonucleotide
cuagcauauuguauuucca

SEQ ID NO: 1265108 - RNA, 19 nt, Artificial Sequence
  Description of Artificial Sequence: Synthetic oligonucleotide
ugcuuaagacaaugaaaua

SEQ ID NO: 1265109 - RNA, 19 nt, Artificial Sequence
  Description of Artificial Sequence: Synthetic oligonucleotide
ggaguucaaauuccucggg

SEQ ID NO: 1265110 - RNA, 19 nt, Artificial Sequence
  Description of Artificial Sequence: Synthetic oligonucleotide
ccauaauauucuagguugg

SEQ ID NO: 1265111 - RNA, 19 nt, Artificial Sequence
  Description of Artificial Sequence: Synthetic oligonucleotide
ugguguaugcagugucacc

SEQ ID NO: 1265112 - RNA, 19 nt, Artificial Sequence
  Description of Artificial Sequence: Synthetic oligonucleotide
uccagacgaauggucuucg

SEQ ID NO: 1265113 - RNA, 19 nt, Artificial Sequence
  Description of Artificial Sequence: Synthetic oligonucleotide
guagcaggguuccaaguuc

SEQ ID NO: 1265114 - RNA, 19 nt, Artificial Sequence
  Description of Artificial Sequence: Synthetic oligonucleotide
gaaggacucgccaauuguc

SEQ ID NO: 1265115 - RNA, 19 nt, Artificial Sequence
  Description of Artificial Sequence: Synthetic oligonucleotide
guaggugcaacaacuuaug

SEQ ID NO: 1265116 - RNA, 19 nt, Artificial Sequence
  Description of Artificial Sequence: Synthetic oligonucleotide
acaacaucauaaggcacug

SEQ ID NO: 1265117 - RNA, 19 nt, Artificial Sequence
  Description of Artificial Sequence: Synthetic oligonucleotide
accccaaucaugugguuau

SEQ ID NO: 1265118 - RNA, 19 nt, Artificial Sequence
  Description of Artificial Sequence: Synthetic oligonucleotide
guguuuugccacccguucc

SEQ ID NO: 1265119 - RNA, 19 nt, Artificial Sequence
  Description of Artificial Sequence: Synthetic oligonucleotide
caccagccaauccagauca

SEQ ID NO: 1265120 - RNA, 19 nt, Artificial Sequence
  Description of Artificial Sequence: Synthetic oligonucleotide
gcuugauacauaaauccac

SEQ ID NO: 1265121 - RNA, 19 nt, Artificial Sequence
  Description of Artificial Sequence: Synthetic oligonucleotide
auggauggauaaugaaaau

SEQ ID NO: 1265122 - RNA, 19 nt, Artificial Sequence
  Description of Artificial Sequence: Synthetic oligonucleotide
cacacacacacacacaucu

SEQ ID NO: 1265123 - RNA, 19 nt, Artificial Sequence
  Description of Artificial Sequence: Synthetic oligonucleotide
acagacggaacuugggcuu

SEQ ID NO: 1265124 - RNA, 19 nt, Artificial Sequence
  Description of Artificial Sequence: Synthetic oligonucleotide
gugaaauaccacauccuuc

SEQ ID NO: 1265125 - RNA, 19 nt, Artificial Sequence
  Description of Artificial Sequence: Synthetic oligonucleotide
gguuucauccagacgaaug

SEQ ID NO: 1265126 - RNA, 19 nt, Artificial Sequence
  Description of Artificial Sequence: Synthetic oligonucleotide
gacgagcaguguucaauac

SEQ ID NO: 1265127 - RNA, 19 nt, Artificial Sequence
  Description of Artificial Sequence: Synthetic oligonucleotide
acaacuuauggcaccacau

SEQ ID NO: 1265128 - RNA, 19 nt, Artificial Sequence
  Description of Artificial Sequence: Synthetic oligonucleotide
accaauggauggauaauga

SEQ ID NO: 1265129 - RNA, 19 nt, Artificial Sequence
  Description of Artificial Sequence: Synthetic oligonucleotide
agacgagcaguguucaaua

SEQ ID NO: 1265130 - RNA, 19 nt, Artificial Sequence
  Description of Artificial Sequence: Synthetic oligonucleotide
uugaccuauguauccucuc

SEQ ID NO: 1265131 - RNA, 19 nt, Artificial Sequence
  Description of Artificial Sequence: Synthetic oligonucleotide
ccauauagcagaaaguucu

SEQ ID NO: 1265132 - RNA, 19 nt, Artificial Sequence
  Description of Artificial Sequence: Synthetic oligonucleotide
aagcuguauggcaccaaug

SEQ ID NO: 1265133 - RNA, 19 nt, Artificial Sequence
  Description of Artificial Sequence: Synthetic oligonucleotide
ucgcaucacaaugcuagca

SEQ ID NO: 1265134 - RNA, 19 nt, Artificial Sequence
  Description of Artificial Sequence: Synthetic oligonucleotide
acgaauggucuucggcuug

SEQ ID NO: 1265135 - RNA, 19 nt, Artificial Sequence
  Description of Artificial Sequence: Synthetic oligonucleotide
cuuacaagauggcugacau

SEQ ID NO: 1265136 - RNA, 19 nt, Artificial Sequence
  Description of Artificial Sequence: Synthetic oligonucleotide
agccccaagagacgagcag

SEQ ID NO: 1265137 - RNA, 19 nt, Artificial Sequence
  Description of Artificial Sequence: Synthetic oligonucleotide
agcuaccuuacaagauggc

SEQ ID NO: 1265138 - RNA, 19 nt, Artificial Sequence
  Description of Artificial Sequence: Synthetic oligonucleotide
ccgaucuagagccagcuug

SEQ ID NO: 1265139 - RNA, 19 nt, Artificial Sequence
  Description of Artificial Sequence: Synthetic oligonucleotide
gugugcuauauaccaacga

SEQ ID NO: 1265140 - RNA, 19 nt, Artificial Sequence
  Description of Artificial Sequence: Synthetic oligonucleotide
uuauagcaugaugcugagc

SEQ ID NO: 1265141 - RNA, 19 nt, Artificial Sequence
  Description of Artificial Sequence: Synthetic oligonucleotide
cacagaguuggcgguagcc

SEQ ID NO: 1265142 - RNA, 19 nt, Artificial Sequence
  Description of Artificial Sequence: Synthetic oligonucleotide
ucggugugcuauauaccaa

SEQ ID NO: 1265143 - RNA, 19 nt, Artificial Sequence
  Description of Artificial Sequence: Synthetic oligonucleotide
guuggcgguagccagugaa

SEQ ID NO: 1265144 - RNA, 19 nt, Artificial Sequence
  Description of Artificial Sequence: Synthetic oligonucleotide
aaccccaaucaugugguua

SEQ ID NO: 1265145 - RNA, 19 nt, Artificial Sequence
  Description of Artificial Sequence: Synthetic oligonucleotide
ggugugcuauauaccaacg

SEQ ID NO: 1265146 - RNA, 19 nt, Artificial Sequence
  Description of Artificial Sequence: Synthetic oligonucleotide
uugcccuucauagcuauuu

SEQ ID NO: 1265147 - RNA, 19 nt, Artificial Sequence
  Description of Artificial Sequence: Synthetic oligonucleotide
uggcgguagccagugaaug

SEQ ID NO: 1265148 - RNA, 19 nt, Artificial Sequence
  Description of Artificial Sequence: Synthetic oligonucleotide
uuggcgguagccagugaau

SEQ ID NO: 1265149 - RNA, 19 nt, Artificial Sequence
  Description of Artificial Sequence: Synthetic oligonucleotide
ccaaucaugugguuaugac

SEQ ID NO: 1265150 - RNA, 19 nt, Artificial Sequence
  Description of Artificial Sequence: Synthetic oligonucleotide
aaauuccucgggugcuuuu

SEQ ID NO: 1265151 - RNA, 19 nt, Artificial Sequence
  Description of Artificial Sequence: Synthetic oligonucleotide
gaguuuagcauuccauaau

SEQ ID NO: 1265152 - RNA, 19 nt, Artificial Sequence
  Description of Artificial Sequence: Synthetic oligonucleotide
guucggugugcuauauacc

SEQ ID NO: 1265153 - RNA, 19 nt, Artificial Sequence
  Description of Artificial Sequence: Synthetic oligonucleotide
cuguauggcaccaauggau

SEQ ID NO: 1265154 - RNA, 19 nt, Artificial Sequence
  Description of Artificial Sequence: Synthetic oligonucleotide
caauauuguucucuugaua

SEQ ID NO: 1265155 - RNA, 19 nt, Artificial Sequence
  Description of Artificial Sequence: Synthetic oligonucleotide
augguacuuugcugaggag

SEQ ID NO: 1265156 - RNA, 19 nt, Artificial Sequence
  Description of Artificial Sequence: Synthetic oligonucleotide
ugguuaugacauucuccaa

SEQ ID NO: 1265157 - RNA, 19 nt, Artificial Sequence
  Description of Artificial Sequence: Synthetic oligonucleotide
uugacacaauauuguucuc

SEQ ID NO: 1265158 - RNA, 19 nt, Artificial Sequence
  Description of Artificial Sequence: Synthetic oligonucleotide
augacagcccggucguagu

SEQ ID NO: 1265159 - RNA, 19 nt, Artificial Sequence
  Description of Artificial Sequence: Synthetic oligonucleotide
gaucacacacacacacaca

SEQ ID NO: 1265160 - RNA, 19 nt, Artificial Sequence
  Description of Artificial Sequence: Synthetic oligonucleotide
agcuugaccuauguauccu

SEQ ID NO: 1265161 - RNA, 19 nt, Artificial Sequence
  Description of Artificial Sequence: Synthetic oligonucleotide
uguuaggguucggugugcu

SEQ ID NO: 1265162 - RNA, 19 nt, Artificial Sequence
  Description of Artificial Sequence: Synthetic oligonucleotide
gagaucacacacacacaca

SEQ ID NO: 1265163 - RNA, 19 nt, Artificial Sequence
  Description of Artificial Sequence: Synthetic oligonucleotide
acacacacacacacacauc

SEQ ID NO: 1265164 - RNA, 19 nt, Artificial Sequence
  Description of Artificial Sequence: Synthetic oligonucleotide
agacggaacuugggcuugc

SEQ ID NO: 1265165 - RNA, 19 nt, Artificial Sequence
  Description of Artificial Sequence: Synthetic oligonucleotide
cacuaacaguguuuugcca

SEQ ID NO: 1265166 - RNA, 19 nt, Artificial Sequence
  Description of Artificial Sequence: Synthetic oligonucleotide
aaaucgcaucacaaugcua

SEQ ID NO: 1265167 - RNA, 19 nt, Artificial Sequence
  Description of Artificial Sequence: Synthetic oligonucleotide
cacacacacacacacacau

SEQ ID NO: 1265168 - RNA, 19 nt, Artificial Sequence
  Description of Artificial Sequence: Synthetic oligonucleotide
gccaauccagaucauaucu

SEQ ID NO: 1265169 - RNA, 19 nt, Artificial Sequence
  Description of Artificial Sequence: Synthetic oligonucleotide
ggcuugauacauaaaucca

SEQ ID NO: 1265170 - RNA, 19 nt, Artificial Sequence
  Description of Artificial Sequence: Synthetic oligonucleotide
caaaucgcaucacaaugcu

SEQ ID NO: 1265171 - RNA, 19 nt, Artificial Sequence
  Description of Artificial Sequence: Synthetic oligonucleotide
cugagcggcaguggucucg

SEQ ID NO: 1265172 - RNA, 19 nt, Artificial Sequence
  Description of Artificial Sequence: Synthetic oligonucleotide
uuuaagcacgaagccccaa

SEQ ID NO: 1265173 - RNA, 19 nt, Artificial Sequence
  Description of Artificial Sequence: Synthetic oligonucleotide
gguagccagugaaugauuc

SEQ ID NO: 1265174 - RNA, 19 nt, Artificial Sequence
  Description of Artificial Sequence: Synthetic oligonucleotide
cacacacacacaucuauau

SEQ ID NO: 1265175 - RNA, 19 nt, Artificial Sequence
  Description of Artificial Sequence: Synthetic oligonucleotide
gguguaugcagugucaccu

SEQ ID NO: 1265176 - RNA, 19 nt, Artificial Sequence
  Description of Artificial Sequence: Synthetic oligonucleotide
guguaugcagugucaccuc

SEQ ID NO: 1265177 - RNA, 19 nt, Artificial Sequence
  Description of Artificial Sequence: Synthetic oligonucleotide
gcaguggucucgaagccag

SEQ ID NO: 1265178 - RNA, 19 nt, Artificial Sequence
  Description of Artificial Sequence: Synthetic oligonucleotide
ugagcggcaguggucucga

SEQ ID NO: 1265179 - RNA, 19 nt, Artificial Sequence
  Description of Artificial Sequence: Synthetic oligonucleotide
guucaauacaucaucucuu

SEQ ID NO: 1265180 - RNA, 19 nt, Artificial Sequence
  Description of Artificial Sequence: Synthetic oligonucleotide
cagugucuaggcuccucug

SEQ ID NO: 1265181 - RNA, 19 nt, Artificial Sequence
  Description of Artificial Sequence: Synthetic oligonucleotide
accuuacaagauggcugac

SEQ ID NO: 1265182 - RNA, 19 nt, Artificial Sequence
  Description of Artificial Sequence: Synthetic oligonucleotide
uugggcuugcugguagagu

SEQ ID NO: 1265183 - RNA, 19 nt, Artificial Sequence
  Description of Artificial Sequence: Synthetic oligonucleotide
cuugaccuauguauccucu

SEQ ID NO: 1265184 - RNA, 19 nt, Artificial Sequence
  Description of Artificial Sequence: Synthetic oligonucleotide
ggaagauagcuaccuuaca

SEQ ID NO: 1265185 - RNA, 19 nt, Artificial Sequence
  Description of Artificial Sequence: Synthetic oligonucleotide
gugcaacaacuuauggcac

SEQ ID NO: 1265186 - RNA, 19 nt, Artificial Sequence
  Description of Artificial Sequence: Synthetic oligonucleotide
ugccacccguuccuucaug

SEQ ID NO: 1265187 - RNA, 19 nt, Artificial Sequence
  Description of Artificial Sequence: Synthetic oligonucleotide
uaggguucggugugcuaua

SEQ ID NO: 1265188 - RNA, 19 nt, Artificial Sequence
  Description of Artificial Sequence: Synthetic oligonucleotide
ccagugaaugauucccuuc

SEQ ID NO: 1265189 - RNA, 19 nt, Artificial Sequence
  Description of Artificial Sequence: Synthetic oligonucleotide
cagccaauccagaucauau

SEQ ID NO: 1265190 - RNA, 19 nt, Artificial Sequence
  Description of Artificial Sequence: Synthetic oligonucleotide
gcuauauaccaacgaugga

SEQ ID NO: 1265191 - RNA, 19 nt, Artificial Sequence
  Description of Artificial Sequence: Synthetic oligonucleotide
cacacacacacacaucuau

SEQ ID NO: 1265192 - RNA, 19 nt, Artificial Sequence
  Description of Artificial Sequence: Synthetic oligonucleotide
gacgaauggucuucggcuu

SEQ ID NO: 1265193 - RNA, 19 nt, Artificial Sequence
  Description of Artificial Sequence: Synthetic oligonucleotide
gagugugguuucauccaga

SEQ ID NO: 1265194 - RNA, 19 nt, Artificial Sequence
  Description of Artificial Sequence: Synthetic oligonucleotide
acacacacacacacacaca

SEQ ID NO: 1265195 - RNA, 19 nt, Artificial Sequence
  Description of Artificial Sequence: Synthetic oligonucleotide
gguccaaccccaaucaugu

SEQ ID NO: 1265196 - RNA, 19 nt, Artificial Sequence
  Description of Artificial Sequence: Synthetic oligonucleotide
aagacugguccaaccccaa

SEQ ID NO: 1265197 - RNA, 19 nt, Artificial Sequence
  Description of Artificial Sequence: Synthetic oligonucleotide
cucgccaauugucuauaaa

SEQ ID NO: 1265198 - RNA, 19 nt, Artificial Sequence
  Description of Artificial Sequence: Synthetic oligonucleotide
acacacacacacaucuaua

SEQ ID NO: 1265199 - RNA, 19 nt, Artificial Sequence
  Description of Artificial Sequence: Synthetic oligonucleotide
agagacgagcaguguucaa

SEQ ID NO: 1265200 - RNA, 19 nt, Artificial Sequence
  Description of Artificial Sequence: Synthetic oligonucleotide
gcaacaacuuauggcacca

SEQ ID NO: 1265201 - RNA, 19 nt, Artificial Sequence
  Description of Artificial Sequence: Synthetic oligonucleotide
agacugguccaaccccaau

SEQ ID NO: 1265202 - RNA, 19 nt, Artificial Sequence
  Description of Artificial Sequence: Synthetic oligonucleotide
cggugugcuauauaccaac

SEQ ID NO: 1265203 - RNA, 19 nt, Artificial Sequence
  Description of Artificial Sequence: Synthetic oligonucleotide
aguuugacccaaagcucau

SEQ ID NO: 1265204 - RNA, 19 nt, Artificial Sequence
  Description of Artificial Sequence: Synthetic oligonucleotide
gagcaguguucaauacauc

SEQ ID NO: 1265205 - RNA, 19 nt, Artificial Sequence
  Description of Artificial Sequence: Synthetic oligonucleotide
uaccaacgauggacaacau

SEQ ID NO: 1265206 - RNA, 19 nt, Artificial Sequence
  Description of Artificial Sequence: Synthetic oligonucleotide
cagacggaacuugggcuug

SEQ ID NO: 1265207 - RNA, 19 nt, Artificial Sequence
  Description of Artificial Sequence: Synthetic oligonucleotide
gaccuauguauccucucuu

SEQ ID NO: 1265208 - RNA, 19 nt, Artificial Sequence
  Description of Artificial Sequence: Synthetic oligonucleotide
ggcgguagccagugaauga

SEQ ID NO: 1265209 - RNA, 19 nt, Artificial Sequence
  Description of Artificial Sequence: Synthetic oligonucleotide
uggcaccaauggauggaua

SEQ ID NO: 1265210 - RNA, 19 nt, Artificial Sequence
  Description of Artificial Sequence: Synthetic oligonucleotide
guccaaccccaaucaugug

SEQ ID NO: 1265211 - RNA, 19 nt, Artificial Sequence
  Description of Artificial Sequence: Synthetic oligonucleotide
acccguuccuucaugcuua

SEQ ID NO: 1265212 - RNA, 19 nt, Artificial Sequence
  Description of Artificial Sequence: Synthetic oligonucleotide
gcuaccuuacaagauggcu

SEQ ID NO: 1265213 - RNA, 19 nt, Artificial Sequence
  Description of Artificial Sequence: Synthetic oligonucleotide
gcaucacaaugcuagcaua

SEQ ID NO: 1265214 - RNA, 19 nt, Artificial Sequence
  Description of Artificial Sequence: Synthetic oligonucleotide
aguuggcgguagccaguga

SEQ ID NO: 1265215 - RNA, 19 nt, Artificial Sequence
  Description of Artificial Sequence: Synthetic oligonucleotide
gcaugaugcugagcggcag

SEQ ID NO: 1265216 - RNA, 19 nt, Artificial Sequence
  Description of Artificial Sequence: Synthetic oligonucleotide
guuaggguucggugugcua

SEQ ID NO: 1265217 - RNA, 19 nt, Artificial Sequence
  Description of Artificial Sequence: Synthetic oligonucleotide
ccugaucaaauagaguucu

SEQ ID NO: 1265218 - RNA, 19 nt, Artificial Sequence
  Description of Artificial Sequence: Synthetic oligonucleotide
gguacuuugcugaggaguu

SEQ ID NO: 1265219 - RNA, 19 nt, Artificial Sequence
  Description of Artificial Sequence: Synthetic oligonucleotide
caacgauggacaacaucau

SEQ ID NO: 1265220 - RNA, 19 nt, Artificial Sequence
  Description of Artificial Sequence: Synthetic oligonucleotide
acacacacacacacaucua

SEQ ID NO: 1265221 - RNA, 19 nt, Artificial Sequence
  Description of Artificial Sequence: Synthetic oligonucleotide
cuucggcuugauacauaaa

SEQ ID NO: 1265222 - RNA, 19 nt, Artificial Sequence
  Description of Artificial Sequence: Synthetic oligonucleotide
aggguucggugugcuauau

SEQ ID NO: 1265223 - RNA, 19 nt, Artificial Sequence
  Description of Artificial Sequence: Synthetic oligonucleotide
guagugucagugugccgau

SEQ ID NO: 1265224 - RNA, 19 nt, Artificial Sequence
  Description of Artificial Sequence: Synthetic oligonucleotide
gcucuugaaaguagguagu

SEQ ID NO: 1265225 - RNA, 19 nt, Artificial Sequence
  Description of Artificial Sequence: Synthetic oligonucleotide
cgaagccagacauaaucaa

SEQ ID NO: 1265226 - RNA, 19 nt, Artificial Sequence
  Description of Artificial Sequence: Synthetic oligonucleotide
cccaaucaugugguuauga

SEQ ID NO: 1265227 - RNA, 19 nt, Artificial Sequence
  Description of Artificial Sequence: Synthetic oligonucleotide
ggacucgccaauugucuau

SEQ ID NO: 1265228 - RNA, 19 nt, Artificial Sequence
  Description of Artificial Sequence: Synthetic oligonucleotide
cugaucaaauagaguucuu

SEQ ID NO: 1265229 - RNA, 19 nt, Artificial Sequence
  Description of Artificial Sequence: Synthetic oligonucleotide
cacccguuccuucaugcuu

SEQ ID NO: 1265230 - RNA, 19 nt, Artificial Sequence
  Description of Artificial Sequence: Synthetic oligonucleotide
gacggaacuugggcuugcu

SEQ ID NO: 1265231 - RNA, 19 nt, Artificial Sequence
  Description of Artificial Sequence: Synthetic oligonucleotide
ccauccacuaacaguguuu

SEQ ID NO: 1265232 - RNA, 19 nt, Artificial Sequence
  Description of Artificial Sequence: Synthetic oligonucleotide
ggucuucggcuugauacau

SEQ ID NO: 1265233 - RNA, 19 nt, Artificial Sequence
  Description of Artificial Sequence: Synthetic oligonucleotide
caaauuccucgggugcuuu

SEQ ID NO: 1265234 - RNA, 19 nt, Artificial Sequence
  Description of Artificial Sequence: Synthetic oligonucleotide
ggguucggugugcuauaua

SEQ ID NO: 1265235 - RNA, 19 nt, Artificial Sequence
  Description of Artificial Sequence: Synthetic oligonucleotide
cccuuccaugaaggacucg

SEQ ID NO: 1265236 - RNA, 19 nt, Artificial Sequence
  Description of Artificial Sequence: Synthetic oligonucleotide
caaccccaaucaugugguu

SEQ ID NO: 1265237 - RNA, 19 nt, Artificial Sequence
  Description of Artificial Sequence: Synthetic oligonucleotide
cccggucguaguuguugua

SEQ ID NO: 1265238 - RNA, 19 nt, Artificial Sequence
  Description of Artificial Sequence: Synthetic oligonucleotide
aaucaaauugacuucaggc

SEQ ID NO: 1265239 - RNA, 19 nt, Artificial Sequence
  Description of Artificial Sequence: Synthetic oligonucleotide
ucaacaaagaaguacgugg

SEQ ID NO: 1265240 - RNA, 19 nt, Artificial Sequence
  Description of Artificial Sequence: Synthetic oligonucleotide
uaauuagucauucugacac

SEQ ID NO: 1265241 - RNA, 19 nt, Artificial Sequence
  Description of Artificial Sequence: Synthetic oligonucleotide
ucuuuuaucagccugggga

SEQ ID NO: 1265242 - RNA, 19 nt, Artificial Sequence
  Description of Artificial Sequence: Synthetic oligonucleotide
ugacacauaauaaauuagg

SEQ ID NO: 1265243 - RNA, 19 nt, Artificial Sequence
  Description of Artificial Sequence: Synthetic oligonucleotide
gaagugaacaucuccauag

SEQ ID NO: 1265244 - RNA, 19 nt, Artificial Sequence
  Description of Artificial Sequence: Synthetic oligonucleotide
auauugcugagcaagaucc

SEQ ID NO: 1265245 - RNA, 19 nt, Artificial Sequence
  Description of Artificial Sequence: Synthetic oligonucleotide
uuuaaagaacagcaguucc

SEQ ID NO: 1265246 - RNA, 19 nt, Artificial Sequence
  Description of Artificial Sequence: Synthetic oligonucleotide
uuuuggauaaccugcuugg

SEQ ID NO: 1265247 - RNA, 19 nt, Artificial Sequence
  Description of Artificial Sequence: Synthetic oligonucleotide
aaaucaaauugacuucagg

SEQ ID NO: 1265248 - RNA, 19 nt, Artificial Sequence
  Description of Artificial Sequence: Synthetic oligonucleotide
agguaagaaaugcugagac

SEQ ID NO: 1265249 - RNA, 19 nt, Artificial Sequence
  Description of Artificial Sequence: Synthetic oligonucleotide
aguuguaguacuuuucuag

SEQ ID NO: 1265250 - RNA, 19 nt, Artificial Sequence
  Description of Artificial Sequence: Synthetic oligonucleotide
aaaugccgaaaucaaauug

SEQ ID NO: 1265251 - RNA, 19 nt, Artificial Sequence
  Description of Artificial Sequence: Synthetic oligonucleotide
cauaagacgucuuuucucg

SEQ ID NO: 1265252 - RNA, 19 nt, Artificial Sequence
  Description of Artificial Sequence: Synthetic oligonucleotide
aaagcaggaucacacuugg

SEQ ID NO: 1265253 - RNA, 19 nt, Artificial Sequence
  Description of Artificial Sequence: Synthetic oligonucleotide
cacauaauaaauuagguaa

SEQ ID NO: 1265254 - RNA, 19 nt, Artificial Sequence
  Description of Artificial Sequence: Synthetic oligonucleotide
aauaaguuggucccugaug

SEQ ID NO: 1265255 - RNA, 19 nt, Artificial Sequence
  Description of Artificial Sequence: Synthetic oligonucleotide
cacagaagcaccaggaugg

SEQ ID NO: 1265256 - RNA, 19 nt, Artificial Sequence
  Description of Artificial Sequence: Synthetic oligonucleotide
uuaaagaacagcaguuccc

SEQ ID NO: 1265257 - RNA, 19 nt, Artificial Sequence
  Description of Artificial Sequence: Synthetic oligonucleotide
aaggguaaaagucuccaug

SEQ ID NO: 1265258 - RNA, 19 nt, Artificial Sequence
  Description of Artificial Sequence: Synthetic oligonucleotide
uucuagauauugcugagca

SEQ ID NO: 1265259 - RNA, 19 nt, Artificial Sequence
  Description of Artificial Sequence: Synthetic oligonucleotide
acucaaacugugaugaucc

SEQ ID NO: 1265260 - RNA, 19 nt, Artificial Sequence
  Description of Artificial Sequence: Synthetic oligonucleotide
agaaagcuggaacugugcc

SEQ ID NO: 1265261 - RNA, 19 nt, Artificial Sequence
  Description of Artificial Sequence: Synthetic oligonucleotide
ugaacaucuccauagaauc

SEQ ID NO: 1265262 - RNA, 19 nt, Artificial Sequence
  Description of Artificial Sequence: Synthetic oligonucleotide
gaagagagggccaaaaugc

SEQ ID NO: 1265263 - RNA, 19 nt, Artificial Sequence
  Description of Artificial Sequence: Synthetic oligonucleotide
aucaucuugagaaagcugg

SEQ ID NO: 1265264 - RNA, 19 nt, Artificial Sequence
  Description of Artificial Sequence: Synthetic oligonucleotide
uuagguaagaaaugcugag

SEQ ID NO: 1265265 - RNA, 19 nt, Artificial Sequence
  Description of Artificial Sequence: Synthetic oligonucleotide
aagaacagcaguuccccuc

SEQ ID NO: 1265266 - RNA, 19 nt, Artificial Sequence
  Description of Artificial Sequence: Synthetic oligonucleotide
cuagauauugcugagcaag

SEQ ID NO: 1265267 - RNA, 19 nt, Artificial Sequence
  Description of Artificial Sequence: Synthetic oligonucleotide
augaaaacgcuaucucugc

SEQ ID NO: 1265268 - RNA, 19 nt, Artificial Sequence
  Description of Artificial Sequence: Synthetic oligonucleotide
ugcuaugagcuucauaggc

SEQ ID NO: 1265269 - RNA, 19 nt, Artificial Sequence
  Description of Artificial Sequence: Synthetic oligonucleotide
auuccagcgggauaugcgc

SEQ ID NO: 1265270 - RNA, 19 nt, Artificial Sequence
  Description of Artificial Sequence: Synthetic oligonucleotide
ucugacacauaauaaauua

SEQ ID NO: 1265271 - RNA, 19 nt, Artificial Sequence
  Description of Artificial Sequence: Synthetic oligonucleotide
aaaaguaccugucuuuaaa

SEQ ID NO: 1265272 - RNA, 19 nt, Artificial Sequence
  Description of Artificial Sequence: Synthetic oligonucleotide
aaacugugaugauccaugg

SEQ ID NO: 1265273 - RNA, 19 nt, Artificial Sequence
  Description of Artificial Sequence: Synthetic oligonucleotide
guaggcaugagccagacuc

SEQ ID NO: 1265274 - RNA, 19 nt, Artificial Sequence
  Description of Artificial Sequence: Synthetic oligonucleotide
auugacuucaggcucagga

SEQ ID NO: 1265275 - RNA, 19 nt, Artificial Sequence
  Description of Artificial Sequence: Synthetic oligonucleotide
ugagcaagauccaugcuug

SEQ ID NO: 1265276 - RNA, 19 nt, Artificial Sequence
  Description of Artificial Sequence: Synthetic oligonucleotide
uucauaggcagcaucuaag

SEQ ID NO: 1265277 - RNA, 19 nt, Artificial Sequence
  Description of Artificial Sequence: Synthetic oligonucleotide
uggauaaccugcuuggacc

SEQ ID NO: 1265278 - RNA, 19 nt, Artificial Sequence
  Description of Artificial Sequence: Synthetic oligonucleotide
aguacuuuucuagauauug

SEQ ID NO: 1265279 - RNA, 19 nt, Artificial Sequence
  Description of Artificial Sequence: Synthetic oligonucleotide
ucuaaauacuuguuucuca

SEQ ID NO: 1265280 - RNA, 19 nt, Artificial Sequence
  Description of Artificial Sequence: Synthetic oligonucleotide
ugucuuuaaagaacagcag

SEQ ID NO: 1265281 - RNA, 19 nt, Artificial Sequence
  Description of Artificial Sequence: Synthetic oligonucleotide
aacucaaacugugaugauc

SEQ ID NO: 1265282 - RNA, 19 nt, Artificial Sequence
  Description of Artificial Sequence: Synthetic oligonucleotide
gaaagcuggaacugugccg

SEQ ID NO: 1265283 - RNA, 19 nt, Artificial Sequence
  Description of Artificial Sequence: Synthetic oligonucleotide
gaggauaugcugaagagac

SEQ ID NO: 1265284 - RNA, 19 nt, Artificial Sequence
  Description of Artificial Sequence: Synthetic oligonucleotide
agugcuuuuggauaaccug

SEQ ID NO: 1265285 - RNA, 19 nt, Artificial Sequence
  Description of Artificial Sequence: Synthetic oligonucleotide
aaguacguggucuucuucu

SEQ ID NO: 1265286 - RNA, 19 nt, Artificial Sequence
  Description of Artificial Sequence: Synthetic oligonucleotide
cuuuucucgucaaaucucc

SEQ ID NO: 1265287 - RNA, 19 nt, Artificial Sequence
  Description of Artificial Sequence: Synthetic oligonucleotide
ugauccauggaagaaauaa

SEQ ID NO: 1265288 - RNA, 19 nt, Artificial Sequence
  Description of Artificial Sequence: Synthetic oligonucleotide
uuuucuagauauugcugag

SEQ ID NO: 1265289 - RNA, 19 nt, Artificial Sequence
  Description of Artificial Sequence: Synthetic oligonucleotide
guaagaaaugcugagacuc

SEQ ID NO: 1265290 - RNA, 19 nt, Artificial Sequence
  Description of Artificial Sequence: Synthetic oligonucleotide
acauggguaccacuguggc

SEQ ID NO: 1265291 - RNA, 19 nt, Artificial Sequence
  Description of Artificial Sequence: Synthetic oligonucleotide
caaacugugaugauccaug

SEQ ID NO: 1265292 - RNA, 19 nt, Artificial Sequence
  Description of Artificial Sequence: Synthetic oligonucleotide
ggugaagccaccgacaucg

SEQ ID NO: 1265293 - RNA, 19 nt, Artificial Sequence
  Description of Artificial Sequence: Synthetic oligonucleotide
ucgaucuucuucacagugg

SEQ ID NO: 1265294 - RNA, 19 nt, Artificial Sequence
  Description of Artificial Sequence: Synthetic oligonucleotide
aaguaccugucuuuaaaga

SEQ ID NO: 1265295 - RNA, 19 nt, Artificial Sequence
  Description of Artificial Sequence: Synthetic oligonucleotide
aaaaggguaaaagucucca

SEQ ID NO: 1265296 - RNA, 19 nt, Artificial Sequence
  Description of Artificial Sequence: Synthetic oligonucleotide
uuuguguaugucuucugug

SEQ ID NO: 1265297 - RNA, 19 nt, Artificial Sequence
  Description of Artificial Sequence: Synthetic oligonucleotide
caccgcaucaauuuguggc

SEQ ID NO: 1265298 - RNA, 19 nt, Artificial Sequence
  Description of Artificial Sequence: Synthetic oligonucleotide
auccauaagacgucuuuuc

SEQ ID NO: 1265299 - RNA, 19 nt, Artificial Sequence
  Description of Artificial Sequence: Synthetic oligonucleotide
gaauaauuagucauucuga

SEQ ID NO: 1265300 - RNA, 19 nt, Artificial Sequence
  Description of Artificial Sequence: Synthetic oligonucleotide
aaaacgcuaucucugcuau

SEQ ID NO: 1265301 - RNA, 19 nt, Artificial Sequence
  Description of Artificial Sequence: Synthetic oligonucleotide
aagagagggccaaaaugcc

SEQ ID NO: 1265302 - RNA, 19 nt, Artificial Sequence
  Description of Artificial Sequence: Synthetic oligonucleotide
cugacacauaauaaauuag

SEQ ID NO: 1265303 - RNA, 19 nt, Artificial Sequence
  Description of Artificial Sequence: Synthetic oligonucleotide
auaugcugaagagacuggc

SEQ ID NO: 1265304 - RNA, 19 nt, Artificial Sequence
  Description of Artificial Sequence: Synthetic oligonucleotide
gaagccaccgacaucgggg

SEQ ID NO: 1265305 - RNA, 19 nt, Artificial Sequence
  Description of Artificial Sequence: Synthetic oligonucleotide
aacgcuaucucugcuauga

SEQ ID NO: 1265306 - RNA, 19 nt, Artificial Sequence
  Description of Artificial Sequence: Synthetic oligonucleotide
cacacaggaauaauuaguc

SEQ ID NO: 1265307 - RNA, 19 nt, Artificial Sequence
  Description of Artificial Sequence: Synthetic oligonucleotide
ugugaugauccauggaaga

SEQ ID NO: 1265308 - RNA, 19 nt, Artificial Sequence
  Description of Artificial Sequence: Synthetic oligonucleotide
ucauucugacacauaauaa

SEQ ID NO: 1265309 - RNA, 19 nt, Artificial Sequence
  Description of Artificial Sequence: Synthetic oligonucleotide
uaggcagcaucuaagugug

SEQ ID NO: 1265310 - RNA, 19 nt, Artificial Sequence
  Description of Artificial Sequence: Synthetic oligonucleotide
aacaucuccauagaaucca

SEQ ID NO: 1265311 - RNA, 19 nt, Artificial Sequence
  Description of Artificial Sequence: Synthetic oligonucleotide
caucuaagugugaaggaag

SEQ ID NO: 1265312 - RNA, 19 nt, Artificial Sequence
  Description of Artificial Sequence: Synthetic oligonucleotide
aacccagagugugaagugc

SEQ ID NO: 1265313 - RNA, 19 nt, Artificial Sequence
  Description of Artificial Sequence: Synthetic oligonucleotide
aaaaugccgaaaucaaauu

SEQ ID NO: 1265314 - RNA, 19 nt, Artificial Sequence
  Description of Artificial Sequence: Synthetic oligonucleotide
ucgugagccacacagcaca

SEQ ID NO: 1265315 - RNA, 19 nt, Artificial Sequence
  Description of Artificial Sequence: Synthetic oligonucleotide
acacauaauaaauuaggua

SEQ ID NO: 1265316 - RNA, 19 nt, Artificial Sequence
  Description of Artificial Sequence: Synthetic oligonucleotide
uagacgggguacaucagag

SEQ ID NO: 1265317 - RNA, 19 nt, Artificial Sequence
  Description of Artificial Sequence: Synthetic oligonucleotide
ugcugagcaagauccaugc

SEQ ID NO: 1265318 - RNA, 19 nt, Artificial Sequence
  Description of Artificial Sequence: Synthetic oligonucleotide
aagacgucuuuucucguca

SEQ ID NO: 1265319 - RNA, 19 nt, Artificial Sequence
  Description of Artificial Sequence: Synthetic oligonucleotide
acauaauaaauuagguaag

SEQ ID NO: 1265320 - RNA, 19 nt, Artificial Sequence
  Description of Artificial Sequence: Synthetic oligonucleotide
uuuguggcucgauuccugg

SEQ ID NO: 1265321 - RNA, 19 nt, Artificial Sequence
  Description of Artificial Sequence: Synthetic oligonucleotide
ugguccaucaaaaggguaa

SEQ ID NO: 1265322 - RNA, 19 nt, Artificial Sequence
  Description of Artificial Sequence: Synthetic oligonucleotide
ucuccuuaucacuaacagc

SEQ ID NO: 1265323 - RNA, 19 nt, Artificial Sequence
  Description of Artificial Sequence: Synthetic oligonucleotide
augugguccauagagggac

SEQ ID NO: 1265324 - RNA, 19 nt, Artificial Sequence
  Description of Artificial Sequence: Synthetic oligonucleotide
aaacccagagugugaagug

SEQ ID NO: 1265325 - RNA, 19 nt, Artificial Sequence
  Description of Artificial Sequence: Synthetic oligonucleotide
uccauaagacgucuuuucu

SEQ ID NO: 1265326 - RNA, 19 nt, Artificial Sequence
  Description of Artificial Sequence: Synthetic oligonucleotide
uucagggugugugucaccg

SEQ ID NO: 1265327 - RNA, 19 nt, Artificial Sequence
  Description of Artificial Sequence: Synthetic oligonucleotide
aaagguggugaagccaccg

SEQ ID NO: 1265328 - RNA, 19 nt, Artificial Sequence
  Description of Artificial Sequence: Synthetic oligonucleotide
uggacaaccuguagacggg

SEQ ID NO: 1265329 - RNA, 19 nt, Artificial Sequence
  Description of Artificial Sequence: Synthetic oligonucleotide
cagcuguuacucuucaggg

SEQ ID NO: 1265330 - RNA, 19 nt, Artificial Sequence
  Description of Artificial Sequence: Synthetic oligonucleotide
cagcaucuaagugugaagg

SEQ ID NO: 1265331 - RNA, 19 nt, Artificial Sequence
  Description of Artificial Sequence: Synthetic oligonucleotide
ucccugaugguccaagugu

SEQ ID NO: 1265332 - RNA, 19 nt, Artificial Sequence
  Description of Artificial Sequence: Synthetic oligonucleotide
gucaucuuuuaucagccug

SEQ ID NO: 1265333 - RNA, 19 nt, Artificial Sequence
  Description of Artificial Sequence: Synthetic oligonucleotide
cauucugacacauaauaaa

SEQ ID NO: 1265334 - RNA, 19 nt, Artificial Sequence
  Description of Artificial Sequence: Synthetic oligonucleotide
uagauauugcugagcaaga

SEQ ID NO: 1265335 - RNA, 19 nt, Artificial Sequence
  Description of Artificial Sequence: Synthetic oligonucleotide
ucauaggcagcaucuaagu

SEQ ID NO: 1265336 - RNA, 19 nt, Artificial Sequence
  Description of Artificial Sequence: Synthetic oligonucleotide
ucuauaucaucuugagaaa

SEQ ID NO: 1265337 - RNA, 19 nt, Artificial Sequence
  Description of Artificial Sequence: Synthetic oligonucleotide
auuagguaagaaaugcuga

SEQ ID NO: 1265338 - RNA, 19 nt, Artificial Sequence
  Description of Artificial Sequence: Synthetic oligonucleotide
aggucuuggagagacagag

SEQ ID NO: 1265339 - RNA, 19 nt, Artificial Sequence
  Description of Artificial Sequence: Synthetic oligonucleotide
uuauccauaagacgucuuu

SEQ ID NO: 1265340 - RNA, 19 nt, Artificial Sequence
  Description of Artificial Sequence: Synthetic oligonucleotide
gauuccagcgggauaugcg

SEQ ID NO: 1265341 - RNA, 19 nt, Artificial Sequence
  Description of Artificial Sequence: Synthetic oligonucleotide
uuggaccucauuuccucgg

SEQ ID NO: 1265342 - RNA, 19 nt, Artificial Sequence
  Description of Artificial Sequence: Synthetic oligonucleotide
caaaaggguaaaagucucc

SEQ ID NO: 1265343 - RNA, 19 nt, Artificial Sequence
  Description of Artificial Sequence: Synthetic oligonucleotide
ugguggacaaccuguagac

SEQ ID NO: 1265344 - RNA, 19 nt, Artificial Sequence
  Description of Artificial Sequence: Synthetic oligonucleotide
ugcaacaccgcaucaauuu

SEQ ID NO: 1265345 - RNA, 19 nt, Artificial Sequence
  Description of Artificial Sequence: Synthetic oligonucleotide
ugacagucagcagaggagc

SEQ ID NO: 1265346 - RNA, 19 nt, Artificial Sequence
  Description of Artificial Sequence: Synthetic oligonucleotide
gaaagagucccagggagug

SEQ ID NO: 1265347 - RNA, 19 nt, Artificial Sequence
  Description of Artificial Sequence: Synthetic oligonucleotide
uccauuucucaucaucauc

SEQ ID NO: 1265348 - RNA, 19 nt, Artificial Sequence
  Description of Artificial Sequence: Synthetic oligonucleotide
agugugaagugcuuuugga

SEQ ID NO: 1265349 - RNA, 19 nt, Artificial Sequence
  Description of Artificial Sequence: Synthetic oligonucleotide
agguggugaagccaccgac

SEQ ID NO: 1265350 - RNA, 19 nt, Artificial Sequence
  Description of Artificial Sequence: Synthetic oligonucleotide
uuacucuucagggugugug

SEQ ID NO: 1265351 - RNA, 19 nt, Artificial Sequence
  Description of Artificial Sequence: Synthetic oligonucleotide
gucauucugacacauaaua

SEQ ID NO: 1265352 - RNA, 19 nt, Artificial Sequence
  Description of Artificial Sequence: Synthetic oligonucleotide
cagaggauaugcugaagag

SEQ ID NO: 1265353 - RNA, 19 nt, Artificial Sequence
  Description of Artificial Sequence: Synthetic oligonucleotide
aagugaacaucuccauaga

SEQ ID NO: 1265354 - RNA, 19 nt, Artificial Sequence
  Description of Artificial Sequence: Synthetic oligonucleotide
aaaggguaaaagucuccau

SEQ ID NO: 1265355 - RNA, 19 nt, Artificial Sequence
  Description of Artificial Sequence: Synthetic oligonucleotide
ugacaaugggacuacuguc

SEQ ID NO: 1265356 - RNA, 19 nt, Artificial Sequence
  Description of Artificial Sequence: Synthetic oligonucleotide
aaggacaaagcaggaucac

SEQ ID NO: 1265357 - RNA, 19 nt, Artificial Sequence
  Description of Artificial Sequence: Synthetic oligonucleotide
ugagguuuguuucccucca

SEQ ID NO: 1265358 - RNA, 19 nt, Artificial Sequence
  Description of Artificial Sequence: Synthetic oligonucleotide
acuguggcaucagaggacg

SEQ ID NO: 1265359 - RNA, 19 nt, Artificial Sequence
  Description of Artificial Sequence: Synthetic oligonucleotide
gauaugcugaagagacugg

SEQ ID NO: 1265360 - RNA, 19 nt, Artificial Sequence
  Description of Artificial Sequence: Synthetic oligonucleotide
uuuaucagccuggggaagc

SEQ ID NO: 1265361 - RNA, 19 nt, Artificial Sequence
  Description of Artificial Sequence: Synthetic oligonucleotide
caugcagaggauaugcuga

SEQ ID NO: 1265362 - RNA, 19 nt, Artificial Sequence
  Description of Artificial Sequence: Synthetic oligonucleotide
aguacguggucuucuucuc

SEQ ID NO: 1265363 - RNA, 19 nt, Artificial Sequence
  Description of Artificial Sequence: Synthetic oligonucleotide
guuguaguacuuuucuaga

SEQ ID NO: 1265364 - RNA, 19 nt, Artificial Sequence
  Description of Artificial Sequence: Synthetic oligonucleotide
ugaaaacgcuaucucugcu

SEQ ID NO: 1265365 - RNA, 19 nt, Artificial Sequence
  Description of Artificial Sequence: Synthetic oligonucleotide
aaaugccugcaacaccgca

SEQ ID NO: 1265366 - RNA, 19 nt, Artificial Sequence
  Description of Artificial Sequence: Synthetic oligonucleotide
gacauggguaccacugugg

SEQ ID NO: 1265367 - RNA, 19 nt, Artificial Sequence
  Description of Artificial Sequence: Synthetic oligonucleotide
agacgggguacaucagagc

SEQ ID NO: 1265368 - RNA, 19 nt, Artificial Sequence
  Description of Artificial Sequence: Synthetic oligonucleotide
uuucuagauauugcugagc

SEQ ID NO: 1265369 - RNA, 19 nt, Artificial Sequence
  Description of Artificial Sequence: Synthetic oligonucleotide
cagaggacggauguggucc

SEQ ID NO: 1265370 - RNA, 19 nt, Artificial Sequence
  Description of Artificial Sequence: Synthetic oligonucleotide
gauaugcgccaaaaguacc

SEQ ID NO: 1265371 - RNA, 19 nt, Artificial Sequence
  Description of Artificial Sequence: Synthetic oligonucleotide
uguccugguccaucaaaag

SEQ ID NO: 1265372 - RNA, 19 nt, Artificial Sequence
  Description of Artificial Sequence: Synthetic oligonucleotide
uuguaguacuuuucuagau

SEQ ID NO: 1265373 - RNA, 19 nt, Artificial Sequence
  Description of Artificial Sequence: Synthetic oligonucleotide
cuuggaccucauuuccucg

SEQ ID NO: 1265374 - RNA, 19 nt, Artificial Sequence
  Description of Artificial Sequence: Synthetic oligonucleotide
aauuuguggcucgauuccu

SEQ ID NO: 1265375 - RNA, 19 nt, Artificial Sequence
  Description of Artificial Sequence: Synthetic oligonucleotide
uucacagugggagggaaac

SEQ ID NO: 1265376 - RNA, 19 nt, Artificial Sequence
  Description of Artificial Sequence: Synthetic oligonucleotide
aaaugcugagacucauuuu

SEQ ID NO: 1265377 - RNA, 19 nt, Artificial Sequence
  Description of Artificial Sequence: Synthetic oligonucleotide
uguggcucgauuccuggaa

SEQ ID NO: 1265378 - RNA, 19 nt, Artificial Sequence
  Description of Artificial Sequence: Synthetic oligonucleotide
agugaacaucuccauagaa

SEQ ID NO: 1265379 - RNA, 19 nt, Artificial Sequence
  Description of Artificial Sequence: Synthetic oligonucleotide
auucugacacauaauaaau

SEQ ID NO: 1265380 - RNA, 19 nt, Artificial Sequence
  Description of Artificial Sequence: Synthetic oligonucleotide
cuuggagagacagaggaca

SEQ ID NO: 1265381 - RNA, 19 nt, Artificial Sequence
  Description of Artificial Sequence: Synthetic oligonucleotide
aaguuguaguacuuuucua

SEQ ID NO: 1265382 - RNA, 19 nt, Artificial Sequence
  Description of Artificial Sequence: Synthetic oligonucleotide
guacuuuucuagauauugc

SEQ ID NO: 1265383 - RNA, 19 nt, Artificial Sequence
  Description of Artificial Sequence: Synthetic oligonucleotide
aucgaagugaacaucucca

SEQ ID NO: 1265384 - RNA, 19 nt, Artificial Sequence
  Description of Artificial Sequence: Synthetic oligonucleotide
auuuccucggacugcccag

SEQ ID NO: 1265385 - RNA, 19 nt, Artificial Sequence
  Description of Artificial Sequence: Synthetic oligonucleotide
uagguaagaaaugcugaga

SEQ ID NO: 1265386 - RNA, 19 nt, Artificial Sequence
  Description of Artificial Sequence: Synthetic oligonucleotide
uaucacuaacagcugcauc

SEQ ID NO: 1265387 - RNA, 19 nt, Artificial Sequence
  Description of Artificial Sequence: Synthetic oligonucleotide
accgcaucaauuuguggcu

SEQ ID NO: 1265388 - RNA, 19 nt, Artificial Sequence
  Description of Artificial Sequence: Synthetic oligonucleotide
aaaacccaaaugccugcaa

SEQ ID NO: 1265389 - RNA, 19 nt, Artificial Sequence
  Description of Artificial Sequence: Synthetic oligonucleotide
uuuuaucagccuggggaag

SEQ ID NO: 1265390 - RNA, 19 nt, Artificial Sequence
  Description of Artificial Sequence: Synthetic oligonucleotide
uauugcugagcaagaucca

SEQ ID NO: 1265391 - RNA, 19 nt, Artificial Sequence
  Description of Artificial Sequence: Synthetic oligonucleotide
guaccugucuuuaaagaac

SEQ ID NO: 1265392 - RNA, 19 nt, Artificial Sequence
  Description of Artificial Sequence: Synthetic oligonucleotide
cucaacaaagaaguacgug

SEQ ID NO: 1265393 - RNA, 19 nt, Artificial Sequence
  Description of Artificial Sequence: Synthetic oligonucleotide
ugcuccaugcagaggauau

SEQ ID NO: 1265394 - RNA, 19 nt, Artificial Sequence
  Description of Artificial Sequence: Synthetic oligonucleotide
uaagacgucuuuucucguc

SEQ ID NO: 1265395 - RNA, 19 nt, Artificial Sequence
  Description of Artificial Sequence: Synthetic oligonucleotide
gauuccuggaaagucaucu

SEQ ID NO: 1265396 - RNA, 19 nt, Artificial Sequence
  Description of Artificial Sequence: Synthetic oligonucleotide
aacaccgcaucaauuugug

SEQ ID NO: 1265397 - RNA, 19 nt, Artificial Sequence
  Description of Artificial Sequence: Synthetic oligonucleotide
agacucauuuuccaguguu

SEQ ID NO: 1265398 - RNA, 19 nt, Artificial Sequence
  Description of Artificial Sequence: Synthetic oligonucleotide
cuggaaagguggugaagcc

SEQ ID NO: 1265399 - RNA, 19 nt, Artificial Sequence
  Description of Artificial Sequence: Synthetic oligonucleotide
ccuggggaagccuuuaucc

SEQ ID NO: 1265400 - RNA, 19 nt, Artificial Sequence
  Description of Artificial Sequence: Synthetic oligonucleotide
augccgaaaucaaauugac

SEQ ID NO: 1265401 - RNA, 19 nt, Artificial Sequence
  Description of Artificial Sequence: Synthetic oligonucleotide
agcaagauccaugcuuggg

SEQ ID NO: 1265402 - RNA, 19 nt, Artificial Sequence
  Description of Artificial Sequence: Synthetic oligonucleotide
ugccgaaaucaaauugacu

SEQ ID NO: 1265403 - RNA, 19 nt, Artificial Sequence
  Description of Artificial Sequence: Synthetic oligonucleotide
uguagacgggguacaucag

SEQ ID NO: 1265404 - RNA, 19 nt, Artificial Sequence
  Description of Artificial Sequence: Synthetic oligonucleotide
agaggauaugcugaagaga

SEQ ID NO: 1265405 - RNA, 19 nt, Artificial Sequence
  Description of Artificial Sequence: Synthetic oligonucleotide
aaauugacuucaggcucag

SEQ ID NO: 1265406 - RNA, 19 nt, Artificial Sequence
  Description of Artificial Sequence: Synthetic oligonucleotide
gaaaacgcuaucucugcua

SEQ ID NO: 1265407 - RNA, 19 nt, Artificial Sequence
  Description of Artificial Sequence: Synthetic oligonucleotide
ugcgccaaaaguaccuguc

SEQ ID NO: 1265408 - RNA, 19 nt, Artificial Sequence
  Description of Artificial Sequence: Synthetic oligonucleotide
aucaauuuguggcucgauu

SEQ ID NO: 1265409 - RNA, 19 nt, Artificial Sequence
  Description of Artificial Sequence: Synthetic oligonucleotide
gacacauaauaaauuaggu

SEQ ID NO: 1265410 - RNA, 19 nt, Artificial Sequence
  Description of Artificial Sequence: Synthetic oligonucleotide
agagagggccaaaaugccg

SEQ ID NO: 1265411 - RNA, 19 nt, Artificial Sequence
  Description of Artificial Sequence: Synthetic oligonucleotide
cugcuaugagcuucauagg

SEQ ID NO: 1265412 - RNA, 19 nt, Artificial Sequence
  Description of Artificial Sequence: Synthetic oligonucleotide
gugacagucagcagaggag

SEQ ID NO: 1265413 - RNA, 19 nt, Artificial Sequence
  Description of Artificial Sequence: Synthetic oligonucleotide
ucgauuccuggaaagucau

SEQ ID NO: 1265414 - RNA, 19 nt, Artificial Sequence
  Description of Artificial Sequence: Synthetic oligonucleotide
gagaaagcuggaacugugc

SEQ ID NO: 1265415 - RNA, 19 nt, Artificial Sequence
  Description of Artificial Sequence: Synthetic oligonucleotide
caggaauaauuagucauuc

SEQ ID NO: 1265416 - RNA, 19 nt, Artificial Sequence
  Description of Artificial Sequence: Synthetic oligonucleotide
ucuagauauugcugagcaa

SEQ ID NO: 1265417 - RNA, 19 nt, Artificial Sequence
  Description of Artificial Sequence: Synthetic oligonucleotide
gacgggguacaucagagcu

SEQ ID NO: 1265418 - RNA, 19 nt, Artificial Sequence
  Description of Artificial Sequence: Synthetic oligonucleotide
aagugcuuuuggauaaccu

SEQ ID NO: 1265419 - RNA, 19 nt, Artificial Sequence
  Description of Artificial Sequence: Synthetic oligonucleotide
gcugcaucgaucuucuuca

SEQ ID NO: 1265420 - RNA, 19 nt, Artificial Sequence
  Description of Artificial Sequence: Synthetic oligonucleotide
agguuuguuucccuccacu

SEQ ID NO: 1265421 - RNA, 19 nt, Artificial Sequence
  Description of Artificial Sequence: Synthetic oligonucleotide
uggaaagguggugaagcca

SEQ ID NO: 1265422 - RNA, 19 nt, Artificial Sequence
  Description of Artificial Sequence: Synthetic oligonucleotide
cucgauuccuggaaaguca

SEQ ID NO: 1265423 - RNA, 19 nt, Artificial Sequence
  Description of Artificial Sequence: Synthetic oligonucleotide
agcuguuacucuucagggu

SEQ ID NO: 1265424 - RNA, 19 nt, Artificial Sequence
  Description of Artificial Sequence: Synthetic oligonucleotide
aaacgcuaucucugcuaug

SEQ ID NO: 1265425 - RNA, 19 nt, Artificial Sequence
  Description of Artificial Sequence: Synthetic oligonucleotide
ucaaacugugaugauccau

SEQ ID NO: 1265426 - RNA, 19 nt, Artificial Sequence
  Description of Artificial Sequence: Synthetic oligonucleotide
ucgaagugaacaucuccau

SEQ ID NO: 1265427 - RNA, 19 nt, Artificial Sequence
  Description of Artificial Sequence: Synthetic oligonucleotide
uacucuucagggugugugu

SEQ ID NO: 1265428 - RNA, 19 nt, Artificial Sequence
  Description of Artificial Sequence: Synthetic oligonucleotide
uuuauccauaagacgucuu

SEQ ID NO: 1265429 - RNA, 19 nt, Artificial Sequence
  Description of Artificial Sequence: Synthetic oligonucleotide
uaggcaugagccagacucu

SEQ ID NO: 1265430 - RNA, 19 nt, Artificial Sequence
  Description of Artificial Sequence: Synthetic oligonucleotide
uuccagcgggauaugcgcc

SEQ ID NO: 1265431 - RNA, 19 nt, Artificial Sequence
  Description of Artificial Sequence: Synthetic oligonucleotide
uggcucgauuccuggaaag

SEQ ID NO: 1265432 - RNA, 19 nt, Artificial Sequence
  Description of Artificial Sequence: Synthetic oligonucleotide
ucacacuuggcuggggucu

SEQ ID NO: 1265433 - RNA, 19 nt, Artificial Sequence
  Description of Artificial Sequence: Synthetic oligonucleotide
acaccgcaucaauuugugg

SEQ ID NO: 1265434 - RNA, 19 nt, Artificial Sequence
  Description of Artificial Sequence: Synthetic oligonucleotide
uuuggauaaccugcuugga

SEQ ID NO: 1265435 - RNA, 19 nt, Artificial Sequence
  Description of Artificial Sequence: Synthetic oligonucleotide
uguggcaucagaggacgga

SEQ ID NO: 1265436 - RNA, 19 nt, Artificial Sequence
  Description of Artificial Sequence: Synthetic oligonucleotide
ucaucgaagugaacaucuc

SEQ ID NO: 1265437 - RNA, 19 nt, Artificial Sequence
  Description of Artificial Sequence: Synthetic oligonucleotide
uggggaagccuuuauccau

SEQ ID NO: 1265438 - RNA, 19 nt, Artificial Sequence
  Description of Artificial Sequence: Synthetic oligonucleotide
auaugcgccaaaaguaccu

SEQ ID NO: 1265439 - RNA, 19 nt, Artificial Sequence
  Description of Artificial Sequence: Synthetic oligonucleotide
uaugcgccaaaaguaccug

SEQ ID NO: 1265440 - RNA, 19 nt, Artificial Sequence
  Description of Artificial Sequence: Synthetic oligonucleotide
aucuaagugugaaggaaga

SEQ ID NO: 1265441 - RNA, 19 nt, Artificial Sequence
  Description of Artificial Sequence: Synthetic oligonucleotide
caugcuuggguggucuugc

SEQ ID NO: 1265442 - RNA, 19 nt, Artificial Sequence
  Description of Artificial Sequence: Synthetic oligonucleotide
cacaggaauaauuagucau

SEQ ID NO: 1265443 - RNA, 19 nt, Artificial Sequence
  Description of Artificial Sequence: Synthetic oligonucleotide
gccgaaaucaaauugacuu

SEQ ID NO: 1265444 - RNA, 19 nt, Artificial Sequence
  Description of Artificial Sequence: Synthetic oligonucleotide
gauccauggaagaaauaaa

SEQ ID NO: 1265445 - RNA, 19 nt, Artificial Sequence
  Description of Artificial Sequence: Synthetic oligonucleotide
auaagacgucuuuucucgu

SEQ ID NO: 1265446 - RNA, 19 nt, Artificial Sequence
  Description of Artificial Sequence: Synthetic oligonucleotide
uauccauaagacgucuuuu

SEQ ID NO: 1265447 - RNA, 19 nt, Artificial Sequence
  Description of Artificial Sequence: Synthetic oligonucleotide
uucgugagccacacagcac

SEQ ID NO: 1265448 - RNA, 19 nt, Artificial Sequence
  Description of Artificial Sequence: Synthetic oligonucleotide
cuaaauacuuguuucucau

SEQ ID NO: 1265449 - RNA, 19 nt, Artificial Sequence
  Description of Artificial Sequence: Synthetic oligonucleotide
ccuuaucacuaacagcugc

SEQ ID NO: 1265450 - RNA, 19 nt, Artificial Sequence
  Description of Artificial Sequence: Synthetic oligonucleotide
agcgccuggagaaugugag

SEQ ID NO: 1265451 - RNA, 19 nt, Artificial Sequence
  Description of Artificial Sequence: Synthetic oligonucleotide
ggauaugcgccaaaaguac

SEQ ID NO: 1265452 - RNA, 19 nt, Artificial Sequence
  Description of Artificial Sequence: Synthetic oligonucleotide
ucuucagggugugugucac

SEQ ID NO: 1265453 - RNA, 19 nt, Artificial Sequence
  Description of Artificial Sequence: Synthetic oligonucleotide
uggaccucauuuccucgga

SEQ ID NO: 1265454 - RNA, 19 nt, Artificial Sequence
  Description of Artificial Sequence: Synthetic oligonucleotide
aagcaggaucacacuuggc

SEQ ID NO: 1265455 - RNA, 19 nt, Artificial Sequence
  Description of Artificial Sequence: Synthetic oligonucleotide
guacguggucuucuucucc

SEQ ID NO: 1265456 - RNA, 19 nt, Artificial Sequence
  Description of Artificial Sequence: Synthetic oligonucleotide
ugggacuacuguccuuucu

SEQ ID NO: 1265457 - RNA, 19 nt, Artificial Sequence
  Description of Artificial Sequence: Synthetic oligonucleotide
ggcucaggauuccagcggg

SEQ ID NO: 1265458 - RNA, 19 nt, Artificial Sequence
  Description of Artificial Sequence: Synthetic oligonucleotide
guuuguguaugucuucugu

SEQ ID NO: 1265459 - RNA, 19 nt, Artificial Sequence
  Description of Artificial Sequence: Synthetic oligonucleotide
aauugacuucaggcucagg

SEQ ID NO: 1265460 - RNA, 19 nt, Artificial Sequence
  Description of Artificial Sequence: Synthetic oligonucleotide
cugguggacaaccuguaga

SEQ ID NO: 1265461 - RNA, 19 nt, Artificial Sequence
  Description of Artificial Sequence: Synthetic oligonucleotide
agagugugaagugcuuuug

SEQ ID NO: 1265462 - RNA, 19 nt, Artificial Sequence
  Description of Artificial Sequence: Synthetic oligonucleotide
augcuuggguggucuugcc

SEQ ID NO: 1265463 - RNA, 19 nt, Artificial Sequence
  Description of Artificial Sequence: Synthetic oligonucleotide
gcagaggauaugcugaaga

SEQ ID NO: 1265464 - RNA, 19 nt, Artificial Sequence
  Description of Artificial Sequence: Synthetic oligonucleotide
guagacgggguacaucaga

SEQ ID NO: 1265465 - RNA, 19 nt, Artificial Sequence
  Description of Artificial Sequence: Synthetic oligonucleotide
ucaggauuccagcgggaua

SEQ ID NO: 1265466 - RNA, 19 nt, Artificial Sequence
  Description of Artificial Sequence: Synthetic oligonucleotide
ucagaggacggaugugguc

SEQ ID NO: 1265467 - RNA, 19 nt, Artificial Sequence
  Description of Artificial Sequence: Synthetic oligonucleotide
agucaucuuuuaucagccu

SEQ ID NO: 1265468 - RNA, 19 nt, Artificial Sequence
  Description of Artificial Sequence: Synthetic oligonucleotide
aggaagagagggccaaaau

SEQ ID NO: 1265469 - RNA, 19 nt, Artificial Sequence
  Description of Artificial Sequence: Synthetic oligonucleotide
acaggaauaauuagucauu

SEQ ID NO: 1265470 - RNA, 19 nt, Artificial Sequence
  Description of Artificial Sequence: Synthetic oligonucleotide
uccagcgggauaugcgcca

SEQ ID NO: 1265471 - RNA, 19 nt, Artificial Sequence
  Description of Artificial Sequence: Synthetic oligonucleotide
caaccuguagacgggguac

SEQ ID NO: 1265472 - RNA, 19 nt, Artificial Sequence
  Description of Artificial Sequence: Synthetic oligonucleotide
gaagagacuggcaggcaca

SEQ ID NO: 1265473 - RNA, 19 nt, Artificial Sequence
  Description of Artificial Sequence: Synthetic oligonucleotide
cagaggagccagcuguuac

SEQ ID NO: 1265474 - RNA, 19 nt, Artificial Sequence
  Description of Artificial Sequence: Synthetic oligonucleotide
gacagucagcagaggagcc

SEQ ID NO: 1265475 - RNA, 19 nt, Artificial Sequence
  Description of Artificial Sequence: Synthetic oligonucleotide
caaaugccugcaacaccgc

SEQ ID NO: 1265476 - RNA, 19 nt, Artificial Sequence
  Description of Artificial Sequence: Synthetic oligonucleotide
acaaccuguagacggggua

SEQ ID NO: 1265477 - RNA, 19 nt, Artificial Sequence
  Description of Artificial Sequence: Synthetic oligonucleotide
gucccugaugguccaagug

SEQ ID NO: 1265478 - RNA, 19 nt, Artificial Sequence
  Description of Artificial Sequence: Synthetic oligonucleotide
agggugugugucaccgucc

SEQ ID NO: 1265479 - RNA, 19 nt, Artificial Sequence
  Description of Artificial Sequence: Synthetic oligonucleotide
ggacggaugugguccauag

SEQ ID NO: 1265480 - RNA, 19 nt, Artificial Sequence
  Description of Artificial Sequence: Synthetic oligonucleotide
agauauugcugagcaagau

SEQ ID NO: 1265481 - RNA, 19 nt, Artificial Sequence
  Description of Artificial Sequence: Synthetic oligonucleotide
ugcagaggauaugcugaag

SEQ ID NO: 1265482 - RNA, 19 nt, Artificial Sequence
  Description of Artificial Sequence: Synthetic oligonucleotide
acgucuuuucucgucaaau

SEQ ID NO: 1265483 - RNA, 19 nt, Artificial Sequence
  Description of Artificial Sequence: Synthetic oligonucleotide
gaugauccauggaagaaau

SEQ ID NO: 1265484 - RNA, 19 nt, Artificial Sequence
  Description of Artificial Sequence: Synthetic oligonucleotide
cuugccucacugcuccaug

SEQ ID NO: 1265485 - RNA, 19 nt, Artificial Sequence
  Description of Artificial Sequence: Synthetic oligonucleotide
gccuuuauccauaagacgu

SEQ ID NO: 1265486 - RNA, 19 nt, Artificial Sequence
  Description of Artificial Sequence: Synthetic oligonucleotide
ucauuuccucggacugccc

SEQ ID NO: 1265487 - RNA, 19 nt, Artificial Sequence
  Description of Artificial Sequence: Synthetic oligonucleotide
uccaguguuuguguauguc

SEQ ID NO: 1265488 - RNA, 19 nt, Artificial Sequence
  Description of Artificial Sequence: Synthetic oligonucleotide
ccauaagacgucuuuucuc

SEQ ID NO: 1265489 - RNA, 19 nt, Artificial Sequence
  Description of Artificial Sequence: Synthetic oligonucleotide
aaccuguagacgggguaca

SEQ ID NO: 1265490 - RNA, 19 nt, Artificial Sequence
  Description of Artificial Sequence: Synthetic oligonucleotide
aggaucacacuuggcuggg

SEQ ID NO: 1265491 - RNA, 19 nt, Artificial Sequence
  Description of Artificial Sequence: Synthetic oligonucleotide
agauccaugcuuggguggu

SEQ ID NO: 1265492 - RNA, 19 nt, Artificial Sequence
  Description of Artificial Sequence: Synthetic oligonucleotide
cagggugugugucaccguc

SEQ ID NO: 1265493 - RNA, 19 nt, Artificial Sequence
  Description of Artificial Sequence: Synthetic oligonucleotide
uuuugacaaugggacuacu

SEQ ID NO: 1265494 - RNA, 19 nt, Artificial Sequence
  Description of Artificial Sequence: Synthetic oligonucleotide
ccgaaaucaaauugacuuc

SEQ ID NO: 1265495 - RNA, 19 nt, Artificial Sequence
  Description of Artificial Sequence: Synthetic oligonucleotide
gacuacuguccuuucuucu

SEQ ID NO: 1265496 - RNA, 19 nt, Artificial Sequence
  Description of Artificial Sequence: Synthetic oligonucleotide
uggggucucaggucuugga

SEQ ID NO: 1265497 - RNA, 19 nt, Artificial Sequence
  Description of Artificial Sequence: Synthetic oligonucleotide
gugugaaggaagagagggc

SEQ ID NO: 1265498 - RNA, 19 nt, Artificial Sequence
  Description of Artificial Sequence: Synthetic oligonucleotide
ugaagugcuuuuggauaac

SEQ ID NO: 1265499 - RNA, 19 nt, Artificial Sequence
  Description of Artificial Sequence: Synthetic oligonucleotide
ggacauggguaccacugug

SEQ ID NO: 1265500 - RNA, 19 nt, Artificial Sequence
  Description of Artificial Sequence: Synthetic oligonucleotide
uacuguccuuucuucuaaa

SEQ ID NO: 1265501 - RNA, 19 nt, Artificial Sequence
  Description of Artificial Sequence: Synthetic oligonucleotide
gcuaucucugcuaugagcu

SEQ ID NO: 1265502 - RNA, 19 nt, Artificial Sequence
  Description of Artificial Sequence: Synthetic oligonucleotide
cucacuaagaaagcugucu

SEQ ID NO: 1265503 - RNA, 19 nt, Artificial Sequence
  Description of Artificial Sequence: Synthetic oligonucleotide
ucuucacagugggagggaa

SEQ ID NO: 1265504 - RNA, 19 nt, Artificial Sequence
  Description of Artificial Sequence: Synthetic oligonucleotide
acgcuaucucugcuaugag

SEQ ID NO: 1265505 - RNA, 19 nt, Artificial Sequence
  Description of Artificial Sequence: Synthetic oligonucleotide
gaccucauuuccucggacu

SEQ ID NO: 1265506 - RNA, 19 nt, Artificial Sequence
  Description of Artificial Sequence: Synthetic oligonucleotide
cuguccugguccaucaaaa

SEQ ID NO: 1265507 - RNA, 19 nt, Artificial Sequence
  Description of Artificial Sequence: Synthetic oligonucleotide
gguggucuugccucacugc

SEQ ID NO: 1265508 - RNA, 19 nt, Artificial Sequence
  Description of Artificial Sequence: Synthetic oligonucleotide
cuguccuuucuucuaaaua

SEQ ID NO: 1265509 - RNA, 19 nt, Artificial Sequence
  Description of Artificial Sequence: Synthetic oligonucleotide
gggauaugcgccaaaagua

SEQ ID NO: 1265510 - RNA, 19 nt, Artificial Sequence
  Description of Artificial Sequence: Synthetic oligonucleotide
aguuccccucgcagggugc

SEQ ID NO: 1265511 - RNA, 19 nt, Artificial Sequence
  Description of Artificial Sequence: Synthetic oligonucleotide
gugaugauccauggaagaa

SEQ ID NO: 1265512 - RNA, 19 nt, Artificial Sequence
  Description of Artificial Sequence: Synthetic oligonucleotide
uuuccucggacugcccaga

SEQ ID NO: 1265513 - RNA, 19 nt, Artificial Sequence
  Description of Artificial Sequence: Synthetic oligonucleotide
cuucagggugugugucacc

SEQ ID NO: 1265514 - RNA, 19 nt, Artificial Sequence
  Description of Artificial Sequence: Synthetic oligonucleotide
gugaacaucuccauagaau

SEQ ID NO: 1265515 - RNA, 19 nt, Artificial Sequence
  Description of Artificial Sequence: Synthetic oligonucleotide
gguggacaaccuguagacg

SEQ ID NO: 1265516 - RNA, 19 nt, Artificial Sequence
  Description of Artificial Sequence: Synthetic oligonucleotide
ugugccgggcugguggaca

SEQ ID NO: 1265517 - RNA, 19 nt, Artificial Sequence
  Description of Artificial Sequence: Synthetic oligonucleotide
ugggcucaucuucgugagc

SEQ ID NO: 1265518 - RNA, 19 nt, Artificial Sequence
  Description of Artificial Sequence: Synthetic oligonucleotide
gcaugagccagacucuguc

SEQ ID NO: 1265519 - RNA, 19 nt, Artificial Sequence
  Description of Artificial Sequence: Synthetic oligonucleotide
ugccugcaacaccgcauca

SEQ ID NO: 1265520 - RNA, 19 nt, Artificial Sequence
  Description of Artificial Sequence: Synthetic oligonucleotide
cuguggcaucagaggacgg

SEQ ID NO: 1265521 - RNA, 19 nt, Artificial Sequence
  Description of Artificial Sequence: Synthetic oligonucleotide
gacggaugugguccauaga

SEQ ID NO: 1265522 - RNA, 19 nt, Artificial Sequence
  Description of Artificial Sequence: Synthetic oligonucleotide
aggcaugagccagacucug

SEQ ID NO: 1265523 - RNA, 19 nt, Artificial Sequence
  Description of Artificial Sequence: Synthetic oligonucleotide
agucauucugacacauaau

SEQ ID NO: 1265524 - RNA, 19 nt, Artificial Sequence
  Description of Artificial Sequence: Synthetic oligonucleotide
gguaagaaaugcugagacu

SEQ ID NO: 1265525 - RNA, 19 nt, Artificial Sequence
  Description of Artificial Sequence: Synthetic oligonucleotide
agacgucuuuucucgucaa

SEQ ID NO: 1265526 - RNA, 19 nt, Artificial Sequence
  Description of Artificial Sequence: Synthetic oligonucleotide
uggcuccauccagacagcc

SEQ ID NO: 1265527 - RNA, 19 nt, Artificial Sequence
  Description of Artificial Sequence: Synthetic oligonucleotide
acugugccgggcuggugga

SEQ ID NO: 1265528 - RNA, 19 nt, Artificial Sequence
  Description of Artificial Sequence: Synthetic oligonucleotide
ggacaaccuguagacgggg

SEQ ID NO: 1265529 - RNA, 19 nt, Artificial Sequence
  Description of Artificial Sequence: Synthetic oligonucleotide
gacgucuuuucucgucaaa

SEQ ID NO: 1265530 - RNA, 19 nt, Artificial Sequence
  Description of Artificial Sequence: Synthetic oligonucleotide
ucuugccucacugcuccau

SEQ ID NO: 1265531 - RNA, 19 nt, Artificial Sequence
  Description of Artificial Sequence: Synthetic oligonucleotide
gcaagauccaugcuugggu

SEQ ID NO: 1265532 - RNA, 19 nt, Artificial Sequence
  Description of Artificial Sequence: Synthetic oligonucleotide
cccaaaugccugcaacacc

SEQ ID NO: 1265533 - RNA, 19 nt, Artificial Sequence
  Description of Artificial Sequence: Synthetic oligonucleotide
caguuccccucgcagggug

SEQ ID NO: 1265534 - RNA, 19 nt, Artificial Sequence
  Description of Artificial Sequence: Synthetic oligonucleotide
augguccaaguguccauuu

SEQ ID NO: 1265535 - RNA, 19 nt, Artificial Sequence
  Description of Artificial Sequence: Synthetic oligonucleotide
agucccagggaguggccaa

SEQ ID NO: 1265536 - RNA, 19 nt, Artificial Sequence
  Description of Artificial Sequence: Synthetic oligonucleotide
agccaccgacaucggggac

SEQ ID NO: 1265537 - RNA, 19 nt, Artificial Sequence
  Description of Artificial Sequence: Synthetic oligonucleotide
gacugcccagaacugauuu

SEQ ID NO: 1265538 - RNA, 19 nt, Artificial Sequence
  Description of Artificial Sequence: Synthetic oligonucleotide
gcaucuaagugugaaggaa

SEQ ID NO: 1265539 - RNA, 19 nt, Artificial Sequence
  Description of Artificial Sequence: Synthetic oligonucleotide
cuuuauccauaagacgucu

SEQ ID NO: 1265540 - RNA, 19 nt, Artificial Sequence
  Description of Artificial Sequence: Synthetic oligonucleotide
cgcuaucucugcuaugagc

SEQ ID NO: 1265541 - RNA, 19 nt, Artificial Sequence
  Description of Artificial Sequence: Synthetic oligonucleotide
caacaccgcaucaauuugu

SEQ ID NO: 1265542 - RNA, 19 nt, Artificial Sequence
  Description of Artificial Sequence: Synthetic oligonucleotide
aggauaugcugaagagacu

SEQ ID NO: 1265543 - RNA, 19 nt, Artificial Sequence
  Description of Artificial Sequence: Synthetic oligonucleotide
uaaccugcuuggaccucau

SEQ ID NO: 1265544 - RNA, 19 nt, Artificial Sequence
  Description of Artificial Sequence: Synthetic oligonucleotide
agugggagggaaacccaga

SEQ ID NO: 1265545 - RNA, 19 nt, Artificial Sequence
  Description of Artificial Sequence: Synthetic oligonucleotide
ggguggucuugccucacug

SEQ ID NO: 1265546 - RNA, 19 nt, Artificial Sequence
  Description of Artificial Sequence: Synthetic oligonucleotide
uccuguaggugagguuugu

SEQ ID NO: 1265547 - RNA, 19 nt, Artificial Sequence
  Description of Artificial Sequence: Synthetic oligonucleotide
gcgggauaugcgccaaaag

SEQ ID NO: 1265548 - RNA, 19 nt, Artificial Sequence
  Description of Artificial Sequence: Synthetic oligonucleotide
agcgggauaugcgccaaaa

SEQ ID NO: 1265549 - RNA, 19 nt, Artificial Sequence
  Description of Artificial Sequence: Synthetic oligonucleotide
uaucagccuggggaagccu

SEQ ID NO: 1265550 - RNA, 19 nt, Artificial Sequence
  Description of Artificial Sequence: Synthetic oligonucleotide
ggauaaccugcuuggaccu

SEQ ID NO: 1265551 - RNA, 19 nt, Artificial Sequence
  Description of Artificial Sequence: Synthetic oligonucleotide
cuguaggugagguuuguuu

SEQ ID NO: 1265552 - RNA, 19 nt, Artificial Sequence
  Description of Artificial Sequence: Synthetic oligonucleotide
uuccucggacugcccagaa

SEQ ID NO: 1265553 - RNA, 19 nt, Artificial Sequence
  Description of Artificial Sequence: Synthetic oligonucleotide
agggaaacccagaguguga

SEQ ID NO: 1265554 - RNA, 19 nt, Artificial Sequence
  Description of Artificial Sequence: Synthetic oligonucleotide
ggauuccagcgggauaugc

SEQ ID NO: 1265555 - RNA, 19 nt, Artificial Sequence
  Description of Artificial Sequence: Synthetic oligonucleotide
gagacucauuuuccagugu

SEQ ID NO: 1265556 - RNA, 19 nt, Artificial Sequence
  Description of Artificial Sequence: Synthetic oligonucleotide
agagcgccuggagaaugug

SEQ ID NO: 1265557 - RNA, 19 nt, Artificial Sequence
  Description of Artificial Sequence: Synthetic oligonucleotide
ggcaucagaggacggaugu

SEQ ID NO: 1265558 - RNA, 19 nt, Artificial Sequence
  Description of Artificial Sequence: Synthetic oligonucleotide
cagaggacauggguaccac

SEQ ID NO: 1265559 - RNA, 19 nt, Artificial Sequence
  Description of Artificial Sequence: Synthetic oligonucleotide
ccuggcauuggggucaaac

SEQ ID NO: 1265560 - RNA, 19 nt, Artificial Sequence
  Description of Artificial Sequence: Synthetic oligonucleotide
guggcucgauuccuggaaa

SEQ ID NO: 1265561 - RNA, 19 nt, Artificial Sequence
  Description of Artificial Sequence: Synthetic oligonucleotide
caggauuccagcgggauau

SEQ ID NO: 1265562 - RNA, 19 nt, Artificial Sequence
  Description of Artificial Sequence: Synthetic oligonucleotide
cgcaucaauuuguggcucg

SEQ ID NO: 1265563 - RNA, 19 nt, Artificial Sequence
  Description of Artificial Sequence: Synthetic oligonucleotide
gcucgauuccuggaaaguc

SEQ ID NO: 1265564 - RNA, 19 nt, Artificial Sequence
  Description of Artificial Sequence: Synthetic oligonucleotide
agacagccuuuacuuuaaa

SEQ ID NO: 1265565 - RNA, 19 nt, Artificial Sequence
  Description of Artificial Sequence: Synthetic oligonucleotide
uaacagcugcaucgaucuu

SEQ ID NO: 1265566 - RNA, 19 nt, Artificial Sequence
  Description of Artificial Sequence: Synthetic oligonucleotide
gagcgccuggagaauguga

SEQ ID NO: 1265567 - RNA, 19 nt, Artificial Sequence
  Description of Artificial Sequence: Synthetic oligonucleotide
caggucuuggagagacaga

SEQ ID NO: 1265568 - RNA, 19 nt, Artificial Sequence
  Description of Artificial Sequence: Synthetic oligonucleotide
cugguccaucaaaagggua

SEQ ID NO: 1265569 - RNA, 19 nt, Artificial Sequence
  Description of Artificial Sequence: Synthetic oligonucleotide
uccaugcuuggguggucuu

SEQ ID NO: 1265570 - RNA, 19 nt, Artificial Sequence
  Description of Artificial Sequence: Synthetic oligonucleotide
gauccaugcuugggugguc

SEQ ID NO: 1265571 - RNA, 19 nt, Artificial Sequence
  Description of Artificial Sequence: Synthetic oligonucleotide
agccuggggaagccuuuau

SEQ ID NO: 1265572 - RNA, 19 nt, Artificial Sequence
  Description of Artificial Sequence: Synthetic oligonucleotide
cacuuggcuggggucucag

SEQ ID NO: 1265573 - RNA, 19 nt, Artificial Sequence
  Description of Artificial Sequence: Synthetic oligonucleotide
gggaaacccagagugugaa

SEQ ID NO: 1265574 - RNA, 19 nt, Artificial Sequence
  Description of Artificial Sequence: Synthetic oligonucleotide
aggauuccagcgggauaug

SEQ ID NO: 1265575 - RNA, 19 nt, Artificial Sequence
  Description of Artificial Sequence: Synthetic oligonucleotide
cagagugugaagugcuuuu

SEQ ID NO: 1265576 - RNA, 19 nt, Artificial Sequence
  Description of Artificial Sequence: Synthetic oligonucleotide
uuggguggucuugccucac

SEQ ID NO: 1265577 - RNA, 19 nt, Artificial Sequence
  Description of Artificial Sequence: Synthetic oligonucleotide
gucagcagaggagccagcu

SEQ ID NO: 1265578 - RNA, 19 nt, Artificial Sequence
  Description of Artificial Sequence: Synthetic oligonucleotide
gugugucaccguccuggca

SEQ ID NO: 1265579 - RNA, 19 nt, Artificial Sequence
  Description of Artificial Sequence: Synthetic oligonucleotide
caucgaucuucuucacagu

SEQ ID NO: 1265580 - RNA, 19 nt, Artificial Sequence
  Description of Artificial Sequence: Synthetic oligonucleotide
ggugugugucaccguccug

SEQ ID NO: 1265581 - RNA, 19 nt, Artificial Sequence
  Description of Artificial Sequence: Synthetic oligonucleotide
ggacugaaugccaucuaua

SEQ ID NO: 1265582 - RNA, 19 nt, Artificial Sequence
  Description of Artificial Sequence: Synthetic oligonucleotide
augauccauggaagaaaua

SEQ ID NO: 1265583 - RNA, 19 nt, Artificial Sequence
  Description of Artificial Sequence: Synthetic oligonucleotide
gacaaccuguagacggggu

SEQ ID NO: 1265584 - RNA, 19 nt, Artificial Sequence
  Description of Artificial Sequence: Synthetic oligonucleotide
cacacuuggcuggggucuc

SEQ ID NO: 1265585 - RNA, 19 nt, Artificial Sequence
  Description of Artificial Sequence: Synthetic oligonucleotide
accuguagacgggguacau

SEQ ID NO: 1265586 - RNA, 19 nt, Artificial Sequence
  Description of Artificial Sequence: Synthetic oligonucleotide
cuucaggcucaggauucca

SEQ ID NO: 1265587 - RNA, 19 nt, Artificial Sequence
  Description of Artificial Sequence: Synthetic oligonucleotide
acgggguacaucagagcuu

SEQ ID NO: 1265588 - RNA, 19 nt, Artificial Sequence
  Description of Artificial Sequence: Synthetic oligonucleotide
gugagccacacagcacaca

SEQ ID NO: 1265589 - RNA, 19 nt, Artificial Sequence
  Description of Artificial Sequence: Synthetic oligonucleotide
cgggauaugcgccaaaagu

SEQ ID NO: 1265590 - RNA, 19 nt, Artificial Sequence
  Description of Artificial Sequence: Synthetic oligonucleotide
gcuccaugcagaggauaug

SEQ ID NO: 1265591 - RNA, 19 nt, Artificial Sequence
  Description of Artificial Sequence: Synthetic oligonucleotide
guggcaucagaggacggau

SEQ ID NO: 1265592 - RNA, 19 nt, Artificial Sequence
  Description of Artificial Sequence: Synthetic oligonucleotide
caggcccagguggguaggc

SEQ ID NO: 1265593 - RNA, 19 nt, Artificial Sequence
  Description of Artificial Sequence: Synthetic oligonucleotide
ucucugcuaugagcuucau

SEQ ID NO: 1265594 - RNA, 19 nt, Artificial Sequence
  Description of Artificial Sequence: Synthetic oligonucleotide
uuccccucgcagggugcug

SEQ ID NO: 1265595 - RNA, 19 nt, Artificial Sequence
  Description of Artificial Sequence: Synthetic oligonucleotide
gccgggcugguggacaacc

SEQ ID NO: 1265596 - RNA, 19 nt, Artificial Sequence
  Description of Artificial Sequence: Synthetic oligonucleotide
aggacggaugugguccaua

SEQ ID NO: 1265597 - RNA, 19 nt, Artificial Sequence
  Description of Artificial Sequence: Synthetic oligonucleotide
ccaugcuuggguggucuug

SEQ ID NO: 1265598 - RNA, 19 nt, Artificial Sequence
  Description of Artificial Sequence: Synthetic oligonucleotide
guuacucuucagggugugu

SEQ ID NO: 1265599 - RNA, 19 nt, Artificial Sequence
  Description of Artificial Sequence: Synthetic oligonucleotide
cagagcgccuggagaaugu

SEQ ID NO: 1265600 - RNA, 19 nt, Artificial Sequence
  Description of Artificial Sequence: Synthetic oligonucleotide
ccauagaauccaggcccag

SEQ ID NO: 1265601 - RNA, 19 nt, Artificial Sequence
  Description of Artificial Sequence: Synthetic oligonucleotide
cugcaacaccgcaucaauu

SEQ ID NO: 1265602 - RNA, 19 nt, Artificial Sequence
  Description of Artificial Sequence: Synthetic oligonucleotide
gucuugccucacugcucca

SEQ ID NO: 1265603 - RNA, 19 nt, Artificial Sequence
  Description of Artificial Sequence: Synthetic oligonucleotide
uuggucccugaugguccaa

SEQ ID NO: 1265604 - RNA, 19 nt, Artificial Sequence
  Description of Artificial Sequence: Synthetic oligonucleotide
cucaggauuccagcgggau

SEQ ID NO: 1265605 - RNA, 19 nt, Artificial Sequence
  Description of Artificial Sequence: Synthetic oligonucleotide
ccguccuggcauugggguc

SEQ ID NO: 1265606 - RNA, 19 nt, Artificial Sequence
  Description of Artificial Sequence: Synthetic oligonucleotide
ggcucgauuccuggaaagu

SEQ ID NO: 1265607 - RNA, 19 nt, Artificial Sequence
  Description of Artificial Sequence: Synthetic oligonucleotide
gccugcaacaccgcaucaa

SEQ ID NO: 1265608 - RNA, 19 nt, Artificial Sequence
  Description of Artificial Sequence: Synthetic oligonucleotide
caucaauuuguggcucgau

SEQ ID NO: 1265609 - RNA, 19 nt, Artificial Sequence
  Description of Artificial Sequence: Synthetic oligonucleotide
cacuaacagcugcaucgau

SEQ ID NO: 1265610 - RNA, 19 nt, Artificial Sequence
  Description of Artificial Sequence: Synthetic oligonucleotide
ugccgggcugguggacaac

SEQ ID NO: 1265611 - RNA, 19 nt, Artificial Sequence
  Description of Artificial Sequence: Synthetic oligonucleotide
cugugccgggcugguggac

SEQ ID NO: 1265612 - RNA, 19 nt, Artificial Sequence
  Description of Artificial Sequence: Synthetic oligonucleotide
ccugcaacaccgcaucaau

SEQ ID NO: 1265613 - RNA, 19 nt, Artificial Sequence
  Description of Artificial Sequence: Synthetic oligonucleotide
aggcagcaucuaaguguga

SEQ ID NO: 1265614 - RNA, 19 nt, Artificial Sequence
  Description of Artificial Sequence: Synthetic oligonucleotide
gguaggcaugagccagacu

SEQ ID NO: 1265615 - RNA, 19 nt, Artificial Sequence
  Description of Artificial Sequence: Synthetic oligonucleotide
ggcugguggacaaccugua

SEQ ID NO: 1265616 - RNA, 19 nt, Artificial Sequence
  Description of Artificial Sequence: Synthetic oligonucleotide
agcugucugcugggcucau

SEQ ID NO: 1265617 - RNA, 19 nt, Artificial Sequence
  Description of Artificial Sequence: Synthetic oligonucleotide
cagcgggauaugcgccaaa

SEQ ID NO: 1265618 - RNA, 19 nt, Artificial Sequence
  Description of Artificial Sequence: Synthetic oligonucleotide
ggcaugagccagacucugu

SEQ ID NO: 1265619 - RNA, 19 nt, Artificial Sequence
  Description of Artificial Sequence: Synthetic oligonucleotide
gcgccuggagaaugugagu

SEQ ID NO: 1265620 - RNA, 19 nt, Artificial Sequence
  Description of Artificial Sequence: Synthetic oligonucleotide
gaggacggaugugguccau

SEQ ID NO: 1265621 - RNA, 19 nt, Artificial Sequence
  Description of Artificial Sequence: Synthetic oligonucleotide
gcugucugcugggcucauc

SEQ ID NO: 1265622 - RNA, 19 nt, Artificial Sequence
  Description of Artificial Sequence: Synthetic oligonucleotide
uccuggcauuggggucaaa

SEQ ID NO: 1265623 - RNA, 19 nt, Artificial Sequence
  Description of Artificial Sequence: Synthetic oligonucleotide
cgccaaaaguaccugucuu

SEQ ID NO: 1265624 - RNA, 19 nt, Artificial Sequence
  Description of Artificial Sequence: Synthetic oligonucleotide
gcaguuccccucgcagggu

SEQ ID NO: 1265625 - RNA, 19 nt, Artificial Sequence
  Description of Artificial Sequence: Synthetic oligonucleotide
ggacugcccagaacugauu

SEQ ID NO: 1265626 - RNA, 19 nt, Artificial Sequence
  Description of Artificial Sequence: Synthetic oligonucleotide
ccagcgggauaugcgccaa

SEQ ID NO: 1265627 - RNA, 19 nt, Artificial Sequence
  Description of Artificial Sequence: Synthetic oligonucleotide
ccgggcugguggacaaccu

SEQ ID NO: 1265628 - RNA, 19 nt, Artificial Sequence
  Description of Artificial Sequence: Synthetic oligonucleotide
ccuguaggugagguuuguu

SEQ ID NO: 1265629 - RNA, 19 nt, Artificial Sequence
  Description of Artificial Sequence: Synthetic oligonucleotide
cagcugcaucgaucuucuu

SEQ ID NO: 1265630 - RNA, 19 nt, Artificial Sequence
  Description of Artificial Sequence: Synthetic oligonucleotide
cccucgcagggugcugacu

SEQ ID NO: 1265631 - RNA, 19 nt, Artificial Sequence
  Description of Artificial Sequence: Synthetic oligonucleotide
aguguucuagauuacgagc

SEQ ID NO: 1265632 - RNA, 19 nt, Artificial Sequence
  Description of Artificial Sequence: Synthetic oligonucleotide
aagagaucgcgccuggugc

SEQ ID NO: 1265633 - RNA, 19 nt, Artificial Sequence
  Description of Artificial Sequence: Synthetic oligonucleotide
aagcuaagccauuugacuc

SEQ ID NO: 1265634 - RNA, 19 nt, Artificial Sequence
  Description of Artificial Sequence: Synthetic oligonucleotide
aaguuauccacaaauauca

SEQ ID NO: 1265635 - RNA, 19 nt, Artificial Sequence
  Description of Artificial Sequence: Synthetic oligonucleotide
uauguuuccaccaguaugu

SEQ ID NO: 1265636 - RNA, 19 nt, Artificial Sequence
  Description of Artificial Sequence: Synthetic oligonucleotide
agcaagguuuuccaaaggc

SEQ ID NO: 1265637 - RNA, 19 nt, Artificial Sequence
  Description of Artificial Sequence: Synthetic oligonucleotide
uagauuacgagcuucguac

SEQ ID NO: 1265638 - RNA, 19 nt, Artificial Sequence
  Description of Artificial Sequence: Synthetic oligonucleotide
ucugaaaagagaucgcgcc

SEQ ID NO: 1265639 - RNA, 19 nt, Artificial Sequence
  Description of Artificial Sequence: Synthetic oligonucleotide
ucuagaaaugcuucgucag

SEQ ID NO: 1265640 - RNA, 19 nt, Artificial Sequence
  Description of Artificial Sequence: Synthetic oligonucleotide
ugcaguuuggagaacuggg

SEQ ID NO: 1265641 - RNA, 19 nt, Artificial Sequence
  Description of Artificial Sequence: Synthetic oligonucleotide
acacuugcgccacacaacc

SEQ ID NO: 1265642 - RNA, 19 nt, Artificial Sequence
  Description of Artificial Sequence: Synthetic oligonucleotide
agugugaggguguucuucc

SEQ ID NO: 1265643 - RNA, 19 nt, Artificial Sequence
  Description of Artificial Sequence: Synthetic oligonucleotide
uucuagauuacgagcuucg

SEQ ID NO: 1265644 - RNA, 19 nt, Artificial Sequence
  Description of Artificial Sequence: Synthetic oligonucleotide
acaaccugaacccacaggu

SEQ ID NO: 1265645 - RNA, 19 nt, Artificial Sequence
  Description of Artificial Sequence: Synthetic oligonucleotide
aagcauuccgugugggccc

SEQ ID NO: 1265646 - RNA, 19 nt, Artificial Sequence
  Description of Artificial Sequence: Synthetic oligonucleotide
agcuaagccauuugacucc

SEQ ID NO: 1265647 - RNA, 19 nt, Artificial Sequence
  Description of Artificial Sequence: Synthetic oligonucleotide
agggugaagaucuccgugc

SEQ ID NO: 1265648 - RNA, 19 nt, Artificial Sequence
  Description of Artificial Sequence: Synthetic oligonucleotide
aaccugaacccacagguug

SEQ ID NO: 1265649 - RNA, 19 nt, Artificial Sequence
  Description of Artificial Sequence: Synthetic oligonucleotide
uccgucagcaccuuggacc

SEQ ID NO: 1265650 - RNA, 19 nt, Artificial Sequence
  Description of Artificial Sequence: Synthetic oligonucleotide
augcuuuguacacuugcgc

SEQ ID NO: 1265651 - RNA, 19 nt, Artificial Sequence
  Description of Artificial Sequence: Synthetic oligonucleotide
aaagagaucgcgccuggug

SEQ ID NO: 1265652 - RNA, 19 nt, Artificial Sequence
  Description of Artificial Sequence: Synthetic oligonucleotide
ugaacccacagguugcugg

SEQ ID NO: 1265653 - RNA, 19 nt, Artificial Sequence
  Description of Artificial Sequence: Synthetic oligonucleotide
guauguuuccaccaguaug

SEQ ID NO: 1265654 - RNA, 19 nt, Artificial Sequence
  Description of Artificial Sequence: Synthetic oligonucleotide
ugcuuuguacacuugcgcc

SEQ ID NO: 1265655 - RNA, 19 nt, Artificial Sequence
  Description of Artificial Sequence: Synthetic oligonucleotide
gauuacgagcuucguaccg

SEQ ID NO: 1265656 - RNA, 19 nt, Artificial Sequence
  Description of Artificial Sequence: Synthetic oligonucleotide
agauuacgagcuucguacc

SEQ ID NO: 1265657 - RNA, 19 nt, Artificial Sequence
  Description of Artificial Sequence: Synthetic oligonucleotide
agccucugaaaagagaucg

SEQ ID NO: 1265658 - RNA, 19 nt, Artificial Sequence
  Description of Artificial Sequence: Synthetic oligonucleotide
cauguguccacuucugacc

SEQ ID NO: 1265659 - RNA, 19 nt, Artificial Sequence
  Description of Artificial Sequence: Synthetic oligonucleotide
ugagaggguacaagaagag

SEQ ID NO: 1265660 - RNA, 19 nt, Artificial Sequence
  Description of Artificial Sequence: Synthetic oligonucleotide
ggguguaacacuuucacug

SEQ ID NO: 1265661 - RNA, 19 nt, Artificial Sequence
  Description of Artificial Sequence: Synthetic oligonucleotide
cacuucugaccuaacaagg

SEQ ID NO: 1265662 - RNA, 19 nt, Artificial Sequence
  Description of Artificial Sequence: Synthetic oligonucleotide
ucagcuuuagggagaagca

SEQ ID NO: 1265663 - RNA, 19 nt, Artificial Sequence
  Description of Artificial Sequence: Synthetic oligonucleotide
uccacuucugaccuaacaa

SEQ ID NO: 1265664 - RNA, 19 nt, Artificial Sequence
  Description of Artificial Sequence: Synthetic oligonucleotide
ucugaccuaacaaggucag

SEQ ID NO: 1265665 - RNA, 19 nt, Artificial Sequence
  Description of Artificial Sequence: Synthetic oligonucleotide
uuuaccuugugggucauca

SEQ ID NO: 1265666 - RNA, 19 nt, Artificial Sequence
  Description of Artificial Sequence: Synthetic oligonucleotide
agcuuuagggagaagcagc

SEQ ID NO: 1265667 - RNA, 19 nt, Artificial Sequence
  Description of Artificial Sequence: Synthetic oligonucleotide
ugaccuaacaaggucagcu

SEQ ID NO: 1265668 - RNA, 19 nt, Artificial Sequence
  Description of Artificial Sequence: Synthetic oligonucleotide
agguggauagccaggaacc

SEQ ID NO: 1265669 - RNA, 19 nt, Artificial Sequence
  Description of Artificial Sequence: Synthetic oligonucleotide
ucuccgugcacaaaguuau

SEQ ID NO: 1265670 - RNA, 19 nt, Artificial Sequence
  Description of Artificial Sequence: Synthetic oligonucleotide
accagugugucacugacgu

SEQ ID NO: 1265671 - RNA, 19 nt, Artificial Sequence
  Description of Artificial Sequence: Synthetic oligonucleotide
uagguggauagccaggaac

SEQ ID NO: 1265672 - RNA, 19 nt, Artificial Sequence
  Description of Artificial Sequence: Synthetic oligonucleotide
gacuuagguggauagccag

SEQ ID NO: 1265673 - RNA, 19 nt, Artificial Sequence
  Description of Artificial Sequence: Synthetic oligonucleotide
cugacuuagguggauagcc

SEQ ID NO: 1265674 - RNA, 19 nt, Artificial Sequence
  Description of Artificial Sequence: Synthetic oligonucleotide
uuccgugugggcccaaggg

SEQ ID NO: 1265675 - RNA, 19 nt, Artificial Sequence
  Description of Artificial Sequence: Synthetic oligonucleotide
uaugucccgagugaugagg

SEQ ID NO: 1265676 - RNA, 19 nt, Artificial Sequence
  Description of Artificial Sequence: Synthetic oligonucleotide
uuucuagaaaugcuucguc

SEQ ID NO: 1265677 - RNA, 19 nt, Artificial Sequence
  Description of Artificial Sequence: Synthetic oligonucleotide
uuuucuagaaaugcuucgu

SEQ ID NO: 1265678 - RNA, 19 nt, Artificial Sequence
  Description of Artificial Sequence: Synthetic oligonucleotide
gaaaagagaucgcgccugg

SEQ ID NO: 1265679 - RNA, 19 nt, Artificial Sequence
  Description of Artificial Sequence: Synthetic oligonucleotide
cuagaaaugcuucgucagc

SEQ ID NO: 1265680 - RNA, 19 nt, Artificial Sequence
  Description of Artificial Sequence: Synthetic oligonucleotide
agugcuagcgaaugcuuug

SEQ ID NO: 1265681 - RNA, 19 nt, Artificial Sequence
  Description of Artificial Sequence: Synthetic oligonucleotide
cuagcgaaugcuuuguaca

SEQ ID NO: 1265682 - RNA, 19 nt, Artificial Sequence
  Description of Artificial Sequence: Synthetic oligonucleotide
acuugcgccacacaaccug

SEQ ID NO: 1265683 - RNA, 19 nt, Artificial Sequence
  Description of Artificial Sequence: Synthetic oligonucleotide
aguaugucccgagugauga

SEQ ID NO: 1265684 - RNA, 19 nt, Artificial Sequence
  Description of Artificial Sequence: Synthetic oligonucleotide
ugccggaguaagcauuccg

SEQ ID NO: 1265685 - RNA, 19 nt, Artificial Sequence
  Description of Artificial Sequence: Synthetic oligonucleotide
gggacaauccgucagcacc

SEQ ID NO: 1265686 - RNA, 19 nt, Artificial Sequence
  Description of Artificial Sequence: Synthetic oligonucleotide
uuuuccagugugagggugu

SEQ ID NO: 1265687 - RNA, 19 nt, Artificial Sequence
  Description of Artificial Sequence: Synthetic oligonucleotide
uccaggacguccagcuugg

SEQ ID NO: 1265688 - RNA, 19 nt, Artificial Sequence
  Description of Artificial Sequence: Synthetic oligonucleotide
ugacuuagguggauagcca

SEQ ID NO: 1265689 - RNA, 19 nt, Artificial Sequence
  Description of Artificial Sequence: Synthetic oligonucleotide
agcaguaaauccauguaca

SEQ ID NO: 1265690 - RNA, 19 nt, Artificial Sequence
  Description of Artificial Sequence: Synthetic oligonucleotide
ccugguaaaagccccaggg

SEQ ID NO: 1265691 - RNA, 19 nt, Artificial Sequence
  Description of Artificial Sequence: Synthetic oligonucleotide
auguauguugggccugagg

SEQ ID NO: 1265692 - RNA, 19 nt, Artificial Sequence
  Description of Artificial Sequence: Synthetic oligonucleotide
aggugaucugacuuaggug

SEQ ID NO: 1265693 - RNA, 19 nt, Artificial Sequence
  Description of Artificial Sequence: Synthetic oligonucleotide
cugguaaaagccccagggc

SEQ ID NO: 1265694 - RNA, 19 nt, Artificial Sequence
  Description of Artificial Sequence: Synthetic oligonucleotide
aucccaacugcccggguuc

SEQ ID NO: 1265695 - RNA, 19 nt, Artificial Sequence
  Description of Artificial Sequence: Synthetic oligonucleotide
ggaguaagcauuccgugug

SEQ ID NO: 1265696 - RNA, 19 nt, Artificial Sequence
  Description of Artificial Sequence: Synthetic oligonucleotide
uuggggacaauccgucagc

SEQ ID NO: 1265697 - RNA, 19 nt, Artificial Sequence
  Description of Artificial Sequence: Synthetic oligonucleotide
uagcgaaugcuuuguacac

SEQ ID NO: 1265698 - RNA, 19 nt, Artificial Sequence
  Description of Artificial Sequence: Synthetic oligonucleotide
acgugaagcuuuuccagug

SEQ ID NO: 1265699 - RNA, 19 nt, Artificial Sequence
  Description of Artificial Sequence: Synthetic oligonucleotide
uucguauguuuccaccagu

SEQ ID NO: 1265700 - RNA, 19 nt, Artificial Sequence
  Description of Artificial Sequence: Synthetic oligonucleotide
cuucguauguuuccaccag

SEQ ID NO: 1265701 - RNA, 19 nt, Artificial Sequence
  Description of Artificial Sequence: Synthetic oligonucleotide
ggagacgugaagcuuuucc

SEQ ID NO: 1265702 - RNA, 19 nt, Artificial Sequence
  Description of Artificial Sequence: Synthetic oligonucleotide
ugcugaaaguguucuagau

SEQ ID NO: 1265703 - RNA, 19 nt, Artificial Sequence
  Description of Artificial Sequence: Synthetic oligonucleotide
caggcuuggggacaauccg

SEQ ID NO: 1265704 - RNA, 19 nt, Artificial Sequence
  Description of Artificial Sequence: Synthetic oligonucleotide
agcuuuaccuuguggguca

SEQ ID NO: 1265705 - RNA, 19 nt, Artificial Sequence
  Description of Artificial Sequence: Synthetic oligonucleotide
accaguaugucccgaguga

SEQ ID NO: 1265706 - RNA, 19 nt, Artificial Sequence
  Description of Artificial Sequence: Synthetic oligonucleotide
agcuucguaccgcaggucu

SEQ ID NO: 1265707 - RNA, 19 nt, Artificial Sequence
  Description of Artificial Sequence: Synthetic oligonucleotide
guugcucucgagcuuuacc

SEQ ID NO: 1265708 - RNA, 19 nt, Artificial Sequence
  Description of Artificial Sequence: Synthetic oligonucleotide
ggcaaaguugcucucgagc

SEQ ID NO: 1265709 - RNA, 19 nt, Artificial Sequence
  Description of Artificial Sequence: Synthetic oligonucleotide
acaaucucaggcaagcuaa

SEQ ID NO: 1265710 - RNA, 19 nt, Artificial Sequence
  Description of Artificial Sequence: Synthetic oligonucleotide
ugagcucagcuacuuugug

SEQ ID NO: 1265711 - RNA, 19 nt, Artificial Sequence
  Description of Artificial Sequence: Synthetic oligonucleotide
uauguugggccugagguuu

SEQ ID NO: 1265712 - RNA, 19 nt, Artificial Sequence
  Description of Artificial Sequence: Synthetic oligonucleotide
gaugaggugaucugacuua

SEQ ID NO: 1265713 - RNA, 19 nt, Artificial Sequence
  Description of Artificial Sequence: Synthetic oligonucleotide
uggcgaacacgauggaggc

SEQ ID NO: 1265714 - RNA, 19 nt, Artificial Sequence
  Description of Artificial Sequence: Synthetic oligonucleotide
gguguaacacuuucacugc

SEQ ID NO: 1265715 - RNA, 19 nt, Artificial Sequence
  Description of Artificial Sequence: Synthetic oligonucleotide
agcaagguagugcuagcga

SEQ ID NO: 1265716 - RNA, 19 nt, Artificial Sequence
  Description of Artificial Sequence: Synthetic oligonucleotide
cacaaaguuauccacaaau

SEQ ID NO: 1265717 - RNA, 19 nt, Artificial Sequence
  Description of Artificial Sequence: Synthetic oligonucleotide
cuaacaaggucagcuuuag

SEQ ID NO: 1265718 - RNA, 19 nt, Artificial Sequence
  Description of Artificial Sequence: Synthetic oligonucleotide
uuagggagaagcagcuuuu

SEQ ID NO: 1265719 - RNA, 19 nt, Artificial Sequence
  Description of Artificial Sequence: Synthetic oligonucleotide
gacuccugguaaaagcccc

SEQ ID NO: 1265720 - RNA, 19 nt, Artificial Sequence
  Description of Artificial Sequence: Synthetic oligonucleotide
ucugacuuagguggauagc

SEQ ID NO: 1265721 - RNA, 19 nt, Artificial Sequence
  Description of Artificial Sequence: Synthetic oligonucleotide
cacaaccugaacccacagg

SEQ ID NO: 1265722 - RNA, 19 nt, Artificial Sequence
  Description of Artificial Sequence: Synthetic oligonucleotide
gaggugaucugacuuaggu

SEQ ID NO: 1265723 - RNA, 19 nt, Artificial Sequence
  Description of Artificial Sequence: Synthetic oligonucleotide
ugaagaucuccgugcacaa

SEQ ID NO: 1265724 - RNA, 19 nt, Artificial Sequence
  Description of Artificial Sequence: Synthetic oligonucleotide
uguacacuugcgccacaca

SEQ ID NO: 1265725 - RNA, 19 nt, Artificial Sequence
  Description of Artificial Sequence: Synthetic oligonucleotide
uagccaggaaccuggcaug

SEQ ID NO: 1265726 - RNA, 19 nt, Artificial Sequence
  Description of Artificial Sequence: Synthetic oligonucleotide
agggcaggcgcuaugguag

SEQ ID NO: 1265727 - RNA, 19 nt, Artificial Sequence
  Description of Artificial Sequence: Synthetic oligonucleotide
augaggugaucugacuuag

SEQ ID NO: 1265728 - RNA, 19 nt, Artificial Sequence
  Description of Artificial Sequence: Synthetic oligonucleotide
gugagaggguacaagaaga

SEQ ID NO: 1265729 - RNA, 19 nt, Artificial Sequence
  Description of Artificial Sequence: Synthetic oligonucleotide
gccgagguaggugagaggg

SEQ ID NO: 1265730 - RNA, 19 nt, Artificial Sequence
  Description of Artificial Sequence: Synthetic oligonucleotide
gucuguuggaucaugagcu

SEQ ID NO: 1265731 - RNA, 19 nt, Artificial Sequence
  Description of Artificial Sequence: Synthetic oligonucleotide
guacacuugcgccacacaa

SEQ ID NO: 1265732 - RNA, 19 nt, Artificial Sequence
  Description of Artificial Sequence: Synthetic oligonucleotide
ugggacacucucuucguau

SEQ ID NO: 1265733 - RNA, 19 nt, Artificial Sequence
  Description of Artificial Sequence: Synthetic oligonucleotide
cacuuucacugccacuggg

SEQ ID NO: 1265734 - RNA, 19 nt, Artificial Sequence
  Description of Artificial Sequence: Synthetic oligonucleotide
uguugauccccagcugugc

SEQ ID NO: 1265735 - RNA, 19 nt, Artificial Sequence
  Description of Artificial Sequence: Synthetic oligonucleotide
cagcgagcggccaagcccc

SEQ ID NO: 1265736 - RNA, 19 nt, Artificial Sequence
  Description of Artificial Sequence: Synthetic oligonucleotide
guaggugagaggguacaag

SEQ ID NO: 1265737 - RNA, 19 nt, Artificial Sequence
  Description of Artificial Sequence: Synthetic oligonucleotide
cuuuguacacuugcgccac

SEQ ID NO: 1265738 - RNA, 19 nt, Artificial Sequence
  Description of Artificial Sequence: Synthetic oligonucleotide
ucccaaguguagaugucuc

SEQ ID NO: 1265739 - RNA, 19 nt, Artificial Sequence
  Description of Artificial Sequence: Synthetic oligonucleotide
ugucccgagugaugagggg

SEQ ID NO: 1265740 - RNA, 19 nt, Artificial Sequence
  Description of Artificial Sequence: Synthetic oligonucleotide
caagcuaagccauuugacu

SEQ ID NO: 1265741 - RNA, 19 nt, Artificial Sequence
  Description of Artificial Sequence: Synthetic oligonucleotide
aaaggcugccacuccgcaa

SEQ ID NO: 1265742 - RNA, 19 nt, Artificial Sequence
  Description of Artificial Sequence: Synthetic oligonucleotide
aacgggguggggaauuuca

SEQ ID NO: 1265743 - RNA, 19 nt, Artificial Sequence
  Description of Artificial Sequence: Synthetic oligonucleotide
acacaaccugaacccacag

SEQ ID NO: 1265744 - RNA, 19 nt, Artificial Sequence
  Description of Artificial Sequence: Synthetic oligonucleotide
ucucuucguauguuuccac

SEQ ID NO: 1265745 - RNA, 19 nt, Artificial Sequence
  Description of Artificial Sequence: Synthetic oligonucleotide
ccacuucugaccuaacaag

SEQ ID NO: 1265746 - RNA, 19 nt, Artificial Sequence
  Description of Artificial Sequence: Synthetic oligonucleotide
cuacuuuguggcccugccc

SEQ ID NO: 1265747 - RNA, 19 nt, Artificial Sequence
  Description of Artificial Sequence: Synthetic oligonucleotide
accuaacaaggucagcuuu

SEQ ID NO: 1265748 - RNA, 19 nt, Artificial Sequence
  Description of Artificial Sequence: Synthetic oligonucleotide
ucuagauuacgagcuucgu

SEQ ID NO: 1265749 - RNA, 19 nt, Artificial Sequence
  Description of Artificial Sequence: Synthetic oligonucleotide
agagaucgcgccuggugcu

SEQ ID NO: 1265750 - RNA, 19 nt, Artificial Sequence
  Description of Artificial Sequence: Synthetic oligonucleotide
cagggugaagaucuccgug

SEQ ID NO: 1265751 - RNA, 19 nt, Artificial Sequence
  Description of Artificial Sequence: Synthetic oligonucleotide
uugauguauguugggccug

SEQ ID NO: 1265752 - RNA, 19 nt, Artificial Sequence
  Description of Artificial Sequence: Synthetic oligonucleotide
gcauccaacagcaccaggc

SEQ ID NO: 1265753 - RNA, 19 nt, Artificial Sequence
  Description of Artificial Sequence: Synthetic oligonucleotide
uagcuggacacugggacac

SEQ ID NO: 1265754 - RNA, 19 nt, Artificial Sequence
  Description of Artificial Sequence: Synthetic oligonucleotide
agcgcuacagccaggaaaa

SEQ ID NO: 1265755 - RNA, 19 nt, Artificial Sequence
  Description of Artificial Sequence: Synthetic oligonucleotide
guaaaagccccagggcuug

SEQ ID NO: 1265756 - RNA, 19 nt, Artificial Sequence
  Description of Artificial Sequence: Synthetic oligonucleotide
aaacgccugccggaguaag

SEQ ID NO: 1265757 - RNA, 19 nt, Artificial Sequence
  Description of Artificial Sequence: Synthetic oligonucleotide
ugauguauguugggccuga

SEQ ID NO: 1265758 - RNA, 19 nt, Artificial Sequence
  Description of Artificial Sequence: Synthetic oligonucleotide
augucccgagugaugaggg

SEQ ID NO: 1265759 - RNA, 19 nt, Artificial Sequence
  Description of Artificial Sequence: Synthetic oligonucleotide
cagcuuuagggagaagcag

SEQ ID NO: 1265760 - RNA, 19 nt, Artificial Sequence
  Description of Artificial Sequence: Synthetic oligonucleotide
cagcaagguagugcuagcg

SEQ ID NO: 1265761 - RNA, 19 nt, Artificial Sequence
  Description of Artificial Sequence: Synthetic oligonucleotide
gcaguaaauccauguacac

SEQ ID NO: 1265762 - RNA, 19 nt, Artificial Sequence
  Description of Artificial Sequence: Synthetic oligonucleotide
gcuaugguagccaccagug

SEQ ID NO: 1265763 - RNA, 19 nt, Artificial Sequence
  Description of Artificial Sequence: Synthetic oligonucleotide
gaacacgauggaggcaaag

SEQ ID NO: 1265764 - RNA, 19 nt, Artificial Sequence
  Description of Artificial Sequence: Synthetic oligonucleotide
aaaagagaucgcgccuggu

SEQ ID NO: 1265765 - RNA, 19 nt, Artificial Sequence
  Description of Artificial Sequence: Synthetic oligonucleotide
guucuagauuacgagcuuc

SEQ ID NO: 1265766 - RNA, 19 nt, Artificial Sequence
  Description of Artificial Sequence: Synthetic oligonucleotide
uuuguggcccugccccagc

SEQ ID NO: 1265767 - RNA, 19 nt, Artificial Sequence
  Description of Artificial Sequence: Synthetic oligonucleotide
aaguugugcugaaaguguu

SEQ ID NO: 1265768 - RNA, 19 nt, Artificial Sequence
  Description of Artificial Sequence: Synthetic oligonucleotide
guagcuggacacugggaca

SEQ ID NO: 1265769 - RNA, 19 nt, Artificial Sequence
  Description of Artificial Sequence: Synthetic oligonucleotide
caccagugugucacugacg

SEQ ID NO: 1265770 - RNA, 19 nt, Artificial Sequence
  Description of Artificial Sequence: Synthetic oligonucleotide
cuagauuacgagcuucgua

SEQ ID NO: 1265771 - RNA, 19 nt, Artificial Sequence
  Description of Artificial Sequence: Synthetic oligonucleotide
gcuagcgaaugcuuuguac

SEQ ID NO: 1265772 - RNA, 19 nt, Artificial Sequence
  Description of Artificial Sequence: Synthetic oligonucleotide
ggcaagcuaagccauuuga

SEQ ID NO: 1265773 - RNA, 19 nt, Artificial Sequence
  Description of Artificial Sequence: Synthetic oligonucleotide
uacgagcuucguaccgcag

SEQ ID NO: 1265774 - RNA, 19 nt, Artificial Sequence
  Description of Artificial Sequence: Synthetic oligonucleotide
caguaugucccgagugaug

SEQ ID NO: 1265775 - RNA, 19 nt, Artificial Sequence
  Description of Artificial Sequence: Synthetic oligonucleotide
ugauggcgaacacgaugga

SEQ ID NO: 1265776 - RNA, 19 nt, Artificial Sequence
  Description of Artificial Sequence: Synthetic oligonucleotide
acuuucacugccacuggga

SEQ ID NO: 1265777 - RNA, 19 nt, Artificial Sequence
  Description of Artificial Sequence: Synthetic oligonucleotide
gcuuuguacacuugcgcca

SEQ ID NO: 1265778 - RNA, 19 nt, Artificial Sequence
  Description of Artificial Sequence: Synthetic oligonucleotide
aggcaagcuaagccauuug

SEQ ID NO: 1265779 - RNA, 19 nt, Artificial Sequence
  Description of Artificial Sequence: Synthetic oligonucleotide
guaugucccgagugaugag

SEQ ID NO: 1265780 - RNA, 19 nt, Artificial Sequence
  Description of Artificial Sequence: Synthetic oligonucleotide
accuuggaccaggauguuc

SEQ ID NO: 1265781 - RNA, 19 nt, Artificial Sequence
  Description of Artificial Sequence: Synthetic oligonucleotide
auguuuccaccaguauguc

SEQ ID NO: 1265782 - RNA, 19 nt, Artificial Sequence
  Description of Artificial Sequence: Synthetic oligonucleotide
cauguacaccugagugagc

SEQ ID NO: 1265783 - RNA, 19 nt, Artificial Sequence
  Description of Artificial Sequence: Synthetic oligonucleotide
acaauccgucagcaccuug

SEQ ID NO: 1265784 - RNA, 19 nt, Artificial Sequence
  Description of Artificial Sequence: Synthetic oligonucleotide
uggggacaauccgucagca

SEQ ID NO: 1265785 - RNA, 19 nt, Artificial Sequence
  Description of Artificial Sequence: Synthetic oligonucleotide
caggagccgagguagguga

SEQ ID NO: 1265786 - RNA, 19 nt, Artificial Sequence
  Description of Artificial Sequence: Synthetic oligonucleotide
aguugcucucgagcuuuac

SEQ ID NO: 1265787 - RNA, 19 nt, Artificial Sequence
  Description of Artificial Sequence: Synthetic oligonucleotide
gugcugaaaguguucuaga

SEQ ID NO: 1265788 - RNA, 19 nt, Artificial Sequence
  Description of Artificial Sequence: Synthetic oligonucleotide
uaaaagccccagggcuugg

SEQ ID NO: 1265789 - RNA, 19 nt, Artificial Sequence
  Description of Artificial Sequence: Synthetic oligonucleotide
ggguacaagaagagcgagg

SEQ ID NO: 1265790 - RNA, 19 nt, Artificial Sequence
  Description of Artificial Sequence: Synthetic oligonucleotide
cacacaaccugaacccaca

SEQ ID NO: 1265791 - RNA, 19 nt, Artificial Sequence
  Description of Artificial Sequence: Synthetic oligonucleotide
agcgaaugcuuuguacacu

SEQ ID NO: 1265792 - RNA, 19 nt, Artificial Sequence
  Description of Artificial Sequence: Synthetic oligonucleotide
ccgggcaugaugcaggaug

SEQ ID NO: 1265793 - RNA, 19 nt, Artificial Sequence
  Description of Artificial Sequence: Synthetic oligonucleotide
caucccaaguguagauguc

SEQ ID NO: 1265794 - RNA, 19 nt, Artificial Sequence
  Description of Artificial Sequence: Synthetic oligonucleotide
guugugcugaaaguguucu

SEQ ID NO: 1265795 - RNA, 19 nt, Artificial Sequence
  Description of Artificial Sequence: Synthetic oligonucleotide
acuuuguggcccugcccca

SEQ ID NO: 1265796 - RNA, 19 nt, Artificial Sequence
  Description of Artificial Sequence: Synthetic oligonucleotide
gcaagcuaagccauuugac

SEQ ID NO: 1265797 - RNA, 19 nt, Artificial Sequence
  Description of Artificial Sequence: Synthetic oligonucleotide
cuugcgccacacaaccuga

SEQ ID NO: 1265798 - RNA, 19 nt, Artificial Sequence
  Description of Artificial Sequence: Synthetic oligonucleotide
ugauccccagcugugcaau

SEQ ID NO: 1265799 - RNA, 19 nt, Artificial Sequence
  Description of Artificial Sequence: Synthetic oligonucleotide
gggacacucucuucguaug

SEQ ID NO: 1265800 - RNA, 19 nt, Artificial Sequence
  Description of Artificial Sequence: Synthetic oligonucleotide
ugcuagcgaaugcuuugua

SEQ ID NO: 1265801 - RNA, 19 nt, Artificial Sequence
  Description of Artificial Sequence: Synthetic oligonucleotide
ccagcgagcggccaagccc

SEQ ID NO: 1265802 - RNA, 19 nt, Artificial Sequence
  Description of Artificial Sequence: Synthetic oligonucleotide
gcaagguagugcuagcgaa

SEQ ID NO: 1265803 - RNA, 19 nt, Artificial Sequence
  Description of Artificial Sequence: Synthetic oligonucleotide
ucgcgccuggugcuggccc

SEQ ID NO: 1265804 - RNA, 19 nt, Artificial Sequence
  Description of Artificial Sequence: Synthetic oligonucleotide
caggcgcuaugguagccac

SEQ ID NO: 1265805 - RNA, 19 nt, Artificial Sequence
  Description of Artificial Sequence: Synthetic oligonucleotide
uugugcugaaaguguucua

SEQ ID NO: 1265806 - RNA, 19 nt, Artificial Sequence
  Description of Artificial Sequence: Synthetic oligonucleotide
cugcccggguuccuggggc

SEQ ID NO: 1265807 - RNA, 19 nt, Artificial Sequence
  Description of Artificial Sequence: Synthetic oligonucleotide
agaucgcgccuggugcugg

SEQ ID NO: 1265808 - RNA, 19 nt, Artificial Sequence
  Description of Artificial Sequence: Synthetic oligonucleotide
cuuuguggcccugccccag

SEQ ID NO: 1265809 - RNA, 19 nt, Artificial Sequence
  Description of Artificial Sequence: Synthetic oligonucleotide
gaucugacuuagguggaua

SEQ ID NO: 1265810 - RNA, 19 nt, Artificial Sequence
  Description of Artificial Sequence: Synthetic oligonucleotide
aggugagaggguacaagaa

SEQ ID NO: 1265811 - RNA, 19 nt, Artificial Sequence
  Description of Artificial Sequence: Synthetic oligonucleotide
cugaccuaacaaggucagc

SEQ ID NO: 1265812 - RNA, 19 nt, Artificial Sequence
  Description of Artificial Sequence: Synthetic oligonucleotide
uugcgccacacaaccugaa

SEQ ID NO: 1265813 - RNA, 19 nt, Artificial Sequence
  Description of Artificial Sequence: Synthetic oligonucleotide
ccggaguaagcauuccgug

SEQ ID NO: 1265814 - RNA, 19 nt, Artificial Sequence
  Description of Artificial Sequence: Synthetic oligonucleotide
caaaggcugccacuccgca

SEQ ID NO: 1265815 - RNA, 19 nt, Artificial Sequence
  Description of Artificial Sequence: Synthetic oligonucleotide
ccgcaggucugucuguugg

SEQ ID NO: 1265816 - RNA, 19 nt, Artificial Sequence
  Description of Artificial Sequence: Synthetic oligonucleotide
cauuugacuccugguaaaa

SEQ ID NO: 1265817 - RNA, 19 nt, Artificial Sequence
  Description of Artificial Sequence: Synthetic oligonucleotide
ggaaauuccucaggucuga

SEQ ID NO: 1265818 - RNA, 19 nt, Artificial Sequence
  Description of Artificial Sequence: Synthetic oligonucleotide
gagaucgcgccuggugcug

SEQ ID NO: 1265819 - RNA, 19 nt, Artificial Sequence
  Description of Artificial Sequence: Synthetic oligonucleotide
ggugcaacgggguggggaa

SEQ ID NO: 1265820 - RNA, 19 nt, Artificial Sequence
  Description of Artificial Sequence: Synthetic oligonucleotide
gguagugcuagcgaaugcu

SEQ ID NO: 1265821 - RNA, 19 nt, Artificial Sequence
  Description of Artificial Sequence: Synthetic oligonucleotide
cuccgcaaagggcucucuc

SEQ ID NO: 1265822 - RNA, 19 nt, Artificial Sequence
  Description of Artificial Sequence: Synthetic oligonucleotide
aggcgcuaugguagccacc

SEQ ID NO: 1265823 - RNA, 19 nt, Artificial Sequence
  Description of Artificial Sequence: Synthetic oligonucleotide
gcgaacacgauggaggcaa

SEQ ID NO: 1265824 - RNA, 19 nt, Artificial Sequence
  Description of Artificial Sequence: Synthetic oligonucleotide
cguaccgcaggucugucug

SEQ ID NO: 1265825 - RNA, 19 nt, Artificial Sequence
  Description of Artificial Sequence: Synthetic oligonucleotide
ugcaacgggguggggaauu

SEQ ID NO: 1265826 - RNA, 19 nt, Artificial Sequence
  Description of Artificial Sequence: Synthetic oligonucleotide
cuccgugcacaaaguuauc

SEQ ID NO: 1265827 - RNA, 19 nt, Artificial Sequence
  Description of Artificial Sequence: Synthetic oligonucleotide
ggcauguguccacuucuga

SEQ ID NO: 1265828 - RNA, 19 nt, Artificial Sequence
  Description of Artificial Sequence: Synthetic oligonucleotide
caagguagugcuagcgaau

SEQ ID NO: 1265829 - RNA, 19 nt, Artificial Sequence
  Description of Artificial Sequence: Synthetic oligonucleotide
ccugccggaguaagcauuc

SEQ ID NO: 1265830 - RNA, 19 nt, Artificial Sequence
  Description of Artificial Sequence: Synthetic oligonucleotide
guauguugggccugagguu

SEQ ID NO: 1265831 - RNA, 19 nt, Artificial Sequence
  Description of Artificial Sequence: Synthetic oligonucleotide
cauuccgugugggcccaag

SEQ ID NO: 1265832 - RNA, 19 nt, Artificial Sequence
  Description of Artificial Sequence: Synthetic oligonucleotide
cccuuugaggaggaagggc

SEQ ID NO: 1265833 - RNA, 19 nt, Artificial Sequence
  Description of Artificial Sequence: Synthetic oligonucleotide
aggaagggcuuugcugccu

SEQ ID NO: 1265834 - RNA, 19 nt, Artificial Sequence
  Description of Artificial Sequence: Synthetic oligonucleotide
ccacuggcccaauuugaug

SEQ ID NO: 1265835 - RNA, 19 nt, Artificial Sequence
  Description of Artificial Sequence: Synthetic oligonucleotide
acagguugcuggguaucaa

SEQ ID NO: 1265836 - RNA, 19 nt, Artificial Sequence
  Description of Artificial Sequence: Synthetic oligonucleotide
cacagguugcuggguauca

SEQ ID NO: 1265837 - RNA, 19 nt, Artificial Sequence
  Description of Artificial Sequence: Synthetic oligonucleotide
gcggccaagccccuccagc

SEQ ID NO: 1265838 - RNA, 19 nt, Artificial Sequence
  Description of Artificial Sequence: Synthetic oligonucleotide
ccgugcacaaaguuaucca

SEQ ID NO: 1265839 - RNA, 19 nt, Artificial Sequence
  Description of Artificial Sequence: Synthetic oligonucleotide
gcgcagugggcacagggca

SEQ ID NO: 1265840 - RNA, 19 nt, Artificial Sequence
  Description of Artificial Sequence: Synthetic oligonucleotide
caggucugaagccugcaau

SEQ ID NO: 1265841 - RNA, 19 nt, Artificial Sequence
  Description of Artificial Sequence: Synthetic oligonucleotide
ggaauuucacagaugccau

SEQ ID NO: 1265842 - RNA, 19 nt, Artificial Sequence
  Description of Artificial Sequence: Synthetic oligonucleotide
ccuggcauguguccacuuc

SEQ ID NO: 1265843 - RNA, 19 nt, Artificial Sequence
  Description of Artificial Sequence: Synthetic oligonucleotide
ggggacaauccgucagcac

SEQ ID NO: 1265844 - RNA, 19 nt, Artificial Sequence
  Description of Artificial Sequence: Synthetic oligonucleotide
agcauuccgugugggccca

SEQ ID NO: 1265845 - RNA, 19 nt, Artificial Sequence
  Description of Artificial Sequence: Synthetic oligonucleotide
cugccggaguaagcauucc

SEQ ID NO: 1265846 - RNA, 19 nt, Artificial Sequence
  Description of Artificial Sequence: Synthetic oligonucleotide
ggcuuggggacaauccguc

SEQ ID NO: 1265847 - RNA, 19 nt, Artificial Sequence
  Description of Artificial Sequence: Synthetic oligonucleotide
cugccaaaggacagacccu

SEQ ID NO: 1265848 - RNA, 19 nt, Artificial Sequence
  Description of Artificial Sequence: Synthetic oligonucleotide
ccgucagcaccuuggacca

SEQ ID NO: 1265849 - RNA, 19 nt, Artificial Sequence
  Description of Artificial Sequence: Synthetic oligonucleotide
gacacucucuucguauguu

SEQ ID NO: 1265850 - RNA, 19 nt, Artificial Sequence
  Description of Artificial Sequence: Synthetic oligonucleotide
gcuuggggacaauccguca

SEQ ID NO: 1265851 - RNA, 19 nt, Artificial Sequence
  Description of Artificial Sequence: Synthetic oligonucleotide
agccugcaauucugccaca

SEQ ID NO: 1265852 - RNA, 19 nt, Artificial Sequence
  Description of Artificial Sequence: Synthetic oligonucleotide
caacgggguggggaauuuc

SEQ ID NO: 1265853 - RNA, 19 nt, Artificial Sequence
  Description of Artificial Sequence: Synthetic oligonucleotide
caaaguugcucucgagcuu

SEQ ID NO: 1265854 - RNA, 19 nt, Artificial Sequence
  Description of Artificial Sequence: Synthetic oligonucleotide
aaguugcucucgagcuuua

SEQ ID NO: 1265855 - RNA, 19 nt, Artificial Sequence
  Description of Artificial Sequence: Synthetic oligonucleotide
ggacacucucuucguaugu

SEQ ID NO: 1265856 - RNA, 19 nt, Artificial Sequence
  Description of Artificial Sequence: Synthetic oligonucleotide
cuucguaccgcaggucugu

SEQ ID NO: 1265857 - RNA, 19 nt, Artificial Sequence
  Description of Artificial Sequence: Synthetic oligonucleotide
guagugcuagcgaaugcuu

SEQ ID NO: 1265858 - RNA, 19 nt, Artificial Sequence
  Description of Artificial Sequence: Synthetic oligonucleotide
acuccgcaaagggcucucu

SEQ ID NO: 1265859 - RNA, 19 nt, Artificial Sequence
  Description of Artificial Sequence: Synthetic oligonucleotide
gguaaaagccccagggcuu

SEQ ID NO: 1265860 - RNA, 19 nt, Artificial Sequence
  Description of Artificial Sequence: Synthetic oligonucleotide
gccaccagugugucacuga

SEQ ID NO: 1265861 - RNA, 19 nt, Artificial Sequence
  Description of Artificial Sequence: Synthetic oligonucleotide
ggccaagccccuccagcac

SEQ ID NO: 1265862 - RNA, 19 nt, Artificial Sequence
  Description of Artificial Sequence: Synthetic oligonucleotide
gggugcaacggggugggga

SEQ ID NO: 1265863 - RNA, 19 nt, Artificial Sequence
  Description of Artificial Sequence: Synthetic oligonucleotide
caggaugagcucagcuacu

SEQ ID NO: 1265864 - RNA, 19 nt, Artificial Sequence
  Description of Artificial Sequence: Synthetic oligonucleotide
cuucgucagcaagguuuuc

SEQ ID NO: 1265865 - RNA, 19 nt, Artificial Sequence
  Description of Artificial Sequence: Synthetic oligonucleotide
gugcuagcgaaugcuuugu

SEQ ID NO: 1265866 - RNA, 19 nt, Artificial Sequence
  Description of Artificial Sequence: Synthetic oligonucleotide
gugugaggguguucuuccu

SEQ ID NO: 1265867 - RNA, 19 nt, Artificial Sequence
  Description of Artificial Sequence: Synthetic oligonucleotide
ccaggagccgagguaggug

SEQ ID NO: 1265868 - RNA, 19 nt, Artificial Sequence
  Description of Artificial Sequence: Synthetic oligonucleotide
ggagcccuccucccuuuga

SEQ ID NO: 1265869 - RNA, 19 nt, Artificial Sequence
  Description of Artificial Sequence: Synthetic oligonucleotide
caaccugaacccacagguu

SEQ ID NO: 1265870 - RNA, 19 nt, Artificial Sequence
  Description of Artificial Sequence: Synthetic oligonucleotide
cgagcggccaagccccucc

SEQ ID NO: 1265871 - RNA, 19 nt, Artificial Sequence
  Description of Artificial Sequence: Synthetic oligonucleotide
gccggaguaagcauuccgu

SEQ ID NO: 1265872 - RNA, 19 nt, Artificial Sequence
  Description of Artificial Sequence: Synthetic oligonucleotide
ggucaccuggacaugcagu

SEQ ID NO: 1265873 - RNA, 19 nt, Artificial Sequence
  Description of Artificial Sequence: Synthetic oligonucleotide
ccaaacgccugccggagua

SEQ ID NO: 1265874 - RNA, 19 nt, Artificial Sequence
  Description of Artificial Sequence: Synthetic oligonucleotide
caucccaacugcccggguu

SEQ ID NO: 1265875 - RNA, 19 nt, Artificial Sequence
  Description of Artificial Sequence: Synthetic oligonucleotide
guaccgcaggucugucugu

SEQ ID NO: 1265876 - RNA, 19 nt, Artificial Sequence
  Description of Artificial Sequence: Synthetic oligonucleotide
caaacgccugccggaguaa

SEQ ID NO: 1265877 - RNA, 19 nt, Artificial Sequence
  Description of Artificial Sequence: Synthetic oligonucleotide
ccagugugucacugacguc

SEQ ID NO: 1265878 - RNA, 19 nt, Artificial Sequence
  Description of Artificial Sequence: Synthetic oligonucleotide
uccucccuuugaggaggaa

SEQ ID NO: 1265879 - RNA, 19 nt, Artificial Sequence
  Description of Artificial Sequence: Synthetic oligonucleotide
cacuugcgccacacaaccu

SEQ ID NO: 1265880 - RNA, 19 nt, Artificial Sequence
  Description of Artificial Sequence: Synthetic oligonucleotide
ggcgaacacgauggaggca

SEQ ID NO: 1265881 - RNA, 19 nt, Artificial Sequence
  Description of Artificial Sequence: Synthetic oligonucleotide
cggaguaagcauuccgugu

SEQ ID NO: 1265882 - RNA, 19 nt, Artificial Sequence
  Description of Artificial Sequence: Synthetic oligonucleotide
gccacuccgcaaagggcuc

SEQ ID NO: 1265883 - RNA, 19 nt, Artificial Sequence
  Description of Artificial Sequence: Synthetic oligonucleotide
cgagcuucguaccgcaggu

SEQ ID NO: 1265884 - RNA, 19 nt, Artificial Sequence
  Description of Artificial Sequence: Synthetic oligonucleotide
agcgagcggccaagccccu

SEQ ID NO: 1265885 - RNA, 19 nt, Artificial Sequence
  Description of Artificial Sequence: Synthetic oligonucleotide
cguauguuuccaccaguau

SEQ ID NO: 1265886 - RNA, 19 nt, Artificial Sequence
  Description of Artificial Sequence: Synthetic oligonucleotide
ccaguaugucccgagugau

SEQ ID NO: 1265887 - RNA, 19 nt, Artificial Sequence
  Description of Artificial Sequence: Synthetic oligonucleotide
gggcuuggcugccaaucuu

SEQ ID NO: 1265888 - RNA, 19 nt, Artificial Sequence
  Description of Artificial Sequence: Synthetic oligonucleotide
gcgcuacagccaggaaaac

SEQ ID NO: 1265889 - RNA, 19 nt, Artificial Sequence
  Description of Artificial Sequence: Synthetic oligonucleotide
ggggugcaacggggugggg

SEQ ID NO: 1265890 - RNA, 19 nt, Artificial Sequence
  Description of Artificial Sequence: Synthetic oligonucleotide
ccugaacccacagguugcu

SEQ ID NO: 1265891 - RNA, 19 nt, Artificial Sequence
  Description of Artificial Sequence: Synthetic oligonucleotide
ccgagguaggugagagggu

SEQ ID NO: 1265892 - RNA, 19 nt, Artificial Sequence
  Description of Artificial Sequence: Synthetic oligonucleotide
gccugccggaguaagcauu

SEQ ID NO: 1265893 - RNA, 19 nt, Artificial Sequence
  Description of Artificial Sequence: Synthetic oligonucleotide
ccaugauggcgaacacgau

SEQ ID NO: 1265894 - RNA, 19 nt, Artificial Sequence
  Description of Artificial Sequence: Synthetic oligonucleotide
gugcaacgggguggggaau

SEQ ID NO: 1265895 - RNA, 19 nt, Artificial Sequence
  Description of Artificial Sequence: Synthetic oligonucleotide
ccacugggaugaggugauc

SEQ ID NO: 1265896 - RNA, 19 nt, Artificial Sequence
  Description of Artificial Sequence: Synthetic oligonucleotide
cgaacacgauggaggcaaa

SEQ ID NO: 1265897 - RNA, 19 nt, Artificial Sequence
  Description of Artificial Sequence: Synthetic oligonucleotide
cgauggaggcaaaguugcu

SEQ ID NO: 1265898 - RNA, 19 nt, Artificial Sequence
  Description of Artificial Sequence: Synthetic oligonucleotide
gcgccuggugcuggcccac

SEQ ID NO: 1265899 - RNA, 19 nt, Artificial Sequence
  Description of Artificial Sequence: Synthetic oligonucleotide
gcaucccaacugcccgggu

SEQ ID NO: 1265900 - RNA, 19 nt, Artificial Sequence
  Description of Artificial Sequence: Synthetic oligonucleotide
gcaacgggguggggaauuu

SEQ ID NO: 1265901 - RNA, 19 nt, Artificial Sequence
  Description of Artificial Sequence: Synthetic oligonucleotide
gcgagcggccaagccccuc

SEQ ID NO: 1265902 - RNA, 19 nt, Artificial Sequence
  Description of Artificial Sequence: Synthetic oligonucleotide
cccaaacgccugccggagu

SEQ ID NO: 1265903 - RNA, 19 nt, Artificial Sequence
  Description of Artificial Sequence: Synthetic oligonucleotide
caccuuggaccaggauguu

SEQ ID NO: 1265904 - RNA, 19 nt, Artificial Sequence
  Description of Artificial Sequence: Synthetic oligonucleotide
ccacuccgcaaagggcucu

SEQ ID NO: 1265905 - RNA, 19 nt, Artificial Sequence
  Description of Artificial Sequence: Synthetic oligonucleotide
gcauuccgugugggcccaa

SEQ ID NO: 1265906 - RNA, 19 nt, Artificial Sequence
  Description of Artificial Sequence: Synthetic oligonucleotide
cccgggcaugaugcaggau

SEQ ID NO: 1265907 - RNA, 19 nt, Artificial Sequence
  Description of Artificial Sequence: Synthetic oligonucleotide
gaagaaaacggacagaagg

SEQ ID NO: 1265908 - RNA, 19 nt, Artificial Sequence
  Description of Artificial Sequence: Synthetic oligonucleotide
aaugaauugagccaggcga

SEQ ID NO: 1265909 - RNA, 19 nt, Artificial Sequence
  Description of Artificial Sequence: Synthetic oligonucleotide
agacaggucuguuagaccc

SEQ ID NO: 1265910 - RNA, 19 nt, Artificial Sequence
  Description of Artificial Sequence: Synthetic oligonucleotide
aauagcugugucccaaccc

SEQ ID NO: 1265911 - RNA, 19 nt, Artificial Sequence
  Description of Artificial Sequence: Synthetic oligonucleotide
agcaaucaauucuugaggc

SEQ ID NO: 1265912 - RNA, 19 nt, Artificial Sequence
  Description of Artificial Sequence: Synthetic oligonucleotide
aaaaugaguccauauuuug

SEQ ID NO: 1265913 - RNA, 19 nt, Artificial Sequence
  Description of Artificial Sequence: Synthetic oligonucleotide
uuauugggguuuaucaugg

SEQ ID NO: 1265914 - RNA, 19 nt, Artificial Sequence
  Description of Artificial Sequence: Synthetic oligonucleotide
gauauguccaugcccaugg

SEQ ID NO: 1265915 - RNA, 19 nt, Artificial Sequence
  Description of Artificial Sequence: Synthetic oligonucleotide
auugagaagguauugauau

SEQ ID NO: 1265916 - RNA, 19 nt, Artificial Sequence
  Description of Artificial Sequence: Synthetic oligonucleotide
uauugcagcaccaaucuug

SEQ ID NO: 1265917 - RNA, 19 nt, Artificial Sequence
  Description of Artificial Sequence: Synthetic oligonucleotide
uguucuuugcagcugcucg

SEQ ID NO: 1265918 - RNA, 19 nt, Artificial Sequence
  Description of Artificial Sequence: Synthetic oligonucleotide
gguauugauaucuuuaucc

SEQ ID NO: 1265919 - RNA, 19 nt, Artificial Sequence
  Description of Artificial Sequence: Synthetic oligonucleotide
uucacauuaaauuucacuu

SEQ ID NO: 1265920 - RNA, 19 nt, Artificial Sequence
  Description of Artificial Sequence: Synthetic oligonucleotide
ugcagcaccaaucuugggg

SEQ ID NO: 1265921 - RNA, 19 nt, Artificial Sequence
  Description of Artificial Sequence: Synthetic oligonucleotide
uuuauugggguuuaucaug

SEQ ID NO: 1265922 - RNA, 19 nt, Artificial Sequence
  Description of Artificial Sequence: Synthetic oligonucleotide
aaguacacacuccuccacc

SEQ ID NO: 1265923 - RNA, 19 nt, Artificial Sequence
  Description of Artificial Sequence: Synthetic oligonucleotide
uuuaucaagucgauagcag

SEQ ID NO: 1265924 - RNA, 19 nt, Artificial Sequence
  Description of Artificial Sequence: Synthetic oligonucleotide
aauuaaggcugacaggcug

SEQ ID NO: 1265925 - RNA, 19 nt, Artificial Sequence
  Description of Artificial Sequence: Synthetic oligonucleotide
uuguuugcuagauaucggg

SEQ ID NO: 1265926 - RNA, 19 nt, Artificial Sequence
  Description of Artificial Sequence: Synthetic oligonucleotide
uuuacacgcagacaggucu

SEQ ID NO: 1265927 - RNA, 19 nt, Artificial Sequence
  Description of Artificial Sequence: Synthetic oligonucleotide
agcagauauguccaugccc

SEQ ID NO: 1265928 - RNA, 19 nt, Artificial Sequence
  Description of Artificial Sequence: Synthetic oligonucleotide
uuaccuuaagguaugcccc

SEQ ID NO: 1265929 - RNA, 19 nt, Artificial Sequence
  Description of Artificial Sequence: Synthetic oligonucleotide
auuauggaagugcagacga

SEQ ID NO: 1265930 - RNA, 19 nt, Artificial Sequence
  Description of Artificial Sequence: Synthetic oligonucleotide
aagucgauagcagauaugu

SEQ ID NO: 1265931 - RNA, 19 nt, Artificial Sequence
  Description of Artificial Sequence: Synthetic oligonucleotide
aaguguguaggcucuggcg

SEQ ID NO: 1265932 - RNA, 19 nt, Artificial Sequence
  Description of Artificial Sequence: Synthetic oligonucleotide
uauugauaucuuuauccag

SEQ ID NO: 1265933 - RNA, 19 nt, Artificial Sequence
  Description of Artificial Sequence: Synthetic oligonucleotide
auagaaagacagccgcucc

SEQ ID NO: 1265934 - RNA, 19 nt, Artificial Sequence
  Description of Artificial Sequence: Synthetic oligonucleotide
ugaaccauagcuuccuuca

SEQ ID NO: 1265935 - RNA, 19 nt, Artificial Sequence
  Description of Artificial Sequence: Synthetic oligonucleotide
auuugccaagguuaaguac

SEQ ID NO: 1265936 - RNA, 19 nt, Artificial Sequence
  Description of Artificial Sequence: Synthetic oligonucleotide
cagacgaacgacauugugg

SEQ ID NO: 1265937 - RNA, 19 nt, Artificial Sequence
  Description of Artificial Sequence: Synthetic oligonucleotide
ucugacaaagacaccacac

SEQ ID NO: 1265938 - RNA, 19 nt, Artificial Sequence
  Description of Artificial Sequence: Synthetic oligonucleotide
uuaucaugggguaggaacu

SEQ ID NO: 1265939 - RNA, 19 nt, Artificial Sequence
  Description of Artificial Sequence: Synthetic oligonucleotide
aaaacggacagaaggcgac

SEQ ID NO: 1265940 - RNA, 19 nt, Artificial Sequence
  Description of Artificial Sequence: Synthetic oligonucleotide
uuaucaagucgauagcaga

SEQ ID NO: 1265941 - RNA, 19 nt, Artificial Sequence
  Description of Artificial Sequence: Synthetic oligonucleotide
auugggguuuaucaugggg

SEQ ID NO: 1265942 - RNA, 19 nt, Artificial Sequence
  Description of Artificial Sequence: Synthetic oligonucleotide
aagacagccgcuccucaac

SEQ ID NO: 1265943 - RNA, 19 nt, Artificial Sequence
  Description of Artificial Sequence: Synthetic oligonucleotide
uuuucagccccaaggaucu

SEQ ID NO: 1265944 - RNA, 19 nt, Artificial Sequence
  Description of Artificial Sequence: Synthetic oligonucleotide
cagacgaacuccucgaagg

SEQ ID NO: 1265945 - RNA, 19 nt, Artificial Sequence
  Description of Artificial Sequence: Synthetic oligonucleotide
ucgauagcagauaugucca

SEQ ID NO: 1265946 - RNA, 19 nt, Artificial Sequence
  Description of Artificial Sequence: Synthetic oligonucleotide
uccucauucaauucccugc

SEQ ID NO: 1265947 - RNA, 19 nt, Artificial Sequence
  Description of Artificial Sequence: Synthetic oligonucleotide
cuuggcucaucuuggagcg

SEQ ID NO: 1265948 - RNA, 19 nt, Artificial Sequence
  Description of Artificial Sequence: Synthetic oligonucleotide
agacgaacgacauugugga

SEQ ID NO: 1265949 - RNA, 19 nt, Artificial Sequence
  Description of Artificial Sequence: Synthetic oligonucleotide
ugaacaacaccuucagaca

SEQ ID NO: 1265950 - RNA, 19 nt, Artificial Sequence
  Description of Artificial Sequence: Synthetic oligonucleotide
uuugcuagauaucgggaga

SEQ ID NO: 1265951 - RNA, 19 nt, Artificial Sequence
  Description of Artificial Sequence: Synthetic oligonucleotide
uguuagacccuucaccaga

SEQ ID NO: 1265952 - RNA, 19 nt, Artificial Sequence
  Description of Artificial Sequence: Synthetic oligonucleotide
guuugcuagauaucgggag

SEQ ID NO: 1265953 - RNA, 19 nt, Artificial Sequence
  Description of Artificial Sequence: Synthetic oligonucleotide
gauuauggaagugcagacg

SEQ ID NO: 1265954 - RNA, 19 nt, Artificial Sequence
  Description of Artificial Sequence: Synthetic oligonucleotide
auucuaauccuccuguccu

SEQ ID NO: 1265955 - RNA, 19 nt, Artificial Sequence
  Description of Artificial Sequence: Synthetic oligonucleotide
aaugagacgugcaccuacc

SEQ ID NO: 1265956 - RNA, 19 nt, Artificial Sequence
  Description of Artificial Sequence: Synthetic oligonucleotide
aaagugguacccauaccac

SEQ ID NO: 1265957 - RNA, 19 nt, Artificial Sequence
  Description of Artificial Sequence: Synthetic oligonucleotide
uuuaguacggcagguaugu

SEQ ID NO: 1265958 - RNA, 19 nt, Artificial Sequence
  Description of Artificial Sequence: Synthetic oligonucleotide
uuuuaguacggcagguaug

SEQ ID NO: 1265959 - RNA, 19 nt, Artificial Sequence
  Description of Artificial Sequence: Synthetic oligonucleotide
uaagguaugccccucccac

SEQ ID NO: 1265960 - RNA, 19 nt, Artificial Sequence
  Description of Artificial Sequence: Synthetic oligonucleotide
uagauaucgggagaugcgg

SEQ ID NO: 1265961 - RNA, 19 nt, Artificial Sequence
  Description of Artificial Sequence: Synthetic oligonucleotide
uuaaguacacacuccucca

SEQ ID NO: 1265962 - RNA, 19 nt, Artificial Sequence
  Description of Artificial Sequence: Synthetic oligonucleotide
uuguauugcagcaccaauc

SEQ ID NO: 1265963 - RNA, 19 nt, Artificial Sequence
  Description of Artificial Sequence: Synthetic oligonucleotide
uccauucuaauccuccugu

SEQ ID NO: 1265964 - RNA, 19 nt, Artificial Sequence
  Description of Artificial Sequence: Synthetic oligonucleotide
agaaaacggacagaaggcg

SEQ ID NO: 1265965 - RNA, 19 nt, Artificial Sequence
  Description of Artificial Sequence: Synthetic oligonucleotide
gaccagacgaacgacauug

SEQ ID NO: 1265966 - RNA, 19 nt, Artificial Sequence
  Description of Artificial Sequence: Synthetic oligonucleotide
ccugggaugaagaaaacgg

SEQ ID NO: 1265967 - RNA, 19 nt, Artificial Sequence
  Description of Artificial Sequence: Synthetic oligonucleotide
aaccauagcuuccuucaug

SEQ ID NO: 1265968 - RNA, 19 nt, Artificial Sequence
  Description of Artificial Sequence: Synthetic oligonucleotide
aacagcgcguagccgaccg

SEQ ID NO: 1265969 - RNA, 19 nt, Artificial Sequence
  Description of Artificial Sequence: Synthetic oligonucleotide
gaacaacaccuucagacac

SEQ ID NO: 1265970 - RNA, 19 nt, Artificial Sequence
  Description of Artificial Sequence: Synthetic oligonucleotide
cuucaccagauuauggaag

SEQ ID NO: 1265971 - RNA, 19 nt, Artificial Sequence
  Description of Artificial Sequence: Synthetic oligonucleotide
uguucucgcaguuucuccc

SEQ ID NO: 1265972 - RNA, 19 nt, Artificial Sequence
  Description of Artificial Sequence: Synthetic oligonucleotide
acccauaccacucccugac

SEQ ID NO: 1265973 - RNA, 19 nt, Artificial Sequence
  Description of Artificial Sequence: Synthetic oligonucleotide
uguuugcuagauaucggga

SEQ ID NO: 1265974 - RNA, 19 nt, Artificial Sequence
  Description of Artificial Sequence: Synthetic oligonucleotide
aguguguaggcucuggcga

SEQ ID NO: 1265975 - RNA, 19 nt, Artificial Sequence
  Description of Artificial Sequence: Synthetic oligonucleotide
aaggcgaccagacgaacga

SEQ ID NO: 1265976 - RNA, 19 nt, Artificial Sequence
  Description of Artificial Sequence: Synthetic oligonucleotide
agguauugauaucuuuauc

SEQ ID NO: 1265977 - RNA, 19 nt, Artificial Sequence
  Description of Artificial Sequence: Synthetic oligonucleotide
gauaucgggagaugcggcc

SEQ ID NO: 1265978 - RNA, 19 nt, Artificial Sequence
  Description of Artificial Sequence: Synthetic oligonucleotide
agugcuacuguuuucugaa

SEQ ID NO: 1265979 - RNA, 19 nt, Artificial Sequence
  Description of Artificial Sequence: Synthetic oligonucleotide
cugaacagggccuuuucag

SEQ ID NO: 1265980 - RNA, 19 nt, Artificial Sequence
  Description of Artificial Sequence: Synthetic oligonucleotide
uucaccagauuauggaagu

SEQ ID NO: 1265981 - RNA, 19 nt, Artificial Sequence
  Description of Artificial Sequence: Synthetic oligonucleotide
cuuauggacuggaugauca

SEQ ID NO: 1265982 - RNA, 19 nt, Artificial Sequence
  Description of Artificial Sequence: Synthetic oligonucleotide
augaagaaaacggacagaa

SEQ ID NO: 1265983 - RNA, 19 nt, Artificial Sequence
  Description of Artificial Sequence: Synthetic oligonucleotide
uuccugguaauuucagcag

SEQ ID NO: 1265984 - RNA, 19 nt, Artificial Sequence
  Description of Artificial Sequence: Synthetic oligonucleotide
ugcgguuuccaaugaauug

SEQ ID NO: 1265985 - RNA, 19 nt, Artificial Sequence
  Description of Artificial Sequence: Synthetic oligonucleotide
ugcucgaacagcacgugca

SEQ ID NO: 1265986 - RNA, 19 nt, Artificial Sequence
  Description of Artificial Sequence: Synthetic oligonucleotide
aagugguacccauaccacu

SEQ ID NO: 1265987 - RNA, 19 nt, Artificial Sequence
  Description of Artificial Sequence: Synthetic oligonucleotide
acgacauuguggaauuugc

SEQ ID NO: 1265988 - RNA, 19 nt, Artificial Sequence
  Description of Artificial Sequence: Synthetic oligonucleotide
uggaauuugccaagguuaa

SEQ ID NO: 1265989 - RNA, 19 nt, Artificial Sequence
  Description of Artificial Sequence: Synthetic oligonucleotide
aaacggacagaaggcgacc

SEQ ID NO: 1265990 - RNA, 19 nt, Artificial Sequence
  Description of Artificial Sequence: Synthetic oligonucleotide
ugugucccaacccuagcug

SEQ ID NO: 1265991 - RNA, 19 nt, Artificial Sequence
  Description of Artificial Sequence: Synthetic oligonucleotide
caaugaauugagccaggcg

SEQ ID NO: 1265992 - RNA, 19 nt, Artificial Sequence
  Description of Artificial Sequence: Synthetic oligonucleotide
gggcuuuacacgcagacag

SEQ ID NO: 1265993 - RNA, 19 nt, Artificial Sequence
  Description of Artificial Sequence: Synthetic oligonucleotide
ucugaacagggccuuuuca

SEQ ID NO: 1265994 - RNA, 19 nt, Artificial Sequence
  Description of Artificial Sequence: Synthetic oligonucleotide
uaguacggcagguaugucu

SEQ ID NO: 1265995 - RNA, 19 nt, Artificial Sequence
  Description of Artificial Sequence: Synthetic oligonucleotide
ugagacgugcaccuaccgc

SEQ ID NO: 1265996 - RNA, 19 nt, Artificial Sequence
  Description of Artificial Sequence: Synthetic oligonucleotide
uguaccccaacuccucuug

SEQ ID NO: 1265997 - RNA, 19 nt, Artificial Sequence
  Description of Artificial Sequence: Synthetic oligonucleotide
uaccgcuuccccaauuaag

SEQ ID NO: 1265998 - RNA, 19 nt, Artificial Sequence
  Description of Artificial Sequence: Synthetic oligonucleotide
uuuggcccgagaauagcug

SEQ ID NO: 1265999 - RNA, 19 nt, Artificial Sequence
  Description of Artificial Sequence: Synthetic oligonucleotide
cuucaagcguuucuucucc

SEQ ID NO: 1266000 - RNA, 19 nt, Artificial Sequence
  Description of Artificial Sequence: Synthetic oligonucleotide
acgcagacaggucuguuag

SEQ ID NO: 1266001 - RNA, 19 nt, Artificial Sequence
  Description of Artificial Sequence: Synthetic oligonucleotide
ggaacuguuaccuuaaggu

SEQ ID NO: 1266002 - RNA, 19 nt, Artificial Sequence
  Description of Artificial Sequence: Synthetic oligonucleotide
ugcgcaaugagacgugcac

SEQ ID NO: 1266003 - RNA, 19 nt, Artificial Sequence
  Description of Artificial Sequence: Synthetic oligonucleotide
agugguacccauaccacuc

SEQ ID NO: 1266004 - RNA, 19 nt, Artificial Sequence
  Description of Artificial Sequence: Synthetic oligonucleotide
ugcgguagcagcaggcuga

SEQ ID NO: 1266005 - RNA, 19 nt, Artificial Sequence
  Description of Artificial Sequence: Synthetic oligonucleotide
uauggaagugcagacgaac

SEQ ID NO: 1266006 - RNA, 19 nt, Artificial Sequence
  Description of Artificial Sequence: Synthetic oligonucleotide
cauagucaacucuuccagc

SEQ ID NO: 1266007 - RNA, 19 nt, Artificial Sequence
  Description of Artificial Sequence: Synthetic oligonucleotide
uccaaugaauugagccagg

SEQ ID NO: 1266008 - RNA, 19 nt, Artificial Sequence
  Description of Artificial Sequence: Synthetic oligonucleotide
ucugccugaaccauagcuu

SEQ ID NO: 1266009 - RNA, 19 nt, Artificial Sequence
  Description of Artificial Sequence: Synthetic oligonucleotide
guccagaaggcuuauggac

SEQ ID NO: 1266010 - RNA, 19 nt, Artificial Sequence
  Description of Artificial Sequence: Synthetic oligonucleotide
aguacggcagguaugucuc

SEQ ID NO: 1266011 - RNA, 19 nt, Artificial Sequence
  Description of Artificial Sequence: Synthetic oligonucleotide
gaauagcugugucccaacc

SEQ ID NO: 1266012 - RNA, 19 nt, Artificial Sequence
  Description of Artificial Sequence: Synthetic oligonucleotide
ugggguaggaacuguuacc

SEQ ID NO: 1266013 - RNA, 19 nt, Artificial Sequence
  Description of Artificial Sequence: Synthetic oligonucleotide
uaaguacacacuccuccac

SEQ ID NO: 1266014 - RNA, 19 nt, Artificial Sequence
  Description of Artificial Sequence: Synthetic oligonucleotide
ugucccaacccuagcuggg

SEQ ID NO: 1266015 - RNA, 19 nt, Artificial Sequence
  Description of Artificial Sequence: Synthetic oligonucleotide
auuguggaauuugccaagg

SEQ ID NO: 1266016 - RNA, 19 nt, Artificial Sequence
  Description of Artificial Sequence: Synthetic oligonucleotide
gaagguauugauaucuuua

SEQ ID NO: 1266017 - RNA, 19 nt, Artificial Sequence
  Description of Artificial Sequence: Synthetic oligonucleotide
uacuuggcucaucuuggag

SEQ ID NO: 1266018 - RNA, 19 nt, Artificial Sequence
  Description of Artificial Sequence: Synthetic oligonucleotide
acaacaccuucagacacgg

SEQ ID NO: 1266019 - RNA, 19 nt, Artificial Sequence
  Description of Artificial Sequence: Synthetic oligonucleotide
aguacacacuccuccaccu

SEQ ID NO: 1266020 - RNA, 19 nt, Artificial Sequence
  Description of Artificial Sequence: Synthetic oligonucleotide
uggcgauacucugacaaag

SEQ ID NO: 1266021 - RNA, 19 nt, Artificial Sequence
  Description of Artificial Sequence: Synthetic oligonucleotide
augaguccauauuuuggug

SEQ ID NO: 1266022 - RNA, 19 nt, Artificial Sequence
  Description of Artificial Sequence: Synthetic oligonucleotide
gacaaagacaccacacgac

SEQ ID NO: 1266023 - RNA, 19 nt, Artificial Sequence
  Description of Artificial Sequence: Synthetic oligonucleotide
gaacuguuaccuuaaggua

SEQ ID NO: 1266024 - RNA, 19 nt, Artificial Sequence
  Description of Artificial Sequence: Synthetic oligonucleotide
gaaggcgaccagacgaacg

SEQ ID NO: 1266025 - RNA, 19 nt, Artificial Sequence
  Description of Artificial Sequence: Synthetic oligonucleotide
cuuaagguaugccccuccc

SEQ ID NO: 1266026 - RNA, 19 nt, Artificial Sequence
  Description of Artificial Sequence: Synthetic oligonucleotide
agauaucgggagaugcggc

SEQ ID NO: 1266027 - RNA, 19 nt, Artificial Sequence
  Description of Artificial Sequence: Synthetic oligonucleotide
gaccgaugaagguggaaug

SEQ ID NO: 1266028 - RNA, 19 nt, Artificial Sequence
  Description of Artificial Sequence: Synthetic oligonucleotide
caaccugggaugaagaaaa

SEQ ID NO: 1266029 - RNA, 19 nt, Artificial Sequence
  Description of Artificial Sequence: Synthetic oligonucleotide
uuacacgcagacaggucug

SEQ ID NO: 1266030 - RNA, 19 nt, Artificial Sequence
  Description of Artificial Sequence: Synthetic oligonucleotide
uagcagauauguccaugcc

SEQ ID NO: 1266031 - RNA, 19 nt, Artificial Sequence
  Description of Artificial Sequence: Synthetic oligonucleotide
caccagauuauggaagugc

SEQ ID NO: 1266032 - RNA, 19 nt, Artificial Sequence
  Description of Artificial Sequence: Synthetic oligonucleotide
ugcucgaccgaugaaggug

SEQ ID NO: 1266033 - RNA, 19 nt, Artificial Sequence
  Description of Artificial Sequence: Synthetic oligonucleotide
accgaugaagguggaaugg

SEQ ID NO: 1266034 - RNA, 19 nt, Artificial Sequence
  Description of Artificial Sequence: Synthetic oligonucleotide
gaucucagcuaucacaccu

SEQ ID NO: 1266035 - RNA, 19 nt, Artificial Sequence
  Description of Artificial Sequence: Synthetic oligonucleotide
guaugccccucccacaaag

SEQ ID NO: 1266036 - RNA, 19 nt, Artificial Sequence
  Description of Artificial Sequence: Synthetic oligonucleotide
agggccaacagcgcguagc

SEQ ID NO: 1266037 - RNA, 19 nt, Artificial Sequence
  Description of Artificial Sequence: Synthetic oligonucleotide
acuuuggcccgagaauagc

SEQ ID NO: 1266038 - RNA, 19 nt, Artificial Sequence
  Description of Artificial Sequence: Synthetic oligonucleotide
acccgguucacauuaaauu

SEQ ID NO: 1266039 - RNA, 19 nt, Artificial Sequence
  Description of Artificial Sequence: Synthetic oligonucleotide
ucaagcguuucuucuccug

SEQ ID NO: 1266040 - RNA, 19 nt, Artificial Sequence
  Description of Artificial Sequence: Synthetic oligonucleotide
caaugagacgugcaccuac

SEQ ID NO: 1266041 - RNA, 19 nt, Artificial Sequence
  Description of Artificial Sequence: Synthetic oligonucleotide
caaaauggccuuagccuug

SEQ ID NO: 1266042 - RNA, 19 nt, Artificial Sequence
  Description of Artificial Sequence: Synthetic oligonucleotide
guagccgaccgcaugcucg

SEQ ID NO: 1266043 - RNA, 19 nt, Artificial Sequence
  Description of Artificial Sequence: Synthetic oligonucleotide
gcaguuguaccccaacucc

SEQ ID NO: 1266044 - RNA, 19 nt, Artificial Sequence
  Description of Artificial Sequence: Synthetic oligonucleotide
uguuaccuuaagguaugcc

SEQ ID NO: 1266045 - RNA, 19 nt, Artificial Sequence
  Description of Artificial Sequence: Synthetic oligonucleotide
augagacgugcaccuaccg

SEQ ID NO: 1266046 - RNA, 19 nt, Artificial Sequence
  Description of Artificial Sequence: Synthetic oligonucleotide
cuucagacacggcauuggc

SEQ ID NO: 1266047 - RNA, 19 nt, Artificial Sequence
  Description of Artificial Sequence: Synthetic oligonucleotide
cagauuauggaagugcaga

SEQ ID NO: 1266048 - RNA, 19 nt, Artificial Sequence
  Description of Artificial Sequence: Synthetic oligonucleotide
ccagcaugcgcaaugagac

SEQ ID NO: 1266049 - RNA, 19 nt, Artificial Sequence
  Description of Artificial Sequence: Synthetic oligonucleotide
agaagguauugauaucuuu

SEQ ID NO: 1266050 - RNA, 19 nt, Artificial Sequence
  Description of Artificial Sequence: Synthetic oligonucleotide
aauacacuugugggcaccu

SEQ ID NO: 1266051 - RNA, 19 nt, Artificial Sequence
  Description of Artificial Sequence: Synthetic oligonucleotide
auuuugguguauugccccu

SEQ ID NO: 1266052 - RNA, 19 nt, Artificial Sequence
  Description of Artificial Sequence: Synthetic oligonucleotide
agcgaagguaaguguguag

SEQ ID NO: 1266053 - RNA, 19 nt, Artificial Sequence
  Description of Artificial Sequence: Synthetic oligonucleotide
agcugcucgaccgaugaag

SEQ ID NO: 1266054 - RNA, 19 nt, Artificial Sequence
  Description of Artificial Sequence: Synthetic oligonucleotide
gaaaacggacagaaggcga

SEQ ID NO: 1266055 - RNA, 19 nt, Artificial Sequence
  Description of Artificial Sequence: Synthetic oligonucleotide
acgugcaccuaccgcuucc

SEQ ID NO: 1266056 - RNA, 19 nt, Artificial Sequence
  Description of Artificial Sequence: Synthetic oligonucleotide
cccaaauacacuugugggc

SEQ ID NO: 1266057 - RNA, 19 nt, Artificial Sequence
  Description of Artificial Sequence: Synthetic oligonucleotide
uuggagcgaagguaagugu

SEQ ID NO: 1266058 - RNA, 19 nt, Artificial Sequence
  Description of Artificial Sequence: Synthetic oligonucleotide
ggagaugcggccuuuguuc

SEQ ID NO: 1266059 - RNA, 19 nt, Artificial Sequence
  Description of Artificial Sequence: Synthetic oligonucleotide
guacccauaccacucccug

SEQ ID NO: 1266060 - RNA, 19 nt, Artificial Sequence
  Description of Artificial Sequence: Synthetic oligonucleotide
ccccaaauacacuuguggg

SEQ ID NO: 1266061 - RNA, 19 nt, Artificial Sequence
  Description of Artificial Sequence: Synthetic oligonucleotide
aggucuguuagacccuuca

SEQ ID NO: 1266062 - RNA, 19 nt, Artificial Sequence
  Description of Artificial Sequence: Synthetic oligonucleotide
gagacgugcaccuaccgcu

SEQ ID NO: 1266063 - RNA, 19 nt, Artificial Sequence
  Description of Artificial Sequence: Synthetic oligonucleotide
uaugccccucccacaaagc

SEQ ID NO: 1266064 - RNA, 19 nt, Artificial Sequence
  Description of Artificial Sequence: Synthetic oligonucleotide
caaccauggcgccugcucc

SEQ ID NO: 1266065 - RNA, 19 nt, Artificial Sequence
  Description of Artificial Sequence: Synthetic oligonucleotide
aauuucacuuuggcccgag

SEQ ID NO: 1266066 - RNA, 19 nt, Artificial Sequence
  Description of Artificial Sequence: Synthetic oligonucleotide
cgagaggcauccaaaaugg

SEQ ID NO: 1266067 - RNA, 19 nt, Artificial Sequence
  Description of Artificial Sequence: Synthetic oligonucleotide
ugcaccuaccgcuucccca

SEQ ID NO: 1266068 - RNA, 19 nt, Artificial Sequence
  Description of Artificial Sequence: Synthetic oligonucleotide
cuggaugaucauguugucc

SEQ ID NO: 1266069 - RNA, 19 nt, Artificial Sequence
  Description of Artificial Sequence: Synthetic oligonucleotide
uaccuuaagguaugccccu

SEQ ID NO: 1266070 - RNA, 19 nt, Artificial Sequence
  Description of Artificial Sequence: Synthetic oligonucleotide
acuguuaccuuaagguaug

SEQ ID NO: 1266071 - RNA, 19 nt, Artificial Sequence
  Description of Artificial Sequence: Synthetic oligonucleotide
gcgaagguaaguguguagg

SEQ ID NO: 1266072 - RNA, 19 nt, Artificial Sequence
  Description of Artificial Sequence: Synthetic oligonucleotide
uggcaguuguaccccaacu

SEQ ID NO: 1266073 - RNA, 19 nt, Artificial Sequence
  Description of Artificial Sequence: Synthetic oligonucleotide
ggaagugcagacgaacucc

SEQ ID NO: 1266074 - RNA, 19 nt, Artificial Sequence
  Description of Artificial Sequence: Synthetic oligonucleotide
acgaacgacauuguggaau

SEQ ID NO: 1266075 - RNA, 19 nt, Artificial Sequence
  Description of Artificial Sequence: Synthetic oligonucleotide
ucccugacacgcauugaga

SEQ ID NO: 1266076 - RNA, 19 nt, Artificial Sequence
  Description of Artificial Sequence: Synthetic oligonucleotide
cugaaccauagcuuccuuc

SEQ ID NO: 1266077 - RNA, 19 nt, Artificial Sequence
  Description of Artificial Sequence: Synthetic oligonucleotide
cugguaauuucagcagccg

SEQ ID NO: 1266078 - RNA, 19 nt, Artificial Sequence
  Description of Artificial Sequence: Synthetic oligonucleotide
caucuuggagcgaagguaa

SEQ ID NO: 1266079 - RNA, 19 nt, Artificial Sequence
  Description of Artificial Sequence: Synthetic oligonucleotide
cugggaugaagaaaacgga

SEQ ID NO: 1266080 - RNA, 19 nt, Artificial Sequence
  Description of Artificial Sequence: Synthetic oligonucleotide
auaucuuuauccaguuggu

SEQ ID NO: 1266081 - RNA, 19 nt, Artificial Sequence
  Description of Artificial Sequence: Synthetic oligonucleotide
accagauuauggaagugca

SEQ ID NO: 1266082 - RNA, 19 nt, Artificial Sequence
  Description of Artificial Sequence: Synthetic oligonucleotide
ugguacccauaccacuccc

SEQ ID NO: 1266083 - RNA, 19 nt, Artificial Sequence
  Description of Artificial Sequence: Synthetic oligonucleotide
ucucgauguuuaucaaguc

SEQ ID NO: 1266084 - RNA, 19 nt, Artificial Sequence
  Description of Artificial Sequence: Synthetic oligonucleotide
cuuuacacgcagacagguc

SEQ ID NO: 1266085 - RNA, 19 nt, Artificial Sequence
  Description of Artificial Sequence: Synthetic oligonucleotide
caagucgauagcagauaug

SEQ ID NO: 1266086 - RNA, 19 nt, Artificial Sequence
  Description of Artificial Sequence: Synthetic oligonucleotide
uccagucuggcaguuguac

SEQ ID NO: 1266087 - RNA, 19 nt, Artificial Sequence
  Description of Artificial Sequence: Synthetic oligonucleotide
ggguuuaucaugggguagg

SEQ ID NO: 1266088 - RNA, 19 nt, Artificial Sequence
  Description of Artificial Sequence: Synthetic oligonucleotide
ugggguuuaucauggggua

SEQ ID NO: 1266089 - RNA, 19 nt, Artificial Sequence
  Description of Artificial Sequence: Synthetic oligonucleotide
acggagguccucaugaaca

SEQ ID NO: 1266090 - RNA, 19 nt, Artificial Sequence
  Description of Artificial Sequence: Synthetic oligonucleotide
aacggacagaaggcgacca

SEQ ID NO: 1266091 - RNA, 19 nt, Artificial Sequence
  Description of Artificial Sequence: Synthetic oligonucleotide
cacuuuggcccgagaauag

SEQ ID NO: 1266092 - RNA, 19 nt, Artificial Sequence
  Description of Artificial Sequence: Synthetic oligonucleotide
ccucccacaaagcaugucc

SEQ ID NO: 1266093 - RNA, 19 nt, Artificial Sequence
  Description of Artificial Sequence: Synthetic oligonucleotide
cucucgauguuuaucaagu

SEQ ID NO: 1266094 - RNA, 19 nt, Artificial Sequence
  Description of Artificial Sequence: Synthetic oligonucleotide
ccucauucaauucccugcg

SEQ ID NO: 1266095 - RNA, 19 nt, Artificial Sequence
  Description of Artificial Sequence: Synthetic oligonucleotide
gagaagcaaucaauucuug

SEQ ID NO: 1266096 - RNA, 19 nt, Artificial Sequence
  Description of Artificial Sequence: Synthetic oligonucleotide
gaggcaauacugcauuugu

SEQ ID NO: 1266097 - RNA, 19 nt, Artificial Sequence
  Description of Artificial Sequence: Synthetic oligonucleotide
gacggagguccucaugaac

SEQ ID NO: 1266098 - RNA, 19 nt, Artificial Sequence
  Description of Artificial Sequence: Synthetic oligonucleotide
agcacaaccauggcgccug

SEQ ID NO: 1266099 - RNA, 19 nt, Artificial Sequence
  Description of Artificial Sequence: Synthetic oligonucleotide
guucucgcaguuucucccc

SEQ ID NO: 1266100 - RNA, 19 nt, Artificial Sequence
  Description of Artificial Sequence: Synthetic oligonucleotide
ugccccuugucuucagggc

SEQ ID NO: 1266101 - RNA, 19 nt, Artificial Sequence
  Description of Artificial Sequence: Synthetic oligonucleotide
ugggaucucuccagucuca

SEQ ID NO: 1266102 - RNA, 19 nt, Artificial Sequence
  Description of Artificial Sequence: Synthetic oligonucleotide
uuauggacuggaugaucau

SEQ ID NO: 1266103 - RNA, 19 nt, Artificial Sequence
  Description of Artificial Sequence: Synthetic oligonucleotide
ugacacgcauugagaaggu

SEQ ID NO: 1266104 - RNA, 19 nt, Artificial Sequence
  Description of Artificial Sequence: Synthetic oligonucleotide
aucacaccuccagucuggc

SEQ ID NO: 1266105 - RNA, 19 nt, Artificial Sequence
  Description of Artificial Sequence: Synthetic oligonucleotide
uacccauaccacucccuga

SEQ ID NO: 1266106 - RNA, 19 nt, Artificial Sequence
  Description of Artificial Sequence: Synthetic oligonucleotide
gaaaaugaguccauauuuu

SEQ ID NO: 1266107 - RNA, 19 nt, Artificial Sequence
  Description of Artificial Sequence: Synthetic oligonucleotide
aucucagcuaucacaccuc

SEQ ID NO: 1266108 - RNA, 19 nt, Artificial Sequence
  Description of Artificial Sequence: Synthetic oligonucleotide
acacgcauugagaagguau

SEQ ID NO: 1266109 - RNA, 19 nt, Artificial Sequence
  Description of Artificial Sequence: Synthetic oligonucleotide
uugcuagauaucgggagau

SEQ ID NO: 1266110 - RNA, 19 nt, Artificial Sequence
  Description of Artificial Sequence: Synthetic oligonucleotide
gaacagcacgugcagcaca

SEQ ID NO: 1266111 - RNA, 19 nt, Artificial Sequence
  Description of Artificial Sequence: Synthetic oligonucleotide
auggaagugcagacgaacu

SEQ ID NO: 1266112 - RNA, 19 nt, Artificial Sequence
  Description of Artificial Sequence: Synthetic oligonucleotide
agaaggcgaccagacgaac

SEQ ID NO: 1266113 - RNA, 19 nt, Artificial Sequence
  Description of Artificial Sequence: Synthetic oligonucleotide
gguaggaacuguuaccuua

SEQ ID NO: 1266114 - RNA, 19 nt, Artificial Sequence
  Description of Artificial Sequence: Synthetic oligonucleotide
agguaugccccucccacaa

SEQ ID NO: 1266115 - RNA, 19 nt, Artificial Sequence
  Description of Artificial Sequence: Synthetic oligonucleotide
acaccacacgacuggagaa

SEQ ID NO: 1266116 - RNA, 19 nt, Artificial Sequence
  Description of Artificial Sequence: Synthetic oligonucleotide
cuguacuguggaugcuggg

SEQ ID NO: 1266117 - RNA, 19 nt, Artificial Sequence
  Description of Artificial Sequence: Synthetic oligonucleotide
uucaagcguuucuucuccu

SEQ ID NO: 1266118 - RNA, 19 nt, Artificial Sequence
  Description of Artificial Sequence: Synthetic oligonucleotide
uccccaauuaaggcugaca

SEQ ID NO: 1266119 - RNA, 19 nt, Artificial Sequence
  Description of Artificial Sequence: Synthetic oligonucleotide
aacagcacgugcagcacaa

SEQ ID NO: 1266120 - RNA, 19 nt, Artificial Sequence
  Description of Artificial Sequence: Synthetic oligonucleotide
gugguacccauaccacucc

SEQ ID NO: 1266121 - RNA, 19 nt, Artificial Sequence
  Description of Artificial Sequence: Synthetic oligonucleotide
uggcccgagaauagcugug

SEQ ID NO: 1266122 - RNA, 19 nt, Artificial Sequence
  Description of Artificial Sequence: Synthetic oligonucleotide
aggaccgagaggcauccaa

SEQ ID NO: 1266123 - RNA, 19 nt, Artificial Sequence
  Description of Artificial Sequence: Synthetic oligonucleotide
agguucuuccgugggaucu

SEQ ID NO: 1266124 - RNA, 19 nt, Artificial Sequence
  Description of Artificial Sequence: Synthetic oligonucleotide
ccucuuguauugcagcacc

SEQ ID NO: 1266125 - RNA, 19 nt, Artificial Sequence
  Description of Artificial Sequence: Synthetic oligonucleotide
ugcagacgaacuccucgaa

SEQ ID NO: 1266126 - RNA, 19 nt, Artificial Sequence
  Description of Artificial Sequence: Synthetic oligonucleotide
agacagccgcuccucaacu

SEQ ID NO: 1266127 - RNA, 19 nt, Artificial Sequence
  Description of Artificial Sequence: Synthetic oligonucleotide
accugcgguagcagcaggc

SEQ ID NO: 1266128 - RNA, 19 nt, Artificial Sequence
  Description of Artificial Sequence: Synthetic oligonucleotide
uugguguauugccccuugu

SEQ ID NO: 1266129 - RNA, 19 nt, Artificial Sequence
  Description of Artificial Sequence: Synthetic oligonucleotide
cagccagucgcuucuuuuc

SEQ ID NO: 1266130 - RNA, 19 nt, Artificial Sequence
  Description of Artificial Sequence: Synthetic oligonucleotide
uccgugggaucucuccagu

SEQ ID NO: 1266131 - RNA, 19 nt, Artificial Sequence
  Description of Artificial Sequence: Synthetic oligonucleotide
accgagaggcauccaaaau

SEQ ID NO: 1266132 - RNA, 19 nt, Artificial Sequence
  Description of Artificial Sequence: Synthetic oligonucleotide
ggcaguuguaccccaacuc

SEQ ID NO: 1266133 - RNA, 19 nt, Artificial Sequence
  Description of Artificial Sequence: Synthetic oligonucleotide
acggacagaaggcgaccag

SEQ ID NO: 1266134 - RNA, 19 nt, Artificial Sequence
  Description of Artificial Sequence: Synthetic oligonucleotide
ugcuagauaucgggagaug

SEQ ID NO: 1266135 - RNA, 19 nt, Artificial Sequence
  Description of Artificial Sequence: Synthetic oligonucleotide
gaccgagaggcauccaaaa

SEQ ID NO: 1266136 - RNA, 19 nt, Artificial Sequence
  Description of Artificial Sequence: Synthetic oligonucleotide
uugcagcaccaaucuuggg

SEQ ID NO: 1266137 - RNA, 19 nt, Artificial Sequence
  Description of Artificial Sequence: Synthetic oligonucleotide
gugggaucucuccagucuc

SEQ ID NO: 1266138 - RNA, 19 nt, Artificial Sequence
  Description of Artificial Sequence: Synthetic oligonucleotide
gcucgaccgaugaaggugg

SEQ ID NO: 1266139 - RNA, 19 nt, Artificial Sequence
  Description of Artificial Sequence: Synthetic oligonucleotide
acgcauugagaagguauug

SEQ ID NO: 1266140 - RNA, 19 nt, Artificial Sequence
  Description of Artificial Sequence: Synthetic oligonucleotide
ucgcaguuucuccccaaau

SEQ ID NO: 1266141 - RNA, 19 nt, Artificial Sequence
  Description of Artificial Sequence: Synthetic oligonucleotide
cuccccaaauacacuugug

SEQ ID NO: 1266142 - RNA, 19 nt, Artificial Sequence
  Description of Artificial Sequence: Synthetic oligonucleotide
acggcagguaugucuccag

SEQ ID NO: 1266143 - RNA, 19 nt, Artificial Sequence
  Description of Artificial Sequence: Synthetic oligonucleotide
gcagacgaacuccucgaag

SEQ ID NO: 1266144 - RNA, 19 nt, Artificial Sequence
  Description of Artificial Sequence: Synthetic oligonucleotide
cccgagaauagcugugucc

SEQ ID NO: 1266145 - RNA, 19 nt, Artificial Sequence
  Description of Artificial Sequence: Synthetic oligonucleotide
ccaaauacacuugugggca

SEQ ID NO: 1266146 - RNA, 19 nt, Artificial Sequence
  Description of Artificial Sequence: Synthetic oligonucleotide
gguagcagcaggcugauuu

SEQ ID NO: 1266147 - RNA, 19 nt, Artificial Sequence
  Description of Artificial Sequence: Synthetic oligonucleotide
uagccgaccgcaugcucga

SEQ ID NO: 1266148 - RNA, 19 nt, Artificial Sequence
  Description of Artificial Sequence: Synthetic oligonucleotide
agcaccaaucuuggggucu

SEQ ID NO: 1266149 - RNA, 19 nt, Artificial Sequence
  Description of Artificial Sequence: Synthetic oligonucleotide
gcugcucgaccgaugaagg

SEQ ID NO: 1266150 - RNA, 19 nt, Artificial Sequence
  Description of Artificial Sequence: Synthetic oligonucleotide
uugaggcaauacugcauuu

SEQ ID NO: 1266151 - RNA, 19 nt, Artificial Sequence
  Description of Artificial Sequence: Synthetic oligonucleotide
gcaaucaauucuugaggca

SEQ ID NO: 1266152 - RNA, 19 nt, Artificial Sequence
  Description of Artificial Sequence: Synthetic oligonucleotide
ccgguucacauuaaauuuc

SEQ ID NO: 1266153 - RNA, 19 nt, Artificial Sequence
  Description of Artificial Sequence: Synthetic oligonucleotide
accuuaagguaugccccuc

SEQ ID NO: 1266154 - RNA, 19 nt, Artificial Sequence
  Description of Artificial Sequence: Synthetic oligonucleotide
aucaagucgauagcagaua

SEQ ID NO: 1266155 - RNA, 19 nt, Artificial Sequence
  Description of Artificial Sequence: Synthetic oligonucleotide
guaggaacuguuaccuuaa

SEQ ID NO: 1266156 - RNA, 19 nt, Artificial Sequence
  Description of Artificial Sequence: Synthetic oligonucleotide
cuggcaguuguaccccaac

SEQ ID NO: 1266157 - RNA, 19 nt, Artificial Sequence
  Description of Artificial Sequence: Synthetic oligonucleotide
agacccuucaccagauuau

SEQ ID NO: 1266158 - RNA, 19 nt, Artificial Sequence
  Description of Artificial Sequence: Synthetic oligonucleotide
auuucacuuuggcccgaga

SEQ ID NO: 1266159 - RNA, 19 nt, Artificial Sequence
  Description of Artificial Sequence: Synthetic oligonucleotide
gcucaucuuggagcgaagg

SEQ ID NO: 1266160 - RNA, 19 nt, Artificial Sequence
  Description of Artificial Sequence: Synthetic oligonucleotide
cuugaggcaauacugcauu

SEQ ID NO: 1266161 - RNA, 19 nt, Artificial Sequence
  Description of Artificial Sequence: Synthetic oligonucleotide
gagaugcggccuuuguucu

SEQ ID NO: 1266162 - RNA, 19 nt, Artificial Sequence
  Description of Artificial Sequence: Synthetic oligonucleotide
acacggcauuggcauuuuc

SEQ ID NO: 1266163 - RNA, 19 nt, Artificial Sequence
  Description of Artificial Sequence: Synthetic oligonucleotide
ucgaaggaucucagcuauc

SEQ ID NO: 1266164 - RNA, 19 nt, Artificial Sequence
  Description of Artificial Sequence: Synthetic oligonucleotide
aucaauucuugaggcaaua

SEQ ID NO: 1266165 - RNA, 19 nt, Artificial Sequence
  Description of Artificial Sequence: Synthetic oligonucleotide
cuuuggcccgagaauagcu

SEQ ID NO: 1266166 - RNA, 19 nt, Artificial Sequence
  Description of Artificial Sequence: Synthetic oligonucleotide
auacacuugugggcaccuc

SEQ ID NO: 1266167 - RNA, 19 nt, Artificial Sequence
  Description of Artificial Sequence: Synthetic oligonucleotide
cuacuuggcucaucuugga

SEQ ID NO: 1266168 - RNA, 19 nt, Artificial Sequence
  Description of Artificial Sequence: Synthetic oligonucleotide
ggaauuugccaagguuaag

SEQ ID NO: 1266169 - RNA, 19 nt, Artificial Sequence
  Description of Artificial Sequence: Synthetic oligonucleotide
ucccugcgguuuccaauga

SEQ ID NO: 1266170 - RNA, 19 nt, Artificial Sequence
  Description of Artificial Sequence: Synthetic oligonucleotide
gaagugcagacgaacuccu

SEQ ID NO: 1266171 - RNA, 19 nt, Artificial Sequence
  Description of Artificial Sequence: Synthetic oligonucleotide
aggcgaccagacgaacgac

SEQ ID NO: 1266172 - RNA, 19 nt, Artificial Sequence
  Description of Artificial Sequence: Synthetic oligonucleotide
caugggguaggaacuguua

SEQ ID NO: 1266173 - RNA, 19 nt, Artificial Sequence
  Description of Artificial Sequence: Synthetic oligonucleotide
agacacggcauuggcauuu

SEQ ID NO: 1266174 - RNA, 19 nt, Artificial Sequence
  Description of Artificial Sequence: Synthetic oligonucleotide
uuagacccuucaccagauu

SEQ ID NO: 1266175 - RNA, 19 nt, Artificial Sequence
  Description of Artificial Sequence: Synthetic oligonucleotide
cuuguauugcagcaccaau

SEQ ID NO: 1266176 - RNA, 19 nt, Artificial Sequence
  Description of Artificial Sequence: Synthetic oligonucleotide
ccuuaagguaugccccucc

SEQ ID NO: 1266177 - RNA, 19 nt, Artificial Sequence
  Description of Artificial Sequence: Synthetic oligonucleotide
agacggagguccucaugaa

SEQ ID NO: 1266178 - RNA, 19 nt, Artificial Sequence
  Description of Artificial Sequence: Synthetic oligonucleotide
guacggcagguaugucucc

SEQ ID NO: 1266179 - RNA, 19 nt, Artificial Sequence
  Description of Artificial Sequence: Synthetic oligonucleotide
cgcaugcucgaacagcacg

SEQ ID NO: 1266180 - RNA, 19 nt, Artificial Sequence
  Description of Artificial Sequence: Synthetic oligonucleotide
gacauccagguucuuccgu

SEQ ID NO: 1266181 - RNA, 19 nt, Artificial Sequence
  Description of Artificial Sequence: Synthetic oligonucleotide
cagaaggcgaccagacgaa

SEQ ID NO: 1266182 - RNA, 19 nt, Artificial Sequence
  Description of Artificial Sequence: Synthetic oligonucleotide
acccuagcugggcuuuaca

SEQ ID NO: 1266183 - RNA, 19 nt, Artificial Sequence
  Description of Artificial Sequence: Synthetic oligonucleotide
gcgacaguagguggcauug

SEQ ID NO: 1266184 - RNA, 19 nt, Artificial Sequence
  Description of Artificial Sequence: Synthetic oligonucleotide
cucgaaggaucucagcuau

SEQ ID NO: 1266185 - RNA, 19 nt, Artificial Sequence
  Description of Artificial Sequence: Synthetic oligonucleotide
gggguuuaucaugggguag

SEQ ID NO: 1266186 - RNA, 19 nt, Artificial Sequence
  Description of Artificial Sequence: Synthetic oligonucleotide
gguuaaguacacacuccuc

SEQ ID NO: 1266187 - RNA, 19 nt, Artificial Sequence
  Description of Artificial Sequence: Synthetic oligonucleotide
uguguaggcucuggcgaua

SEQ ID NO: 1266188 - RNA, 19 nt, Artificial Sequence
  Description of Artificial Sequence: Synthetic oligonucleotide
caacaccuucagacacggc

SEQ ID NO: 1266189 - RNA, 19 nt, Artificial Sequence
  Description of Artificial Sequence: Synthetic oligonucleotide
cucagcuaucacaccucca

SEQ ID NO: 1266190 - RNA, 19 nt, Artificial Sequence
  Description of Artificial Sequence: Synthetic oligonucleotide
uccacccgguucacauuaa

SEQ ID NO: 1266191 - RNA, 19 nt, Artificial Sequence
  Description of Artificial Sequence: Synthetic oligonucleotide
gaauggaaaaugaguccau

SEQ ID NO: 1266192 - RNA, 19 nt, Artificial Sequence
  Description of Artificial Sequence: Synthetic oligonucleotide
uugguccagaaggcuuaug

SEQ ID NO: 1266193 - RNA, 19 nt, Artificial Sequence
  Description of Artificial Sequence: Synthetic oligonucleotide
ccagacgaacgacauugug

SEQ ID NO: 1266194 - RNA, 19 nt, Artificial Sequence
  Description of Artificial Sequence: Synthetic oligonucleotide
ggaggaccgagaggcaucc

SEQ ID NO: 1266195 - RNA, 19 nt, Artificial Sequence
  Description of Artificial Sequence: Synthetic oligonucleotide
caauuaaggcugacaggcu

SEQ ID NO: 1266196 - RNA, 19 nt, Artificial Sequence
  Description of Artificial Sequence: Synthetic oligonucleotide
cacgcagacaggucuguua

SEQ ID NO: 1266197 - RNA, 19 nt, Artificial Sequence
  Description of Artificial Sequence: Synthetic oligonucleotide
uuaguacggcagguauguc

SEQ ID NO: 1266198 - RNA, 19 nt, Artificial Sequence
  Description of Artificial Sequence: Synthetic oligonucleotide
gacgaacgacauuguggaa

SEQ ID NO: 1266199 - RNA, 19 nt, Artificial Sequence
  Description of Artificial Sequence: Synthetic oligonucleotide
gcuaucacaccuccagucu

SEQ ID NO: 1266200 - RNA, 19 nt, Artificial Sequence
  Description of Artificial Sequence: Synthetic oligonucleotide
ccgcuuccccaauuaaggc

SEQ ID NO: 1266201 - RNA, 19 nt, Artificial Sequence
  Description of Artificial Sequence: Synthetic oligonucleotide
guguaggcucuggcgauac

SEQ ID NO: 1266202 - RNA, 19 nt, Artificial Sequence
  Description of Artificial Sequence: Synthetic oligonucleotide
cacgcauugagaagguauu

SEQ ID NO: 1266203 - RNA, 19 nt, Artificial Sequence
  Description of Artificial Sequence: Synthetic oligonucleotide
cugugucccaacccuagcu

SEQ ID NO: 1266204 - RNA, 19 nt, Artificial Sequence
  Description of Artificial Sequence: Synthetic oligonucleotide
gggguaggaacuguuaccu

SEQ ID NO: 1266205 - RNA, 19 nt, Artificial Sequence
  Description of Artificial Sequence: Synthetic oligonucleotide
gagcgaagguaagugugua

SEQ ID NO: 1266206 - RNA, 19 nt, Artificial Sequence
  Description of Artificial Sequence: Synthetic oligonucleotide
acaggucuguuagacccuu

SEQ ID NO: 1266207 - RNA, 19 nt, Artificial Sequence
  Description of Artificial Sequence: Synthetic oligonucleotide
ucgggagaugcggccuuug

SEQ ID NO: 1266208 - RNA, 19 nt, Artificial Sequence
  Description of Artificial Sequence: Synthetic oligonucleotide
gcgcaaugagacgugcacc

SEQ ID NO: 1266209 - RNA, 19 nt, Artificial Sequence
  Description of Artificial Sequence: Synthetic oligonucleotide
ucgaccgaugaagguggaa

SEQ ID NO: 1266210 - RNA, 19 nt, Artificial Sequence
  Description of Artificial Sequence: Synthetic oligonucleotide
aggcaauacugcauuuguu

SEQ ID NO: 1266211 - RNA, 19 nt, Artificial Sequence
  Description of Artificial Sequence: Synthetic oligonucleotide
gugaggcugccagcaugcg

SEQ ID NO: 1266212 - RNA, 19 nt, Artificial Sequence
  Description of Artificial Sequence: Synthetic oligonucleotide
uuccccaauuaaggcugac

SEQ ID NO: 1266213 - RNA, 19 nt, Artificial Sequence
  Description of Artificial Sequence: Synthetic oligonucleotide
ggggcuacuuggcucaucu

SEQ ID NO: 1266214 - RNA, 19 nt, Artificial Sequence
  Description of Artificial Sequence: Synthetic oligonucleotide
agcagacggagguccucau

SEQ ID NO: 1266215 - RNA, 19 nt, Artificial Sequence
  Description of Artificial Sequence: Synthetic oligonucleotide
cuaccgcuuccccaauuaa

SEQ ID NO: 1266216 - RNA, 19 nt, Artificial Sequence
  Description of Artificial Sequence: Synthetic oligonucleotide
accagacgaacgacauugu

SEQ ID NO: 1266217 - RNA, 19 nt, Artificial Sequence
  Description of Artificial Sequence: Synthetic oligonucleotide
gguuuaucaugggguagga

SEQ ID NO: 1266218 - RNA, 19 nt, Artificial Sequence
  Description of Artificial Sequence: Synthetic oligonucleotide
augcgcaaugagacgugca

SEQ ID NO: 1266219 - RNA, 19 nt, Artificial Sequence
  Description of Artificial Sequence: Synthetic oligonucleotide
cugcgguuuccaaugaauu

SEQ ID NO: 1266220 - RNA, 19 nt, Artificial Sequence
  Description of Artificial Sequence: Synthetic oligonucleotide
gacgaacuccucgaaggau

SEQ ID NO: 1266221 - RNA, 19 nt, Artificial Sequence
  Description of Artificial Sequence: Synthetic oligonucleotide
cccugacacgcauugagaa

SEQ ID NO: 1266222 - RNA, 19 nt, Artificial Sequence
  Description of Artificial Sequence: Synthetic oligonucleotide
gagaagguauugauaucuu

SEQ ID NO: 1266223 - RNA, 19 nt, Artificial Sequence
  Description of Artificial Sequence: Synthetic oligonucleotide
cgguucacauuaaauuuca

SEQ ID NO: 1266224 - RNA, 19 nt, Artificial Sequence
  Description of Artificial Sequence: Synthetic oligonucleotide
gcuuuacacgcagacaggu

SEQ ID NO: 1266225 - RNA, 19 nt, Artificial Sequence
  Description of Artificial Sequence: Synthetic oligonucleotide
gaacuccucgaaggaucuc

SEQ ID NO: 1266226 - RNA, 19 nt, Artificial Sequence
  Description of Artificial Sequence: Synthetic oligonucleotide
ccaacagcgcguagccgac

SEQ ID NO: 1266227 - RNA, 19 nt, Artificial Sequence
  Description of Artificial Sequence: Synthetic oligonucleotide
gaugcggccuuuguucuuu

SEQ ID NO: 1266228 - RNA, 19 nt, Artificial Sequence
  Description of Artificial Sequence: Synthetic oligonucleotide
caacagcgcguagccgacc

SEQ ID NO: 1266229 - RNA, 19 nt, Artificial Sequence
  Description of Artificial Sequence: Synthetic oligonucleotide
cgcguagccgaccgcaugc

SEQ ID NO: 1266230 - RNA, 19 nt, Artificial Sequence
  Description of Artificial Sequence: Synthetic oligonucleotide
accuaccgcuuccccaauu

SEQ ID NO: 1266231 - RNA, 19 nt, Artificial Sequence
  Description of Artificial Sequence: Synthetic oligonucleotide
cuucuggagugcuacuguu

SEQ ID NO: 1266232 - RNA, 19 nt, Artificial Sequence
  Description of Artificial Sequence: Synthetic oligonucleotide
guguguaggcucuggcgau

SEQ ID NO: 1266233 - RNA, 19 nt, Artificial Sequence
  Description of Artificial Sequence: Synthetic oligonucleotide
cacccgguucacauuaaau

SEQ ID NO: 1266234 - RNA, 19 nt, Artificial Sequence
  Description of Artificial Sequence: Synthetic oligonucleotide
gacacgcauugagaaggua

SEQ ID NO: 1266235 - RNA, 19 nt, Artificial Sequence
  Description of Artificial Sequence: Synthetic oligonucleotide
ccauccauagucaacucuu

SEQ ID NO: 1266236 - RNA, 19 nt, Artificial Sequence
  Description of Artificial Sequence: Synthetic oligonucleotide
gagccaggcgacaguaggu

SEQ ID NO: 1266237 - RNA, 19 nt, Artificial Sequence
  Description of Artificial Sequence: Synthetic oligonucleotide
cccgguucacauuaaauuu

SEQ ID NO: 1266238 - RNA, 19 nt, Artificial Sequence
  Description of Artificial Sequence: Synthetic oligonucleotide
guauugcagcaccaaucuu

SEQ ID NO: 1266239 - RNA, 19 nt, Artificial Sequence
  Description of Artificial Sequence: Synthetic oligonucleotide
cagcgcguagccgaccgca

SEQ ID NO: 1266240 - RNA, 19 nt, Artificial Sequence
  Description of Artificial Sequence: Synthetic oligonucleotide
agacgugcaccuaccgcuu

SEQ ID NO: 1266241 - RNA, 19 nt, Artificial Sequence
  Description of Artificial Sequence: Synthetic oligonucleotide
ggcucuggcgauacucuga

SEQ ID NO: 1266242 - RNA, 19 nt, Artificial Sequence
  Description of Artificial Sequence: Synthetic oligonucleotide
ggagcgaagguaagugugu

SEQ ID NO: 1266243 - RNA, 19 nt, Artificial Sequence
  Description of Artificial Sequence: Synthetic oligonucleotide
ggccaacagcgcguagccg

SEQ ID NO: 1266244 - RNA, 19 nt, Artificial Sequence
  Description of Artificial Sequence: Synthetic oligonucleotide
gguucuuccgugggaucuc

SEQ ID NO: 1266245 - RNA, 19 nt, Artificial Sequence
  Description of Artificial Sequence: Synthetic oligonucleotide
gcaugcucgaacagcacgu

SEQ ID NO: 1266246 - RNA, 19 nt, Artificial Sequence
  Description of Artificial Sequence: Synthetic oligonucleotide
ggaccgagaggcauccaaa

SEQ ID NO: 1266247 - RNA, 19 nt, Artificial Sequence
  Description of Artificial Sequence: Synthetic oligonucleotide
cucgaccgaugaaggugga

SEQ ID NO: 1266248 - RNA, 19 nt, Artificial Sequence
  Description of Artificial Sequence: Synthetic oligonucleotide
ggcucaucuuggagcgaag

SEQ ID NO: 1266249 - RNA, 19 nt, Artificial Sequence
  Description of Artificial Sequence: Synthetic oligonucleotide
gcccgagaauagcuguguc

SEQ ID NO: 1266250 - RNA, 19 nt, Artificial Sequence
  Description of Artificial Sequence: Synthetic oligonucleotide
cgcauugagaagguauuga

SEQ ID NO: 1266251 - RNA, 19 nt, Artificial Sequence
  Description of Artificial Sequence: Synthetic oligonucleotide
gccccuugucuucagggcu

SEQ ID NO: 1266252 - RNA, 19 nt, Artificial Sequence
  Description of Artificial Sequence: Synthetic oligonucleotide
ccgaugaagguggaaugga

SEQ ID NO: 1266253 - RNA, 19 nt, Artificial Sequence
  Description of Artificial Sequence: Synthetic oligonucleotide
gcgcguagccgaccgcaug

SEQ ID NO: 1266254 - RNA, 19 nt, Artificial Sequence
  Description of Artificial Sequence: Synthetic oligonucleotide
cugcucgaccgaugaaggu

SEQ ID NO: 1266255 - RNA, 19 nt, Artificial Sequence
  Description of Artificial Sequence: Synthetic oligonucleotide
acacucuucuggagugcua

SEQ ID NO: 1266256 - RNA, 19 nt, Artificial Sequence
  Description of Artificial Sequence: Synthetic oligonucleotide
ccucacacucuucuggagu

SEQ ID NO: 1266257 - RNA, 19 nt, Artificial Sequence
  Description of Artificial Sequence: Synthetic oligonucleotide
cagccgcuccucaacuugu

SEQ ID NO: 1266258 - RNA, 19 nt, Artificial Sequence
  Description of Artificial Sequence: Synthetic oligonucleotide
ccgugggaucucuccaguc

SEQ ID NO: 1266259 - RNA, 19 nt, Artificial Sequence
  Description of Artificial Sequence: Synthetic oligonucleotide
ccugcgguuuccaaugaau

SEQ ID NO: 1266260 - RNA, 19 nt, Artificial Sequence
  Description of Artificial Sequence: Synthetic oligonucleotide
gguaugccccucccacaaa

SEQ ID NO: 1266261 - RNA, 19 nt, Artificial Sequence
  Description of Artificial Sequence: Synthetic oligonucleotide
cagauauguccaugcccau

SEQ ID NO: 1266262 - RNA, 19 nt, Artificial Sequence
  Description of Artificial Sequence: Synthetic oligonucleotide
gguacccauaccacucccu

SEQ ID NO: 1266263 - RNA, 19 nt, Artificial Sequence
  Description of Artificial Sequence: Synthetic oligonucleotide
aggcgacaguagguggcau

SEQ ID NO: 1266264 - RNA, 19 nt, Artificial Sequence
  Description of Artificial Sequence: Synthetic oligonucleotide
caaggcaaccugggaugaa

SEQ ID NO: 1266265 - RNA, 19 nt, Artificial Sequence
  Description of Artificial Sequence: Synthetic oligonucleotide
gaggaccgagaggcaucca

SEQ ID NO: 1266266 - RNA, 19 nt, Artificial Sequence
  Description of Artificial Sequence: Synthetic oligonucleotide
cgagaauagcuguguccca

SEQ ID NO: 1266267 - RNA, 19 nt, Artificial Sequence
  Description of Artificial Sequence: Synthetic oligonucleotide
cgugggaucucuccagucu

SEQ ID NO: 1266268 - RNA, 19 nt, Artificial Sequence
  Description of Artificial Sequence: Synthetic oligonucleotide
ggcuuauggacuggaugau

SEQ ID NO: 1266269 - RNA, 19 nt, Artificial Sequence
  Description of Artificial Sequence: Synthetic oligonucleotide
ggcgacaguagguggcauu

SEQ ID NO: 1266270 - RNA, 19 nt, Artificial Sequence
  Description of Artificial Sequence: Synthetic oligonucleotide
gcgaccagacgaacgacau

SEQ ID NO: 1266271 - RNA, 19 nt, Artificial Sequence
  Description of Artificial Sequence: Synthetic oligonucleotide
ggcccgagaauagcugugu

SEQ ID NO: 1266272 - RNA, 19 nt, Artificial Sequence
  Description of Artificial Sequence: Synthetic oligonucleotide
cgaacgacauuguggaauu

SEQ ID NO: 1266273 - RNA, 19 nt, Artificial Sequence
  Description of Artificial Sequence: Synthetic oligonucleotide
gacacggcauuggcauuuu

SEQ ID NO: 1266274 - RNA, 19 nt, Artificial Sequence
  Description of Artificial Sequence: Synthetic oligonucleotide
cguagccgaccgcaugcuc

SEQ ID NO: 1266275 - RNA, 19 nt, Artificial Sequence
  Description of Artificial Sequence: Synthetic oligonucleotide
ggguaggaacuguuaccuu

SEQ ID NO: 1266276 - RNA, 19 nt, Artificial Sequence
  Description of Artificial Sequence: Synthetic oligonucleotide
cagcacaaccauggcgccu

SEQ ID NO: 1266277 - RNA, 19 nt, Artificial Sequence
  Description of Artificial Sequence: Synthetic oligonucleotide
ccacccgguucacauuaaa

SEQ ID NO: 1266278 - RNA, 19 nt, Artificial Sequence
  Description of Artificial Sequence: Synthetic oligonucleotide
cuguggaugcuggguacuu

SEQ ID NO: 1266279 - RNA, 19 nt, Artificial Sequence
  Description of Artificial Sequence: Synthetic oligonucleotide
cgaccgaugaagguggaau

SEQ ID NO: 1266280 - RNA, 19 nt, Artificial Sequence
  Description of Artificial Sequence: Synthetic oligonucleotide
gggaucucuccagucucau

SEQ ID NO: 1266281 - RNA, 19 nt, Artificial Sequence
  Description of Artificial Sequence: Synthetic oligonucleotide
agccgaccgcaugcucgaa

SEQ ID NO: 1266282 - RNA, 19 nt, Artificial Sequence
  Description of Artificial Sequence: Synthetic oligonucleotide
cccugcgguuuccaaugaa

SEQ ID NO: 1266283 - RNA, 19 nt, Artificial Sequence
  Description of Artificial Sequence: Synthetic oligonucleotide
cgauagcagauauguccau

SEQ ID NO: 1266284 - RNA, 19 nt, Artificial Sequence
  Description of Artificial Sequence: Synthetic oligonucleotide
caccuaccgcuuccccaau

SEQ ID NO: 1266285 - RNA, 19 nt, Artificial Sequence
  Description of Artificial Sequence: Synthetic oligonucleotide
cccaacccuagcugggcuu

SEQ ID NO: 1266286 - RNA, 19 nt, Artificial Sequence
  Description of Artificial Sequence: Synthetic oligonucleotide
gcguagccgaccgcaugcu

SEQ ID NO: 1266287 - RNA, 19 nt, Artificial Sequence
  Description of Artificial Sequence: Synthetic oligonucleotide
ccaacccuagcugggcuuu

SEQ ID NO: 1266288 - RNA, 19 nt, Artificial Sequence
  Description of Artificial Sequence: Synthetic oligonucleotide
ccccucccacaaagcaugu

SEQ ID NO: 1266289 - RNA, 19 nt, Artificial Sequence
  Description of Artificial Sequence: Synthetic oligonucleotide
cgacaguagguggcauugu

SEQ ID NO: 1266290 - RNA, 19 nt, Artificial Sequence
  Description of Artificial Sequence: Synthetic oligonucleotide
cgaccagacgaacgacauu

SEQ ID NO: 1266291 - RNA, 19 nt, Artificial Sequence
  Description of Artificial Sequence: Synthetic oligonucleotide
aaauuaacugaucagacca

SEQ ID NO: 1266292 - RNA, 19 nt, Artificial Sequence
  Description of Artificial Sequence: Synthetic oligonucleotide
uuugugacaauuaauuuag

SEQ ID NO: 1266293 - RNA, 19 nt, Artificial Sequence
  Description of Artificial Sequence: Synthetic oligonucleotide
uuuagguuaguguaggugg

SEQ ID NO: 1266294 - RNA, 19 nt, Artificial Sequence
  Description of Artificial Sequence: Synthetic oligonucleotide
aaacccaucagugaaaugg

SEQ ID NO: 1266295 - RNA, 19 nt, Artificial Sequence
  Description of Artificial Sequence: Synthetic oligonucleotide
uguaugaaagcacacauug

SEQ ID NO: 1266296 - RNA, 19 nt, Artificial Sequence
  Description of Artificial Sequence: Synthetic oligonucleotide
aacagaauaaacuucccug

SEQ ID NO: 1266297 - RNA, 19 nt, Artificial Sequence
  Description of Artificial Sequence: Synthetic oligonucleotide
uaugaaagcacacauugcc

SEQ ID NO: 1266298 - RNA, 19 nt, Artificial Sequence
  Description of Artificial Sequence: Synthetic oligonucleotide
aauuaauuuaguauucuuc

SEQ ID NO: 1266299 - RNA, 19 nt, Artificial Sequence
  Description of Artificial Sequence: Synthetic oligonucleotide
gaauauuuauuuaaaaccc

SEQ ID NO: 1266300 - RNA, 19 nt, Artificial Sequence
  Description of Artificial Sequence: Synthetic oligonucleotide
aaaagcagcaccuuuguga

SEQ ID NO: 1266301 - RNA, 19 nt, Artificial Sequence
  Description of Artificial Sequence: Synthetic oligonucleotide
uaauuuaguauucuucucc

SEQ ID NO: 1266302 - RNA, 19 nt, Artificial Sequence
  Description of Artificial Sequence: Synthetic oligonucleotide
auuuauuuaaaacccauca

SEQ ID NO: 1266303 - RNA, 19 nt, Artificial Sequence
  Description of Artificial Sequence: Synthetic oligonucleotide
aaagcagcaccuuugugac

SEQ ID NO: 1266304 - RNA, 19 nt, Artificial Sequence
  Description of Artificial Sequence: Synthetic oligonucleotide
auuaauuuaguauucuucu

SEQ ID NO: 1266305 - RNA, 19 nt, Artificial Sequence
  Description of Artificial Sequence: Synthetic oligonucleotide
uuuaaaacccaucagugaa

SEQ ID NO: 1266306 - RNA, 19 nt, Artificial Sequence
  Description of Artificial Sequence: Synthetic oligonucleotide
ucauucauauuucauaagu

SEQ ID NO: 1266307 - RNA, 19 nt, Artificial Sequence
  Description of Artificial Sequence: Synthetic oligonucleotide
uguuggaacagaauaaacu

SEQ ID NO: 1266308 - RNA, 19 nt, Artificial Sequence
  Description of Artificial Sequence: Synthetic oligonucleotide
uggaacagaauaaacuucc

SEQ ID NO: 1266309 - RNA, 19 nt, Artificial Sequence
  Description of Artificial Sequence: Synthetic oligonucleotide
cacaauuugaccuaucaac

SEQ ID NO: 1266310 - RNA, 19 nt, Artificial Sequence
  Description of Artificial Sequence: Synthetic oligonucleotide
acaauuugaccuaucaacc

SEQ ID NO: 1266311 - RNA, 19 nt, Artificial Sequence
  Description of Artificial Sequence: Synthetic oligonucleotide
aauuuaguauucuucuccu

SEQ ID NO: 1266312 - RNA, 19 nt, Artificial Sequence
  Description of Artificial Sequence: Synthetic oligonucleotide
uguaaaagcagcaccuuug

SEQ ID NO: 1266313 - RNA, 19 nt, Artificial Sequence
  Description of Artificial Sequence: Synthetic oligonucleotide
ugacaagucauucauauuu

SEQ ID NO: 1266314 - RNA, 19 nt, Artificial Sequence
  Description of Artificial Sequence: Synthetic oligonucleotide
uaaggauggaguuguaggg

SEQ ID NO: 1266315 - RNA, 19 nt, Artificial Sequence
  Description of Artificial Sequence: Synthetic oligonucleotide
aacugaucagaccacagcu

SEQ ID NO: 1266316 - RNA, 19 nt, Artificial Sequence
  Description of Artificial Sequence: Synthetic oligonucleotide
ucuuuguuggaacagaaua

SEQ ID NO: 1266317 - RNA, 19 nt, Artificial Sequence
  Description of Artificial Sequence: Synthetic oligonucleotide
guaaggauggaguuguagg

SEQ ID NO: 1266318 - RNA, 19 nt, Artificial Sequence
  Description of Artificial Sequence: Synthetic oligonucleotide
gaccuaucaaccuauuuag

SEQ ID NO: 1266319 - RNA, 19 nt, Artificial Sequence
  Description of Artificial Sequence: Synthetic oligonucleotide
uacaaauuaacugaucaga

SEQ ID NO: 1266320 - RNA, 19 nt, Artificial Sequence
  Description of Artificial Sequence: Synthetic oligonucleotide
ugacaauuaauuuaguauu

SEQ ID NO: 1266321 - RNA, 19 nt, Artificial Sequence
  Description of Artificial Sequence: Synthetic oligonucleotide
ucuaugacaagucauucau

SEQ ID NO: 1266322 - RNA, 19 nt, Artificial Sequence
  Description of Artificial Sequence: Synthetic oligonucleotide
uaugacaagucauucauau

SEQ ID NO: 1266323 - RNA, 19 nt, Artificial Sequence
  Description of Artificial Sequence: Synthetic oligonucleotide
augguugcugcuuugcggc

SEQ ID NO: 1266324 - RNA, 19 nt, Artificial Sequence
  Description of Artificial Sequence: Synthetic oligonucleotide
ucauaagucaguaacugua

SEQ ID NO: 1266325 - RNA, 19 nt, Artificial Sequence
  Description of Artificial Sequence: Synthetic oligonucleotide
aaauggacggcuugggucu

SEQ ID NO: 1266326 - RNA, 19 nt, Artificial Sequence
  Description of Artificial Sequence: Synthetic oligonucleotide
auacaaauuaacugaucag

SEQ ID NO: 1266327 - RNA, 19 nt, Artificial Sequence
  Description of Artificial Sequence: Synthetic oligonucleotide
acaaauuaacugaucagac

SEQ ID NO: 1266328 - RNA, 19 nt, Artificial Sequence
  Description of Artificial Sequence: Synthetic oligonucleotide
uaagucaguaacuguauga

SEQ ID NO: 1266329 - RNA, 19 nt, Artificial Sequence
  Description of Artificial Sequence: Synthetic oligonucleotide
ugaccuaucaaccuauuua

SEQ ID NO: 1266330 - RNA, 19 nt, Artificial Sequence
  Description of Artificial Sequence: Synthetic oligonucleotide
caaauuaacugaucagacc

SEQ ID NO: 1266331 - RNA, 19 nt, Artificial Sequence
  Description of Artificial Sequence: Synthetic oligonucleotide
aagucauucauauuucaua

SEQ ID NO: 1266332 - RNA, 19 nt, Artificial Sequence
  Description of Artificial Sequence: Synthetic oligonucleotide
aaccuauuuagguuagugu

SEQ ID NO: 1266333 - RNA, 19 nt, Artificial Sequence
  Description of Artificial Sequence: Synthetic oligonucleotide
uauuuauuuaaaacccauc

SEQ ID NO: 1266334 - RNA, 19 nt, Artificial Sequence
  Description of Artificial Sequence: Synthetic oligonucleotide
auuuaaaacccaucaguga

SEQ ID NO: 1266335 - RNA, 19 nt, Artificial Sequence
  Description of Artificial Sequence: Synthetic oligonucleotide
agucauucauauuucauaa

SEQ ID NO: 1266336 - RNA, 19 nt, Artificial Sequence
  Description of Artificial Sequence: Synthetic oligonucleotide
uuaacugaucagaccacag

SEQ ID NO: 1266337 - RNA, 19 nt, Artificial Sequence
  Description of Artificial Sequence: Synthetic oligonucleotide
aauuaacugaucagaccac

SEQ ID NO: 1266338 - RNA, 19 nt, Artificial Sequence
  Description of Artificial Sequence: Synthetic oligonucleotide
acagaauaaacuucccugu

SEQ ID NO: 1266339 - RNA, 19 nt, Artificial Sequence
  Description of Artificial Sequence: Synthetic oligonucleotide
ugaaagcacacauugccac

SEQ ID NO: 1266340 - RNA, 19 nt, Artificial Sequence
  Description of Artificial Sequence: Synthetic oligonucleotide
aauuugaccuaucaaccua

SEQ ID NO: 1266341 - RNA, 19 nt, Artificial Sequence
  Description of Artificial Sequence: Synthetic oligonucleotide
uggaagacacaauuugacc

SEQ ID NO: 1266342 - RNA, 19 nt, Artificial Sequence
  Description of Artificial Sequence: Synthetic oligonucleotide
aauaaacuucccuguaaaa

SEQ ID NO: 1266343 - RNA, 19 nt, Artificial Sequence
  Description of Artificial Sequence: Synthetic oligonucleotide
aguaacuguaugaaagcac

SEQ ID NO: 1266344 - RNA, 19 nt, Artificial Sequence
  Description of Artificial Sequence: Synthetic oligonucleotide
gggaauauuuauuuaaaac

SEQ ID NO: 1266345 - RNA, 19 nt, Artificial Sequence
  Description of Artificial Sequence: Synthetic oligonucleotide
ugugacaauuaauuuagua

SEQ ID NO: 1266346 - RNA, 19 nt, Artificial Sequence
  Description of Artificial Sequence: Synthetic oligonucleotide
gaaauggacggcuuggguc

SEQ ID NO: 1266347 - RNA, 19 nt, Artificial Sequence
  Description of Artificial Sequence: Synthetic oligonucleotide
acuguaugaaagcacacau

SEQ ID NO: 1266348 - RNA, 19 nt, Artificial Sequence
  Description of Artificial Sequence: Synthetic oligonucleotide
uaacugaucagaccacagc

SEQ ID NO: 1266349 - RNA, 19 nt, Artificial Sequence
  Description of Artificial Sequence: Synthetic oligonucleotide
cauucauauuucauaaguc

SEQ ID NO: 1266350 - RNA, 19 nt, Artificial Sequence
  Description of Artificial Sequence: Synthetic oligonucleotide
ugccacauacaaauuaacu

SEQ ID NO: 1266351 - RNA, 19 nt, Artificial Sequence
  Description of Artificial Sequence: Synthetic oligonucleotide
uaucaaccuauuuagguua

SEQ ID NO: 1266352 - RNA, 19 nt, Artificial Sequence
  Description of Artificial Sequence: Synthetic oligonucleotide
agcacacauugccacauac

SEQ ID NO: 1266353 - RNA, 19 nt, Artificial Sequence
  Description of Artificial Sequence: Synthetic oligonucleotide
uuaauuuaguauucuucuc

SEQ ID NO: 1266354 - RNA, 19 nt, Artificial Sequence
  Description of Artificial Sequence: Synthetic oligonucleotide
cuauuuagguuaguguagg

SEQ ID NO: 1266355 - RNA, 19 nt, Artificial Sequence
  Description of Artificial Sequence: Synthetic oligonucleotide
accuauuuagguuagugua

SEQ ID NO: 1266356 - RNA, 19 nt, Artificial Sequence
  Description of Artificial Sequence: Synthetic oligonucleotide
uuggaacagaauaaacuuc

SEQ ID NO: 1266357 - RNA, 19 nt, Artificial Sequence
  Description of Artificial Sequence: Synthetic oligonucleotide
auggaagacacaauuugac

SEQ ID NO: 1266358 - RNA, 19 nt, Artificial Sequence
  Description of Artificial Sequence: Synthetic oligonucleotide
gacacaauuugaccuauca

SEQ ID NO: 1266359 - RNA, 19 nt, Artificial Sequence
  Description of Artificial Sequence: Synthetic oligonucleotide
ucccuguaaaagcagcacc

SEQ ID NO: 1266360 - RNA, 19 nt, Artificial Sequence
  Description of Artificial Sequence: Synthetic oligonucleotide
gccacauacaaauuaacug

SEQ ID NO: 1266361 - RNA, 19 nt, Artificial Sequence
  Description of Artificial Sequence: Synthetic oligonucleotide
gaauaaacuucccuguaaa

SEQ ID NO: 1266362 - RNA, 19 nt, Artificial Sequence
  Description of Artificial Sequence: Synthetic oligonucleotide
caugguugcugcuuugcgg

SEQ ID NO: 1266363 - RNA, 19 nt, Artificial Sequence
  Description of Artificial Sequence: Synthetic oligonucleotide
acucacgcaugguugcugc

SEQ ID NO: 1266364 - RNA, 19 nt, Artificial Sequence
  Description of Artificial Sequence: Synthetic oligonucleotide
agugaaauggacggcuugg

SEQ ID NO: 1266365 - RNA, 19 nt, Artificial Sequence
  Description of Artificial Sequence: Synthetic oligonucleotide
uucauaagucaguaacugu

SEQ ID NO: 1266366 - RNA, 19 nt, Artificial Sequence
  Description of Artificial Sequence: Synthetic oligonucleotide
uuaaaacccaucagugaaa

SEQ ID NO: 1266367 - RNA, 19 nt, Artificial Sequence
  Description of Artificial Sequence: Synthetic oligonucleotide
uuucuuuguuggaacagaa

SEQ ID NO: 1266368 - RNA, 19 nt, Artificial Sequence
  Description of Artificial Sequence: Synthetic oligonucleotide
aacuguaugaaagcacaca

SEQ ID NO: 1266369 - RNA, 19 nt, Artificial Sequence
  Description of Artificial Sequence: Synthetic oligonucleotide
cuuugugacaauuaauuua

SEQ ID NO: 1266370 - RNA, 19 nt, Artificial Sequence
  Description of Artificial Sequence: Synthetic oligonucleotide
cagaccacagcuuucuuug

SEQ ID NO: 1266371 - RNA, 19 nt, Artificial Sequence
  Description of Artificial Sequence: Synthetic oligonucleotide
auuuagguuaguguaggug

SEQ ID NO: 1266372 - RNA, 19 nt, Artificial Sequence
  Description of Artificial Sequence: Synthetic oligonucleotide
auaagucaguaacuguaug

SEQ ID NO: 1266373 - RNA, 19 nt, Artificial Sequence
  Description of Artificial Sequence: Synthetic oligonucleotide
gacaauuaauuuaguauuc

SEQ ID NO: 1266374 - RNA, 19 nt, Artificial Sequence
  Description of Artificial Sequence: Synthetic oligonucleotide
ccaucagugaaauggacgg

SEQ ID NO: 1266375 - RNA, 19 nt, Artificial Sequence
  Description of Artificial Sequence: Synthetic oligonucleotide
agaauaaacuucccuguaa

SEQ ID NO: 1266376 - RNA, 19 nt, Artificial Sequence
  Description of Artificial Sequence: Synthetic oligonucleotide
aagucaguaacuguaugaa

SEQ ID NO: 1266377 - RNA, 19 nt, Artificial Sequence
  Description of Artificial Sequence: Synthetic oligonucleotide
guaacuguaugaaagcaca

SEQ ID NO: 1266378 - RNA, 19 nt, Artificial Sequence
  Description of Artificial Sequence: Synthetic oligonucleotide
aaacuucccuguaaaagca

SEQ ID NO: 1266379 - RNA, 19 nt, Artificial Sequence
  Description of Artificial Sequence: Synthetic oligonucleotide
ugggugguaaggauggagu

SEQ ID NO: 1266380 - RNA, 19 nt, Artificial Sequence
  Description of Artificial Sequence: Synthetic oligonucleotide
acaauuaauuuaguauucu

SEQ ID NO: 1266381 - RNA, 19 nt, Artificial Sequence
  Description of Artificial Sequence: Synthetic oligonucleotide
acaagucauucauauuuca

SEQ ID NO: 1266382 - RNA, 19 nt, Artificial Sequence
  Description of Artificial Sequence: Synthetic oligonucleotide
uugggucuaugacaaguca

SEQ ID NO: 1266383 - RNA, 19 nt, Artificial Sequence
  Description of Artificial Sequence: Synthetic oligonucleotide
ugaaauggacggcuugggu

SEQ ID NO: 1266384 - RNA, 19 nt, Artificial Sequence
  Description of Artificial Sequence: Synthetic oligonucleotide
auuucauaagucaguaacu

SEQ ID NO: 1266385 - RNA, 19 nt, Artificial Sequence
  Description of Artificial Sequence: Synthetic oligonucleotide
uuugcggcugcccggaggu

SEQ ID NO: 1266386 - RNA, 19 nt, Artificial Sequence
  Description of Artificial Sequence: Synthetic oligonucleotide
uaacuguaugaaagcacac

SEQ ID NO: 1266387 - RNA, 19 nt, Artificial Sequence
  Description of Artificial Sequence: Synthetic oligonucleotide
aaaacccaucagugaaaug

SEQ ID NO: 1266388 - RNA, 19 nt, Artificial Sequence
  Description of Artificial Sequence: Synthetic oligonucleotide
acggcuugggucuaugaca

SEQ ID NO: 1266389 - RNA, 19 nt, Artificial Sequence
  Description of Artificial Sequence: Synthetic oligonucleotide
guuggaacagaauaaacuu

SEQ ID NO: 1266390 - RNA, 19 nt, Artificial Sequence
  Description of Artificial Sequence: Synthetic oligonucleotide
ugggucuaugacaagucau

SEQ ID NO: 1266391 - RNA, 19 nt, Artificial Sequence
  Description of Artificial Sequence: Synthetic oligonucleotide
cacauugccacauacaaau

SEQ ID NO: 1266392 - RNA, 19 nt, Artificial Sequence
  Description of Artificial Sequence: Synthetic oligonucleotide
uugccacauacaaauuaac

SEQ ID NO: 1266393 - RNA, 19 nt, Artificial Sequence
  Description of Artificial Sequence: Synthetic oligonucleotide
uaaaacccaucagugaaau

SEQ ID NO: 1266394 - RNA, 19 nt, Artificial Sequence
  Description of Artificial Sequence: Synthetic oligonucleotide
gaagacacaauuugaccua

SEQ ID NO: 1266395 - RNA, 19 nt, Artificial Sequence
  Description of Artificial Sequence: Synthetic oligonucleotide
aaagcacacauugccacau

SEQ ID NO: 1266396 - RNA, 19 nt, Artificial Sequence
  Description of Artificial Sequence: Synthetic oligonucleotide
aucagugaaauggacggcu

SEQ ID NO: 1266397 - RNA, 19 nt, Artificial Sequence
  Description of Artificial Sequence: Synthetic oligonucleotide
accuuugugacaauuaauu

SEQ ID NO: 1266398 - RNA, 19 nt, Artificial Sequence
  Description of Artificial Sequence: Synthetic oligonucleotide
acauacaaauuaacugauc

SEQ ID NO: 1266399 - RNA, 19 nt, Artificial Sequence
  Description of Artificial Sequence: Synthetic oligonucleotide
uauuuagguuaguguaggu

SEQ ID NO: 1266400 - RNA, 19 nt, Artificial Sequence
  Description of Artificial Sequence: Synthetic oligonucleotide
cuugggucuaugacaaguc

SEQ ID NO: 1266401 - RNA, 19 nt, Artificial Sequence
  Description of Artificial Sequence: Synthetic oligonucleotide
ccuauuuagguuaguguag

SEQ ID NO: 1266402 - RNA, 19 nt, Artificial Sequence
  Description of Artificial Sequence: Synthetic oligonucleotide
acacaauuugaccuaucaa

SEQ ID NO: 1266403 - RNA, 19 nt, Artificial Sequence
  Description of Artificial Sequence: Synthetic oligonucleotide
cacacauugccacauacaa

SEQ ID NO: 1266404 - RNA, 19 nt, Artificial Sequence
  Description of Artificial Sequence: Synthetic oligonucleotide
caaccuauuuagguuagug

SEQ ID NO: 1266405 - RNA, 19 nt, Artificial Sequence
  Description of Artificial Sequence: Synthetic oligonucleotide
uucuuuguuggaacagaau

SEQ ID NO: 1266406 - RNA, 19 nt, Artificial Sequence
  Description of Artificial Sequence: Synthetic oligonucleotide
gaaagcacacauugccaca

SEQ ID NO: 1266407 - RNA, 19 nt, Artificial Sequence
  Description of Artificial Sequence: Synthetic oligonucleotide
gaacagaauaaacuucccu

SEQ ID NO: 1266408 - RNA, 19 nt, Artificial Sequence
  Description of Artificial Sequence: Synthetic oligonucleotide
auauuucauaagucaguaa

SEQ ID NO: 1266409 - RNA, 19 nt, Artificial Sequence
  Description of Artificial Sequence: Synthetic oligonucleotide
gacaagucauucauauuuc

SEQ ID NO: 1266410 - RNA, 19 nt, Artificial Sequence
  Description of Artificial Sequence: Synthetic oligonucleotide
gacggcuugggucuaugac

SEQ ID NO: 1266411 - RNA, 19 nt, Artificial Sequence
  Description of Artificial Sequence: Synthetic oligonucleotide
gucuaugacaagucauuca

SEQ ID NO: 1266412 - RNA, 19 nt, Artificial Sequence
  Description of Artificial Sequence: Synthetic oligonucleotide
auugccacauacaaauuaa

SEQ ID NO: 1266413 - RNA, 19 nt, Artificial Sequence
  Description of Artificial Sequence: Synthetic oligonucleotide
agcuuucuuuguuggaaca

SEQ ID NO: 1266414 - RNA, 19 nt, Artificial Sequence
  Description of Artificial Sequence: Synthetic oligonucleotide
guaugaaagcacacauugc

SEQ ID NO: 1266415 - RNA, 19 nt, Artificial Sequence
  Description of Artificial Sequence: Synthetic oligonucleotide
guuggcggaggcgaggagg

SEQ ID NO: 1266416 - RNA, 19 nt, Artificial Sequence
  Description of Artificial Sequence: Synthetic oligonucleotide
aacuucccuguaaaagcag

SEQ ID NO: 1266417 - RNA, 19 nt, Artificial Sequence
  Description of Artificial Sequence: Synthetic oligonucleotide
agucaguaacuguaugaaa

SEQ ID NO: 1266418 - RNA, 19 nt, Artificial Sequence
  Description of Artificial Sequence: Synthetic oligonucleotide
uuggcggaggcgaggagga

SEQ ID NO: 1266419 - RNA, 19 nt, Artificial Sequence
  Description of Artificial Sequence: Synthetic oligonucleotide
uugaccuaucaaccuauuu

SEQ ID NO: 1266420 - RNA, 19 nt, Artificial Sequence
  Description of Artificial Sequence: Synthetic oligonucleotide
acagcuuucuuuguuggaa

SEQ ID NO: 1266421 - RNA, 19 nt, Artificial Sequence
  Description of Artificial Sequence: Synthetic oligonucleotide
aacccaucagugaaaugga

SEQ ID NO: 1266422 - RNA, 19 nt, Artificial Sequence
  Description of Artificial Sequence: Synthetic oligonucleotide
cauauuucauaagucagua

SEQ ID NO: 1266423 - RNA, 19 nt, Artificial Sequence
  Description of Artificial Sequence: Synthetic oligonucleotide
agcagcaccuuugugacaa

SEQ ID NO: 1266424 - RNA, 19 nt, Artificial Sequence
  Description of Artificial Sequence: Synthetic oligonucleotide
ugaucagaccacagcuuuc

SEQ ID NO: 1266425 - RNA, 19 nt, Artificial Sequence
  Description of Artificial Sequence: Synthetic oligonucleotide
uugugacaauuaauuuagu

SEQ ID NO: 1266426 - RNA, 19 nt, Artificial Sequence
  Description of Artificial Sequence: Synthetic oligonucleotide
gugaaauggacggcuuggg

SEQ ID NO: 1266427 - RNA, 19 nt, Artificial Sequence
  Description of Artificial Sequence: Synthetic oligonucleotide
aagacacaauuugaccuau

SEQ ID NO: 1266428 - RNA, 19 nt, Artificial Sequence
  Description of Artificial Sequence: Synthetic oligonucleotide
cauugccacauacaaauua

SEQ ID NO: 1266429 - RNA, 19 nt, Artificial Sequence
  Description of Artificial Sequence: Synthetic oligonucleotide
augaaagcacacauugcca

SEQ ID NO: 1266430 - RNA, 19 nt, Artificial Sequence
  Description of Artificial Sequence: Synthetic oligonucleotide
gcugcuuugcggcugcccg

SEQ ID NO: 1266431 - RNA, 19 nt, Artificial Sequence
  Description of Artificial Sequence: Synthetic oligonucleotide
cagcuuucuuuguuggaac

SEQ ID NO: 1266432 - RNA, 19 nt, Artificial Sequence
  Description of Artificial Sequence: Synthetic oligonucleotide
accuaucaaccuauuuagg

SEQ ID NO: 1266433 - RNA, 19 nt, Artificial Sequence
  Description of Artificial Sequence: Synthetic oligonucleotide
uucccuguaaaagcagcac

SEQ ID NO: 1266434 - RNA, 19 nt, Artificial Sequence
  Description of Artificial Sequence: Synthetic oligonucleotide
auuuaguauucuucuccuu

SEQ ID NO: 1266435 - RNA, 19 nt, Artificial Sequence
  Description of Artificial Sequence: Synthetic oligonucleotide
ucagugaaauggacggcuu

SEQ ID NO: 1266436 - RNA, 19 nt, Artificial Sequence
  Description of Artificial Sequence: Synthetic oligonucleotide
gguaaggauggaguuguag

SEQ ID NO: 1266437 - RNA, 19 nt, Artificial Sequence
  Description of Artificial Sequence: Synthetic oligonucleotide
auuugaccuaucaaccuau

SEQ ID NO: 1266438 - RNA, 19 nt, Artificial Sequence
  Description of Artificial Sequence: Synthetic oligonucleotide
cuucccuguaaaagcagca

SEQ ID NO: 1266439 - RNA, 19 nt, Artificial Sequence
  Description of Artificial Sequence: Synthetic oligonucleotide
cuuugcggcugcccggagg

SEQ ID NO: 1266440 - RNA, 19 nt, Artificial Sequence
  Description of Artificial Sequence: Synthetic oligonucleotide
aucaaccuauuuagguuag

SEQ ID NO: 1266441 - RNA, 19 nt, Artificial Sequence
  Description of Artificial Sequence: Synthetic oligonucleotide
cuuucuuuguuggaacaga

SEQ ID NO: 1266442 - RNA, 19 nt, Artificial Sequence
  Description of Artificial Sequence: Synthetic oligonucleotide
cagugaaauggacggcuug

SEQ ID NO: 1266443 - RNA, 19 nt, Artificial Sequence
  Description of Artificial Sequence: Synthetic oligonucleotide
guaaaagcagcaccuuugu

SEQ ID NO: 1266444 - RNA, 19 nt, Artificial Sequence
  Description of Artificial Sequence: Synthetic oligonucleotide
guugcugcuuugcggcugc

SEQ ID NO: 1266445 - RNA, 19 nt, Artificial Sequence
  Description of Artificial Sequence: Synthetic oligonucleotide
uuugaccuaucaaccuauu

SEQ ID NO: 1266446 - RNA, 19 nt, Artificial Sequence
  Description of Artificial Sequence: Synthetic oligonucleotide
cuaucaaccuauuuagguu

SEQ ID NO: 1266447 - RNA, 19 nt, Artificial Sequence
  Description of Artificial Sequence: Synthetic oligonucleotide
caauuugaccuaucaaccu

SEQ ID NO: 1266448 - RNA, 19 nt, Artificial Sequence
  Description of Artificial Sequence: Synthetic oligonucleotide
caucagugaaauggacggc

SEQ ID NO: 1266449 - RNA, 19 nt, Artificial Sequence
  Description of Artificial Sequence: Synthetic oligonucleotide
augacaagucauucauauu

SEQ ID NO: 1266450 - RNA, 19 nt, Artificial Sequence
  Description of Artificial Sequence: Synthetic oligonucleotide
caguaacuguaugaaagca

SEQ ID NO: 1266451 - RNA, 19 nt, Artificial Sequence
  Description of Artificial Sequence: Synthetic oligonucleotide
acccaucagugaaauggac

SEQ ID NO: 1266452 - RNA, 19 nt, Artificial Sequence
  Description of Artificial Sequence: Synthetic oligonucleotide
gcaugguugcugcuuugcg

SEQ ID NO: 1266453 - RNA, 19 nt, Artificial Sequence
  Description of Artificial Sequence: Synthetic oligonucleotide
cugcuuugcggcugcccgg

SEQ ID NO: 1266454 - RNA, 19 nt, Artificial Sequence
  Description of Artificial Sequence: Synthetic oligonucleotide
gcuuucuuuguuggaacag

SEQ ID NO: 1266455 - RNA, 19 nt, Artificial Sequence
  Description of Artificial Sequence: Synthetic oligonucleotide
aagcagcaccuuugugaca

SEQ ID NO: 1266456 - RNA, 19 nt, Artificial Sequence
  Description of Artificial Sequence: Synthetic oligonucleotide
cauaagucaguaacuguau

SEQ ID NO: 1266457 - RNA, 19 nt, Artificial Sequence
  Description of Artificial Sequence: Synthetic oligonucleotide
ggaacagaauaaacuuccc

SEQ ID NO: 1266458 - RNA, 19 nt, Artificial Sequence
  Description of Artificial Sequence: Synthetic oligonucleotide
gagguuggcggaggcgagg

SEQ ID NO: 1266459 - RNA, 19 nt, Artificial Sequence
  Description of Artificial Sequence: Synthetic oligonucleotide
ucaaccuauuuagguuagu

SEQ ID NO: 1266460 - RNA, 19 nt, Artificial Sequence
  Description of Artificial Sequence: Synthetic oligonucleotide
ugcggcugcccggagguug

SEQ ID NO: 1266461 - RNA, 19 nt, Artificial Sequence
  Description of Artificial Sequence: Synthetic oligonucleotide
ccuaucaaccuauuuaggu

SEQ ID NO: 1266462 - RNA, 19 nt, Artificial Sequence
  Description of Artificial Sequence: Synthetic oligonucleotide
gcugcccggagguuggcgg

SEQ ID NO: 1266463 - RNA, 19 nt, Artificial Sequence
  Description of Artificial Sequence: Synthetic oligonucleotide
caagucauucauauuucau

SEQ ID NO: 1266464 - RNA, 19 nt, Artificial Sequence
  Description of Artificial Sequence: Synthetic oligonucleotide
cagaauaaacuucccugua

SEQ ID NO: 1266465 - RNA, 19 nt, Artificial Sequence
  Description of Artificial Sequence: Synthetic oligonucleotide
agacacaauuugaccuauc

SEQ ID NO: 1266466 - RNA, 19 nt, Artificial Sequence
  Description of Artificial Sequence: Synthetic oligonucleotide
cuaugacaagucauucaua

SEQ ID NO: 1266467 - RNA, 19 nt, Artificial Sequence
  Description of Artificial Sequence: Synthetic oligonucleotide
ugcuuugcggcugcccgga

SEQ ID NO: 1266468 - RNA, 19 nt, Artificial Sequence
  Description of Artificial Sequence: Synthetic oligonucleotide
aagcacacauugccacaua

SEQ ID NO: 1266469 - RNA, 19 nt, Artificial Sequence
  Description of Artificial Sequence: Synthetic oligonucleotide
ggucuaugacaagucauuc

SEQ ID NO: 1266470 - RNA, 19 nt, Artificial Sequence
  Description of Artificial Sequence: Synthetic oligonucleotide
acacauugccacauacaaa

SEQ ID NO: 1266471 - RNA, 19 nt, Artificial Sequence
  Description of Artificial Sequence: Synthetic oligonucleotide
agcaccuuugugacaauua

SEQ ID NO: 1266472 - RNA, 19 nt, Artificial Sequence
  Description of Artificial Sequence: Synthetic oligonucleotide
gcaccuuugugacaauuaa

SEQ ID NO: 1266473 - RNA, 19 nt, Artificial Sequence
  Description of Artificial Sequence: Synthetic oligonucleotide
ugguugcugcuuugcggcu

SEQ ID NO: 1266474 - RNA, 19 nt, Artificial Sequence
  Description of Artificial Sequence: Synthetic oligonucleotide
ugcugcuuugcggcugccc

SEQ ID NO: 1266475 - RNA, 19 nt, Artificial Sequence
  Description of Artificial Sequence: Synthetic oligonucleotide
ucacgcaugguugcugcuu

SEQ ID NO: 1266476 - RNA, 19 nt, Artificial Sequence
  Description of Artificial Sequence: Synthetic oligonucleotide
ggcggaggcgaggaggagg

SEQ ID NO: 1266477 - RNA, 19 nt, Artificial Sequence
  Description of Artificial Sequence: Synthetic oligonucleotide
acgcaugguugcugcuuug

SEQ ID NO: 1266478 - RNA, 19 nt, Artificial Sequence
  Description of Artificial Sequence: Synthetic oligonucleotide
cugaucagaccacagcuuu

SEQ ID NO: 1266479 - RNA, 19 nt, Artificial Sequence
  Description of Artificial Sequence: Synthetic oligonucleotide
agguuggcggaggcgagga

SEQ ID NO: 1266480 - RNA, 19 nt, Artificial Sequence
  Description of Artificial Sequence: Synthetic oligonucleotide
ugguaaggauggaguugua

SEQ ID NO: 1266481 - RNA, 19 nt, Artificial Sequence
  Description of Artificial Sequence: Synthetic oligonucleotide
aucagaccacagcuuucuu

SEQ ID NO: 1266482 - RNA, 19 nt, Artificial Sequence
  Description of Artificial Sequence: Synthetic oligonucleotide
uggacggcuugggucuaug

SEQ ID NO: 1266483 - RNA, 19 nt, Artificial Sequence
  Description of Artificial Sequence: Synthetic oligonucleotide
cuguaugaaagcacacauu

SEQ ID NO: 1266484 - RNA, 19 nt, Artificial Sequence
  Description of Artificial Sequence: Synthetic oligonucleotide
ugcccggagguuggcggag

SEQ ID NO: 1266485 - RNA, 19 nt, Artificial Sequence
  Description of Artificial Sequence: Synthetic oligonucleotide
cuguaaaagcagcaccuuu

SEQ ID NO: 1266486 - RNA, 19 nt, Artificial Sequence
  Description of Artificial Sequence: Synthetic oligonucleotide
caccuuugugacaauuaau

SEQ ID NO: 1266487 - RNA, 19 nt, Artificial Sequence
  Description of Artificial Sequence: Synthetic oligonucleotide
gaccacagcuuucuuuguu

SEQ ID NO: 1266488 - RNA, 19 nt, Artificial Sequence
  Description of Artificial Sequence: Synthetic oligonucleotide
aauggacggcuugggucua

SEQ ID NO: 1266489 - RNA, 19 nt, Artificial Sequence
  Description of Artificial Sequence: Synthetic oligonucleotide
gguugcugcuuugcggcug

SEQ ID NO: 1266490 - RNA, 19 nt, Artificial Sequence
  Description of Artificial Sequence: Synthetic oligonucleotide
acauugccacauacaaauu

SEQ ID NO: 1266491 - RNA, 19 nt, Artificial Sequence
  Description of Artificial Sequence: Synthetic oligonucleotide
gcuugggucuaugacaagu

SEQ ID NO: 1266492 - RNA, 19 nt, Artificial Sequence
  Description of Artificial Sequence: Synthetic oligonucleotide
cccuguaaaagcagcaccu

SEQ ID NO: 1266493 - RNA, 19 nt, Artificial Sequence
  Description of Artificial Sequence: Synthetic oligonucleotide
ggagguuggcggaggcgag

SEQ ID NO: 1266494 - RNA, 19 nt, Artificial Sequence
  Description of Artificial Sequence: Synthetic oligonucleotide
ggcuugggucuaugacaag

SEQ ID NO: 1266495 - RNA, 19 nt, Artificial Sequence
  Description of Artificial Sequence: Synthetic oligonucleotide
gguuggcggaggcgaggag

SEQ ID NO: 1266496 - RNA, 19 nt, Artificial Sequence
  Description of Artificial Sequence: Synthetic oligonucleotide
ccuuugugacaauuaauuu

SEQ ID NO: 1266497 - RNA, 19 nt, Artificial Sequence
  Description of Artificial Sequence: Synthetic oligonucleotide
uggcggaggcgaggaggag

SEQ ID NO: 1266498 - RNA, 19 nt, Artificial Sequence
  Description of Artificial Sequence: Synthetic oligonucleotide
ggacggcuugggucuauga

SEQ ID NO: 1266499 - RNA, 19 nt, Artificial Sequence
  Description of Artificial Sequence: Synthetic oligonucleotide
cugcccggagguuggcgga

SEQ ID NO: 1266500 - RNA, 19 nt, Artificial Sequence
  Description of Artificial Sequence: Synthetic oligonucleotide
uugcugcuuugcggcugcc

SEQ ID NO: 1266501 - RNA, 19 nt, Artificial Sequence
  Description of Artificial Sequence: Synthetic oligonucleotide
gggucuaugacaagucauu

SEQ ID NO: 1266502 - RNA, 19 nt, Artificial Sequence
  Description of Artificial Sequence: Synthetic oligonucleotide
gcggcugcccggagguugg

SEQ ID NO: 1266503 - RNA, 19 nt, Artificial Sequence
  Description of Artificial Sequence: Synthetic oligonucleotide
ggcugcccggagguuggcg

SEQ ID NO: 1266504 - RNA, 19 nt, Artificial Sequence
  Description of Artificial Sequence: Synthetic oligonucleotide
cgcaugguugcugcuuugc

SEQ ID NO: 1266505 - RNA, 19 nt, Artificial Sequence
  Description of Artificial Sequence: Synthetic oligonucleotide
cggcuugggucuaugacaa

SEQ ID NO: 1266506 - RNA, 19 nt, Artificial Sequence
  Description of Artificial Sequence: Synthetic oligonucleotide
cacgcaugguugcugcuuu

SEQ ID NO: 1266507 - RNA, 19 nt, Artificial Sequence
  Description of Artificial Sequence: Synthetic oligonucleotide
cucacgcaugguugcugcu

SEQ ID NO: 1266508 - RNA, 19 nt, Artificial Sequence
  Description of Artificial Sequence: Synthetic oligonucleotide
cccggagguuggcggaggc

SEQ ID NO: 1266509 - RNA, 19 nt, Artificial Sequence
  Description of Artificial Sequence: Synthetic oligonucleotide
ccggagguuggcggaggcg

SEQ ID NO: 1266510 - RNA, 19 nt, Artificial Sequence
  Description of Artificial Sequence: Synthetic oligonucleotide
gcuuugcggcugcccggag

SEQ ID NO: 1266511 - RNA, 19 nt, Artificial Sequence
  Description of Artificial Sequence: Synthetic oligonucleotide
auggacggcuugggucuau

SEQ ID NO: 1266512 - RNA, 19 nt, Artificial Sequence
  Description of Artificial Sequence: Synthetic oligonucleotide
cggagguuggcggaggcga

SEQ ID NO: 1266513 - RNA, 19 nt, Artificial Sequence
  Description of Artificial Sequence: Synthetic oligonucleotide
gcccggagguuggcggagg

SEQ ID NO: 1266514 - RNA, 19 nt, Artificial Sequence
  Description of Artificial Sequence: Synthetic oligonucleotide
cagcaccuuugugacaauu

SEQ ID NO: 1266515 - RNA, 19 nt, Artificial Sequence
  Description of Artificial Sequence: Synthetic oligonucleotide
uugcggcugcccggagguu

SEQ ID NO: 1266516 - RNA, 19 nt, Artificial Sequence
  Description of Artificial Sequence: Synthetic oligonucleotide
ccuguaaaagcagcaccuu

SEQ ID NO: 1266517 - RNA, 19 nt, Artificial Sequence
  Description of Artificial Sequence: Synthetic oligonucleotide
gcagcaccuuugugacaau

SEQ ID NO: 1266518 - RNA, 19 nt, Artificial Sequence
  Description of Artificial Sequence: Synthetic oligonucleotide
cggcugcccggagguuggc

SEQ ID NO: 1266519 - RNA, 19 nt, Artificial Sequence
  Description of Artificial Sequence: Synthetic oligonucleotide
aauaacacaaaacaguccu

SEQ ID NO: 1266520 - RNA, 19 nt, Artificial Sequence
  Description of Artificial Sequence: Synthetic oligonucleotide
uuuauuucaaucaacuggc

SEQ ID NO: 1266521 - RNA, 19 nt, Artificial Sequence
  Description of Artificial Sequence: Synthetic oligonucleotide
aauguuaugccuguugagc

SEQ ID NO: 1266522 - RNA, 19 nt, Artificial Sequence
  Description of Artificial Sequence: Synthetic oligonucleotide
aaaccacagauauggaugc

SEQ ID NO: 1266523 - RNA, 19 nt, Artificial Sequence
  Description of Artificial Sequence: Synthetic oligonucleotide
uuuaaucugaucaauuuga

SEQ ID NO: 1266524 - RNA, 19 nt, Artificial Sequence
  Description of Artificial Sequence: Synthetic oligonucleotide
uuaguguaauuucugaugc

SEQ ID NO: 1266525 - RNA, 19 nt, Artificial Sequence
  Description of Artificial Sequence: Synthetic oligonucleotide
uuaaauacgcauuaaaaua

SEQ ID NO: 1266526 - RNA, 19 nt, Artificial Sequence
  Description of Artificial Sequence: Synthetic oligonucleotide
aaccacuuagaaaauaggc

SEQ ID NO: 1266527 - RNA, 19 nt, Artificial Sequence
  Description of Artificial Sequence: Synthetic oligonucleotide
uuggaagaugugaagagcg

SEQ ID NO: 1266528 - RNA, 19 nt, Artificial Sequence
  Description of Artificial Sequence: Synthetic oligonucleotide
aauuggaagaugugaagag

SEQ ID NO: 1266529 - RNA, 19 nt, Artificial Sequence
  Description of Artificial Sequence: Synthetic oligonucleotide
ugaacaugcagcuuuaugu

SEQ ID NO: 1266530 - RNA, 19 nt, Artificial Sequence
  Description of Artificial Sequence: Synthetic oligonucleotide
uuuuaaucugaucaauuug

SEQ ID NO: 1266531 - RNA, 19 nt, Artificial Sequence
  Description of Artificial Sequence: Synthetic oligonucleotide
acuuguaaucuccaaacac

SEQ ID NO: 1266532 - RNA, 19 nt, Artificial Sequence
  Description of Artificial Sequence: Synthetic oligonucleotide
aucaauuugagucaagaca

SEQ ID NO: 1266533 - RNA, 19 nt, Artificial Sequence
  Description of Artificial Sequence: Synthetic oligonucleotide
guaaucuccaaacacaaug

SEQ ID NO: 1266534 - RNA, 19 nt, Artificial Sequence
  Description of Artificial Sequence: Synthetic oligonucleotide
ucgaucagcacaaacacca

SEQ ID NO: 1266535 - RNA, 19 nt, Artificial Sequence
  Description of Artificial Sequence: Synthetic oligonucleotide
uuaucgucaaucaaguccu

SEQ ID NO: 1266536 - RNA, 19 nt, Artificial Sequence
  Description of Artificial Sequence: Synthetic oligonucleotide
aaauuuucacugguggggc

SEQ ID NO: 1266537 - RNA, 19 nt, Artificial Sequence
  Description of Artificial Sequence: Synthetic oligonucleotide
uuccuuaucgucaaucaag

SEQ ID NO: 1266538 - RNA, 19 nt, Artificial Sequence
  Description of Artificial Sequence: Synthetic oligonucleotide
gauauagagugcaugagcc

SEQ ID NO: 1266539 - RNA, 19 nt, Artificial Sequence
  Description of Artificial Sequence: Synthetic oligonucleotide
ucaucgaucagcacaaaca

SEQ ID NO: 1266540 - RNA, 19 nt, Artificial Sequence
  Description of Artificial Sequence: Synthetic oligonucleotide
caaucaacuggccauaccg

SEQ ID NO: 1266541 - RNA, 19 nt, Artificial Sequence
  Description of Artificial Sequence: Synthetic oligonucleotide
uacgcauuaaaauaacaca

SEQ ID NO: 1266542 - RNA, 19 nt, Artificial Sequence
  Description of Artificial Sequence: Synthetic oligonucleotide
aggauauaugaucuggcac

SEQ ID NO: 1266543 - RNA, 19 nt, Artificial Sequence
  Description of Artificial Sequence: Synthetic oligonucleotide
agaaucaccacauuggaau

SEQ ID NO: 1266544 - RNA, 19 nt, Artificial Sequence
  Description of Artificial Sequence: Synthetic oligonucleotide
uauaugaucuggcacuuca

SEQ ID NO: 1266545 - RNA, 19 nt, Artificial Sequence
  Description of Artificial Sequence: Synthetic oligonucleotide
ucauucaauuggaagaugu

SEQ ID NO: 1266546 - RNA, 19 nt, Artificial Sequence
  Description of Artificial Sequence: Synthetic oligonucleotide
aauguauugcuugauguca

SEQ ID NO: 1266547 - RNA, 19 nt, Artificial Sequence
  Description of Artificial Sequence: Synthetic oligonucleotide
agauucugaagauggcugc

SEQ ID NO: 1266548 - RNA, 19 nt, Artificial Sequence
  Description of Artificial Sequence: Synthetic oligonucleotide
uuaaucugaucaauuugag

SEQ ID NO: 1266549 - RNA, 19 nt, Artificial Sequence
  Description of Artificial Sequence: Synthetic oligonucleotide
caaaccacagauauggaug

SEQ ID NO: 1266550 - RNA, 19 nt, Artificial Sequence
  Description of Artificial Sequence: Synthetic oligonucleotide
uguggugagaaucaccaca

SEQ ID NO: 1266551 - RNA, 19 nt, Artificial Sequence
  Description of Artificial Sequence: Synthetic oligonucleotide
auacgcauuaaaauaacac

SEQ ID NO: 1266552 - RNA, 19 nt, Artificial Sequence
  Description of Artificial Sequence: Synthetic oligonucleotide
aaugccuuuuaaucugauc

SEQ ID NO: 1266553 - RNA, 19 nt, Artificial Sequence
  Description of Artificial Sequence: Synthetic oligonucleotide
agagcgauagugcaugcac

SEQ ID NO: 1266554 - RNA, 19 nt, Artificial Sequence
  Description of Artificial Sequence: Synthetic oligonucleotide
aaaguuugcccacaccucu

SEQ ID NO: 1266555 - RNA, 19 nt, Artificial Sequence
  Description of Artificial Sequence: Synthetic oligonucleotide
caguuugugaacaugcagc

SEQ ID NO: 1266556 - RNA, 19 nt, Artificial Sequence
  Description of Artificial Sequence: Synthetic oligonucleotide
aguguaauuucugaugcac

SEQ ID NO: 1266557 - RNA, 19 nt, Artificial Sequence
  Description of Artificial Sequence: Synthetic oligonucleotide
acguuauuuucaaugaagc

SEQ ID NO: 1266558 - RNA, 19 nt, Artificial Sequence
  Description of Artificial Sequence: Synthetic oligonucleotide
gucaagacagcauugacca

SEQ ID NO: 1266559 - RNA, 19 nt, Artificial Sequence
  Description of Artificial Sequence: Synthetic oligonucleotide
ucaauuggaagaugugaag

SEQ ID NO: 1266560 - RNA, 19 nt, Artificial Sequence
  Description of Artificial Sequence: Synthetic oligonucleotide
ucaaugaagccaaucauuu

SEQ ID NO: 1266561 - RNA, 19 nt, Artificial Sequence
  Description of Artificial Sequence: Synthetic oligonucleotide
uauagagugcaugagccag

SEQ ID NO: 1266562 - RNA, 19 nt, Artificial Sequence
  Description of Artificial Sequence: Synthetic oligonucleotide
agaccuauaugguuuagug

SEQ ID NO: 1266563 - RNA, 19 nt, Artificial Sequence
  Description of Artificial Sequence: Synthetic oligonucleotide
uuugagucaagacagcauu

SEQ ID NO: 1266564 - RNA, 19 nt, Artificial Sequence
  Description of Artificial Sequence: Synthetic oligonucleotide
cacguuauuuucaaugaag

SEQ ID NO: 1266565 - RNA, 19 nt, Artificial Sequence
  Description of Artificial Sequence: Synthetic oligonucleotide
ugcuaaugccuuacaaagg

SEQ ID NO: 1266566 - RNA, 19 nt, Artificial Sequence
  Description of Artificial Sequence: Synthetic oligonucleotide
gcuaaugccuuacaaaggg

SEQ ID NO: 1266567 - RNA, 19 nt, Artificial Sequence
  Description of Artificial Sequence: Synthetic oligonucleotide
acuugcugcaauuauauuu

SEQ ID NO: 1266568 - RNA, 19 nt, Artificial Sequence
  Description of Artificial Sequence: Synthetic oligonucleotide
accuauaugguuuagugua

SEQ ID NO: 1266569 - RNA, 19 nt, Artificial Sequence
  Description of Artificial Sequence: Synthetic oligonucleotide
aacacaauguuaugccugu

SEQ ID NO: 1266570 - RNA, 19 nt, Artificial Sequence
  Description of Artificial Sequence: Synthetic oligonucleotide
ugugaagagcgauagugca

SEQ ID NO: 1266571 - RNA, 19 nt, Artificial Sequence
  Description of Artificial Sequence: Synthetic oligonucleotide
cacggauagcaucugaugg

SEQ ID NO: 1266572 - RNA, 19 nt, Artificial Sequence
  Description of Artificial Sequence: Synthetic oligonucleotide
auccuaguuaccaacuugc

SEQ ID NO: 1266573 - RNA, 19 nt, Artificial Sequence
  Description of Artificial Sequence: Synthetic oligonucleotide
ugacgaggauauaugaucu

SEQ ID NO: 1266574 - RNA, 19 nt, Artificial Sequence
  Description of Artificial Sequence: Synthetic oligonucleotide
aaauuucacucaaaaggag

SEQ ID NO: 1266575 - RNA, 19 nt, Artificial Sequence
  Description of Artificial Sequence: Synthetic oligonucleotide
aauuugagucaagacagca

SEQ ID NO: 1266576 - RNA, 19 nt, Artificial Sequence
  Description of Artificial Sequence: Synthetic oligonucleotide
agguagauucugaagaugg

SEQ ID NO: 1266577 - RNA, 19 nt, Artificial Sequence
  Description of Artificial Sequence: Synthetic oligonucleotide
cuuguaaucuccaaacaca

SEQ ID NO: 1266578 - RNA, 19 nt, Artificial Sequence
  Description of Artificial Sequence: Synthetic oligonucleotide
ucgauggugacgcuaggag

SEQ ID NO: 1266579 - RNA, 19 nt, Artificial Sequence
  Description of Artificial Sequence: Synthetic oligonucleotide
uguccauugcaaaccacag

SEQ ID NO: 1266580 - RNA, 19 nt, Artificial Sequence
  Description of Artificial Sequence: Synthetic oligonucleotide
ugugcuaaugccuuacaaa

SEQ ID NO: 1266581 - RNA, 19 nt, Artificial Sequence
  Description of Artificial Sequence: Synthetic oligonucleotide
acaauguuaugccuguuga

SEQ ID NO: 1266582 - RNA, 19 nt, Artificial Sequence
  Description of Artificial Sequence: Synthetic oligonucleotide
ucaucacguagucaaggag

SEQ ID NO: 1266583 - RNA, 19 nt, Artificial Sequence
  Description of Artificial Sequence: Synthetic oligonucleotide
acgaggcugucccaaagcc

SEQ ID NO: 1266584 - RNA, 19 nt, Artificial Sequence
  Description of Artificial Sequence: Synthetic oligonucleotide
gauauggaugccuggaauc

SEQ ID NO: 1266585 - RNA, 19 nt, Artificial Sequence
  Description of Artificial Sequence: Synthetic oligonucleotide
aguuugugaacaugcagcu

SEQ ID NO: 1266586 - RNA, 19 nt, Artificial Sequence
  Description of Artificial Sequence: Synthetic oligonucleotide
uccuuaucgucaaucaagu

SEQ ID NO: 1266587 - RNA, 19 nt, Artificial Sequence
  Description of Artificial Sequence: Synthetic oligonucleotide
aauuucugaugcaccacgg

SEQ ID NO: 1266588 - RNA, 19 nt, Artificial Sequence
  Description of Artificial Sequence: Synthetic oligonucleotide
gauguggugagaaucacca

SEQ ID NO: 1266589 - RNA, 19 nt, Artificial Sequence
  Description of Artificial Sequence: Synthetic oligonucleotide
ugaucaauuugagucaaga

SEQ ID NO: 1266590 - RNA, 19 nt, Artificial Sequence
  Description of Artificial Sequence: Synthetic oligonucleotide
cuugucugagaacagcaag

SEQ ID NO: 1266591 - RNA, 19 nt, Artificial Sequence
  Description of Artificial Sequence: Synthetic oligonucleotide
ugaaagcuucauuuucucc

SEQ ID NO: 1266592 - RNA, 19 nt, Artificial Sequence
  Description of Artificial Sequence: Synthetic oligonucleotide
cugacgaggauauaugauc

SEQ ID NO: 1266593 - RNA, 19 nt, Artificial Sequence
  Description of Artificial Sequence: Synthetic oligonucleotide
uccacgucauacacgaggc

SEQ ID NO: 1266594 - RNA, 19 nt, Artificial Sequence
  Description of Artificial Sequence: Synthetic oligonucleotide
ugaagagcgauagugcaug

SEQ ID NO: 1266595 - RNA, 19 nt, Artificial Sequence
  Description of Artificial Sequence: Synthetic oligonucleotide
aaucaacuggccauaccgg

SEQ ID NO: 1266596 - RNA, 19 nt, Artificial Sequence
  Description of Artificial Sequence: Synthetic oligonucleotide
gacacguuauuuucaauga

SEQ ID NO: 1266597 - RNA, 19 nt, Artificial Sequence
  Description of Artificial Sequence: Synthetic oligonucleotide
cuaguuguccauugcaaac

SEQ ID NO: 1266598 - RNA, 19 nt, Artificial Sequence
  Description of Artificial Sequence: Synthetic oligonucleotide
agcgauagugcaugcacuc

SEQ ID NO: 1266599 - RNA, 19 nt, Artificial Sequence
  Description of Artificial Sequence: Synthetic oligonucleotide
uuugacacguuauuuucaa

SEQ ID NO: 1266600 - RNA, 19 nt, Artificial Sequence
  Description of Artificial Sequence: Synthetic oligonucleotide
uuugacaaaguuugcccac

SEQ ID NO: 1266601 - RNA, 19 nt, Artificial Sequence
  Description of Artificial Sequence: Synthetic oligonucleotide
uuauuucaaucaacuggcc

SEQ ID NO: 1266602 - RNA, 19 nt, Artificial Sequence
  Description of Artificial Sequence: Synthetic oligonucleotide
uggaacauccuaguuacca

SEQ ID NO: 1266603 - RNA, 19 nt, Artificial Sequence
  Description of Artificial Sequence: Synthetic oligonucleotide
auuuucaaugaagccaauc

SEQ ID NO: 1266604 - RNA, 19 nt, Artificial Sequence
  Description of Artificial Sequence: Synthetic oligonucleotide
uuucgagcagcugugagac

SEQ ID NO: 1266605 - RNA, 19 nt, Artificial Sequence
  Description of Artificial Sequence: Synthetic oligonucleotide
uguuaugccuguugagcag

SEQ ID NO: 1266606 - RNA, 19 nt, Artificial Sequence
  Description of Artificial Sequence: Synthetic oligonucleotide
auguuaugccuguugagca

SEQ ID NO: 1266607 - RNA, 19 nt, Artificial Sequence
  Description of Artificial Sequence: Synthetic oligonucleotide
augugaagagcgauagugc

SEQ ID NO: 1266608 - RNA, 19 nt, Artificial Sequence
  Description of Artificial Sequence: Synthetic oligonucleotide
gaaugcggcggagugaggg

SEQ ID NO: 1266609 - RNA, 19 nt, Artificial Sequence
  Description of Artificial Sequence: Synthetic oligonucleotide
agcacuacccgguuccagg

SEQ ID NO: 1266610 - RNA, 19 nt, Artificial Sequence
  Description of Artificial Sequence: Synthetic oligonucleotide
uggaggaccgugcagcagc

SEQ ID NO: 1266611 - RNA, 19 nt, Artificial Sequence
  Description of Artificial Sequence: Synthetic oligonucleotide
aagagagguagauucugaa

SEQ ID NO: 1266612 - RNA, 19 nt, Artificial Sequence
  Description of Artificial Sequence: Synthetic oligonucleotide
acgaggauauaugaucugg

SEQ ID NO: 1266613 - RNA, 19 nt, Artificial Sequence
  Description of Artificial Sequence: Synthetic oligonucleotide
uuccaaauuuucacuggug

SEQ ID NO: 1266614 - RNA, 19 nt, Artificial Sequence
  Description of Artificial Sequence: Synthetic oligonucleotide
aacccagugacuugcugca

SEQ ID NO: 1266615 - RNA, 19 nt, Artificial Sequence
  Description of Artificial Sequence: Synthetic oligonucleotide
uacuaguuguccauugcaa

SEQ ID NO: 1266616 - RNA, 19 nt, Artificial Sequence
  Description of Artificial Sequence: Synthetic oligonucleotide
aaggaggcuuagcuuugac

SEQ ID NO: 1266617 - RNA, 19 nt, Artificial Sequence
  Description of Artificial Sequence: Synthetic oligonucleotide
uggccuuuaguucuguguc

SEQ ID NO: 1266618 - RNA, 19 nt, Artificial Sequence
  Description of Artificial Sequence: Synthetic oligonucleotide
gaggauauaugaucuggca

SEQ ID NO: 1266619 - RNA, 19 nt, Artificial Sequence
  Description of Artificial Sequence: Synthetic oligonucleotide
cauucaauuggaagaugug

SEQ ID NO: 1266620 - RNA, 19 nt, Artificial Sequence
  Description of Artificial Sequence: Synthetic oligonucleotide
cagcuugccuuuaaauacg

SEQ ID NO: 1266621 - RNA, 19 nt, Artificial Sequence
  Description of Artificial Sequence: Synthetic oligonucleotide
ucaaaaggaggcuuagcuu

SEQ ID NO: 1266622 - RNA, 19 nt, Artificial Sequence
  Description of Artificial Sequence: Synthetic oligonucleotide
caucacguagucaaggaga

SEQ ID NO: 1266623 - RNA, 19 nt, Artificial Sequence
  Description of Artificial Sequence: Synthetic oligonucleotide
uccuugaaauuucacucaa

SEQ ID NO: 1266624 - RNA, 19 nt, Artificial Sequence
  Description of Artificial Sequence: Synthetic oligonucleotide
ugcugacgaggauauauga

SEQ ID NO: 1266625 - RNA, 19 nt, Artificial Sequence
  Description of Artificial Sequence: Synthetic oligonucleotide
cuuguccacugccagagac

SEQ ID NO: 1266626 - RNA, 19 nt, Artificial Sequence
  Description of Artificial Sequence: Synthetic oligonucleotide
uguuugacagucugauggu

SEQ ID NO: 1266627 - RNA, 19 nt, Artificial Sequence
  Description of Artificial Sequence: Synthetic oligonucleotide
acgcauuaaaauaacacaa

SEQ ID NO: 1266628 - RNA, 19 nt, Artificial Sequence
  Description of Artificial Sequence: Synthetic oligonucleotide
ugaagccaaucauuuccag

SEQ ID NO: 1266629 - RNA, 19 nt, Artificial Sequence
  Description of Artificial Sequence: Synthetic oligonucleotide
acuaguuguccauugcaaa

SEQ ID NO: 1266630 - RNA, 19 nt, Artificial Sequence
  Description of Artificial Sequence: Synthetic oligonucleotide
uguauugcuugaugucagc

SEQ ID NO: 1266631 - RNA, 19 nt, Artificial Sequence
  Description of Artificial Sequence: Synthetic oligonucleotide
caauguuaugccuguugag

SEQ ID NO: 1266632 - RNA, 19 nt, Artificial Sequence
  Description of Artificial Sequence: Synthetic oligonucleotide
augcacucaaaucgauggg

SEQ ID NO: 1266633 - RNA, 19 nt, Artificial Sequence
  Description of Artificial Sequence: Synthetic oligonucleotide
auauagagugcaugagcca

SEQ ID NO: 1266634 - RNA, 19 nt, Artificial Sequence
  Description of Artificial Sequence: Synthetic oligonucleotide
uugaccuccacgucauaca

SEQ ID NO: 1266635 - RNA, 19 nt, Artificial Sequence
  Description of Artificial Sequence: Synthetic oligonucleotide
accaacuugccacuuucug

SEQ ID NO: 1266636 - RNA, 19 nt, Artificial Sequence
  Description of Artificial Sequence: Synthetic oligonucleotide
uggaagaugugaagagcga

SEQ ID NO: 1266637 - RNA, 19 nt, Artificial Sequence
  Description of Artificial Sequence: Synthetic oligonucleotide
cauccuaguuaccaacuug

SEQ ID NO: 1266638 - RNA, 19 nt, Artificial Sequence
  Description of Artificial Sequence: Synthetic oligonucleotide
aucgaucagcacaaacacc

SEQ ID NO: 1266639 - RNA, 19 nt, Artificial Sequence
  Description of Artificial Sequence: Synthetic oligonucleotide
gacgcuaggagccuggaua

SEQ ID NO: 1266640 - RNA, 19 nt, Artificial Sequence
  Description of Artificial Sequence: Synthetic oligonucleotide
acacggauagcaucugaug

SEQ ID NO: 1266641 - RNA, 19 nt, Artificial Sequence
  Description of Artificial Sequence: Synthetic oligonucleotide
aguuguccauugcaaacca

SEQ ID NO: 1266642 - RNA, 19 nt, Artificial Sequence
  Description of Artificial Sequence: Synthetic oligonucleotide
gacaaaguuugcccacacc

SEQ ID NO: 1266643 - RNA, 19 nt, Artificial Sequence
  Description of Artificial Sequence: Synthetic oligonucleotide
aucaacuggccauaccggu

SEQ ID NO: 1266644 - RNA, 19 nt, Artificial Sequence
  Description of Artificial Sequence: Synthetic oligonucleotide
ucuugucugagaacagcaa

SEQ ID NO: 1266645 - RNA, 19 nt, Artificial Sequence
  Description of Artificial Sequence: Synthetic oligonucleotide
caauuugagucaagacagc

SEQ ID NO: 1266646 - RNA, 19 nt, Artificial Sequence
  Description of Artificial Sequence: Synthetic oligonucleotide
guuggauguggugagaauc

SEQ ID NO: 1266647 - RNA, 19 nt, Artificial Sequence
  Description of Artificial Sequence: Synthetic oligonucleotide
agcuuugacacguuauuuu

SEQ ID NO: 1266648 - RNA, 19 nt, Artificial Sequence
  Description of Artificial Sequence: Synthetic oligonucleotide
aacaagagagguagauucu

SEQ ID NO: 1266649 - RNA, 19 nt, Artificial Sequence
  Description of Artificial Sequence: Synthetic oligonucleotide
gugaacaugcagcuuuaug

SEQ ID NO: 1266650 - RNA, 19 nt, Artificial Sequence
  Description of Artificial Sequence: Synthetic oligonucleotide
uggcuugcagaccuauaug

SEQ ID NO: 1266651 - RNA, 19 nt, Artificial Sequence
  Description of Artificial Sequence: Synthetic oligonucleotide
caaaguuugcccacaccuc

SEQ ID NO: 1266652 - RNA, 19 nt, Artificial Sequence
  Description of Artificial Sequence: Synthetic oligonucleotide
aaaaggaggcuuagcuuug

SEQ ID NO: 1266653 - RNA, 19 nt, Artificial Sequence
  Description of Artificial Sequence: Synthetic oligonucleotide
auauggaugccuggaauca

SEQ ID NO: 1266654 - RNA, 19 nt, Artificial Sequence
  Description of Artificial Sequence: Synthetic oligonucleotide
aauaggcuguggcuguuua

SEQ ID NO: 1266655 - RNA, 19 nt, Artificial Sequence
  Description of Artificial Sequence: Synthetic oligonucleotide
auaagguugcuguccacau

SEQ ID NO: 1266656 - RNA, 19 nt, Artificial Sequence
  Description of Artificial Sequence: Synthetic oligonucleotide
gagggaaugcggcggagug

SEQ ID NO: 1266657 - RNA, 19 nt, Artificial Sequence
  Description of Artificial Sequence: Synthetic oligonucleotide
augccuuacaaagggaugu

SEQ ID NO: 1266658 - RNA, 19 nt, Artificial Sequence
  Description of Artificial Sequence: Synthetic oligonucleotide
acuuagaaaauaggcugug

SEQ ID NO: 1266659 - RNA, 19 nt, Artificial Sequence
  Description of Artificial Sequence: Synthetic oligonucleotide
accuacuaguuguccauug

SEQ ID NO: 1266660 - RNA, 19 nt, Artificial Sequence
  Description of Artificial Sequence: Synthetic oligonucleotide
agcccaugaaauucagcug

SEQ ID NO: 1266661 - RNA, 19 nt, Artificial Sequence
  Description of Artificial Sequence: Synthetic oligonucleotide
cucaucgaucagcacaaac

SEQ ID NO: 1266662 - RNA, 19 nt, Artificial Sequence
  Description of Artificial Sequence: Synthetic oligonucleotide
gacgaggauauaugaucug

SEQ ID NO: 1266663 - RNA, 19 nt, Artificial Sequence
  Description of Artificial Sequence: Synthetic oligonucleotide
auaccgguaccuguuugac

SEQ ID NO: 1266664 - RNA, 19 nt, Artificial Sequence
  Description of Artificial Sequence: Synthetic oligonucleotide
acuacccgguuccagguga

SEQ ID NO: 1266665 - RNA, 19 nt, Artificial Sequence
  Description of Artificial Sequence: Synthetic oligonucleotide
ucgagcagcugugagacuc

SEQ ID NO: 1266666 - RNA, 19 nt, Artificial Sequence
  Description of Artificial Sequence: Synthetic oligonucleotide
ugcaccgagggcgacuccg

SEQ ID NO: 1266667 - RNA, 19 nt, Artificial Sequence
  Description of Artificial Sequence: Synthetic oligonucleotide
agucaaggagaugugauuu

SEQ ID NO: 1266668 - RNA, 19 nt, Artificial Sequence
  Description of Artificial Sequence: Synthetic oligonucleotide
cauuucgagcagcugugag

SEQ ID NO: 1266669 - RNA, 19 nt, Artificial Sequence
  Description of Artificial Sequence: Synthetic oligonucleotide
cucaaaaggaggcuuagcu

SEQ ID NO: 1266670 - RNA, 19 nt, Artificial Sequence
  Description of Artificial Sequence: Synthetic oligonucleotide
gucaaggagaugugauuug

SEQ ID NO: 1266671 - RNA, 19 nt, Artificial Sequence
  Description of Artificial Sequence: Synthetic oligonucleotide
guguaauuucugaugcacc

SEQ ID NO: 1266672 - RNA, 19 nt, Artificial Sequence
  Description of Artificial Sequence: Synthetic oligonucleotide
uucuggccagaaaaggcuc

SEQ ID NO: 1266673 - RNA, 19 nt, Artificial Sequence
  Description of Artificial Sequence: Synthetic oligonucleotide
aggaggcuuagcuuugaca

SEQ ID NO: 1266674 - RNA, 19 nt, Artificial Sequence
  Description of Artificial Sequence: Synthetic oligonucleotide
cauugcaaaccacagauau

SEQ ID NO: 1266675 - RNA, 19 nt, Artificial Sequence
  Description of Artificial Sequence: Synthetic oligonucleotide
uucauucaauuggaagaug

SEQ ID NO: 1266676 - RNA, 19 nt, Artificial Sequence
  Description of Artificial Sequence: Synthetic oligonucleotide
gagguagauucugaagaug

SEQ ID NO: 1266677 - RNA, 19 nt, Artificial Sequence
  Description of Artificial Sequence: Synthetic oligonucleotide
ugaccacacggauagcauc

SEQ ID NO: 1266678 - RNA, 19 nt, Artificial Sequence
  Description of Artificial Sequence: Synthetic oligonucleotide
uggugucaccuacuaguug

SEQ ID NO: 1266679 - RNA, 19 nt, Artificial Sequence
  Description of Artificial Sequence: Synthetic oligonucleotide
cuacuaguuguccauugca

SEQ ID NO: 1266680 - RNA, 19 nt, Artificial Sequence
  Description of Artificial Sequence: Synthetic oligonucleotide
gaggcugucccaaagccca

SEQ ID NO: 1266681 - RNA, 19 nt, Artificial Sequence
  Description of Artificial Sequence: Synthetic oligonucleotide
uugcaguacugcugcugcg

SEQ ID NO: 1266682 - RNA, 19 nt, Artificial Sequence
  Description of Artificial Sequence: Synthetic oligonucleotide
acacguuauuuucaaugaa

SEQ ID NO: 1266683 - RNA, 19 nt, Artificial Sequence
  Description of Artificial Sequence: Synthetic oligonucleotide
ucaacuggccauaccggua

SEQ ID NO: 1266684 - RNA, 19 nt, Artificial Sequence
  Description of Artificial Sequence: Synthetic oligonucleotide
ugcaaaccacagauaugga

SEQ ID NO: 1266685 - RNA, 19 nt, Artificial Sequence
  Description of Artificial Sequence: Synthetic oligonucleotide
uagucaaggagaugugauu

SEQ ID NO: 1266686 - RNA, 19 nt, Artificial Sequence
  Description of Artificial Sequence: Synthetic oligonucleotide
cugcugacgaggauauaug

SEQ ID NO: 1266687 - RNA, 19 nt, Artificial Sequence
  Description of Artificial Sequence: Synthetic oligonucleotide
cguuauuuucaaugaagcc

SEQ ID NO: 1266688 - RNA, 19 nt, Artificial Sequence
  Description of Artificial Sequence: Synthetic oligonucleotide
gucaucacguagucaagga

SEQ ID NO: 1266689 - RNA, 19 nt, Artificial Sequence
  Description of Artificial Sequence: Synthetic oligonucleotide
caaaaggaggcuuagcuuu

SEQ ID NO: 1266690 - RNA, 19 nt, Artificial Sequence
  Description of Artificial Sequence: Synthetic oligonucleotide
uucaggucgcccacagccu

SEQ ID NO: 1266691 - RNA, 19 nt, Artificial Sequence
  Description of Artificial Sequence: Synthetic oligonucleotide
gcuuugacacguuauuuuc

SEQ ID NO: 1266692 - RNA, 19 nt, Artificial Sequence
  Description of Artificial Sequence: Synthetic oligonucleotide
ggucaucacguagucaagg

SEQ ID NO: 1266693 - RNA, 19 nt, Artificial Sequence
  Description of Artificial Sequence: Synthetic oligonucleotide
gcugcugcgcugcaaaacc

SEQ ID NO: 1266694 - RNA, 19 nt, Artificial Sequence
  Description of Artificial Sequence: Synthetic oligonucleotide
gaccuauaugguuuagugu

SEQ ID NO: 1266695 - RNA, 19 nt, Artificial Sequence
  Description of Artificial Sequence: Synthetic oligonucleotide
ucggagggucagcagcugc

SEQ ID NO: 1266696 - RNA, 19 nt, Artificial Sequence
  Description of Artificial Sequence: Synthetic oligonucleotide
auauaugaucuggcacuuc

SEQ ID NO: 1266697 - RNA, 19 nt, Artificial Sequence
  Description of Artificial Sequence: Synthetic oligonucleotide
aagagcgauagugcaugca

SEQ ID NO: 1266698 - RNA, 19 nt, Artificial Sequence
  Description of Artificial Sequence: Synthetic oligonucleotide
agcauuucgagcagcugug

SEQ ID NO: 1266699 - RNA, 19 nt, Artificial Sequence
  Description of Artificial Sequence: Synthetic oligonucleotide
accacauuggaaugccuuu

SEQ ID NO: 1266700 - RNA, 19 nt, Artificial Sequence
  Description of Artificial Sequence: Synthetic oligonucleotide
uagguggugucaccuacua

SEQ ID NO: 1266701 - RNA, 19 nt, Artificial Sequence
  Description of Artificial Sequence: Synthetic oligonucleotide
cacguagucaaggagaugu

SEQ ID NO: 1266702 - RNA, 19 nt, Artificial Sequence
  Description of Artificial Sequence: Synthetic oligonucleotide
cuaaugccuuacaaaggga

SEQ ID NO: 1266703 - RNA, 19 nt, Artificial Sequence
  Description of Artificial Sequence: Synthetic oligonucleotide
cacgaggcugucccaaagc

SEQ ID NO: 1266704 - RNA, 19 nt, Artificial Sequence
  Description of Artificial Sequence: Synthetic oligonucleotide
gcaaaacccagugacuugc

SEQ ID NO: 1266705 - RNA, 19 nt, Artificial Sequence
  Description of Artificial Sequence: Synthetic oligonucleotide
accgugcagcagcacuacc

SEQ ID NO: 1266706 - RNA, 19 nt, Artificial Sequence
  Description of Artificial Sequence: Synthetic oligonucleotide
ggugucaccuacuaguugu

SEQ ID NO: 1266707 - RNA, 19 nt, Artificial Sequence
  Description of Artificial Sequence: Synthetic oligonucleotide
uguuggauguggugagaau

SEQ ID NO: 1266708 - RNA, 19 nt, Artificial Sequence
  Description of Artificial Sequence: Synthetic oligonucleotide
gcuaggagccuggauauag

SEQ ID NO: 1266709 - RNA, 19 nt, Artificial Sequence
  Description of Artificial Sequence: Synthetic oligonucleotide
uaucgucaaucaaguccug

SEQ ID NO: 1266710 - RNA, 19 nt, Artificial Sequence
  Description of Artificial Sequence: Synthetic oligonucleotide
ucugaagauggcugcugua

SEQ ID NO: 1266711 - RNA, 19 nt, Artificial Sequence
  Description of Artificial Sequence: Synthetic oligonucleotide
gauggucaguuucugugcu

SEQ ID NO: 1266712 - RNA, 19 nt, Artificial Sequence
  Description of Artificial Sequence: Synthetic oligonucleotide
acgcuaggagccuggauau

SEQ ID NO: 1266713 - RNA, 19 nt, Artificial Sequence
  Description of Artificial Sequence: Synthetic oligonucleotide
acauccuaguuaccaacuu

SEQ ID NO: 1266714 - RNA, 19 nt, Artificial Sequence
  Description of Artificial Sequence: Synthetic oligonucleotide
uaccgguaccuguuugaca

SEQ ID NO: 1266715 - RNA, 19 nt, Artificial Sequence
  Description of Artificial Sequence: Synthetic oligonucleotide
ugauaagguugcuguccac

SEQ ID NO: 1266716 - RNA, 19 nt, Artificial Sequence
  Description of Artificial Sequence: Synthetic oligonucleotide
ggagugagggcgcugucgc

SEQ ID NO: 1266717 - RNA, 19 nt, Artificial Sequence
  Description of Artificial Sequence: Synthetic oligonucleotide
uggccauaccgguaccugu

SEQ ID NO: 1266718 - RNA, 19 nt, Artificial Sequence
  Description of Artificial Sequence: Synthetic oligonucleotide
ugcagaccuauaugguuua

SEQ ID NO: 1266719 - RNA, 19 nt, Artificial Sequence
  Description of Artificial Sequence: Synthetic oligonucleotide
aggcaaaacccagugacuu

SEQ ID NO: 1266720 - RNA, 19 nt, Artificial Sequence
  Description of Artificial Sequence: Synthetic oligonucleotide
uugacacguuauuuucaau

SEQ ID NO: 1266721 - RNA, 19 nt, Artificial Sequence
  Description of Artificial Sequence: Synthetic oligonucleotide
gguagguggugucaccuac

SEQ ID NO: 1266722 - RNA, 19 nt, Artificial Sequence
  Description of Artificial Sequence: Synthetic oligonucleotide
aggcggucaucacguaguc

SEQ ID NO: 1266723 - RNA, 19 nt, Artificial Sequence
  Description of Artificial Sequence: Synthetic oligonucleotide
cuccacaugcaccgagggc

SEQ ID NO: 1266724 - RNA, 19 nt, Artificial Sequence
  Description of Artificial Sequence: Synthetic oligonucleotide
aucacguagucaaggagau

SEQ ID NO: 1266725 - RNA, 19 nt, Artificial Sequence
  Description of Artificial Sequence: Synthetic oligonucleotide
uauggaugccuggaaucaa

SEQ ID NO: 1266726 - RNA, 19 nt, Artificial Sequence
  Description of Artificial Sequence: Synthetic oligonucleotide
gggaaugcggcggagugag

SEQ ID NO: 1266727 - RNA, 19 nt, Artificial Sequence
  Description of Artificial Sequence: Synthetic oligonucleotide
cuuagcuuugacacguuau

SEQ ID NO: 1266728 - RNA, 19 nt, Artificial Sequence
  Description of Artificial Sequence: Synthetic oligonucleotide
ccuacuaguuguccauugc

SEQ ID NO: 1266729 - RNA, 19 nt, Artificial Sequence
  Description of Artificial Sequence: Synthetic oligonucleotide
cuuccuuaucgucaaucaa

SEQ ID NO: 1266730 - RNA, 19 nt, Artificial Sequence
  Description of Artificial Sequence: Synthetic oligonucleotide
augcggcggagugagggcg

SEQ ID NO: 1266731 - RNA, 19 nt, Artificial Sequence
  Description of Artificial Sequence: Synthetic oligonucleotide
gauagugcaugcacucaaa

SEQ ID NO: 1266732 - RNA, 19 nt, Artificial Sequence
  Description of Artificial Sequence: Synthetic oligonucleotide
agccgagggaaugcggcgg

SEQ ID NO: 1266733 - RNA, 19 nt, Artificial Sequence
  Description of Artificial Sequence: Synthetic oligonucleotide
guuugacagucugaugguc

SEQ ID NO: 1266734 - RNA, 19 nt, Artificial Sequence
  Description of Artificial Sequence: Synthetic oligonucleotide
cgaggauauaugaucuggc

SEQ ID NO: 1266735 - RNA, 19 nt, Artificial Sequence
  Description of Artificial Sequence: Synthetic oligonucleotide
ugcccacaccucugucugg

SEQ ID NO: 1266736 - RNA, 19 nt, Artificial Sequence
  Description of Artificial Sequence: Synthetic oligonucleotide
uuaugccuguugagcaguu

SEQ ID NO: 1266737 - RNA, 19 nt, Artificial Sequence
  Description of Artificial Sequence: Synthetic oligonucleotide
ccuuuaaauacgcauuaaa

SEQ ID NO: 1266738 - RNA, 19 nt, Artificial Sequence
  Description of Artificial Sequence: Synthetic oligonucleotide
caggacccggccacugagg

SEQ ID NO: 1266739 - RNA, 19 nt, Artificial Sequence
  Description of Artificial Sequence: Synthetic oligonucleotide
gcaauuauauuuucuguuu

SEQ ID NO: 1266740 - RNA, 19 nt, Artificial Sequence
  Description of Artificial Sequence: Synthetic oligonucleotide
cuaggagccuggauauaga

SEQ ID NO: 1266741 - RNA, 19 nt, Artificial Sequence
  Description of Artificial Sequence: Synthetic oligonucleotide
cacgcagggaagcgcuugc

SEQ ID NO: 1266742 - RNA, 19 nt, Artificial Sequence
  Description of Artificial Sequence: Synthetic oligonucleotide
cccaauguauugcuugaug

SEQ ID NO: 1266743 - RNA, 19 nt, Artificial Sequence
  Description of Artificial Sequence: Synthetic oligonucleotide
ggauguggugagaaucacc

SEQ ID NO: 1266744 - RNA, 19 nt, Artificial Sequence
  Description of Artificial Sequence: Synthetic oligonucleotide
ccacagauauggaugccug

SEQ ID NO: 1266745 - RNA, 19 nt, Artificial Sequence
  Description of Artificial Sequence: Synthetic oligonucleotide
auaacacaaaacaguccuu

SEQ ID NO: 1266746 - RNA, 19 nt, Artificial Sequence
  Description of Artificial Sequence: Synthetic oligonucleotide
cuugcagaccuauaugguu

SEQ ID NO: 1266747 - RNA, 19 nt, Artificial Sequence
  Description of Artificial Sequence: Synthetic oligonucleotide
gagugagggcgcugucgcc

SEQ ID NO: 1266748 - RNA, 19 nt, Artificial Sequence
  Description of Artificial Sequence: Synthetic oligonucleotide
ucacguagucaaggagaug

SEQ ID NO: 1266749 - RNA, 19 nt, Artificial Sequence
  Description of Artificial Sequence: Synthetic oligonucleotide
ggagccgagggaaugcggc

SEQ ID NO: 1266750 - RNA, 19 nt, Artificial Sequence
  Description of Artificial Sequence: Synthetic oligonucleotide
agacaggcagcuugccuuu

SEQ ID NO: 1266751 - RNA, 19 nt, Artificial Sequence
  Description of Artificial Sequence: Synthetic oligonucleotide
ugacgcuaggagccuggau

SEQ ID NO: 1266752 - RNA, 19 nt, Artificial Sequence
  Description of Artificial Sequence: Synthetic oligonucleotide
gauauaugaucuggcacuu

SEQ ID NO: 1266753 - RNA, 19 nt, Artificial Sequence
  Description of Artificial Sequence: Synthetic oligonucleotide
auacacgaggcugucccaa

SEQ ID NO: 1266754 - RNA, 19 nt, Artificial Sequence
  Description of Artificial Sequence: Synthetic oligonucleotide
caugcaccgagggcgacuc

SEQ ID NO: 1266755 - RNA, 19 nt, Artificial Sequence
  Description of Artificial Sequence: Synthetic oligonucleotide
ugugaacaugcagcuuuau

SEQ ID NO: 1266756 - RNA, 19 nt, Artificial Sequence
  Description of Artificial Sequence: Synthetic oligonucleotide
accgagggcgacuccgcca

SEQ ID NO: 1266757 - RNA, 19 nt, Artificial Sequence
  Description of Artificial Sequence: Synthetic oligonucleotide
guagucaaggagaugugau

SEQ ID NO: 1266758 - RNA, 19 nt, Artificial Sequence
  Description of Artificial Sequence: Synthetic oligonucleotide
guauugcuugaugucagcu

SEQ ID NO: 1266759 - RNA, 19 nt, Artificial Sequence
  Description of Artificial Sequence: Synthetic oligonucleotide
gucccaaagcccaugaaau

SEQ ID NO: 1266760 - RNA, 19 nt, Artificial Sequence
  Description of Artificial Sequence: Synthetic oligonucleotide
gucauacacgaggcugucc

SEQ ID NO: 1266761 - RNA, 19 nt, Artificial Sequence
  Description of Artificial Sequence: Synthetic oligonucleotide
cagauauggaugccuggaa

SEQ ID NO: 1266762 - RNA, 19 nt, Artificial Sequence
  Description of Artificial Sequence: Synthetic oligonucleotide
acggugagguagguggugu

SEQ ID NO: 1266763 - RNA, 19 nt, Artificial Sequence
  Description of Artificial Sequence: Synthetic oligonucleotide
ggcgacuccgccacgcagg

SEQ ID NO: 1266764 - RNA, 19 nt, Artificial Sequence
  Description of Artificial Sequence: Synthetic oligonucleotide
gagggcgacuccgccacgc

SEQ ID NO: 1266765 - RNA, 19 nt, Artificial Sequence
  Description of Artificial Sequence: Synthetic oligonucleotide
ccgguuccaggugauaagg

SEQ ID NO: 1266766 - RNA, 19 nt, Artificial Sequence
  Description of Artificial Sequence: Synthetic oligonucleotide
cauacacgaggcuguccca

SEQ ID NO: 1266767 - RNA, 19 nt, Artificial Sequence
  Description of Artificial Sequence: Synthetic oligonucleotide
cugugagacucuccaccuc

SEQ ID NO: 1266768 - RNA, 19 nt, Artificial Sequence
  Description of Artificial Sequence: Synthetic oligonucleotide
guccauggcgccgccgccg

SEQ ID NO: 1266769 - RNA, 19 nt, Artificial Sequence
  Description of Artificial Sequence: Synthetic oligonucleotide
acccgguuccaggugauaa

SEQ ID NO: 1266770 - RNA, 19 nt, Artificial Sequence
  Description of Artificial Sequence: Synthetic oligonucleotide
ggugacgcuaggagccugg

SEQ ID NO: 1266771 - RNA, 19 nt, Artificial Sequence
  Description of Artificial Sequence: Synthetic oligonucleotide
acguagucaaggagaugug

SEQ ID NO: 1266772 - RNA, 19 nt, Artificial Sequence
  Description of Artificial Sequence: Synthetic oligonucleotide
gcaugcacucaaaucgaug

SEQ ID NO: 1266773 - RNA, 19 nt, Artificial Sequence
  Description of Artificial Sequence: Synthetic oligonucleotide
ggcccaauguauugcuuga

SEQ ID NO: 1266774 - RNA, 19 nt, Artificial Sequence
  Description of Artificial Sequence: Synthetic oligonucleotide
ugccuuacaaagggauguu

SEQ ID NO: 1266775 - RNA, 19 nt, Artificial Sequence
  Description of Artificial Sequence: Synthetic oligonucleotide
ugguggggccaucuucauu

SEQ ID NO: 1266776 - RNA, 19 nt, Artificial Sequence
  Description of Artificial Sequence: Synthetic oligonucleotide
agggaaugcggcggaguga

SEQ ID NO: 1266777 - RNA, 19 nt, Artificial Sequence
  Description of Artificial Sequence: Synthetic oligonucleotide
cuggcacuucaucaguucu

SEQ ID NO: 1266778 - RNA, 19 nt, Artificial Sequence
  Description of Artificial Sequence: Synthetic oligonucleotide
acaugcaccgagggcgacu

SEQ ID NO: 1266779 - RNA, 19 nt, Artificial Sequence
  Description of Artificial Sequence: Synthetic oligonucleotide
gacucuccaccucaucgau

SEQ ID NO: 1266780 - RNA, 19 nt, Artificial Sequence
  Description of Artificial Sequence: Synthetic oligonucleotide
gagcgauagugcaugcacu

SEQ ID NO: 1266781 - RNA, 19 nt, Artificial Sequence
  Description of Artificial Sequence: Synthetic oligonucleotide
gcgacuccgccacgcaggg

SEQ ID NO: 1266782 - RNA, 19 nt, Artificial Sequence
  Description of Artificial Sequence: Synthetic oligonucleotide
cacggugagguagguggug

SEQ ID NO: 1266783 - RNA, 19 nt, Artificial Sequence
  Description of Artificial Sequence: Synthetic oligonucleotide
ccuuaucgucaaucaaguc

SEQ ID NO: 1266784 - RNA, 19 nt, Artificial Sequence
  Description of Artificial Sequence: Synthetic oligonucleotide
ccuauaugguuuaguguaa

SEQ ID NO: 1266785 - RNA, 19 nt, Artificial Sequence
  Description of Artificial Sequence: Synthetic oligonucleotide
cccgguuccaggugauaag

SEQ ID NO: 1266786 - RNA, 19 nt, Artificial Sequence
  Description of Artificial Sequence: Synthetic oligonucleotide
ccauaccgguaccuguuug

SEQ ID NO: 1266787 - RNA, 19 nt, Artificial Sequence
  Description of Artificial Sequence: Synthetic oligonucleotide
ccuuuaguucugugucaac

SEQ ID NO: 1266788 - RNA, 19 nt, Artificial Sequence
  Description of Artificial Sequence: Synthetic oligonucleotide
agggcgacuccgccacgca

SEQ ID NO: 1266789 - RNA, 19 nt, Artificial Sequence
  Description of Artificial Sequence: Synthetic oligonucleotide
gugucaccuacuaguuguc

SEQ ID NO: 1266790 - RNA, 19 nt, Artificial Sequence
  Description of Artificial Sequence: Synthetic oligonucleotide
auuugaccuccacgucaua

SEQ ID NO: 1266791 - RNA, 19 nt, Artificial Sequence
  Description of Artificial Sequence: Synthetic oligonucleotide
gcugcugacgaggauauau

SEQ ID NO: 1266792 - RNA, 19 nt, Artificial Sequence
  Description of Artificial Sequence: Synthetic oligonucleotide
ggaagaugugaagagcgau

SEQ ID NO: 1266793 - RNA, 19 nt, Artificial Sequence
  Description of Artificial Sequence: Synthetic oligonucleotide
gggcgacuccgccacgcag

SEQ ID NO: 1266794 - RNA, 19 nt, Artificial Sequence
  Description of Artificial Sequence: Synthetic oligonucleotide
gcagaccuauaugguuuag

SEQ ID NO: 1266795 - RNA, 19 nt, Artificial Sequence
  Description of Artificial Sequence: Synthetic oligonucleotide
cagaccuauaugguuuagu

SEQ ID NO: 1266796 - RNA, 19 nt, Artificial Sequence
  Description of Artificial Sequence: Synthetic oligonucleotide
ccgagggcgacuccgccac

SEQ ID NO: 1266797 - RNA, 19 nt, Artificial Sequence
  Description of Artificial Sequence: Synthetic oligonucleotide
ccuuacaaagggauguuuu

SEQ ID NO: 1266798 - RNA, 19 nt, Artificial Sequence
  Description of Artificial Sequence: Synthetic oligonucleotide
cucggagggucagcagcug

SEQ ID NO: 1266799 - RNA, 19 nt, Artificial Sequence
  Description of Artificial Sequence: Synthetic oligonucleotide
acacaauguuaugccuguu

SEQ ID NO: 1266800 - RNA, 19 nt, Artificial Sequence
  Description of Artificial Sequence: Synthetic oligonucleotide
caccacggugagguaggug

SEQ ID NO: 1266801 - RNA, 19 nt, Artificial Sequence
  Description of Artificial Sequence: Synthetic oligonucleotide
ggauagcaucugauggcuc

SEQ ID NO: 1266802 - RNA, 19 nt, Artificial Sequence
  Description of Artificial Sequence: Synthetic oligonucleotide
guagguggugucaccuacu

SEQ ID NO: 1266803 - RNA, 19 nt, Artificial Sequence
  Description of Artificial Sequence: Synthetic oligonucleotide
gcgauagugcaugcacuca

SEQ ID NO: 1266804 - RNA, 19 nt, Artificial Sequence
  Description of Artificial Sequence: Synthetic oligonucleotide
cacaugcaccgagggcgac

SEQ ID NO: 1266805 - RNA, 19 nt, Artificial Sequence
  Description of Artificial Sequence: Synthetic oligonucleotide
cucgcucuuccuugaaauu

SEQ ID NO: 1266806 - RNA, 19 nt, Artificial Sequence
  Description of Artificial Sequence: Synthetic oligonucleotide
gcuugcagaccuauauggu

SEQ ID NO: 1266807 - RNA, 19 nt, Artificial Sequence
  Description of Artificial Sequence: Synthetic oligonucleotide
cgauagugcaugcacucaa

SEQ ID NO: 1266808 - RNA, 19 nt, Artificial Sequence
  Description of Artificial Sequence: Synthetic oligonucleotide
cguagucaaggagauguga

SEQ ID NO: 1266809 - RNA, 19 nt, Artificial Sequence
  Description of Artificial Sequence: Synthetic oligonucleotide
cggagugagggcgcugucg

SEQ ID NO: 1266810 - RNA, 19 nt, Artificial Sequence
  Description of Artificial Sequence: Synthetic oligonucleotide
gcugacgaggauauaugau

SEQ ID NO: 1266811 - RNA, 19 nt, Artificial Sequence
  Description of Artificial Sequence: Synthetic oligonucleotide
gugacgcuaggagccugga

SEQ ID NO: 1266812 - RNA, 19 nt, Artificial Sequence
  Description of Artificial Sequence: Synthetic oligonucleotide
gcgcugcaaaaccuccaca

SEQ ID NO: 1266813 - RNA, 19 nt, Artificial Sequence
  Description of Artificial Sequence: Synthetic oligonucleotide
gccucguccauggcgccgc

SEQ ID NO: 1266814 - RNA, 19 nt, Artificial Sequence
  Description of Artificial Sequence: Synthetic oligonucleotide
ggaaugcggcggagugagg

SEQ ID NO: 1266815 - RNA, 19 nt, Artificial Sequence
  Description of Artificial Sequence: Synthetic oligonucleotide
gcauuucgagcagcuguga

SEQ ID NO: 1266816 - RNA, 19 nt, Artificial Sequence
  Description of Artificial Sequence: Synthetic oligonucleotide
uacccgguuccaggugaua

SEQ ID NO: 1266817 - RNA, 19 nt, Artificial Sequence
  Description of Artificial Sequence: Synthetic oligonucleotide
gcaguacugcugcugcgcu

SEQ ID NO: 1266818 - RNA, 19 nt, Artificial Sequence
  Description of Artificial Sequence: Synthetic oligonucleotide
ggaggaccgugcagcagca

SEQ ID NO: 1266819 - RNA, 19 nt, Artificial Sequence
  Description of Artificial Sequence: Synthetic oligonucleotide
gccgggagccgagggaaug

SEQ ID NO: 1266820 - RNA, 19 nt, Artificial Sequence
  Description of Artificial Sequence: Synthetic oligonucleotide
ccgggagccgagggaaugc

SEQ ID NO: 1266821 - RNA, 19 nt, Artificial Sequence
  Description of Artificial Sequence: Synthetic oligonucleotide
ccacaugcaccgagggcga

SEQ ID NO: 1266822 - RNA, 19 nt, Artificial Sequence
  Description of Artificial Sequence: Synthetic oligonucleotide
ggcggucaucacguaguca

SEQ ID NO: 1266823 - RNA, 19 nt, Artificial Sequence
  Description of Artificial Sequence: Synthetic oligonucleotide
ccacgcagggaagcgcuug

SEQ ID NO: 1266824 - RNA, 19 nt, Artificial Sequence
  Description of Artificial Sequence: Synthetic oligonucleotide
ccacacggauagcaucuga

SEQ ID NO: 1266825 - RNA, 19 nt, Artificial Sequence
  Description of Artificial Sequence: Synthetic oligonucleotide
ggcccucgcucuuccuuga

SEQ ID NO: 1266826 - RNA, 19 nt, Artificial Sequence
  Description of Artificial Sequence: Synthetic oligonucleotide
cuacccgguuccaggugau

SEQ ID NO: 1266827 - RNA, 19 nt, Artificial Sequence
  Description of Artificial Sequence: Synthetic oligonucleotide
gagcuuccuuaucgucaau

SEQ ID NO: 1266828 - RNA, 19 nt, Artificial Sequence
  Description of Artificial Sequence: Synthetic oligonucleotide
ggcggagugagggcgcugu

SEQ ID NO: 1266829 - RNA, 19 nt, Artificial Sequence
  Description of Artificial Sequence: Synthetic oligonucleotide
gcgcuugcuucaggucgcc

SEQ ID NO: 1266830 - RNA, 19 nt, Artificial Sequence
  Description of Artificial Sequence: Synthetic oligonucleotide
gccuuacaaagggauguuu

SEQ ID NO: 1266831 - RNA, 19 nt, Artificial Sequence
  Description of Artificial Sequence: Synthetic oligonucleotide
cccucgcucuuccuugaaa

SEQ ID NO: 1266832 - RNA, 19 nt, Artificial Sequence
  Description of Artificial Sequence: Synthetic oligonucleotide
gcggagugagggcgcuguc

SEQ ID NO: 1266833 - RNA, 19 nt, Artificial Sequence
  Description of Artificial Sequence: Synthetic oligonucleotide
ccgagggaaugcggcggag

SEQ ID NO: 1266834 - RNA, 19 nt, Artificial Sequence
  Description of Artificial Sequence: Synthetic oligonucleotide
ccuggaggaaacccucgau

SEQ ID NO: 1266835 - RNA, 19 nt, Artificial Sequence
  Description of Artificial Sequence: Synthetic oligonucleotide
cccagugacuugcugcaau

SEQ ID NO: 1266836 - RNA, 19 nt, Artificial Sequence
  Description of Artificial Sequence: Synthetic oligonucleotide
ccacauuggaaugccuuuu

SEQ ID NO: 1266837 - RNA, 19 nt, Artificial Sequence
  Description of Artificial Sequence: Synthetic oligonucleotide
gcccaauguauugcuugau

SEQ ID NO: 1266838 - RNA, 19 nt, Artificial Sequence
  Description of Artificial Sequence: Synthetic oligonucleotide
cgagggcgacuccgccacg

SEQ ID NO: 1266839 - RNA, 19 nt, Artificial Sequence
  Description of Artificial Sequence: Synthetic oligonucleotide
gcccucgcucuuccuugaa

SEQ ID NO: 1266840 - RNA, 19 nt, Artificial Sequence
  Description of Artificial Sequence: Synthetic oligonucleotide
ggggcccaauguauugcuu

SEQ ID NO: 1266841 - RNA, 19 nt, Artificial Sequence
  Description of Artificial Sequence: Synthetic oligonucleotide
ggcuuagcuuugacacguu

SEQ ID NO: 1266842 - RNA, 19 nt, Artificial Sequence
  Description of Artificial Sequence: Synthetic oligonucleotide
gcaccacggugagguaggu

SEQ ID NO: 1266843 - RNA, 19 nt, Artificial Sequence
  Description of Artificial Sequence: Synthetic oligonucleotide
gcggcggagugagggcgcu

SEQ ID NO: 1266844 - RNA, 19 nt, Artificial Sequence
  Description of Artificial Sequence: Synthetic oligonucleotide
cgcuaggagccuggauaua

SEQ ID NO: 1266845 - RNA, 19 nt, Artificial Sequence
  Description of Artificial Sequence: Synthetic oligonucleotide
cggcggagugagggcgcug

SEQ ID NO: 1266846 - RNA, 19 nt, Artificial Sequence
  Description of Artificial Sequence: Synthetic oligonucleotide
uauauuugaacucauuugg

SEQ ID NO: 1266847 - RNA, 19 nt, Artificial Sequence
  Description of Artificial Sequence: Synthetic oligonucleotide
uuaaagaucgaacugagag

SEQ ID NO: 1266848 - RNA, 19 nt, Artificial Sequence
  Description of Artificial Sequence: Synthetic oligonucleotide
uauaaaaucaacuggcugg

SEQ ID NO: 1266849 - RNA, 19 nt, Artificial Sequence
  Description of Artificial Sequence: Synthetic oligonucleotide
aguauuagggcucaugccc

SEQ ID NO: 1266850 - RNA, 19 nt, Artificial Sequence
  Description of Artificial Sequence: Synthetic oligonucleotide
ugauauaaaaucaacuggc

SEQ ID NO: 1266851 - RNA, 19 nt, Artificial Sequence
  Description of Artificial Sequence: Synthetic oligonucleotide
aaaacgguuuuauuuacac

SEQ ID NO: 1266852 - RNA, 19 nt, Artificial Sequence
  Description of Artificial Sequence: Synthetic oligonucleotide
aggauagugauauaaaauc

SEQ ID NO: 1266853 - RNA, 19 nt, Artificial Sequence
  Description of Artificial Sequence: Synthetic oligonucleotide
acugagucgacucugaagg

SEQ ID NO: 1266854 - RNA, 19 nt, Artificial Sequence
  Description of Artificial Sequence: Synthetic oligonucleotide
ucuacuaguccaaagaucu

SEQ ID NO: 1266855 - RNA, 19 nt, Artificial Sequence
  Description of Artificial Sequence: Synthetic oligonucleotide
aaagaucgaacugagaguc

SEQ ID NO: 1266856 - RNA, 19 nt, Artificial Sequence
  Description of Artificial Sequence: Synthetic oligonucleotide
uguucaaaugcccagaaac

SEQ ID NO: 1266857 - RNA, 19 nt, Artificial Sequence
  Description of Artificial Sequence: Synthetic oligonucleotide
aauguuaaagaucgaacug

SEQ ID NO: 1266858 - RNA, 19 nt, Artificial Sequence
  Description of Artificial Sequence: Synthetic oligonucleotide
augucucuaagucuuaucc

SEQ ID NO: 1266859 - RNA, 19 nt, Artificial Sequence
  Description of Artificial Sequence: Synthetic oligonucleotide
aacuauaccugaaagcugc

SEQ ID NO: 1266860 - RNA, 19 nt, Artificial Sequence
  Description of Artificial Sequence: Synthetic oligonucleotide
aacccuuagguugagaggc

SEQ ID NO: 1266861 - RNA, 19 nt, Artificial Sequence
  Description of Artificial Sequence: Synthetic oligonucleotide
cugacuaucaaguauuagg

SEQ ID NO: 1266862 - RNA, 19 nt, Artificial Sequence
  Description of Artificial Sequence: Synthetic oligonucleotide
acugaacuaauucaucagc

SEQ ID NO: 1266863 - RNA, 19 nt, Artificial Sequence
  Description of Artificial Sequence: Synthetic oligonucleotide
aucaagaugucucuaaguc

SEQ ID NO: 1266864 - RNA, 19 nt, Artificial Sequence
  Description of Artificial Sequence: Synthetic oligonucleotide
uuuacacugaacuaauuca

SEQ ID NO: 1266865 - RNA, 19 nt, Artificial Sequence
  Description of Artificial Sequence: Synthetic oligonucleotide
uauaagugcagugaagugg

SEQ ID NO: 1266866 - RNA, 19 nt, Artificial Sequence
  Description of Artificial Sequence: Synthetic oligonucleotide
ggaaugaucuuauaaaacg

SEQ ID NO: 1266867 - RNA, 19 nt, Artificial Sequence
  Description of Artificial Sequence: Synthetic oligonucleotide
aaguauuagggcucaugcc

SEQ ID NO: 1266868 - RNA, 19 nt, Artificial Sequence
  Description of Artificial Sequence: Synthetic oligonucleotide
auaaccaucucuucuuggc

SEQ ID NO: 1266869 - RNA, 19 nt, Artificial Sequence
  Description of Artificial Sequence: Synthetic oligonucleotide
auaaaaggaacccuuaggu

SEQ ID NO: 1266870 - RNA, 19 nt, Artificial Sequence
  Description of Artificial Sequence: Synthetic oligonucleotide
auauauuugaacucauuug

SEQ ID NO: 1266871 - RNA, 19 nt, Artificial Sequence
  Description of Artificial Sequence: Synthetic oligonucleotide
ucuaacuauaccugaaagc

SEQ ID NO: 1266872 - RNA, 19 nt, Artificial Sequence
  Description of Artificial Sequence: Synthetic oligonucleotide
uuuauaagugcagugaagu

SEQ ID NO: 1266873 - RNA, 19 nt, Artificial Sequence
  Description of Artificial Sequence: Synthetic oligonucleotide
ucaauguuaaagaucgaac

SEQ ID NO: 1266874 - RNA, 19 nt, Artificial Sequence
  Description of Artificial Sequence: Synthetic oligonucleotide
uuuaacaguaugcaggcau

SEQ ID NO: 1266875 - RNA, 19 nt, Artificial Sequence
  Description of Artificial Sequence: Synthetic oligonucleotide
auaaaacgguuuuauuuac

SEQ ID NO: 1266876 - RNA, 19 nt, Artificial Sequence
  Description of Artificial Sequence: Synthetic oligonucleotide
uguuaaagaucgaacugag

SEQ ID NO: 1266877 - RNA, 19 nt, Artificial Sequence
  Description of Artificial Sequence: Synthetic oligonucleotide
auacaugguaacucuuucc

SEQ ID NO: 1266878 - RNA, 19 nt, Artificial Sequence
  Description of Artificial Sequence: Synthetic oligonucleotide
auauaaaaucaacuggcug

SEQ ID NO: 1266879 - RNA, 19 nt, Artificial Sequence
  Description of Artificial Sequence: Synthetic oligonucleotide
ugaggaacauagcugacug

SEQ ID NO: 1266880 - RNA, 19 nt, Artificial Sequence
  Description of Artificial Sequence: Synthetic oligonucleotide
uuagugaauccuuugcuca

SEQ ID NO: 1266881 - RNA, 19 nt, Artificial Sequence
  Description of Artificial Sequence: Synthetic oligonucleotide
aaaggucucuacuagucca

SEQ ID NO: 1266882 - RNA, 19 nt, Artificial Sequence
  Description of Artificial Sequence: Synthetic oligonucleotide
uacaugguaacucuuucca

SEQ ID NO: 1266883 - RNA, 19 nt, Artificial Sequence
  Description of Artificial Sequence: Synthetic oligonucleotide
caaguauuagggcucaugc

SEQ ID NO: 1266884 - RNA, 19 nt, Artificial Sequence
  Description of Artificial Sequence: Synthetic oligonucleotide
uuggucugaaguuaaaggu

SEQ ID NO: 1266885 - RNA, 19 nt, Artificial Sequence
  Description of Artificial Sequence: Synthetic oligonucleotide
cacauuucaguucugcucc

SEQ ID NO: 1266886 - RNA, 19 nt, Artificial Sequence
  Description of Artificial Sequence: Synthetic oligonucleotide
aucauuuaacaguaugcag

SEQ ID NO: 1266887 - RNA, 19 nt, Artificial Sequence
  Description of Artificial Sequence: Synthetic oligonucleotide
aagaauauguaaagcugac

SEQ ID NO: 1266888 - RNA, 19 nt, Artificial Sequence
  Description of Artificial Sequence: Synthetic oligonucleotide
uuaaaggucucuacuaguc

SEQ ID NO: 1266889 - RNA, 19 nt, Artificial Sequence
  Description of Artificial Sequence: Synthetic oligonucleotide
aucuaacuauaccugaaag

SEQ ID NO: 1266890 - RNA, 19 nt, Artificial Sequence
  Description of Artificial Sequence: Synthetic oligonucleotide
agggcuauaaucauuuaac

SEQ ID NO: 1266891 - RNA, 19 nt, Artificial Sequence
  Description of Artificial Sequence: Synthetic oligonucleotide
ucagcgaugacagacauau

SEQ ID NO: 1266892 - RNA, 19 nt, Artificial Sequence
  Description of Artificial Sequence: Synthetic oligonucleotide
auagugauauaaaaucaac

SEQ ID NO: 1266893 - RNA, 19 nt, Artificial Sequence
  Description of Artificial Sequence: Synthetic oligonucleotide
gaacuaauucaucagcuuc

SEQ ID NO: 1266894 - RNA, 19 nt, Artificial Sequence
  Description of Artificial Sequence: Synthetic oligonucleotide
uuuguuccugacuaucaag

SEQ ID NO: 1266895 - RNA, 19 nt, Artificial Sequence
  Description of Artificial Sequence: Synthetic oligonucleotide
uauuugaacucauuugguc

SEQ ID NO: 1266896 - RNA, 19 nt, Artificial Sequence
  Description of Artificial Sequence: Synthetic oligonucleotide
uaaagaucgaacugagagu

SEQ ID NO: 1266897 - RNA, 19 nt, Artificial Sequence
  Description of Artificial Sequence: Synthetic oligonucleotide
uccuuagugaauccuuugc

SEQ ID NO: 1266898 - RNA, 19 nt, Artificial Sequence
  Description of Artificial Sequence: Synthetic oligonucleotide
aaccugauuggcaaugcac

SEQ ID NO: 1266899 - RNA, 19 nt, Artificial Sequence
  Description of Artificial Sequence: Synthetic oligonucleotide
auucagaaauguggaaucc

SEQ ID NO: 1266900 - RNA, 19 nt, Artificial Sequence
  Description of Artificial Sequence: Synthetic oligonucleotide
agaguugaaccugauuggc

SEQ ID NO: 1266901 - RNA, 19 nt, Artificial Sequence
  Description of Artificial Sequence: Synthetic oligonucleotide
ugaucuuauaaaacgguuu

SEQ ID NO: 1266902 - RNA, 19 nt, Artificial Sequence
  Description of Artificial Sequence: Synthetic oligonucleotide
caucucuaagaucucaggc

SEQ ID NO: 1266903 - RNA, 19 nt, Artificial Sequence
  Description of Artificial Sequence: Synthetic oligonucleotide
uuauaagugcagugaagug

SEQ ID NO: 1266904 - RNA, 19 nt, Artificial Sequence
  Description of Artificial Sequence: Synthetic oligonucleotide
uggaguucaguaccggucc

SEQ ID NO: 1266905 - RNA, 19 nt, Artificial Sequence
  Description of Artificial Sequence: Synthetic oligonucleotide
ugauuggcaaugcacugug

SEQ ID NO: 1266906 - RNA, 19 nt, Artificial Sequence
  Description of Artificial Sequence: Synthetic oligonucleotide
aacccuagggcgcggcugc

SEQ ID NO: 1266907 - RNA, 19 nt, Artificial Sequence
  Description of Artificial Sequence: Synthetic oligonucleotide
uuaucuaacuauaccugaa

SEQ ID NO: 1266908 - RNA, 19 nt, Artificial Sequence
  Description of Artificial Sequence: Synthetic oligonucleotide
uaacuauaccugaaagcug

SEQ ID NO: 1266909 - RNA, 19 nt, Artificial Sequence
  Description of Artificial Sequence: Synthetic oligonucleotide
ucaggcuuauuguuacagg

SEQ ID NO: 1266910 - RNA, 19 nt, Artificial Sequence
  Description of Artificial Sequence: Synthetic oligonucleotide
gaagggguuagcuuccagc

SEQ ID NO: 1266911 - RNA, 19 nt, Artificial Sequence
  Description of Artificial Sequence: Synthetic oligonucleotide
ggcuauaaucauuuaacag

SEQ ID NO: 1266912 - RNA, 19 nt, Artificial Sequence
  Description of Artificial Sequence: Synthetic oligonucleotide
aauaaccgcauagacugug

SEQ ID NO: 1266913 - RNA, 19 nt, Artificial Sequence
  Description of Artificial Sequence: Synthetic oligonucleotide
agaacugcggggcacgcuc

SEQ ID NO: 1266914 - RNA, 19 nt, Artificial Sequence
  Description of Artificial Sequence: Synthetic oligonucleotide
uaagcauacaugguaacuc

SEQ ID NO: 1266915 - RNA, 19 nt, Artificial Sequence
  Description of Artificial Sequence: Synthetic oligonucleotide
gaacccuuagguugagagg

SEQ ID NO: 1266916 - RNA, 19 nt, Artificial Sequence
  Description of Artificial Sequence: Synthetic oligonucleotide
uuuggagugccccacuggu

SEQ ID NO: 1266917 - RNA, 19 nt, Artificial Sequence
  Description of Artificial Sequence: Synthetic oligonucleotide
ucucuacuaguccaaagau

SEQ ID NO: 1266918 - RNA, 19 nt, Artificial Sequence
  Description of Artificial Sequence: Synthetic oligonucleotide
uaucuaacuauaccugaaa

SEQ ID NO: 1266919 - RNA, 19 nt, Artificial Sequence
  Description of Artificial Sequence: Synthetic oligonucleotide
cuaucaaguauuagggcuc

SEQ ID NO: 1266920 - RNA, 19 nt, Artificial Sequence
  Description of Artificial Sequence: Synthetic oligonucleotide
uggucugaaguuaaagguc

SEQ ID NO: 1266921 - RNA, 19 nt, Artificial Sequence
  Description of Artificial Sequence: Synthetic oligonucleotide
agugaaguggaguucagua

SEQ ID NO: 1266922 - RNA, 19 nt, Artificial Sequence
  Description of Artificial Sequence: Synthetic oligonucleotide
auguuaaagaucgaacuga

SEQ ID NO: 1266923 - RNA, 19 nt, Artificial Sequence
  Description of Artificial Sequence: Synthetic oligonucleotide
agacauauauuugaacuca

SEQ ID NO: 1266924 - RNA, 19 nt, Artificial Sequence
  Description of Artificial Sequence: Synthetic oligonucleotide
aguugaaccugauuggcaa

SEQ ID NO: 1266925 - RNA, 19 nt, Artificial Sequence
  Description of Artificial Sequence: Synthetic oligonucleotide
cagacauauauuugaacuc

SEQ ID NO: 1266926 - RNA, 19 nt, Artificial Sequence
  Description of Artificial Sequence: Synthetic oligonucleotide
cucugaagggccaaucaag

SEQ ID NO: 1266927 - RNA, 19 nt, Artificial Sequence
  Description of Artificial Sequence: Synthetic oligonucleotide
uaccuguuuaucuaacuau

SEQ ID NO: 1266928 - RNA, 19 nt, Artificial Sequence
  Description of Artificial Sequence: Synthetic oligonucleotide
uagcugacuguacugaguc

SEQ ID NO: 1266929 - RNA, 19 nt, Artificial Sequence
  Description of Artificial Sequence: Synthetic oligonucleotide
uuguccuacaaagaacuca

SEQ ID NO: 1266930 - RNA, 19 nt, Artificial Sequence
  Description of Artificial Sequence: Synthetic oligonucleotide
cauaaccaucucuucuugg

SEQ ID NO: 1266931 - RNA, 19 nt, Artificial Sequence
  Description of Artificial Sequence: Synthetic oligonucleotide
ggaacccuuagguugagag

SEQ ID NO: 1266932 - RNA, 19 nt, Artificial Sequence
  Description of Artificial Sequence: Synthetic oligonucleotide
ggugacacgaaccccaacc

SEQ ID NO: 1266933 - RNA, 19 nt, Artificial Sequence
  Description of Artificial Sequence: Synthetic oligonucleotide
uguaccuguuuaucuaacu

SEQ ID NO: 1266934 - RNA, 19 nt, Artificial Sequence
  Description of Artificial Sequence: Synthetic oligonucleotide
ugucucuaagucuuauccu

SEQ ID NO: 1266935 - RNA, 19 nt, Artificial Sequence
  Description of Artificial Sequence: Synthetic oligonucleotide
cuaacuauaccugaaagcu

SEQ ID NO: 1266936 - RNA, 19 nt, Artificial Sequence
  Description of Artificial Sequence: Synthetic oligonucleotide
uuccgaaacucacugcgcu

SEQ ID NO: 1266937 - RNA, 19 nt, Artificial Sequence
  Description of Artificial Sequence: Synthetic oligonucleotide
cacugaacuaauucaucag

SEQ ID NO: 1266938 - RNA, 19 nt, Artificial Sequence
  Description of Artificial Sequence: Synthetic oligonucleotide
caguaugcaggcauuguac

SEQ ID NO: 1266939 - RNA, 19 nt, Artificial Sequence
  Description of Artificial Sequence: Synthetic oligonucleotide
agucuuauccugguucugg

SEQ ID NO: 1266940 - RNA, 19 nt, Artificial Sequence
  Description of Artificial Sequence: Synthetic oligonucleotide
ucauuuggucugaaguuaa

SEQ ID NO: 1266941 - RNA, 19 nt, Artificial Sequence
  Description of Artificial Sequence: Synthetic oligonucleotide
acgaaccccaacccuaggg

SEQ ID NO: 1266942 - RNA, 19 nt, Artificial Sequence
  Description of Artificial Sequence: Synthetic oligonucleotide
auuuauaagugcagugaag

SEQ ID NO: 1266943 - RNA, 19 nt, Artificial Sequence
  Description of Artificial Sequence: Synthetic oligonucleotide
gaaguggaguucaguaccg

SEQ ID NO: 1266944 - RNA, 19 nt, Artificial Sequence
  Description of Artificial Sequence: Synthetic oligonucleotide
guagcggucguagaagggg

SEQ ID NO: 1266945 - RNA, 19 nt, Artificial Sequence
  Description of Artificial Sequence: Synthetic oligonucleotide
caaaugcccagaaacauaa

SEQ ID NO: 1266946 - RNA, 19 nt, Artificial Sequence
  Description of Artificial Sequence: Synthetic oligonucleotide
ugaagacauagaacuggga

SEQ ID NO: 1266947 - RNA, 19 nt, Artificial Sequence
  Description of Artificial Sequence: Synthetic oligonucleotide
ucaguggcguagaagaguu

SEQ ID NO: 1266948 - RNA, 19 nt, Artificial Sequence
  Description of Artificial Sequence: Synthetic oligonucleotide
ggcguagaagaguugaacc

SEQ ID NO: 1266949 - RNA, 19 nt, Artificial Sequence
  Description of Artificial Sequence: Synthetic oligonucleotide
aaccccaacccuagggcgc

SEQ ID NO: 1266950 - RNA, 19 nt, Artificial Sequence
  Description of Artificial Sequence: Synthetic oligonucleotide
uuaacaguaugcaggcauu

SEQ ID NO: 1266951 - RNA, 19 nt, Artificial Sequence
  Description of Artificial Sequence: Synthetic oligonucleotide
cucuacuaguccaaagauc

SEQ ID NO: 1266952 - RNA, 19 nt, Artificial Sequence
  Description of Artificial Sequence: Synthetic oligonucleotide
agaccugcgcagcugcugg

SEQ ID NO: 1266953 - RNA, 19 nt, Artificial Sequence
  Description of Artificial Sequence: Synthetic oligonucleotide
uguacugagucuggccagg

SEQ ID NO: 1266954 - RNA, 19 nt, Artificial Sequence
  Description of Artificial Sequence: Synthetic oligonucleotide
uauguaaagcugacaucuc

SEQ ID NO: 1266955 - RNA, 19 nt, Artificial Sequence
  Description of Artificial Sequence: Synthetic oligonucleotide
guuuggagugccccacugg

SEQ ID NO: 1266956 - RNA, 19 nt, Artificial Sequence
  Description of Artificial Sequence: Synthetic oligonucleotide
uuggugcauggaaagaaua

SEQ ID NO: 1266957 - RNA, 19 nt, Artificial Sequence
  Description of Artificial Sequence: Synthetic oligonucleotide
uccacgacugagucgacuc

SEQ ID NO: 1266958 - RNA, 19 nt, Artificial Sequence
  Description of Artificial Sequence: Synthetic oligonucleotide
uugaggaacauagcugacu

SEQ ID NO: 1266959 - RNA, 19 nt, Artificial Sequence
  Description of Artificial Sequence: Synthetic oligonucleotide
ugacacgaaccccaacccu

SEQ ID NO: 1266960 - RNA, 19 nt, Artificial Sequence
  Description of Artificial Sequence: Synthetic oligonucleotide
ucaguaccgguccauuguc

SEQ ID NO: 1266961 - RNA, 19 nt, Artificial Sequence
  Description of Artificial Sequence: Synthetic oligonucleotide
cuuccgaaacucacugcgc

SEQ ID NO: 1266962 - RNA, 19 nt, Artificial Sequence
  Description of Artificial Sequence: Synthetic oligonucleotide
gugacacgaaccccaaccc

SEQ ID NO: 1266963 - RNA, 19 nt, Artificial Sequence
  Description of Artificial Sequence: Synthetic oligonucleotide
cacuuugcuccaauucagc

SEQ ID NO: 1266964 - RNA, 19 nt, Artificial Sequence
  Description of Artificial Sequence: Synthetic oligonucleotide
aguagggcuauaaucauuu

SEQ ID NO: 1266965 - RNA, 19 nt, Artificial Sequence
  Description of Artificial Sequence: Synthetic oligonucleotide
uuguaccuguuuaucuaac

SEQ ID NO: 1266966 - RNA, 19 nt, Artificial Sequence
  Description of Artificial Sequence: Synthetic oligonucleotide
auauuugaacucauuuggu

SEQ ID NO: 1266967 - RNA, 19 nt, Artificial Sequence
  Description of Artificial Sequence: Synthetic oligonucleotide
cuuugcuccaauucagcga

SEQ ID NO: 1266968 - RNA, 19 nt, Artificial Sequence
  Description of Artificial Sequence: Synthetic oligonucleotide
agcugacaucucuaagauc

SEQ ID NO: 1266969 - RNA, 19 nt, Artificial Sequence
  Description of Artificial Sequence: Synthetic oligonucleotide
ucgggucugaauauuuaua

SEQ ID NO: 1266970 - RNA, 19 nt, Artificial Sequence
  Description of Artificial Sequence: Synthetic oligonucleotide
cgaacugagagucuugucc

SEQ ID NO: 1266971 - RNA, 19 nt, Artificial Sequence
  Description of Artificial Sequence: Synthetic oligonucleotide
caggcuauccacgacugag

SEQ ID NO: 1266972 - RNA, 19 nt, Artificial Sequence
  Description of Artificial Sequence: Synthetic oligonucleotide
acaguaugcaggcauugua

SEQ ID NO: 1266973 - RNA, 19 nt, Artificial Sequence
  Description of Artificial Sequence: Synthetic oligonucleotide
gacucugaagggccaauca

SEQ ID NO: 1266974 - RNA, 19 nt, Artificial Sequence
  Description of Artificial Sequence: Synthetic oligonucleotide
gaacauagcugacuguacu

SEQ ID NO: 1266975 - RNA, 19 nt, Artificial Sequence
  Description of Artificial Sequence: Synthetic oligonucleotide
ggagcuaugaagucaaaua

SEQ ID NO: 1266976 - RNA, 19 nt, Artificial Sequence
  Description of Artificial Sequence: Synthetic oligonucleotide
aaauguugggcaggacuga

SEQ ID NO: 1266977 - RNA, 19 nt, Artificial Sequence
  Description of Artificial Sequence: Synthetic oligonucleotide
gcugacaucucuaagaucu

SEQ ID NO: 1266978 - RNA, 19 nt, Artificial Sequence
  Description of Artificial Sequence: Synthetic oligonucleotide
ucacuuuguuuggagugcc

SEQ ID NO: 1266979 - RNA, 19 nt, Artificial Sequence
  Description of Artificial Sequence: Synthetic oligonucleotide
cacugguugcuuccgaaac

SEQ ID NO: 1266980 - RNA, 19 nt, Artificial Sequence
  Description of Artificial Sequence: Synthetic oligonucleotide
agcaacauucagaaaugug

SEQ ID NO: 1266981 - RNA, 19 nt, Artificial Sequence
  Description of Artificial Sequence: Synthetic oligonucleotide
uucuagaagucuuccuuuu

SEQ ID NO: 1266982 - RNA, 19 nt, Artificial Sequence
  Description of Artificial Sequence: Synthetic oligonucleotide
aggaacauagcugacugua

SEQ ID NO: 1266983 - RNA, 19 nt, Artificial Sequence
  Description of Artificial Sequence: Synthetic oligonucleotide
aguuacacugaaggcaacu

SEQ ID NO: 1266984 - RNA, 19 nt, Artificial Sequence
  Description of Artificial Sequence: Synthetic oligonucleotide
gcugaguuacacugaaggc

SEQ ID NO: 1266985 - RNA, 19 nt, Artificial Sequence
  Description of Artificial Sequence: Synthetic oligonucleotide
cucaauguuaaagaucgaa

SEQ ID NO: 1266986 - RNA, 19 nt, Artificial Sequence
  Description of Artificial Sequence: Synthetic oligonucleotide
aucuugucccgguagcggu

SEQ ID NO: 1266987 - RNA, 19 nt, Artificial Sequence
  Description of Artificial Sequence: Synthetic oligonucleotide
ucagagaguagggcuauaa

SEQ ID NO: 1266988 - RNA, 19 nt, Artificial Sequence
  Description of Artificial Sequence: Synthetic oligonucleotide
uaaccgcauagacuguguc

SEQ ID NO: 1266989 - RNA, 19 nt, Artificial Sequence
  Description of Artificial Sequence: Synthetic oligonucleotide
caaagaucuccuuccuauc

SEQ ID NO: 1266990 - RNA, 19 nt, Artificial Sequence
  Description of Artificial Sequence: Synthetic oligonucleotide
auucagcgaugacagacau

SEQ ID NO: 1266991 - RNA, 19 nt, Artificial Sequence
  Description of Artificial Sequence: Synthetic oligonucleotide
auagaacugggagcuauga

SEQ ID NO: 1266992 - RNA, 19 nt, Artificial Sequence
  Description of Artificial Sequence: Synthetic oligonucleotide
agguuuaugaagacauaga

SEQ ID NO: 1266993 - RNA, 19 nt, Artificial Sequence
  Description of Artificial Sequence: Synthetic oligonucleotide
acacgcgcagcugugcugg

SEQ ID NO: 1266994 - RNA, 19 nt, Artificial Sequence
  Description of Artificial Sequence: Synthetic oligonucleotide
ucuuggcagugcacaaaga

SEQ ID NO: 1266995 - RNA, 19 nt, Artificial Sequence
  Description of Artificial Sequence: Synthetic oligonucleotide
uggcguagaagaguugaac

SEQ ID NO: 1266996 - RNA, 19 nt, Artificial Sequence
  Description of Artificial Sequence: Synthetic oligonucleotide
ucucaauguuaaagaucga

SEQ ID NO: 1266997 - RNA, 19 nt, Artificial Sequence
  Description of Artificial Sequence: Synthetic oligonucleotide
auccccucgggucugaaua

SEQ ID NO: 1266998 - RNA, 19 nt, Artificial Sequence
  Description of Artificial Sequence: Synthetic oligonucleotide
uuagguugagaggcaauua

SEQ ID NO: 1266999 - RNA, 19 nt, Artificial Sequence
  Description of Artificial Sequence: Synthetic oligonucleotide
accgggaacacgcgcagcu

SEQ ID NO: 1267000 - RNA, 19 nt, Artificial Sequence
  Description of Artificial Sequence: Synthetic oligonucleotide
uagcggucguagaaggggu

SEQ ID NO: 1267001 - RNA, 19 nt, Artificial Sequence
  Description of Artificial Sequence: Synthetic oligonucleotide
guuaaaggucucuacuagu

SEQ ID NO: 1267002 - RNA, 19 nt, Artificial Sequence
  Description of Artificial Sequence: Synthetic oligonucleotide
gaggcaauuaucagaauau

SEQ ID NO: 1267003 - RNA, 19 nt, Artificial Sequence
  Description of Artificial Sequence: Synthetic oligonucleotide
guagaagggguuagcuucc

SEQ ID NO: 1267004 - RNA, 19 nt, Artificial Sequence
  Description of Artificial Sequence: Synthetic oligonucleotide
cagaucaaaucaaacuucu

SEQ ID NO: 1267005 - RNA, 19 nt, Artificial Sequence
  Description of Artificial Sequence: Synthetic oligonucleotide
augaucuuauaaaacgguu

SEQ ID NO: 1267006 - RNA, 19 nt, Artificial Sequence
  Description of Artificial Sequence: Synthetic oligonucleotide
guuacacugaaggcaacuc

SEQ ID NO: 1267007 - RNA, 19 nt, Artificial Sequence
  Description of Artificial Sequence: Synthetic oligonucleotide
aucgaacugagagucuugu

SEQ ID NO: 1267008 - RNA, 19 nt, Artificial Sequence
  Description of Artificial Sequence: Synthetic oligonucleotide
ucguagaagggguuagcuu

SEQ ID NO: 1267009 - RNA, 19 nt, Artificial Sequence
  Description of Artificial Sequence: Synthetic oligonucleotide
caggacugagcccgguucc

SEQ ID NO: 1267010 - RNA, 19 nt, Artificial Sequence
  Description of Artificial Sequence: Synthetic oligonucleotide
aagucuuauccugguucug

SEQ ID NO: 1267011 - RNA, 19 nt, Artificial Sequence
  Description of Artificial Sequence: Synthetic oligonucleotide
aggcggcugggucagaccu

SEQ ID NO: 1267012 - RNA, 19 nt, Artificial Sequence
  Description of Artificial Sequence: Synthetic oligonucleotide
caggauagugauauaaaau

SEQ ID NO: 1267013 - RNA, 19 nt, Artificial Sequence
  Description of Artificial Sequence: Synthetic oligonucleotide
caguaccgguccauugucc

SEQ ID NO: 1267014 - RNA, 19 nt, Artificial Sequence
  Description of Artificial Sequence: Synthetic oligonucleotide
uccugacuaucaaguauua

SEQ ID NO: 1267015 - RNA, 19 nt, Artificial Sequence
  Description of Artificial Sequence: Synthetic oligonucleotide
uaccgguccauuguccuac

SEQ ID NO: 1267016 - RNA, 19 nt, Artificial Sequence
  Description of Artificial Sequence: Synthetic oligonucleotide
ugacuguacugagucuggc

SEQ ID NO: 1267017 - RNA, 19 nt, Artificial Sequence
  Description of Artificial Sequence: Synthetic oligonucleotide
uuguuuggagugccccacu

SEQ ID NO: 1267018 - RNA, 19 nt, Artificial Sequence
  Description of Artificial Sequence: Synthetic oligonucleotide
ucaggcuauccacgacuga

SEQ ID NO: 1267019 - RNA, 19 nt, Artificial Sequence
  Description of Artificial Sequence: Synthetic oligonucleotide
gaucgaacugagagucuug

SEQ ID NO: 1267020 - RNA, 19 nt, Artificial Sequence
  Description of Artificial Sequence: Synthetic oligonucleotide
gaguugaaccugauuggca

SEQ ID NO: 1267021 - RNA, 19 nt, Artificial Sequence
  Description of Artificial Sequence: Synthetic oligonucleotide
agaucgaacugagagucuu

SEQ ID NO: 1267022 - RNA, 19 nt, Artificial Sequence
  Description of Artificial Sequence: Synthetic oligonucleotide
cauuggugcauggaaagaa

SEQ ID NO: 1267023 - RNA, 19 nt, Artificial Sequence
  Description of Artificial Sequence: Synthetic oligonucleotide
guauuagggcucaugccca

SEQ ID NO: 1267024 - RNA, 19 nt, Artificial Sequence
  Description of Artificial Sequence: Synthetic oligonucleotide
auagcugacuguacugagu

SEQ ID NO: 1267025 - RNA, 19 nt, Artificial Sequence
  Description of Artificial Sequence: Synthetic oligonucleotide
cuuuguuccugacuaucaa

SEQ ID NO: 1267026 - RNA, 19 nt, Artificial Sequence
  Description of Artificial Sequence: Synthetic oligonucleotide
ucgaacugagagucuuguc

SEQ ID NO: 1267027 - RNA, 19 nt, Artificial Sequence
  Description of Artificial Sequence: Synthetic oligonucleotide
gcgcacugcacacaggccc

SEQ ID NO: 1267028 - RNA, 19 nt, Artificial Sequence
  Description of Artificial Sequence: Synthetic oligonucleotide
guuaaagaucgaacugaga

SEQ ID NO: 1267029 - RNA, 19 nt, Artificial Sequence
  Description of Artificial Sequence: Synthetic oligonucleotide
guggaguucaguaccgguc

SEQ ID NO: 1267030 - RNA, 19 nt, Artificial Sequence
  Description of Artificial Sequence: Synthetic oligonucleotide
gaucucaggcuuauuguua

SEQ ID NO: 1267031 - RNA, 19 nt, Artificial Sequence
  Description of Artificial Sequence: Synthetic oligonucleotide
aagaucgaacugagagucu

SEQ ID NO: 1267032 - RNA, 19 nt, Artificial Sequence
  Description of Artificial Sequence: Synthetic oligonucleotide
ccacuuugcuccaauucag

SEQ ID NO: 1267033 - RNA, 19 nt, Artificial Sequence
  Description of Artificial Sequence: Synthetic oligonucleotide
acgguuuuauuuacacuga

SEQ ID NO: 1267034 - RNA, 19 nt, Artificial Sequence
  Description of Artificial Sequence: Synthetic oligonucleotide
aggcgggacucaaaggcgg

SEQ ID NO: 1267035 - RNA, 19 nt, Artificial Sequence
  Description of Artificial Sequence: Synthetic oligonucleotide
auuuaacaguaugcaggca

SEQ ID NO: 1267036 - RNA, 19 nt, Artificial Sequence
  Description of Artificial Sequence: Synthetic oligonucleotide
uaccugaaagcugcugagu

SEQ ID NO: 1267037 - RNA, 19 nt, Artificial Sequence
  Description of Artificial Sequence: Synthetic oligonucleotide
gacacgaaccccaacccua

SEQ ID NO: 1267038 - RNA, 19 nt, Artificial Sequence
  Description of Artificial Sequence: Synthetic oligonucleotide
gggauucuagaagucuucc

SEQ ID NO: 1267039 - RNA, 19 nt, Artificial Sequence
  Description of Artificial Sequence: Synthetic oligonucleotide
ugaccccguugccaucugc

SEQ ID NO: 1267040 - RNA, 19 nt, Artificial Sequence
  Description of Artificial Sequence: Synthetic oligonucleotide
cugugcuggugacacgaac

SEQ ID NO: 1267041 - RNA, 19 nt, Artificial Sequence
  Description of Artificial Sequence: Synthetic oligonucleotide
caggcauuguaccuguuua

SEQ ID NO: 1267042 - RNA, 19 nt, Artificial Sequence
  Description of Artificial Sequence: Synthetic oligonucleotide
aacugcggggcacgcucca

SEQ ID NO: 1267043 - RNA, 19 nt, Artificial Sequence
  Description of Artificial Sequence: Synthetic oligonucleotide
acacgaaccccaacccuag

SEQ ID NO: 1267044 - RNA, 19 nt, Artificial Sequence
  Description of Artificial Sequence: Synthetic oligonucleotide
guaugcaggcauuguaccu

SEQ ID NO: 1267045 - RNA, 19 nt, Artificial Sequence
  Description of Artificial Sequence: Synthetic oligonucleotide
ccuuaaguucaggauagug

SEQ ID NO: 1267046 - RNA, 19 nt, Artificial Sequence
  Description of Artificial Sequence: Synthetic oligonucleotide
ccugauuggcaaugcacug

SEQ ID NO: 1267047 - RNA, 19 nt, Artificial Sequence
  Description of Artificial Sequence: Synthetic oligonucleotide
auaaccgcauagacugugu

SEQ ID NO: 1267048 - RNA, 19 nt, Artificial Sequence
  Description of Artificial Sequence: Synthetic oligonucleotide
caugcccacaaucacuucu

SEQ ID NO: 1267049 - RNA, 19 nt, Artificial Sequence
  Description of Artificial Sequence: Synthetic oligonucleotide
uccgaaacucacugcgcuu

SEQ ID NO: 1267050 - RNA, 19 nt, Artificial Sequence
  Description of Artificial Sequence: Synthetic oligonucleotide
uccuaucaguggcguagaa

SEQ ID NO: 1267051 - RNA, 19 nt, Artificial Sequence
  Description of Artificial Sequence: Synthetic oligonucleotide
uuggagugccccacugguu

SEQ ID NO: 1267052 - RNA, 19 nt, Artificial Sequence
  Description of Artificial Sequence: Synthetic oligonucleotide
gguugcuuccgaaacucac

SEQ ID NO: 1267053 - RNA, 19 nt, Artificial Sequence
  Description of Artificial Sequence: Synthetic oligonucleotide
gaggggauucuagaagucu

SEQ ID NO: 1267054 - RNA, 19 nt, Artificial Sequence
  Description of Artificial Sequence: Synthetic oligonucleotide
cuuauuguuacagguuuau

SEQ ID NO: 1267055 - RNA, 19 nt, Artificial Sequence
  Description of Artificial Sequence: Synthetic oligonucleotide
cugugucuuucgcugaaaa

SEQ ID NO: 1267056 - RNA, 19 nt, Artificial Sequence
  Description of Artificial Sequence: Synthetic oligonucleotide
ggagccccggcguaccggg

SEQ ID NO: 1267057 - RNA, 19 nt, Artificial Sequence
  Description of Artificial Sequence: Synthetic oligonucleotide
gcauuguaccuguuuaucu

SEQ ID NO: 1267058 - RNA, 19 nt, Artificial Sequence
  Description of Artificial Sequence: Synthetic oligonucleotide
gguagcggucguagaaggg

SEQ ID NO: 1267059 - RNA, 19 nt, Artificial Sequence
  Description of Artificial Sequence: Synthetic oligonucleotide
ggaacauagcugacuguac

SEQ ID NO: 1267060 - RNA, 19 nt, Artificial Sequence
  Description of Artificial Sequence: Synthetic oligonucleotide
aaaugcccagaaacauaaa

SEQ ID NO: 1267061 - RNA, 19 nt, Artificial Sequence
  Description of Artificial Sequence: Synthetic oligonucleotide
accccaacccuagggcgcg

SEQ ID NO: 1267062 - RNA, 19 nt, Artificial Sequence
  Description of Artificial Sequence: Synthetic oligonucleotide
ugggcacauuucaguucug

SEQ ID NO: 1267063 - RNA, 19 nt, Artificial Sequence
  Description of Artificial Sequence: Synthetic oligonucleotide
ggcuuauuguuacagguuu

SEQ ID NO: 1267064 - RNA, 19 nt, Artificial Sequence
  Description of Artificial Sequence: Synthetic oligonucleotide
uccccucgggucugaauau

SEQ ID NO: 1267065 - RNA, 19 nt, Artificial Sequence
  Description of Artificial Sequence: Synthetic oligonucleotide
cauuuggucugaaguuaaa

SEQ ID NO: 1267066 - RNA, 19 nt, Artificial Sequence
  Description of Artificial Sequence: Synthetic oligonucleotide
aggcuuauuguuacagguu

SEQ ID NO: 1267067 - RNA, 19 nt, Artificial Sequence
  Description of Artificial Sequence: Synthetic oligonucleotide
gaacugcggggcacgcucc

SEQ ID NO: 1267068 - RNA, 19 nt, Artificial Sequence
  Description of Artificial Sequence: Synthetic oligonucleotide
gaacacgcgcagcugugcu

SEQ ID NO: 1267069 - RNA, 19 nt, Artificial Sequence
  Description of Artificial Sequence: Synthetic oligonucleotide
gaggaacauagcugacugu

SEQ ID NO: 1267070 - RNA, 19 nt, Artificial Sequence
  Description of Artificial Sequence: Synthetic oligonucleotide
aggcuauccacgacugagu

SEQ ID NO: 1267071 - RNA, 19 nt, Artificial Sequence
  Description of Artificial Sequence: Synthetic oligonucleotide
gaguuacacugaaggcaac

SEQ ID NO: 1267072 - RNA, 19 nt, Artificial Sequence
  Description of Artificial Sequence: Synthetic oligonucleotide
caacccuagggcgcggcug

SEQ ID NO: 1267073 - RNA, 19 nt, Artificial Sequence
  Description of Artificial Sequence: Synthetic oligonucleotide
cggcguaccgggaacacgc

SEQ ID NO: 1267074 - RNA, 19 nt, Artificial Sequence
  Description of Artificial Sequence: Synthetic oligonucleotide
agcauacaugguaacucuu

SEQ ID NO: 1267075 - RNA, 19 nt, Artificial Sequence
  Description of Artificial Sequence: Synthetic oligonucleotide
ccugacuaucaaguauuag

SEQ ID NO: 1267076 - RNA, 19 nt, Artificial Sequence
  Description of Artificial Sequence: Synthetic oligonucleotide
auccacgacugagucgacu

SEQ ID NO: 1267077 - RNA, 19 nt, Artificial Sequence
  Description of Artificial Sequence: Synthetic oligonucleotide
ccaaagaucuccuuccuau

SEQ ID NO: 1267078 - RNA, 19 nt, Artificial Sequence
  Description of Artificial Sequence: Synthetic oligonucleotide
uauccacgacugagucgac

SEQ ID NO: 1267079 - RNA, 19 nt, Artificial Sequence
  Description of Artificial Sequence: Synthetic oligonucleotide
gucguagaagggguuagcu

SEQ ID NO: 1267080 - RNA, 19 nt, Artificial Sequence
  Description of Artificial Sequence: Synthetic oligonucleotide
acugcggggcacgcuccac

SEQ ID NO: 1267081 - RNA, 19 nt, Artificial Sequence
  Description of Artificial Sequence: Synthetic oligonucleotide
cucgggucugaauauuuau

SEQ ID NO: 1267082 - RNA, 19 nt, Artificial Sequence
  Description of Artificial Sequence: Synthetic oligonucleotide
cucgcugaccccguugcca

SEQ ID NO: 1267083 - RNA, 19 nt, Artificial Sequence
  Description of Artificial Sequence: Synthetic oligonucleotide
ucccgguagcggucguaga

SEQ ID NO: 1267084 - RNA, 19 nt, Artificial Sequence
  Description of Artificial Sequence: Synthetic oligonucleotide
cgguagcggucguagaagg

SEQ ID NO: 1267085 - RNA, 19 nt, Artificial Sequence
  Description of Artificial Sequence: Synthetic oligonucleotide
ucgacucugaagggccaau

SEQ ID NO: 1267086 - RNA, 19 nt, Artificial Sequence
  Description of Artificial Sequence: Synthetic oligonucleotide
guagggcuauaaucauuua

SEQ ID NO: 1267087 - RNA, 19 nt, Artificial Sequence
  Description of Artificial Sequence: Synthetic oligonucleotide
ggcacauuucaguucugcu

SEQ ID NO: 1267088 - RNA, 19 nt, Artificial Sequence
  Description of Artificial Sequence: Synthetic oligonucleotide
acugugucuuucgcugaaa

SEQ ID NO: 1267089 - RNA, 19 nt, Artificial Sequence
  Description of Artificial Sequence: Synthetic oligonucleotide
gcagugcacaaagaaaugu

SEQ ID NO: 1267090 - RNA, 19 nt, Artificial Sequence
  Description of Artificial Sequence: Synthetic oligonucleotide
ggaacacgcgcagcugugc

SEQ ID NO: 1267091 - RNA, 19 nt, Artificial Sequence
  Description of Artificial Sequence: Synthetic oligonucleotide
cugauuggcaaugcacugu

SEQ ID NO: 1267092 - RNA, 19 nt, Artificial Sequence
  Description of Artificial Sequence: Synthetic oligonucleotide
cuagggcgcggcugcgcac

SEQ ID NO: 1267093 - RNA, 19 nt, Artificial Sequence
  Description of Artificial Sequence: Synthetic oligonucleotide
gaauaaccgcauagacugu

SEQ ID NO: 1267094 - RNA, 19 nt, Artificial Sequence
  Description of Artificial Sequence: Synthetic oligonucleotide
agucgacucugaagggcca

SEQ ID NO: 1267095 - RNA, 19 nt, Artificial Sequence
  Description of Artificial Sequence: Synthetic oligonucleotide
agccggagccccggcguac

SEQ ID NO: 1267096 - RNA, 19 nt, Artificial Sequence
  Description of Artificial Sequence: Synthetic oligonucleotide
aggucucuacuaguccaaa

SEQ ID NO: 1267097 - RNA, 19 nt, Artificial Sequence
  Description of Artificial Sequence: Synthetic oligonucleotide
ccuuagugaauccuuugcu

SEQ ID NO: 1267098 - RNA, 19 nt, Artificial Sequence
  Description of Artificial Sequence: Synthetic oligonucleotide
gaccccguugccaucugcu

SEQ ID NO: 1267099 - RNA, 19 nt, Artificial Sequence
  Description of Artificial Sequence: Synthetic oligonucleotide
agccccggcguaccgggaa

SEQ ID NO: 1267100 - RNA, 19 nt, Artificial Sequence
  Description of Artificial Sequence: Synthetic oligonucleotide
guaccgguccauuguccua

SEQ ID NO: 1267101 - RNA, 19 nt, Artificial Sequence
  Description of Artificial Sequence: Synthetic oligonucleotide
gcguaccgggaacacgcgc

SEQ ID NO: 1267102 - RNA, 19 nt, Artificial Sequence
  Description of Artificial Sequence: Synthetic oligonucleotide
gaguagggcuauaaucauu

SEQ ID NO: 1267103 - RNA, 19 nt, Artificial Sequence
  Description of Artificial Sequence: Synthetic oligonucleotide
aggaacccuuagguugaga

SEQ ID NO: 1267104 - RNA, 19 nt, Artificial Sequence
  Description of Artificial Sequence: Synthetic oligonucleotide
acccuuagguugagaggca

SEQ ID NO: 1267105 - RNA, 19 nt, Artificial Sequence
  Description of Artificial Sequence: Synthetic oligonucleotide
ggucagaccugcgcagcug

SEQ ID NO: 1267106 - RNA, 19 nt, Artificial Sequence
  Description of Artificial Sequence: Synthetic oligonucleotide
aucaaguauuagggcucau

SEQ ID NO: 1267107 - RNA, 19 nt, Artificial Sequence
  Description of Artificial Sequence: Synthetic oligonucleotide
cguaccgggaacacgcgca

SEQ ID NO: 1267108 - RNA, 19 nt, Artificial Sequence
  Description of Artificial Sequence: Synthetic oligonucleotide
ggcguaccgggaacacgcg

SEQ ID NO: 1267109 - RNA, 19 nt, Artificial Sequence
  Description of Artificial Sequence: Synthetic oligonucleotide
gcggcugggucagaccugc

SEQ ID NO: 1267110 - RNA, 19 nt, Artificial Sequence
  Description of Artificial Sequence: Synthetic oligonucleotide
cgaugacagacauauauuu

SEQ ID NO: 1267111 - RNA, 19 nt, Artificial Sequence
  Description of Artificial Sequence: Synthetic oligonucleotide
cugccaaaucuguuguauu

SEQ ID NO: 1267112 - RNA, 19 nt, Artificial Sequence
  Description of Artificial Sequence: Synthetic oligonucleotide
gucgacucugaagggccaa

SEQ ID NO: 1267113 - RNA, 19 nt, Artificial Sequence
  Description of Artificial Sequence: Synthetic oligonucleotide
ggcgggacucaaaggcggc

SEQ ID NO: 1267114 - RNA, 19 nt, Artificial Sequence
  Description of Artificial Sequence: Synthetic oligonucleotide
ggcgcggcugcgcacugca

SEQ ID NO: 1267115 - RNA, 19 nt, Artificial Sequence
  Description of Artificial Sequence: Synthetic oligonucleotide
gggagcuaugaagucaaau

SEQ ID NO: 1267116 - RNA, 19 nt, Artificial Sequence
  Description of Artificial Sequence: Synthetic oligonucleotide
agggcgcggcugcgcacug

SEQ ID NO: 1267117 - RNA, 19 nt, Artificial Sequence
  Description of Artificial Sequence: Synthetic oligonucleotide
guccuacaaagaacucaua

SEQ ID NO: 1267118 - RNA, 19 nt, Artificial Sequence
  Description of Artificial Sequence: Synthetic oligonucleotide
cgcauagacugugucuuuc

SEQ ID NO: 1267119 - RNA, 19 nt, Artificial Sequence
  Description of Artificial Sequence: Synthetic oligonucleotide
gcaggcauuguaccuguuu

SEQ ID NO: 1267120 - RNA, 19 nt, Artificial Sequence
  Description of Artificial Sequence: Synthetic oligonucleotide
ccggcguaccgggaacacg

SEQ ID NO: 1267121 - RNA, 19 nt, Artificial Sequence
  Description of Artificial Sequence: Synthetic oligonucleotide
gcgaugacagacauauauu

SEQ ID NO: 1267122 - RNA, 19 nt, Artificial Sequence
  Description of Artificial Sequence: Synthetic oligonucleotide
agcauccccucgggucuga

SEQ ID NO: 1267123 - RNA, 19 nt, Artificial Sequence
  Description of Artificial Sequence: Synthetic oligonucleotide
ggcggcugggucagaccug

SEQ ID NO: 1267124 - RNA, 19 nt, Artificial Sequence
  Description of Artificial Sequence: Synthetic oligonucleotide
gggucagaccugcgcagcu

SEQ ID NO: 1267125 - RNA, 19 nt, Artificial Sequence
  Description of Artificial Sequence: Synthetic oligonucleotide
gcugaccccguugccaucu

SEQ ID NO: 1267126 - RNA, 19 nt, Artificial Sequence
  Description of Artificial Sequence: Synthetic oligonucleotide
cauccccucgggucugaau

SEQ ID NO: 1267127 - RNA, 19 nt, Artificial Sequence
  Description of Artificial Sequence: Synthetic oligonucleotide
ccgggaacacgcgcagcug

SEQ ID NO: 1267128 - RNA, 19 nt, Artificial Sequence
  Description of Artificial Sequence: Synthetic oligonucleotide
cgcggcugcgcacugcaca

SEQ ID NO: 1267129 - RNA, 19 nt, Artificial Sequence
  Description of Artificial Sequence: Synthetic oligonucleotide
ccuuagguugagaggcaau

SEQ ID NO: 1267130 - RNA, 19 nt, Artificial Sequence
  Description of Artificial Sequence: Synthetic oligonucleotide
ccggagccccggcguaccg

SEQ ID NO: 1267131 - RNA, 19 nt, Artificial Sequence
  Description of Artificial Sequence: Synthetic oligonucleotide
cccuuagguugagaggcaa

SEQ ID NO: 1267132 - RNA, 19 nt, Artificial Sequence
  Description of Artificial Sequence: Synthetic oligonucleotide
gagccccggcguaccggga

SEQ ID NO: 1267133 - RNA, 19 nt, Artificial Sequence
  Description of Artificial Sequence: Synthetic oligonucleotide
cccggcguaccgggaacac

SEQ ID NO: 1267134 - RNA, 19 nt, Artificial Sequence
  Description of Artificial Sequence: Synthetic oligonucleotide
ccacgacugagucgacucu

SEQ ID NO: 1267135 - RNA, 19 nt, Artificial Sequence
  Description of Artificial Sequence: Synthetic oligonucleotide
ccguugccaucugcucccc

SEQ ID NO: 1267136 - RNA, 19 nt, Artificial Sequence
  Description of Artificial Sequence: Synthetic oligonucleotide
cggagccccggcguaccgg

SEQ ID NO: 1267137 - RNA, 19 nt, Artificial Sequence
  Description of Artificial Sequence: Synthetic oligonucleotide
cgacugagucgacucugaa

SEQ ID NO: 1267138 - RNA, 19 nt, Artificial Sequence
  Description of Artificial Sequence: Synthetic oligonucleotide
cgggaacacgcgcagcugu

SEQ ID NO: 1267139 - RNA, 19 nt, Artificial Sequence
  Description of Artificial Sequence: Synthetic oligonucleotide
caucagcacuaugccuuuu

SEQ ID NO: 1267140 - RNA, 19 nt, Artificial Sequence
  Description of Artificial Sequence: Synthetic oligonucleotide
gcgggacucaaaggcggcu

SEQ ID NO: 1267141 - RNA, 19 nt, Artificial Sequence
  Description of Artificial Sequence: Synthetic oligonucleotide
gggcgcggcugcgcacugc

SEQ ID NO: 1267142 - RNA, 19 nt, Artificial Sequence
  Description of Artificial Sequence: Synthetic oligonucleotide
ccgguccauuguccuacaa

SEQ ID NO: 1267143 - RNA, 19 nt, Artificial Sequence
  Description of Artificial Sequence: Synthetic oligonucleotide
ccaacccuagggcgcggcu

SEQ ID NO: 1267144 - RNA, 19 nt, Artificial Sequence
  Description of Artificial Sequence: Synthetic oligonucleotide
acgaaaaugaugcucaucc

SEQ ID NO: 1267145 - RNA, 19 nt, Artificial Sequence
  Description of Artificial Sequence: Synthetic oligonucleotide
aacuaaaucguuucuuccc

SEQ ID NO: 1267146 - RNA, 19 nt, Artificial Sequence
  Description of Artificial Sequence: Synthetic oligonucleotide
ugaauucaaacccagaggc

SEQ ID NO: 1267147 - RNA, 19 nt, Artificial Sequence
  Description of Artificial Sequence: Synthetic oligonucleotide
ugaguuauccauuuguagg

SEQ ID NO: 1267148 - RNA, 19 nt, Artificial Sequence
  Description of Artificial Sequence: Synthetic oligonucleotide
aauagauacaucucggaca

SEQ ID NO: 1267149 - RNA, 19 nt, Artificial Sequence
  Description of Artificial Sequence: Synthetic oligonucleotide
auacagacgaaaaugaugc

SEQ ID NO: 1267150 - RNA, 19 nt, Artificial Sequence
  Description of Artificial Sequence: Synthetic oligonucleotide
ucuaugaggauuuagcagc

SEQ ID NO: 1267151 - RNA, 19 nt, Artificial Sequence
  Description of Artificial Sequence: Synthetic oligonucleotide
gaaauuaguucuucuaccg

SEQ ID NO: 1267152 - RNA, 19 nt, Artificial Sequence
  Description of Artificial Sequence: Synthetic oligonucleotide
uucuguauggcuuuacucg

SEQ ID NO: 1267153 - RNA, 19 nt, Artificial Sequence
  Description of Artificial Sequence: Synthetic oligonucleotide
acagaauagauacaucucg

SEQ ID NO: 1267154 - RNA, 19 nt, Artificial Sequence
  Description of Artificial Sequence: Synthetic oligonucleotide
aaaacggccauucugguga

SEQ ID NO: 1267155 - RNA, 19 nt, Artificial Sequence
  Description of Artificial Sequence: Synthetic oligonucleotide
uuuaccagcaaccaugcug

SEQ ID NO: 1267156 - RNA, 19 nt, Artificial Sequence
  Description of Artificial Sequence: Synthetic oligonucleotide
ucaauuauccaccagcaac

SEQ ID NO: 1267157 - RNA, 19 nt, Artificial Sequence
  Description of Artificial Sequence: Synthetic oligonucleotide
aaacucucugcuuugaaug

SEQ ID NO: 1267158 - RNA, 19 nt, Artificial Sequence
  Description of Artificial Sequence: Synthetic oligonucleotide
agcucuuuccaucaaaugg

SEQ ID NO: 1267159 - RNA, 19 nt, Artificial Sequence
  Description of Artificial Sequence: Synthetic oligonucleotide
uuuaauguagguuccagcu

SEQ ID NO: 1267160 - RNA, 19 nt, Artificial Sequence
  Description of Artificial Sequence: Synthetic oligonucleotide
aacucuuucucgcagaacu

SEQ ID NO: 1267161 - RNA, 19 nt, Artificial Sequence
  Description of Artificial Sequence: Synthetic oligonucleotide
gaaggaaaccgauaaaacc

SEQ ID NO: 1267162 - RNA, 19 nt, Artificial Sequence
  Description of Artificial Sequence: Synthetic oligonucleotide
uuauccaccagcaacaaaa

SEQ ID NO: 1267163 - RNA, 19 nt, Artificial Sequence
  Description of Artificial Sequence: Synthetic oligonucleotide
ucuggaugagcaaagacca

SEQ ID NO: 1267164 - RNA, 19 nt, Artificial Sequence
  Description of Artificial Sequence: Synthetic oligonucleotide
guucaaagcuuucaaaacg

SEQ ID NO: 1267165 - RNA, 19 nt, Artificial Sequence
  Description of Artificial Sequence: Synthetic oligonucleotide
uucuggaugagcaaagacc

SEQ ID NO: 1267166 - RNA, 19 nt, Artificial Sequence
  Description of Artificial Sequence: Synthetic oligonucleotide
auagauacaucucggacag

SEQ ID NO: 1267167 - RNA, 19 nt, Artificial Sequence
  Description of Artificial Sequence: Synthetic oligonucleotide
uuacucguccauaucaggg

SEQ ID NO: 1267168 - RNA, 19 nt, Artificial Sequence
  Description of Artificial Sequence: Synthetic oligonucleotide
aguucucacaucuacaucu

SEQ ID NO: 1267169 - RNA, 19 nt, Artificial Sequence
  Description of Artificial Sequence: Synthetic oligonucleotide
ugaaauuaguucuucuacc

SEQ ID NO: 1267170 - RNA, 19 nt, Artificial Sequence
  Description of Artificial Sequence: Synthetic oligonucleotide
uagaucauugaacaacucc

SEQ ID NO: 1267171 - RNA, 19 nt, Artificial Sequence
  Description of Artificial Sequence: Synthetic oligonucleotide
uaguguucaaaugugagag

SEQ ID NO: 1267172 - RNA, 19 nt, Artificial Sequence
  Description of Artificial Sequence: Synthetic oligonucleotide
acuucaaacaagcucuuuc

SEQ ID NO: 1267173 - RNA, 19 nt, Artificial Sequence
  Description of Artificial Sequence: Synthetic oligonucleotide
gaggaugagaaauuaaaac

SEQ ID NO: 1267174 - RNA, 19 nt, Artificial Sequence
  Description of Artificial Sequence: Synthetic oligonucleotide
auacaucucggacagguac

SEQ ID NO: 1267175 - RNA, 19 nt, Artificial Sequence
  Description of Artificial Sequence: Synthetic oligonucleotide
ugaaacgcacucuaugagg

SEQ ID NO: 1267176 - RNA, 19 nt, Artificial Sequence
  Description of Artificial Sequence: Synthetic oligonucleotide
ugagaaauuaaaacucucu

SEQ ID NO: 1267177 - RNA, 19 nt, Artificial Sequence
  Description of Artificial Sequence: Synthetic oligonucleotide
ucuagcucaagaaugucug

SEQ ID NO: 1267178 - RNA, 19 nt, Artificial Sequence
  Description of Artificial Sequence: Synthetic oligonucleotide
aaggaaaccgauaaaacca

SEQ ID NO: 1267179 - RNA, 19 nt, Artificial Sequence
  Description of Artificial Sequence: Synthetic oligonucleotide
aauuaguucuucuaccgaa

SEQ ID NO: 1267180 - RNA, 19 nt, Artificial Sequence
  Description of Artificial Sequence: Synthetic oligonucleotide
uuugaaacaaucugggcaa

SEQ ID NO: 1267181 - RNA, 19 nt, Artificial Sequence
  Description of Artificial Sequence: Synthetic oligonucleotide
accgauaaaaccaugcugg

SEQ ID NO: 1267182 - RNA, 19 nt, Artificial Sequence
  Description of Artificial Sequence: Synthetic oligonucleotide
aacugaacaacaaccgggc

SEQ ID NO: 1267183 - RNA, 19 nt, Artificial Sequence
  Description of Artificial Sequence: Synthetic oligonucleotide
aaacauugcauacacgcaa

SEQ ID NO: 1267184 - RNA, 19 nt, Artificial Sequence
  Description of Artificial Sequence: Synthetic oligonucleotide
aaugggaauuuacccaguc

SEQ ID NO: 1267185 - RNA, 19 nt, Artificial Sequence
  Description of Artificial Sequence: Synthetic oligonucleotide
aaaucguuucuucccagag

SEQ ID NO: 1267186 - RNA, 19 nt, Artificial Sequence
  Description of Artificial Sequence: Synthetic oligonucleotide
aaccgauaaaaccaugcug

SEQ ID NO: 1267187 - RNA, 19 nt, Artificial Sequence
  Description of Artificial Sequence: Synthetic oligonucleotide
uguacgagcaucguguuag

SEQ ID NO: 1267188 - RNA, 19 nt, Artificial Sequence
  Description of Artificial Sequence: Synthetic oligonucleotide
aaucguuucuucccagagg

SEQ ID NO: 1267189 - RNA, 19 nt, Artificial Sequence
  Description of Artificial Sequence: Synthetic oligonucleotide
aaagucuccguguacaaau

SEQ ID NO: 1267190 - RNA, 19 nt, Artificial Sequence
  Description of Artificial Sequence: Synthetic oligonucleotide
ugcuggugaauucaaaccc

SEQ ID NO: 1267191 - RNA, 19 nt, Artificial Sequence
  Description of Artificial Sequence: Synthetic oligonucleotide
ucguuuagaaauccaaugu

SEQ ID NO: 1267192 - RNA, 19 nt, Artificial Sequence
  Description of Artificial Sequence: Synthetic oligonucleotide
acuucuugcgaagugaaac

SEQ ID NO: 1267193 - RNA, 19 nt, Artificial Sequence
  Description of Artificial Sequence: Synthetic oligonucleotide
agaacugaacaacaaccgg

SEQ ID NO: 1267194 - RNA, 19 nt, Artificial Sequence
  Description of Artificial Sequence: Synthetic oligonucleotide
cuucaaacaagcucuuucc

SEQ ID NO: 1267195 - RNA, 19 nt, Artificial Sequence
  Description of Artificial Sequence: Synthetic oligonucleotide
cauaucagggcacuguagg

SEQ ID NO: 1267196 - RNA, 19 nt, Artificial Sequence
  Description of Artificial Sequence: Synthetic oligonucleotide
caucguguuaggaaaaccc

SEQ ID NO: 1267197 - RNA, 19 nt, Artificial Sequence
  Description of Artificial Sequence: Synthetic oligonucleotide
agucacguucaucagagag

SEQ ID NO: 1267198 - RNA, 19 nt, Artificial Sequence
  Description of Artificial Sequence: Synthetic oligonucleotide
cuuaguguucaaaugugag

SEQ ID NO: 1267199 - RNA, 19 nt, Artificial Sequence
  Description of Artificial Sequence: Synthetic oligonucleotide
aagugaaacgcacucuaug

SEQ ID NO: 1267200 - RNA, 19 nt, Artificial Sequence
  Description of Artificial Sequence: Synthetic oligonucleotide
gaauagauacaucucggac

SEQ ID NO: 1267201 - RNA, 19 nt, Artificial Sequence
  Description of Artificial Sequence: Synthetic oligonucleotide
ucucgcagaacucuugaag

SEQ ID NO: 1267202 - RNA, 19 nt, Artificial Sequence
  Description of Artificial Sequence: Synthetic oligonucleotide
aaaccgauaaaaccaugcu

SEQ ID NO: 1267203 - RNA, 19 nt, Artificial Sequence
  Description of Artificial Sequence: Synthetic oligonucleotide
cucgcagaacucuugaagg

SEQ ID NO: 1267204 - RNA, 19 nt, Artificial Sequence
  Description of Artificial Sequence: Synthetic oligonucleotide
uuccuaagcaaacauugca

SEQ ID NO: 1267205 - RNA, 19 nt, Artificial Sequence
  Description of Artificial Sequence: Synthetic oligonucleotide
uaugcugccuguacgagca

SEQ ID NO: 1267206 - RNA, 19 nt, Artificial Sequence
  Description of Artificial Sequence: Synthetic oligonucleotide
agacgaauuuucuucagug

SEQ ID NO: 1267207 - RNA, 19 nt, Artificial Sequence
  Description of Artificial Sequence: Synthetic oligonucleotide
aaauuaguucuucuaccga

SEQ ID NO: 1267208 - RNA, 19 nt, Artificial Sequence
  Description of Artificial Sequence: Synthetic oligonucleotide
aaaugaugcucauccaggu

SEQ ID NO: 1267209 - RNA, 19 nt, Artificial Sequence
  Description of Artificial Sequence: Synthetic oligonucleotide
uuuacucguccauaucagg

SEQ ID NO: 1267210 - RNA, 19 nt, Artificial Sequence
  Description of Artificial Sequence: Synthetic oligonucleotide
uuaguguucaaaugugaga

SEQ ID NO: 1267211 - RNA, 19 nt, Artificial Sequence
  Description of Artificial Sequence: Synthetic oligonucleotide
cugaaauuaguucuucuac

SEQ ID NO: 1267212 - RNA, 19 nt, Artificial Sequence
  Description of Artificial Sequence: Synthetic oligonucleotide
ugaacuaaaucguuucuuc

SEQ ID NO: 1267213 - RNA, 19 nt, Artificial Sequence
  Description of Artificial Sequence: Synthetic oligonucleotide
cagaauagauacaucucgg

SEQ ID NO: 1267214 - RNA, 19 nt, Artificial Sequence
  Description of Artificial Sequence: Synthetic oligonucleotide
cacucuaugaggauuuagc

SEQ ID NO: 1267215 - RNA, 19 nt, Artificial Sequence
  Description of Artificial Sequence: Synthetic oligonucleotide
agcuccuuaacuucuugcg

SEQ ID NO: 1267216 - RNA, 19 nt, Artificial Sequence
  Description of Artificial Sequence: Synthetic oligonucleotide
ggugaauucaaacccagag

SEQ ID NO: 1267217 - RNA, 19 nt, Artificial Sequence
  Description of Artificial Sequence: Synthetic oligonucleotide
agugaaacgcacucuauga

SEQ ID NO: 1267218 - RNA, 19 nt, Artificial Sequence
  Description of Artificial Sequence: Synthetic oligonucleotide
gagcuagucauccaaagca

SEQ ID NO: 1267219 - RNA, 19 nt, Artificial Sequence
  Description of Artificial Sequence: Synthetic oligonucleotide
cagaucaacacgauccagg

SEQ ID NO: 1267220 - RNA, 19 nt, Artificial Sequence
  Description of Artificial Sequence: Synthetic oligonucleotide
aaacaagcucuuuccauca

SEQ ID NO: 1267221 - RNA, 19 nt, Artificial Sequence
  Description of Artificial Sequence: Synthetic oligonucleotide
uuuagaaauccaaugucuu

SEQ ID NO: 1267222 - RNA, 19 nt, Artificial Sequence
  Description of Artificial Sequence: Synthetic oligonucleotide
aaggccuucggugaaggac

SEQ ID NO: 1267223 - RNA, 19 nt, Artificial Sequence
  Description of Artificial Sequence: Synthetic oligonucleotide
cuucuugcgaagugaaacg

SEQ ID NO: 1267224 - RNA, 19 nt, Artificial Sequence
  Description of Artificial Sequence: Synthetic oligonucleotide
gucguuuagaaauccaaug

SEQ ID NO: 1267225 - RNA, 19 nt, Artificial Sequence
  Description of Artificial Sequence: Synthetic oligonucleotide
auaugcugccuguacgagc

SEQ ID NO: 1267226 - RNA, 19 nt, Artificial Sequence
  Description of Artificial Sequence: Synthetic oligonucleotide
uuacagugagcuuugggac

SEQ ID NO: 1267227 - RNA, 19 nt, Artificial Sequence
  Description of Artificial Sequence: Synthetic oligonucleotide
cuuuaauguagguuccagc

SEQ ID NO: 1267228 - RNA, 19 nt, Artificial Sequence
  Description of Artificial Sequence: Synthetic oligonucleotide
agugcauacagucuuuggu

SEQ ID NO: 1267229 - RNA, 19 nt, Artificial Sequence
  Description of Artificial Sequence: Synthetic oligonucleotide
ugucuccauagaaugaaug

SEQ ID NO: 1267230 - RNA, 19 nt, Artificial Sequence
  Description of Artificial Sequence: Synthetic oligonucleotide
aaaccaugcuggugaauuc

SEQ ID NO: 1267231 - RNA, 19 nt, Artificial Sequence
  Description of Artificial Sequence: Synthetic oligonucleotide
ucggacagguaccagaacu

SEQ ID NO: 1267232 - RNA, 19 nt, Artificial Sequence
  Description of Artificial Sequence: Synthetic oligonucleotide
cucuaugaggauuuagcag

SEQ ID NO: 1267233 - RNA, 19 nt, Artificial Sequence
  Description of Artificial Sequence: Synthetic oligonucleotide
ugaguaagucaucuuccag

SEQ ID NO: 1267234 - RNA, 19 nt, Artificial Sequence
  Description of Artificial Sequence: Synthetic oligonucleotide
acgaauuuucuucaguggu

SEQ ID NO: 1267235 - RNA, 19 nt, Artificial Sequence
  Description of Artificial Sequence: Synthetic oligonucleotide
uguauggcuuuacucgucc

SEQ ID NO: 1267236 - RNA, 19 nt, Artificial Sequence
  Description of Artificial Sequence: Synthetic oligonucleotide
aacccuuaguguucaaaug

SEQ ID NO: 1267237 - RNA, 19 nt, Artificial Sequence
  Description of Artificial Sequence: Synthetic oligonucleotide
aauucaaacccagaggcuu

SEQ ID NO: 1267238 - RNA, 19 nt, Artificial Sequence
  Description of Artificial Sequence: Synthetic oligonucleotide
ucaaauuauccauuccguc

SEQ ID NO: 1267239 - RNA, 19 nt, Artificial Sequence
  Description of Artificial Sequence: Synthetic oligonucleotide
aaaaccaugcuggugaauu

SEQ ID NO: 1267240 - RNA, 19 nt, Artificial Sequence
  Description of Artificial Sequence: Synthetic oligonucleotide
ucuucuaccgaagauucca

SEQ ID NO: 1267241 - RNA, 19 nt, Artificial Sequence
  Description of Artificial Sequence: Synthetic oligonucleotide
aagacgaauuuucuucagu

SEQ ID NO: 1267242 - RNA, 19 nt, Artificial Sequence
  Description of Artificial Sequence: Synthetic oligonucleotide
uuuaaguccuuuaggucgu

SEQ ID NO: 1267243 - RNA, 19 nt, Artificial Sequence
  Description of Artificial Sequence: Synthetic oligonucleotide
uggugaguaagucaucuuc

SEQ ID NO: 1267244 - RNA, 19 nt, Artificial Sequence
  Description of Artificial Sequence: Synthetic oligonucleotide
acucuaugaggauuuagca

SEQ ID NO: 1267245 - RNA, 19 nt, Artificial Sequence
  Description of Artificial Sequence: Synthetic oligonucleotide
acuaaaucguuucuuccca

SEQ ID NO: 1267246 - RNA, 19 nt, Artificial Sequence
  Description of Artificial Sequence: Synthetic oligonucleotide
uccuauuuccuguuuuacc

SEQ ID NO: 1267247 - RNA, 19 nt, Artificial Sequence
  Description of Artificial Sequence: Synthetic oligonucleotide
agaucauugaacaacuccu

SEQ ID NO: 1267248 - RNA, 19 nt, Artificial Sequence
  Description of Artificial Sequence: Synthetic oligonucleotide
uaggaaaacccuuaguguu

SEQ ID NO: 1267249 - RNA, 19 nt, Artificial Sequence
  Description of Artificial Sequence: Synthetic oligonucleotide
uugcauacacgcaaaucug

SEQ ID NO: 1267250 - RNA, 19 nt, Artificial Sequence
  Description of Artificial Sequence: Synthetic oligonucleotide
aauuuacccagucccucug

SEQ ID NO: 1267251 - RNA, 19 nt, Artificial Sequence
  Description of Artificial Sequence: Synthetic oligonucleotide
uuggaggacaaggaaauug

SEQ ID NO: 1267252 - RNA, 19 nt, Artificial Sequence
  Description of Artificial Sequence: Synthetic oligonucleotide
uacauucaauuucaaggac

SEQ ID NO: 1267253 - RNA, 19 nt, Artificial Sequence
  Description of Artificial Sequence: Synthetic oligonucleotide
uguuguggugaguaaguca

SEQ ID NO: 1267254 - RNA, 19 nt, Artificial Sequence
  Description of Artificial Sequence: Synthetic oligonucleotide
acccuuaguguucaaaugu

SEQ ID NO: 1267255 - RNA, 19 nt, Artificial Sequence
  Description of Artificial Sequence: Synthetic oligonucleotide
acugaacaacaaccgggcc

SEQ ID NO: 1267256 - RNA, 19 nt, Artificial Sequence
  Description of Artificial Sequence: Synthetic oligonucleotide
cuuuacucguccauaucag

SEQ ID NO: 1267257 - RNA, 19 nt, Artificial Sequence
  Description of Artificial Sequence: Synthetic oligonucleotide
ugcauacacgcaaaucuga

SEQ ID NO: 1267258 - RNA, 19 nt, Artificial Sequence
  Description of Artificial Sequence: Synthetic oligonucleotide
uggaugggcguuuguaagg

SEQ ID NO: 1267259 - RNA, 19 nt, Artificial Sequence
  Description of Artificial Sequence: Synthetic oligonucleotide
uccuaagcaaacauugcau

SEQ ID NO: 1267260 - RNA, 19 nt, Artificial Sequence
  Description of Artificial Sequence: Synthetic oligonucleotide
uuuaggucguuuagaaauc

SEQ ID NO: 1267261 - RNA, 19 nt, Artificial Sequence
  Description of Artificial Sequence: Synthetic oligonucleotide
ugcaugcucucucacagac

SEQ ID NO: 1267262 - RNA, 19 nt, Artificial Sequence
  Description of Artificial Sequence: Synthetic oligonucleotide
uacacgcaaaucugaagcc

SEQ ID NO: 1267263 - RNA, 19 nt, Artificial Sequence
  Description of Artificial Sequence: Synthetic oligonucleotide
aaugugagagcuagucauc

SEQ ID NO: 1267264 - RNA, 19 nt, Artificial Sequence
  Description of Artificial Sequence: Synthetic oligonucleotide
ucaagaaugucugcaguca

SEQ ID NO: 1267265 - RNA, 19 nt, Artificial Sequence
  Description of Artificial Sequence: Synthetic oligonucleotide
cauuccgucuucuugaaga

SEQ ID NO: 1267266 - RNA, 19 nt, Artificial Sequence
  Description of Artificial Sequence: Synthetic oligonucleotide
cuguagaucauugaacaac

SEQ ID NO: 1267267 - RNA, 19 nt, Artificial Sequence
  Description of Artificial Sequence: Synthetic oligonucleotide
uguuaggaaaacccuuagu

SEQ ID NO: 1267268 - RNA, 19 nt, Artificial Sequence
  Description of Artificial Sequence: Synthetic oligonucleotide
caauuauccaccagcaaca

SEQ ID NO: 1267269 - RNA, 19 nt, Artificial Sequence
  Description of Artificial Sequence: Synthetic oligonucleotide
cuugcgaagugaaacgcac

SEQ ID NO: 1267270 - RNA, 19 nt, Artificial Sequence
  Description of Artificial Sequence: Synthetic oligonucleotide
uacaucucggacagguacc

SEQ ID NO: 1267271 - RNA, 19 nt, Artificial Sequence
  Description of Artificial Sequence: Synthetic oligonucleotide
ucuguauggcuuuacucgu

SEQ ID NO: 1267272 - RNA, 19 nt, Artificial Sequence
  Description of Artificial Sequence: Synthetic oligonucleotide
cucacuucaaacaagcucu

SEQ ID NO: 1267273 - RNA, 19 nt, Artificial Sequence
  Description of Artificial Sequence: Synthetic oligonucleotide
uuauccauuuguaggcuuc

SEQ ID NO: 1267274 - RNA, 19 nt, Artificial Sequence
  Description of Artificial Sequence: Synthetic oligonucleotide
augggcguuuguaaggucc

SEQ ID NO: 1267275 - RNA, 19 nt, Artificial Sequence
  Description of Artificial Sequence: Synthetic oligonucleotide
ugaacaacaaccgggccac

SEQ ID NO: 1267276 - RNA, 19 nt, Artificial Sequence
  Description of Artificial Sequence: Synthetic oligonucleotide
ucuaccgaagauuccauuu

SEQ ID NO: 1267277 - RNA, 19 nt, Artificial Sequence
  Description of Artificial Sequence: Synthetic oligonucleotide
cuuuaggucguuuagaaau

SEQ ID NO: 1267278 - RNA, 19 nt, Artificial Sequence
  Description of Artificial Sequence: Synthetic oligonucleotide
uccuuuaggucguuuagaa

SEQ ID NO: 1267279 - RNA, 19 nt, Artificial Sequence
  Description of Artificial Sequence: Synthetic oligonucleotide
gaagacgaauuuucuucag

SEQ ID NO: 1267280 - RNA, 19 nt, Artificial Sequence
  Description of Artificial Sequence: Synthetic oligonucleotide
ugcgaagugaaacgcacuc

SEQ ID NO: 1267281 - RNA, 19 nt, Artificial Sequence
  Description of Artificial Sequence: Synthetic oligonucleotide
uuucucgcagaacucuuga

SEQ ID NO: 1267282 - RNA, 19 nt, Artificial Sequence
  Description of Artificial Sequence: Synthetic oligonucleotide
uacucguccauaucagggc

SEQ ID NO: 1267283 - RNA, 19 nt, Artificial Sequence
  Description of Artificial Sequence: Synthetic oligonucleotide
agauacaucucggacaggu

SEQ ID NO: 1267284 - RNA, 19 nt, Artificial Sequence
  Description of Artificial Sequence: Synthetic oligonucleotide
agucccucugaaaacaggg

SEQ ID NO: 1267285 - RNA, 19 nt, Artificial Sequence
  Description of Artificial Sequence: Synthetic oligonucleotide
cuuaacuucuugcgaagug

SEQ ID NO: 1267286 - RNA, 19 nt, Artificial Sequence
  Description of Artificial Sequence: Synthetic oligonucleotide
ucuugcgaagugaaacgca

SEQ ID NO: 1267287 - RNA, 19 nt, Artificial Sequence
  Description of Artificial Sequence: Synthetic oligonucleotide
cauacacgcaaaucugaag

SEQ ID NO: 1267288 - RNA, 19 nt, Artificial Sequence
  Description of Artificial Sequence: Synthetic oligonucleotide
uaaaucguuucuucccaga

SEQ ID NO: 1267289 - RNA, 19 nt, Artificial Sequence
  Description of Artificial Sequence: Synthetic oligonucleotide
gaaguggcaauccucaacu

SEQ ID NO: 1267290 - RNA, 19 nt, Artificial Sequence
  Description of Artificial Sequence: Synthetic oligonucleotide
gaauggaccgaguucucac

SEQ ID NO: 1267291 - RNA, 19 nt, Artificial Sequence
  Description of Artificial Sequence: Synthetic oligonucleotide
agucuccguguacaaauuc

SEQ ID NO: 1267292 - RNA, 19 nt, Artificial Sequence
  Description of Artificial Sequence: Synthetic oligonucleotide
ccaucaauuauccaccagc

SEQ ID NO: 1267293 - RNA, 19 nt, Artificial Sequence
  Description of Artificial Sequence: Synthetic oligonucleotide
agauguuacagugagcuuu

SEQ ID NO: 1267294 - RNA, 19 nt, Artificial Sequence
  Description of Artificial Sequence: Synthetic oligonucleotide
cucaagaaugucugcaguc

SEQ ID NO: 1267295 - RNA, 19 nt, Artificial Sequence
  Description of Artificial Sequence: Synthetic oligonucleotide
aguggcaauccucaacugu

SEQ ID NO: 1267296 - RNA, 19 nt, Artificial Sequence
  Description of Artificial Sequence: Synthetic oligonucleotide
uugaaggauuccuaagcaa

SEQ ID NO: 1267297 - RNA, 19 nt, Artificial Sequence
  Description of Artificial Sequence: Synthetic oligonucleotide
caacaaccgggccacaugc

SEQ ID NO: 1267298 - RNA, 19 nt, Artificial Sequence
  Description of Artificial Sequence: Synthetic oligonucleotide
uccuuaacuucuugcgaag

SEQ ID NO: 1267299 - RNA, 19 nt, Artificial Sequence
  Description of Artificial Sequence: Synthetic oligonucleotide
uuaggucguuuagaaaucc

SEQ ID NO: 1267300 - RNA, 19 nt, Artificial Sequence
  Description of Artificial Sequence: Synthetic oligonucleotide
ccauagaaugaauggaccg

SEQ ID NO: 1267301 - RNA, 19 nt, Artificial Sequence
  Description of Artificial Sequence: Synthetic oligonucleotide
uacagugagcuuugggaca

SEQ ID NO: 1267302 - RNA, 19 nt, Artificial Sequence
  Description of Artificial Sequence: Synthetic oligonucleotide
ugugucuccauagaaugaa

SEQ ID NO: 1267303 - RNA, 19 nt, Artificial Sequence
  Description of Artificial Sequence: Synthetic oligonucleotide
caucaauuauccaccagca

SEQ ID NO: 1267304 - RNA, 19 nt, Artificial Sequence
  Description of Artificial Sequence: Synthetic oligonucleotide
aggccuucggugaaggacc

SEQ ID NO: 1267305 - RNA, 19 nt, Artificial Sequence
  Description of Artificial Sequence: Synthetic oligonucleotide
agaacucuugaaggauucc

SEQ ID NO: 1267306 - RNA, 19 nt, Artificial Sequence
  Description of Artificial Sequence: Synthetic oligonucleotide
cuaaaucguuucuucccag

SEQ ID NO: 1267307 - RNA, 19 nt, Artificial Sequence
  Description of Artificial Sequence: Synthetic oligonucleotide
auuucaaggacagugcaua

SEQ ID NO: 1267308 - RNA, 19 nt, Artificial Sequence
  Description of Artificial Sequence: Synthetic oligonucleotide
uucuugcgaagugaaacgc

SEQ ID NO: 1267309 - RNA, 19 nt, Artificial Sequence
  Description of Artificial Sequence: Synthetic oligonucleotide
cuggugaauucaaacccag

SEQ ID NO: 1267310 - RNA, 19 nt, Artificial Sequence
  Description of Artificial Sequence: Synthetic oligonucleotide
cuaggaaguggcaauccuc

SEQ ID NO: 1267311 - RNA, 19 nt, Artificial Sequence
  Description of Artificial Sequence: Synthetic oligonucleotide
ggucuucaaauacagacga

SEQ ID NO: 1267312 - RNA, 19 nt, Artificial Sequence
  Description of Artificial Sequence: Synthetic oligonucleotide
caaauuauccauuccgucu

SEQ ID NO: 1267313 - RNA, 19 nt, Artificial Sequence
  Description of Artificial Sequence: Synthetic oligonucleotide
uauggcuuuacucguccau

SEQ ID NO: 1267314 - RNA, 19 nt, Artificial Sequence
  Description of Artificial Sequence: Synthetic oligonucleotide
uucggugaaggacccggag

SEQ ID NO: 1267315 - RNA, 19 nt, Artificial Sequence
  Description of Artificial Sequence: Synthetic oligonucleotide
uucucccaaagucuccgug

SEQ ID NO: 1267316 - RNA, 19 nt, Artificial Sequence
  Description of Artificial Sequence: Synthetic oligonucleotide
cacacucacuucaaacaag

SEQ ID NO: 1267317 - RNA, 19 nt, Artificial Sequence
  Description of Artificial Sequence: Synthetic oligonucleotide
acagccaaaggccuucggu

SEQ ID NO: 1267318 - RNA, 19 nt, Artificial Sequence
  Description of Artificial Sequence: Synthetic oligonucleotide
uuuggcugguuugaaacaa

SEQ ID NO: 1267319 - RNA, 19 nt, Artificial Sequence
  Description of Artificial Sequence: Synthetic oligonucleotide
uggaagcuccaaaauuaac

SEQ ID NO: 1267320 - RNA, 19 nt, Artificial Sequence
  Description of Artificial Sequence: Synthetic oligonucleotide
caggucguucugaagacac

SEQ ID NO: 1267321 - RNA, 19 nt, Artificial Sequence
  Description of Artificial Sequence: Synthetic oligonucleotide
cauugaacaacuccuugga

SEQ ID NO: 1267322 - RNA, 19 nt, Artificial Sequence
  Description of Artificial Sequence: Synthetic oligonucleotide
aauuucaaggacagugcau

SEQ ID NO: 1267323 - RNA, 19 nt, Artificial Sequence
  Description of Artificial Sequence: Synthetic oligonucleotide
aaccaugcuggugaauuca

SEQ ID NO: 1267324 - RNA, 19 nt, Artificial Sequence
  Description of Artificial Sequence: Synthetic oligonucleotide
auggaccgaguucucacag

SEQ ID NO: 1267325 - RNA, 19 nt, Artificial Sequence
  Description of Artificial Sequence: Synthetic oligonucleotide
uuucaaggacagugcauac

SEQ ID NO: 1267326 - RNA, 19 nt, Artificial Sequence
  Description of Artificial Sequence: Synthetic oligonucleotide
auaucagggcacuguaggu

SEQ ID NO: 1267327 - RNA, 19 nt, Artificial Sequence
  Description of Artificial Sequence: Synthetic oligonucleotide
aggaaaacccuuaguguuc

SEQ ID NO: 1267328 - RNA, 19 nt, Artificial Sequence
  Description of Artificial Sequence: Synthetic oligonucleotide
ucgcagaacucuugaagga

SEQ ID NO: 1267329 - RNA, 19 nt, Artificial Sequence
  Description of Artificial Sequence: Synthetic oligonucleotide
cuagcucaagaaugucugc

SEQ ID NO: 1267330 - RNA, 19 nt, Artificial Sequence
  Description of Artificial Sequence: Synthetic oligonucleotide
guguuaggaaaacccuuag

SEQ ID NO: 1267331 - RNA, 19 nt, Artificial Sequence
  Description of Artificial Sequence: Synthetic oligonucleotide
gauaugcugccuguacgag

SEQ ID NO: 1267332 - RNA, 19 nt, Artificial Sequence
  Description of Artificial Sequence: Synthetic oligonucleotide
cugaacaacaaccgggcca

SEQ ID NO: 1267333 - RNA, 19 nt, Artificial Sequence
  Description of Artificial Sequence: Synthetic oligonucleotide
acaacaaccgggccacaug

SEQ ID NO: 1267334 - RNA, 19 nt, Artificial Sequence
  Description of Artificial Sequence: Synthetic oligonucleotide
guuuagaaauccaaugucu

SEQ ID NO: 1267335 - RNA, 19 nt, Artificial Sequence
  Description of Artificial Sequence: Synthetic oligonucleotide
caagaaugucugcagucac

SEQ ID NO: 1267336 - RNA, 19 nt, Artificial Sequence
  Description of Artificial Sequence: Synthetic oligonucleotide
gcuuuacucguccauauca

SEQ ID NO: 1267337 - RNA, 19 nt, Artificial Sequence
  Description of Artificial Sequence: Synthetic oligonucleotide
caaacauugcauacacgca

SEQ ID NO: 1267338 - RNA, 19 nt, Artificial Sequence
  Description of Artificial Sequence: Synthetic oligonucleotide
agagccgauguuuggcuug

SEQ ID NO: 1267339 - RNA, 19 nt, Artificial Sequence
  Description of Artificial Sequence: Synthetic oligonucleotide
gaaauugcuugaagaaauc

SEQ ID NO: 1267340 - RNA, 19 nt, Artificial Sequence
  Description of Artificial Sequence: Synthetic oligonucleotide
acgagcaucguguuaggaa

SEQ ID NO: 1267341 - RNA, 19 nt, Artificial Sequence
  Description of Artificial Sequence: Synthetic oligonucleotide
uuuacccagucccucugaa

SEQ ID NO: 1267342 - RNA, 19 nt, Artificial Sequence
  Description of Artificial Sequence: Synthetic oligonucleotide
ucguguuaggaaaacccuu

SEQ ID NO: 1267343 - RNA, 19 nt, Artificial Sequence
  Description of Artificial Sequence: Synthetic oligonucleotide
ucuccguguacaaauucuu

SEQ ID NO: 1267344 - RNA, 19 nt, Artificial Sequence
  Description of Artificial Sequence: Synthetic oligonucleotide
ucuuuccaucaaaugggaa

SEQ ID NO: 1267345 - RNA, 19 nt, Artificial Sequence
  Description of Artificial Sequence: Synthetic oligonucleotide
agaggaugagaaauuaaaa

SEQ ID NO: 1267346 - RNA, 19 nt, Artificial Sequence
  Description of Artificial Sequence: Synthetic oligonucleotide
cagugcauacagucuuugg

SEQ ID NO: 1267347 - RNA, 19 nt, Artificial Sequence
  Description of Artificial Sequence: Synthetic oligonucleotide
agcaucguguuaggaaaac

SEQ ID NO: 1267348 - RNA, 19 nt, Artificial Sequence
  Description of Artificial Sequence: Synthetic oligonucleotide
accgaguucucacagccaa

SEQ ID NO: 1267349 - RNA, 19 nt, Artificial Sequence
  Description of Artificial Sequence: Synthetic oligonucleotide
gggucuucaaauacagacg

SEQ ID NO: 1267350 - RNA, 19 nt, Artificial Sequence
  Description of Artificial Sequence: Synthetic oligonucleotide
agguguuuucuggucaauc

SEQ ID NO: 1267351 - RNA, 19 nt, Artificial Sequence
  Description of Artificial Sequence: Synthetic oligonucleotide
agcuagucauccaaagcag

SEQ ID NO: 1267352 - RNA, 19 nt, Artificial Sequence
  Description of Artificial Sequence: Synthetic oligonucleotide
ggugaguaagucaucuucc

SEQ ID NO: 1267353 - RNA, 19 nt, Artificial Sequence
  Description of Artificial Sequence: Synthetic oligonucleotide
caaacuucaccuaggaagu

SEQ ID NO: 1267354 - RNA, 19 nt, Artificial Sequence
  Description of Artificial Sequence: Synthetic oligonucleotide
ucaccuaggaaguggcaau

SEQ ID NO: 1267355 - RNA, 19 nt, Artificial Sequence
  Description of Artificial Sequence: Synthetic oligonucleotide
ugugagagcuagucaucca

SEQ ID NO: 1267356 - RNA, 19 nt, Artificial Sequence
  Description of Artificial Sequence: Synthetic oligonucleotide
aauuauccaccagcaacaa

SEQ ID NO: 1267357 - RNA, 19 nt, Artificial Sequence
  Description of Artificial Sequence: Synthetic oligonucleotide
auucaaacccagaggcuuc

SEQ ID NO: 1267358 - RNA, 19 nt, Artificial Sequence
  Description of Artificial Sequence: Synthetic oligonucleotide
cauagaaugaauggaccga

SEQ ID NO: 1267359 - RNA, 19 nt, Artificial Sequence
  Description of Artificial Sequence: Synthetic oligonucleotide
ugccuguacgagcaucgug

SEQ ID NO: 1267360 - RNA, 19 nt, Artificial Sequence
  Description of Artificial Sequence: Synthetic oligonucleotide
caaaugugagagcuaguca

SEQ ID NO: 1267361 - RNA, 19 nt, Artificial Sequence
  Description of Artificial Sequence: Synthetic oligonucleotide
cacgcaaaucugaagccuc

SEQ ID NO: 1267362 - RNA, 19 nt, Artificial Sequence
  Description of Artificial Sequence: Synthetic oligonucleotide
uuccgucuucuugaagacg

SEQ ID NO: 1267363 - RNA, 19 nt, Artificial Sequence
  Description of Artificial Sequence: Synthetic oligonucleotide
aucaauuauccaccagcaa

SEQ ID NO: 1267364 - RNA, 19 nt, Artificial Sequence
  Description of Artificial Sequence: Synthetic oligonucleotide
ugaguacauucaauuucaa

SEQ ID NO: 1267365 - RNA, 19 nt, Artificial Sequence
  Description of Artificial Sequence: Synthetic oligonucleotide
ggaccgaguucucacagcc

SEQ ID NO: 1267366 - RNA, 19 nt, Artificial Sequence
  Description of Artificial Sequence: Synthetic oligonucleotide
uucagugguggguuuggaa

SEQ ID NO: 1267367 - RNA, 19 nt, Artificial Sequence
  Description of Artificial Sequence: Synthetic oligonucleotide
uccaggauaugcugccugu

SEQ ID NO: 1267368 - RNA, 19 nt, Artificial Sequence
  Description of Artificial Sequence: Synthetic oligonucleotide
uugcgaagugaaacgcacu

SEQ ID NO: 1267369 - RNA, 19 nt, Artificial Sequence
  Description of Artificial Sequence: Synthetic oligonucleotide
acaacuccuuggaugggcg

SEQ ID NO: 1267370 - RNA, 19 nt, Artificial Sequence
  Description of Artificial Sequence: Synthetic oligonucleotide
aucguguuaggaaaacccu

SEQ ID NO: 1267371 - RNA, 19 nt, Artificial Sequence
  Description of Artificial Sequence: Synthetic oligonucleotide
cauugcauacacgcaaauc

SEQ ID NO: 1267372 - RNA, 19 nt, Artificial Sequence
  Description of Artificial Sequence: Synthetic oligonucleotide
uacagacgaaaaugaugcu

SEQ ID NO: 1267373 - RNA, 19 nt, Artificial Sequence
  Description of Artificial Sequence: Synthetic oligonucleotide
aacaagcucuuuccaucaa

SEQ ID NO: 1267374 - RNA, 19 nt, Artificial Sequence
  Description of Artificial Sequence: Synthetic oligonucleotide
aacgcacucuaugaggauu

SEQ ID NO: 1267375 - RNA, 19 nt, Artificial Sequence
  Description of Artificial Sequence: Synthetic oligonucleotide
uuccuaaaguucucacauc

SEQ ID NO: 1267376 - RNA, 19 nt, Artificial Sequence
  Description of Artificial Sequence: Synthetic oligonucleotide
aaacgcacucuaugaggau

SEQ ID NO: 1267377 - RNA, 19 nt, Artificial Sequence
  Description of Artificial Sequence: Synthetic oligonucleotide
acagaucaacacgauccag

SEQ ID NO: 1267378 - RNA, 19 nt, Artificial Sequence
  Description of Artificial Sequence: Synthetic oligonucleotide
gaauuuacccagucccucu

SEQ ID NO: 1267379 - RNA, 19 nt, Artificial Sequence
  Description of Artificial Sequence: Synthetic oligonucleotide
aguuauccauuuguaggcu

SEQ ID NO: 1267380 - RNA, 19 nt, Artificial Sequence
  Description of Artificial Sequence: Synthetic oligonucleotide
ucaacacgauccaggucgu

SEQ ID NO: 1267381 - RNA, 19 nt, Artificial Sequence
  Description of Artificial Sequence: Synthetic oligonucleotide
aaaggccuucggugaagga

SEQ ID NO: 1267382 - RNA, 19 nt, Artificial Sequence
  Description of Artificial Sequence: Synthetic oligonucleotide
uucaaccuuuugacacacc

SEQ ID NO: 1267383 - RNA, 19 nt, Artificial Sequence
  Description of Artificial Sequence: Synthetic oligonucleotide
agagguguuuucuggucaa

SEQ ID NO: 1267384 - RNA, 19 nt, Artificial Sequence
  Description of Artificial Sequence: Synthetic oligonucleotide
uuguaagguccaugaagau

SEQ ID NO: 1267385 - RNA, 19 nt, Artificial Sequence
  Description of Artificial Sequence: Synthetic oligonucleotide
aacaacaaccgggccacau

SEQ ID NO: 1267386 - RNA, 19 nt, Artificial Sequence
  Description of Artificial Sequence: Synthetic oligonucleotide
auuuacccagucccucuga

SEQ ID NO: 1267387 - RNA, 19 nt, Artificial Sequence
  Description of Artificial Sequence: Synthetic oligonucleotide
gaucaacacgauccagguc

SEQ ID NO: 1267388 - RNA, 19 nt, Artificial Sequence
  Description of Artificial Sequence: Synthetic oligonucleotide
gguucucccaaagucuccg

SEQ ID NO: 1267389 - RNA, 19 nt, Artificial Sequence
  Description of Artificial Sequence: Synthetic oligonucleotide
cagguaccagaacugaaca

SEQ ID NO: 1267390 - RNA, 19 nt, Artificial Sequence
  Description of Artificial Sequence: Synthetic oligonucleotide
ggugaacacugacuguuug

SEQ ID NO: 1267391 - RNA, 19 nt, Artificial Sequence
  Description of Artificial Sequence: Synthetic oligonucleotide
acacgcaaaucugaagccu

SEQ ID NO: 1267392 - RNA, 19 nt, Artificial Sequence
  Description of Artificial Sequence: Synthetic oligonucleotide
acauugcauacacgcaaau

SEQ ID NO: 1267393 - RNA, 19 nt, Artificial Sequence
  Description of Artificial Sequence: Synthetic oligonucleotide
agguaccagaacugaacaa

SEQ ID NO: 1267394 - RNA, 19 nt, Artificial Sequence
  Description of Artificial Sequence: Synthetic oligonucleotide
aagauccacaccacagaau

SEQ ID NO: 1267395 - RNA, 19 nt, Artificial Sequence
  Description of Artificial Sequence: Synthetic oligonucleotide
ggucguucugaagacacug

SEQ ID NO: 1267396 - RNA, 19 nt, Artificial Sequence
  Description of Artificial Sequence: Synthetic oligonucleotide
gacgaaaaugaugcucauc

SEQ ID NO: 1267397 - RNA, 19 nt, Artificial Sequence
  Description of Artificial Sequence: Synthetic oligonucleotide
uccccucuuacuccauuuc

SEQ ID NO: 1267398 - RNA, 19 nt, Artificial Sequence
  Description of Artificial Sequence: Synthetic oligonucleotide
guacgagcaucguguuagg

SEQ ID NO: 1267399 - RNA, 19 nt, Artificial Sequence
  Description of Artificial Sequence: Synthetic oligonucleotide
uucucgcagaacucuugaa

SEQ ID NO: 1267400 - RNA, 19 nt, Artificial Sequence
  Description of Artificial Sequence: Synthetic oligonucleotide
gcguuuguaagguccauga

SEQ ID NO: 1267401 - RNA, 19 nt, Artificial Sequence
  Description of Artificial Sequence: Synthetic oligonucleotide
uucuaccgaagauuccauu

SEQ ID NO: 1267402 - RNA, 19 nt, Artificial Sequence
  Description of Artificial Sequence: Synthetic oligonucleotide
aggaaaccgauaaaaccau

SEQ ID NO: 1267403 - RNA, 19 nt, Artificial Sequence
  Description of Artificial Sequence: Synthetic oligonucleotide
cguuuagaaauccaauguc

SEQ ID NO: 1267404 - RNA, 19 nt, Artificial Sequence
  Description of Artificial Sequence: Synthetic oligonucleotide
aggucguuuagaaauccaa

SEQ ID NO: 1267405 - RNA, 19 nt, Artificial Sequence
  Description of Artificial Sequence: Synthetic oligonucleotide
ugggacagaucaacacgau

SEQ ID NO: 1267406 - RNA, 19 nt, Artificial Sequence
  Description of Artificial Sequence: Synthetic oligonucleotide
ggaaauugcuugaagaaau

SEQ ID NO: 1267407 - RNA, 19 nt, Artificial Sequence
  Description of Artificial Sequence: Synthetic oligonucleotide
cuuuugacacaccuuugcu

SEQ ID NO: 1267408 - RNA, 19 nt, Artificial Sequence
  Description of Artificial Sequence: Synthetic oligonucleotide
gcugccuguacgagcaucg

SEQ ID NO: 1267409 - RNA, 19 nt, Artificial Sequence
  Description of Artificial Sequence: Synthetic oligonucleotide
agacgaaaaugaugcucau

SEQ ID NO: 1267410 - RNA, 19 nt, Artificial Sequence
  Description of Artificial Sequence: Synthetic oligonucleotide
ucguccauaucagggcacu

SEQ ID NO: 1267411 - RNA, 19 nt, Artificial Sequence
  Description of Artificial Sequence: Synthetic oligonucleotide
accuuugcuacaaacucuu

SEQ ID NO: 1267412 - RNA, 19 nt, Artificial Sequence
  Description of Artificial Sequence: Synthetic oligonucleotide
uacgagcaucguguuagga

SEQ ID NO: 1267413 - RNA, 19 nt, Artificial Sequence
  Description of Artificial Sequence: Synthetic oligonucleotide
auguagguuccagcuuggg

SEQ ID NO: 1267414 - RNA, 19 nt, Artificial Sequence
  Description of Artificial Sequence: Synthetic oligonucleotide
cuugaagacgaauuuucuu

SEQ ID NO: 1267415 - RNA, 19 nt, Artificial Sequence
  Description of Artificial Sequence: Synthetic oligonucleotide
aaacggccauucuggugaa

SEQ ID NO: 1267416 - RNA, 19 nt, Artificial Sequence
  Description of Artificial Sequence: Synthetic oligonucleotide
ccggagagguguuuucugg

SEQ ID NO: 1267417 - RNA, 19 nt, Artificial Sequence
  Description of Artificial Sequence: Synthetic oligonucleotide
aacuucuugcgaagugaaa

SEQ ID NO: 1267418 - RNA, 19 nt, Artificial Sequence
  Description of Artificial Sequence: Synthetic oligonucleotide
gaugggcguuuguaagguc

SEQ ID NO: 1267419 - RNA, 19 nt, Artificial Sequence
  Description of Artificial Sequence: Synthetic oligonucleotide
gaauucaaacccagaggcu

SEQ ID NO: 1267420 - RNA, 19 nt, Artificial Sequence
  Description of Artificial Sequence: Synthetic oligonucleotide
uagauacaucucggacagg

SEQ ID NO: 1267421 - RNA, 19 nt, Artificial Sequence
  Description of Artificial Sequence: Synthetic oligonucleotide
uugaaacaaucugggcaaa

SEQ ID NO: 1267422 - RNA, 19 nt, Artificial Sequence
  Description of Artificial Sequence: Synthetic oligonucleotide
ggaauuuacccagucccuc

SEQ ID NO: 1267423 - RNA, 19 nt, Artificial Sequence
  Description of Artificial Sequence: Synthetic oligonucleotide
guagaucauugaacaacuc

SEQ ID NO: 1267424 - RNA, 19 nt, Artificial Sequence
  Description of Artificial Sequence: Synthetic oligonucleotide
uaugaggauuuagcagcuc

SEQ ID NO: 1267425 - RNA, 19 nt, Artificial Sequence
  Description of Artificial Sequence: Synthetic oligonucleotide
aacggccauucuggugaac

SEQ ID NO: 1267426 - RNA, 19 nt, Artificial Sequence
  Description of Artificial Sequence: Synthetic oligonucleotide
uaaaaccaugcuggugaau

SEQ ID NO: 1267427 - RNA, 19 nt, Artificial Sequence
  Description of Artificial Sequence: Synthetic oligonucleotide
gcuucaaccuuuugacaca

SEQ ID NO: 1267428 - RNA, 19 nt, Artificial Sequence
  Description of Artificial Sequence: Synthetic oligonucleotide
uuuggaggacaaggaaauu

SEQ ID NO: 1267429 - RNA, 19 nt, Artificial Sequence
  Description of Artificial Sequence: Synthetic oligonucleotide
cuccaucaauuauccacca

SEQ ID NO: 1267430 - RNA, 19 nt, Artificial Sequence
  Description of Artificial Sequence: Synthetic oligonucleotide
ccauaucagggcacuguag

SEQ ID NO: 1267431 - RNA, 19 nt, Artificial Sequence
  Description of Artificial Sequence: Synthetic oligonucleotide
caucuagcucaagaauguc

SEQ ID NO: 1267432 - RNA, 19 nt, Artificial Sequence
  Description of Artificial Sequence: Synthetic oligonucleotide
accuuuugacacaccuuug

SEQ ID NO: 1267433 - RNA, 19 nt, Artificial Sequence
  Description of Artificial Sequence: Synthetic oligonucleotide
auguuacagugagcuuugg

SEQ ID NO: 1267434 - RNA, 19 nt, Artificial Sequence
  Description of Artificial Sequence: Synthetic oligonucleotide
ccuucggugaaggacccgg

SEQ ID NO: 1267435 - RNA, 19 nt, Artificial Sequence
  Description of Artificial Sequence: Synthetic oligonucleotide
cuaugaggauuuagcagcu

SEQ ID NO: 1267436 - RNA, 19 nt, Artificial Sequence
  Description of Artificial Sequence: Synthetic oligonucleotide
guccuuuaggucguuuaga

SEQ ID NO: 1267437 - RNA, 19 nt, Artificial Sequence
  Description of Artificial Sequence: Synthetic oligonucleotide
cucauccagguaguguguc

SEQ ID NO: 1267438 - RNA, 19 nt, Artificial Sequence
  Description of Artificial Sequence: Synthetic oligonucleotide
auggcuuuacucguccaua

SEQ ID NO: 1267439 - RNA, 19 nt, Artificial Sequence
  Description of Artificial Sequence: Synthetic oligonucleotide
gaaggacccggagaggugu

SEQ ID NO: 1267440 - RNA, 19 nt, Artificial Sequence
  Description of Artificial Sequence: Synthetic oligonucleotide
aagucuccguguacaaauu

SEQ ID NO: 1267441 - RNA, 19 nt, Artificial Sequence
  Description of Artificial Sequence: Synthetic oligonucleotide
ggcaauccucaacuguuuc

SEQ ID NO: 1267442 - RNA, 19 nt, Artificial Sequence
  Description of Artificial Sequence: Synthetic oligonucleotide
ccccucuuacuccauuucc

SEQ ID NO: 1267443 - RNA, 19 nt, Artificial Sequence
  Description of Artificial Sequence: Synthetic oligonucleotide
ggaaaccgauaaaaccaug

SEQ ID NO: 1267444 - RNA, 19 nt, Artificial Sequence
  Description of Artificial Sequence: Synthetic oligonucleotide
gcaucguguuaggaaaacc

SEQ ID NO: 1267445 - RNA, 19 nt, Artificial Sequence
  Description of Artificial Sequence: Synthetic oligonucleotide
gacccggagagguguuuuc

SEQ ID NO: 1267446 - RNA, 19 nt, Artificial Sequence
  Description of Artificial Sequence: Synthetic oligonucleotide
cuucaccuaggaaguggca

SEQ ID NO: 1267447 - RNA, 19 nt, Artificial Sequence
  Description of Artificial Sequence: Synthetic oligonucleotide
ccuaagcaaacauugcaua

SEQ ID NO: 1267448 - RNA, 19 nt, Artificial Sequence
  Description of Artificial Sequence: Synthetic oligonucleotide
gauacaucucggacaggua

SEQ ID NO: 1267449 - RNA, 19 nt, Artificial Sequence
  Description of Artificial Sequence: Synthetic oligonucleotide
acgcaaaucugaagccuca

SEQ ID NO: 1267450 - RNA, 19 nt, Artificial Sequence
  Description of Artificial Sequence: Synthetic oligonucleotide
uggcagagcuccccucuua

SEQ ID NO: 1267451 - RNA, 19 nt, Artificial Sequence
  Description of Artificial Sequence: Synthetic oligonucleotide
caccuaggaaguggcaauc

SEQ ID NO: 1267452 - RNA, 19 nt, Artificial Sequence
  Description of Artificial Sequence: Synthetic oligonucleotide
cuuucaaaacggccauucu

SEQ ID NO: 1267453 - RNA, 19 nt, Artificial Sequence
  Description of Artificial Sequence: Synthetic oligonucleotide
ggcagagcuccccucuuac

SEQ ID NO: 1267454 - RNA, 19 nt, Artificial Sequence
  Description of Artificial Sequence: Synthetic oligonucleotide
ggugaguuauccauuugua

SEQ ID NO: 1267455 - RNA, 19 nt, Artificial Sequence
  Description of Artificial Sequence: Synthetic oligonucleotide
ugcugccuguacgagcauc

SEQ ID NO: 1267456 - RNA, 19 nt, Artificial Sequence
  Description of Artificial Sequence: Synthetic oligonucleotide
ggugaaggacccggagagg

SEQ ID NO: 1267457 - RNA, 19 nt, Artificial Sequence
  Description of Artificial Sequence: Synthetic oligonucleotide
acaccacagaauagauaca

SEQ ID NO: 1267458 - RNA, 19 nt, Artificial Sequence
  Description of Artificial Sequence: Synthetic oligonucleotide
gucuccguguacaaauucu

SEQ ID NO: 1267459 - RNA, 19 nt, Artificial Sequence
  Description of Artificial Sequence: Synthetic oligonucleotide
guuauccauuuguaggcuu

SEQ ID NO: 1267460 - RNA, 19 nt, Artificial Sequence
  Description of Artificial Sequence: Synthetic oligonucleotide
gggcaaacuucaccuagga

SEQ ID NO: 1267461 - RNA, 19 nt, Artificial Sequence
  Description of Artificial Sequence: Synthetic oligonucleotide
cacgauccaggucguucug

SEQ ID NO: 1267462 - RNA, 19 nt, Artificial Sequence
  Description of Artificial Sequence: Synthetic oligonucleotide
caccacagaauagauacau

SEQ ID NO: 1267463 - RNA, 19 nt, Artificial Sequence
  Description of Artificial Sequence: Synthetic oligonucleotide
acccggagagguguuuucu

SEQ ID NO: 1267464 - RNA, 19 nt, Artificial Sequence
  Description of Artificial Sequence: Synthetic oligonucleotide
ccguguacaaauucuuuaa

SEQ ID NO: 1267465 - RNA, 19 nt, Artificial Sequence
  Description of Artificial Sequence: Synthetic oligonucleotide
gaagugaaacgcacucuau

SEQ ID NO: 1267466 - RNA, 19 nt, Artificial Sequence
  Description of Artificial Sequence: Synthetic oligonucleotide
uaccagcaaccaugcugca

SEQ ID NO: 1267467 - RNA, 19 nt, Artificial Sequence
  Description of Artificial Sequence: Synthetic oligonucleotide
gaaaacccuuaguguucaa

SEQ ID NO: 1267468 - RNA, 19 nt, Artificial Sequence
  Description of Artificial Sequence: Synthetic oligonucleotide
cgaguucucacagccaaag

SEQ ID NO: 1267469 - RNA, 19 nt, Artificial Sequence
  Description of Artificial Sequence: Synthetic oligonucleotide
gagcaucguguuaggaaaa

SEQ ID NO: 1267470 - RNA, 19 nt, Artificial Sequence
  Description of Artificial Sequence: Synthetic oligonucleotide
ggggugaguuauccauuug

SEQ ID NO: 1267471 - RNA, 19 nt, Artificial Sequence
  Description of Artificial Sequence: Synthetic oligonucleotide
acgcacucuaugaggauuu

SEQ ID NO: 1267472 - RNA, 19 nt, Artificial Sequence
  Description of Artificial Sequence: Synthetic oligonucleotide
cagguagugugucuccaua

SEQ ID NO: 1267473 - RNA, 19 nt, Artificial Sequence
  Description of Artificial Sequence: Synthetic oligonucleotide
ggcuuuacucguccauauc

SEQ ID NO: 1267474 - RNA, 19 nt, Artificial Sequence
  Description of Artificial Sequence: Synthetic oligonucleotide
cuaccgaagauuccauuuu

SEQ ID NO: 1267475 - RNA, 19 nt, Artificial Sequence
  Description of Artificial Sequence: Synthetic oligonucleotide
guggcaauccucaacuguu

SEQ ID NO: 1267476 - RNA, 19 nt, Artificial Sequence
  Description of Artificial Sequence: Synthetic oligonucleotide
cgagcaucguguuaggaaa

SEQ ID NO: 1267477 - RNA, 19 nt, Artificial Sequence
  Description of Artificial Sequence: Synthetic oligonucleotide
cugaacuaaaucguuucuu

SEQ ID NO: 1267478 - RNA, 19 nt, Artificial Sequence
  Description of Artificial Sequence: Synthetic oligonucleotide
gaccgaguucucacagcca

SEQ ID NO: 1267479 - RNA, 19 nt, Artificial Sequence
  Description of Artificial Sequence: Synthetic oligonucleotide
ugucugcagucacguucau

SEQ ID NO: 1267480 - RNA, 19 nt, Artificial Sequence
  Description of Artificial Sequence: Synthetic oligonucleotide
gccuguacgagcaucgugu

SEQ ID NO: 1267481 - RNA, 19 nt, Artificial Sequence
  Description of Artificial Sequence: Synthetic oligonucleotide
gcuuugggacagaucaaca

SEQ ID NO: 1267482 - RNA, 19 nt, Artificial Sequence
  Description of Artificial Sequence: Synthetic oligonucleotide
cugcaugcucucucacaga

SEQ ID NO: 1267483 - RNA, 19 nt, Artificial Sequence
  Description of Artificial Sequence: Synthetic oligonucleotide
gcagacucuguuuuccuau

SEQ ID NO: 1267484 - RNA, 19 nt, Artificial Sequence
  Description of Artificial Sequence: Synthetic oligonucleotide
cuucuaccgaagauuccau

SEQ ID NO: 1267485 - RNA, 19 nt, Artificial Sequence
  Description of Artificial Sequence: Synthetic oligonucleotide
cgauaaaaccaugcuggug

SEQ ID NO: 1267486 - RNA, 19 nt, Artificial Sequence
  Description of Artificial Sequence: Synthetic oligonucleotide
ccaugcugcaugcucucuc

SEQ ID NO: 1267487 - RNA, 19 nt, Artificial Sequence
  Description of Artificial Sequence: Synthetic oligonucleotide
gccaacagaugaucugaaa

SEQ ID NO: 1267488 - RNA, 19 nt, Artificial Sequence
  Description of Artificial Sequence: Synthetic oligonucleotide
caccaugaguacauucaau

SEQ ID NO: 1267489 - RNA, 19 nt, Artificial Sequence
  Description of Artificial Sequence: Synthetic oligonucleotide
ggucguuuagaaauccaau

SEQ ID NO: 1267490 - RNA, 19 nt, Artificial Sequence
  Description of Artificial Sequence: Synthetic oligonucleotide
gagagccgauguuuggcuu

SEQ ID NO: 1267491 - RNA, 19 nt, Artificial Sequence
  Description of Artificial Sequence: Synthetic oligonucleotide
caaccuuuugacacaccuu

SEQ ID NO: 1267492 - RNA, 19 nt, Artificial Sequence
  Description of Artificial Sequence: Synthetic oligonucleotide
cguguuaggaaaacccuua

SEQ ID NO: 1267493 - RNA, 19 nt, Artificial Sequence
  Description of Artificial Sequence: Synthetic oligonucleotide
ggcagacucuguuuuccua

SEQ ID NO: 1267494 - RNA, 19 nt, Artificial Sequence
  Description of Artificial Sequence: Synthetic oligonucleotide
cuccguguacaaauucuuu

SEQ ID NO: 1267495 - RNA, 19 nt, Artificial Sequence
  Description of Artificial Sequence: Synthetic oligonucleotide
ggcugguuugaaacaaucu

SEQ ID NO: 1267496 - RNA, 19 nt, Artificial Sequence
  Description of Artificial Sequence: Synthetic oligonucleotide
cuguacgagcaucguguua

SEQ ID NO: 1267497 - RNA, 19 nt, Artificial Sequence
  Description of Artificial Sequence: Synthetic oligonucleotide
ggugggaaggaaaccgaua

SEQ ID NO: 1267498 - RNA, 19 nt, Artificial Sequence
  Description of Artificial Sequence: Synthetic oligonucleotide
aaggacccggagagguguu

SEQ ID NO: 1267499 - RNA, 19 nt, Artificial Sequence
  Description of Artificial Sequence: Synthetic oligonucleotide
gggaauuuacccagucccu

SEQ ID NO: 1267500 - RNA, 19 nt, Artificial Sequence
  Description of Artificial Sequence: Synthetic oligonucleotide
ggaugggcguuuguaaggu

SEQ ID NO: 1267501 - RNA, 19 nt, Artificial Sequence
  Description of Artificial Sequence: Synthetic oligonucleotide
ggccuucggugaaggaccc

SEQ ID NO: 1267502 - RNA, 19 nt, Artificial Sequence
  Description of Artificial Sequence: Synthetic oligonucleotide
caacuccuuggaugggcgu

SEQ ID NO: 1267503 - RNA, 19 nt, Artificial Sequence
  Description of Artificial Sequence: Synthetic oligonucleotide
augcugccuguacgagcau

SEQ ID NO: 1267504 - RNA, 19 nt, Artificial Sequence
  Description of Artificial Sequence: Synthetic oligonucleotide
ccgauaaaaccaugcuggu

SEQ ID NO: 1267505 - RNA, 19 nt, Artificial Sequence
  Description of Artificial Sequence: Synthetic oligonucleotide
gcgaagugaaacgcacucu

SEQ ID NO: 1267506 - RNA, 19 nt, Artificial Sequence
  Description of Artificial Sequence: Synthetic oligonucleotide
gccuucggugaaggacccg

SEQ ID NO: 1267507 - RNA, 19 nt, Artificial Sequence
  Description of Artificial Sequence: Synthetic oligonucleotide
ccuuaacuucuugcgaagu

SEQ ID NO: 1267508 - RNA, 19 nt, Artificial Sequence
  Description of Artificial Sequence: Synthetic oligonucleotide
gcucauccagguagugugu

SEQ ID NO: 1267509 - RNA, 19 nt, Artificial Sequence
  Description of Artificial Sequence: Synthetic oligonucleotide
cagugagcuuugggacaga

SEQ ID NO: 1267510 - RNA, 19 nt, Artificial Sequence
  Description of Artificial Sequence: Synthetic oligonucleotide
caagcaccaugaguacauu

SEQ ID NO: 1267511 - RNA, 19 nt, Artificial Sequence
  Description of Artificial Sequence: Synthetic oligonucleotide
cugccuguacgagcaucgu

SEQ ID NO: 1267512 - RNA, 19 nt, Artificial Sequence
  Description of Artificial Sequence: Synthetic oligonucleotide
ccaggauaugcugccugua

SEQ ID NO: 1267513 - RNA, 19 nt, Artificial Sequence
  Description of Artificial Sequence: Synthetic oligonucleotide
ccagguagugugucuccau

SEQ ID NO: 1267514 - RNA, 19 nt, Artificial Sequence
  Description of Artificial Sequence: Synthetic oligonucleotide
ccuguacgagcaucguguu

SEQ ID NO: 1267515 - RNA, 19 nt, Artificial Sequence
  Description of Artificial Sequence: Synthetic oligonucleotide
ggacccggagagguguuuu

SEQ ID NO: 1267516 - RNA, 19 nt, Artificial Sequence
  Description of Artificial Sequence: Synthetic oligonucleotide
caacacgauccaggucguu

SEQ ID NO: 1267517 - RNA, 19 nt, Artificial Sequence
  Description of Artificial Sequence: Synthetic oligonucleotide
cgcacucuaugaggauuua

SEQ ID NO: 1267518 - RNA, 19 nt, Artificial Sequence
  Description of Artificial Sequence: Synthetic oligonucleotide
auucucagcaauuauaucc

SEQ ID NO: 1267519 - RNA, 19 nt, Artificial Sequence
  Description of Artificial Sequence: Synthetic oligonucleotide
agugguugcaauuacauac

SEQ ID NO: 1267520 - RNA, 19 nt, Artificial Sequence
  Description of Artificial Sequence: Synthetic oligonucleotide
aauucggagaacuuccucg

SEQ ID NO: 1267521 - RNA, 19 nt, Artificial Sequence
  Description of Artificial Sequence: Synthetic oligonucleotide
uuuaguagggaauacuggg

SEQ ID NO: 1267522 - RNA, 19 nt, Artificial Sequence
  Description of Artificial Sequence: Synthetic oligonucleotide
aaaugguccuguuaaguac

SEQ ID NO: 1267523 - RNA, 19 nt, Artificial Sequence
  Description of Artificial Sequence: Synthetic oligonucleotide
uaaugaaaaucccugguag

SEQ ID NO: 1267524 - RNA, 19 nt, Artificial Sequence
  Description of Artificial Sequence: Synthetic oligonucleotide
uggaaugagauccaaacug

SEQ ID NO: 1267525 - RNA, 19 nt, Artificial Sequence
  Description of Artificial Sequence: Synthetic oligonucleotide
auaaccacuguacacauag

SEQ ID NO: 1267526 - RNA, 19 nt, Artificial Sequence
  Description of Artificial Sequence: Synthetic oligonucleotide
aacgauuuccuuuaagugu

SEQ ID NO: 1267527 - RNA, 19 nt, Artificial Sequence
  Description of Artificial Sequence: Synthetic oligonucleotide
aauaaugaaaaucccuggu

SEQ ID NO: 1267528 - RNA, 19 nt, Artificial Sequence
  Description of Artificial Sequence: Synthetic oligonucleotide
ucagcaauuauauccauca

SEQ ID NO: 1267529 - RNA, 19 nt, Artificial Sequence
  Description of Artificial Sequence: Synthetic oligonucleotide
ucaguauguguucauagcc

SEQ ID NO: 1267530 - RNA, 19 nt, Artificial Sequence
  Description of Artificial Sequence: Synthetic oligonucleotide
uaaaucucaucaaugaguc

SEQ ID NO: 1267531 - RNA, 19 nt, Artificial Sequence
  Description of Artificial Sequence: Synthetic oligonucleotide
cacacaauugccuugcucc

SEQ ID NO: 1267532 - RNA, 19 nt, Artificial Sequence
  Description of Artificial Sequence: Synthetic oligonucleotide
cucucaacacccuagaaag

SEQ ID NO: 1267533 - RNA, 19 nt, Artificial Sequence
  Description of Artificial Sequence: Synthetic oligonucleotide
uuaguagauccacauugcg

SEQ ID NO: 1267534 - RNA, 19 nt, Artificial Sequence
  Description of Artificial Sequence: Synthetic oligonucleotide
uccuguuaaguacucaucc

SEQ ID NO: 1267535 - RNA, 19 nt, Artificial Sequence
  Description of Artificial Sequence: Synthetic oligonucleotide
aauuguugaccuuaucagu

SEQ ID NO: 1267536 - RNA, 19 nt, Artificial Sequence
  Description of Artificial Sequence: Synthetic oligonucleotide
ucguaugucagcugggugg

SEQ ID NO: 1267537 - RNA, 19 nt, Artificial Sequence
  Description of Artificial Sequence: Synthetic oligonucleotide
aauacaguccucgauauaa

SEQ ID NO: 1267538 - RNA, 19 nt, Artificial Sequence
  Description of Artificial Sequence: Synthetic oligonucleotide
cauaggauaugucuguggg

SEQ ID NO: 1267539 - RNA, 19 nt, Artificial Sequence
  Description of Artificial Sequence: Synthetic oligonucleotide
gauuaauucugcaauugag

SEQ ID NO: 1267540 - RNA, 19 nt, Artificial Sequence
  Description of Artificial Sequence: Synthetic oligonucleotide
agcacguucagguucacuc

SEQ ID NO: 1267541 - RNA, 19 nt, Artificial Sequence
  Description of Artificial Sequence: Synthetic oligonucleotide
uauguguucauagccauag

SEQ ID NO: 1267542 - RNA, 19 nt, Artificial Sequence
  Description of Artificial Sequence: Synthetic oligonucleotide
auugcgauccagcagcagg

SEQ ID NO: 1267543 - RNA, 19 nt, Artificial Sequence
  Description of Artificial Sequence: Synthetic oligonucleotide
uuccucucgaugaauaaag

SEQ ID NO: 1267544 - RNA, 19 nt, Artificial Sequence
  Description of Artificial Sequence: Synthetic oligonucleotide
acuuauucugugcugacug

SEQ ID NO: 1267545 - RNA, 19 nt, Artificial Sequence
  Description of Artificial Sequence: Synthetic oligonucleotide
uggguaauuguucugcccc

SEQ ID NO: 1267546 - RNA, 19 nt, Artificial Sequence
  Description of Artificial Sequence: Synthetic oligonucleotide
cuuuaguagggaauacugg

SEQ ID NO: 1267547 - RNA, 19 nt, Artificial Sequence
  Description of Artificial Sequence: Synthetic oligonucleotide
ucuaucccagacaugaacu

SEQ ID NO: 1267548 - RNA, 19 nt, Artificial Sequence
  Description of Artificial Sequence: Synthetic oligonucleotide
aucagugucuaucccagac

SEQ ID NO: 1267549 - RNA, 19 nt, Artificial Sequence
  Description of Artificial Sequence: Synthetic oligonucleotide
aaaauaucagcgugacucu

SEQ ID NO: 1267550 - RNA, 19 nt, Artificial Sequence
  Description of Artificial Sequence: Synthetic oligonucleotide
auguuuuccgaaucguugg

SEQ ID NO: 1267551 - RNA, 19 nt, Artificial Sequence
  Description of Artificial Sequence: Synthetic oligonucleotide
uuaaguacucaucccacac

SEQ ID NO: 1267552 - RNA, 19 nt, Artificial Sequence
  Description of Artificial Sequence: Synthetic oligonucleotide
ugauuaauucugcaauuga

SEQ ID NO: 1267553 - RNA, 19 nt, Artificial Sequence
  Description of Artificial Sequence: Synthetic oligonucleotide
gauggucccauacagugcc

SEQ ID NO: 1267554 - RNA, 19 nt, Artificial Sequence
  Description of Artificial Sequence: Synthetic oligonucleotide
agagccguaauguuuuccg

SEQ ID NO: 1267555 - RNA, 19 nt, Artificial Sequence
  Description of Artificial Sequence: Synthetic oligonucleotide
aguugagcaagucgcacac

SEQ ID NO: 1267556 - RNA, 19 nt, Artificial Sequence
  Description of Artificial Sequence: Synthetic oligonucleotide
ucgauauaauuguugaccu

SEQ ID NO: 1267557 - RNA, 19 nt, Artificial Sequence
  Description of Artificial Sequence: Synthetic oligonucleotide
aagucgcacacugaguggc

SEQ ID NO: 1267558 - RNA, 19 nt, Artificial Sequence
  Description of Artificial Sequence: Synthetic oligonucleotide
cacauugcgauccagcagc

SEQ ID NO: 1267559 - RNA, 19 nt, Artificial Sequence
  Description of Artificial Sequence: Synthetic oligonucleotide
agcgcacuuguccagaaac

SEQ ID NO: 1267560 - RNA, 19 nt, Artificial Sequence
  Description of Artificial Sequence: Synthetic oligonucleotide
ucucgaugaauaaaggauc

SEQ ID NO: 1267561 - RNA, 19 nt, Artificial Sequence
  Description of Artificial Sequence: Synthetic oligonucleotide
agagguccccaucaaaugg

SEQ ID NO: 1267562 - RNA, 19 nt, Artificial Sequence
  Description of Artificial Sequence: Synthetic oligonucleotide
ccauucaucaguuuagugg

SEQ ID NO: 1267563 - RNA, 19 nt, Artificial Sequence
  Description of Artificial Sequence: Synthetic oligonucleotide
aaucguuggguaauuguuc

SEQ ID NO: 1267564 - RNA, 19 nt, Artificial Sequence
  Description of Artificial Sequence: Synthetic oligonucleotide
cucgaugaauaaaggaucc

SEQ ID NO: 1267565 - RNA, 19 nt, Artificial Sequence
  Description of Artificial Sequence: Synthetic oligonucleotide
aaguacucaucccacacaa

SEQ ID NO: 1267566 - RNA, 19 nt, Artificial Sequence
  Description of Artificial Sequence: Synthetic oligonucleotide
augaaaaucccugguaggg

SEQ ID NO: 1267567 - RNA, 19 nt, Artificial Sequence
  Description of Artificial Sequence: Synthetic oligonucleotide
auuacauacucagugccuc

SEQ ID NO: 1267568 - RNA, 19 nt, Artificial Sequence
  Description of Artificial Sequence: Synthetic oligonucleotide
gagguuaucgaacacggga

SEQ ID NO: 1267569 - RNA, 19 nt, Artificial Sequence
  Description of Artificial Sequence: Synthetic oligonucleotide
uguuaaguacucaucccac

SEQ ID NO: 1267570 - RNA, 19 nt, Artificial Sequence
  Description of Artificial Sequence: Synthetic oligonucleotide
uaguagggaauacugggca

SEQ ID NO: 1267571 - RNA, 19 nt, Artificial Sequence
  Description of Artificial Sequence: Synthetic oligonucleotide
aagcggcguuaguagaucc

SEQ ID NO: 1267572 - RNA, 19 nt, Artificial Sequence
  Description of Artificial Sequence: Synthetic oligonucleotide
uaguagauccacauugcga

SEQ ID NO: 1267573 - RNA, 19 nt, Artificial Sequence
  Description of Artificial Sequence: Synthetic oligonucleotide
uaauucugcaauugaggug

SEQ ID NO: 1267574 - RNA, 19 nt, Artificial Sequence
  Description of Artificial Sequence: Synthetic oligonucleotide
ugaaugcacccucugauuc

SEQ ID NO: 1267575 - RNA, 19 nt, Artificial Sequence
  Description of Artificial Sequence: Synthetic oligonucleotide
gagaauucggagaacuucc

SEQ ID NO: 1267576 - RNA, 19 nt, Artificial Sequence
  Description of Artificial Sequence: Synthetic oligonucleotide
acauacuauucugaaugcc

SEQ ID NO: 1267577 - RNA, 19 nt, Artificial Sequence
  Description of Artificial Sequence: Synthetic oligonucleotide
gagacaacuuauucugugc

SEQ ID NO: 1267578 - RNA, 19 nt, Artificial Sequence
  Description of Artificial Sequence: Synthetic oligonucleotide
ugcaauugaggugugguug

SEQ ID NO: 1267579 - RNA, 19 nt, Artificial Sequence
  Description of Artificial Sequence: Synthetic oligonucleotide
aagagguccccaucaaaug

SEQ ID NO: 1267580 - RNA, 19 nt, Artificial Sequence
  Description of Artificial Sequence: Synthetic oligonucleotide
ugagccuuuagcaggccag

SEQ ID NO: 1267581 - RNA, 19 nt, Artificial Sequence
  Description of Artificial Sequence: Synthetic oligonucleotide
uacucaucccacacaauug

SEQ ID NO: 1267582 - RNA, 19 nt, Artificial Sequence
  Description of Artificial Sequence: Synthetic oligonucleotide
gaacacgggaaacacugag

SEQ ID NO: 1267583 - RNA, 19 nt, Artificial Sequence
  Description of Artificial Sequence: Synthetic oligonucleotide
ucucaacacccuagaaagg

SEQ ID NO: 1267584 - RNA, 19 nt, Artificial Sequence
  Description of Artificial Sequence: Synthetic oligonucleotide
gggcaaucaguccaaaugg

SEQ ID NO: 1267585 - RNA, 19 nt, Artificial Sequence
  Description of Artificial Sequence: Synthetic oligonucleotide
ucaaugaguccuucguaug

SEQ ID NO: 1267586 - RNA, 19 nt, Artificial Sequence
  Description of Artificial Sequence: Synthetic oligonucleotide
agacaacuuauucugugcu

SEQ ID NO: 1267587 - RNA, 19 nt, Artificial Sequence
  Description of Artificial Sequence: Synthetic oligonucleotide
uuaucgaacacgggaaaca

SEQ ID NO: 1267588 - RNA, 19 nt, Artificial Sequence
  Description of Artificial Sequence: Synthetic oligonucleotide
gaaacacugaguuuuggcu

SEQ ID NO: 1267589 - RNA, 19 nt, Artificial Sequence
  Description of Artificial Sequence: Synthetic oligonucleotide
uagauccacauugcgaucc

SEQ ID NO: 1267590 - RNA, 19 nt, Artificial Sequence
  Description of Artificial Sequence: Synthetic oligonucleotide
aucagcgugacucuguuuu

SEQ ID NO: 1267591 - RNA, 19 nt, Artificial Sequence
  Description of Artificial Sequence: Synthetic oligonucleotide
cuugagcccacuauugcac

SEQ ID NO: 1267592 - RNA, 19 nt, Artificial Sequence
  Description of Artificial Sequence: Synthetic oligonucleotide
gacaacuuauucugugcug

SEQ ID NO: 1267593 - RNA, 19 nt, Artificial Sequence
  Description of Artificial Sequence: Synthetic oligonucleotide
gucaguauguguucauagc

SEQ ID NO: 1267594 - RNA, 19 nt, Artificial Sequence
  Description of Artificial Sequence: Synthetic oligonucleotide
aacucccgcagcucgcgac

SEQ ID NO: 1267595 - RNA, 19 nt, Artificial Sequence
  Description of Artificial Sequence: Synthetic oligonucleotide
aguauguguucauagccau

SEQ ID NO: 1267596 - RNA, 19 nt, Artificial Sequence
  Description of Artificial Sequence: Synthetic oligonucleotide
aggagguuaucgaacacgg

SEQ ID NO: 1267597 - RNA, 19 nt, Artificial Sequence
  Description of Artificial Sequence: Synthetic oligonucleotide
aucguuggguaauuguucu

SEQ ID NO: 1267598 - RNA, 19 nt, Artificial Sequence
  Description of Artificial Sequence: Synthetic oligonucleotide
agucuucagacguggugac

SEQ ID NO: 1267599 - RNA, 19 nt, Artificial Sequence
  Description of Artificial Sequence: Synthetic oligonucleotide
ugaaaaucccugguagggc

SEQ ID NO: 1267600 - RNA, 19 nt, Artificial Sequence
  Description of Artificial Sequence: Synthetic oligonucleotide
augaauaaaggaucccaaa

SEQ ID NO: 1267601 - RNA, 19 nt, Artificial Sequence
  Description of Artificial Sequence: Synthetic oligonucleotide
gaaugcacccucugauucc

SEQ ID NO: 1267602 - RNA, 19 nt, Artificial Sequence
  Description of Artificial Sequence: Synthetic oligonucleotide
aaccagucucaacaccuug

SEQ ID NO: 1267603 - RNA, 19 nt, Artificial Sequence
  Description of Artificial Sequence: Synthetic oligonucleotide
uuggguaauuguucugccc

SEQ ID NO: 1267604 - RNA, 19 nt, Artificial Sequence
  Description of Artificial Sequence: Synthetic oligonucleotide
uggcgcauaaccacuguac

SEQ ID NO: 1267605 - RNA, 19 nt, Artificial Sequence
  Description of Artificial Sequence: Synthetic oligonucleotide
uucagguucacucgcccgu

SEQ ID NO: 1267606 - RNA, 19 nt, Artificial Sequence
  Description of Artificial Sequence: Synthetic oligonucleotide
aaauaucagcgugacucug

SEQ ID NO: 1267607 - RNA, 19 nt, Artificial Sequence
  Description of Artificial Sequence: Synthetic oligonucleotide
uauaauuguugaccuuauc

SEQ ID NO: 1267608 - RNA, 19 nt, Artificial Sequence
  Description of Artificial Sequence: Synthetic oligonucleotide
guuaguagauccacauugc

SEQ ID NO: 1267609 - RNA, 19 nt, Artificial Sequence
  Description of Artificial Sequence: Synthetic oligonucleotide
ucacucgcccguacgacag

SEQ ID NO: 1267610 - RNA, 19 nt, Artificial Sequence
  Description of Artificial Sequence: Synthetic oligonucleotide
uccggcguggcacaaacaa

SEQ ID NO: 1267611 - RNA, 19 nt, Artificial Sequence
  Description of Artificial Sequence: Synthetic oligonucleotide
uguacacauaggauauguc

SEQ ID NO: 1267612 - RNA, 19 nt, Artificial Sequence
  Description of Artificial Sequence: Synthetic oligonucleotide
ucaguuuagugguugcaau

SEQ ID NO: 1267613 - RNA, 19 nt, Artificial Sequence
  Description of Artificial Sequence: Synthetic oligonucleotide
uguuuucuccugguuggcg

SEQ ID NO: 1267614 - RNA, 19 nt, Artificial Sequence
  Description of Artificial Sequence: Synthetic oligonucleotide
uucguaugucagcugggug

SEQ ID NO: 1267615 - RNA, 19 nt, Artificial Sequence
  Description of Artificial Sequence: Synthetic oligonucleotide
caaacgauuuccuuuaagu

SEQ ID NO: 1267616 - RNA, 19 nt, Artificial Sequence
  Description of Artificial Sequence: Synthetic oligonucleotide
ugaguggcgcauaaccacu

SEQ ID NO: 1267617 - RNA, 19 nt, Artificial Sequence
  Description of Artificial Sequence: Synthetic oligonucleotide
uccaaaugguccuguuaag

SEQ ID NO: 1267618 - RNA, 19 nt, Artificial Sequence
  Description of Artificial Sequence: Synthetic oligonucleotide
uuuuccgaaucguugggua

SEQ ID NO: 1267619 - RNA, 19 nt, Artificial Sequence
  Description of Artificial Sequence: Synthetic oligonucleotide
aauaucagcgugacucugu

SEQ ID NO: 1267620 - RNA, 19 nt, Artificial Sequence
  Description of Artificial Sequence: Synthetic oligonucleotide
ggucaguauguguucauag

SEQ ID NO: 1267621 - RNA, 19 nt, Artificial Sequence
  Description of Artificial Sequence: Synthetic oligonucleotide
uggcaagcggcguuaguag

SEQ ID NO: 1267622 - RNA, 19 nt, Artificial Sequence
  Description of Artificial Sequence: Synthetic oligonucleotide
ggaaacacugaguuuuggc

SEQ ID NO: 1267623 - RNA, 19 nt, Artificial Sequence
  Description of Artificial Sequence: Synthetic oligonucleotide
ccaacugggagagaaagcg

SEQ ID NO: 1267624 - RNA, 19 nt, Artificial Sequence
  Description of Artificial Sequence: Synthetic oligonucleotide
auucggagaacuuccucga

SEQ ID NO: 1267625 - RNA, 19 nt, Artificial Sequence
  Description of Artificial Sequence: Synthetic oligonucleotide
ucccauacagugccugcag

SEQ ID NO: 1267626 - RNA, 19 nt, Artificial Sequence
  Description of Artificial Sequence: Synthetic oligonucleotide
gggauggucccauacagug

SEQ ID NO: 1267627 - RNA, 19 nt, Artificial Sequence
  Description of Artificial Sequence: Synthetic oligonucleotide
cguuaguagauccacauug

SEQ ID NO: 1267628 - RNA, 19 nt, Artificial Sequence
  Description of Artificial Sequence: Synthetic oligonucleotide
ucgcccguacgacaggugc

SEQ ID NO: 1267629 - RNA, 19 nt, Artificial Sequence
  Description of Artificial Sequence: Synthetic oligonucleotide
gacguggugacaucuuuga

SEQ ID NO: 1267630 - RNA, 19 nt, Artificial Sequence
  Description of Artificial Sequence: Synthetic oligonucleotide
ugagcggaugcuucugggc

SEQ ID NO: 1267631 - RNA, 19 nt, Artificial Sequence
  Description of Artificial Sequence: Synthetic oligonucleotide
gaucccaaaacacccaggu

SEQ ID NO: 1267632 - RNA, 19 nt, Artificial Sequence
  Description of Artificial Sequence: Synthetic oligonucleotide
aacuuccucgaugcuccgc

SEQ ID NO: 1267633 - RNA, 19 nt, Artificial Sequence
  Description of Artificial Sequence: Synthetic oligonucleotide
ugguuggcguuucuucugc

SEQ ID NO: 1267634 - RNA, 19 nt, Artificial Sequence
  Description of Artificial Sequence: Synthetic oligonucleotide
aaugcacccucugauucca

SEQ ID NO: 1267635 - RNA, 19 nt, Artificial Sequence
  Description of Artificial Sequence: Synthetic oligonucleotide
caagucgcacacugagugg

SEQ ID NO: 1267636 - RNA, 19 nt, Artificial Sequence
  Description of Artificial Sequence: Synthetic oligonucleotide
aguccuucguaugucagcu

SEQ ID NO: 1267637 - RNA, 19 nt, Artificial Sequence
  Description of Artificial Sequence: Synthetic oligonucleotide
acgggaaacacugaguuuu

SEQ ID NO: 1267638 - RNA, 19 nt, Artificial Sequence
  Description of Artificial Sequence: Synthetic oligonucleotide
uaauuguucugccccuguc

SEQ ID NO: 1267639 - RNA, 19 nt, Artificial Sequence
  Description of Artificial Sequence: Synthetic oligonucleotide
ucaacaccuugaugagcgg

SEQ ID NO: 1267640 - RNA, 19 nt, Artificial Sequence
  Description of Artificial Sequence: Synthetic oligonucleotide
ugagcaagucgcacacuga

SEQ ID NO: 1267641 - RNA, 19 nt, Artificial Sequence
  Description of Artificial Sequence: Synthetic oligonucleotide
gaguugagcaagucgcaca

SEQ ID NO: 1267642 - RNA, 19 nt, Artificial Sequence
  Description of Artificial Sequence: Synthetic oligonucleotide
auacuauucugaaugccgu

SEQ ID NO: 1267643 - RNA, 19 nt, Artificial Sequence
  Description of Artificial Sequence: Synthetic oligonucleotide
ucgaugaauaaaggauccc

SEQ ID NO: 1267644 - RNA, 19 nt, Artificial Sequence
  Description of Artificial Sequence: Synthetic oligonucleotide
auguguucauagccauagg

SEQ ID NO: 1267645 - RNA, 19 nt, Artificial Sequence
  Description of Artificial Sequence: Synthetic oligonucleotide
auggauaagagguccccau

SEQ ID NO: 1267646 - RNA, 19 nt, Artificial Sequence
  Description of Artificial Sequence: Synthetic oligonucleotide
caacugggagagaaagcgc

SEQ ID NO: 1267647 - RNA, 19 nt, Artificial Sequence
  Description of Artificial Sequence: Synthetic oligonucleotide
uucacucgcccguacgaca

SEQ ID NO: 1267648 - RNA, 19 nt, Artificial Sequence
  Description of Artificial Sequence: Synthetic oligonucleotide
caguauguguucauagcca

SEQ ID NO: 1267649 - RNA, 19 nt, Artificial Sequence
  Description of Artificial Sequence: Synthetic oligonucleotide
ugcgcggccaaaucuugcc

SEQ ID NO: 1267650 - RNA, 19 nt, Artificial Sequence
  Description of Artificial Sequence: Synthetic oligonucleotide
acugaguuuuggcuuccug

SEQ ID NO: 1267651 - RNA, 19 nt, Artificial Sequence
  Description of Artificial Sequence: Synthetic oligonucleotide
aguuuagugguugcaauua

SEQ ID NO: 1267652 - RNA, 19 nt, Artificial Sequence
  Description of Artificial Sequence: Synthetic oligonucleotide
caaaggugacaccuccgag

SEQ ID NO: 1267653 - RNA, 19 nt, Artificial Sequence
  Description of Artificial Sequence: Synthetic oligonucleotide
uuggcgagggagccccugg

SEQ ID NO: 1267654 - RNA, 19 nt, Artificial Sequence
  Description of Artificial Sequence: Synthetic oligonucleotide
aacacgggaaacacugagu

SEQ ID NO: 1267655 - RNA, 19 nt, Artificial Sequence
  Description of Artificial Sequence: Synthetic oligonucleotide
agcgugacucuguuuucuc

SEQ ID NO: 1267656 - RNA, 19 nt, Artificial Sequence
  Description of Artificial Sequence: Synthetic oligonucleotide
caagguuguucaaggucag

SEQ ID NO: 1267657 - RNA, 19 nt, Artificial Sequence
  Description of Artificial Sequence: Synthetic oligonucleotide
agguucacucgcccguacg

SEQ ID NO: 1267658 - RNA, 19 nt, Artificial Sequence
  Description of Artificial Sequence: Synthetic oligonucleotide
cacguucagguucacucgc

SEQ ID NO: 1267659 - RNA, 19 nt, Artificial Sequence
  Description of Artificial Sequence: Synthetic oligonucleotide
gagcggaugcuucugggca

SEQ ID NO: 1267660 - RNA, 19 nt, Artificial Sequence
  Description of Artificial Sequence: Synthetic oligonucleotide
uacaggcuagucuggucgc

SEQ ID NO: 1267661 - RNA, 19 nt, Artificial Sequence
  Description of Artificial Sequence: Synthetic oligonucleotide
gacgcaacgccucgcgcag

SEQ ID NO: 1267662 - RNA, 19 nt, Artificial Sequence
  Description of Artificial Sequence: Synthetic oligonucleotide
gauaagagguccccaucaa

SEQ ID NO: 1267663 - RNA, 19 nt, Artificial Sequence
  Description of Artificial Sequence: Synthetic oligonucleotide
guuaucgaacacgggaaac

SEQ ID NO: 1267664 - RNA, 19 nt, Artificial Sequence
  Description of Artificial Sequence: Synthetic oligonucleotide
acaggugcgcggccaaauc

SEQ ID NO: 1267665 - RNA, 19 nt, Artificial Sequence
  Description of Artificial Sequence: Synthetic oligonucleotide
uugagcccacuauugcaca

SEQ ID NO: 1267666 - RNA, 19 nt, Artificial Sequence
  Description of Artificial Sequence: Synthetic oligonucleotide
caaaccagucucaacaccu

SEQ ID NO: 1267667 - RNA, 19 nt, Artificial Sequence
  Description of Artificial Sequence: Synthetic oligonucleotide
agcgcagggcagcaauuuc

SEQ ID NO: 1267668 - RNA, 19 nt, Artificial Sequence
  Description of Artificial Sequence: Synthetic oligonucleotide
ccaaacuguauuccucucg

SEQ ID NO: 1267669 - RNA, 19 nt, Artificial Sequence
  Description of Artificial Sequence: Synthetic oligonucleotide
agucuggucgccauccaag

SEQ ID NO: 1267670 - RNA, 19 nt, Artificial Sequence
  Description of Artificial Sequence: Synthetic oligonucleotide
gcacccucugauuccaugg

SEQ ID NO: 1267671 - RNA, 19 nt, Artificial Sequence
  Description of Artificial Sequence: Synthetic oligonucleotide
ccuguuaaguacucauccc

SEQ ID NO: 1267672 - RNA, 19 nt, Artificial Sequence
  Description of Artificial Sequence: Synthetic oligonucleotide
cuugccgagcgcacucucc

SEQ ID NO: 1267673 - RNA, 19 nt, Artificial Sequence
  Description of Artificial Sequence: Synthetic oligonucleotide
ugaaugccguaaaucucau

SEQ ID NO: 1267674 - RNA, 19 nt, Artificial Sequence
  Description of Artificial Sequence: Synthetic oligonucleotide
uagugguugcaauuacaua

SEQ ID NO: 1267675 - RNA, 19 nt, Artificial Sequence
  Description of Artificial Sequence: Synthetic oligonucleotide
uccucgaugcuccgccagc

SEQ ID NO: 1267676 - RNA, 19 nt, Artificial Sequence
  Description of Artificial Sequence: Synthetic oligonucleotide
ucguuggguaauuguucug

SEQ ID NO: 1267677 - RNA, 19 nt, Artificial Sequence
  Description of Artificial Sequence: Synthetic oligonucleotide
ggagaauucggagaacuuc

SEQ ID NO: 1267678 - RNA, 19 nt, Artificial Sequence
  Description of Artificial Sequence: Synthetic oligonucleotide
cugguuggcguuucuucug

SEQ ID NO: 1267679 - RNA, 19 nt, Artificial Sequence
  Description of Artificial Sequence: Synthetic oligonucleotide
auaucagcgugacucuguu

SEQ ID NO: 1267680 - RNA, 19 nt, Artificial Sequence
  Description of Artificial Sequence: Synthetic oligonucleotide
agcaaaggugacaccuccg

SEQ ID NO: 1267681 - RNA, 19 nt, Artificial Sequence
  Description of Artificial Sequence: Synthetic oligonucleotide
gcguugcucacacagcaag

SEQ ID NO: 1267682 - RNA, 19 nt, Artificial Sequence
  Description of Artificial Sequence: Synthetic oligonucleotide
agcgcacucuccuuuccca

SEQ ID NO: 1267683 - RNA, 19 nt, Artificial Sequence
  Description of Artificial Sequence: Synthetic oligonucleotide
ucucagcaauuauauccau

SEQ ID NO: 1267684 - RNA, 19 nt, Artificial Sequence
  Description of Artificial Sequence: Synthetic oligonucleotide
uacugggcaaucaguccaa

SEQ ID NO: 1267685 - RNA, 19 nt, Artificial Sequence
  Description of Artificial Sequence: Synthetic oligonucleotide
ggcaauacaguccucgaua

SEQ ID NO: 1267686 - RNA, 19 nt, Artificial Sequence
  Description of Artificial Sequence: Synthetic oligonucleotide
auuccucucgaugaauaaa

SEQ ID NO: 1267687 - RNA, 19 nt, Artificial Sequence
  Description of Artificial Sequence: Synthetic oligonucleotide
guacucaucccacacaauu

SEQ ID NO: 1267688 - RNA, 19 nt, Artificial Sequence
  Description of Artificial Sequence: Synthetic oligonucleotide
ucccagacaugaacuccug

SEQ ID NO: 1267689 - RNA, 19 nt, Artificial Sequence
  Description of Artificial Sequence: Synthetic oligonucleotide
ugucuaucccagacaugaa

SEQ ID NO: 1267690 - RNA, 19 nt, Artificial Sequence
  Description of Artificial Sequence: Synthetic oligonucleotide
acguucagguucacucgcc

SEQ ID NO: 1267691 - RNA, 19 nt, Artificial Sequence
  Description of Artificial Sequence: Synthetic oligonucleotide
caguccucgauauaauugu

SEQ ID NO: 1267692 - RNA, 19 nt, Artificial Sequence
  Description of Artificial Sequence: Synthetic oligonucleotide
ucuggucgccauccaagua

SEQ ID NO: 1267693 - RNA, 19 nt, Artificial Sequence
  Description of Artificial Sequence: Synthetic oligonucleotide
gagccguaauguuuuccga

SEQ ID NO: 1267694 - RNA, 19 nt, Artificial Sequence
  Description of Artificial Sequence: Synthetic oligonucleotide
uuccgaaucguuggguaau

SEQ ID NO: 1267695 - RNA, 19 nt, Artificial Sequence
  Description of Artificial Sequence: Synthetic oligonucleotide
ucagacguggugacaucuu

SEQ ID NO: 1267696 - RNA, 19 nt, Artificial Sequence
  Description of Artificial Sequence: Synthetic oligonucleotide
gccguaaaucucaucaaug

SEQ ID NO: 1267697 - RNA, 19 nt, Artificial Sequence
  Description of Artificial Sequence: Synthetic oligonucleotide
cuucaaaguggggcccugg

SEQ ID NO: 1267698 - RNA, 19 nt, Artificial Sequence
  Description of Artificial Sequence: Synthetic oligonucleotide
cucgcgacgcaacgccucg

SEQ ID NO: 1267699 - RNA, 19 nt, Artificial Sequence
  Description of Artificial Sequence: Synthetic oligonucleotide
gaaucguuggguaauuguu

SEQ ID NO: 1267700 - RNA, 19 nt, Artificial Sequence
  Description of Artificial Sequence: Synthetic oligonucleotide
agaauucggagaacuuccu

SEQ ID NO: 1267701 - RNA, 19 nt, Artificial Sequence
  Description of Artificial Sequence: Synthetic oligonucleotide
uucggagaacuuccucgau

SEQ ID NO: 1267702 - RNA, 19 nt, Artificial Sequence
  Description of Artificial Sequence: Synthetic oligonucleotide
agacguggugacaucuuug

SEQ ID NO: 1267703 - RNA, 19 nt, Artificial Sequence
  Description of Artificial Sequence: Synthetic oligonucleotide
aguggcgcauaaccacugu

SEQ ID NO: 1267704 - RNA, 19 nt, Artificial Sequence
  Description of Artificial Sequence: Synthetic oligonucleotide
gucgccauccaaguagcac

SEQ ID NO: 1267705 - RNA, 19 nt, Artificial Sequence
  Description of Artificial Sequence: Synthetic oligonucleotide
agggaauacugggcaauca

SEQ ID NO: 1267706 - RNA, 19 nt, Artificial Sequence
  Description of Artificial Sequence: Synthetic oligonucleotide
uacgacaggugcgcggcca

SEQ ID NO: 1267707 - RNA, 19 nt, Artificial Sequence
  Description of Artificial Sequence: Synthetic oligonucleotide
uucuagccugggucugacc

SEQ ID NO: 1267708 - RNA, 19 nt, Artificial Sequence
  Description of Artificial Sequence: Synthetic oligonucleotide
gcaaaggugacaccuccga

SEQ ID NO: 1267709 - RNA, 19 nt, Artificial Sequence
  Description of Artificial Sequence: Synthetic oligonucleotide
aaaccagucucaacaccuu

SEQ ID NO: 1267710 - RNA, 19 nt, Artificial Sequence
  Description of Artificial Sequence: Synthetic oligonucleotide
aacacccuagaaaggcuuu

SEQ ID NO: 1267711 - RNA, 19 nt, Artificial Sequence
  Description of Artificial Sequence: Synthetic oligonucleotide
gaguggcgcauaaccacug

SEQ ID NO: 1267712 - RNA, 19 nt, Artificial Sequence
  Description of Artificial Sequence: Synthetic oligonucleotide
ugguacaggcuagucuggu

SEQ ID NO: 1267713 - RNA, 19 nt, Artificial Sequence
  Description of Artificial Sequence: Synthetic oligonucleotide
ccgggaaaggaguugagca

SEQ ID NO: 1267714 - RNA, 19 nt, Artificial Sequence
  Description of Artificial Sequence: Synthetic oligonucleotide
caauugaggugugguuggc

SEQ ID NO: 1267715 - RNA, 19 nt, Artificial Sequence
  Description of Artificial Sequence: Synthetic oligonucleotide
ggcgcauaaccacuguaca

SEQ ID NO: 1267716 - RNA, 19 nt, Artificial Sequence
  Description of Artificial Sequence: Synthetic oligonucleotide
ugaccuuaucagugucuau

SEQ ID NO: 1267717 - RNA, 19 nt, Artificial Sequence
  Description of Artificial Sequence: Synthetic oligonucleotide
ugcaugguacaggcuaguc

SEQ ID NO: 1267718 - RNA, 19 nt, Artificial Sequence
  Description of Artificial Sequence: Synthetic oligonucleotide
ggugacaccuccgaggaaa

SEQ ID NO: 1267719 - RNA, 19 nt, Artificial Sequence
  Description of Artificial Sequence: Synthetic oligonucleotide
caucaaugaguccuucgua

SEQ ID NO: 1267720 - RNA, 19 nt, Artificial Sequence
  Description of Artificial Sequence: Synthetic oligonucleotide
caaugaguccuucguaugu

SEQ ID NO: 1267721 - RNA, 19 nt, Artificial Sequence
  Description of Artificial Sequence: Synthetic oligonucleotide
uccugaccaucauguuggc

SEQ ID NO: 1267722 - RNA, 19 nt, Artificial Sequence
  Description of Artificial Sequence: Synthetic oligonucleotide
ugguccuguuaaguacuca

SEQ ID NO: 1267723 - RNA, 19 nt, Artificial Sequence
  Description of Artificial Sequence: Synthetic oligonucleotide
gguugcaauuacauacuca

SEQ ID NO: 1267724 - RNA, 19 nt, Artificial Sequence
  Description of Artificial Sequence: Synthetic oligonucleotide
uucaagcguugcucacaca

SEQ ID NO: 1267725 - RNA, 19 nt, Artificial Sequence
  Description of Artificial Sequence: Synthetic oligonucleotide
agcggaugcuucugggcaa

SEQ ID NO: 1267726 - RNA, 19 nt, Artificial Sequence
  Description of Artificial Sequence: Synthetic oligonucleotide
ggauaugucugugggguuc

SEQ ID NO: 1267727 - RNA, 19 nt, Artificial Sequence
  Description of Artificial Sequence: Synthetic oligonucleotide
guccuguuaaguacucauc

SEQ ID NO: 1267728 - RNA, 19 nt, Artificial Sequence
  Description of Artificial Sequence: Synthetic oligonucleotide
agucgcacacugaguggcg

SEQ ID NO: 1267729 - RNA, 19 nt, Artificial Sequence
  Description of Artificial Sequence: Synthetic oligonucleotide
gguucacucgcccguacga

SEQ ID NO: 1267730 - RNA, 19 nt, Artificial Sequence
  Description of Artificial Sequence: Synthetic oligonucleotide
aucgaacacgggaaacacu

SEQ ID NO: 1267731 - RNA, 19 nt, Artificial Sequence
  Description of Artificial Sequence: Synthetic oligonucleotide
cguuggguaauuguucugc

SEQ ID NO: 1267732 - RNA, 19 nt, Artificial Sequence
  Description of Artificial Sequence: Synthetic oligonucleotide
caauugccuugcucccagc

SEQ ID NO: 1267733 - RNA, 19 nt, Artificial Sequence
  Description of Artificial Sequence: Synthetic oligonucleotide
ccaucaaauggaaugagau

SEQ ID NO: 1267734 - RNA, 19 nt, Artificial Sequence
  Description of Artificial Sequence: Synthetic oligonucleotide
ggagguuaucgaacacggg

SEQ ID NO: 1267735 - RNA, 19 nt, Artificial Sequence
  Description of Artificial Sequence: Synthetic oligonucleotide
guucacucgcccguacgac

SEQ ID NO: 1267736 - RNA, 19 nt, Artificial Sequence
  Description of Artificial Sequence: Synthetic oligonucleotide
gagaaagcgcagggcagca

SEQ ID NO: 1267737 - RNA, 19 nt, Artificial Sequence
  Description of Artificial Sequence: Synthetic oligonucleotide
gguaauuguucugccccug

SEQ ID NO: 1267738 - RNA, 19 nt, Artificial Sequence
  Description of Artificial Sequence: Synthetic oligonucleotide
ggaaugagauccaaacugu

SEQ ID NO: 1267739 - RNA, 19 nt, Artificial Sequence
  Description of Artificial Sequence: Synthetic oligonucleotide
guggcaagcggcguuagua

SEQ ID NO: 1267740 - RNA, 19 nt, Artificial Sequence
  Description of Artificial Sequence: Synthetic oligonucleotide
acguggugacaucuuugau

SEQ ID NO: 1267741 - RNA, 19 nt, Artificial Sequence
  Description of Artificial Sequence: Synthetic oligonucleotide
guaauuguucugccccugu

SEQ ID NO: 1267742 - RNA, 19 nt, Artificial Sequence
  Description of Artificial Sequence: Synthetic oligonucleotide
aggauaugucugugggguu

SEQ ID NO: 1267743 - RNA, 19 nt, Artificial Sequence
  Description of Artificial Sequence: Synthetic oligonucleotide
ugacugguccagucuccuc

SEQ ID NO: 1267744 - RNA, 19 nt, Artificial Sequence
  Description of Artificial Sequence: Synthetic oligonucleotide
agcaagucgcacacugagu

SEQ ID NO: 1267745 - RNA, 19 nt, Artificial Sequence
  Description of Artificial Sequence: Synthetic oligonucleotide
caagcggcguuaguagauc

SEQ ID NO: 1267746 - RNA, 19 nt, Artificial Sequence
  Description of Artificial Sequence: Synthetic oligonucleotide
gauaugucugugggguucu

SEQ ID NO: 1267747 - RNA, 19 nt, Artificial Sequence
  Description of Artificial Sequence: Synthetic oligonucleotide
cacuucauguuccuuuagu

SEQ ID NO: 1267748 - RNA, 19 nt, Artificial Sequence
  Description of Artificial Sequence: Synthetic oligonucleotide
ggauggucccauacagugc

SEQ ID NO: 1267749 - RNA, 19 nt, Artificial Sequence
  Description of Artificial Sequence: Synthetic oligonucleotide
ggaguugagcaagucgcac

SEQ ID NO: 1267750 - RNA, 19 nt, Artificial Sequence
  Description of Artificial Sequence: Synthetic oligonucleotide
cccugucugagccuuuagc

SEQ ID NO: 1267751 - RNA, 19 nt, Artificial Sequence
  Description of Artificial Sequence: Synthetic oligonucleotide
gucgcacacugaguggcgc

SEQ ID NO: 1267752 - RNA, 19 nt, Artificial Sequence
  Description of Artificial Sequence: Synthetic oligonucleotide
caacaccuugaugagcgga

SEQ ID NO: 1267753 - RNA, 19 nt, Artificial Sequence
  Description of Artificial Sequence: Synthetic oligonucleotide
cacccuagaaaggcuuuuc

SEQ ID NO: 1267754 - RNA, 19 nt, Artificial Sequence
  Description of Artificial Sequence: Synthetic oligonucleotide
ggcgagggagccccuggcg

SEQ ID NO: 1267755 - RNA, 19 nt, Artificial Sequence
  Description of Artificial Sequence: Synthetic oligonucleotide
guccuucguaugucagcug

SEQ ID NO: 1267756 - RNA, 19 nt, Artificial Sequence
  Description of Artificial Sequence: Synthetic oligonucleotide
ccucucaacacccuagaaa

SEQ ID NO: 1267757 - RNA, 19 nt, Artificial Sequence
  Description of Artificial Sequence: Synthetic oligonucleotide
cauugcgauccagcagcag

SEQ ID NO: 1267758 - RNA, 19 nt, Artificial Sequence
  Description of Artificial Sequence: Synthetic oligonucleotide
ccauggauaagaggucccc

SEQ ID NO: 1267759 - RNA, 19 nt, Artificial Sequence
  Description of Artificial Sequence: Synthetic oligonucleotide
cucacacagcaagcuccgg

SEQ ID NO: 1267760 - RNA, 19 nt, Artificial Sequence
  Description of Artificial Sequence: Synthetic oligonucleotide
ucagguucacucgcccgua

SEQ ID NO: 1267761 - RNA, 19 nt, Artificial Sequence
  Description of Artificial Sequence: Synthetic oligonucleotide
cagugacugccguucuuca

SEQ ID NO: 1267762 - RNA, 19 nt, Artificial Sequence
  Description of Artificial Sequence: Synthetic oligonucleotide
ggcguuaguagauccacau

SEQ ID NO: 1267763 - RNA, 19 nt, Artificial Sequence
  Description of Artificial Sequence: Synthetic oligonucleotide
auccauccagagccguaau

SEQ ID NO: 1267764 - RNA, 19 nt, Artificial Sequence
  Description of Artificial Sequence: Synthetic oligonucleotide
ccguaauguuuuccgaauc

SEQ ID NO: 1267765 - RNA, 19 nt, Artificial Sequence
  Description of Artificial Sequence: Synthetic oligonucleotide
acucgcccguacgacaggu

SEQ ID NO: 1267766 - RNA, 19 nt, Artificial Sequence
  Description of Artificial Sequence: Synthetic oligonucleotide
aggcuagucuggucgccau

SEQ ID NO: 1267767 - RNA, 19 nt, Artificial Sequence
  Description of Artificial Sequence: Synthetic oligonucleotide
gucccauacagugccugca

SEQ ID NO: 1267768 - RNA, 19 nt, Artificial Sequence
  Description of Artificial Sequence: Synthetic oligonucleotide
gcaauacaguccucgauau

SEQ ID NO: 1267769 - RNA, 19 nt, Artificial Sequence
  Description of Artificial Sequence: Synthetic oligonucleotide
caagcuccggcguggcaca

SEQ ID NO: 1267770 - RNA, 19 nt, Artificial Sequence
  Description of Artificial Sequence: Synthetic oligonucleotide
cagcaauuauauccaucaa

SEQ ID NO: 1267771 - RNA, 19 nt, Artificial Sequence
  Description of Artificial Sequence: Synthetic oligonucleotide
uccgaaucguuggguaauu

SEQ ID NO: 1267772 - RNA, 19 nt, Artificial Sequence
  Description of Artificial Sequence: Synthetic oligonucleotide
cguugcucacacagcaagc

SEQ ID NO: 1267773 - RNA, 19 nt, Artificial Sequence
  Description of Artificial Sequence: Synthetic oligonucleotide
ccucuacccagcugcuucc

SEQ ID NO: 1267774 - RNA, 19 nt, Artificial Sequence
  Description of Artificial Sequence: Synthetic oligonucleotide
ggcaagcggcguuaguaga

SEQ ID NO: 1267775 - RNA, 19 nt, Artificial Sequence
  Description of Artificial Sequence: Synthetic oligonucleotide
cagguucacucgcccguac

SEQ ID NO: 1267776 - RNA, 19 nt, Artificial Sequence
  Description of Artificial Sequence: Synthetic oligonucleotide
agcggcguuaguagaucca

SEQ ID NO: 1267777 - RNA, 19 nt, Artificial Sequence
  Description of Artificial Sequence: Synthetic oligonucleotide
ugcuuccauucaucaguuu

SEQ ID NO: 1267778 - RNA, 19 nt, Artificial Sequence
  Description of Artificial Sequence: Synthetic oligonucleotide
acauugcgauccagcagca

SEQ ID NO: 1267779 - RNA, 19 nt, Artificial Sequence
  Description of Artificial Sequence: Synthetic oligonucleotide
cgaugaauaaaggauccca

SEQ ID NO: 1267780 - RNA, 19 nt, Artificial Sequence
  Description of Artificial Sequence: Synthetic oligonucleotide
cacucgcccguacgacagg

SEQ ID NO: 1267781 - RNA, 19 nt, Artificial Sequence
  Description of Artificial Sequence: Synthetic oligonucleotide
guuuuccgaaucguugggu

SEQ ID NO: 1267782 - RNA, 19 nt, Artificial Sequence
  Description of Artificial Sequence: Synthetic oligonucleotide
ggaauacugggcaaucagu

SEQ ID NO: 1267783 - RNA, 19 nt, Artificial Sequence
  Description of Artificial Sequence: Synthetic oligonucleotide
cacaauugccuugcuccca

SEQ ID NO: 1267784 - RNA, 19 nt, Artificial Sequence
  Description of Artificial Sequence: Synthetic oligonucleotide
aguacucaucccacacaau

SEQ ID NO: 1267785 - RNA, 19 nt, Artificial Sequence
  Description of Artificial Sequence: Synthetic oligonucleotide
guacgacaggugcgcggcc

SEQ ID NO: 1267786 - RNA, 19 nt, Artificial Sequence
  Description of Artificial Sequence: Synthetic oligonucleotide
caguuuagugguugcaauu

SEQ ID NO: 1267787 - RNA, 19 nt, Artificial Sequence
  Description of Artificial Sequence: Synthetic oligonucleotide
gucuggucgccauccaagu

SEQ ID NO: 1267788 - RNA, 19 nt, Artificial Sequence
  Description of Artificial Sequence: Synthetic oligonucleotide
cucgcccguacgacaggug

SEQ ID NO: 1267789 - RNA, 19 nt, Artificial Sequence
  Description of Artificial Sequence: Synthetic oligonucleotide
cugggagaauucggagaac

SEQ ID NO: 1267790 - RNA, 19 nt, Artificial Sequence
  Description of Artificial Sequence: Synthetic oligonucleotide
cccagacaugaacuccugc

SEQ ID NO: 1267791 - RNA, 19 nt, Artificial Sequence
  Description of Artificial Sequence: Synthetic oligonucleotide
gccgggaaaggaguugagc

SEQ ID NO: 1267792 - RNA, 19 nt, Artificial Sequence
  Description of Artificial Sequence: Synthetic oligonucleotide
acacccuagaaaggcuuuu

SEQ ID NO: 1267793 - RNA, 19 nt, Artificial Sequence
  Description of Artificial Sequence: Synthetic oligonucleotide
ccguacgacaggugcgcgg

SEQ ID NO: 1267794 - RNA, 19 nt, Artificial Sequence
  Description of Artificial Sequence: Synthetic oligonucleotide
gcuccggcguggcacaaac

SEQ ID NO: 1267795 - RNA, 19 nt, Artificial Sequence
  Description of Artificial Sequence: Synthetic oligonucleotide
auaugucugugggguucug

SEQ ID NO: 1267796 - RNA, 19 nt, Artificial Sequence
  Description of Artificial Sequence: Synthetic oligonucleotide
cguucagguucacucgccc

SEQ ID NO: 1267797 - RNA, 19 nt, Artificial Sequence
  Description of Artificial Sequence: Synthetic oligonucleotide
cagcccggugggcagugac

SEQ ID NO: 1267798 - RNA, 19 nt, Artificial Sequence
  Description of Artificial Sequence: Synthetic oligonucleotide
cuagucuggucgccaucca

SEQ ID NO: 1267799 - RNA, 19 nt, Artificial Sequence
  Description of Artificial Sequence: Synthetic oligonucleotide
acgcaacgccucgcgcagc

SEQ ID NO: 1267800 - RNA, 19 nt, Artificial Sequence
  Description of Artificial Sequence: Synthetic oligonucleotide
guauguguucauagccaua

SEQ ID NO: 1267801 - RNA, 19 nt, Artificial Sequence
  Description of Artificial Sequence: Synthetic oligonucleotide
cguacgacaggugcgcggc

SEQ ID NO: 1267802 - RNA, 19 nt, Artificial Sequence
  Description of Artificial Sequence: Synthetic oligonucleotide
gcggcguuaguagauccac

SEQ ID NO: 1267803 - RNA, 19 nt, Artificial Sequence
  Description of Artificial Sequence: Synthetic oligonucleotide
gugcgcggccaaaucuugc

SEQ ID NO: 1267804 - RNA, 19 nt, Artificial Sequence
  Description of Artificial Sequence: Synthetic oligonucleotide
agaaagcgcagggcagcaa

SEQ ID NO: 1267805 - RNA, 19 nt, Artificial Sequence
  Description of Artificial Sequence: Synthetic oligonucleotide
aggugcgcggccaaaucuu

SEQ ID NO: 1267806 - RNA, 19 nt, Artificial Sequence
  Description of Artificial Sequence: Synthetic oligonucleotide
ggugcgcggccaaaucuug

SEQ ID NO: 1267807 - RNA, 19 nt, Artificial Sequence
  Description of Artificial Sequence: Synthetic oligonucleotide
gacugccguucuucaaagu

SEQ ID NO: 1267808 - RNA, 19 nt, Artificial Sequence
  Description of Artificial Sequence: Synthetic oligonucleotide
caggugcgcggccaaaucu

SEQ ID NO: 1267809 - RNA, 19 nt, Artificial Sequence
  Description of Artificial Sequence: Synthetic oligonucleotide
aggugugguuggcgaggga

SEQ ID NO: 1267810 - RNA, 19 nt, Artificial Sequence
  Description of Artificial Sequence: Synthetic oligonucleotide
agcguugcucacacagcaa

SEQ ID NO: 1267811 - RNA, 19 nt, Artificial Sequence
  Description of Artificial Sequence: Synthetic oligonucleotide
gcagcucgcgacgcaacgc

SEQ ID NO: 1267812 - RNA, 19 nt, Artificial Sequence
  Description of Artificial Sequence: Synthetic oligonucleotide
gcccguacgacaggugcgc

SEQ ID NO: 1267813 - RNA, 19 nt, Artificial Sequence
  Description of Artificial Sequence: Synthetic oligonucleotide
gccguaauguuuuccgaau

SEQ ID NO: 1267814 - RNA, 19 nt, Artificial Sequence
  Description of Artificial Sequence: Synthetic oligonucleotide
ggcaaucaguccaaauggu

SEQ ID NO: 1267815 - RNA, 19 nt, Artificial Sequence
  Description of Artificial Sequence: Synthetic oligonucleotide
ucgcgacgcaacgccucgc

SEQ ID NO: 1267816 - RNA, 19 nt, Artificial Sequence
  Description of Artificial Sequence: Synthetic oligonucleotide
agcucgcgacgcaacgccu

SEQ ID NO: 1267817 - RNA, 19 nt, Artificial Sequence
  Description of Artificial Sequence: Synthetic oligonucleotide
cggcguggcacaaacaaaa

SEQ ID NO: 1267818 - RNA, 19 nt, Artificial Sequence
  Description of Artificial Sequence: Synthetic oligonucleotide
gugacaccuccgaggaaaa

SEQ ID NO: 1267819 - RNA, 19 nt, Artificial Sequence
  Description of Artificial Sequence: Synthetic oligonucleotide
cgcccguacgacaggugcg

SEQ ID NO: 1267820 - RNA, 19 nt, Artificial Sequence
  Description of Artificial Sequence: Synthetic oligonucleotide
gcgacgcaacgccucgcgc

SEQ ID NO: 1267821 - RNA, 19 nt, Artificial Sequence
  Description of Artificial Sequence: Synthetic oligonucleotide
ugguagggccacgccuguc

SEQ ID NO: 1267822 - RNA, 19 nt, Artificial Sequence
  Description of Artificial Sequence: Synthetic oligonucleotide
ggcuagucuggucgccauc

SEQ ID NO: 1267823 - RNA, 19 nt, Artificial Sequence
  Description of Artificial Sequence: Synthetic oligonucleotide
gacaggugcgcggccaaau

SEQ ID NO: 1267824 - RNA, 19 nt, Artificial Sequence
  Description of Artificial Sequence: Synthetic oligonucleotide
auggucccauacagugccu

SEQ ID NO: 1267825 - RNA, 19 nt, Artificial Sequence
  Description of Artificial Sequence: Synthetic oligonucleotide
cagacguggugacaucuuu

SEQ ID NO: 1267826 - RNA, 19 nt, Artificial Sequence
  Description of Artificial Sequence: Synthetic oligonucleotide
ccgaaucguuggguaauug

SEQ ID NO: 1267827 - RNA, 19 nt, Artificial Sequence
  Description of Artificial Sequence: Synthetic oligonucleotide
cgaaucguuggguaauugu

SEQ ID NO: 1267828 - RNA, 19 nt, Artificial Sequence
  Description of Artificial Sequence: Synthetic oligonucleotide
cgcgacgcaacgccucgcg

SEQ ID NO: 1267829 - RNA, 19 nt, Artificial Sequence
  Description of Artificial Sequence: Synthetic oligonucleotide
gcggccugcaugugacuuc

SEQ ID NO: 1267830 - RNA, 19 nt, Artificial Sequence
  Description of Artificial Sequence: Synthetic oligonucleotide
gggcaauacaguccucgau

SEQ ID NO: 1267831 - RNA, 19 nt, Artificial Sequence
  Description of Artificial Sequence: Synthetic oligonucleotide
cuccggcguggcacaaaca

SEQ ID NO: 1267832 - RNA, 19 nt, Artificial Sequence
  Description of Artificial Sequence: Synthetic oligonucleotide
cgacgcaacgccucgcgca

SEQ ID NO: 1267833 - RNA, 19 nt, Artificial Sequence
  Description of Artificial Sequence: Synthetic oligonucleotide
ccgagcgcacucuccuuuc

SEQ ID NO: 1267834 - RNA, 19 nt, Artificial Sequence
  Description of Artificial Sequence: Synthetic oligonucleotide
cgcagcacguucagguuca

SEQ ID NO: 1267835 - RNA, 19 nt, Artificial Sequence
  Description of Artificial Sequence: Synthetic oligonucleotide
cagcgcacuuguccagaaa

SEQ ID NO: 1267836 - RNA, 19 nt, Artificial Sequence
  Description of Artificial Sequence: Synthetic oligonucleotide
cgagcgcacucuccuuucc

SEQ ID NO: 1267837 - RNA, 19 nt, Artificial Sequence
  Description of Artificial Sequence: Synthetic oligonucleotide
cccggugggcagugacugc

SEQ ID NO: 1267838 - RNA, 19 nt, Artificial Sequence
  Description of Artificial Sequence: Synthetic oligonucleotide
gcucgcgacgcaacgccuc

SEQ ID NO: 1267839 - RNA, 19 nt, Artificial Sequence
  Description of Artificial Sequence: Synthetic oligonucleotide
cccguacgacaggugcgcg

SEQ ID NO: 1267840 - RNA, 19 nt, Artificial Sequence
  Description of Artificial Sequence: Synthetic oligonucleotide
gcaagcggcguuaguagau

SEQ ID NO: 1267841 - RNA, 19 nt, Artificial Sequence
  Description of Artificial Sequence: Synthetic oligonucleotide
gcguuaguagauccacauu

SEQ ID NO: 1267842 - RNA, 19 nt, Artificial Sequence
  Description of Artificial Sequence: Synthetic oligonucleotide
ccggcguggcacaaacaaa

SEQ ID NO: 1267843 - RNA, 19 nt, Artificial Sequence
  Description of Artificial Sequence: Synthetic oligonucleotide
gcgcacuuguccagaaacu

SEQ ID NO: 1267844 - RNA, 19 nt, Artificial Sequence
  Description of Artificial Sequence: Synthetic oligonucleotide
gguggcaagcggcguuagu

SEQ ID NO: 1267845 - RNA, 19 nt, Artificial Sequence
  Description of Artificial Sequence: Synthetic oligonucleotide
ccagcgcacuuguccagaa

SEQ ID NO: 1267846 - RNA, 19 nt, Artificial Sequence
  Description of Artificial Sequence: Synthetic oligonucleotide
ggcguggcacaaacaaaau

SEQ ID NO: 1267847 - RNA, 19 nt, Artificial Sequence
  Description of Artificial Sequence: Synthetic oligonucleotide
cggcguuaguagauccaca

SEQ ID NO: 1267848 - RNA, 19 nt, Artificial Sequence
  Description of Artificial Sequence: Synthetic oligonucleotide
gccgagcgcacucuccuuu

SEQ ID NO: 1267849 - RNA, 19 nt, Artificial Sequence
  Description of Artificial Sequence: Synthetic oligonucleotide
cgauauaauuguugaccuu

SEQ ID NO: 1267850 - RNA, 19 nt, Artificial Sequence
  Description of Artificial Sequence: Synthetic oligonucleotide
guggggcccugggagaauu

SEQ ID NO: 1267851 - RNA, 19 nt, Artificial Sequence
  Description of Artificial Sequence: Synthetic oligonucleotide
cgcaacgccucgcgcagca

SEQ ID NO: 1267852 - RNA, 19 nt, Artificial Sequence
  Description of Artificial Sequence: Synthetic oligonucleotide
gcaacgccucgcgcagcac

SEQ ID NO: 1267853 - RNA, 19 nt, Artificial Sequence
  Description of Artificial Sequence: Synthetic oligonucleotide
acgccucgcgcagcacguu

SEQ ID NO: 1267854 - RNA, 19 nt, Artificial Sequence
  Description of Artificial Sequence: Synthetic oligonucleotide
cgcgcagcacguucagguu

SEQ ID NO: 1267855 - RNA, 19 nt, Artificial Sequence
  Description of Artificial Sequence: Synthetic oligonucleotide
cgcacacugaguggcgcau

SEQ ID NO: 1267856 - RNA, 19 nt, Artificial Sequence
  Description of Artificial Sequence: Synthetic oligonucleotide
cggaugcuucugggcaaua

SEQ ID NO: 1267857 - RNA, 19 nt, Artificial Sequence
  Description of Artificial Sequence: Synthetic oligonucleotide
aauaguuggauuccgaggg

SEQ ID NO: 1267858 - RNA, 19 nt, Artificial Sequence
  Description of Artificial Sequence: Synthetic oligonucleotide
aauaccggaaaacauaagg

SEQ ID NO: 1267859 - RNA, 19 nt, Artificial Sequence
  Description of Artificial Sequence: Synthetic oligonucleotide
aauaaucauacaugcaugg

SEQ ID NO: 1267860 - RNA, 19 nt, Artificial Sequence
  Description of Artificial Sequence: Synthetic oligonucleotide
uuaggaucaaguuaaauga

SEQ ID NO: 1267861 - RNA, 19 nt, Artificial Sequence
  Description of Artificial Sequence: Synthetic oligonucleotide
gaucuccuaacucagaugg

SEQ ID NO: 1267862 - RNA, 19 nt, Artificial Sequence
  Description of Artificial Sequence: Synthetic oligonucleotide
uugaauuucccacugcccg

SEQ ID NO: 1267863 - RNA, 19 nt, Artificial Sequence
  Description of Artificial Sequence: Synthetic oligonucleotide
ucgaucaacauaccaaugg

SEQ ID NO: 1267864 - RNA, 19 nt, Artificial Sequence
  Description of Artificial Sequence: Synthetic oligonucleotide
uuuauuaucugaucggucu

SEQ ID NO: 1267865 - RNA, 19 nt, Artificial Sequence
  Description of Artificial Sequence: Synthetic oligonucleotide
aacucagaugguuaggauc

SEQ ID NO: 1267866 - RNA, 19 nt, Artificial Sequence
  Description of Artificial Sequence: Synthetic oligonucleotide
ucaugaaggagaaaggaug

SEQ ID NO: 1267867 - RNA, 19 nt, Artificial Sequence
  Description of Artificial Sequence: Synthetic oligonucleotide
caaauugcagcuuugcucc

SEQ ID NO: 1267868 - RNA, 19 nt, Artificial Sequence
  Description of Artificial Sequence: Synthetic oligonucleotide
cauaccaauggucauacgg

SEQ ID NO: 1267869 - RNA, 19 nt, Artificial Sequence
  Description of Artificial Sequence: Synthetic oligonucleotide
gguguuaagguuuagguag

SEQ ID NO: 1267870 - RNA, 19 nt, Artificial Sequence
  Description of Artificial Sequence: Synthetic oligonucleotide
cuugaaauuugucugacac

SEQ ID NO: 1267871 - RNA, 19 nt, Artificial Sequence
  Description of Artificial Sequence: Synthetic oligonucleotide
agcuccaucccgcugaugc

SEQ ID NO: 1267872 - RNA, 19 nt, Artificial Sequence
  Description of Artificial Sequence: Synthetic oligonucleotide
uuaagguuuagguagcugu

SEQ ID NO: 1267873 - RNA, 19 nt, Artificial Sequence
  Description of Artificial Sequence: Synthetic oligonucleotide
ugaggauuaaacagaaugu

SEQ ID NO: 1267874 - RNA, 19 nt, Artificial Sequence
  Description of Artificial Sequence: Synthetic oligonucleotide
aaacgugggcgacugagcg

SEQ ID NO: 1267875 - RNA, 19 nt, Artificial Sequence
  Description of Artificial Sequence: Synthetic oligonucleotide
aggcuuuucaaguagcggg

SEQ ID NO: 1267876 - RNA, 19 nt, Artificial Sequence
  Description of Artificial Sequence: Synthetic oligonucleotide
aguuaaaugacauccaguu

SEQ ID NO: 1267877 - RNA, 19 nt, Artificial Sequence
  Description of Artificial Sequence: Synthetic oligonucleotide
augcuuucgaucaacauac

SEQ ID NO: 1267878 - RNA, 19 nt, Artificial Sequence
  Description of Artificial Sequence: Synthetic oligonucleotide
gaagagccgaucaugaagg

SEQ ID NO: 1267879 - RNA, 19 nt, Artificial Sequence
  Description of Artificial Sequence: Synthetic oligonucleotide
auaccggaaaacauaaggc

SEQ ID NO: 1267880 - RNA, 19 nt, Artificial Sequence
  Description of Artificial Sequence: Synthetic oligonucleotide
uguaauaaucauacaugca

SEQ ID NO: 1267881 - RNA, 19 nt, Artificial Sequence
  Description of Artificial Sequence: Synthetic oligonucleotide
uaguaaaccacaaagccuu

SEQ ID NO: 1267882 - RNA, 19 nt, Artificial Sequence
  Description of Artificial Sequence: Synthetic oligonucleotide
uuacucuuauaguaaacca

SEQ ID NO: 1267883 - RNA, 19 nt, Artificial Sequence
  Description of Artificial Sequence: Synthetic oligonucleotide
  modified_base (7)..(7): a, c, u, g, unknown or other
gaagggnugaaguuggcga

SEQ ID NO: 1267884 - RNA, 19 nt, Artificial Sequence
  Description of Artificial Sequence: Synthetic oligonucleotide
uguaccaugugccaacaga

SEQ ID NO: 1267885 - RNA, 19 nt, Artificial Sequence
  Description of Artificial Sequence: Synthetic oligonucleotide
cugguaauaaaccacacca

SEQ ID NO: 1267886 - RNA, 19 nt, Artificial Sequence
  Description of Artificial Sequence: Synthetic oligonucleotide
ugaaaagugagcagcggga

SEQ ID NO: 1267887 - RNA, 19 nt, Artificial Sequence
  Description of Artificial Sequence: Synthetic oligonucleotide
agucguucuaacuugaaau

SEQ ID NO: 1267888 - RNA, 19 nt, Artificial Sequence
  Description of Artificial Sequence: Synthetic oligonucleotide
uuuugcauaacccgugggu

SEQ ID NO: 1267889 - RNA, 19 nt, Artificial Sequence
  Description of Artificial Sequence: Synthetic oligonucleotide
  modified_base (3)..(3): a, c, u, g, unknown or other
  modified_base (10)..(10): a, c, u, g, unknown or other
agngaagggnugaaguugg

SEQ ID NO: 1267890 - RNA, 19 nt, Artificial Sequence
  Description of Artificial Sequence: Synthetic oligonucleotide
uggcauuugucccaaucgg

SEQ ID NO: 1267891 - RNA, 19 nt, Artificial Sequence
  Description of Artificial Sequence: Synthetic oligonucleotide
caauaguuggauuccgagg

SEQ ID NO: 1267892 - RNA, 19 nt, Artificial Sequence
  Description of Artificial Sequence: Synthetic oligonucleotide
aagacgguagaguuuauua

SEQ ID NO: 1267893 - RNA, 19 nt, Artificial Sequence
  Description of Artificial Sequence: Synthetic oligonucleotide
uaccggaaaacauaaggca

SEQ ID NO: 1267894 - RNA, 19 nt, Artificial Sequence
  Description of Artificial Sequence: Synthetic oligonucleotide
aaaauaccggaaaacauaa

SEQ ID NO: 1267895 - RNA, 19 nt, Artificial Sequence
  Description of Artificial Sequence: Synthetic oligonucleotide
caccaaugaaaauaucugc

SEQ ID NO: 1267896 - RNA, 19 nt, Artificial Sequence
  Description of Artificial Sequence: Synthetic oligonucleotide
aucggauaguuguccaugc

SEQ ID NO: 1267897 - RNA, 19 nt, Artificial Sequence
  Description of Artificial Sequence: Synthetic oligonucleotide
uuugcuccuaugaauggca

SEQ ID NO: 1267898 - RNA, 19 nt, Artificial Sequence
  Description of Artificial Sequence: Synthetic oligonucleotide
uucuguugcgcauagcaga

SEQ ID NO: 1267899 - RNA, 19 nt, Artificial Sequence
  Description of Artificial Sequence: Synthetic oligonucleotide
cuuguagacacuuccauga

SEQ ID NO: 1267900 - RNA, 19 nt, Artificial Sequence
  Description of Artificial Sequence: Synthetic oligonucleotide
uaacccgugggucaccagg

SEQ ID NO: 1267901 - RNA, 19 nt, Artificial Sequence
  Description of Artificial Sequence: Synthetic oligonucleotide
uuucuguugcgcauagcag

SEQ ID NO: 1267902 - RNA, 19 nt, Artificial Sequence
  Description of Artificial Sequence: Synthetic oligonucleotide
aauaaaccacaccaaugaa

SEQ ID NO: 1267903 - RNA, 19 nt, Artificial Sequence
  Description of Artificial Sequence: Synthetic oligonucleotide
guaauaaucauacaugcau

SEQ ID NO: 1267904 - RNA, 19 nt, Artificial Sequence
  Description of Artificial Sequence: Synthetic oligonucleotide
cuaugaauggcaauccauc

SEQ ID NO: 1267905 - RNA, 19 nt, Artificial Sequence
  Description of Artificial Sequence: Synthetic oligonucleotide
uaucugaucggucuugaaa

SEQ ID NO: 1267906 - RNA, 19 nt, Artificial Sequence
  Description of Artificial Sequence: Synthetic oligonucleotide
aggucuaugaacucagacu

SEQ ID NO: 1267907 - RNA, 19 nt, Artificial Sequence
  Description of Artificial Sequence: Synthetic oligonucleotide
gaugccacuauacaaucuc

SEQ ID NO: 1267908 - RNA, 19 nt, Artificial Sequence
  Description of Artificial Sequence: Synthetic oligonucleotide
gccuuauucacaaucaugg

SEQ ID NO: 1267909 - RNA, 19 nt, Artificial Sequence
  Description of Artificial Sequence: Synthetic oligonucleotide
uguugcgcauagcagacca

SEQ ID NO: 1267910 - RNA, 19 nt, Artificial Sequence
  Description of Artificial Sequence: Synthetic oligonucleotide
guugcaucauggcagagac

SEQ ID NO: 1267911 - RNA, 19 nt, Artificial Sequence
  Description of Artificial Sequence: Synthetic oligonucleotide
ucauacgggagggaaaucc

SEQ ID NO: 1267912 - RNA, 19 nt, Artificial Sequence
  Description of Artificial Sequence: Synthetic oligonucleotide
uccccaaaguacccuaagg

SEQ ID NO: 1267913 - RNA, 19 nt, Artificial Sequence
  Description of Artificial Sequence: Synthetic oligonucleotide
cuugaauuucccacugccc

SEQ ID NO: 1267914 - RNA, 19 nt, Artificial Sequence
  Description of Artificial Sequence: Synthetic oligonucleotide
agugcaguuguauuuucug

SEQ ID NO: 1267915 - RNA, 19 nt, Artificial Sequence
  Description of Artificial Sequence: Synthetic oligonucleotide
guaauaaaccacaccaaug

SEQ ID NO: 1267916 - RNA, 19 nt, Artificial Sequence
  Description of Artificial Sequence: Synthetic oligonucleotide
acuuuugcauaacccgugg

SEQ ID NO: 1267917 - RNA, 19 nt, Artificial Sequence
  Description of Artificial Sequence: Synthetic oligonucleotide
gaugguuaggaucaaguua

SEQ ID NO: 1267918 - RNA, 19 nt, Artificial Sequence
  Description of Artificial Sequence: Synthetic oligonucleotide
  modified_base (7)..(7): a, c, u, g, unknown or other
  modified_base (14)..(14): a, c, u, g, unknown or other
gaucagngaagggnugaag

SEQ ID NO: 1267919 - RNA, 19 nt, Artificial Sequence
  Description of Artificial Sequence: Synthetic oligonucleotide
ucuuuacucuuauaguaaa

SEQ ID NO: 1267920 - RNA, 19 nt, Artificial Sequence
  Description of Artificial Sequence: Synthetic oligonucleotide
ucuaugaacucagacuugu

SEQ ID NO: 1267921 - RNA, 19 nt, Artificial Sequence
  Description of Artificial Sequence: Synthetic oligonucleotide
acuuccaugagcaaagccu

SEQ ID NO: 1267922 - RNA, 19 nt, Artificial Sequence
  Description of Artificial Sequence: Synthetic oligonucleotide
guaggggucaccaaauugc

SEQ ID NO: 1267923 - RNA, 19 nt, Artificial Sequence
  Description of Artificial Sequence: Synthetic oligonucleotide
uaggaucaaguuaaaugac

SEQ ID NO: 1267924 - RNA, 19 nt, Artificial Sequence
  Description of Artificial Sequence: Synthetic oligonucleotide
cuuucgaucaacauaccaa

SEQ ID NO: 1267925 - RNA, 19 nt, Artificial Sequence
  Description of Artificial Sequence: Synthetic oligonucleotide
aagcgcugguaauaaacca

SEQ ID NO: 1267926 - RNA, 19 nt, Artificial Sequence
  Description of Artificial Sequence: Synthetic oligonucleotide
acuauacaaucucucggug

SEQ ID NO: 1267927 - RNA, 19 nt, Artificial Sequence
  Description of Artificial Sequence: Synthetic oligonucleotide
augcagauacacuugaauu

SEQ ID NO: 1267928 - RNA, 19 nt, Artificial Sequence
  Description of Artificial Sequence: Synthetic oligonucleotide
ucggucuugaaaagugagc

SEQ ID NO: 1267929 - RNA, 19 nt, Artificial Sequence
  Description of Artificial Sequence: Synthetic oligonucleotide
uaucauagccaguguagga

SEQ ID NO: 1267930 - RNA, 19 nt, Artificial Sequence
  Description of Artificial Sequence: Synthetic oligonucleotide
gacagugucgauggugucg

SEQ ID NO: 1267931 - RNA, 19 nt, Artificial Sequence
  Description of Artificial Sequence: Synthetic oligonucleotide
ucugaucggucuugaaaag

SEQ ID NO: 1267932 - RNA, 19 nt, Artificial Sequence
  Description of Artificial Sequence: Synthetic oligonucleotide
uacccuaaggcugagcucu

SEQ ID NO: 1267933 - RNA, 19 nt, Artificial Sequence
  Description of Artificial Sequence: Synthetic oligonucleotide
ucuguugcgcauagcagac

SEQ ID NO: 1267934 - RNA, 19 nt, Artificial Sequence
  Description of Artificial Sequence: Synthetic oligonucleotide
augguuaggaucaaguuaa

SEQ ID NO: 1267935 - RNA, 19 nt, Artificial Sequence
  Description of Artificial Sequence: Synthetic oligonucleotide
aaguuaaaugacauccagu

SEQ ID NO: 1267936 - RNA, 19 nt, Artificial Sequence
  Description of Artificial Sequence: Synthetic oligonucleotide
acagucugcucaaaaugcc

SEQ ID NO: 1267937 - RNA, 19 nt, Artificial Sequence
  Description of Artificial Sequence: Synthetic oligonucleotide
ggagaaaggauguaccaug

SEQ ID NO: 1267938 - RNA, 19 nt, Artificial Sequence
  Description of Artificial Sequence: Synthetic oligonucleotide
aauggcaauccaucaucgu

SEQ ID NO: 1267939 - RNA, 19 nt, Artificial Sequence
  Description of Artificial Sequence: Synthetic oligonucleotide
  modified_base (6)..(6): a, c, u, g, unknown or other
aagggnugaaguuggcgau

SEQ ID NO: 1267940 - RNA, 19 nt, Artificial Sequence
  Description of Artificial Sequence: Synthetic oligonucleotide
uuuucaaguagcggggaga

SEQ ID NO: 1267941 - RNA, 19 nt, Artificial Sequence
  Description of Artificial Sequence: Synthetic oligonucleotide
ugcauggucucacgagagg

SEQ ID NO: 1267942 - RNA, 19 nt, Artificial Sequence
  Description of Artificial Sequence: Synthetic oligonucleotide
uuccgagggacucguauug

SEQ ID NO: 1267943 - RNA, 19 nt, Artificial Sequence
  Description of Artificial Sequence: Synthetic oligonucleotide
gaucaaguuaaaugacauc

SEQ ID NO: 1267944 - RNA, 19 nt, Artificial Sequence
  Description of Artificial Sequence: Synthetic oligonucleotide
acucagaugguuaggauca

SEQ ID NO: 1267945 - RNA, 19 nt, Artificial Sequence
  Description of Artificial Sequence: Synthetic oligonucleotide
cagcucagcuacaaaauac

SEQ ID NO: 1267946 - RNA, 19 nt, Artificial Sequence
  Description of Artificial Sequence: Synthetic oligonucleotide
  modified_base (5)..(5): a, c, u, g, unknown or other
  modified_base (12)..(12): a, c, u, g, unknown or other
ucagngaagggnugaaguu

SEQ ID NO: 1267947 - RNA, 19 nt, Artificial Sequence
  Description of Artificial Sequence: Synthetic oligonucleotide
ugaucuccuaacucagaug

SEQ ID NO: 1267948 - RNA, 19 nt, Artificial Sequence
  Description of Artificial Sequence: Synthetic oligonucleotide
aacuuuugcauaacccgug

SEQ ID NO: 1267949 - RNA, 19 nt, Artificial Sequence
  Description of Artificial Sequence: Synthetic oligonucleotide
uaccaauggucauacggga

SEQ ID NO: 1267950 - RNA, 19 nt, Artificial Sequence
  Description of Artificial Sequence: Synthetic oligonucleotide
aaagccucgcucccaagaa

SEQ ID NO: 1267951 - RNA, 19 nt, Artificial Sequence
  Description of Artificial Sequence: Synthetic oligonucleotide
  modified_base (18)..(18): a, c, u, g, unknown or other
acucugguuaugaucagng

SEQ ID NO: 1267952 - RNA, 19 nt, Artificial Sequence
  Description of Artificial Sequence: Synthetic oligonucleotide
  modified_base (4)..(4): a, c, u, g, unknown or other
  modified_base (11)..(11): a, c, u, g, unknown or other
cagngaagggnugaaguug

SEQ ID NO: 1267953 - RNA, 19 nt, Artificial Sequence
  Description of Artificial Sequence: Synthetic oligonucleotide
acaaacgugggcgacugag

SEQ ID NO: 1267954 - RNA, 19 nt, Artificial Sequence
  Description of Artificial Sequence: Synthetic oligonucleotide
uaggagaucacagccacaa

SEQ ID NO: 1267955 - RNA, 19 nt, Artificial Sequence
  Description of Artificial Sequence: Synthetic oligonucleotide
agcgcugguaauaaaccac

SEQ ID NO: 1267956 - RNA, 19 nt, Artificial Sequence
  Description of Artificial Sequence: Synthetic oligonucleotide
  modified_base (2)..(2): a, c, u, g, unknown or other
gnugaaguuggcgaucaca

SEQ ID NO: 1267957 - RNA, 19 nt, Artificial Sequence
  Description of Artificial Sequence: Synthetic oligonucleotide
cuuuugcauaacccguggg

SEQ ID NO: 1267958 - RNA, 19 nt, Artificial Sequence
  Description of Artificial Sequence: Synthetic oligonucleotide
uccuaugaauggcaaucca

SEQ ID NO: 1267959 - RNA, 19 nt, Artificial Sequence
  Description of Artificial Sequence: Synthetic oligonucleotide
agcggggagagcaaacugc

SEQ ID NO: 1267960 - RNA, 19 nt, Artificial Sequence
  Description of Artificial Sequence: Synthetic oligonucleotide
  modified_base (6)..(6): a, c, u, g, unknown or other
  modified_base (13)..(13): a, c, u, g, unknown or other
aucagngaagggnugaagu

SEQ ID NO: 1267961 - RNA, 19 nt, Artificial Sequence
  Description of Artificial Sequence: Synthetic oligonucleotide
ugucccaaucggauaguug

SEQ ID NO: 1267962 - RNA, 19 nt, Artificial Sequence
  Description of Artificial Sequence: Synthetic oligonucleotide
ucccgcucucuguaaaagg

SEQ ID NO: 1267963 - RNA, 19 nt, Artificial Sequence
  Description of Artificial Sequence: Synthetic oligonucleotide
gaucaacauaccaaugguc

SEQ ID NO: 1267964 - RNA, 19 nt, Artificial Sequence
  Description of Artificial Sequence: Synthetic oligonucleotide
auacaugcauggucucacg

SEQ ID NO: 1267965 - RNA, 19 nt, Artificial Sequence
  Description of Artificial Sequence: Synthetic oligonucleotide
ucauuacuacacacuuuga

SEQ ID NO: 1267966 - RNA, 19 nt, Artificial Sequence
  Description of Artificial Sequence: Synthetic oligonucleotide
  modified_base (9)..(9): a, c, u, g, unknown or other
  modified_base (16)..(16): a, c, u, g, unknown or other
augaucagngaagggnuga

SEQ ID NO: 1267967 - RNA, 19 nt, Artificial Sequence
  Description of Artificial Sequence: Synthetic oligonucleotide
uaggggucaccaaauugca

SEQ ID NO: 1267968 - RNA, 19 nt, Artificial Sequence
  Description of Artificial Sequence: Synthetic oligonucleotide
agauuaucauuuccuugcu

SEQ ID NO: 1267969 - RNA, 19 nt, Artificial Sequence
  Description of Artificial Sequence: Synthetic oligonucleotide
gagccgaucaugaaggaga

SEQ ID NO: 1267970 - RNA, 19 nt, Artificial Sequence
  Description of Artificial Sequence: Synthetic oligonucleotide
agcggauuccacccuggac

SEQ ID NO: 1267971 - RNA, 19 nt, Artificial Sequence
  Description of Artificial Sequence: Synthetic oligonucleotide
agcuuugcuccuaugaaug

SEQ ID NO: 1267972 - RNA, 19 nt, Artificial Sequence
  Description of Artificial Sequence: Synthetic oligonucleotide
aagccucgcucccaagaag

SEQ ID NO: 1267973 - RNA, 19 nt, Artificial Sequence
  Description of Artificial Sequence: Synthetic oligonucleotide
gguagaguuuauuaucuga

SEQ ID NO: 1267974 - RNA, 19 nt, Artificial Sequence
  Description of Artificial Sequence: Synthetic oligonucleotide
cauagaaguuguagccagc

SEQ ID NO: 1267975 - RNA, 19 nt, Artificial Sequence
  Description of Artificial Sequence: Synthetic oligonucleotide
cuuuucaaguagcggggag

SEQ ID NO: 1267976 - RNA, 19 nt, Artificial Sequence
  Description of Artificial Sequence: Synthetic oligonucleotide
cacugguacauguuccgag

SEQ ID NO: 1267977 - RNA, 19 nt, Artificial Sequence
  Description of Artificial Sequence: Synthetic oligonucleotide
aaauaccggaaaacauaag

SEQ ID NO: 1267978 - RNA, 19 nt, Artificial Sequence
  Description of Artificial Sequence: Synthetic oligonucleotide
ccaaaguacccuaaggcug

SEQ ID NO: 1267979 - RNA, 19 nt, Artificial Sequence
  Description of Artificial Sequence: Synthetic oligonucleotide
agaaaggauguaccaugug

SEQ ID NO: 1267980 - RNA, 19 nt, Artificial Sequence
  Description of Artificial Sequence: Synthetic oligonucleotide
agaugguuaggaucaaguu

SEQ ID NO: 1267981 - RNA, 19 nt, Artificial Sequence
  Description of Artificial Sequence: Synthetic oligonucleotide
aaagcggauuccacccugg

SEQ ID NO: 1267982 - RNA, 19 nt, Artificial Sequence
  Description of Artificial Sequence: Synthetic oligonucleotide
augaauggcaauccaucau

SEQ ID NO: 1267983 - RNA, 19 nt, Artificial Sequence
  Description of Artificial Sequence: Synthetic oligonucleotide
augaaaauaucugcuucca

SEQ ID NO: 1267984 - RNA, 19 nt, Artificial Sequence
  Description of Artificial Sequence: Synthetic oligonucleotide
ucaccaaauugcagcuuug

SEQ ID NO: 1267985 - RNA, 19 nt, Artificial Sequence
  Description of Artificial Sequence: Synthetic oligonucleotide
cauacaugcauggucucac

SEQ ID NO: 1267986 - RNA, 19 nt, Artificial Sequence
  Description of Artificial Sequence: Synthetic oligonucleotide
auaaucauacaugcauggu

SEQ ID NO: 1267987 - RNA, 19 nt, Artificial Sequence
  Description of Artificial Sequence: Synthetic oligonucleotide
acuugaaauuugucugaca

SEQ ID NO: 1267988 - RNA, 19 nt, Artificial Sequence
  Description of Artificial Sequence: Synthetic oligonucleotide
aggaucaaguuaaaugaca

SEQ ID NO: 1267989 - RNA, 19 nt, Artificial Sequence
  Description of Artificial Sequence: Synthetic oligonucleotide
ugguacauguuccgaggac

SEQ ID NO: 1267990 - RNA, 19 nt, Artificial Sequence
  Description of Artificial Sequence: Synthetic oligonucleotide
ugcauggagaaaccuuguc

SEQ ID NO: 1267991 - RNA, 19 nt, Artificial Sequence
  Description of Artificial Sequence: Synthetic oligonucleotide
caauggucauacgggaggg

SEQ ID NO: 1267992 - RNA, 19 nt, Artificial Sequence
  Description of Artificial Sequence: Synthetic oligonucleotide
gucccaaucggauaguugu

SEQ ID NO: 1267993 - RNA, 19 nt, Artificial Sequence
  Description of Artificial Sequence: Synthetic oligonucleotide
caaacgugggcgacugagc

SEQ ID NO: 1267994 - RNA, 19 nt, Artificial Sequence
  Description of Artificial Sequence: Synthetic oligonucleotide
aucggucuugaaaagugag

SEQ ID NO: 1267995 - RNA, 19 nt, Artificial Sequence
  Description of Artificial Sequence: Synthetic oligonucleotide
aaguacccuaaggcugagc

SEQ ID NO: 1267996 - RNA, 19 nt, Artificial Sequence
  Description of Artificial Sequence: Synthetic oligonucleotide
ccaauggucauacgggagg

SEQ ID NO: 1267997 - RNA, 19 nt, Artificial Sequence
  Description of Artificial Sequence: Synthetic oligonucleotide
agggaaauccaugaggauu

SEQ ID NO: 1267998 - RNA, 19 nt, Artificial Sequence
  Description of Artificial Sequence: Synthetic oligonucleotide
acgguagaguuuauuaucu

SEQ ID NO: 1267999 - RNA, 19 nt, Artificial Sequence
  Description of Artificial Sequence: Synthetic oligonucleotide
ucuccuaacucagaugguu

SEQ ID NO: 1268000 - RNA, 19 nt, Artificial Sequence
  Description of Artificial Sequence: Synthetic oligonucleotide
cuaacucagaugguuagga

SEQ ID NO: 1268001 - RNA, 19 nt, Artificial Sequence
  Description of Artificial Sequence: Synthetic oligonucleotide
gcugguaauaaaccacacc

SEQ ID NO: 1268002 - RNA, 19 nt, Artificial Sequence
  Description of Artificial Sequence: Synthetic oligonucleotide
aaauugcagcuuugcuccu

SEQ ID NO: 1268003 - RNA, 19 nt, Artificial Sequence
  Description of Artificial Sequence: Synthetic oligonucleotide
gacucguauugugaugcag

SEQ ID NO: 1268004 - RNA, 19 nt, Artificial Sequence
  Description of Artificial Sequence: Synthetic oligonucleotide
ccaauaguuggauuccgag

SEQ ID NO: 1268005 - RNA, 19 nt, Artificial Sequence
  Description of Artificial Sequence: Synthetic oligonucleotide
agcaguugaagagccgauc

SEQ ID NO: 1268006 - RNA, 19 nt, Artificial Sequence
  Description of Artificial Sequence: Synthetic oligonucleotide
ugaggugucugaagacggu

SEQ ID NO: 1268007 - RNA, 19 nt, Artificial Sequence
  Description of Artificial Sequence: Synthetic oligonucleotide
uucuguccgugacggcugg

SEQ ID NO: 1268008 - RNA, 19 nt, Artificial Sequence
  Description of Artificial Sequence: Synthetic oligonucleotide
cucacgagagggcuuugag

SEQ ID NO: 1268009 - RNA, 19 nt, Artificial Sequence
  Description of Artificial Sequence: Synthetic oligonucleotide
aaguuggcgaucacacuca

SEQ ID NO: 1268010 - RNA, 19 nt, Artificial Sequence
  Description of Artificial Sequence: Synthetic oligonucleotide
uugcauggagaaaccuugu

SEQ ID NO: 1268011 - RNA, 19 nt, Artificial Sequence
  Description of Artificial Sequence: Synthetic oligonucleotide
ucguucuaacuugaaauuu

SEQ ID NO: 1268012 - RNA, 19 nt, Artificial Sequence
  Description of Artificial Sequence: Synthetic oligonucleotide
agccuuauucacaaucaug

SEQ ID NO: 1268013 - RNA, 19 nt, Artificial Sequence
  Description of Artificial Sequence: Synthetic oligonucleotide
acucguauugugaugcaga

SEQ ID NO: 1268014 - RNA, 19 nt, Artificial Sequence
  Description of Artificial Sequence: Synthetic oligonucleotide
cacgagagggcuuugaggu

SEQ ID NO: 1268015 - RNA, 19 nt, Artificial Sequence
  Description of Artificial Sequence: Synthetic oligonucleotide
gauuccacccuggacguuc

SEQ ID NO: 1268016 - RNA, 19 nt, Artificial Sequence
  Description of Artificial Sequence: Synthetic oligonucleotide
auaguuggauuccgaggga

SEQ ID NO: 1268017 - RNA, 19 nt, Artificial Sequence
  Description of Artificial Sequence: Synthetic oligonucleotide
acccuggacguuccuuccc

SEQ ID NO: 1268018 - RNA, 19 nt, Artificial Sequence
  Description of Artificial Sequence: Synthetic oligonucleotide
guuuauuaucugaucgguc

SEQ ID NO: 1268019 - RNA, 19 nt, Artificial Sequence
  Description of Artificial Sequence: Synthetic oligonucleotide
uaacucagaugguuaggau

SEQ ID NO: 1268020 - RNA, 19 nt, Artificial Sequence
  Description of Artificial Sequence: Synthetic oligonucleotide
guuaagguuuagguagcug

SEQ ID NO: 1268021 - RNA, 19 nt, Artificial Sequence
  Description of Artificial Sequence: Synthetic oligonucleotide
ugacggcuggcaaauuuau

SEQ ID NO: 1268022 - RNA, 19 nt, Artificial Sequence
  Description of Artificial Sequence: Synthetic oligonucleotide
ccccaaaguacccuaaggc

SEQ ID NO: 1268023 - RNA, 19 nt, Artificial Sequence
  Description of Artificial Sequence: Synthetic oligonucleotide
gggacucguauugugaugc

SEQ ID NO: 1268024 - RNA, 19 nt, Artificial Sequence
  Description of Artificial Sequence: Synthetic oligonucleotide
agagaccaugcaaggcugc

SEQ ID NO: 1268025 - RNA, 19 nt, Artificial Sequence
  Description of Artificial Sequence: Synthetic oligonucleotide
aggguugcauggagaaacc

SEQ ID NO: 1268026 - RNA, 19 nt, Artificial Sequence
  Description of Artificial Sequence: Synthetic oligonucleotide
caaagcggauuccacccug

SEQ ID NO: 1268027 - RNA, 19 nt, Artificial Sequence
  Description of Artificial Sequence: Synthetic oligonucleotide
uguuaagguuuagguagcu

SEQ ID NO: 1268028 - RNA, 19 nt, Artificial Sequence
  Description of Artificial Sequence: Synthetic oligonucleotide
gagcucuccucagagaaga

SEQ ID NO: 1268029 - RNA, 19 nt, Artificial Sequence
  Description of Artificial Sequence: Synthetic oligonucleotide
aguagcggggagagcaaac

SEQ ID NO: 1268030 - RNA, 19 nt, Artificial Sequence
  Description of Artificial Sequence: Synthetic oligonucleotide
aguuggcgaucacacucag

SEQ ID NO: 1268031 - RNA, 19 nt, Artificial Sequence
  Description of Artificial Sequence: Synthetic oligonucleotide
ggcuuuucaaguagcgggg

SEQ ID NO: 1268032 - RNA, 19 nt, Artificial Sequence
  Description of Artificial Sequence: Synthetic oligonucleotide
aauuucccacugcccgugu

SEQ ID NO: 1268033 - RNA, 19 nt, Artificial Sequence
  Description of Artificial Sequence: Synthetic oligonucleotide
guagcuguaguagggguca

SEQ ID NO: 1268034 - RNA, 19 nt, Artificial Sequence
  Description of Artificial Sequence: Synthetic oligonucleotide
gcauggucucacgagaggg

SEQ ID NO: 1268035 - RNA, 19 nt, Artificial Sequence
  Description of Artificial Sequence: Synthetic oligonucleotide
caugugccaacagagcauc

SEQ ID NO: 1268036 - RNA, 19 nt, Artificial Sequence
  Description of Artificial Sequence: Synthetic oligonucleotide
  modified_base (5)..(5): a, c, u, g, unknown or other
agggnugaaguuggcgauc

SEQ ID NO: 1268037 - RNA, 19 nt, Artificial Sequence
  Description of Artificial Sequence: Synthetic oligonucleotide
ugcuuucgaucaacauacc

SEQ ID NO: 1268038 - RNA, 19 nt, Artificial Sequence
  Description of Artificial Sequence: Synthetic oligonucleotide
gguaauaaaccacaccaau

SEQ ID NO: 1268039 - RNA, 19 nt, Artificial Sequence
  Description of Artificial Sequence: Synthetic oligonucleotide
guguuaagguuuagguagc

SEQ ID NO: 1268040 - RNA, 19 nt, Artificial Sequence
  Description of Artificial Sequence: Synthetic oligonucleotide
uuaucugaucggucuugaa

SEQ ID NO: 1268041 - RNA, 19 nt, Artificial Sequence
  Description of Artificial Sequence: Synthetic oligonucleotide
cacuauacaaucucucggu

SEQ ID NO: 1268042 - RNA, 19 nt, Artificial Sequence
  Description of Artificial Sequence: Synthetic oligonucleotide
cauacgggagggaaaucca

SEQ ID NO: 1268043 - RNA, 19 nt, Artificial Sequence
  Description of Artificial Sequence: Synthetic oligonucleotide
auagccaguguaggagauc

SEQ ID NO: 1268044 - RNA, 19 nt, Artificial Sequence
  Description of Artificial Sequence: Synthetic oligonucleotide
cugcccgugucauuacuac

SEQ ID NO: 1268045 - RNA, 19 nt, Artificial Sequence
  Description of Artificial Sequence: Synthetic oligonucleotide
auuccgagggacucguauu

SEQ ID NO: 1268046 - RNA, 19 nt, Artificial Sequence
  Description of Artificial Sequence: Synthetic oligonucleotide
aggagaaaggauguaccau

SEQ ID NO: 1268047 - RNA, 19 nt, Artificial Sequence
  Description of Artificial Sequence: Synthetic oligonucleotide
accaauggucauacgggag

SEQ ID NO: 1268048 - RNA, 19 nt, Artificial Sequence
  Description of Artificial Sequence: Synthetic oligonucleotide
aguaaaccacaaagccuuc

SEQ ID NO: 1268049 - RNA, 19 nt, Artificial Sequence
  Description of Artificial Sequence: Synthetic oligonucleotide
cguucuaacuugaaauuug

SEQ ID NO: 1268050 - RNA, 19 nt, Artificial Sequence
  Description of Artificial Sequence: Synthetic oligonucleotide
acacaaacgugggcgacug

SEQ ID NO: 1268051 - RNA, 19 nt, Artificial Sequence
  Description of Artificial Sequence: Synthetic oligonucleotide
aagcggauuccacccugga

SEQ ID NO: 1268052 - RNA, 19 nt, Artificial Sequence
  Description of Artificial Sequence: Synthetic oligonucleotide
ucccaaucggauaguuguc

SEQ ID NO: 1268053 - RNA, 19 nt, Artificial Sequence
  Description of Artificial Sequence: Synthetic oligonucleotide
cauuacuacacacuuugau

SEQ ID NO: 1268054 - RNA, 19 nt, Artificial Sequence
  Description of Artificial Sequence: Synthetic oligonucleotide
ugcccgugucauuacuaca

SEQ ID NO: 1268055 - RNA, 19 nt, Artificial Sequence
  Description of Artificial Sequence: Synthetic oligonucleotide
agcgggaagcccauggucu

SEQ ID NO: 1268056 - RNA, 19 nt, Artificial Sequence
  Description of Artificial Sequence: Synthetic oligonucleotide
gcugcggccacagacagug

SEQ ID NO: 1268057 - RNA, 19 nt, Artificial Sequence
  Description of Artificial Sequence: Synthetic oligonucleotide
agugucgauggugucgcug

SEQ ID NO: 1268058 - RNA, 19 nt, Artificial Sequence
  Description of Artificial Sequence: Synthetic oligonucleotide
cauguggcguaagcgcugg

SEQ ID NO: 1268059 - RNA, 19 nt, Artificial Sequence
  Description of Artificial Sequence: Synthetic oligonucleotide
cccgcucucuguaaaaggc

SEQ ID NO: 1268060 - RNA, 19 nt, Artificial Sequence
  Description of Artificial Sequence: Synthetic oligonucleotide
cagaugguuaggaucaagu

SEQ ID NO: 1268061 - RNA, 19 nt, Artificial Sequence
  Description of Artificial Sequence: Synthetic oligonucleotide
  modified_base (8)..(8): a, c, u, g, unknown or other
  modified_base (15)..(15): a, c, u, g, unknown or other
ugaucagngaagggnugaa

SEQ ID NO: 1268062 - RNA, 19 nt, Artificial Sequence
  Description of Artificial Sequence: Synthetic oligonucleotide
caaagccucgcucccaaga

SEQ ID NO: 1268063 - RNA, 19 nt, Artificial Sequence
  Description of Artificial Sequence: Synthetic oligonucleotide
gagggcuuugaggugucug

SEQ ID NO: 1268064 - RNA, 19 nt, Artificial Sequence
  Description of Artificial Sequence: Synthetic oligonucleotide
cgaucaugaaggagaaagg

SEQ ID NO: 1268065 - RNA, 19 nt, Artificial Sequence
  Description of Artificial Sequence: Synthetic oligonucleotide
uguccgugacggcuggcaa

SEQ ID NO: 1268066 - RNA, 19 nt, Artificial Sequence
  Description of Artificial Sequence: Synthetic oligonucleotide
gauuccgagggacucguau

SEQ ID NO: 1268067 - RNA, 19 nt, Artificial Sequence
  Description of Artificial Sequence: Synthetic oligonucleotide
gugucauuacuacacacuu

SEQ ID NO: 1268068 - RNA, 19 nt, Artificial Sequence
  Description of Artificial Sequence: Synthetic oligonucleotide
acgugggcgacugagcggu

SEQ ID NO: 1268069 - RNA, 19 nt, Artificial Sequence
  Description of Artificial Sequence: Synthetic oligonucleotide
guggcguaagcgcugguaa

SEQ ID NO: 1268070 - RNA, 19 nt, Artificial Sequence
  Description of Artificial Sequence: Synthetic oligonucleotide
uacauguuccgaggacucu

SEQ ID NO: 1268071 - RNA, 19 nt, Artificial Sequence
  Description of Artificial Sequence: Synthetic oligonucleotide
  modified_base (2)..(2): a, c, u, g, unknown or other
  modified_base (9)..(9): a, c, u, g, unknown or other
gngaagggnugaaguuggc

SEQ ID NO: 1268072 - RNA, 19 nt, Artificial Sequence
  Description of Artificial Sequence: Synthetic oligonucleotide
uguggcguaagcgcuggua

SEQ ID NO: 1268073 - RNA, 19 nt, Artificial Sequence
  Description of Artificial Sequence: Synthetic oligonucleotide
gagaaaggauguaccaugu

SEQ ID NO: 1268074 - RNA, 19 nt, Artificial Sequence
  Description of Artificial Sequence: Synthetic oligonucleotide
guuguccaugcuguaauaa

SEQ ID NO: 1268075 - RNA, 19 nt, Artificial Sequence
  Description of Artificial Sequence: Synthetic oligonucleotide
uuugucccaaucggauagu

SEQ ID NO: 1268076 - RNA, 19 nt, Artificial Sequence
  Description of Artificial Sequence: Synthetic oligonucleotide
aauugcagcuuugcuccua

SEQ ID NO: 1268077 - RNA, 19 nt, Artificial Sequence
  Description of Artificial Sequence: Synthetic oligonucleotide
ucucggugccauagaaguu

SEQ ID NO: 1268078 - RNA, 19 nt, Artificial Sequence
  Description of Artificial Sequence: Synthetic oligonucleotide
ugucuggcaccaucccgcu

SEQ ID NO: 1268079 - RNA, 19 nt, Artificial Sequence
  Description of Artificial Sequence: Synthetic oligonucleotide
ucucacgagagggcuuuga

SEQ ID NO: 1268080 - RNA, 19 nt, Artificial Sequence
  Description of Artificial Sequence: Synthetic oligonucleotide
uccgugacggcuggcaaau

SEQ ID NO: 1268081 - RNA, 19 nt, Artificial Sequence
  Description of Artificial Sequence: Synthetic oligonucleotide
augugccaacagagcaucc

SEQ ID NO: 1268082 - RNA, 19 nt, Artificial Sequence
  Description of Artificial Sequence: Synthetic oligonucleotide
auaacccgugggucaccag

SEQ ID NO: 1268083 - RNA, 19 nt, Artificial Sequence
  Description of Artificial Sequence: Synthetic oligonucleotide
uucaaguagcggggagagc

SEQ ID NO: 1268084 - RNA, 19 nt, Artificial Sequence
  Description of Artificial Sequence: Synthetic oligonucleotide
gucguucuaacuugaaauu

SEQ ID NO: 1268085 - RNA, 19 nt, Artificial Sequence
  Description of Artificial Sequence: Synthetic oligonucleotide
gguuuagguagcuguagua

SEQ ID NO: 1268086 - RNA, 19 nt, Artificial Sequence
  Description of Artificial Sequence: Synthetic oligonucleotide
aaguagcggggagagcaaa

SEQ ID NO: 1268087 - RNA, 19 nt, Artificial Sequence
  Description of Artificial Sequence: Synthetic oligonucleotide
gguguugcaucauggcaga

SEQ ID NO: 1268088 - RNA, 19 nt, Artificial Sequence
  Description of Artificial Sequence: Synthetic oligonucleotide
uggcguaagcgcugguaau

SEQ ID NO: 1268089 - RNA, 19 nt, Artificial Sequence
  Description of Artificial Sequence: Synthetic oligonucleotide
gagggacucguauugugau

SEQ ID NO: 1268090 - RNA, 19 nt, Artificial Sequence
  Description of Artificial Sequence: Synthetic oligonucleotide
cuccuaacucagaugguua

SEQ ID NO: 1268091 - RNA, 19 nt, Artificial Sequence
  Description of Artificial Sequence: Synthetic oligonucleotide
cagucguucuaacuugaaa

SEQ ID NO: 1268092 - RNA, 19 nt, Artificial Sequence
  Description of Artificial Sequence: Synthetic oligonucleotide
cccgcugaugccacuauac

SEQ ID NO: 1268093 - RNA, 19 nt, Artificial Sequence
  Description of Artificial Sequence: Synthetic oligonucleotide
ccuaacucagaugguuagg

SEQ ID NO: 1268094 - RNA, 19 nt, Artificial Sequence
  Description of Artificial Sequence: Synthetic oligonucleotide
ucguauugugaugcagaua

SEQ ID NO: 1268095 - RNA, 19 nt, Artificial Sequence
  Description of Artificial Sequence: Synthetic oligonucleotide
gagaccaugcaaggcugca

SEQ ID NO: 1268096 - RNA, 19 nt, Artificial Sequence
  Description of Artificial Sequence: Synthetic oligonucleotide
ccggaaaacauaaggcaca

SEQ ID NO: 1268097 - RNA, 19 nt, Artificial Sequence
  Description of Artificial Sequence: Synthetic oligonucleotide
cccaaucggauaguugucc

SEQ ID NO: 1268098 - RNA, 19 nt, Artificial Sequence
  Description of Artificial Sequence: Synthetic oligonucleotide
ugaagacgguagaguuuau

SEQ ID NO: 1268099 - RNA, 19 nt, Artificial Sequence
  Description of Artificial Sequence: Synthetic oligonucleotide
ggcgacugagcggucagag

SEQ ID NO: 1268100 - RNA, 19 nt, Artificial Sequence
  Description of Artificial Sequence: Synthetic oligonucleotide
uccccgguguuaagguuua

SEQ ID NO: 1268101 - RNA, 19 nt, Artificial Sequence
  Description of Artificial Sequence: Synthetic oligonucleotide
gguagcuguaguagggguc

SEQ ID NO: 1268102 - RNA, 19 nt, Artificial Sequence
  Description of Artificial Sequence: Synthetic oligonucleotide
caucguccaacuuuugcau

SEQ ID NO: 1268103 - RNA, 19 nt, Artificial Sequence
  Description of Artificial Sequence: Synthetic oligonucleotide
gcccgugucauuacuacac

SEQ ID NO: 1268104 - RNA, 19 nt, Artificial Sequence
  Description of Artificial Sequence: Synthetic oligonucleotide
gacggcuggcaaauuuauc

SEQ ID NO: 1268105 - RNA, 19 nt, Artificial Sequence
  Description of Artificial Sequence: Synthetic oligonucleotide
ccgugucauuacuacacac

SEQ ID NO: 1268106 - RNA, 19 nt, Artificial Sequence
  Description of Artificial Sequence: Synthetic oligonucleotide
auacgggagggaaauccau

SEQ ID NO: 1268107 - RNA, 19 nt, Artificial Sequence
  Description of Artificial Sequence: Synthetic oligonucleotide
guuggcgaucacacucagc

SEQ ID NO: 1268108 - RNA, 19 nt, Artificial Sequence
  Description of Artificial Sequence: Synthetic oligonucleotide
uugucccaaucggauaguu

SEQ ID NO: 1268109 - RNA, 19 nt, Artificial Sequence
  Description of Artificial Sequence: Synthetic oligonucleotide
ucccgcugaugccacuaua

SEQ ID NO: 1268110 - RNA, 19 nt, Artificial Sequence
  Description of Artificial Sequence: Synthetic oligonucleotide
cucguauugugaugcagau

SEQ ID NO: 1268111 - RNA, 19 nt, Artificial Sequence
  Description of Artificial Sequence: Synthetic oligonucleotide
uggucucacgagagggcuu

SEQ ID NO: 1268112 - RNA, 19 nt, Artificial Sequence
  Description of Artificial Sequence: Synthetic oligonucleotide
cuguugcgcauagcagacc

SEQ ID NO: 1268113 - RNA, 19 nt, Artificial Sequence
  Description of Artificial Sequence: Synthetic oligonucleotide
ugacaccauguggcguaag

SEQ ID NO: 1268114 - RNA, 19 nt, Artificial Sequence
  Description of Artificial Sequence: Synthetic oligonucleotide
cuaugaacucagacuugua

SEQ ID NO: 1268115 - RNA, 19 nt, Artificial Sequence
  Description of Artificial Sequence: Synthetic oligonucleotide
gucgcugcggccacagaca

SEQ ID NO: 1268116 - RNA, 19 nt, Artificial Sequence
  Description of Artificial Sequence: Synthetic oligonucleotide
cauaacccgugggucacca

SEQ ID NO: 1268117 - RNA, 19 nt, Artificial Sequence
  Description of Artificial Sequence: Synthetic oligonucleotide
cccgguguuaagguuuagg

SEQ ID NO: 1268118 - RNA, 19 nt, Artificial Sequence
  Description of Artificial Sequence: Synthetic oligonucleotide
gcggggagagcaaacugcc

SEQ ID NO: 1268119 - RNA, 19 nt, Artificial Sequence
  Description of Artificial Sequence: Synthetic oligonucleotide
cccaaaguacccuaaggcu

SEQ ID NO: 1268120 - RNA, 19 nt, Artificial Sequence
  Description of Artificial Sequence: Synthetic oligonucleotide
gcugaugccacuauacaau

SEQ ID NO: 1268121 - RNA, 19 nt, Artificial Sequence
  Description of Artificial Sequence: Synthetic oligonucleotide
acaaucucucggugccaua

SEQ ID NO: 1268122 - RNA, 19 nt, Artificial Sequence
  Description of Artificial Sequence: Synthetic oligonucleotide
ccaaucggauaguugucca

SEQ ID NO: 1268123 - RNA, 19 nt, Artificial Sequence
  Description of Artificial Sequence: Synthetic oligonucleotide
acugcccgugucauuacua

SEQ ID NO: 1268124 - RNA, 19 nt, Artificial Sequence
  Description of Artificial Sequence: Synthetic oligonucleotide
cagugcaguuguauuuucu

SEQ ID NO: 1268125 - RNA, 19 nt, Artificial Sequence
  Description of Artificial Sequence: Synthetic oligonucleotide
guagcggggagagcaaacu

SEQ ID NO: 1268126 - RNA, 19 nt, Artificial Sequence
  Description of Artificial Sequence: Synthetic oligonucleotide
gcgcugguaauaaaccaca

SEQ ID NO: 1268127 - RNA, 19 nt, Artificial Sequence
  Description of Artificial Sequence: Synthetic oligonucleotide
guccgugacggcuggcaaa

SEQ ID NO: 1268128 - RNA, 19 nt, Artificial Sequence
  Description of Artificial Sequence: Synthetic oligonucleotide
gaagacgguagaguuuauu

SEQ ID NO: 1268129 - RNA, 19 nt, Artificial Sequence
  Description of Artificial Sequence: Synthetic oligonucleotide
ggcauguccucagcuggcc

SEQ ID NO: 1268130 - RNA, 19 nt, Artificial Sequence
  Description of Artificial Sequence: Synthetic oligonucleotide
ccgguguuaagguuuaggu

SEQ ID NO: 1268131 - RNA, 19 nt, Artificial Sequence
  Description of Artificial Sequence: Synthetic oligonucleotide
guaggagaucacagccaca

SEQ ID NO: 1268132 - RNA, 19 nt, Artificial Sequence
  Description of Artificial Sequence: Synthetic oligonucleotide
gcgacugagcggucagagc

SEQ ID NO: 1268133 - RNA, 19 nt, Artificial Sequence
  Description of Artificial Sequence: Synthetic oligonucleotide
cugaucggucuugaaaagu

SEQ ID NO: 1268134 - RNA, 19 nt, Artificial Sequence
  Description of Artificial Sequence: Synthetic oligonucleotide
gaaauuugucugacaccau

SEQ ID NO: 1268135 - RNA, 19 nt, Artificial Sequence
  Description of Artificial Sequence: Synthetic oligonucleotide
gcgggaagcccauggucug

SEQ ID NO: 1268136 - RNA, 19 nt, Artificial Sequence
  Description of Artificial Sequence: Synthetic oligonucleotide
ucuguccgugacggcuggc

SEQ ID NO: 1268137 - RNA, 19 nt, Artificial Sequence
  Description of Artificial Sequence: Synthetic oligonucleotide
agccuuccccgguguuaag

SEQ ID NO: 1268138 - RNA, 19 nt, Artificial Sequence
  Description of Artificial Sequence: Synthetic oligonucleotide
ccuaugaauggcaauccau

SEQ ID NO: 1268139 - RNA, 19 nt, Artificial Sequence
  Description of Artificial Sequence: Synthetic oligonucleotide
  modified_base (3)..(3): a, c, u, g, unknown or other
ggnugaaguuggcgaucac

SEQ ID NO: 1268140 - RNA, 19 nt, Artificial Sequence
  Description of Artificial Sequence: Synthetic oligonucleotide
caaucggauaguuguccau

SEQ ID NO: 1268141 - RNA, 19 nt, Artificial Sequence
  Description of Artificial Sequence: Synthetic oligonucleotide
gagagggcuuugagguguc

SEQ ID NO: 1268142 - RNA, 19 nt, Artificial Sequence
  Description of Artificial Sequence: Synthetic oligonucleotide
gucauacgggagggaaauc

SEQ ID NO: 1268143 - RNA, 19 nt, Artificial Sequence
  Description of Artificial Sequence: Synthetic oligonucleotide
ggucauacgggagggaaau

SEQ ID NO: 1268144 - RNA, 19 nt, Artificial Sequence
  Description of Artificial Sequence: Synthetic oligonucleotide
ggacucguauugugaugca

SEQ ID NO: 1268145 - RNA, 19 nt, Artificial Sequence
  Description of Artificial Sequence: Synthetic oligonucleotide
cgugucauuacuacacacu

SEQ ID NO: 1268146 - RNA, 19 nt, Artificial Sequence
  Description of Artificial Sequence: Synthetic oligonucleotide
ggcguaagcgcugguaaua

SEQ ID NO: 1268147 - RNA, 19 nt, Artificial Sequence
  Description of Artificial Sequence: Synthetic oligonucleotide
auguggcguaagcgcuggu

SEQ ID NO: 1268148 - RNA, 19 nt, Artificial Sequence
  Description of Artificial Sequence: Synthetic oligonucleotide
gugggcgacugagcgguca

SEQ ID NO: 1268149 - RNA, 19 nt, Artificial Sequence
  Description of Artificial Sequence: Synthetic oligonucleotide
cgagggacucguauuguga

SEQ ID NO: 1268150 - RNA, 19 nt, Artificial Sequence
  Description of Artificial Sequence: Synthetic oligonucleotide
ccgcucucuguaaaaggca

SEQ ID NO: 1268151 - RNA, 19 nt, Artificial Sequence
  Description of Artificial Sequence: Synthetic oligonucleotide
guugcgcauagcagaccaa

SEQ ID NO: 1268152 - RNA, 19 nt, Artificial Sequence
  Description of Artificial Sequence: Synthetic oligonucleotide
cgaucaacauaccaauggu

SEQ ID NO: 1268153 - RNA, 19 nt, Artificial Sequence
  Description of Artificial Sequence: Synthetic oligonucleotide
acccgugggucaccagguu

SEQ ID NO: 1268154 - RNA, 19 nt, Artificial Sequence
  Description of Artificial Sequence: Synthetic oligonucleotide
gcguaagcgcugguaauaa

SEQ ID NO: 1268155 - RNA, 19 nt, Artificial Sequence
  Description of Artificial Sequence: Synthetic oligonucleotide
cgguguuaagguuuaggua

SEQ ID NO: 1268156 - RNA, 19 nt, Artificial Sequence
  Description of Artificial Sequence: Synthetic oligonucleotide
cacaaacgugggcgacuga

SEQ ID NO: 1268157 - RNA, 19 nt, Artificial Sequence
  Description of Artificial Sequence: Synthetic oligonucleotide
caucccgcugaugccacua

SEQ ID NO: 1268158 - RNA, 19 nt, Artificial Sequence
  Description of Artificial Sequence: Synthetic oligonucleotide
cucagaugguuaggaucaa

SEQ ID NO: 1268159 - RNA, 19 nt, Artificial Sequence
  Description of Artificial Sequence: Synthetic oligonucleotide
ggagagcaaacugccacau

SEQ ID NO: 1268160 - RNA, 19 nt, Artificial Sequence
  Description of Artificial Sequence: Synthetic oligonucleotide
cccgugucauuacuacaca

SEQ ID NO: 1268161 - RNA, 19 nt, Artificial Sequence
  Description of Artificial Sequence: Synthetic oligonucleotide
ccgaggacucugguuauga

SEQ ID NO: 1268162 - RNA, 19 nt, Artificial Sequence
  Description of Artificial Sequence: Synthetic oligonucleotide
cauuuccccaaagcggauu

SEQ ID NO: 1268163 - RNA, 19 nt, Artificial Sequence
  Description of Artificial Sequence: Synthetic oligonucleotide
cuuccccgguguuaagguu

SEQ ID NO: 1268164 - RNA, 19 nt, Artificial Sequence
  Description of Artificial Sequence: Synthetic oligonucleotide
ccaugugccaacagagcau

SEQ ID NO: 1268165 - RNA, 19 nt, Artificial Sequence
  Description of Artificial Sequence: Synthetic oligonucleotide
cugacaccauguggcguaa

SEQ ID NO: 1268166 - RNA, 19 nt, Artificial Sequence
  Description of Artificial Sequence: Synthetic oligonucleotide
cacugcccgugucauuacu

SEQ ID NO: 1268167 - RNA, 19 nt, Artificial Sequence
  Description of Artificial Sequence: Synthetic oligonucleotide
ccuuccccgguguuaaggu

SEQ ID NO: 1268168 - RNA, 19 nt, Artificial Sequence
  Description of Artificial Sequence: Synthetic oligonucleotide
ccagucguucuaacuugaa

SEQ ID NO: 1268169 - RNA, 19 nt, Artificial Sequence
  Description of Artificial Sequence: Synthetic oligonucleotide
ggguugcauggagaaaccu

SEQ ID NO: 1268170 - RNA, 19 nt, Artificial Sequence
  Description of Artificial Sequence: Synthetic oligonucleotide
ggucucacgagagggcuuu

SEQ ID NO: 1268171 - RNA, 19 nt, Artificial Sequence
  Description of Artificial Sequence: Synthetic oligonucleotide
ccaugagcaaagccucgcu

SEQ ID NO: 1268172 - RNA, 19 nt, Artificial Sequence
  Description of Artificial Sequence: Synthetic oligonucleotide
ccaaagcggauuccacccu

SEQ ID NO: 1268173 - RNA, 19 nt, Artificial Sequence
  Description of Artificial Sequence: Synthetic oligonucleotide
ccucgcucccaagaagccu

SEQ ID NO: 1268174 - RNA, 19 nt, Artificial Sequence
  Description of Artificial Sequence: Synthetic oligonucleotide
ccccgguguuaagguuuag

SEQ ID NO: 1268175 - RNA, 19 nt, Artificial Sequence
  Description of Artificial Sequence: Synthetic oligonucleotide
cccgugggucaccagguuu

SEQ ID NO: 1268176 - RNA, 19 nt, Artificial Sequence
  Description of Artificial Sequence: Synthetic oligonucleotide
cgugggcgacugagcgguc

SEQ ID NO: 1268177 - RNA, 19 nt, Artificial Sequence
  Description of Artificial Sequence: Synthetic oligonucleotide
ggauuccacccuggacguu

SEQ ID NO: 1268178 - RNA, 19 nt, Artificial Sequence
  Description of Artificial Sequence: Synthetic oligonucleotide
ccaucccgcugaugccacu

SEQ ID NO: 1268179 - RNA, 19 nt, Artificial Sequence
  Description of Artificial Sequence: Synthetic oligonucleotide
ccgugacggcuggcaaauu

SEQ ID NO: 1268180 - RNA, 19 nt, Artificial Sequence
  Description of Artificial Sequence: Synthetic oligonucleotide
  modified_base (1)..(1): a, c, u, g, unknown or other
  modified_base (8)..(8): a, c, u, g, unknown or other
ngaagggnugaaguuggcg

SEQ ID NO: 1268181 - RNA, 19 nt, Artificial Sequence
  Description of Artificial Sequence: Synthetic oligonucleotide
uauuuuauaauaaucaggc

SEQ ID NO: 1268182 - RNA, 19 nt, Artificial Sequence
  Description of Artificial Sequence: Synthetic oligonucleotide
aaguugauaauauuuuggg

SEQ ID NO: 1268183 - RNA, 19 nt, Artificial Sequence
  Description of Artificial Sequence: Synthetic oligonucleotide
auauuuugggcccagaaac

SEQ ID NO: 1268184 - RNA, 19 nt, Artificial Sequence
  Description of Artificial Sequence: Synthetic oligonucleotide
aauaaucaggcacaguuag

SEQ ID NO: 1268185 - RNA, 19 nt, Artificial Sequence
  Description of Artificial Sequence: Synthetic oligonucleotide
  modified_base (12)..(12): a, c, u, g, unknown or other
uauuguccaacnaugauag

SEQ ID NO: 1268186 - RNA, 19 nt, Artificial Sequence
  Description of Artificial Sequence: Synthetic oligonucleotide
guugauaauauuuugggcc

SEQ ID NO: 1268187 - RNA, 19 nt, Artificial Sequence
  Description of Artificial Sequence: Synthetic oligonucleotide
ugaaagaucaaucuaaaau

SEQ ID NO: 1268188 - RNA, 19 nt, Artificial Sequence
  Description of Artificial Sequence: Synthetic oligonucleotide
uguuuuacuauaacaacag

SEQ ID NO: 1268189 - RNA, 19 nt, Artificial Sequence
  Description of Artificial Sequence: Synthetic oligonucleotide
  modified_base (4)..(4): a, c, u, g, unknown or other
aacnaugauaguuacuuga

SEQ ID NO: 1268190 - RNA, 19 nt, Artificial Sequence
  Description of Artificial Sequence: Synthetic oligonucleotide
ugauuaguguuuaagagga

SEQ ID NO: 1268191 - RNA, 19 nt, Artificial Sequence
  Description of Artificial Sequence: Synthetic oligonucleotide
agaaaguacaaauccauuc

SEQ ID NO: 1268192 - RNA, 19 nt, Artificial Sequence
  Description of Artificial Sequence: Synthetic oligonucleotide
uuuacuauaacaacaggaa

SEQ ID NO: 1268193 - RNA, 19 nt, Artificial Sequence
  Description of Artificial Sequence: Synthetic oligonucleotide
uuaguguuuaagaggaggg

SEQ ID NO: 1268194 - RNA, 19 nt, Artificial Sequence
  Description of Artificial Sequence: Synthetic oligonucleotide
ucugauuaguguuuaagag

SEQ ID NO: 1268195 - RNA, 19 nt, Artificial Sequence
  Description of Artificial Sequence: Synthetic oligonucleotide
ucuuagauaagucucggca

SEQ ID NO: 1268196 - RNA, 19 nt, Artificial Sequence
  Description of Artificial Sequence: Synthetic oligonucleotide
aguugauaauauuuugggc

SEQ ID NO: 1268197 - RNA, 19 nt, Artificial Sequence
  Description of Artificial Sequence: Synthetic oligonucleotide
ucaaucuaaaaucagccac

SEQ ID NO: 1268198 - RNA, 19 nt, Artificial Sequence
  Description of Artificial Sequence: Synthetic oligonucleotide
ugaacuuacugucuucugg

SEQ ID NO: 1268199 - RNA, 19 nt, Artificial Sequence
  Description of Artificial Sequence: Synthetic oligonucleotide
uuguuuuacuauaacaaca

SEQ ID NO: 1268200 - RNA, 19 nt, Artificial Sequence
  Description of Artificial Sequence: Synthetic oligonucleotide
aaagaacccaaguugauaa

SEQ ID NO: 1268201 - RNA, 19 nt, Artificial Sequence
  Description of Artificial Sequence: Synthetic oligonucleotide
uguauacaugcaauaaucc

SEQ ID NO: 1268202 - RNA, 19 nt, Artificial Sequence
  Description of Artificial Sequence: Synthetic oligonucleotide
uacuauaacaacaggaaaa

SEQ ID NO: 1268203 - RNA, 19 nt, Artificial Sequence
  Description of Artificial Sequence: Synthetic oligonucleotide
aauuggucaaugugggcac

SEQ ID NO: 1268204 - RNA, 19 nt, Artificial Sequence
  Description of Artificial Sequence: Synthetic oligonucleotide
  modified_base (14)..(14): a, c, u, g, unknown or other
aauauuguccaacnaugau

SEQ ID NO: 1268205 - RNA, 19 nt, Artificial Sequence
  Description of Artificial Sequence: Synthetic oligonucleotide
uuauccucgauaacuaaag

SEQ ID NO: 1268206 - RNA, 19 nt, Artificial Sequence
  Description of Artificial Sequence: Synthetic oligonucleotide
cacaguuagaggaacaggg

SEQ ID NO: 1268207 - RNA, 19 nt, Artificial Sequence
  Description of Artificial Sequence: Synthetic oligonucleotide
cugauuaguguuuaagagg

SEQ ID NO: 1268208 - RNA, 19 nt, Artificial Sequence
  Description of Artificial Sequence: Synthetic oligonucleotide
agguaaaccaccugguggc

SEQ ID NO: 1268209 - RNA, 19 nt, Artificial Sequence
  Description of Artificial Sequence: Synthetic oligonucleotide
uggauaacugguuggaagg

SEQ ID NO: 1268210 - RNA, 19 nt, Artificial Sequence
  Description of Artificial Sequence: Synthetic oligonucleotide
uuggcguuaauuuacuaag

SEQ ID NO: 1268211 - RNA, 19 nt, Artificial Sequence
  Description of Artificial Sequence: Synthetic oligonucleotide
cacguggcaacucagaugg

SEQ ID NO: 1268212 - RNA, 19 nt, Artificial Sequence
  Description of Artificial Sequence: Synthetic oligonucleotide
uuguauacaugcaauaauc

SEQ ID NO: 1268213 - RNA, 19 nt, Artificial Sequence
  Description of Artificial Sequence: Synthetic oligonucleotide
auaacuaaagaacccaagu

SEQ ID NO: 1268214 - RNA, 19 nt, Artificial Sequence
  Description of Artificial Sequence: Synthetic oligonucleotide
agaucaaucuaaaaucagc

SEQ ID NO: 1268215 - RNA, 19 nt, Artificial Sequence
  Description of Artificial Sequence: Synthetic oligonucleotide
aaauuggucaaugugggca

SEQ ID NO: 1268216 - RNA, 19 nt, Artificial Sequence
  Description of Artificial Sequence: Synthetic oligonucleotide
uuuguguguagaaucagcu

SEQ ID NO: 1268217 - RNA, 19 nt, Artificial Sequence
  Description of Artificial Sequence: Synthetic oligonucleotide
uuuacuaaggccuucgauu

SEQ ID NO: 1268218 - RNA, 19 nt, Artificial Sequence
  Description of Artificial Sequence: Synthetic oligonucleotide
aauauuuugggcccagaaa

SEQ ID NO: 1268219 - RNA, 19 nt, Artificial Sequence
  Description of Artificial Sequence: Synthetic oligonucleotide
auacaugcaauaauccucc

SEQ ID NO: 1268220 - RNA, 19 nt, Artificial Sequence
  Description of Artificial Sequence: Synthetic oligonucleotide
cuuuauucggauuggcucc

SEQ ID NO: 1268221 - RNA, 19 nt, Artificial Sequence
  Description of Artificial Sequence: Synthetic oligonucleotide
uggauaguuaguauuuuga

SEQ ID NO: 1268222 - RNA, 19 nt, Artificial Sequence
  Description of Artificial Sequence: Synthetic oligonucleotide
auaauuuucagguggucca

SEQ ID NO: 1268223 - RNA, 19 nt, Artificial Sequence
  Description of Artificial Sequence: Synthetic oligonucleotide
aaugugggcacguggcaac

SEQ ID NO: 1268224 - RNA, 19 nt, Artificial Sequence
  Description of Artificial Sequence: Synthetic oligonucleotide
augaucuacacuuguaucu

SEQ ID NO: 1268225 - RNA, 19 nt, Artificial Sequence
  Description of Artificial Sequence: Synthetic oligonucleotide
cuuagauaagucucggcag

SEQ ID NO: 1268226 - RNA, 19 nt, Artificial Sequence
  Description of Artificial Sequence: Synthetic oligonucleotide
aguguuuaagaggagggac

SEQ ID NO: 1268227 - RNA, 19 nt, Artificial Sequence
  Description of Artificial Sequence: Synthetic oligonucleotide
uggucuuagauaagucucg

SEQ ID NO: 1268228 - RNA, 19 nt, Artificial Sequence
  Description of Artificial Sequence: Synthetic oligonucleotide
aguaacaggcccugcaagg

SEQ ID NO: 1268229 - RNA, 19 nt, Artificial Sequence
  Description of Artificial Sequence: Synthetic oligonucleotide
ucugaguugugacugcgag

SEQ ID NO: 1268230 - RNA, 19 nt, Artificial Sequence
  Description of Artificial Sequence: Synthetic oligonucleotide
uuagauaagucucggcaga

SEQ ID NO: 1268231 - RNA, 19 nt, Artificial Sequence
  Description of Artificial Sequence: Synthetic oligonucleotide
agcaaagaagcuccccucc

SEQ ID NO: 1268232 - RNA, 19 nt, Artificial Sequence
  Description of Artificial Sequence: Synthetic oligonucleotide
aaucaggcacaguuagagg

SEQ ID NO: 1268233 - RNA, 19 nt, Artificial Sequence
  Description of Artificial Sequence: Synthetic oligonucleotide
uuauuucagcaguuggcgg

SEQ ID NO: 1268234 - RNA, 19 nt, Artificial Sequence
  Description of Artificial Sequence: Synthetic oligonucleotide
cuugaugguugauaagucc

SEQ ID NO: 1268235 - RNA, 19 nt, Artificial Sequence
  Description of Artificial Sequence: Synthetic oligonucleotide
aaguuuuauaccagcauug

SEQ ID NO: 1268236 - RNA, 19 nt, Artificial Sequence
  Description of Artificial Sequence: Synthetic oligonucleotide
guuacuugaacgcugguga

SEQ ID NO: 1268237 - RNA, 19 nt, Artificial Sequence
  Description of Artificial Sequence: Synthetic oligonucleotide
cuuaagacgcuucuuccgg

SEQ ID NO: 1268238 - RNA, 19 nt, Artificial Sequence
  Description of Artificial Sequence: Synthetic oligonucleotide
ucuggucuuagauaagucu

SEQ ID NO: 1268239 - RNA, 19 nt, Artificial Sequence
  Description of Artificial Sequence: Synthetic oligonucleotide
aucaggcacaguuagagga

SEQ ID NO: 1268240 - RNA, 19 nt, Artificial Sequence
  Description of Artificial Sequence: Synthetic oligonucleotide
ugcaauaauccuccugaag

SEQ ID NO: 1268241 - RNA, 19 nt, Artificial Sequence
  Description of Artificial Sequence: Synthetic oligonucleotide
uaucuauuggcguuaauuu

SEQ ID NO: 1268242 - RNA, 19 nt, Artificial Sequence
  Description of Artificial Sequence: Synthetic oligonucleotide
cucgauaacuaaagaaccc

SEQ ID NO: 1268243 - RNA, 19 nt, Artificial Sequence
  Description of Artificial Sequence: Synthetic oligonucleotide
gauaacuaaagaacccaag

SEQ ID NO: 1268244 - RNA, 19 nt, Artificial Sequence
  Description of Artificial Sequence: Synthetic oligonucleotide
aaucaggcucauugaacuc

SEQ ID NO: 1268245 - RNA, 19 nt, Artificial Sequence
  Description of Artificial Sequence: Synthetic oligonucleotide
  modified_base (9)..(9): a, c, u, g, unknown or other
uguccaacnaugauaguua

SEQ ID NO: 1268246 - RNA, 19 nt, Artificial Sequence
  Description of Artificial Sequence: Synthetic oligonucleotide
gguaaagguucuuuaaaag

SEQ ID NO: 1268247 - RNA, 19 nt, Artificial Sequence
  Description of Artificial Sequence: Synthetic oligonucleotide
uaauauuuugggcccagaa

SEQ ID NO: 1268248 - RNA, 19 nt, Artificial Sequence
  Description of Artificial Sequence: Synthetic oligonucleotide
caugcaauaauccuccuga

SEQ ID NO: 1268249 - RNA, 19 nt, Artificial Sequence
  Description of Artificial Sequence: Synthetic oligonucleotide
uauuucagcaguuggcggu

SEQ ID NO: 1268250 - RNA, 19 nt, Artificial Sequence
  Description of Artificial Sequence: Synthetic oligonucleotide
aauaauccuccugaagucu

SEQ ID NO: 1268251 - RNA, 19 nt, Artificial Sequence
  Description of Artificial Sequence: Synthetic oligonucleotide
agcaucagaucguaacacg

SEQ ID NO: 1268252 - RNA, 19 nt, Artificial Sequence
  Description of Artificial Sequence: Synthetic oligonucleotide
uuauaauaaucaggcacag

SEQ ID NO: 1268253 - RNA, 19 nt, Artificial Sequence
  Description of Artificial Sequence: Synthetic oligonucleotide
uggcguuaauuuacuaagg

SEQ ID NO: 1268254 - RNA, 19 nt, Artificial Sequence
  Description of Artificial Sequence: Synthetic oligonucleotide
aagacgcuucuuccggggc

SEQ ID NO: 1268255 - RNA, 19 nt, Artificial Sequence
  Description of Artificial Sequence: Synthetic oligonucleotide
aguuuuauaccagcauugg

SEQ ID NO: 1268256 - RNA, 19 nt, Artificial Sequence
  Description of Artificial Sequence: Synthetic oligonucleotide
gaaacuaggaucacaguga

SEQ ID NO: 1268257 - RNA, 19 nt, Artificial Sequence
  Description of Artificial Sequence: Synthetic oligonucleotide
auuuuauaauaaucaggca

SEQ ID NO: 1268258 - RNA, 19 nt, Artificial Sequence
  Description of Artificial Sequence: Synthetic oligonucleotide
uuaucuauuggcguuaauu

SEQ ID NO: 1268259 - RNA, 19 nt, Artificial Sequence
  Description of Artificial Sequence: Synthetic oligonucleotide
gggaaauuggucaaugugg

SEQ ID NO: 1268260 - RNA, 19 nt, Artificial Sequence
  Description of Artificial Sequence: Synthetic oligonucleotide
agguauuuguggcuggcuc

SEQ ID NO: 1268261 - RNA, 19 nt, Artificial Sequence
  Description of Artificial Sequence: Synthetic oligonucleotide
auuggcguuaauuuacuaa

SEQ ID NO: 1268262 - RNA, 19 nt, Artificial Sequence
  Description of Artificial Sequence: Synthetic oligonucleotide
cauucgaggaguuuuccug

SEQ ID NO: 1268263 - RNA, 19 nt, Artificial Sequence
  Description of Artificial Sequence: Synthetic oligonucleotide
uuaagacgcuucuuccggg

SEQ ID NO: 1268264 - RNA, 19 nt, Artificial Sequence
  Description of Artificial Sequence: Synthetic oligonucleotide
ucgauaacuaaagaaccca

SEQ ID NO: 1268265 - RNA, 19 nt, Artificial Sequence
  Description of Artificial Sequence: Synthetic oligonucleotide
  modified_base (10)..(10): a, c, u, g, unknown or other
uuguccaacnaugauaguu

SEQ ID NO: 1268266 - RNA, 19 nt, Artificial Sequence
  Description of Artificial Sequence: Synthetic oligonucleotide
aacugguuggaagguaaac

SEQ ID NO: 1268267 - RNA, 19 nt, Artificial Sequence
  Description of Artificial Sequence: Synthetic oligonucleotide
aaacuaggaucacagugaa

SEQ ID NO: 1268268 - RNA, 19 nt, Artificial Sequence
  Description of Artificial Sequence: Synthetic oligonucleotide
uuuugggcccagaaacuag

SEQ ID NO: 1268269 - RNA, 19 nt, Artificial Sequence
  Description of Artificial Sequence: Synthetic oligonucleotide
uuaagaggagggacguaag

SEQ ID NO: 1268270 - RNA, 19 nt, Artificial Sequence
  Description of Artificial Sequence: Synthetic oligonucleotide
acuaaagaacccaaguuga

SEQ ID NO: 1268271 - RNA, 19 nt, Artificial Sequence
  Description of Artificial Sequence: Synthetic oligonucleotide
cucagauggaauacuuuag

SEQ ID NO: 1268272 - RNA, 19 nt, Artificial Sequence
  Description of Artificial Sequence: Synthetic oligonucleotide
gacguaaguaugcuucuug

SEQ ID NO: 1268273 - RNA, 19 nt, Artificial Sequence
  Description of Artificial Sequence: Synthetic oligonucleotide
ucuacacuuguaucuuucc

SEQ ID NO: 1268274 - RNA, 19 nt, Artificial Sequence
  Description of Artificial Sequence: Synthetic oligonucleotide
cuggucuuagauaagucuc

SEQ ID NO: 1268275 - RNA, 19 nt, Artificial Sequence
  Description of Artificial Sequence: Synthetic oligonucleotide
ggauaguuaguauuuugag

SEQ ID NO: 1268276 - RNA, 19 nt, Artificial Sequence
  Description of Artificial Sequence: Synthetic oligonucleotide
auggaauacuuuaggacac

SEQ ID NO: 1268277 - RNA, 19 nt, Artificial Sequence
  Description of Artificial Sequence: Synthetic oligonucleotide
guuuuauaccagcauuggc

SEQ ID NO: 1268278 - RNA, 19 nt, Artificial Sequence
  Description of Artificial Sequence: Synthetic oligonucleotide
uuacuaaggccuucgauuu

SEQ ID NO: 1268279 - RNA, 19 nt, Artificial Sequence
  Description of Artificial Sequence: Synthetic oligonucleotide
gcaccguucuguuugaugg

SEQ ID NO: 1268280 - RNA, 19 nt, Artificial Sequence
  Description of Artificial Sequence: Synthetic oligonucleotide
accagcauuggcuacuuca

SEQ ID NO: 1268281 - RNA, 19 nt, Artificial Sequence
  Description of Artificial Sequence: Synthetic oligonucleotide
aauuuacuaaggccuucga

SEQ ID NO: 1268282 - RNA, 19 nt, Artificial Sequence
  Description of Artificial Sequence: Synthetic oligonucleotide
cugcuuagguauuuguggc

SEQ ID NO: 1268283 - RNA, 19 nt, Artificial Sequence
  Description of Artificial Sequence: Synthetic oligonucleotide
uuccuuuuaucugaguugu

SEQ ID NO: 1268284 - RNA, 19 nt, Artificial Sequence
  Description of Artificial Sequence: Synthetic oligonucleotide
cuuuccuugcaauauuguc

SEQ ID NO: 1268285 - RNA, 19 nt, Artificial Sequence
  Description of Artificial Sequence: Synthetic oligonucleotide
  modified_base (16)..(16): a, c, u, g, unknown or other
gcaauauuguccaacnaug

SEQ ID NO: 1268286 - RNA, 19 nt, Artificial Sequence
  Description of Artificial Sequence: Synthetic oligonucleotide
uaagacgcuucuuccgggg

SEQ ID NO: 1268287 - RNA, 19 nt, Artificial Sequence
  Description of Artificial Sequence: Synthetic oligonucleotide
augggaucguccuccuucc

SEQ ID NO: 1268288 - RNA, 19 nt, Artificial Sequence
  Description of Artificial Sequence: Synthetic oligonucleotide
agggacguaaguaugcuuc

SEQ ID NO: 1268289 - RNA, 19 nt, Artificial Sequence
  Description of Artificial Sequence: Synthetic oligonucleotide
uguguggggaacuuggaua

SEQ ID NO: 1268290 - RNA, 19 nt, Artificial Sequence
  Description of Artificial Sequence: Synthetic oligonucleotide
auuccugaauucuaguuuu

SEQ ID NO: 1268291 - RNA, 19 nt, Artificial Sequence
  Description of Artificial Sequence: Synthetic oligonucleotide
ugcuuuauucggauuggcu

SEQ ID NO: 1268292 - RNA, 19 nt, Artificial Sequence
  Description of Artificial Sequence: Synthetic oligonucleotide
acucagauggaauacuuua

SEQ ID NO: 1268293 - RNA, 19 nt, Artificial Sequence
  Description of Artificial Sequence: Synthetic oligonucleotide
  modified_base (19)..(19): a, c, u, g, unknown or other
cuugcaauauuguccaacn

SEQ ID NO: 1268294 - RNA, 19 nt, Artificial Sequence
  Description of Artificial Sequence: Synthetic oligonucleotide
uguuggucacaggagaagc

SEQ ID NO: 1268295 - RNA, 19 nt, Artificial Sequence
  Description of Artificial Sequence: Synthetic oligonucleotide
aagaagagcucugauuagu

SEQ ID NO: 1268296 - RNA, 19 nt, Artificial Sequence
  Description of Artificial Sequence: Synthetic oligonucleotide
gaaucaggcucauugaacu

SEQ ID NO: 1268297 - RNA, 19 nt, Artificial Sequence
  Description of Artificial Sequence: Synthetic oligonucleotide
caauaauccuccugaaguc

SEQ ID NO: 1268298 - RNA, 19 nt, Artificial Sequence
  Description of Artificial Sequence: Synthetic oligonucleotide
auccucgauaacuaaagaa

SEQ ID NO: 1268299 - RNA, 19 nt, Artificial Sequence
  Description of Artificial Sequence: Synthetic oligonucleotide
acuugaacgcuggugagag

SEQ ID NO: 1268300 - RNA, 19 nt, Artificial Sequence
  Description of Artificial Sequence: Synthetic oligonucleotide
aguuaguauuuugaggucu

SEQ ID NO: 1268301 - RNA, 19 nt, Artificial Sequence
  Description of Artificial Sequence: Synthetic oligonucleotide
caugaucuacacuuguauc

SEQ ID NO: 1268302 - RNA, 19 nt, Artificial Sequence
  Description of Artificial Sequence: Synthetic oligonucleotide
aucagaucguaacacggcu

SEQ ID NO: 1268303 - RNA, 19 nt, Artificial Sequence
  Description of Artificial Sequence: Synthetic oligonucleotide
ugagcuaggcugaucugug

SEQ ID NO: 1268304 - RNA, 19 nt, Artificial Sequence
  Description of Artificial Sequence: Synthetic oligonucleotide
guaaagguucuuuaaaagu

SEQ ID NO: 1268305 - RNA, 19 nt, Artificial Sequence
  Description of Artificial Sequence: Synthetic oligonucleotide
uugauaaguccauuggguu

SEQ ID NO: 1268306 - RNA, 19 nt, Artificial Sequence
  Description of Artificial Sequence: Synthetic oligonucleotide
gaaauuggucaaugugggc

SEQ ID NO: 1268307 - RNA, 19 nt, Artificial Sequence
  Description of Artificial Sequence: Synthetic oligonucleotide
augaauuuggugacugcac

SEQ ID NO: 1268308 - RNA, 19 nt, Artificial Sequence
  Description of Artificial Sequence: Synthetic oligonucleotide
auucggauuggcuccaaca

SEQ ID NO: 1268309 - RNA, 19 nt, Artificial Sequence
  Description of Artificial Sequence: Synthetic oligonucleotide
uuacuugaacgcuggugag

SEQ ID NO: 1268310 - RNA, 19 nt, Artificial Sequence
  Description of Artificial Sequence: Synthetic oligonucleotide
ggagucguaacugagcuag

SEQ ID NO: 1268311 - RNA, 19 nt, Artificial Sequence
  Description of Artificial Sequence: Synthetic oligonucleotide
agcaucacaaucauauuca

SEQ ID NO: 1268312 - RNA, 19 nt, Artificial Sequence
  Description of Artificial Sequence: Synthetic oligonucleotide
uauccucgauaacuaaaga

SEQ ID NO: 1268313 - RNA, 19 nt, Artificial Sequence
  Description of Artificial Sequence: Synthetic oligonucleotide
acuaaggccuucgauuuuc

SEQ ID NO: 1268314 - RNA, 19 nt, Artificial Sequence
  Description of Artificial Sequence: Synthetic oligonucleotide
  modified_base (7)..(7): a, c, u, g, unknown or other
uccaacnaugauaguuacu

SEQ ID NO: 1268315 - RNA, 19 nt, Artificial Sequence
  Description of Artificial Sequence: Synthetic oligonucleotide
auuuacuaaggccuucgau

SEQ ID NO: 1268316 - RNA, 19 nt, Artificial Sequence
  Description of Artificial Sequence: Synthetic oligonucleotide
  modified_base (2)..(2): a, c, u, g, unknown or other
cnaugauaguuacuugaac

SEQ ID NO: 1268317 - RNA, 19 nt, Artificial Sequence
  Description of Artificial Sequence: Synthetic oligonucleotide
ucuccgcucgggaaauugg

SEQ ID NO: 1268318 - RNA, 19 nt, Artificial Sequence
  Description of Artificial Sequence: Synthetic oligonucleotide
cuuagguauuuguggcugg

SEQ ID NO: 1268319 - RNA, 19 nt, Artificial Sequence
  Description of Artificial Sequence: Synthetic oligonucleotide
ucgggcuuuccauucgagg

SEQ ID NO: 1268320 - RNA, 19 nt, Artificial Sequence
  Description of Artificial Sequence: Synthetic oligonucleotide
ugauaaguccauuggguuu

SEQ ID NO: 1268321 - RNA, 19 nt, Artificial Sequence
  Description of Artificial Sequence: Synthetic oligonucleotide
uggggaacuuggauaacug

SEQ ID NO: 1268322 - RNA, 19 nt, Artificial Sequence
  Description of Artificial Sequence: Synthetic oligonucleotide
cucugauuaguguuuaaga

SEQ ID NO: 1268323 - RNA, 19 nt, Artificial Sequence
  Description of Artificial Sequence: Synthetic oligonucleotide
uaagucucggcagaaagua

SEQ ID NO: 1268324 - RNA, 19 nt, Artificial Sequence
  Description of Artificial Sequence: Synthetic oligonucleotide
auuggcuccaacaugacua

SEQ ID NO: 1268325 - RNA, 19 nt, Artificial Sequence
  Description of Artificial Sequence: Synthetic oligonucleotide
cauuggcuacuucagaauc

SEQ ID NO: 1268326 - RNA, 19 nt, Artificial Sequence
  Description of Artificial Sequence: Synthetic oligonucleotide
ucugcuccacgacaggacu

SEQ ID NO: 1268327 - RNA, 19 nt, Artificial Sequence
  Description of Artificial Sequence: Synthetic oligonucleotide
cucucuuuauccucgauaa

SEQ ID NO: 1268328 - RNA, 19 nt, Artificial Sequence
  Description of Artificial Sequence: Synthetic oligonucleotide
acgcuagucauaguaacag

SEQ ID NO: 1268329 - RNA, 19 nt, Artificial Sequence
  Description of Artificial Sequence: Synthetic oligonucleotide
acaugcaauaauccuccug

SEQ ID NO: 1268330 - RNA, 19 nt, Artificial Sequence
  Description of Artificial Sequence: Synthetic oligonucleotide
aguuagaggaacagggucu

SEQ ID NO: 1268331 - RNA, 19 nt, Artificial Sequence
  Description of Artificial Sequence: Synthetic oligonucleotide
caugggaucguccuccuuc

SEQ ID NO: 1268332 - RNA, 19 nt, Artificial Sequence
  Description of Artificial Sequence: Synthetic oligonucleotide
agaagcuccccuccauggg

SEQ ID NO: 1268333 - RNA, 19 nt, Artificial Sequence
  Description of Artificial Sequence: Synthetic oligonucleotide
cucugcuuagguauuugug

SEQ ID NO: 1268334 - RNA, 19 nt, Artificial Sequence
  Description of Artificial Sequence: Synthetic oligonucleotide
  modified_base (13)..(13): a, c, u, g, unknown or other
auauuguccaacnaugaua

SEQ ID NO: 1268335 - RNA, 19 nt, Artificial Sequence
  Description of Artificial Sequence: Synthetic oligonucleotide
ugguuggaagguaaaccac

SEQ ID NO: 1268336 - RNA, 19 nt, Artificial Sequence
  Description of Artificial Sequence: Synthetic oligonucleotide
acugcgagcaucacaauca

SEQ ID NO: 1268337 - RNA, 19 nt, Artificial Sequence
  Description of Artificial Sequence: Synthetic oligonucleotide
gcguuaauuuacuaaggcc

SEQ ID NO: 1268338 - RNA, 19 nt, Artificial Sequence
  Description of Artificial Sequence: Synthetic oligonucleotide
caguuagaggaacaggguc

SEQ ID NO: 1268339 - RNA, 19 nt, Artificial Sequence
  Description of Artificial Sequence: Synthetic oligonucleotide
cugagaggcauccugccac

SEQ ID NO: 1268340 - RNA, 19 nt, Artificial Sequence
  Description of Artificial Sequence: Synthetic oligonucleotide
cuucgauuuuccuuuuauc

SEQ ID NO: 1268341 - RNA, 19 nt, Artificial Sequence
  Description of Artificial Sequence: Synthetic oligonucleotide
uaacacggcuuccucagaa

SEQ ID NO: 1268342 - RNA, 19 nt, Artificial Sequence
  Description of Artificial Sequence: Synthetic oligonucleotide
  modified_base (15)..(15): a, c, u, g, unknown or other
caauauuguccaacnauga

SEQ ID NO: 1268343 - RNA, 19 nt, Artificial Sequence
  Description of Artificial Sequence: Synthetic oligonucleotide
guauacaugcaauaauccu

SEQ ID NO: 1268344 - RNA, 19 nt, Artificial Sequence
  Description of Artificial Sequence: Synthetic oligonucleotide
gcuuuauucggauuggcuc

SEQ ID NO: 1268345 - RNA, 19 nt, Artificial Sequence
  Description of Artificial Sequence: Synthetic oligonucleotide
uaaagaacccaaguugaua

SEQ ID NO: 1268346 - RNA, 19 nt, Artificial Sequence
  Description of Artificial Sequence: Synthetic oligonucleotide
uuaguauuuugaggucuag

SEQ ID NO: 1268347 - RNA, 19 nt, Artificial Sequence
  Description of Artificial Sequence: Synthetic oligonucleotide
uuuccauucgaggaguuuu

SEQ ID NO: 1268348 - RNA, 19 nt, Artificial Sequence
  Description of Artificial Sequence: Synthetic oligonucleotide
  modified_base (5)..(5): a, c, u, g, unknown or other
caacnaugauaguuacuug

SEQ ID NO: 1268349 - RNA, 19 nt, Artificial Sequence
  Description of Artificial Sequence: Synthetic oligonucleotide
aucuauuggcguuaauuua

SEQ ID NO: 1268350 - RNA, 19 nt, Artificial Sequence
  Description of Artificial Sequence: Synthetic oligonucleotide
gaacucugcuccacgacag

SEQ ID NO: 1268351 - RNA, 19 nt, Artificial Sequence
  Description of Artificial Sequence: Synthetic oligonucleotide
gcuggugagagauggaggc

SEQ ID NO: 1268352 - RNA, 19 nt, Artificial Sequence
  Description of Artificial Sequence: Synthetic oligonucleotide
ugaugguugauaaguccau

SEQ ID NO: 1268353 - RNA, 19 nt, Artificial Sequence
  Description of Artificial Sequence: Synthetic oligonucleotide
uuccuugccucuccgacaa

SEQ ID NO: 1268354 - RNA, 19 nt, Artificial Sequence
  Description of Artificial Sequence: Synthetic oligonucleotide
acugaacuuacugucuucu

SEQ ID NO: 1268355 - RNA, 19 nt, Artificial Sequence
  Description of Artificial Sequence: Synthetic oligonucleotide
uggugagagauggaggcug

SEQ ID NO: 1268356 - RNA, 19 nt, Artificial Sequence
  Description of Artificial Sequence: Synthetic oligonucleotide
agcuaggcugaucugugug

SEQ ID NO: 1268357 - RNA, 19 nt, Artificial Sequence
  Description of Artificial Sequence: Synthetic oligonucleotide
uggacgcuagucauaguaa

SEQ ID NO: 1268358 - RNA, 19 nt, Artificial Sequence
  Description of Artificial Sequence: Synthetic oligonucleotide
uggcuggcucucuuuaucc

SEQ ID NO: 1268359 - RNA, 19 nt, Artificial Sequence
  Description of Artificial Sequence: Synthetic oligonucleotide
cuccaacaugacuacuggg

SEQ ID NO: 1268360 - RNA, 19 nt, Artificial Sequence
  Description of Artificial Sequence: Synthetic oligonucleotide
gcaauaauccuccugaagu

SEQ ID NO: 1268361 - RNA, 19 nt, Artificial Sequence
  Description of Artificial Sequence: Synthetic oligonucleotide
gacugcgagcaucacaauc

SEQ ID NO: 1268362 - RNA, 19 nt, Artificial Sequence
  Description of Artificial Sequence: Synthetic oligonucleotide
ucaggcacaguuagaggaa

SEQ ID NO: 1268363 - RNA, 19 nt, Artificial Sequence
  Description of Artificial Sequence: Synthetic oligonucleotide
uaguauuuugaggucuaga

SEQ ID NO: 1268364 - RNA, 19 nt, Artificial Sequence
  Description of Artificial Sequence: Synthetic oligonucleotide
gaacuuacugucuucuggu

SEQ ID NO: 1268365 - RNA, 19 nt, Artificial Sequence
  Description of Artificial Sequence: Synthetic oligonucleotide
uauaauaaucaggcacagu

SEQ ID NO: 1268366 - RNA, 19 nt, Artificial Sequence
  Description of Artificial Sequence: Synthetic oligonucleotide
uuaauuuacuaaggccuuc

SEQ ID NO: 1268367 - RNA, 19 nt, Artificial Sequence
  Description of Artificial Sequence: Synthetic oligonucleotide
gaacucagcacaguuuuga

SEQ ID NO: 1268368 - RNA, 19 nt, Artificial Sequence
  Description of Artificial Sequence: Synthetic oligonucleotide
ugcuuagguauuuguggcu

SEQ ID NO: 1268369 - RNA, 19 nt, Artificial Sequence
  Description of Artificial Sequence: Synthetic oligonucleotide
aacccaaguugauaauauu

SEQ ID NO: 1268370 - RNA, 19 nt, Artificial Sequence
  Description of Artificial Sequence: Synthetic oligonucleotide
guaaguaugcuucuuggau

SEQ ID NO: 1268371 - RNA, 19 nt, Artificial Sequence
  Description of Artificial Sequence: Synthetic oligonucleotide
  modified_base (18)..(18): a, c, u, g, unknown or other
uugcaauauuguccaacna

SEQ ID NO: 1268372 - RNA, 19 nt, Artificial Sequence
  Description of Artificial Sequence: Synthetic oligonucleotide
gacuuuguguguagaauca

SEQ ID NO: 1268373 - RNA, 19 nt, Artificial Sequence
  Description of Artificial Sequence: Synthetic oligonucleotide
ucguaacacggcuuccuca

SEQ ID NO: 1268374 - RNA, 19 nt, Artificial Sequence
  Description of Artificial Sequence: Synthetic oligonucleotide
uaguguuuaagaggaggga

SEQ ID NO: 1268375 - RNA, 19 nt, Artificial Sequence
  Description of Artificial Sequence: Synthetic oligonucleotide
ggacuuuguguguagaauc

SEQ ID NO: 1268376 - RNA, 19 nt, Artificial Sequence
  Description of Artificial Sequence: Synthetic oligonucleotide
cagaucguaacacggcuuc

SEQ ID NO: 1268377 - RNA, 19 nt, Artificial Sequence
  Description of Artificial Sequence: Synthetic oligonucleotide
agguugaucuccugugcug

SEQ ID NO: 1268378 - RNA, 19 nt, Artificial Sequence
  Description of Artificial Sequence: Synthetic oligonucleotide
aaacagaagcagacguuca

SEQ ID NO: 1268379 - RNA, 19 nt, Artificial Sequence
  Description of Artificial Sequence: Synthetic oligonucleotide
ugggcccuugcauucuggg

SEQ ID NO: 1268380 - RNA, 19 nt, Artificial Sequence
  Description of Artificial Sequence: Synthetic oligonucleotide
agaucguaacacggcuucc

SEQ ID NO: 1268381 - RNA, 19 nt, Artificial Sequence
  Description of Artificial Sequence: Synthetic oligonucleotide
uuuauucggauuggcucca

SEQ ID NO: 1268382 - RNA, 19 nt, Artificial Sequence
  Description of Artificial Sequence: Synthetic oligonucleotide
  modified_base (3)..(3): a, c, u, g, unknown or other
acnaugauaguuacuugaa

SEQ ID NO: 1268383 - RNA, 19 nt, Artificial Sequence
  Description of Artificial Sequence: Synthetic oligonucleotide
gagcaucagaucguaacac

SEQ ID NO: 1268384 - RNA, 19 nt, Artificial Sequence
  Description of Artificial Sequence: Synthetic oligonucleotide
uccgacaaucacaggggac

SEQ ID NO: 1268385 - RNA, 19 nt, Artificial Sequence
  Description of Artificial Sequence: Synthetic oligonucleotide
ucgggaaauuggucaaugu

SEQ ID NO: 1268386 - RNA, 19 nt, Artificial Sequence
  Description of Artificial Sequence: Synthetic oligonucleotide
gucuuagauaagucucggc

SEQ ID NO: 1268387 - RNA, 19 nt, Artificial Sequence
  Description of Artificial Sequence: Synthetic oligonucleotide
acucugcuuagguauuugu

SEQ ID NO: 1268388 - RNA, 19 nt, Artificial Sequence
  Description of Artificial Sequence: Synthetic oligonucleotide
ggucaaugugggcacgugg

SEQ ID NO: 1268389 - RNA, 19 nt, Artificial Sequence
  Description of Artificial Sequence: Synthetic oligonucleotide
aacuuacugucuucugguu

SEQ ID NO: 1268390 - RNA, 19 nt, Artificial Sequence
  Description of Artificial Sequence: Synthetic oligonucleotide
ugcugguuugcuggaagag

SEQ ID NO: 1268391 - RNA, 19 nt, Artificial Sequence
  Description of Artificial Sequence: Synthetic oligonucleotide
uuccauucgaggaguuuuc

SEQ ID NO: 1268392 - RNA, 19 nt, Artificial Sequence
  Description of Artificial Sequence: Synthetic oligonucleotide
  modified_base (8)..(8): a, c, u, g, unknown or other
guccaacnaugauaguuac

SEQ ID NO: 1268393 - RNA, 19 nt, Artificial Sequence
  Description of Artificial Sequence: Synthetic oligonucleotide
cuccguugcaccuguugcc

SEQ ID NO: 1268394 - RNA, 19 nt, Artificial Sequence
  Description of Artificial Sequence: Synthetic oligonucleotide
ucagaucguaacacggcuu

SEQ ID NO: 1268395 - RNA, 19 nt, Artificial Sequence
  Description of Artificial Sequence: Synthetic oligonucleotide
guugauaaguccauugggu

SEQ ID NO: 1268396 - RNA, 19 nt, Artificial Sequence
  Description of Artificial Sequence: Synthetic oligonucleotide
uuaccuguugcugcauaug

SEQ ID NO: 1268397 - RNA, 19 nt, Artificial Sequence
  Description of Artificial Sequence: Synthetic oligonucleotide
gugacugcgagcaucacaa

SEQ ID NO: 1268398 - RNA, 19 nt, Artificial Sequence
  Description of Artificial Sequence: Synthetic oligonucleotide
agucauaguaacaggcccu

SEQ ID NO: 1268399 - RNA, 19 nt, Artificial Sequence
  Description of Artificial Sequence: Synthetic oligonucleotide
caacgcuggaggcacuggg

SEQ ID NO: 1268400 - RNA, 19 nt, Artificial Sequence
  Description of Artificial Sequence: Synthetic oligonucleotide
uggcaacucagauggaaua

SEQ ID NO: 1268401 - RNA, 19 nt, Artificial Sequence
  Description of Artificial Sequence: Synthetic oligonucleotide
gaagcuccccuccauggga

SEQ ID NO: 1268402 - RNA, 19 nt, Artificial Sequence
  Description of Artificial Sequence: Synthetic oligonucleotide
gcuaggcugaucugugugg

SEQ ID NO: 1268403 - RNA, 19 nt, Artificial Sequence
  Description of Artificial Sequence: Synthetic oligonucleotide
guaacaggcccugcaaggc

SEQ ID NO: 1268404 - RNA, 19 nt, Artificial Sequence
  Description of Artificial Sequence: Synthetic oligonucleotide
auaagucucggcagaaagu

SEQ ID NO: 1268405 - RNA, 19 nt, Artificial Sequence
  Description of Artificial Sequence: Synthetic oligonucleotide
auaacugguuggaagguaa

SEQ ID NO: 1268406 - RNA, 19 nt, Artificial Sequence
  Description of Artificial Sequence: Synthetic oligonucleotide
ugaucuacacuuguaucuu

SEQ ID NO: 1268407 - RNA, 19 nt, Artificial Sequence
  Description of Artificial Sequence: Synthetic oligonucleotide
ucgaggaguuuuccugaug

SEQ ID NO: 1268408 - RNA, 19 nt, Artificial Sequence
  Description of Artificial Sequence: Synthetic oligonucleotide
ugggacuuuguguguagaa

SEQ ID NO: 1268409 - RNA, 19 nt, Artificial Sequence
  Description of Artificial Sequence: Synthetic oligonucleotide
uauucggauuggcuccaac

SEQ ID NO: 1268410 - RNA, 19 nt, Artificial Sequence
  Description of Artificial Sequence: Synthetic oligonucleotide
uaacugguuggaagguaaa

SEQ ID NO: 1268411 - RNA, 19 nt, Artificial Sequence
  Description of Artificial Sequence: Synthetic oligonucleotide
guaaacccacaggugcugg

SEQ ID NO: 1268412 - RNA, 19 nt, Artificial Sequence
  Description of Artificial Sequence: Synthetic oligonucleotide
gacuacugggacuuugugu

SEQ ID NO: 1268413 - RNA, 19 nt, Artificial Sequence
  Description of Artificial Sequence: Synthetic oligonucleotide
cugaacuuacugucuucug

SEQ ID NO: 1268414 - RNA, 19 nt, Artificial Sequence
  Description of Artificial Sequence: Synthetic oligonucleotide
acccaaguugauaauauuu

SEQ ID NO: 1268415 - RNA, 19 nt, Artificial Sequence
  Description of Artificial Sequence: Synthetic oligonucleotide
guguggggaacuuggauaa

SEQ ID NO: 1268416 - RNA, 19 nt, Artificial Sequence
  Description of Artificial Sequence: Synthetic oligonucleotide
uuuuaucuauuggcguuaa

SEQ ID NO: 1268417 - RNA, 19 nt, Artificial Sequence
  Description of Artificial Sequence: Synthetic oligonucleotide
gcucuuaagacgcuucuuc

SEQ ID NO: 1268418 - RNA, 19 nt, Artificial Sequence
  Description of Artificial Sequence: Synthetic oligonucleotide
ggauggacgcuagucauag

SEQ ID NO: 1268419 - RNA, 19 nt, Artificial Sequence
  Description of Artificial Sequence: Synthetic oligonucleotide
agaacccaaguugauaaua

SEQ ID NO: 1268420 - RNA, 19 nt, Artificial Sequence
  Description of Artificial Sequence: Synthetic oligonucleotide
gucauaguaacaggcccug

SEQ ID NO: 1268421 - RNA, 19 nt, Artificial Sequence
  Description of Artificial Sequence: Synthetic oligonucleotide
uccuuuuaucugaguugug

SEQ ID NO: 1268422 - RNA, 19 nt, Artificial Sequence
  Description of Artificial Sequence: Synthetic oligonucleotide
ggguuugguaaacccacag

SEQ ID NO: 1268423 - RNA, 19 nt, Artificial Sequence
  Description of Artificial Sequence: Synthetic oligonucleotide
cuuccggggcugcacaaag

SEQ ID NO: 1268424 - RNA, 19 nt, Artificial Sequence
  Description of Artificial Sequence: Synthetic oligonucleotide
guguuguuggucacaggag

SEQ ID NO: 1268425 - RNA, 19 nt, Artificial Sequence
  Description of Artificial Sequence: Synthetic oligonucleotide
uuuaucuauuggcguuaau

SEQ ID NO: 1268426 - RNA, 19 nt, Artificial Sequence
  Description of Artificial Sequence: Synthetic oligonucleotide
agcuuccucggcucccaac

SEQ ID NO: 1268427 - RNA, 19 nt, Artificial Sequence
  Description of Artificial Sequence: Synthetic oligonucleotide
acgacaggacucugcuuag

SEQ ID NO: 1268428 - RNA, 19 nt, Artificial Sequence
  Description of Artificial Sequence: Synthetic oligonucleotide
uucuccgcucgggaaauug

SEQ ID NO: 1268429 - RNA, 19 nt, Artificial Sequence
  Description of Artificial Sequence: Synthetic oligonucleotide
gacgcuagucauaguaaca

SEQ ID NO: 1268430 - RNA, 19 nt, Artificial Sequence
  Description of Artificial Sequence: Synthetic oligonucleotide
ggagcaucagaucguaaca

SEQ ID NO: 1268431 - RNA, 19 nt, Artificial Sequence
  Description of Artificial Sequence: Synthetic oligonucleotide
caugacuacugggacuuug

SEQ ID NO: 1268432 - RNA, 19 nt, Artificial Sequence
  Description of Artificial Sequence: Synthetic oligonucleotide
ggucuuagauaagucucgg

SEQ ID NO: 1268433 - RNA, 19 nt, Artificial Sequence
  Description of Artificial Sequence: Synthetic oligonucleotide
aacucagauggaauacuuu

SEQ ID NO: 1268434 - RNA, 19 nt, Artificial Sequence
  Description of Artificial Sequence: Synthetic oligonucleotide
gcucugauuaguguuuaag

SEQ ID NO: 1268435 - RNA, 19 nt, Artificial Sequence
  Description of Artificial Sequence: Synthetic oligonucleotide
uuccucggcucccaacgcu

SEQ ID NO: 1268436 - RNA, 19 nt, Artificial Sequence
  Description of Artificial Sequence: Synthetic oligonucleotide
cguuaauuuacuaaggccu

SEQ ID NO: 1268437 - RNA, 19 nt, Artificial Sequence
  Description of Artificial Sequence: Synthetic oligonucleotide
ggacgcuagucauaguaac

SEQ ID NO: 1268438 - RNA, 19 nt, Artificial Sequence
  Description of Artificial Sequence: Synthetic oligonucleotide
auuuugggcccagaaacua

SEQ ID NO: 1268439 - RNA, 19 nt, Artificial Sequence
  Description of Artificial Sequence: Synthetic oligonucleotide
ccaacaugacuacugggac

SEQ ID NO: 1268440 - RNA, 19 nt, Artificial Sequence
  Description of Artificial Sequence: Synthetic oligonucleotide
uccgcucgggaaauugguc

SEQ ID NO: 1268441 - RNA, 19 nt, Artificial Sequence
  Description of Artificial Sequence: Synthetic oligonucleotide
cuugccucuccgacaauca

SEQ ID NO: 1268442 - RNA, 19 nt, Artificial Sequence
  Description of Artificial Sequence: Synthetic oligonucleotide
cucgggaaauuggucaaug

SEQ ID NO: 1268443 - RNA, 19 nt, Artificial Sequence
  Description of Artificial Sequence: Synthetic oligonucleotide
gauaaguccauuggguuuu

SEQ ID NO: 1268444 - RNA, 19 nt, Artificial Sequence
  Description of Artificial Sequence: Synthetic oligonucleotide
ugcuccacgacaggacucu

SEQ ID NO: 1268445 - RNA, 19 nt, Artificial Sequence
  Description of Artificial Sequence: Synthetic oligonucleotide
augcaauaauccuccugaa

SEQ ID NO: 1268446 - RNA, 19 nt, Artificial Sequence
  Description of Artificial Sequence: Synthetic oligonucleotide
gcuuagguauuuguggcug

SEQ ID NO: 1268447 - RNA, 19 nt, Artificial Sequence
  Description of Artificial Sequence: Synthetic oligonucleotide
uacaugcaauaauccuccu

SEQ ID NO: 1268448 - RNA, 19 nt, Artificial Sequence
  Description of Artificial Sequence: Synthetic oligonucleotide
cauucugggguuugguaaa

SEQ ID NO: 1268449 - RNA, 19 nt, Artificial Sequence
  Description of Artificial Sequence: Synthetic oligonucleotide
aacgcuggaggcacugggu

SEQ ID NO: 1268450 - RNA, 19 nt, Artificial Sequence
  Description of Artificial Sequence: Synthetic oligonucleotide
  modified_base (11)..(11): a, c, u, g, unknown or other
auuguccaacnaugauagu

SEQ ID NO: 1268451 - RNA, 19 nt, Artificial Sequence
  Description of Artificial Sequence: Synthetic oligonucleotide
uucgaggaguuuuccugau

SEQ ID NO: 1268452 - RNA, 19 nt, Artificial Sequence
  Description of Artificial Sequence: Synthetic oligonucleotide
agaagcagacguucacauu

SEQ ID NO: 1268453 - RNA, 19 nt, Artificial Sequence
  Description of Artificial Sequence: Synthetic oligonucleotide
uagguauuuguggcuggcu

SEQ ID NO: 1268454 - RNA, 19 nt, Artificial Sequence
  Description of Artificial Sequence: Synthetic oligonucleotide
gugaaacuggaugguguug

SEQ ID NO: 1268455 - RNA, 19 nt, Artificial Sequence
  Description of Artificial Sequence: Synthetic oligonucleotide
cacucgggcuuuccauucg

SEQ ID NO: 1268456 - RNA, 19 nt, Artificial Sequence
  Description of Artificial Sequence: Synthetic oligonucleotide
augacuacugggacuuugu

SEQ ID NO: 1268457 - RNA, 19 nt, Artificial Sequence
  Description of Artificial Sequence: Synthetic oligonucleotide
uguggcuggcucucuuuau

SEQ ID NO: 1268458 - RNA, 19 nt, Artificial Sequence
  Description of Artificial Sequence: Synthetic oligonucleotide
gccucuccgacaaucacag

SEQ ID NO: 1268459 - RNA, 19 nt, Artificial Sequence
  Description of Artificial Sequence: Synthetic oligonucleotide
cguaacacggcuuccucag

SEQ ID NO: 1268460 - RNA, 19 nt, Artificial Sequence
  Description of Artificial Sequence: Synthetic oligonucleotide
cuuccucggcucccaacgc

SEQ ID NO: 1268461 - RNA, 19 nt, Artificial Sequence
  Description of Artificial Sequence: Synthetic oligonucleotide
cucgggcuuuccauucgag

SEQ ID NO: 1268462 - RNA, 19 nt, Artificial Sequence
  Description of Artificial Sequence: Synthetic oligonucleotide
uacuaaggccuucgauuuu

SEQ ID NO: 1268463 - RNA, 19 nt, Artificial Sequence
  Description of Artificial Sequence: Synthetic oligonucleotide
auucuaguuuugggaaccu

SEQ ID NO: 1268464 - RNA, 19 nt, Artificial Sequence
  Description of Artificial Sequence: Synthetic oligonucleotide
acucgggcuuuccauucga

SEQ ID NO: 1268465 - RNA, 19 nt, Artificial Sequence
  Description of Artificial Sequence: Synthetic oligonucleotide
cuuccuugccucuccgaca

SEQ ID NO: 1268466 - RNA, 19 nt, Artificial Sequence
  Description of Artificial Sequence: Synthetic oligonucleotide
gacgcuucuuccggggcug

SEQ ID NO: 1268467 - RNA, 19 nt, Artificial Sequence
  Description of Artificial Sequence: Synthetic oligonucleotide
gagucguaacugagcuagg

SEQ ID NO: 1268468 - RNA, 19 nt, Artificial Sequence
  Description of Artificial Sequence: Synthetic oligonucleotide
ccuccguugcaccuguugc

SEQ ID NO: 1268469 - RNA, 19 nt, Artificial Sequence
  Description of Artificial Sequence: Synthetic oligonucleotide
ggcaacucagauggaauac

SEQ ID NO: 1268470 - RNA, 19 nt, Artificial Sequence
  Description of Artificial Sequence: Synthetic oligonucleotide
cuuuuaucuauuggcguua

SEQ ID NO: 1268471 - RNA, 19 nt, Artificial Sequence
  Description of Artificial Sequence: Synthetic oligonucleotide
auaauccuccugaagucuu

SEQ ID NO: 1268472 - RNA, 19 nt, Artificial Sequence
  Description of Artificial Sequence: Synthetic oligonucleotide
ggucuagauucuucaucug

SEQ ID NO: 1268473 - RNA, 19 nt, Artificial Sequence
  Description of Artificial Sequence: Synthetic oligonucleotide
ugcgagcaucacaaucaua

SEQ ID NO: 1268474 - RNA, 19 nt, Artificial Sequence
  Description of Artificial Sequence: Synthetic oligonucleotide
agauaagucucggcagaaa

SEQ ID NO: 1268475 - RNA, 19 nt, Artificial Sequence
  Description of Artificial Sequence: Synthetic oligonucleotide
cgggaaauuggucaaugug

SEQ ID NO: 1268476 - RNA, 19 nt, Artificial Sequence
  Description of Artificial Sequence: Synthetic oligonucleotide
gguauuuguggcuggcucu

SEQ ID NO: 1268477 - RNA, 19 nt, Artificial Sequence
  Description of Artificial Sequence: Synthetic oligonucleotide
ccuugcaauauuguccaac

SEQ ID NO: 1268478 - RNA, 19 nt, Artificial Sequence
  Description of Artificial Sequence: Synthetic oligonucleotide
ccuuuuaucugaguuguga

SEQ ID NO: 1268479 - RNA, 19 nt, Artificial Sequence
  Description of Artificial Sequence: Synthetic oligonucleotide
gcgagcaucacaaucauau

SEQ ID NO: 1268480 - RNA, 19 nt, Artificial Sequence
  Description of Artificial Sequence: Synthetic oligonucleotide
cuauuggcguuaauuuacu

SEQ ID NO: 1268481 - RNA, 19 nt, Artificial Sequence
  Description of Artificial Sequence: Synthetic oligonucleotide
gguaaacccacaggugcug

SEQ ID NO: 1268482 - RNA, 19 nt, Artificial Sequence
  Description of Artificial Sequence: Synthetic oligonucleotide
cuaguuuugggaaccuuuu

SEQ ID NO: 1268483 - RNA, 19 nt, Artificial Sequence
  Description of Artificial Sequence: Synthetic oligonucleotide
ugcauaugcuggagucgua

SEQ ID NO: 1268484 - RNA, 19 nt, Artificial Sequence
  Description of Artificial Sequence: Synthetic oligonucleotide
gugggcacguggcaacuca

SEQ ID NO: 1268485 - RNA, 19 nt, Artificial Sequence
  Description of Artificial Sequence: Synthetic oligonucleotide
gcuggagucguaacugagc

SEQ ID NO: 1268486 - RNA, 19 nt, Artificial Sequence
  Description of Artificial Sequence: Synthetic oligonucleotide
uucuaguuuugggaaccuu

SEQ ID NO: 1268487 - RNA, 19 nt, Artificial Sequence
  Description of Artificial Sequence: Synthetic oligonucleotide
aacuaggaucacagugaaa

SEQ ID NO: 1268488 - RNA, 19 nt, Artificial Sequence
  Description of Artificial Sequence: Synthetic oligonucleotide
gcucucuuuauccucgaua

SEQ ID NO: 1268489 - RNA, 19 nt, Artificial Sequence
  Description of Artificial Sequence: Synthetic oligonucleotide
ggcauccugccacucgggc

SEQ ID NO: 1268490 - RNA, 19 nt, Artificial Sequence
  Description of Artificial Sequence: Synthetic oligonucleotide
cuccgacaaucacagggga

SEQ ID NO: 1268491 - RNA, 19 nt, Artificial Sequence
  Description of Artificial Sequence: Synthetic oligonucleotide
uguggggaacuuggauaac

SEQ ID NO: 1268492 - RNA, 19 nt, Artificial Sequence
  Description of Artificial Sequence: Synthetic oligonucleotide
  modified_base (6)..(6): a, c, u, g, unknown or other
ccaacnaugauaguuacuu

SEQ ID NO: 1268493 - RNA, 19 nt, Artificial Sequence
  Description of Artificial Sequence: Synthetic oligonucleotide
cggauuggcuccaacauga

SEQ ID NO: 1268494 - RNA, 19 nt, Artificial Sequence
  Description of Artificial Sequence: Synthetic oligonucleotide
cuguuugauggaggucuug

SEQ ID NO: 1268495 - RNA, 19 nt, Artificial Sequence
  Description of Artificial Sequence: Synthetic oligonucleotide
ugggaucguccuccuuccu

SEQ ID NO: 1268496 - RNA, 19 nt, Artificial Sequence
  Description of Artificial Sequence: Synthetic oligonucleotide
cgaggaguuuuccugauga

SEQ ID NO: 1268497 - RNA, 19 nt, Artificial Sequence
  Description of Artificial Sequence: Synthetic oligonucleotide
cuuggauaacugguuggaa

SEQ ID NO: 1268498 - RNA, 19 nt, Artificial Sequence
  Description of Artificial Sequence: Synthetic oligonucleotide
guaacacggcuuccucaga

SEQ ID NO: 1268499 - RNA, 19 nt, Artificial Sequence
  Description of Artificial Sequence: Synthetic oligonucleotide
gaucuacacuuguaucuuu

SEQ ID NO: 1268500 - RNA, 19 nt, Artificial Sequence
  Description of Artificial Sequence: Synthetic oligonucleotide
aucugaguugugacugcga

SEQ ID NO: 1268501 - RNA, 19 nt, Artificial Sequence
  Description of Artificial Sequence: Synthetic oligonucleotide
gguucauuccugaauucua

SEQ ID NO: 1268502 - RNA, 19 nt, Artificial Sequence
  Description of Artificial Sequence: Synthetic oligonucleotide
augggcccuugcauucugg

SEQ ID NO: 1268503 - RNA, 19 nt, Artificial Sequence
  Description of Artificial Sequence: Synthetic oligonucleotide
guuugcuggaagagccaga

SEQ ID NO: 1268504 - RNA, 19 nt, Artificial Sequence
  Description of Artificial Sequence: Synthetic oligonucleotide
guggggaacuuggauaacu

SEQ ID NO: 1268505 - RNA, 19 nt, Artificial Sequence
  Description of Artificial Sequence: Synthetic oligonucleotide
aguaugcuucuuggauagu

SEQ ID NO: 1268506 - RNA, 19 nt, Artificial Sequence
  Description of Artificial Sequence: Synthetic oligonucleotide
caccguucuguuugaugga

SEQ ID NO: 1268507 - RNA, 19 nt, Artificial Sequence
  Description of Artificial Sequence: Synthetic oligonucleotide
cugagcuaggcugaucugu

SEQ ID NO: 1268508 - RNA, 19 nt, Artificial Sequence
  Description of Artificial Sequence: Synthetic oligonucleotide
ugacugcgagcaucacaau

SEQ ID NO: 1268509 - RNA, 19 nt, Artificial Sequence
  Description of Artificial Sequence: Synthetic oligonucleotide
aggcacaguuagaggaaca

SEQ ID NO: 1268510 - RNA, 19 nt, Artificial Sequence
  Description of Artificial Sequence: Synthetic oligonucleotide
cagguugaucuccugugcu

SEQ ID NO: 1268511 - RNA, 19 nt, Artificial Sequence
  Description of Artificial Sequence: Synthetic oligonucleotide
uuauucggauuggcuccaa

SEQ ID NO: 1268512 - RNA, 19 nt, Artificial Sequence
  Description of Artificial Sequence: Synthetic oligonucleotide
acgcuucuuccggggcugc

SEQ ID NO: 1268513 - RNA, 19 nt, Artificial Sequence
  Description of Artificial Sequence: Synthetic oligonucleotide
ugugggcacguggcaacuc

SEQ ID NO: 1268514 - RNA, 19 nt, Artificial Sequence
  Description of Artificial Sequence: Synthetic oligonucleotide
cgggcuuuccauucgagga

SEQ ID NO: 1268515 - RNA, 19 nt, Artificial Sequence
  Description of Artificial Sequence: Synthetic oligonucleotide
ccaggcucauuucauggca

SEQ ID NO: 1268516 - RNA, 19 nt, Artificial Sequence
  Description of Artificial Sequence: Synthetic oligonucleotide
gccuccguugcaccuguug

SEQ ID NO: 1268517 - RNA, 19 nt, Artificial Sequence
  Description of Artificial Sequence: Synthetic oligonucleotide
cugcauaugcuggagucgu

SEQ ID NO: 1268518 - RNA, 19 nt, Artificial Sequence
  Description of Artificial Sequence: Synthetic oligonucleotide
cuugaacgcuggugagaga

SEQ ID NO: 1268519 - RNA, 19 nt, Artificial Sequence
  Description of Artificial Sequence: Synthetic oligonucleotide
augugggcacguggcaacu

SEQ ID NO: 1268520 - RNA, 19 nt, Artificial Sequence
  Description of Artificial Sequence: Synthetic oligonucleotide
cguaaguaugcuucuugga

SEQ ID NO: 1268521 - RNA, 19 nt, Artificial Sequence
  Description of Artificial Sequence: Synthetic oligonucleotide
cuggccuccguugcaccug

SEQ ID NO: 1268522 - RNA, 19 nt, Artificial Sequence
  Description of Artificial Sequence: Synthetic oligonucleotide
gagcuaggcugaucugugu

SEQ ID NO: 1268523 - RNA, 19 nt, Artificial Sequence
  Description of Artificial Sequence: Synthetic oligonucleotide
ggaucacagugaaacugga

SEQ ID NO: 1268524 - RNA, 19 nt, Artificial Sequence
  Description of Artificial Sequence: Synthetic oligonucleotide
ccgcucgggaaauugguca

SEQ ID NO: 1268525 - RNA, 19 nt, Artificial Sequence
  Description of Artificial Sequence: Synthetic oligonucleotide
caaagaagcuccccuccau

SEQ ID NO: 1268526 - RNA, 19 nt, Artificial Sequence
  Description of Artificial Sequence: Synthetic oligonucleotide
cgauaacuaaagaacccaa

SEQ ID NO: 1268527 - RNA, 19 nt, Artificial Sequence
  Description of Artificial Sequence: Synthetic oligonucleotide
gagggacguaaguaugcuu

SEQ ID NO: 1268528 - RNA, 19 nt, Artificial Sequence
  Description of Artificial Sequence: Synthetic oligonucleotide
guuagaggaacagggucuu

SEQ ID NO: 1268529 - RNA, 19 nt, Artificial Sequence
  Description of Artificial Sequence: Synthetic oligonucleotide
ccuugccucuccgacaauc

SEQ ID NO: 1268530 - RNA, 19 nt, Artificial Sequence
  Description of Artificial Sequence: Synthetic oligonucleotide
aggacucugcuuagguauu

SEQ ID NO: 1268531 - RNA, 19 nt, Artificial Sequence
  Description of Artificial Sequence: Synthetic oligonucleotide
guuuaagaggagggacgua

SEQ ID NO: 1268532 - RNA, 19 nt, Artificial Sequence
  Description of Artificial Sequence: Synthetic oligonucleotide
cuccgcucgggaaauuggu

SEQ ID NO: 1268533 - RNA, 19 nt, Artificial Sequence
  Description of Artificial Sequence: Synthetic oligonucleotide
gggacguaaguaugcuucu

SEQ ID NO: 1268534 - RNA, 19 nt, Artificial Sequence
  Description of Artificial Sequence: Synthetic oligonucleotide
gcugaucuguguggggaac

SEQ ID NO: 1268535 - RNA, 19 nt, Artificial Sequence
  Description of Artificial Sequence: Synthetic oligonucleotide
ccaugaucuacacuuguau

SEQ ID NO: 1268536 - RNA, 19 nt, Artificial Sequence
  Description of Artificial Sequence: Synthetic oligonucleotide
ggucuuggaaagccaggcu

SEQ ID NO: 1268537 - RNA, 19 nt, Artificial Sequence
  Description of Artificial Sequence: Synthetic oligonucleotide
gcaacucagauggaauacu

SEQ ID NO: 1268538 - RNA, 19 nt, Artificial Sequence
  Description of Artificial Sequence: Synthetic oligonucleotide
ggggauggacgcuagucau

SEQ ID NO: 1268539 - RNA, 19 nt, Artificial Sequence
  Description of Artificial Sequence: Synthetic oligonucleotide
cugccacucgggcuuucca

SEQ ID NO: 1268540 - RNA, 19 nt, Artificial Sequence
  Description of Artificial Sequence: Synthetic oligonucleotide
cuacugggacuuugugugu

SEQ ID NO: 1268541 - RNA, 19 nt, Artificial Sequence
  Description of Artificial Sequence: Synthetic oligonucleotide
ggcugaucuguguggggaa

SEQ ID NO: 1268542 - RNA, 19 nt, Artificial Sequence
  Description of Artificial Sequence: Synthetic oligonucleotide
ggccaugaucuacacuugu

SEQ ID NO: 1268543 - RNA, 19 nt, Artificial Sequence
  Description of Artificial Sequence: Synthetic oligonucleotide
ggcacguggcaacucagau

SEQ ID NO: 1268544 - RNA, 19 nt, Artificial Sequence
  Description of Artificial Sequence: Synthetic oligonucleotide
gggacuuuguguguagaau

SEQ ID NO: 1268545 - RNA, 19 nt, Artificial Sequence
  Description of Artificial Sequence: Synthetic oligonucleotide
ggauuggcuccaacaugac

SEQ ID NO: 1268546 - RNA, 19 nt, Artificial Sequence
  Description of Artificial Sequence: Synthetic oligonucleotide
ccgacaaucacaggggacu

SEQ ID NO: 1268547 - RNA, 19 nt, Artificial Sequence
  Description of Artificial Sequence: Synthetic oligonucleotide
gcauccugccacucgggcu

SEQ ID NO: 1268548 - RNA, 19 nt, Artificial Sequence
  Description of Artificial Sequence: Synthetic oligonucleotide
gccaugaucuacacuugua

SEQ ID NO: 1268549 - RNA, 19 nt, Artificial Sequence
  Description of Artificial Sequence: Synthetic oligonucleotide
ccaacgcuggaggcacugg

SEQ ID NO: 1268550 - RNA, 19 nt, Artificial Sequence
  Description of Artificial Sequence: Synthetic oligonucleotide
ccuucgauuuuccuuuuau

SEQ ID NO: 1268551 - RNA, 19 nt, Artificial Sequence
  Description of Artificial Sequence: Synthetic oligonucleotide
cucggcucccaacgcugga

SEQ ID NO: 1268552 - RNA, 19 nt, Artificial Sequence
  Description of Artificial Sequence: Synthetic oligonucleotide
ggagggacguaaguaugcu

SEQ ID NO: 1268553 - RNA, 19 nt, Artificial Sequence
  Description of Artificial Sequence: Synthetic oligonucleotide
cugcgagcaucacaaucau

SEQ ID NO: 1268554 - RNA, 19 nt, Artificial Sequence
  Description of Artificial Sequence: Synthetic oligonucleotide
gagcuuccucggcucccaa

SEQ ID NO: 1268555 - RNA, 19 nt, Artificial Sequence
  Description of Artificial Sequence: Synthetic oligonucleotide
gggaucguccuccuuccuu

SEQ ID NO: 1268556 - RNA, 19 nt, Artificial Sequence
  Description of Artificial Sequence: Synthetic oligonucleotide
cgacaggacucugcuuagg

SEQ ID NO: 1268557 - RNA, 19 nt, Artificial Sequence
  Description of Artificial Sequence: Synthetic oligonucleotide
gggauggacgcuagucaua

SEQ ID NO: 1268558 - RNA, 19 nt, Artificial Sequence
  Description of Artificial Sequence: Synthetic oligonucleotide
ccguugcaccuguugccuc

SEQ ID NO: 1268559 - RNA, 19 nt, Artificial Sequence
  Description of Artificial Sequence: Synthetic oligonucleotide
gcuggccuccguugcaccu

SEQ ID NO: 1268560 - RNA, 19 nt, Artificial Sequence
  Description of Artificial Sequence: Synthetic oligonucleotide
acguggcaacucagaugga

SEQ ID NO: 1268561 - RNA, 19 nt, Artificial Sequence
  Description of Artificial Sequence: Synthetic oligonucleotide
gccuucgauuuuccuuuua

SEQ ID NO: 1268562 - RNA, 19 nt, Artificial Sequence
  Description of Artificial Sequence: Synthetic oligonucleotide
ggacguaaguaugcuucuu

SEQ ID NO: 1268563 - RNA, 19 nt, Artificial Sequence
  Description of Artificial Sequence: Synthetic oligonucleotide
gcccuugcauucugggguu

SEQ ID NO: 1268564 - RNA, 19 nt, Artificial Sequence
  Description of Artificial Sequence: Synthetic oligonucleotide
cuccccuccaugggaucgu

SEQ ID NO: 1268565 - RNA, 19 nt, Artificial Sequence
  Description of Artificial Sequence: Synthetic oligonucleotide
gcucgggaaauuggucaau

SEQ ID NO: 1268566 - RNA, 19 nt, Artificial Sequence
  Description of Artificial Sequence: Synthetic oligonucleotide
cgacaaucacaggggacuu

SEQ ID NO: 1268567 - RNA, 19 nt, Artificial Sequence
  Description of Artificial Sequence: Synthetic oligonucleotide
cccuugcauucugggguuu

SEQ ID NO: 1268568 - RNA, 19 nt, Artificial Sequence
  Description of Artificial Sequence: Synthetic oligonucleotide
ggccuccguugcaccuguu

SEQ ID NO: 1268569 - RNA, 19 nt, Artificial Sequence
  Description of Artificial Sequence: Synthetic oligonucleotide
aaucauuucgcauuggggu

SEQ ID NO: 1268570 - RNA, 19 nt, Artificial Sequence
  Description of Artificial Sequence: Synthetic oligonucleotide
aacaagagcgaucagggag

SEQ ID NO: 1268571 - RNA, 19 nt, Artificial Sequence
  Description of Artificial Sequence: Synthetic oligonucleotide
aaaguauaguugaacagcc

SEQ ID NO: 1268572 - RNA, 19 nt, Artificial Sequence
  Description of Artificial Sequence: Synthetic oligonucleotide
aagggaugaccacacaucc

SEQ ID NO: 1268573 - RNA, 19 nt, Artificial Sequence
  Description of Artificial Sequence: Synthetic oligonucleotide
ucagcugucgccauuaucc

SEQ ID NO: 1268574 - RNA, 19 nt, Artificial Sequence
  Description of Artificial Sequence: Synthetic oligonucleotide
uuguauaacccaaauaucu

SEQ ID NO: 1268575 - RNA, 19 nt, Artificial Sequence
  Description of Artificial Sequence: Synthetic oligonucleotide
aauauagaggaccauuugu

SEQ ID NO: 1268576 - RNA, 19 nt, Artificial Sequence
  Description of Artificial Sequence: Synthetic oligonucleotide
guggguaaaauuuauaccc

SEQ ID NO: 1268577 - RNA, 19 nt, Artificial Sequence
  Description of Artificial Sequence: Synthetic oligonucleotide
ucaacaguaaacugaauug

SEQ ID NO: 1268578 - RNA, 19 nt, Artificial Sequence
  Description of Artificial Sequence: Synthetic oligonucleotide
uguuaagaaugcuugcucg

SEQ ID NO: 1268579 - RNA, 19 nt, Artificial Sequence
  Description of Artificial Sequence: Synthetic oligonucleotide
aaugaaagcagucucccca

SEQ ID NO: 1268580 - RNA, 19 nt, Artificial Sequence
  Description of Artificial Sequence: Synthetic oligonucleotide
uauccauguguuaagaaug

SEQ ID NO: 1268581 - RNA, 19 nt, Artificial Sequence
  Description of Artificial Sequence: Synthetic oligonucleotide
uugucuuacccucauagag

SEQ ID NO: 1268582 - RNA, 19 nt, Artificial Sequence
  Description of Artificial Sequence: Synthetic oligonucleotide
uauaacaaguccagcaaag

SEQ ID NO: 1268583 - RNA, 19 nt, Artificial Sequence
  Description of Artificial Sequence: Synthetic oligonucleotide
aguauuaccagacaucacu

SEQ ID NO: 1268584 - RNA, 19 nt, Artificial Sequence
  Description of Artificial Sequence: Synthetic oligonucleotide
aaauacaguagguaugcca

SEQ ID NO: 1268585 - RNA, 19 nt, Artificial Sequence
  Description of Artificial Sequence: Synthetic oligonucleotide
aaauuuauacccuuccuuu

SEQ ID NO: 1268586 - RNA, 19 nt, Artificial Sequence
  Description of Artificial Sequence: Synthetic oligonucleotide
aaaauuuauacccuuccuu

SEQ ID NO: 1268587 - RNA, 19 nt, Artificial Sequence
  Description of Artificial Sequence: Synthetic oligonucleotide
uauaacccaaauaucugag

SEQ ID NO: 1268588 - RNA, 19 nt, Artificial Sequence
  Description of Artificial Sequence: Synthetic oligonucleotide
uguauaacccaaauaucug

SEQ ID NO: 1268589 - RNA, 19 nt, Artificial Sequence
  Description of Artificial Sequence: Synthetic oligonucleotide
auuaccagacaucacuggg

SEQ ID NO: 1268590 - RNA, 19 nt, Artificial Sequence
  Description of Artificial Sequence: Synthetic oligonucleotide
uuaaagauauccauguguu

SEQ ID NO: 1268591 - RNA, 19 nt, Artificial Sequence
  Description of Artificial Sequence: Synthetic oligonucleotide
aguuuugauaccggcaucc

SEQ ID NO: 1268592 - RNA, 19 nt, Artificial Sequence
  Description of Artificial Sequence: Synthetic oligonucleotide
uguucaguaccucagcugu

SEQ ID NO: 1268593 - RNA, 19 nt, Artificial Sequence
  Description of Artificial Sequence: Synthetic oligonucleotide
uccucaaaguuucauccgg

SEQ ID NO: 1268594 - RNA, 19 nt, Artificial Sequence
  Description of Artificial Sequence: Synthetic oligonucleotide
cuuuaauccucaaaguuuc

SEQ ID NO: 1268595 - RNA, 19 nt, Artificial Sequence
  Description of Artificial Sequence: Synthetic oligonucleotide
agcacuacaacccugcacu

SEQ ID NO: 1268596 - RNA, 19 nt, Artificial Sequence
  Description of Artificial Sequence: Synthetic oligonucleotide
ucaaaguuucauccggucc

SEQ ID NO: 1268597 - RNA, 19 nt, Artificial Sequence
  Description of Artificial Sequence: Synthetic oligonucleotide
uuugccuuccauaugguuc

SEQ ID NO: 1268598 - RNA, 19 nt, Artificial Sequence
  Description of Artificial Sequence: Synthetic oligonucleotide
aagauauccauguguuaag

SEQ ID NO: 1268599 - RNA, 19 nt, Artificial Sequence
  Description of Artificial Sequence: Synthetic oligonucleotide
auucaauuggaaucauuuc

SEQ ID NO: 1268600 - RNA, 19 nt, Artificial Sequence
  Description of Artificial Sequence: Synthetic oligonucleotide
cugauaaccggauaugcag

SEQ ID NO: 1268601 - RNA, 19 nt, Artificial Sequence
  Description of Artificial Sequence: Synthetic oligonucleotide
acuacaacccugcacugac

SEQ ID NO: 1268602 - RNA, 19 nt, Artificial Sequence
  Description of Artificial Sequence: Synthetic oligonucleotide
ucucccaauguucaguacc

SEQ ID NO: 1268603 - RNA, 19 nt, Artificial Sequence
  Description of Artificial Sequence: Synthetic oligonucleotide
aguugaacagccaagacca

SEQ ID NO: 1268604 - RNA, 19 nt, Artificial Sequence
  Description of Artificial Sequence: Synthetic oligonucleotide
aagaaugcuugcucgaagu

SEQ ID NO: 1268605 - RNA, 19 nt, Artificial Sequence
  Description of Artificial Sequence: Synthetic oligonucleotide
ucgccauuaucccuggugg

SEQ ID NO: 1268606 - RNA, 19 nt, Artificial Sequence
  Description of Artificial Sequence: Synthetic oligonucleotide
ucgaaguucacauggaauc

SEQ ID NO: 1268607 - RNA, 19 nt, Artificial Sequence
  Description of Artificial Sequence: Synthetic oligonucleotide
aguuauuuccuugagguca

SEQ ID NO: 1268608 - RNA, 19 nt, Artificial Sequence
  Description of Artificial Sequence: Synthetic oligonucleotide
uuguuauauacugagauuu

SEQ ID NO: 1268609 - RNA, 19 nt, Artificial Sequence
  Description of Artificial Sequence: Synthetic oligonucleotide
uauuaccagacaucacugg

SEQ ID NO: 1268610 - RNA, 19 nt, Artificial Sequence
  Description of Artificial Sequence: Synthetic oligonucleotide
aauacaguagguaugccau

SEQ ID NO: 1268611 - RNA, 19 nt, Artificial Sequence
  Description of Artificial Sequence: Synthetic oligonucleotide
uguuacucgaaguucacau

SEQ ID NO: 1268612 - RNA, 19 nt, Artificial Sequence
  Description of Artificial Sequence: Synthetic oligonucleotide
auuggaaucauuucgcauu

SEQ ID NO: 1268613 - RNA, 19 nt, Artificial Sequence
  Description of Artificial Sequence: Synthetic oligonucleotide
auaacaaguccagcaaagc

SEQ ID NO: 1268614 - RNA, 19 nt, Artificial Sequence
  Description of Artificial Sequence: Synthetic oligonucleotide
gauaccggcauccuguaac

SEQ ID NO: 1268615 - RNA, 19 nt, Artificial Sequence
  Description of Artificial Sequence: Synthetic oligonucleotide
auacccuuccuuuacacca

SEQ ID NO: 1268616 - RNA, 19 nt, Artificial Sequence
  Description of Artificial Sequence: Synthetic oligonucleotide
auaguugaacagccaagac

SEQ ID NO: 1268617 - RNA, 19 nt, Artificial Sequence
  Description of Artificial Sequence: Synthetic oligonucleotide
aauuggaaucauuucgcau

SEQ ID NO: 1268618 - RNA, 19 nt, Artificial Sequence
  Description of Artificial Sequence: Synthetic oligonucleotide
aaguggaacccaucagcac

SEQ ID NO: 1268619 - RNA, 19 nt, Artificial Sequence
  Description of Artificial Sequence: Synthetic oligonucleotide
uaagaaugcuugcucgaag

SEQ ID NO: 1268620 - RNA, 19 nt, Artificial Sequence
  Description of Artificial Sequence: Synthetic oligonucleotide
cauggaaucccgaaguuuc

SEQ ID NO: 1268621 - RNA, 19 nt, Artificial Sequence
  Description of Artificial Sequence: Synthetic oligonucleotide
uuaccagacaucacugggc

SEQ ID NO: 1268622 - RNA, 19 nt, Artificial Sequence
  Description of Artificial Sequence: Synthetic oligonucleotide
uccauaugguucuuucuag

SEQ ID NO: 1268623 - RNA, 19 nt, Artificial Sequence
  Description of Artificial Sequence: Synthetic oligonucleotide
gacaacuuuugucaacccc

SEQ ID NO: 1268624 - RNA, 19 nt, Artificial Sequence
  Description of Artificial Sequence: Synthetic oligonucleotide
uuggaaucauuucgcauug

SEQ ID NO: 1268625 - RNA, 19 nt, Artificial Sequence
  Description of Artificial Sequence: Synthetic oligonucleotide
uauucuucggcacacccau

SEQ ID NO: 1268626 - RNA, 19 nt, Artificial Sequence
  Description of Artificial Sequence: Synthetic oligonucleotide
aauaucugagcagcaaacu

SEQ ID NO: 1268627 - RNA, 19 nt, Artificial Sequence
  Description of Artificial Sequence: Synthetic oligonucleotide
ugucuuacccucauagagu

SEQ ID NO: 1268628 - RNA, 19 nt, Artificial Sequence
  Description of Artificial Sequence: Synthetic oligonucleotide
agugaccaaggucagaagu

SEQ ID NO: 1268629 - RNA, 19 nt, Artificial Sequence
  Description of Artificial Sequence: Synthetic oligonucleotide
gucacgguaagacuguuug

SEQ ID NO: 1268630 - RNA, 19 nt, Artificial Sequence
  Description of Artificial Sequence: Synthetic oligonucleotide
aucugcaacccacucaaag

SEQ ID NO: 1268631 - RNA, 19 nt, Artificial Sequence
  Description of Artificial Sequence: Synthetic oligonucleotide
cauuggggugcaaugaaag

SEQ ID NO: 1268632 - RNA, 19 nt, Artificial Sequence
  Description of Artificial Sequence: Synthetic oligonucleotide
uuagcggugcaggaaaggg

SEQ ID NO: 1268633 - RNA, 19 nt, Artificial Sequence
  Description of Artificial Sequence: Synthetic oligonucleotide
uauauacugagauuuuauu

SEQ ID NO: 1268634 - RNA, 19 nt, Artificial Sequence
  Description of Artificial Sequence: Synthetic oligonucleotide
uaauuuucucacagugacc

SEQ ID NO: 1268635 - RNA, 19 nt, Artificial Sequence
  Description of Artificial Sequence: Synthetic oligonucleotide
uuuauacccuuccuuuaca

SEQ ID NO: 1268636 - RNA, 19 nt, Artificial Sequence
  Description of Artificial Sequence: Synthetic oligonucleotide
aggaccauuuguucaacag

SEQ ID NO: 1268637 - RNA, 19 nt, Artificial Sequence
  Description of Artificial Sequence: Synthetic oligonucleotide
cauaucaaccaguguacag

SEQ ID NO: 1268638 - RNA, 19 nt, Artificial Sequence
  Description of Artificial Sequence: Synthetic oligonucleotide
uucaguaccucagcugucg

SEQ ID NO: 1268639 - RNA, 19 nt, Artificial Sequence
  Description of Artificial Sequence: Synthetic oligonucleotide
ugaccaaggucagaagugg

SEQ ID NO: 1268640 - RNA, 19 nt, Artificial Sequence
  Description of Artificial Sequence: Synthetic oligonucleotide
uguguuaagaaugcuugcu

SEQ ID NO: 1268641 - RNA, 19 nt, Artificial Sequence
  Description of Artificial Sequence: Synthetic oligonucleotide
uggguaaaauuuauacccu

SEQ ID NO: 1268642 - RNA, 19 nt, Artificial Sequence
  Description of Artificial Sequence: Synthetic oligonucleotide
uaugcaguauuaccagaca

SEQ ID NO: 1268643 - RNA, 19 nt, Artificial Sequence
  Description of Artificial Sequence: Synthetic oligonucleotide
ugcaguauuaccagacauc

SEQ ID NO: 1268644 - RNA, 19 nt, Artificial Sequence
  Description of Artificial Sequence: Synthetic oligonucleotide
ucuggccuauaacaagucc

SEQ ID NO: 1268645 - RNA, 19 nt, Artificial Sequence
  Description of Artificial Sequence: Synthetic oligonucleotide
cacccauucaauuggaauc

SEQ ID NO: 1268646 - RNA, 19 nt, Artificial Sequence
  Description of Artificial Sequence: Synthetic oligonucleotide
uuccauaugguucuuucua

SEQ ID NO: 1268647 - RNA, 19 nt, Artificial Sequence
  Description of Artificial Sequence: Synthetic oligonucleotide
acagcugauaaccggauau

SEQ ID NO: 1268648 - RNA, 19 nt, Artificial Sequence
  Description of Artificial Sequence: Synthetic oligonucleotide
uucaaacuaggaaugugua

SEQ ID NO: 1268649 - RNA, 19 nt, Artificial Sequence
  Description of Artificial Sequence: Synthetic oligonucleotide
auaucaaccaguguacagu

SEQ ID NO: 1268650 - RNA, 19 nt, Artificial Sequence
  Description of Artificial Sequence: Synthetic oligonucleotide
gguggguaaaauuuauacc

SEQ ID NO: 1268651 - RNA, 19 nt, Artificial Sequence
  Description of Artificial Sequence: Synthetic oligonucleotide
aaccaguguacaguucugg

SEQ ID NO: 1268652 - RNA, 19 nt, Artificial Sequence
  Description of Artificial Sequence: Synthetic oligonucleotide
uuuccuggauuaucuaaca

SEQ ID NO: 1268653 - RNA, 19 nt, Artificial Sequence
  Description of Artificial Sequence: Synthetic oligonucleotide
cugguaaucuuauuggaga

SEQ ID NO: 1268654 - RNA, 19 nt, Artificial Sequence
  Description of Artificial Sequence: Synthetic oligonucleotide
acugcgacaaauacaguag

SEQ ID NO: 1268655 - RNA, 19 nt, Artificial Sequence
  Description of Artificial Sequence: Synthetic oligonucleotide
ucauccgguccuuuauggg

SEQ ID NO: 1268656 - RNA, 19 nt, Artificial Sequence
  Description of Artificial Sequence: Synthetic oligonucleotide
acaacuuuugucaaccccu

SEQ ID NO: 1268657 - RNA, 19 nt, Artificial Sequence
  Description of Artificial Sequence: Synthetic oligonucleotide
accggcauccuguaacaac

SEQ ID NO: 1268658 - RNA, 19 nt, Artificial Sequence
  Description of Artificial Sequence: Synthetic oligonucleotide
acaagagcgaucagggagg

SEQ ID NO: 1268659 - RNA, 19 nt, Artificial Sequence
  Description of Artificial Sequence: Synthetic oligonucleotide
auauagcuuggguagcaug

SEQ ID NO: 1268660 - RNA, 19 nt, Artificial Sequence
  Description of Artificial Sequence: Synthetic oligonucleotide
aaguuuggcccauaccaaa

SEQ ID NO: 1268661 - RNA, 19 nt, Artificial Sequence
  Description of Artificial Sequence: Synthetic oligonucleotide
ugacuucaggaguaacucc

SEQ ID NO: 1268662 - RNA, 19 nt, Artificial Sequence
  Description of Artificial Sequence: Synthetic oligonucleotide
ugcgacaaauacaguaggu

SEQ ID NO: 1268663 - RNA, 19 nt, Artificial Sequence
  Description of Artificial Sequence: Synthetic oligonucleotide
ggauaugcaguauuaccag

SEQ ID NO: 1268664 - RNA, 19 nt, Artificial Sequence
  Description of Artificial Sequence: Synthetic oligonucleotide
ggugguuacaucaacacca

SEQ ID NO: 1268665 - RNA, 19 nt, Artificial Sequence
  Description of Artificial Sequence: Synthetic oligonucleotide
cuccacucgaucugcaacc

SEQ ID NO: 1268666 - RNA, 19 nt, Artificial Sequence
  Description of Artificial Sequence: Synthetic oligonucleotide
aauugcauucucugauuuu

SEQ ID NO: 1268667 - RNA, 19 nt, Artificial Sequence
  Description of Artificial Sequence: Synthetic oligonucleotide
uucuucggcacacccauuc

SEQ ID NO: 1268668 - RNA, 19 nt, Artificial Sequence
  Description of Artificial Sequence: Synthetic oligonucleotide
uguuauauacugagauuuu

SEQ ID NO: 1268669 - RNA, 19 nt, Artificial Sequence
  Description of Artificial Sequence: Synthetic oligonucleotide
ugacucaugaugucaacuu

SEQ ID NO: 1268670 - RNA, 19 nt, Artificial Sequence
  Description of Artificial Sequence: Synthetic oligonucleotide
gauaugcaguauuaccaga

SEQ ID NO: 1268671 - RNA, 19 nt, Artificial Sequence
  Description of Artificial Sequence: Synthetic oligonucleotide
guauaguugaacagccaag

SEQ ID NO: 1268672 - RNA, 19 nt, Artificial Sequence
  Description of Artificial Sequence: Synthetic oligonucleotide
aaggagguguagacggcgc

SEQ ID NO: 1268673 - RNA, 19 nt, Artificial Sequence
  Description of Artificial Sequence: Synthetic oligonucleotide
ggaguuauuuccuugaggu

SEQ ID NO: 1268674 - RNA, 19 nt, Artificial Sequence
  Description of Artificial Sequence: Synthetic oligonucleotide
ucgaaguuuggcccauacc

SEQ ID NO: 1268675 - RNA, 19 nt, Artificial Sequence
  Description of Artificial Sequence: Synthetic oligonucleotide
uccggaguuauuuccuuga

SEQ ID NO: 1268676 - RNA, 19 nt, Artificial Sequence
  Description of Artificial Sequence: Synthetic oligonucleotide
cugcgacaaauacaguagg

SEQ ID NO: 1268677 - RNA, 19 nt, Artificial Sequence
  Description of Artificial Sequence: Synthetic oligonucleotide
gccacugcgacaaauacag

SEQ ID NO: 1268678 - RNA, 19 nt, Artificial Sequence
  Description of Artificial Sequence: Synthetic oligonucleotide
guuacucgaaguucacaug

SEQ ID NO: 1268679 - RNA, 19 nt, Artificial Sequence
  Description of Artificial Sequence: Synthetic oligonucleotide
ugguaaucuuauuggagau

SEQ ID NO: 1268680 - RNA, 19 nt, Artificial Sequence
  Description of Artificial Sequence: Synthetic oligonucleotide
gauuaucuaacaauucaua

SEQ ID NO: 1268681 - RNA, 19 nt, Artificial Sequence
  Description of Artificial Sequence: Synthetic oligonucleotide
guuaagaaugcuugcucga

SEQ ID NO: 1268682 - RNA, 19 nt, Artificial Sequence
  Description of Artificial Sequence: Synthetic oligonucleotide
augcaguauuaccagacau

SEQ ID NO: 1268683 - RNA, 19 nt, Artificial Sequence
  Description of Artificial Sequence: Synthetic oligonucleotide
ugguuguauaacccaaaua

SEQ ID NO: 1268684 - RNA, 19 nt, Artificial Sequence
  Description of Artificial Sequence: Synthetic oligonucleotide
acugggcggauccuucugg

SEQ ID NO: 1268685 - RNA, 19 nt, Artificial Sequence
  Description of Artificial Sequence: Synthetic oligonucleotide
gacucaugaugucaacuuc

SEQ ID NO: 1268686 - RNA, 19 nt, Artificial Sequence
  Description of Artificial Sequence: Synthetic oligonucleotide
uuaagaaugcuugcucgaa

SEQ ID NO: 1268687 - RNA, 19 nt, Artificial Sequence
  Description of Artificial Sequence: Synthetic oligonucleotide
guuguauaacccaaauauc

SEQ ID NO: 1268688 - RNA, 19 nt, Artificial Sequence
  Description of Artificial Sequence: Synthetic oligonucleotide
ucauuucgcauuggggugc

SEQ ID NO: 1268689 - RNA, 19 nt, Artificial Sequence
  Description of Artificial Sequence: Synthetic oligonucleotide
uccaggaaucauuaucaau

SEQ ID NO: 1268690 - RNA, 19 nt, Artificial Sequence
  Description of Artificial Sequence: Synthetic oligonucleotide
cacucgaucugcaacccac

SEQ ID NO: 1268691 - RNA, 19 nt, Artificial Sequence
  Description of Artificial Sequence: Synthetic oligonucleotide
ucuacuuuugguggguaaa

SEQ ID NO: 1268692 - RNA, 19 nt, Artificial Sequence
  Description of Artificial Sequence: Synthetic oligonucleotide
aacaguaaacugaauuguu

SEQ ID NO: 1268693 - RNA, 19 nt, Artificial Sequence
  Description of Artificial Sequence: Synthetic oligonucleotide
caaugaaagcagucucccc

SEQ ID NO: 1268694 - RNA, 19 nt, Artificial Sequence
  Description of Artificial Sequence: Synthetic oligonucleotide
caaauauagcuuggguagc

SEQ ID NO: 1268695 - RNA, 19 nt, Artificial Sequence
  Description of Artificial Sequence: Synthetic oligonucleotide
ucauaucaaccaguguaca

SEQ ID NO: 1268696 - RNA, 19 nt, Artificial Sequence
  Description of Artificial Sequence: Synthetic oligonucleotide
cugacuucaggaguaacuc

SEQ ID NO: 1268697 - RNA, 19 nt, Artificial Sequence
  Description of Artificial Sequence: Synthetic oligonucleotide
uagcggugcaggaaagggc

SEQ ID NO: 1268698 - RNA, 19 nt, Artificial Sequence
  Description of Artificial Sequence: Synthetic oligonucleotide
caguguacaguucugggga

SEQ ID NO: 1268699 - RNA, 19 nt, Artificial Sequence
  Description of Artificial Sequence: Synthetic oligonucleotide
auagcuuggguagcaugac

SEQ ID NO: 1268700 - RNA, 19 nt, Artificial Sequence
  Description of Artificial Sequence: Synthetic oligonucleotide
gucgccauuaucccuggug

SEQ ID NO: 1268701 - RNA, 19 nt, Artificial Sequence
  Description of Artificial Sequence: Synthetic oligonucleotide
aggauuucaaauauagcuu

SEQ ID NO: 1268702 - RNA, 19 nt, Artificial Sequence
  Description of Artificial Sequence: Synthetic oligonucleotide
uacccuuccuuuacaccag

SEQ ID NO: 1268703 - RNA, 19 nt, Artificial Sequence
  Description of Artificial Sequence: Synthetic oligonucleotide
augguuguauaacccaaau

SEQ ID NO: 1268704 - RNA, 19 nt, Artificial Sequence
  Description of Artificial Sequence: Synthetic oligonucleotide
uaaccggauaugcaguauu

SEQ ID NO: 1268705 - RNA, 19 nt, Artificial Sequence
  Description of Artificial Sequence: Synthetic oligonucleotide
ugacaacuuuugucaaccc

SEQ ID NO: 1268706 - RNA, 19 nt, Artificial Sequence
  Description of Artificial Sequence: Synthetic oligonucleotide
gacaucacugggcccaaac

SEQ ID NO: 1268707 - RNA, 19 nt, Artificial Sequence
  Description of Artificial Sequence: Synthetic oligonucleotide
uccuuuacaccaggguucc

SEQ ID NO: 1268708 - RNA, 19 nt, Artificial Sequence
  Description of Artificial Sequence: Synthetic oligonucleotide
accggauaugcaguauuac

SEQ ID NO: 1268709 - RNA, 19 nt, Artificial Sequence
  Description of Artificial Sequence: Synthetic oligonucleotide
uuccuggauuaucuaacaa

SEQ ID NO: 1268710 - RNA, 19 nt, Artificial Sequence
  Description of Artificial Sequence: Synthetic oligonucleotide
cucaaaguuucauccgguc

SEQ ID NO: 1268711 - RNA, 19 nt, Artificial Sequence
  Description of Artificial Sequence: Synthetic oligonucleotide
cacgguaagacuguuuguc

SEQ ID NO: 1268712 - RNA, 19 nt, Artificial Sequence
  Description of Artificial Sequence: Synthetic oligonucleotide
ugggcagucgaagggauga

SEQ ID NO: 1268713 - RNA, 19 nt, Artificial Sequence
  Description of Artificial Sequence: Synthetic oligonucleotide
gaguuauuuccuugagguc

SEQ ID NO: 1268714 - RNA, 19 nt, Artificial Sequence
  Description of Artificial Sequence: Synthetic oligonucleotide
cuuauuggagauugcagcu

SEQ ID NO: 1268715 - RNA, 19 nt, Artificial Sequence
  Description of Artificial Sequence: Synthetic oligonucleotide
ggcuccgauccccugaugg

SEQ ID NO: 1268716 - RNA, 19 nt, Artificial Sequence
  Description of Artificial Sequence: Synthetic oligonucleotide
gauaaccggauaugcagua

SEQ ID NO: 1268717 - RNA, 19 nt, Artificial Sequence
  Description of Artificial Sequence: Synthetic oligonucleotide
acccauucaauuggaauca

SEQ ID NO: 1268718 - RNA, 19 nt, Artificial Sequence
  Description of Artificial Sequence: Synthetic oligonucleotide
auggaaucccgaaguuucc

SEQ ID NO: 1268719 - RNA, 19 nt, Artificial Sequence
  Description of Artificial Sequence: Synthetic oligonucleotide
agcaugacucaugauguca

SEQ ID NO: 1268720 - RNA, 19 nt, Artificial Sequence
  Description of Artificial Sequence: Synthetic oligonucleotide
uccuuuaugggcagauguu

SEQ ID NO: 1268721 - RNA, 19 nt, Artificial Sequence
  Description of Artificial Sequence: Synthetic oligonucleotide
agagcgaucagggaggcuu

SEQ ID NO: 1268722 - RNA, 19 nt, Artificial Sequence
  Description of Artificial Sequence: Synthetic oligonucleotide
agauauccauguguuaaga

SEQ ID NO: 1268723 - RNA, 19 nt, Artificial Sequence
  Description of Artificial Sequence: Synthetic oligonucleotide
aacugggcggauccuucug

SEQ ID NO: 1268724 - RNA, 19 nt, Artificial Sequence
  Description of Artificial Sequence: Synthetic oligonucleotide
aguagguaugccaucgccu

SEQ ID NO: 1268725 - RNA, 19 nt, Artificial Sequence
  Description of Artificial Sequence: Synthetic oligonucleotide
ccaggaaucauuaucaaua

SEQ ID NO: 1268726 - RNA, 19 nt, Artificial Sequence
  Description of Artificial Sequence: Synthetic oligonucleotide
uucggcacacccauucaau

SEQ ID NO: 1268727 - RNA, 19 nt, Artificial Sequence
  Description of Artificial Sequence: Synthetic oligonucleotide
cacugcgggucauuauugg

SEQ ID NO: 1268728 - RNA, 19 nt, Artificial Sequence
  Description of Artificial Sequence: Synthetic oligonucleotide
cacugcgacaaauacagua

SEQ ID NO: 1268729 - RNA, 19 nt, Artificial Sequence
  Description of Artificial Sequence: Synthetic oligonucleotide
aacuuuugucaaccccuaa

SEQ ID NO: 1268730 - RNA, 19 nt, Artificial Sequence
  Description of Artificial Sequence: Synthetic oligonucleotide
aaguauaguugaacagcca

SEQ ID NO: 1268731 - RNA, 19 nt, Artificial Sequence
  Description of Artificial Sequence: Synthetic oligonucleotide
cuauaacaaguccagcaaa

SEQ ID NO: 1268732 - RNA, 19 nt, Artificial Sequence
  Description of Artificial Sequence: Synthetic oligonucleotide
uuggacugcaggaggacuu

SEQ ID NO: 1268733 - RNA, 19 nt, Artificial Sequence
  Description of Artificial Sequence: Synthetic oligonucleotide
guaacuccacucgaucugc

SEQ ID NO: 1268734 - RNA, 19 nt, Artificial Sequence
  Description of Artificial Sequence: Synthetic oligonucleotide
ggagaaaguauaguugaac

SEQ ID NO: 1268735 - RNA, 19 nt, Artificial Sequence
  Description of Artificial Sequence: Synthetic oligonucleotide
agucuggccuauaacaagu

SEQ ID NO: 1268736 - RNA, 19 nt, Artificial Sequence
  Description of Artificial Sequence: Synthetic oligonucleotide
ccggauaugcaguauuacc

SEQ ID NO: 1268737 - RNA, 19 nt, Artificial Sequence
  Description of Artificial Sequence: Synthetic oligonucleotide
cauaccaaaugguuguaua

SEQ ID NO: 1268738 - RNA, 19 nt, Artificial Sequence
  Description of Artificial Sequence: Synthetic oligonucleotide
cuuagcggugcaggaaagg

SEQ ID NO: 1268739 - RNA, 19 nt, Artificial Sequence
  Description of Artificial Sequence: Synthetic oligonucleotide
uccgauccccugauggcca

SEQ ID NO: 1268740 - RNA, 19 nt, Artificial Sequence
  Description of Artificial Sequence: Synthetic oligonucleotide
guagcaugacucaugaugu

SEQ ID NO: 1268741 - RNA, 19 nt, Artificial Sequence
  Description of Artificial Sequence: Synthetic oligonucleotide
gaagcagcgcuccggaaaa

SEQ ID NO: 1268742 - RNA, 19 nt, Artificial Sequence
  Description of Artificial Sequence: Synthetic oligonucleotide
gcaguauuaccagacauca

SEQ ID NO: 1268743 - RNA, 19 nt, Artificial Sequence
  Description of Artificial Sequence: Synthetic oligonucleotide
cauuaucccuggugggaag

SEQ ID NO: 1268744 - RNA, 19 nt, Artificial Sequence
  Description of Artificial Sequence: Synthetic oligonucleotide
gcuauucuucggcacaccc

SEQ ID NO: 1268745 - RNA, 19 nt, Artificial Sequence
  Description of Artificial Sequence: Synthetic oligonucleotide
uagcuuggguagcaugacu

SEQ ID NO: 1268746 - RNA, 19 nt, Artificial Sequence
  Description of Artificial Sequence: Synthetic oligonucleotide
acgcaagacacgccucuag

SEQ ID NO: 1268747 - RNA, 19 nt, Artificial Sequence
  Description of Artificial Sequence: Synthetic oligonucleotide
gcugguaaucuuauuggag

SEQ ID NO: 1268748 - RNA, 19 nt, Artificial Sequence
  Description of Artificial Sequence: Synthetic oligonucleotide
ugucaaccccuaaaauaua

SEQ ID NO: 1268749 - RNA, 19 nt, Artificial Sequence
  Description of Artificial Sequence: Synthetic oligonucleotide
uugcucgaaguuuggccca

SEQ ID NO: 1268750 - RNA, 19 nt, Artificial Sequence
  Description of Artificial Sequence: Synthetic oligonucleotide
auguguaacuuuucuccua

SEQ ID NO: 1268751 - RNA, 19 nt, Artificial Sequence
  Description of Artificial Sequence: Synthetic oligonucleotide
cgaaguuuggcccauacca

SEQ ID NO: 1268752 - RNA, 19 nt, Artificial Sequence
  Description of Artificial Sequence: Synthetic oligonucleotide
uuauuggagauugcagcuu

SEQ ID NO: 1268753 - RNA, 19 nt, Artificial Sequence
  Description of Artificial Sequence: Synthetic oligonucleotide
ucgcauuggggugcaauga

SEQ ID NO: 1268754 - RNA, 19 nt, Artificial Sequence
  Description of Artificial Sequence: Synthetic oligonucleotide
ugcuguaaucugguccuug

SEQ ID NO: 1268755 - RNA, 19 nt, Artificial Sequence
  Description of Artificial Sequence: Synthetic oligonucleotide
gaaguuuggcccauaccaa

SEQ ID NO: 1268756 - RNA, 19 nt, Artificial Sequence
  Description of Artificial Sequence: Synthetic oligonucleotide
gauccccugauggccagag

SEQ ID NO: 1268757 - RNA, 19 nt, Artificial Sequence
  Description of Artificial Sequence: Synthetic oligonucleotide
cagcugucgccauuauccc

SEQ ID NO: 1268758 - RNA, 19 nt, Artificial Sequence
  Description of Artificial Sequence: Synthetic oligonucleotide
gacggcgcgggaaagagaa

SEQ ID NO: 1268759 - RNA, 19 nt, Artificial Sequence
  Description of Artificial Sequence: Synthetic oligonucleotide
caguauuaccagacaucac

SEQ ID NO: 1268760 - RNA, 19 nt, Artificial Sequence
  Description of Artificial Sequence: Synthetic oligonucleotide
ggaggcuuagcggugcagg

SEQ ID NO: 1268761 - RNA, 19 nt, Artificial Sequence
  Description of Artificial Sequence: Synthetic oligonucleotide
uccacucgaucugcaaccc

SEQ ID NO: 1268762 - RNA, 19 nt, Artificial Sequence
  Description of Artificial Sequence: Synthetic oligonucleotide
cauccugagcaccccaguc

SEQ ID NO: 1268763 - RNA, 19 nt, Artificial Sequence
  Description of Artificial Sequence: Synthetic oligonucleotide
ugggcggauccuucuggag

SEQ ID NO: 1268764 - RNA, 19 nt, Artificial Sequence
  Description of Artificial Sequence: Synthetic oligonucleotide
aaaguuucauccgguccuu

SEQ ID NO: 1268765 - RNA, 19 nt, Artificial Sequence
  Description of Artificial Sequence: Synthetic oligonucleotide
gaccacugggcagucgaag

SEQ ID NO: 1268766 - RNA, 19 nt, Artificial Sequence
  Description of Artificial Sequence: Synthetic oligonucleotide
caaccaguguacaguucug

SEQ ID NO: 1268767 - RNA, 19 nt, Artificial Sequence
  Description of Artificial Sequence: Synthetic oligonucleotide
ggaguaacuccacucgauc

SEQ ID NO: 1268768 - RNA, 19 nt, Artificial Sequence
  Description of Artificial Sequence: Synthetic oligonucleotide
agcgcuccggaaaacaaga

SEQ ID NO: 1268769 - RNA, 19 nt, Artificial Sequence
  Description of Artificial Sequence: Synthetic oligonucleotide
cgaucagggaggcuuagcg

SEQ ID NO: 1268770 - RNA, 19 nt, Artificial Sequence
  Description of Artificial Sequence: Synthetic oligonucleotide
ugcuugcucgaaguuuggc

SEQ ID NO: 1268771 - RNA, 19 nt, Artificial Sequence
  Description of Artificial Sequence: Synthetic oligonucleotide
ugguuacaucaacaccaaa

SEQ ID NO: 1268772 - RNA, 19 nt, Artificial Sequence
  Description of Artificial Sequence: Synthetic oligonucleotide
agcugucgccauuaucccu

SEQ ID NO: 1268773 - RNA, 19 nt, Artificial Sequence
  Description of Artificial Sequence: Synthetic oligonucleotide
aaccggauaugcaguauua

SEQ ID NO: 1268774 - RNA, 19 nt, Artificial Sequence
  Description of Artificial Sequence: Synthetic oligonucleotide
ggcgcaacgcaagacacgc

SEQ ID NO: 1268775 - RNA, 19 nt, Artificial Sequence
  Description of Artificial Sequence: Synthetic oligonucleotide
uagcaugacucaugauguc

SEQ ID NO: 1268776 - RNA, 19 nt, Artificial Sequence
  Description of Artificial Sequence: Synthetic oligonucleotide
cccgaaguuuccacaagcc

SEQ ID NO: 1268777 - RNA, 19 nt, Artificial Sequence
  Description of Artificial Sequence: Synthetic oligonucleotide
auguuacucgaaguucaca

SEQ ID NO: 1268778 - RNA, 19 nt, Artificial Sequence
  Description of Artificial Sequence: Synthetic oligonucleotide
aucaaccaguguacaguuc

SEQ ID NO: 1268779 - RNA, 19 nt, Artificial Sequence
  Description of Artificial Sequence: Synthetic oligonucleotide
uccgguccuuuaugggcag

SEQ ID NO: 1268780 - RNA, 19 nt, Artificial Sequence
  Description of Artificial Sequence: Synthetic oligonucleotide
uugauaccggcauccugua

SEQ ID NO: 1268781 - RNA, 19 nt, Artificial Sequence
  Description of Artificial Sequence: Synthetic oligonucleotide
agcaccccagucuggugug

SEQ ID NO: 1268782 - RNA, 19 nt, Artificial Sequence
  Description of Artificial Sequence: Synthetic oligonucleotide
acauggaaucccgaaguuu

SEQ ID NO: 1268783 - RNA, 19 nt, Artificial Sequence
  Description of Artificial Sequence: Synthetic oligonucleotide
ugauaccggcauccuguaa

SEQ ID NO: 1268784 - RNA, 19 nt, Artificial Sequence
  Description of Artificial Sequence: Synthetic oligonucleotide
cagugaccaaggucagaag

SEQ ID NO: 1268785 - RNA, 19 nt, Artificial Sequence
  Description of Artificial Sequence: Synthetic oligonucleotide
guguacaguucuggggaag

SEQ ID NO: 1268786 - RNA, 19 nt, Artificial Sequence
  Description of Artificial Sequence: Synthetic oligonucleotide
ugcuauucuucggcacacc

SEQ ID NO: 1268787 - RNA, 19 nt, Artificial Sequence
  Description of Artificial Sequence: Synthetic oligonucleotide
aucucuacuuuuggugggu

SEQ ID NO: 1268788 - RNA, 19 nt, Artificial Sequence
  Description of Artificial Sequence: Synthetic oligonucleotide
cucagcugucgccauuauc

SEQ ID NO: 1268789 - RNA, 19 nt, Artificial Sequence
  Description of Artificial Sequence: Synthetic oligonucleotide
caagagcgaucagggaggc

SEQ ID NO: 1268790 - RNA, 19 nt, Artificial Sequence
  Description of Artificial Sequence: Synthetic oligonucleotide
aggucagaaguggaaccca

SEQ ID NO: 1268791 - RNA, 19 nt, Artificial Sequence
  Description of Artificial Sequence: Synthetic oligonucleotide
auuggagauugcagcuuug

SEQ ID NO: 1268792 - RNA, 19 nt, Artificial Sequence
  Description of Artificial Sequence: Synthetic oligonucleotide
ggcccauaccaaaugguug

SEQ ID NO: 1268793 - RNA, 19 nt, Artificial Sequence
  Description of Artificial Sequence: Synthetic oligonucleotide
auaaccggauaugcaguau

SEQ ID NO: 1268794 - RNA, 19 nt, Artificial Sequence
  Description of Artificial Sequence: Synthetic oligonucleotide
cuguaaucugguccuugga

SEQ ID NO: 1268795 - RNA, 19 nt, Artificial Sequence
  Description of Artificial Sequence: Synthetic oligonucleotide
gggcccaaaccauugcuuc

SEQ ID NO: 1268796 - RNA, 19 nt, Artificial Sequence
  Description of Artificial Sequence: Synthetic oligonucleotide
cggaguuauuuccuugagg

SEQ ID NO: 1268797 - RNA, 19 nt, Artificial Sequence
  Description of Artificial Sequence: Synthetic oligonucleotide
ggaaagggcggcgcaacgc

SEQ ID NO: 1268798 - RNA, 19 nt, Artificial Sequence
  Description of Artificial Sequence: Synthetic oligonucleotide
ggauuaucuaacaauucau

SEQ ID NO: 1268799 - RNA, 19 nt, Artificial Sequence
  Description of Artificial Sequence: Synthetic oligonucleotide
cuucggcacacccauucaa

SEQ ID NO: 1268800 - RNA, 19 nt, Artificial Sequence
  Description of Artificial Sequence: Synthetic oligonucleotide
aacgcaagacacgccucua

SEQ ID NO: 1268801 - RNA, 19 nt, Artificial Sequence
  Description of Artificial Sequence: Synthetic oligonucleotide
gcuccgauccccugauggc

SEQ ID NO: 1268802 - RNA, 19 nt, Artificial Sequence
  Description of Artificial Sequence: Synthetic oligonucleotide
ggcuuagcggugcaggaaa

SEQ ID NO: 1268803 - RNA, 19 nt, Artificial Sequence
  Description of Artificial Sequence: Synthetic oligonucleotide
guguagacggcgcgggaaa

SEQ ID NO: 1268804 - RNA, 19 nt, Artificial Sequence
  Description of Artificial Sequence: Synthetic oligonucleotide
gcuuuaauccucaaaguuu

SEQ ID NO: 1268805 - RNA, 19 nt, Artificial Sequence
  Description of Artificial Sequence: Synthetic oligonucleotide
ccggaaaacaagagcgauc

SEQ ID NO: 1268806 - RNA, 19 nt, Artificial Sequence
  Description of Artificial Sequence: Synthetic oligonucleotide
gggcggauccuucuggaga

SEQ ID NO: 1268807 - RNA, 19 nt, Artificial Sequence
  Description of Artificial Sequence: Synthetic oligonucleotide
aaagggcggcgcaacgcaa

SEQ ID NO: 1268808 - RNA, 19 nt, Artificial Sequence
  Description of Artificial Sequence: Synthetic oligonucleotide
gucagaaguggaacccauc

SEQ ID NO: 1268809 - RNA, 19 nt, Artificial Sequence
  Description of Artificial Sequence: Synthetic oligonucleotide
agggcggcgcaacgcaaga

SEQ ID NO: 1268810 - RNA, 19 nt, Artificial Sequence
  Description of Artificial Sequence: Synthetic oligonucleotide
cgcuccggaaaacaagagc

SEQ ID NO: 1268811 - RNA, 19 nt, Artificial Sequence
  Description of Artificial Sequence: Synthetic oligonucleotide
ccacugcgggucauuauug

SEQ ID NO: 1268812 - RNA, 19 nt, Artificial Sequence
  Description of Artificial Sequence: Synthetic oligonucleotide
gcgacaaauacaguaggua

SEQ ID NO: 1268813 - RNA, 19 nt, Artificial Sequence
  Description of Artificial Sequence: Synthetic oligonucleotide
gucuggccuauaacaaguc

SEQ ID NO: 1268814 - RNA, 19 nt, Artificial Sequence
  Description of Artificial Sequence: Synthetic oligonucleotide
cugggcggauccuucugga

SEQ ID NO: 1268815 - RNA, 19 nt, Artificial Sequence
  Description of Artificial Sequence: Synthetic oligonucleotide
gcacuacaacccugcacug

SEQ ID NO: 1268816 - RNA, 19 nt, Artificial Sequence
  Description of Artificial Sequence: Synthetic oligonucleotide
acccugcacugacuaucug

SEQ ID NO: 1268817 - RNA, 19 nt, Artificial Sequence
  Description of Artificial Sequence: Synthetic oligonucleotide
accucagcugucgccauua

SEQ ID NO: 1268818 - RNA, 19 nt, Artificial Sequence
  Description of Artificial Sequence: Synthetic oligonucleotide
caacgcaagacacgccucu

SEQ ID NO: 1268819 - RNA, 19 nt, Artificial Sequence
  Description of Artificial Sequence: Synthetic oligonucleotide
ccggaguuauuuccuugag

SEQ ID NO: 1268820 - RNA, 19 nt, Artificial Sequence
  Description of Artificial Sequence: Synthetic oligonucleotide
ggccuauaacaaguccagc

SEQ ID NO: 1268821 - RNA, 19 nt, Artificial Sequence
  Description of Artificial Sequence: Synthetic oligonucleotide
gaggucacgguaagacugu

SEQ ID NO: 1268822 - RNA, 19 nt, Artificial Sequence
  Description of Artificial Sequence: Synthetic oligonucleotide
uggcuccgauccccugaug

SEQ ID NO: 1268823 - RNA, 19 nt, Artificial Sequence
  Description of Artificial Sequence: Synthetic oligonucleotide
ugcucgaaguuuggcccau

SEQ ID NO: 1268824 - RNA, 19 nt, Artificial Sequence
  Description of Artificial Sequence: Synthetic oligonucleotide
gguccuuuaugggcagaug

SEQ ID NO: 1268825 - RNA, 19 nt, Artificial Sequence
  Description of Artificial Sequence: Synthetic oligonucleotide
uaccggcauccuguaacaa

SEQ ID NO: 1268826 - RNA, 19 nt, Artificial Sequence
  Description of Artificial Sequence: Synthetic oligonucleotide
gcuuagcggugcaggaaag

SEQ ID NO: 1268827 - RNA, 19 nt, Artificial Sequence
  Description of Artificial Sequence: Synthetic oligonucleotide
agaccacugcgggucauua

SEQ ID NO: 1268828 - RNA, 19 nt, Artificial Sequence
  Description of Artificial Sequence: Synthetic oligonucleotide
cggcacacccauucaauug

SEQ ID NO: 1268829 - RNA, 19 nt, Artificial Sequence
  Description of Artificial Sequence: Synthetic oligonucleotide
gcgcgggaaagagaagcag

SEQ ID NO: 1268830 - RNA, 19 nt, Artificial Sequence
  Description of Artificial Sequence: Synthetic oligonucleotide
ccaucgccuucauacucug

SEQ ID NO: 1268831 - RNA, 19 nt, Artificial Sequence
  Description of Artificial Sequence: Synthetic oligonucleotide
cugggcccaaaccauugcu

SEQ ID NO: 1268832 - RNA, 19 nt, Artificial Sequence
  Description of Artificial Sequence: Synthetic oligonucleotide
gguguagacggcgcgggaa

SEQ ID NO: 1268833 - RNA, 19 nt, Artificial Sequence
  Description of Artificial Sequence: Synthetic oligonucleotide
ccggcauccuguaacaacu

SEQ ID NO: 1268834 - RNA, 19 nt, Artificial Sequence
  Description of Artificial Sequence: Synthetic oligonucleotide
cauuucgcauuggggugca

SEQ ID NO: 1268835 - RNA, 19 nt, Artificial Sequence
  Description of Artificial Sequence: Synthetic oligonucleotide
ugcaguccuuccggaguua

SEQ ID NO: 1268836 - RNA, 19 nt, Artificial Sequence
  Description of Artificial Sequence: Synthetic oligonucleotide
agacggcgcgggaaagaga

SEQ ID NO: 1268837 - RNA, 19 nt, Artificial Sequence
  Description of Artificial Sequence: Synthetic oligonucleotide
gagcgaucagggaggcuua

SEQ ID NO: 1268838 - RNA, 19 nt, Artificial Sequence
  Description of Artificial Sequence: Synthetic oligonucleotide
gaccacugcgggucauuau

SEQ ID NO: 1268839 - RNA, 19 nt, Artificial Sequence
  Description of Artificial Sequence: Synthetic oligonucleotide
gcgcuccggaaaacaagag

SEQ ID NO: 1268840 - RNA, 19 nt, Artificial Sequence
  Description of Artificial Sequence: Synthetic oligonucleotide
ccgaaguuuccacaagccu

SEQ ID NO: 1268841 - RNA, 19 nt, Artificial Sequence
  Description of Artificial Sequence: Synthetic oligonucleotide
gcgaucagggaggcuuagc

SEQ ID NO: 1268842 - RNA, 19 nt, Artificial Sequence
  Description of Artificial Sequence: Synthetic oligonucleotide
cggcgcaacgcaagacacg

SEQ ID NO: 1268843 - RNA, 19 nt, Artificial Sequence
  Description of Artificial Sequence: Synthetic oligonucleotide
ccucaaaguuucauccggu

SEQ ID NO: 1268844 - RNA, 19 nt, Artificial Sequence
  Description of Artificial Sequence: Synthetic oligonucleotide
acggcgcgggaaagagaag

SEQ ID NO: 1268845 - RNA, 19 nt, Artificial Sequence
  Description of Artificial Sequence: Synthetic oligonucleotide
auucuucggcacacccauu

SEQ ID NO: 1268846 - RNA, 19 nt, Artificial Sequence
  Description of Artificial Sequence: Synthetic oligonucleotide
guucaacaguaaacugaau

SEQ ID NO: 1268847 - RNA, 19 nt, Artificial Sequence
  Description of Artificial Sequence: Synthetic oligonucleotide
agacaucacugggcccaaa

SEQ ID NO: 1268848 - RNA, 19 nt, Artificial Sequence
  Description of Artificial Sequence: Synthetic oligonucleotide
ggucagaaguggaacccau

SEQ ID NO: 1268849 - RNA, 19 nt, Artificial Sequence
  Description of Artificial Sequence: Synthetic oligonucleotide
auuucgcauuggggugcaa

SEQ ID NO: 1268850 - RNA, 19 nt, Artificial Sequence
  Description of Artificial Sequence: Synthetic oligonucleotide
cagucuccccacauuucuu

SEQ ID NO: 1268851 - RNA, 19 nt, Artificial Sequence
  Description of Artificial Sequence: Synthetic oligonucleotide
caacccacucaaaguucuu

SEQ ID NO: 1268852 - RNA, 19 nt, Artificial Sequence
  Description of Artificial Sequence: Synthetic oligonucleotide
gcgcaacgcaagacacgcc

SEQ ID NO: 1268853 - RNA, 19 nt, Artificial Sequence
  Description of Artificial Sequence: Synthetic oligonucleotide
ccacucgaucugcaaccca

SEQ ID NO: 1268854 - RNA, 19 nt, Artificial Sequence
  Description of Artificial Sequence: Synthetic oligonucleotide
ggggugcaaugaaagcagu

SEQ ID NO: 1268855 - RNA, 19 nt, Artificial Sequence
  Description of Artificial Sequence: Synthetic oligonucleotide
gcaaacugggcggauccuu

SEQ ID NO: 1268856 - RNA, 19 nt, Artificial Sequence
  Description of Artificial Sequence: Synthetic oligonucleotide
caguccuuccggaguuauu

SEQ ID NO: 1268857 - RNA, 19 nt, Artificial Sequence
  Description of Artificial Sequence: Synthetic oligonucleotide
cgguaagacuguuugucuu

SEQ ID NO: 1268858 - RNA, 19 nt, Artificial Sequence
  Description of Artificial Sequence: Synthetic oligonucleotide
ccauaccaaaugguuguau

SEQ ID NO: 1268859 - RNA, 19 nt, Artificial Sequence
  Description of Artificial Sequence: Synthetic oligonucleotide
ggucacgguaagacuguuu

SEQ ID NO: 1268860 - RNA, 19 nt, Artificial Sequence
  Description of Artificial Sequence: Synthetic oligonucleotide
gcaguccuuccggaguuau

SEQ ID NO: 1268861 - RNA, 19 nt, Artificial Sequence
  Description of Artificial Sequence: Synthetic oligonucleotide
caccccagucuggugugau

SEQ ID NO: 1268862 - RNA, 19 nt, Artificial Sequence
  Description of Artificial Sequence: Synthetic oligonucleotide
cagaccacugcgggucauu

SEQ ID NO: 1268863 - RNA, 19 nt, Artificial Sequence
  Description of Artificial Sequence: Synthetic oligonucleotide
gcggauccuucuggagaaa

SEQ ID NO: 1268864 - RNA, 19 nt, Artificial Sequence
  Description of Artificial Sequence: Synthetic oligonucleotide
ccacugcgacaaauacagu

SEQ ID NO: 1268865 - RNA, 19 nt, Artificial Sequence
  Description of Artificial Sequence: Synthetic oligonucleotide
gcucgaaguuuggcccaua

SEQ ID NO: 1268866 - RNA, 19 nt, Artificial Sequence
  Description of Artificial Sequence: Synthetic oligonucleotide
cccauucaauuggaaucau

SEQ ID NO: 1268867 - RNA, 19 nt, Artificial Sequence
  Description of Artificial Sequence: Synthetic oligonucleotide
uuucuauaaauacagggag

SEQ ID NO: 1268868 - RNA, 19 nt, Artificial Sequence
  Description of Artificial Sequence: Synthetic oligonucleotide
uccgauagagguuagaccg

SEQ ID NO: 1268869 - RNA, 19 nt, Artificial Sequence
  Description of Artificial Sequence: Synthetic oligonucleotide
gaugaaagaauccacguug

SEQ ID NO: 1268870 - RNA, 19 nt, Artificial Sequence
  Description of Artificial Sequence: Synthetic oligonucleotide
uucaaugcaagugucauag

SEQ ID NO: 1268871 - RNA, 19 nt, Artificial Sequence
  Description of Artificial Sequence: Synthetic oligonucleotide
aaaagcuagauugccaggg

SEQ ID NO: 1268872 - RNA, 19 nt, Artificial Sequence
  Description of Artificial Sequence: Synthetic oligonucleotide
gauggaaaacucuuggccc

SEQ ID NO: 1268873 - RNA, 19 nt, Artificial Sequence
  Description of Artificial Sequence: Synthetic oligonucleotide
aaaggagucucgcagauaa

SEQ ID NO: 1268874 - RNA, 19 nt, Artificial Sequence
  Description of Artificial Sequence: Synthetic oligonucleotide
ucuauaaauacagggagca

SEQ ID NO: 1268875 - RNA, 19 nt, Artificial Sequence
  Description of Artificial Sequence: Synthetic oligonucleotide
uaggaacugucaaagagcc

SEQ ID NO: 1268876 - RNA, 19 nt, Artificial Sequence
  Description of Artificial Sequence: Synthetic oligonucleotide
uaacagaugagaugcaccc

SEQ ID NO: 1268877 - RNA, 19 nt, Artificial Sequence
  Description of Artificial Sequence: Synthetic oligonucleotide
auaaauacagggagcaccc

SEQ ID NO: 1268878 - RNA, 19 nt, Artificial Sequence
  Description of Artificial Sequence: Synthetic oligonucleotide
gagucucgcagauaaaccg

SEQ ID NO: 1268879 - RNA, 19 nt, Artificial Sequence
  Description of Artificial Sequence: Synthetic oligonucleotide
aaauacagggagcacccag

SEQ ID NO: 1268880 - RNA, 19 nt, Artificial Sequence
  Description of Artificial Sequence: Synthetic oligonucleotide
auggaaaacucuuggcccc

SEQ ID NO: 1268881 - RNA, 19 nt, Artificial Sequence
  Description of Artificial Sequence: Synthetic oligonucleotide
uagagguuagaccgcaugg

SEQ ID NO: 1268882 - RNA, 19 nt, Artificial Sequence
  Description of Artificial Sequence: Synthetic oligonucleotide
uuaaaagaggggcugggac

SEQ ID NO: 1268883 - RNA, 19 nt, Artificial Sequence
  Description of Artificial Sequence: Synthetic oligonucleotide
uccaacaccgucucguugg

SEQ ID NO: 1268884 - RNA, 19 nt, Artificial Sequence
  Description of Artificial Sequence: Synthetic oligonucleotide
cagauauuccccaacacug

SEQ ID NO: 1268885 - RNA, 19 nt, Artificial Sequence
  Description of Artificial Sequence: Synthetic oligonucleotide
auccgauagagguuagacc

SEQ ID NO: 1268886 - RNA, 19 nt, Artificial Sequence
  Description of Artificial Sequence: Synthetic oligonucleotide
ugagaugcaccccuucggg

SEQ ID NO: 1268887 - RNA, 19 nt, Artificial Sequence
  Description of Artificial Sequence: Synthetic oligonucleotide
acgaucaccggcuuguagg

SEQ ID NO: 1268888 - RNA, 19 nt, Artificial Sequence
  Description of Artificial Sequence: Synthetic oligonucleotide
uagcagauccgauagaggu

SEQ ID NO: 1268889 - RNA, 19 nt, Artificial Sequence
  Description of Artificial Sequence: Synthetic oligonucleotide
ucauccgugacagacagca

SEQ ID NO: 1268890 - RNA, 19 nt, Artificial Sequence
  Description of Artificial Sequence: Synthetic oligonucleotide
auuucuauaaauacaggga

SEQ ID NO: 1268891 - RNA, 19 nt, Artificial Sequence
  Description of Artificial Sequence: Synthetic oligonucleotide
ggaguaacagaugagaugc

SEQ ID NO: 1268892 - RNA, 19 nt, Artificial Sequence
  Description of Artificial Sequence: Synthetic oligonucleotide
ggaacugucaaagagcccg

SEQ ID NO: 1268893 - RNA, 19 nt, Artificial Sequence
  Description of Artificial Sequence: Synthetic oligonucleotide
cugucauucacagaggggc

SEQ ID NO: 1268894 - RNA, 19 nt, Artificial Sequence
  Description of Artificial Sequence: Synthetic oligonucleotide
agucaaggguccuuaaaag

SEQ ID NO: 1268895 - RNA, 19 nt, Artificial Sequence
  Description of Artificial Sequence: Synthetic oligonucleotide
uccgugacagacagcaagg

SEQ ID NO: 1268896 - RNA, 19 nt, Artificial Sequence
  Description of Artificial Sequence: Synthetic oligonucleotide
aggagcaaggcccacgccg

SEQ ID NO: 1268897 - RNA, 19 nt, Artificial Sequence
  Description of Artificial Sequence: Synthetic oligonucleotide
gaaagagaccccuguggcg

SEQ ID NO: 1268898 - RNA, 19 nt, Artificial Sequence
  Description of Artificial Sequence: Synthetic oligonucleotide
ucuucaacccaaaggaguc

SEQ ID NO: 1268899 - RNA, 19 nt, Artificial Sequence
  Description of Artificial Sequence: Synthetic oligonucleotide
uggagugccagguagugug

SEQ ID NO: 1268900 - RNA, 19 nt, Artificial Sequence
  Description of Artificial Sequence: Synthetic oligonucleotide
aaagagcccgugcaccacg

SEQ ID NO: 1268901 - RNA, 19 nt, Artificial Sequence
  Description of Artificial Sequence: Synthetic oligonucleotide
cccaauacugaucauaggg

SEQ ID NO: 1268902 - RNA, 19 nt, Artificial Sequence
  Description of Artificial Sequence: Synthetic oligonucleotide
ucguuggcaucauagaaac

SEQ ID NO: 1268903 - RNA, 19 nt, Artificial Sequence
  Description of Artificial Sequence: Synthetic oligonucleotide
cucacuauggcuccccggg

SEQ ID NO: 1268904 - RNA, 19 nt, Artificial Sequence
  Description of Artificial Sequence: Synthetic oligonucleotide
auccgugacagacagcaag

SEQ ID NO: 1268905 - RNA, 19 nt, Artificial Sequence
  Description of Artificial Sequence: Synthetic oligonucleotide
aagaaccuaggcucccagg

SEQ ID NO: 1268906 - RNA, 19 nt, Artificial Sequence
  Description of Artificial Sequence: Synthetic oligonucleotide
aaaauguccugaguggccu

SEQ ID NO: 1268907 - RNA, 19 nt, Artificial Sequence
  Description of Artificial Sequence: Synthetic oligonucleotide
accugucauucacagaggg

SEQ ID NO: 1268908 - RNA, 19 nt, Artificial Sequence
  Description of Artificial Sequence: Synthetic oligonucleotide
gaugacuccaucgucagga

SEQ ID NO: 1268909 - RNA, 19 nt, Artificial Sequence
  Description of Artificial Sequence: Synthetic oligonucleotide
ucgcagauaaaccggcugc

SEQ ID NO: 1268910 - RNA, 19 nt, Artificial Sequence
  Description of Artificial Sequence: Synthetic oligonucleotide
aggagucucgcagauaaac

SEQ ID NO: 1268911 - RNA, 19 nt, Artificial Sequence
  Description of Artificial Sequence: Synthetic oligonucleotide
ucauagagcgugcgauugg

SEQ ID NO: 1268912 - RNA, 19 nt, Artificial Sequence
  Description of Artificial Sequence: Synthetic oligonucleotide
gaaaaggggacaacagaag

SEQ ID NO: 1268913 - RNA, 19 nt, Artificial Sequence
  Description of Artificial Sequence: Synthetic oligonucleotide
gaagagccacuucaaguag

SEQ ID NO: 1268914 - RNA, 19 nt, Artificial Sequence
  Description of Artificial Sequence: Synthetic oligonucleotide
cagguagugugagagaucc

SEQ ID NO: 1268915 - RNA, 19 nt, Artificial Sequence
  Description of Artificial Sequence: Synthetic oligonucleotide
aagaauccacguugugcuc

SEQ ID NO: 1268916 - RNA, 19 nt, Artificial Sequence
  Description of Artificial Sequence: Synthetic oligonucleotide
accacggcuucucggaacc

SEQ ID NO: 1268917 - RNA, 19 nt, Artificial Sequence
  Description of Artificial Sequence: Synthetic oligonucleotide
auagagguuagaccgcaug

SEQ ID NO: 1268918 - RNA, 19 nt, Artificial Sequence
  Description of Artificial Sequence: Synthetic oligonucleotide
aaagcuagauugccaggga

SEQ ID NO: 1268919 - RNA, 19 nt, Artificial Sequence
  Description of Artificial Sequence: Synthetic oligonucleotide
ucgaagaggucgagcaccg

SEQ ID NO: 1268920 - RNA, 19 nt, Artificial Sequence
  Description of Artificial Sequence: Synthetic oligonucleotide
guaggaacugucaaagagc

SEQ ID NO: 1268921 - RNA, 19 nt, Artificial Sequence
  Description of Artificial Sequence: Synthetic oligonucleotide
ucgcuucccaaccucagcc

SEQ ID NO: 1268922 - RNA, 19 nt, Artificial Sequence
  Description of Artificial Sequence: Synthetic oligonucleotide
agagcgugcgauuggagug

SEQ ID NO: 1268923 - RNA, 19 nt, Artificial Sequence
  Description of Artificial Sequence: Synthetic oligonucleotide
ucagaaccccuccuauggg

SEQ ID NO: 1268924 - RNA, 19 nt, Artificial Sequence
  Description of Artificial Sequence: Synthetic oligonucleotide
cagauaaaccggcugcucc

SEQ ID NO: 1268925 - RNA, 19 nt, Artificial Sequence
  Description of Artificial Sequence: Synthetic oligonucleotide
gauauuccccaacacugac

SEQ ID NO: 1268926 - RNA, 19 nt, Artificial Sequence
  Description of Artificial Sequence: Synthetic oligonucleotide
aaccuaggcucccagggga

SEQ ID NO: 1268927 - RNA, 19 nt, Artificial Sequence
  Description of Artificial Sequence: Synthetic oligonucleotide
ucaacccaaaggagucucg

SEQ ID NO: 1268928 - RNA, 19 nt, Artificial Sequence
  Description of Artificial Sequence: Synthetic oligonucleotide
uuagaccgcauggacgugg

SEQ ID NO: 1268929 - RNA, 19 nt, Artificial Sequence
  Description of Artificial Sequence: Synthetic oligonucleotide
gauccgauagagguuagac

SEQ ID NO: 1268930 - RNA, 19 nt, Artificial Sequence
  Description of Artificial Sequence: Synthetic oligonucleotide
auaaaccggcugcuccucc

SEQ ID NO: 1268931 - RNA, 19 nt, Artificial Sequence
  Description of Artificial Sequence: Synthetic oligonucleotide
uccacguugugcucauccg

SEQ ID NO: 1268932 - RNA, 19 nt, Artificial Sequence
  Description of Artificial Sequence: Synthetic oligonucleotide
gaaccuaggcucccagggg

SEQ ID NO: 1268933 - RNA, 19 nt, Artificial Sequence
  Description of Artificial Sequence: Synthetic oligonucleotide
gccaagagagucuucaacc

SEQ ID NO: 1268934 - RNA, 19 nt, Artificial Sequence
  Description of Artificial Sequence: Synthetic oligonucleotide
auacagggagcacccaguc

SEQ ID NO: 1268935 - RNA, 19 nt, Artificial Sequence
  Description of Artificial Sequence: Synthetic oligonucleotide
guagcggugagccaguuaa

SEQ ID NO: 1268936 - RNA, 19 nt, Artificial Sequence
  Description of Artificial Sequence: Synthetic oligonucleotide
ugggaguaacagaugagau

SEQ ID NO: 1268937 - RNA, 19 nt, Artificial Sequence
  Description of Artificial Sequence: Synthetic oligonucleotide
aguugcagauggaaaacuc

SEQ ID NO: 1268938 - RNA, 19 nt, Artificial Sequence
  Description of Artificial Sequence: Synthetic oligonucleotide
agauaaaccggcugcuccu

SEQ ID NO: 1268939 - RNA, 19 nt, Artificial Sequence
  Description of Artificial Sequence: Synthetic oligonucleotide
uccuuaaaagaggggcugg

SEQ ID NO: 1268940 - RNA, 19 nt, Artificial Sequence
  Description of Artificial Sequence: Synthetic oligonucleotide
aauacagggagcacccagu

SEQ ID NO: 1268941 - RNA, 19 nt, Artificial Sequence
  Description of Artificial Sequence: Synthetic oligonucleotide
uagagcgugcgauuggagu

SEQ ID NO: 1268942 - RNA, 19 nt, Artificial Sequence
  Description of Artificial Sequence: Synthetic oligonucleotide
gagguuagaccgcauggac

SEQ ID NO: 1268943 - RNA, 19 nt, Artificial Sequence
  Description of Artificial Sequence: Synthetic oligonucleotide
ugucauucacagaggggca

SEQ ID NO: 1268944 - RNA, 19 nt, Artificial Sequence
  Description of Artificial Sequence: Synthetic oligonucleotide
agaugaaagaauccacguu

SEQ ID NO: 1268945 - RNA, 19 nt, Artificial Sequence
  Description of Artificial Sequence: Synthetic oligonucleotide
aaagggagagcauccccaa

SEQ ID NO: 1268946 - RNA, 19 nt, Artificial Sequence
  Description of Artificial Sequence: Synthetic oligonucleotide
ggaaagagaccccuguggc

SEQ ID NO: 1268947 - RNA, 19 nt, Artificial Sequence
  Description of Artificial Sequence: Synthetic oligonucleotide
gaagaggucgagcaccguc

SEQ ID NO: 1268948 - RNA, 19 nt, Artificial Sequence
  Description of Artificial Sequence: Synthetic oligonucleotide
ucucugccaucgaagaggu

SEQ ID NO: 1268949 - RNA, 19 nt, Artificial Sequence
  Description of Artificial Sequence: Synthetic oligonucleotide
aacccaaaggagucucgca

SEQ ID NO: 1268950 - RNA, 19 nt, Artificial Sequence
  Description of Artificial Sequence: Synthetic oligonucleotide
cuuguaggagccgcggugg

SEQ ID NO: 1268951 - RNA, 19 nt, Artificial Sequence
  Description of Artificial Sequence: Synthetic oligonucleotide
gucaaggguccuuaaaaga

SEQ ID NO: 1268952 - RNA, 19 nt, Artificial Sequence
  Description of Artificial Sequence: Synthetic oligonucleotide
cuaugggugucccuccuag

SEQ ID NO: 1268953 - RNA, 19 nt, Artificial Sequence
  Description of Artificial Sequence: Synthetic oligonucleotide
gcuacuggcauugagguac

SEQ ID NO: 1268954 - RNA, 19 nt, Artificial Sequence
  Description of Artificial Sequence: Synthetic oligonucleotide
uagauugccagggagugau

SEQ ID NO: 1268955 - RNA, 19 nt, Artificial Sequence
  Description of Artificial Sequence: Synthetic oligonucleotide
gagagucuucaacccaaag

SEQ ID NO: 1268956 - RNA, 19 nt, Artificial Sequence
  Description of Artificial Sequence: Synthetic oligonucleotide
caagcucucucugccaucg

SEQ ID NO: 1268957 - RNA, 19 nt, Artificial Sequence
  Description of Artificial Sequence: Synthetic oligonucleotide
agucucgcagauaaaccgg

SEQ ID NO: 1268958 - RNA, 19 nt, Artificial Sequence
  Description of Artificial Sequence: Synthetic oligonucleotide
agguuagaccgcauggacg

SEQ ID NO: 1268959 - RNA, 19 nt, Artificial Sequence
  Description of Artificial Sequence: Synthetic oligonucleotide
accccaauacugaucauag

SEQ ID NO: 1268960 - RNA, 19 nt, Artificial Sequence
  Description of Artificial Sequence: Synthetic oligonucleotide
aagagagucuucaacccaa

SEQ ID NO: 1268961 - RNA, 19 nt, Artificial Sequence
  Description of Artificial Sequence: Synthetic oligonucleotide
uagaccgcauggacguggg

SEQ ID NO: 1268962 - RNA, 19 nt, Artificial Sequence
  Description of Artificial Sequence: Synthetic oligonucleotide
ucucggaacccuugcaccu

SEQ ID NO: 1268963 - RNA, 19 nt, Artificial Sequence
  Description of Artificial Sequence: Synthetic oligonucleotide
gagguacaagucgucgugg

SEQ ID NO: 1268964 - RNA, 19 nt, Artificial Sequence
  Description of Artificial Sequence: Synthetic oligonucleotide
aggcacggcacaccaggcc

SEQ ID NO: 1268965 - RNA, 19 nt, Artificial Sequence
  Description of Artificial Sequence: Synthetic oligonucleotide
aagagaccccuguggcggg

SEQ ID NO: 1268966 - RNA, 19 nt, Artificial Sequence
  Description of Artificial Sequence: Synthetic oligonucleotide
agugucauagagcgugcga

SEQ ID NO: 1268967 - RNA, 19 nt, Artificial Sequence
  Description of Artificial Sequence: Synthetic oligonucleotide
ugcgauuggagugccaggu

SEQ ID NO: 1268968 - RNA, 19 nt, Artificial Sequence
  Description of Artificial Sequence: Synthetic oligonucleotide
agaggucgagcaccgucac

SEQ ID NO: 1268969 - RNA, 19 nt, Artificial Sequence
  Description of Artificial Sequence: Synthetic oligonucleotide
cacguugugcucauccgug

SEQ ID NO: 1268970 - RNA, 19 nt, Artificial Sequence
  Description of Artificial Sequence: Synthetic oligonucleotide
cacagauauuccccaacac

SEQ ID NO: 1268971 - RNA, 19 nt, Artificial Sequence
  Description of Artificial Sequence: Synthetic oligonucleotide
ggguccuuaaaagaggggc

SEQ ID NO: 1268972 - RNA, 19 nt, Artificial Sequence
  Description of Artificial Sequence: Synthetic oligonucleotide
guagcagauccgauagagg

SEQ ID NO: 1268973 - RNA, 19 nt, Artificial Sequence
  Description of Artificial Sequence: Synthetic oligonucleotide
gucauagagcgugcgauug

SEQ ID NO: 1268974 - RNA, 19 nt, Artificial Sequence
  Description of Artificial Sequence: Synthetic oligonucleotide
cagauccggagcagcagcg

SEQ ID NO: 1268975 - RNA, 19 nt, Artificial Sequence
  Description of Artificial Sequence: Synthetic oligonucleotide
augguucaaugcaaguguc

SEQ ID NO: 1268976 - RNA, 19 nt, Artificial Sequence
  Description of Artificial Sequence: Synthetic oligonucleotide
cucgcagauaaaccggcug

SEQ ID NO: 1268977 - RNA, 19 nt, Artificial Sequence
  Description of Artificial Sequence: Synthetic oligonucleotide
aaaccugagaugggccuug

SEQ ID NO: 1268978 - RNA, 19 nt, Artificial Sequence
  Description of Artificial Sequence: Synthetic oligonucleotide
agaugggccuugcaggcca

SEQ ID NO: 1268979 - RNA, 19 nt, Artificial Sequence
  Description of Artificial Sequence: Synthetic oligonucleotide
ccaagagagucuucaaccc

SEQ ID NO: 1268980 - RNA, 19 nt, Artificial Sequence
  Description of Artificial Sequence: Synthetic oligonucleotide
agugugggagcgaugaggu

SEQ ID NO: 1268981 - RNA, 19 nt, Artificial Sequence
  Description of Artificial Sequence: Synthetic oligonucleotide
gauugccagggagugauga

SEQ ID NO: 1268982 - RNA, 19 nt, Artificial Sequence
  Description of Artificial Sequence: Synthetic oligonucleotide
caugguucaaugcaagugu

SEQ ID NO: 1268983 - RNA, 19 nt, Artificial Sequence
  Description of Artificial Sequence: Synthetic oligonucleotide
cuccuagugggaaggccgg

SEQ ID NO: 1268984 - RNA, 19 nt, Artificial Sequence
  Description of Artificial Sequence: Synthetic oligonucleotide
caagugucauagagcgugc

SEQ ID NO: 1268985 - RNA, 19 nt, Artificial Sequence
  Description of Artificial Sequence: Synthetic oligonucleotide
gaaggccggcgacaggaag

SEQ ID NO: 1268986 - RNA, 19 nt, Artificial Sequence
  Description of Artificial Sequence: Synthetic oligonucleotide
gucgugguggggaucaugc

SEQ ID NO: 1268987 - RNA, 19 nt, Artificial Sequence
  Description of Artificial Sequence: Synthetic oligonucleotide
cucguuggcaucauagaaa

SEQ ID NO: 1268988 - RNA, 19 nt, Artificial Sequence
  Description of Artificial Sequence: Synthetic oligonucleotide
auuggagugccagguagug

SEQ ID NO: 1268989 - RNA, 19 nt, Artificial Sequence
  Description of Artificial Sequence: Synthetic oligonucleotide
cacuggacaccucacuaug

SEQ ID NO: 1268990 - RNA, 19 nt, Artificial Sequence
  Description of Artificial Sequence: Synthetic oligonucleotide
cacuauggcuccccgggcc

SEQ ID NO: 1268991 - RNA, 19 nt, Artificial Sequence
  Description of Artificial Sequence: Synthetic oligonucleotide
ucacuauggcuccccgggc

SEQ ID NO: 1268992 - RNA, 19 nt, Artificial Sequence
  Description of Artificial Sequence: Synthetic oligonucleotide
gggauggucucucuccccg

SEQ ID NO: 1268993 - RNA, 19 nt, Artificial Sequence
  Description of Artificial Sequence: Synthetic oligonucleotide
gagugaugacuccaucguc

SEQ ID NO: 1268994 - RNA, 19 nt, Artificial Sequence
  Description of Artificial Sequence: Synthetic oligonucleotide
ccuccuagugggaaggccg

SEQ ID NO: 1268995 - RNA, 19 nt, Artificial Sequence
  Description of Artificial Sequence: Synthetic oligonucleotide
agagguuagaccgcaugga

SEQ ID NO: 1268996 - RNA, 19 nt, Artificial Sequence
  Description of Artificial Sequence: Synthetic oligonucleotide
gauucagggcgcccuggug

SEQ ID NO: 1268997 - RNA, 19 nt, Artificial Sequence
  Description of Artificial Sequence: Synthetic oligonucleotide
cagucaaggguccuuaaaa

SEQ ID NO: 1268998 - RNA, 19 nt, Artificial Sequence
  Description of Artificial Sequence: Synthetic oligonucleotide
guccuuaaaagaggggcug

SEQ ID NO: 1268999 - RNA, 19 nt, Artificial Sequence
  Description of Artificial Sequence: Synthetic oligonucleotide
ccugagaugggccuugcag

SEQ ID NO: 1269000 - RNA, 19 nt, Artificial Sequence
  Description of Artificial Sequence: Synthetic oligonucleotide
ucucgcagauaaaccggcu

SEQ ID NO: 1269001 - RNA, 19 nt, Artificial Sequence
  Description of Artificial Sequence: Synthetic oligonucleotide
gcucauccgugacagacag

SEQ ID NO: 1269002 - RNA, 19 nt, Artificial Sequence
  Description of Artificial Sequence: Synthetic oligonucleotide
cuggaaagagaccccugug

SEQ ID NO: 1269003 - RNA, 19 nt, Artificial Sequence
  Description of Artificial Sequence: Synthetic oligonucleotide
ucaaugcaagugucauaga

SEQ ID NO: 1269004 - RNA, 19 nt, Artificial Sequence
  Description of Artificial Sequence: Synthetic oligonucleotide
ucggaacccuugcaccugc

SEQ ID NO: 1269005 - RNA, 19 nt, Artificial Sequence
  Description of Artificial Sequence: Synthetic oligonucleotide
caugagguagggaccagga

SEQ ID NO: 1269006 - RNA, 19 nt, Artificial Sequence
  Description of Artificial Sequence: Synthetic oligonucleotide
agguacaagucgucguggu

SEQ ID NO: 1269007 - RNA, 19 nt, Artificial Sequence
  Description of Artificial Sequence: Synthetic oligonucleotide
cugacacuucaaaagugga

SEQ ID NO: 1269008 - RNA, 19 nt, Artificial Sequence
  Description of Artificial Sequence: Synthetic oligonucleotide
aaccugagaugggccuugc

SEQ ID NO: 1269009 - RNA, 19 nt, Artificial Sequence
  Description of Artificial Sequence: Synthetic oligonucleotide
gggaccucaaagaaccuag

SEQ ID NO: 1269010 - RNA, 19 nt, Artificial Sequence
  Description of Artificial Sequence: Synthetic oligonucleotide
cugggaguaacagaugaga

SEQ ID NO: 1269011 - RNA, 19 nt, Artificial Sequence
  Description of Artificial Sequence: Synthetic oligonucleotide
ugucauagagcgugcgauu

SEQ ID NO: 1269012 - RNA, 19 nt, Artificial Sequence
  Description of Artificial Sequence: Synthetic oligonucleotide
caagagagucuucaaccca

SEQ ID NO: 1269013 - RNA, 19 nt, Artificial Sequence
  Description of Artificial Sequence: Synthetic oligonucleotide
caacccaaaggagucucgc

SEQ ID NO: 1269014 - RNA, 19 nt, Artificial Sequence
  Description of Artificial Sequence: Synthetic oligonucleotide
gaccugucauucacagagg

SEQ ID NO: 1269015 - RNA, 19 nt, Artificial Sequence
  Description of Artificial Sequence: Synthetic oligonucleotide
accucacuauggcuccccg

SEQ ID NO: 1269016 - RNA, 19 nt, Artificial Sequence
  Description of Artificial Sequence: Synthetic oligonucleotide
ggagcgaugagguggucac

SEQ ID NO: 1269017 - RNA, 19 nt, Artificial Sequence
  Description of Artificial Sequence: Synthetic oligonucleotide
gggaaaaggggacaacaga

SEQ ID NO: 1269018 - RNA, 19 nt, Artificial Sequence
  Description of Artificial Sequence: Synthetic oligonucleotide
agcacccagucaagggucc

SEQ ID NO: 1269019 - RNA, 19 nt, Artificial Sequence
  Description of Artificial Sequence: Synthetic oligonucleotide
uggacguggggaagagcca

SEQ ID NO: 1269020 - RNA, 19 nt, Artificial Sequence
  Description of Artificial Sequence: Synthetic oligonucleotide
gcaaggcccacgccgaagg

SEQ ID NO: 1269021 - RNA, 19 nt, Artificial Sequence
  Description of Artificial Sequence: Synthetic oligonucleotide
aggaacugucaaagagccc

SEQ ID NO: 1269022 - RNA, 19 nt, Artificial Sequence
  Description of Artificial Sequence: Synthetic oligonucleotide
aaccccuccuauggguguc

SEQ ID NO: 1269023 - RNA, 19 nt, Artificial Sequence
  Description of Artificial Sequence: Synthetic oligonucleotide
uacugaucauagggacugg

SEQ ID NO: 1269024 - RNA, 19 nt, Artificial Sequence
  Description of Artificial Sequence: Synthetic oligonucleotide
uggguucuccuccgguaca

SEQ ID NO: 1269025 - RNA, 19 nt, Artificial Sequence
  Description of Artificial Sequence: Synthetic oligonucleotide
cacuucaaaaguggagcug

SEQ ID NO: 1269026 - RNA, 19 nt, Artificial Sequence
  Description of Artificial Sequence: Synthetic oligonucleotide
caucgaagaggucgagcac

SEQ ID NO: 1269027 - RNA, 19 nt, Artificial Sequence
  Description of Artificial Sequence: Synthetic oligonucleotide
ccaauacugaucauaggga

SEQ ID NO: 1269028 - RNA, 19 nt, Artificial Sequence
  Description of Artificial Sequence: Synthetic oligonucleotide
gaccgcauggacgugggga

SEQ ID NO: 1269029 - RNA, 19 nt, Artificial Sequence
  Description of Artificial Sequence: Synthetic oligonucleotide
acuccaucgucaggacccc

SEQ ID NO: 1269030 - RNA, 19 nt, Artificial Sequence
  Description of Artificial Sequence: Synthetic oligonucleotide
cccgaucagcaccagacgg

SEQ ID NO: 1269031 - RNA, 19 nt, Artificial Sequence
  Description of Artificial Sequence: Synthetic oligonucleotide
cucgcuucccaaccucagc

SEQ ID NO: 1269032 - RNA, 19 nt, Artificial Sequence
  Description of Artificial Sequence: Synthetic oligonucleotide
aagucgucgugguggggau

SEQ ID NO: 1269033 - RNA, 19 nt, Artificial Sequence
  Description of Artificial Sequence: Synthetic oligonucleotide
gcuagauugccagggagug

SEQ ID NO: 1269034 - RNA, 19 nt, Artificial Sequence
  Description of Artificial Sequence: Synthetic oligonucleotide
ugggauggucucucucccc

SEQ ID NO: 1269035 - RNA, 19 nt, Artificial Sequence
  Description of Artificial Sequence: Synthetic oligonucleotide
gugcgauuggagugccagg

SEQ ID NO: 1269036 - RNA, 19 nt, Artificial Sequence
  Description of Artificial Sequence: Synthetic oligonucleotide
agcccgggcaugcucccac

SEQ ID NO: 1269037 - RNA, 19 nt, Artificial Sequence
  Description of Artificial Sequence: Synthetic oligonucleotide
uaugggugucccuccuagu

SEQ ID NO: 1269038 - RNA, 19 nt, Artificial Sequence
  Description of Artificial Sequence: Synthetic oligonucleotide
gucucguuggcaucauaga

SEQ ID NO: 1269039 - RNA, 19 nt, Artificial Sequence
  Description of Artificial Sequence: Synthetic oligonucleotide
cuccuaugggugucccucc

SEQ ID NO: 1269040 - RNA, 19 nt, Artificial Sequence
  Description of Artificial Sequence: Synthetic oligonucleotide
cuucaaguagucugugucu

SEQ ID NO: 1269041 - RNA, 19 nt, Artificial Sequence
  Description of Artificial Sequence: Synthetic oligonucleotide
accgcauggacguggggaa

SEQ ID NO: 1269042 - RNA, 19 nt, Artificial Sequence
  Description of Artificial Sequence: Synthetic oligonucleotide
gagcgugcgauuggagugc

SEQ ID NO: 1269043 - RNA, 19 nt, Artificial Sequence
  Description of Artificial Sequence: Synthetic oligonucleotide
uggaaaacucuuggcccca

SEQ ID NO: 1269044 - RNA, 19 nt, Artificial Sequence
  Description of Artificial Sequence: Synthetic oligonucleotide
ucgugguggggaucaugcc

SEQ ID NO: 1269045 - RNA, 19 nt, Artificial Sequence
  Description of Artificial Sequence: Synthetic oligonucleotide
auggucucucuccccguug

SEQ ID NO: 1269046 - RNA, 19 nt, Artificial Sequence
  Description of Artificial Sequence: Synthetic oligonucleotide
gauaaaccggcugcuccuc

SEQ ID NO: 1269047 - RNA, 19 nt, Artificial Sequence
  Description of Artificial Sequence: Synthetic oligonucleotide
gcuuguaggagccgcggug

SEQ ID NO: 1269048 - RNA, 19 nt, Artificial Sequence
  Description of Artificial Sequence: Synthetic oligonucleotide
aggaggauucagggcgccc

SEQ ID NO: 1269049 - RNA, 19 nt, Artificial Sequence
  Description of Artificial Sequence: Synthetic oligonucleotide
gguacaagucgucguggug

SEQ ID NO: 1269050 - RNA, 19 nt, Artificial Sequence
  Description of Artificial Sequence: Synthetic oligonucleotide
agccaugguucaaugcaag

SEQ ID NO: 1269051 - RNA, 19 nt, Artificial Sequence
  Description of Artificial Sequence: Synthetic oligonucleotide
acguugugcucauccguga

SEQ ID NO: 1269052 - RNA, 19 nt, Artificial Sequence
  Description of Artificial Sequence: Synthetic oligonucleotide
gagcccgugcaccacgauc

SEQ ID NO: 1269053 - RNA, 19 nt, Artificial Sequence
  Description of Artificial Sequence: Synthetic oligonucleotide
agcgugcgauuggagugcc

SEQ ID NO: 1269054 - RNA, 19 nt, Artificial Sequence
  Description of Artificial Sequence: Synthetic oligonucleotide
augggcaccacggcuucuc

SEQ ID NO: 1269055 - RNA, 19 nt, Artificial Sequence
  Description of Artificial Sequence: Synthetic oligonucleotide
aaccucagccgugggagaa

SEQ ID NO: 1269056 - RNA, 19 nt, Artificial Sequence
  Description of Artificial Sequence: Synthetic oligonucleotide
ccaugguucaaugcaagug

SEQ ID NO: 1269057 - RNA, 19 nt, Artificial Sequence
  Description of Artificial Sequence: Synthetic oligonucleotide
guaguccagcagguggcgg

SEQ ID NO: 1269058 - RNA, 19 nt, Artificial Sequence
  Description of Artificial Sequence: Synthetic oligonucleotide
gaucaccggcuuguaggag

SEQ ID NO: 1269059 - RNA, 19 nt, Artificial Sequence
  Description of Artificial Sequence: Synthetic oligonucleotide
cauagagcgugcgauugga

SEQ ID NO: 1269060 - RNA, 19 nt, Artificial Sequence
  Description of Artificial Sequence: Synthetic oligonucleotide
auagagcgugcgauuggag

SEQ ID NO: 1269061 - RNA, 19 nt, Artificial Sequence
  Description of Artificial Sequence: Synthetic oligonucleotide
ggagagccaugguucaaug

SEQ ID NO: 1269062 - RNA, 19 nt, Artificial Sequence
  Description of Artificial Sequence: Synthetic oligonucleotide
aggguccuuaaaagagggg

SEQ ID NO: 1269063 - RNA, 19 nt, Artificial Sequence
  Description of Artificial Sequence: Synthetic oligonucleotide
agcggugagccaguuaaaa

SEQ ID NO: 1269064 - RNA, 19 nt, Artificial Sequence
  Description of Artificial Sequence: Synthetic oligonucleotide
aggaccugucauucacaga

SEQ ID NO: 1269065 - RNA, 19 nt, Artificial Sequence
  Description of Artificial Sequence: Synthetic oligonucleotide
gagcacccagucaaggguc

SEQ ID NO: 1269066 - RNA, 19 nt, Artificial Sequence
  Description of Artificial Sequence: Synthetic oligonucleotide
acggcccacucggagaaag

SEQ ID NO: 1269067 - RNA, 19 nt, Artificial Sequence
  Description of Artificial Sequence: Synthetic oligonucleotide
cuguaggaacugucaaaga

SEQ ID NO: 1269068 - RNA, 19 nt, Artificial Sequence
  Description of Artificial Sequence: Synthetic oligonucleotide
gccgcaagcucucucugcc

SEQ ID NO: 1269069 - RNA, 19 nt, Artificial Sequence
  Description of Artificial Sequence: Synthetic oligonucleotide
guucaaugcaagugucaua

SEQ ID NO: 1269070 - RNA, 19 nt, Artificial Sequence
  Description of Artificial Sequence: Synthetic oligonucleotide
gccgaagggagccucugcc

SEQ ID NO: 1269071 - RNA, 19 nt, Artificial Sequence
  Description of Artificial Sequence: Synthetic oligonucleotide
caaggcccacgccgaaggg

SEQ ID NO: 1269072 - RNA, 19 nt, Artificial Sequence
  Description of Artificial Sequence: Synthetic oligonucleotide
caucuccaacaccgucucg

SEQ ID NO: 1269073 - RNA, 19 nt, Artificial Sequence
  Description of Artificial Sequence: Synthetic oligonucleotide
cgauuggagugccagguag

SEQ ID NO: 1269074 - RNA, 19 nt, Artificial Sequence
  Description of Artificial Sequence: Synthetic oligonucleotide
ccgaucagcaccagacggc

SEQ ID NO: 1269075 - RNA, 19 nt, Artificial Sequence
  Description of Artificial Sequence: Synthetic oligonucleotide
cucucuccccguugaugag

SEQ ID NO: 1269076 - RNA, 19 nt, Artificial Sequence
  Description of Artificial Sequence: Synthetic oligonucleotide
agagaccccuguggcgggc

SEQ ID NO: 1269077 - RNA, 19 nt, Artificial Sequence
  Description of Artificial Sequence: Synthetic oligonucleotide
aggagagccaugguucaau

SEQ ID NO: 1269078 - RNA, 19 nt, Artificial Sequence
  Description of Artificial Sequence: Synthetic oligonucleotide
accuaggcucccaggggac

SEQ ID NO: 1269079 - RNA, 19 nt, Artificial Sequence
  Description of Artificial Sequence: Synthetic oligonucleotide
ccugggaguaacagaugag

SEQ ID NO: 1269080 - RNA, 19 nt, Artificial Sequence
  Description of Artificial Sequence: Synthetic oligonucleotide
gcaccagacggcccacucg

SEQ ID NO: 1269081 - RNA, 19 nt, Artificial Sequence
  Description of Artificial Sequence: Synthetic oligonucleotide
agaccgcauggacgugggg

SEQ ID NO: 1269082 - RNA, 19 nt, Artificial Sequence
  Description of Artificial Sequence: Synthetic oligonucleotide
ggaccucaaagaaccuagg

SEQ ID NO: 1269083 - RNA, 19 nt, Artificial Sequence
  Description of Artificial Sequence: Synthetic oligonucleotide
cagauccgauagagguuag

SEQ ID NO: 1269084 - RNA, 19 nt, Artificial Sequence
  Description of Artificial Sequence: Synthetic oligonucleotide
cacaagggccgcaagcucu

SEQ ID NO: 1269085 - RNA, 19 nt, Artificial Sequence
  Description of Artificial Sequence: Synthetic oligonucleotide
agauccgauagagguuaga

SEQ ID NO: 1269086 - RNA, 19 nt, Artificial Sequence
  Description of Artificial Sequence: Synthetic oligonucleotide
gccacagauauuccccaac

SEQ ID NO: 1269087 - RNA, 19 nt, Artificial Sequence
  Description of Artificial Sequence: Synthetic oligonucleotide
ggggccuuuccaugauggg

SEQ ID NO: 1269088 - RNA, 19 nt, Artificial Sequence
  Description of Artificial Sequence: Synthetic oligonucleotide
cugccaucgaagaggucga

SEQ ID NO: 1269089 - RNA, 19 nt, Artificial Sequence
  Description of Artificial Sequence: Synthetic oligonucleotide
gucgucgugguggggauca

SEQ ID NO: 1269090 - RNA, 19 nt, Artificial Sequence
  Description of Artificial Sequence: Synthetic oligonucleotide
uccuccgguacagccagau

SEQ ID NO: 1269091 - RNA, 19 nt, Artificial Sequence
  Description of Artificial Sequence: Synthetic oligonucleotide
uggcuccccgggccaagag

SEQ ID NO: 1269092 - RNA, 19 nt, Artificial Sequence
  Description of Artificial Sequence: Synthetic oligonucleotide
gcugcgggcaucagcagcc

SEQ ID NO: 1269093 - RNA, 19 nt, Artificial Sequence
  Description of Artificial Sequence: Synthetic oligonucleotide
gcuccccgggccaagagag

SEQ ID NO: 1269094 - RNA, 19 nt, Artificial Sequence
  Description of Artificial Sequence: Synthetic oligonucleotide
cagacggcccacucggaga

SEQ ID NO: 1269095 - RNA, 19 nt, Artificial Sequence
  Description of Artificial Sequence: Synthetic oligonucleotide
ggacaugagguagggacca

SEQ ID NO: 1269096 - RNA, 19 nt, Artificial Sequence
  Description of Artificial Sequence: Synthetic oligonucleotide
ccgauagagguuagaccgc

SEQ ID NO: 1269097 - RNA, 19 nt, Artificial Sequence
  Description of Artificial Sequence: Synthetic oligonucleotide
gaccaggaccugucauuca

SEQ ID NO: 1269098 - RNA, 19 nt, Artificial Sequence
  Description of Artificial Sequence: Synthetic oligonucleotide
uccuagugggaaggccggc

SEQ ID NO: 1269099 - RNA, 19 nt, Artificial Sequence
  Description of Artificial Sequence: Synthetic oligonucleotide
agcuacuggcauugaggua

SEQ ID NO: 1269100 - RNA, 19 nt, Artificial Sequence
  Description of Artificial Sequence: Synthetic oligonucleotide
acaagucgucguggugggg

SEQ ID NO: 1269101 - RNA, 19 nt, Artificial Sequence
  Description of Artificial Sequence: Synthetic oligonucleotide
gcagauccgauagagguua

SEQ ID NO: 1269102 - RNA, 19 nt, Artificial Sequence
  Description of Artificial Sequence: Synthetic oligonucleotide
ugccaucgaagaggucgag

SEQ ID NO: 1269103 - RNA, 19 nt, Artificial Sequence
  Description of Artificial Sequence: Synthetic oligonucleotide
ggcaucauagaaaccgaaa

SEQ ID NO: 1269104 - RNA, 19 nt, Artificial Sequence
  Description of Artificial Sequence: Synthetic oligonucleotide
cucggaacccuugcaccug

SEQ ID NO: 1269105 - RNA, 19 nt, Artificial Sequence
  Description of Artificial Sequence: Synthetic oligonucleotide
ccccaauacugaucauagg

SEQ ID NO: 1269106 - RNA, 19 nt, Artificial Sequence
  Description of Artificial Sequence: Synthetic oligonucleotide
ccuagugggaaggccggcg

SEQ ID NO: 1269107 - RNA, 19 nt, Artificial Sequence
  Description of Artificial Sequence: Synthetic oligonucleotide
gagggccaggaagcuacug

SEQ ID NO: 1269108 - RNA, 19 nt, Artificial Sequence
  Description of Artificial Sequence: Synthetic oligonucleotide
gugugggagcgaugaggug

SEQ ID NO: 1269109 - RNA, 19 nt, Artificial Sequence
  Description of Artificial Sequence: Synthetic oligonucleotide
accugagaugggccuugca

SEQ ID NO: 1269110 - RNA, 19 nt, Artificial Sequence
  Description of Artificial Sequence: Synthetic oligonucleotide
caccucacuauggcucccc

SEQ ID NO: 1269111 - RNA, 19 nt, Artificial Sequence
  Description of Artificial Sequence: Synthetic oligonucleotide
ggcuguagcagauccgaua

SEQ ID NO: 1269112 - RNA, 19 nt, Artificial Sequence
  Description of Artificial Sequence: Synthetic oligonucleotide
ggggcugcgggcaucagca

SEQ ID NO: 1269113 - RNA, 19 nt, Artificial Sequence
  Description of Artificial Sequence: Synthetic oligonucleotide
gcgaugagguggucacagg

SEQ ID NO: 1269114 - RNA, 19 nt, Artificial Sequence
  Description of Artificial Sequence: Synthetic oligonucleotide
gaugagggccaggaagcua

SEQ ID NO: 1269115 - RNA, 19 nt, Artificial Sequence
  Description of Artificial Sequence: Synthetic oligonucleotide
cccugggaguaacagauga

SEQ ID NO: 1269116 - RNA, 19 nt, Artificial Sequence
  Description of Artificial Sequence: Synthetic oligonucleotide
uaggagccgcgguggggug

SEQ ID NO: 1269117 - RNA, 19 nt, Artificial Sequence
  Description of Artificial Sequence: Synthetic oligonucleotide
guuagaccgcauggacgug

SEQ ID NO: 1269118 - RNA, 19 nt, Artificial Sequence
  Description of Artificial Sequence: Synthetic oligonucleotide
cuagauugccagggaguga

SEQ ID NO: 1269119 - RNA, 19 nt, Artificial Sequence
  Description of Artificial Sequence: Synthetic oligonucleotide
uuccuccaugcaguggcau

SEQ ID NO: 1269120 - RNA, 19 nt, Artificial Sequence
  Description of Artificial Sequence: Synthetic oligonucleotide
ggacguggggaagagccac

SEQ ID NO: 1269121 - RNA, 19 nt, Artificial Sequence
  Description of Artificial Sequence: Synthetic oligonucleotide
ucuccccguugaugagggc

SEQ ID NO: 1269122 - RNA, 19 nt, Artificial Sequence
  Description of Artificial Sequence: Synthetic oligonucleotide
ucccuccuagugggaaggc

SEQ ID NO: 1269123 - RNA, 19 nt, Artificial Sequence
  Description of Artificial Sequence: Synthetic oligonucleotide
cgugcgauuggagugccag

SEQ ID NO: 1269124 - RNA, 19 nt, Artificial Sequence
  Description of Artificial Sequence: Synthetic oligonucleotide
cuguagcagauccgauaga

SEQ ID NO: 1269125 - RNA, 19 nt, Artificial Sequence
  Description of Artificial Sequence: Synthetic oligonucleotide
ggcauugggauggucucuc

SEQ ID NO: 1269126 - RNA, 19 nt, Artificial Sequence
  Description of Artificial Sequence: Synthetic oligonucleotide
cucccacaagggccgcaag

SEQ ID NO: 1269127 - RNA, 19 nt, Artificial Sequence
  Description of Artificial Sequence: Synthetic oligonucleotide
ggccgcaagcucucucugc

SEQ ID NO: 1269128 - RNA, 19 nt, Artificial Sequence
  Description of Artificial Sequence: Synthetic oligonucleotide
gguccuuaaaagaggggcu

SEQ ID NO: 1269129 - RNA, 19 nt, Artificial Sequence
  Description of Artificial Sequence: Synthetic oligonucleotide
caggggacaccccaauacu

SEQ ID NO: 1269130 - RNA, 19 nt, Artificial Sequence
  Description of Artificial Sequence: Synthetic oligonucleotide
aggggacaacagaagcuaa

SEQ ID NO: 1269131 - RNA, 19 nt, Artificial Sequence
  Description of Artificial Sequence: Synthetic oligonucleotide
gcauugagguacaagucgu

SEQ ID NO: 1269132 - RNA, 19 nt, Artificial Sequence
  Description of Artificial Sequence: Synthetic oligonucleotide
cccaaaggagucucgcaga

SEQ ID NO: 1269133 - RNA, 19 nt, Artificial Sequence
  Description of Artificial Sequence: Synthetic oligonucleotide
caaccucagccgugggaga

SEQ ID NO: 1269134 - RNA, 19 nt, Artificial Sequence
  Description of Artificial Sequence: Synthetic oligonucleotide
gggcugggaccucaaagaa

SEQ ID NO: 1269135 - RNA, 19 nt, Artificial Sequence
  Description of Artificial Sequence: Synthetic oligonucleotide
agauugccagggagugaug

SEQ ID NO: 1269136 - RNA, 19 nt, Artificial Sequence
  Description of Artificial Sequence: Synthetic oligonucleotide
ccagguagugugagagauc

SEQ ID NO: 1269137 - RNA, 19 nt, Artificial Sequence
  Description of Artificial Sequence: Synthetic oligonucleotide
gccggcgacaggaaguuga

SEQ ID NO: 1269138 - RNA, 19 nt, Artificial Sequence
  Description of Artificial Sequence: Synthetic oligonucleotide
gcauggacguggggaagag

SEQ ID NO: 1269139 - RNA, 19 nt, Artificial Sequence
  Description of Artificial Sequence: Synthetic oligonucleotide
caccgucucguuggcauca

SEQ ID NO: 1269140 - RNA, 19 nt, Artificial Sequence
  Description of Artificial Sequence: Synthetic oligonucleotide
gcaccgucaccacgguccc

SEQ ID NO: 1269141 - RNA, 19 nt, Artificial Sequence
  Description of Artificial Sequence: Synthetic oligonucleotide
ggagccgcgguggggugcg

SEQ ID NO: 1269142 - RNA, 19 nt, Artificial Sequence
  Description of Artificial Sequence: Synthetic oligonucleotide
agagcccgugcaccacgau

SEQ ID NO: 1269143 - RNA, 19 nt, Artificial Sequence
  Description of Artificial Sequence: Synthetic oligonucleotide
gggagcgaugaggugguca

SEQ ID NO: 1269144 - RNA, 19 nt, Artificial Sequence
  Description of Artificial Sequence: Synthetic oligonucleotide
cgugguggggaucaugcca

SEQ ID NO: 1269145 - RNA, 19 nt, Artificial Sequence
  Description of Artificial Sequence: Synthetic oligonucleotide
gagcgaugagguggucaca

SEQ ID NO: 1269146 - RNA, 19 nt, Artificial Sequence
  Description of Artificial Sequence: Synthetic oligonucleotide
agggcgcccugguggggug

SEQ ID NO: 1269147 - RNA, 19 nt, Artificial Sequence
  Description of Artificial Sequence: Synthetic oligonucleotide
gccuuuccaugaugggcac

SEQ ID NO: 1269148 - RNA, 19 nt, Artificial Sequence
  Description of Artificial Sequence: Synthetic oligonucleotide
acgccgaagggagccucug

SEQ ID NO: 1269149 - RNA, 19 nt, Artificial Sequence
  Description of Artificial Sequence: Synthetic oligonucleotide
gauagagguuagaccgcau

SEQ ID NO: 1269150 - RNA, 19 nt, Artificial Sequence
  Description of Artificial Sequence: Synthetic oligonucleotide
cugcuucccaaggccacca

SEQ ID NO: 1269151 - RNA, 19 nt, Artificial Sequence
  Description of Artificial Sequence: Synthetic oligonucleotide
gcaagcucucucugccauc

SEQ ID NO: 1269152 - RNA, 19 nt, Artificial Sequence
  Description of Artificial Sequence: Synthetic oligonucleotide
cguugugcucauccgugac

SEQ ID NO: 1269153 - RNA, 19 nt, Artificial Sequence
  Description of Artificial Sequence: Synthetic oligonucleotide
cauccgugacagacagcaa

SEQ ID NO: 1269154 - RNA, 19 nt, Artificial Sequence
  Description of Artificial Sequence: Synthetic oligonucleotide
gagaccccuguggcgggca

SEQ ID NO: 1269155 - RNA, 19 nt, Artificial Sequence
  Description of Artificial Sequence: Synthetic oligonucleotide
gggccgcaagcucucucug

SEQ ID NO: 1269156 - RNA, 19 nt, Artificial Sequence
  Description of Artificial Sequence: Synthetic oligonucleotide
gagccacuucaaguagucu

SEQ ID NO: 1269157 - RNA, 19 nt, Artificial Sequence
  Description of Artificial Sequence: Synthetic oligonucleotide
gcccacgccgaagggagcc

SEQ ID NO: 1269158 - RNA, 19 nt, Artificial Sequence
  Description of Artificial Sequence: Synthetic oligonucleotide
ggcuccccgggccaagaga

SEQ ID NO: 1269159 - RNA, 19 nt, Artificial Sequence
  Description of Artificial Sequence: Synthetic oligonucleotide
ccuggaaagagaccccugu

SEQ ID NO: 1269160 - RNA, 19 nt, Artificial Sequence
  Description of Artificial Sequence: Synthetic oligonucleotide
cacggucccggggugcguc

SEQ ID NO: 1269161 - RNA, 19 nt, Artificial Sequence
  Description of Artificial Sequence: Synthetic oligonucleotide
gcgucucauugauguaguc

SEQ ID NO: 1269162 - RNA, 19 nt, Artificial Sequence
  Description of Artificial Sequence: Synthetic oligonucleotide
caaaggagucucgcagaua

SEQ ID NO: 1269163 - RNA, 19 nt, Artificial Sequence
  Description of Artificial Sequence: Synthetic oligonucleotide
cccuccuagugggaaggcc

SEQ ID NO: 1269164 - RNA, 19 nt, Artificial Sequence
  Description of Artificial Sequence: Synthetic oligonucleotide
ggugcucgcuucccaaccu

SEQ ID NO: 1269165 - RNA, 19 nt, Artificial Sequence
  Description of Artificial Sequence: Synthetic oligonucleotide
ccaggaccugucauucaca

SEQ ID NO: 1269166 - RNA, 19 nt, Artificial Sequence
  Description of Artificial Sequence: Synthetic oligonucleotide
ccagucaaggguccuuaaa

SEQ ID NO: 1269167 - RNA, 19 nt, Artificial Sequence
  Description of Artificial Sequence: Synthetic oligonucleotide
accucagccgugggagaaa

SEQ ID NO: 1269168 - RNA, 19 nt, Artificial Sequence
  Description of Artificial Sequence: Synthetic oligonucleotide
gugggagcgaugagguggu

SEQ ID NO: 1269169 - RNA, 19 nt, Artificial Sequence
  Description of Artificial Sequence: Synthetic oligonucleotide
cgaucaccggcuuguagga

SEQ ID NO: 1269170 - RNA, 19 nt, Artificial Sequence
  Description of Artificial Sequence: Synthetic oligonucleotide
ccguugaugagggccagga

SEQ ID NO: 1269171 - RNA, 19 nt, Artificial Sequence
  Description of Artificial Sequence: Synthetic oligonucleotide
ccagggagugaugacucca

SEQ ID NO: 1269172 - RNA, 19 nt, Artificial Sequence
  Description of Artificial Sequence: Synthetic oligonucleotide
cgugcaccacgaucaccgg

SEQ ID NO: 1269173 - RNA, 19 nt, Artificial Sequence
  Description of Artificial Sequence: Synthetic oligonucleotide
gccuggaaagagaccccug

SEQ ID NO: 1269174 - RNA, 19 nt, Artificial Sequence
  Description of Artificial Sequence: Synthetic oligonucleotide
cauccccaagugaggacau

SEQ ID NO: 1269175 - RNA, 19 nt, Artificial Sequence
  Description of Artificial Sequence: Synthetic oligonucleotide
gguagcggugagccaguua

SEQ ID NO: 1269176 - RNA, 19 nt, Artificial Sequence
  Description of Artificial Sequence: Synthetic oligonucleotide
ggauucagggcgcccuggu

SEQ ID NO: 1269177 - RNA, 19 nt, Artificial Sequence
  Description of Artificial Sequence: Synthetic oligonucleotide
ggcuugccagagucuggca

SEQ ID NO: 1269178 - RNA, 19 nt, Artificial Sequence
  Description of Artificial Sequence: Synthetic oligonucleotide
caacaccgucucguuggca

SEQ ID NO: 1269179 - RNA, 19 nt, Artificial Sequence
  Description of Artificial Sequence: Synthetic oligonucleotide
cugggaccucaaagaaccu

SEQ ID NO: 1269180 - RNA, 19 nt, Artificial Sequence
  Description of Artificial Sequence: Synthetic oligonucleotide
cgauagagguuagaccgca

SEQ ID NO: 1269181 - RNA, 19 nt, Artificial Sequence
  Description of Artificial Sequence: Synthetic oligonucleotide
gccagggagaugaaagaau

SEQ ID NO: 1269182 - RNA, 19 nt, Artificial Sequence
  Description of Artificial Sequence: Synthetic oligonucleotide
gccaguaguugcagaugga

SEQ ID NO: 1269183 - RNA, 19 nt, Artificial Sequence
  Description of Artificial Sequence: Synthetic oligonucleotide
caaaccugagaugggccuu

SEQ ID NO: 1269184 - RNA, 19 nt, Artificial Sequence
  Description of Artificial Sequence: Synthetic oligonucleotide
cacggcuucucggaacccu

SEQ ID NO: 1269185 - RNA, 19 nt, Artificial Sequence
  Description of Artificial Sequence: Synthetic oligonucleotide
gcgauuggagugccaggua

SEQ ID NO: 1269186 - RNA, 19 nt, Artificial Sequence
  Description of Artificial Sequence: Synthetic oligonucleotide
cugcucccacaagggccgc

SEQ ID NO: 1269187 - RNA, 19 nt, Artificial Sequence
  Description of Artificial Sequence: Synthetic oligonucleotide
accgucucguuggcaucau

SEQ ID NO: 1269188 - RNA, 19 nt, Artificial Sequence
  Description of Artificial Sequence: Synthetic oligonucleotide
ccaaaggagucucgcagau

SEQ ID NO: 1269189 - RNA, 19 nt, Artificial Sequence
  Description of Artificial Sequence: Synthetic oligonucleotide
ucccggggugcgucucauu

SEQ ID NO: 1269190 - RNA, 19 nt, Artificial Sequence
  Description of Artificial Sequence: Synthetic oligonucleotide
ccaagggcuguagcagauc

SEQ ID NO: 1269191 - RNA, 19 nt, Artificial Sequence
  Description of Artificial Sequence: Synthetic oligonucleotide
ggcgcccuggugggguggg

SEQ ID NO: 1269192 - RNA, 19 nt, Artificial Sequence
  Description of Artificial Sequence: Synthetic oligonucleotide
ugggagcgaugaggugguc

SEQ ID NO: 1269193 - RNA, 19 nt, Artificial Sequence
  Description of Artificial Sequence: Synthetic oligonucleotide
ccacguugugcucauccgu

SEQ ID NO: 1269194 - RNA, 19 nt, Artificial Sequence
  Description of Artificial Sequence: Synthetic oligonucleotide
cccguugaugagggccagg

SEQ ID NO: 1269195 - RNA, 19 nt, Artificial Sequence
  Description of Artificial Sequence: Synthetic oligonucleotide
cacgccgaagggagccucu

SEQ ID NO: 1269196 - RNA, 19 nt, Artificial Sequence
  Description of Artificial Sequence: Synthetic oligonucleotide
ccuccgguacagccagauc

SEQ ID NO: 1269197 - RNA, 19 nt, Artificial Sequence
  Description of Artificial Sequence: Synthetic oligonucleotide
gcccgggcaugcucccacc

SEQ ID NO: 1269198 - RNA, 19 nt, Artificial Sequence
  Description of Artificial Sequence: Synthetic oligonucleotide
ucgucgugguggggaucau

SEQ ID NO: 1269199 - RNA, 19 nt, Artificial Sequence
  Description of Artificial Sequence: Synthetic oligonucleotide
gcccgugcaccacgaucac

SEQ ID NO: 1269200 - RNA, 19 nt, Artificial Sequence
  Description of Artificial Sequence: Synthetic oligonucleotide
ccgucaccacggucccggg

SEQ ID NO: 1269201 - RNA, 19 nt, Artificial Sequence
  Description of Artificial Sequence: Synthetic oligonucleotide
cgccgaagggagccucugc

SEQ ID NO: 1269202 - RNA, 19 nt, Artificial Sequence
  Description of Artificial Sequence: Synthetic oligonucleotide
ccgcauggacguggggaag

SEQ ID NO: 1269203 - RNA, 19 nt, Artificial Sequence
  Description of Artificial Sequence: Synthetic oligonucleotide
cuccuccgguacagccaga

SEQ ID NO: 1269204 - RNA, 19 nt, Artificial Sequence
  Description of Artificial Sequence: Synthetic oligonucleotide
ggaaggccggcgacaggaa

SEQ ID NO: 1269205 - RNA, 19 nt, Artificial Sequence
  Description of Artificial Sequence: Synthetic oligonucleotide
gacggcccacucggagaaa

SEQ ID NO: 1269206 - RNA, 19 nt, Artificial Sequence
  Description of Artificial Sequence: Synthetic oligonucleotide
gggcgcccugguggggugg

SEQ ID NO: 1269207 - RNA, 19 nt, Artificial Sequence
  Description of Artificial Sequence: Synthetic oligonucleotide
ccgaagggagccucugccu

SEQ ID NO: 1269208 - RNA, 19 nt, Artificial Sequence
  Description of Artificial Sequence: Synthetic oligonucleotide
ccgcaagcucucucugcca

SEQ ID NO: 1269209 - RNA, 19 nt, Artificial Sequence
  Description of Artificial Sequence: Synthetic oligonucleotide
ccacggcuucucggaaccc

SEQ ID NO: 1269210 - RNA, 19 nt, Artificial Sequence
  Description of Artificial Sequence: Synthetic oligonucleotide
cuuggccccaagggcugua

SEQ ID NO: 1269211 - RNA, 19 nt, Artificial Sequence
  Description of Artificial Sequence: Synthetic oligonucleotide
ccuaugggugucccuccua

SEQ ID NO: 1269212 - RNA, 19 nt, Artificial Sequence
  Description of Artificial Sequence: Synthetic oligonucleotide
ccccuccuauggguguccc

SEQ ID NO: 1269213 - RNA, 19 nt, Artificial Sequence
  Description of Artificial Sequence: Synthetic oligonucleotide
ggcccacgccgaagggagc

SEQ ID NO: 1269214 - RNA, 19 nt, Artificial Sequence
  Description of Artificial Sequence: Synthetic oligonucleotide
cgucgugguggggaucaug

SEQ ID NO: 1269215 - RNA, 19 nt, Artificial Sequence
  Description of Artificial Sequence: Synthetic oligonucleotide
cagcggcagcgguagcggu

SEQ ID NO: 1269216 - RNA, 19 nt, Artificial Sequence
  Description of Artificial Sequence: Synthetic oligonucleotide
cuccccgggccaagagagu

SEQ ID NO: 1269217 - RNA, 19 nt, Artificial Sequence
  Description of Artificial Sequence: Synthetic oligonucleotide
cgcauggacguggggaaga

SEQ ID NO: 1269218 - RNA, 19 nt, Artificial Sequence
  Description of Artificial Sequence: Synthetic oligonucleotide
ggggaucaugccaguaguu

SEQ ID NO: 1269219 - RNA, 19 nt, Artificial Sequence
  Description of Artificial Sequence: Synthetic oligonucleotide
ccccguugaugagggccag

SEQ ID NO: 1269220 - RNA, 19 nt, Artificial Sequence
  Description of Artificial Sequence: Synthetic oligonucleotide
ccacgccgaagggagccuc

SEQ ID NO: 1269221 - RNA, 19 nt, Artificial Sequence
  Description of Artificial Sequence: Synthetic oligonucleotide
cagggcgcccugguggggu

SEQ ID NO: 1269222 - RNA, 19 nt, Artificial Sequence
  Description of Artificial Sequence: Synthetic oligonucleotide
cagcccgggcaugcuccca

SEQ ID NO: 1269223 - RNA, 19 nt, Artificial Sequence
  Description of Artificial Sequence: Synthetic oligonucleotide
caagggccgcaagcucucu

SEQ ID NO: 1269224 - RNA, 19 nt, Artificial Sequence
  Description of Artificial Sequence: Synthetic oligonucleotide
cggggugcgucucauugau

SEQ ID NO: 1269225 - RNA, 19 nt, Artificial Sequence
  Description of Artificial Sequence: Synthetic oligonucleotide
gcacccagucaaggguccu

SEQ ID NO: 1269226 - RNA, 19 nt, Artificial Sequence
  Description of Artificial Sequence: Synthetic oligonucleotide
gcgugcgauuggagugcca

SEQ ID NO: 1269227 - RNA, 19 nt, Artificial Sequence
  Description of Artificial Sequence: Synthetic oligonucleotide
gcaccacgaucaccggcuu

SEQ ID NO: 1269228 - RNA, 19 nt, Artificial Sequence
  Description of Artificial Sequence: Synthetic oligonucleotide
ccgucucguuggcaucaua

SEQ ID NO: 1269229 - RNA, 19 nt, Artificial Sequence
  Description of Artificial Sequence: Synthetic oligonucleotide
cgagcaccgucaccacggu

SEQ ID NO: 1269230 - RNA, 19 nt, Artificial Sequence
  Description of Artificial Sequence: Synthetic oligonucleotide
cggucccggggugcgucuc

SEQ ID NO: 1269231 - RNA, 19 nt, Artificial Sequence
  Description of Artificial Sequence: Synthetic oligonucleotide
cccacgccgaagggagccu

SEQ ID NO: 1269232 - RNA, 19 nt, Artificial Sequence
  Description of Artificial Sequence: Synthetic oligonucleotide
ccacggucccggggugcgu

SEQ ID NO: 1269233 - RNA, 19 nt, Artificial Sequence
  Description of Artificial Sequence: Synthetic oligonucleotide
cgguagcggugagccaguu

SEQ ID NO: 1269234 - RNA, 19 nt, Artificial Sequence
  Description of Artificial Sequence: Synthetic oligonucleotide
aaauguaggaauuaacacc

SEQ ID NO: 1269235 - RNA, 19 nt, Artificial Sequence
  Description of Artificial Sequence: Synthetic oligonucleotide
uguaauuugacgaagacac

SEQ ID NO: 1269236 - RNA, 19 nt, Artificial Sequence
  Description of Artificial Sequence: Synthetic oligonucleotide
aaaauguaggaauuaacac

SEQ ID NO: 1269237 - RNA, 19 nt, Artificial Sequence
  Description of Artificial Sequence: Synthetic oligonucleotide
uuuguaauuccuaauagga

SEQ ID NO: 1269238 - RNA, 19 nt, Artificial Sequence
  Description of Artificial Sequence: Synthetic oligonucleotide
uguaaaaugcuucagccgc

SEQ ID NO: 1269239 - RNA, 19 nt, Artificial Sequence
  Description of Artificial Sequence: Synthetic oligonucleotide
uguuaugacauuaugcuug

SEQ ID NO: 1269240 - RNA, 19 nt, Artificial Sequence
  Description of Artificial Sequence: Synthetic oligonucleotide
uuugaugcagaaaggaagg

SEQ ID NO: 1269241 - RNA, 19 nt, Artificial Sequence
  Description of Artificial Sequence: Synthetic oligonucleotide
auuguuaugacauuaugcu

SEQ ID NO: 1269242 - RNA, 19 nt, Artificial Sequence
  Description of Artificial Sequence: Synthetic oligonucleotide
aauggguuuuauuugcuuc

SEQ ID NO: 1269243 - RNA, 19 nt, Artificial Sequence
  Description of Artificial Sequence: Synthetic oligonucleotide
ucauaauccaguuuacagg

SEQ ID NO: 1269244 - RNA, 19 nt, Artificial Sequence
  Description of Artificial Sequence: Synthetic oligonucleotide
uacagaauagccaaucgag

SEQ ID NO: 1269245 - RNA, 19 nt, Artificial Sequence
  Description of Artificial Sequence: Synthetic oligonucleotide
auugucaauuucuagauca

SEQ ID NO: 1269246 - RNA, 19 nt, Artificial Sequence
  Description of Artificial Sequence: Synthetic oligonucleotide
ucagugaacaagucaaugg

SEQ ID NO: 1269247 - RNA, 19 nt, Artificial Sequence
  Description of Artificial Sequence: Synthetic oligonucleotide
aagucgaccauauucagcu

SEQ ID NO: 1269248 - RNA, 19 nt, Artificial Sequence
  Description of Artificial Sequence: Synthetic oligonucleotide
uuguauuauugcaacaucc

SEQ ID NO: 1269249 - RNA, 19 nt, Artificial Sequence
  Description of Artificial Sequence: Synthetic oligonucleotide
aauuucuagaucacucucc

SEQ ID NO: 1269250 - RNA, 19 nt, Artificial Sequence
  Description of Artificial Sequence: Synthetic oligonucleotide
cauuguuaugacauuaugc

SEQ ID NO: 1269251 - RNA, 19 nt, Artificial Sequence
  Description of Artificial Sequence: Synthetic oligonucleotide
aucauaauccaguuuacag

SEQ ID NO: 1269252 - RNA, 19 nt, Artificial Sequence
  Description of Artificial Sequence: Synthetic oligonucleotide
uguaauuccuaauaggaaa

SEQ ID NO: 1269253 - RNA, 19 nt, Artificial Sequence
  Description of Artificial Sequence: Synthetic oligonucleotide
aguaagugagcuaagcugc

SEQ ID NO: 1269254 - RNA, 19 nt, Artificial Sequence
  Description of Artificial Sequence: Synthetic oligonucleotide
uuacugaugagauucauaa

SEQ ID NO: 1269255 - RNA, 19 nt, Artificial Sequence
  Description of Artificial Sequence: Synthetic oligonucleotide
uauuauugcaacauccagu

SEQ ID NO: 1269256 - RNA, 19 nt, Artificial Sequence
  Description of Artificial Sequence: Synthetic oligonucleotide
auuugcuggguucugggcc

SEQ ID NO: 1269257 - RNA, 19 nt, Artificial Sequence
  Description of Artificial Sequence: Synthetic oligonucleotide
ugauguaacuuuaugagua

SEQ ID NO: 1269258 - RNA, 19 nt, Artificial Sequence
  Description of Artificial Sequence: Synthetic oligonucleotide
uuaucucucgcucuucacg

SEQ ID NO: 1269259 - RNA, 19 nt, Artificial Sequence
  Description of Artificial Sequence: Synthetic oligonucleotide
aucauuuagggcuucaaug

SEQ ID NO: 1269260 - RNA, 19 nt, Artificial Sequence
  Description of Artificial Sequence: Synthetic oligonucleotide
ucucuuugcauacagaaua

SEQ ID NO: 1269261 - RNA, 19 nt, Artificial Sequence
  Description of Artificial Sequence: Synthetic oligonucleotide
uguauuauugcaacaucca

SEQ ID NO: 1269262 - RNA, 19 nt, Artificial Sequence
  Description of Artificial Sequence: Synthetic oligonucleotide
uguaacuuuaugaguagca

SEQ ID NO: 1269263 - RNA, 19 nt, Artificial Sequence
  Description of Artificial Sequence: Synthetic oligonucleotide
augacauuaugcuugaccu

SEQ ID NO: 1269264 - RNA, 19 nt, Artificial Sequence
  Description of Artificial Sequence: Synthetic oligonucleotide
aaccaccuggaaaagagcc

SEQ ID NO: 1269265 - RNA, 19 nt, Artificial Sequence
  Description of Artificial Sequence: Synthetic oligonucleotide
ugcccaguaauucaaagga

SEQ ID NO: 1269266 - RNA, 19 nt, Artificial Sequence
  Description of Artificial Sequence: Synthetic oligonucleotide
uuaugcuugaccuccaaac

SEQ ID NO: 1269267 - RNA, 19 nt, Artificial Sequence
  Description of Artificial Sequence: Synthetic oligonucleotide
aagggacuggauuaucuuc

SEQ ID NO: 1269268 - RNA, 19 nt, Artificial Sequence
  Description of Artificial Sequence: Synthetic oligonucleotide
acauuaucugaaugaagac

SEQ ID NO: 1269269 - RNA, 19 nt, Artificial Sequence
  Description of Artificial Sequence: Synthetic oligonucleotide
cauacugagcuccagacug

SEQ ID NO: 1269270 - RNA, 19 nt, Artificial Sequence
  Description of Artificial Sequence: Synthetic oligonucleotide
aacuuuaugaguagcaggu

SEQ ID NO: 1269271 - RNA, 19 nt, Artificial Sequence
  Description of Artificial Sequence: Synthetic oligonucleotide
uugacgaagacacuggcuc

SEQ ID NO: 1269272 - RNA, 19 nt, Artificial Sequence
  Description of Artificial Sequence: Synthetic oligonucleotide
aaguuuguaauuccuaaua

SEQ ID NO: 1269273 - RNA, 19 nt, Artificial Sequence
  Description of Artificial Sequence: Synthetic oligonucleotide
uccuaauaggaaaacauua

SEQ ID NO: 1269274 - RNA, 19 nt, Artificial Sequence
  Description of Artificial Sequence: Synthetic oligonucleotide
aaaggaagggacuggauua

SEQ ID NO: 1269275 - RNA, 19 nt, Artificial Sequence
  Description of Artificial Sequence: Synthetic oligonucleotide
uuuagggcuucaauggcag

SEQ ID NO: 1269276 - RNA, 19 nt, Artificial Sequence
  Description of Artificial Sequence: Synthetic oligonucleotide
gucuggcucaauuacaccg

SEQ ID NO: 1269277 - RNA, 19 nt, Artificial Sequence
  Description of Artificial Sequence: Synthetic oligonucleotide
aauuugacgaagacacugg

SEQ ID NO: 1269278 - RNA, 19 nt, Artificial Sequence
  Description of Artificial Sequence: Synthetic oligonucleotide
gacauuaugcuugaccucc

SEQ ID NO: 1269279 - RNA, 19 nt, Artificial Sequence
  Description of Artificial Sequence: Synthetic oligonucleotide
ucgaauggcagcauuuggc

SEQ ID NO: 1269280 - RNA, 19 nt, Artificial Sequence
  Description of Artificial Sequence: Synthetic oligonucleotide
ugcaacauccaguaaguga

SEQ ID NO: 1269281 - RNA, 19 nt, Artificial Sequence
  Description of Artificial Sequence: Synthetic oligonucleotide
caaucgaggguuuagcuug

SEQ ID NO: 1269282 - RNA, 19 nt, Artificial Sequence
  Description of Artificial Sequence: Synthetic oligonucleotide
uucacguuugcgcucauac

SEQ ID NO: 1269283 - RNA, 19 nt, Artificial Sequence
  Description of Artificial Sequence: Synthetic oligonucleotide
uuuaugaguagcagguggu

SEQ ID NO: 1269284 - RNA, 19 nt, Artificial Sequence
  Description of Artificial Sequence: Synthetic oligonucleotide
ugacaauuuacugaugaga

SEQ ID NO: 1269285 - RNA, 19 nt, Artificial Sequence
  Description of Artificial Sequence: Synthetic oligonucleotide
cuguaaaaugcuucagccg

SEQ ID NO: 1269286 - RNA, 19 nt, Artificial Sequence
  Description of Artificial Sequence: Synthetic oligonucleotide
cuaauaggaaaacauuauc

SEQ ID NO: 1269287 - RNA, 19 nt, Artificial Sequence
  Description of Artificial Sequence: Synthetic oligonucleotide
cugaggauuucauugaguc

SEQ ID NO: 1269288 - RNA, 19 nt, Artificial Sequence
  Description of Artificial Sequence: Synthetic oligonucleotide
auaaccuuuggguugcucu

SEQ ID NO: 1269289 - RNA, 19 nt, Artificial Sequence
  Description of Artificial Sequence: Synthetic oligonucleotide
acuuguauggcugagcuga

SEQ ID NO: 1269290 - RNA, 19 nt, Artificial Sequence
  Description of Artificial Sequence: Synthetic oligonucleotide
aagacccuaauggcaaacc

SEQ ID NO: 1269291 - RNA, 19 nt, Artificial Sequence
  Description of Artificial Sequence: Synthetic oligonucleotide
cauacagaauagccaaucg

SEQ ID NO: 1269292 - RNA, 19 nt, Artificial Sequence
  Description of Artificial Sequence: Synthetic oligonucleotide
auuaucuucgaagcacccc

SEQ ID NO: 1269293 - RNA, 19 nt, Artificial Sequence
  Description of Artificial Sequence: Synthetic oligonucleotide
aaacgcauuuccucggugu

SEQ ID NO: 1269294 - RNA, 19 nt, Artificial Sequence
  Description of Artificial Sequence: Synthetic oligonucleotide
ucuguaauuugacgaagac

SEQ ID NO: 1269295 - RNA, 19 nt, Artificial Sequence
  Description of Artificial Sequence: Synthetic oligonucleotide
caguaagucgaccauauuc

SEQ ID NO: 1269296 - RNA, 19 nt, Artificial Sequence
  Description of Artificial Sequence: Synthetic oligonucleotide
caggaaacgcauuuccucg

SEQ ID NO: 1269297 - RNA, 19 nt, Artificial Sequence
  Description of Artificial Sequence: Synthetic oligonucleotide
uuauuugcuucccacuaac

SEQ ID NO: 1269298 - RNA, 19 nt, Artificial Sequence
  Description of Artificial Sequence: Synthetic oligonucleotide
uucacgaaagcccgaagcu

SEQ ID NO: 1269299 - RNA, 19 nt, Artificial Sequence
  Description of Artificial Sequence: Synthetic oligonucleotide
ugcuuacacaucuucacga

SEQ ID NO: 1269300 - RNA, 19 nt, Artificial Sequence
  Description of Artificial Sequence: Synthetic oligonucleotide
uuuugacauauuugcuggg

SEQ ID NO: 1269301 - RNA, 19 nt, Artificial Sequence
  Description of Artificial Sequence: Synthetic oligonucleotide
agcucgcucacuuugcggg

SEQ ID NO: 1269302 - RNA, 19 nt, Artificial Sequence
  Description of Artificial Sequence: Synthetic oligonucleotide
uuguaauuccuaauaggaa

SEQ ID NO: 1269303 - RNA, 19 nt, Artificial Sequence
  Description of Artificial Sequence: Synthetic oligonucleotide
caugagagcaguaagucga

SEQ ID NO: 1269304 - RNA, 19 nt, Artificial Sequence
  Description of Artificial Sequence: Synthetic oligonucleotide
uguaggaauuaacaccccu

SEQ ID NO: 1269305 - RNA, 19 nt, Artificial Sequence
  Description of Artificial Sequence: Synthetic oligonucleotide
uucuguaauuugacgaaga

SEQ ID NO: 1269306 - RNA, 19 nt, Artificial Sequence
  Description of Artificial Sequence: Synthetic oligonucleotide
ugcgcucauacuuucuccg

SEQ ID NO: 1269307 - RNA, 19 nt, Artificial Sequence
  Description of Artificial Sequence: Synthetic oligonucleotide
cuucacgaaagcccgaagc

SEQ ID NO: 1269308 - RNA, 19 nt, Artificial Sequence
  Description of Artificial Sequence: Synthetic oligonucleotide
auuucuagaucacucuccu

SEQ ID NO: 1269309 - RNA, 19 nt, Artificial Sequence
  Description of Artificial Sequence: Synthetic oligonucleotide
uaagucgaccauauucagc

SEQ ID NO: 1269310 - RNA, 19 nt, Artificial Sequence
  Description of Artificial Sequence: Synthetic oligonucleotide
ucccucgccacuuguaugg

SEQ ID NO: 1269311 - RNA, 19 nt, Artificial Sequence
  Description of Artificial Sequence: Synthetic oligonucleotide
aguaagucgaccauauuca

SEQ ID NO: 1269312 - RNA, 19 nt, Artificial Sequence
  Description of Artificial Sequence: Synthetic oligonucleotide
uggauuaucuucgaagcac

SEQ ID NO: 1269313 - RNA, 19 nt, Artificial Sequence
  Description of Artificial Sequence: Synthetic oligonucleotide
gauggcgucagugaacaag

SEQ ID NO: 1269314 - RNA, 19 nt, Artificial Sequence
  Description of Artificial Sequence: Synthetic oligonucleotide
uuuagcuugauggcgucag

SEQ ID NO: 1269315 - RNA, 19 nt, Artificial Sequence
  Description of Artificial Sequence: Synthetic oligonucleotide
ucucgagccuucuucaccc

SEQ ID NO: 1269316 - RNA, 19 nt, Artificial Sequence
  Description of Artificial Sequence: Synthetic oligonucleotide
aaaccaccuggaaaagagc

SEQ ID NO: 1269317 - RNA, 19 nt, Artificial Sequence
  Description of Artificial Sequence: Synthetic oligonucleotide
cuucagccgcauuugaugc

SEQ ID NO: 1269318 - RNA, 19 nt, Artificial Sequence
  Description of Artificial Sequence: Synthetic oligonucleotide
uuuauuugcuucccacuaa

SEQ ID NO: 1269319 - RNA, 19 nt, Artificial Sequence
  Description of Artificial Sequence: Synthetic oligonucleotide
agcucaccaucauuuaggg

SEQ ID NO: 1269320 - RNA, 19 nt, Artificial Sequence
  Description of Artificial Sequence: Synthetic oligonucleotide
ugaggauuucauugagucc

SEQ ID NO: 1269321 - RNA, 19 nt, Artificial Sequence
  Description of Artificial Sequence: Synthetic oligonucleotide
ugcucuucauucagcauug

SEQ ID NO: 1269322 - RNA, 19 nt, Artificial Sequence
  Description of Artificial Sequence: Synthetic oligonucleotide
ucucccauuucuugagggg

SEQ ID NO: 1269323 - RNA, 19 nt, Artificial Sequence
  Description of Artificial Sequence: Synthetic oligonucleotide
uuugacgaagacacuggcu

SEQ ID NO: 1269324 - RNA, 19 nt, Artificial Sequence
  Description of Artificial Sequence: Synthetic oligonucleotide
cagcucaccaucauuuagg

SEQ ID NO: 1269325 - RNA, 19 nt, Artificial Sequence
  Description of Artificial Sequence: Synthetic oligonucleotide
agaauagccaaucgagggu

SEQ ID NO: 1269326 - RNA, 19 nt, Artificial Sequence
  Description of Artificial Sequence: Synthetic oligonucleotide
auguaacuuuaugaguagc

SEQ ID NO: 1269327 - RNA, 19 nt, Artificial Sequence
  Description of Artificial Sequence: Synthetic oligonucleotide
uuuacugaugagauucaua

SEQ ID NO: 1269328 - RNA, 19 nt, Artificial Sequence
  Description of Artificial Sequence: Synthetic oligonucleotide
aacgcauuuccucggugug

SEQ ID NO: 1269329 - RNA, 19 nt, Artificial Sequence
  Description of Artificial Sequence: Synthetic oligonucleotide
ucuucgaagcaccccagcu

SEQ ID NO: 1269330 - RNA, 19 nt, Artificial Sequence
  Description of Artificial Sequence: Synthetic oligonucleotide
ucacuugaugguucauccg

SEQ ID NO: 1269331 - RNA, 19 nt, Artificial Sequence
  Description of Artificial Sequence: Synthetic oligonucleotide
ugacauauuugcuggguuc

SEQ ID NO: 1269332 - RNA, 19 nt, Artificial Sequence
  Description of Artificial Sequence: Synthetic oligonucleotide
ucgaccauauucagcuucc

SEQ ID NO: 1269333 - RNA, 19 nt, Artificial Sequence
  Description of Artificial Sequence: Synthetic oligonucleotide
uuccuaauaggaaaacauu

SEQ ID NO: 1269334 - RNA, 19 nt, Artificial Sequence
  Description of Artificial Sequence: Synthetic oligonucleotide
uaaguuuguaauuccuaau

SEQ ID NO: 1269335 - RNA, 19 nt, Artificial Sequence
  Description of Artificial Sequence: Synthetic oligonucleotide
acagaauagccaaucgagg

SEQ ID NO: 1269336 - RNA, 19 nt, Artificial Sequence
  Description of Artificial Sequence: Synthetic oligonucleotide
uucaugagagcaguaaguc

SEQ ID NO: 1269337 - RNA, 19 nt, Artificial Sequence
  Description of Artificial Sequence: Synthetic oligonucleotide
ucauccgucuuuauguuuu

SEQ ID NO: 1269338 - RNA, 19 nt, Artificial Sequence
  Description of Artificial Sequence: Synthetic oligonucleotide
ucggugugcaggacguucg

SEQ ID NO: 1269339 - RNA, 19 nt, Artificial Sequence
  Description of Artificial Sequence: Synthetic oligonucleotide
uauggcugagcugaaucag

SEQ ID NO: 1269340 - RNA, 19 nt, Artificial Sequence
  Description of Artificial Sequence: Synthetic oligonucleotide
uggcuucuguaauuugacg

SEQ ID NO: 1269341 - RNA, 19 nt, Artificial Sequence
  Description of Artificial Sequence: Synthetic oligonucleotide
ucgcucuucacguuugcgc

SEQ ID NO: 1269342 - RNA, 19 nt, Artificial Sequence
  Description of Artificial Sequence: Synthetic oligonucleotide
aaaauauguuuaagguuga

SEQ ID NO: 1269343 - RNA, 19 nt, Artificial Sequence
  Description of Artificial Sequence: Synthetic oligonucleotide
cugcuuacacaucuucacg

SEQ ID NO: 1269344 - RNA, 19 nt, Artificial Sequence
  Description of Artificial Sequence: Synthetic oligonucleotide
cuuuauguuuuccucuguc

SEQ ID NO: 1269345 - RNA, 19 nt, Artificial Sequence
  Description of Artificial Sequence: Synthetic oligonucleotide
cugacaauuuacugaugag

SEQ ID NO: 1269346 - RNA, 19 nt, Artificial Sequence
  Description of Artificial Sequence: Synthetic oligonucleotide
uaaccuuuggguugcucug

SEQ ID NO: 1269347 - RNA, 19 nt, Artificial Sequence
  Description of Artificial Sequence: Synthetic oligonucleotide
uugauggcgucagugaaca

SEQ ID NO: 1269348 - RNA, 19 nt, Artificial Sequence
  Description of Artificial Sequence: Synthetic oligonucleotide
aggguuuagcuugauggcg

SEQ ID NO: 1269349 - RNA, 19 nt, Artificial Sequence
  Description of Artificial Sequence: Synthetic oligonucleotide
cuuucuccgauguucagca

SEQ ID NO: 1269350 - RNA, 19 nt, Artificial Sequence
  Description of Artificial Sequence: Synthetic oligonucleotide
uggcugacaauuuacugau

SEQ ID NO: 1269351 - RNA, 19 nt, Artificial Sequence
  Description of Artificial Sequence: Synthetic oligonucleotide
guaagucgaccauauucag

SEQ ID NO: 1269352 - RNA, 19 nt, Artificial Sequence
  Description of Artificial Sequence: Synthetic oligonucleotide
aggaaacgcauuuccucgg

SEQ ID NO: 1269353 - RNA, 19 nt, Artificial Sequence
  Description of Artificial Sequence: Synthetic oligonucleotide
uacaccgucauugucaauu

SEQ ID NO: 1269354 - RNA, 19 nt, Artificial Sequence
  Description of Artificial Sequence: Synthetic oligonucleotide
uuuacaggcaagggcaaga

SEQ ID NO: 1269355 - RNA, 19 nt, Artificial Sequence
  Description of Artificial Sequence: Synthetic oligonucleotide
ucuggcucaauuacaccgu

SEQ ID NO: 1269356 - RNA, 19 nt, Artificial Sequence
  Description of Artificial Sequence: Synthetic oligonucleotide
agggacuggauuaucuucg

SEQ ID NO: 1269357 - RNA, 19 nt, Artificial Sequence
  Description of Artificial Sequence: Synthetic oligonucleotide
uugucaauuucuagaucac

SEQ ID NO: 1269358 - RNA, 19 nt, Artificial Sequence
  Description of Artificial Sequence: Synthetic oligonucleotide
augaguagcaggugguacu

SEQ ID NO: 1269359 - RNA, 19 nt, Artificial Sequence
  Description of Artificial Sequence: Synthetic oligonucleotide
aaacuuggcugacaauuua

SEQ ID NO: 1269360 - RNA, 19 nt, Artificial Sequence
  Description of Artificial Sequence: Synthetic oligonucleotide
auuaacaccccuaaauuuu

SEQ ID NO: 1269361 - RNA, 19 nt, Artificial Sequence
  Description of Artificial Sequence: Synthetic oligonucleotide
gaugaggucagagguacac

SEQ ID NO: 1269362 - RNA, 19 nt, Artificial Sequence
  Description of Artificial Sequence: Synthetic oligonucleotide
uagaucacucuccucacuu

SEQ ID NO: 1269363 - RNA, 19 nt, Artificial Sequence
  Description of Artificial Sequence: Synthetic oligonucleotide
auuacaccgucauugucaa

SEQ ID NO: 1269364 - RNA, 19 nt, Artificial Sequence
  Description of Artificial Sequence: Synthetic oligonucleotide
uccaguaagugagcuaagc

SEQ ID NO: 1269365 - RNA, 19 nt, Artificial Sequence
  Description of Artificial Sequence: Synthetic oligonucleotide
uucuccgauguucagcaau

SEQ ID NO: 1269366 - RNA, 19 nt, Artificial Sequence
  Description of Artificial Sequence: Synthetic oligonucleotide
aggggcaccagugucuggc

SEQ ID NO: 1269367 - RNA, 19 nt, Artificial Sequence
  Description of Artificial Sequence: Synthetic oligonucleotide
ccgcauuugaugcagaaag

SEQ ID NO: 1269368 - RNA, 19 nt, Artificial Sequence
  Description of Artificial Sequence: Synthetic oligonucleotide
uuaucugaaugaagacccu

SEQ ID NO: 1269369 - RNA, 19 nt, Artificial Sequence
  Description of Artificial Sequence: Synthetic oligonucleotide
uaucuucgaagcaccccag

SEQ ID NO: 1269370 - RNA, 19 nt, Artificial Sequence
  Description of Artificial Sequence: Synthetic oligonucleotide
uugugcccgagguugaacu

SEQ ID NO: 1269371 - RNA, 19 nt, Artificial Sequence
  Description of Artificial Sequence: Synthetic oligonucleotide
aauccaguuuacaggcaag

SEQ ID NO: 1269372 - RNA, 19 nt, Artificial Sequence
  Description of Artificial Sequence: Synthetic oligonucleotide
auauuuugacauauuugcu

SEQ ID NO: 1269373 - RNA, 19 nt, Artificial Sequence
  Description of Artificial Sequence: Synthetic oligonucleotide
cuugauggcgucagugaac

SEQ ID NO: 1269374 - RNA, 19 nt, Artificial Sequence
  Description of Artificial Sequence: Synthetic oligonucleotide
ugcauggccgcaagaaccu

SEQ ID NO: 1269375 - RNA, 19 nt, Artificial Sequence
  Description of Artificial Sequence: Synthetic oligonucleotide
aggaaaacauuaucugaau

SEQ ID NO: 1269376 - RNA, 19 nt, Artificial Sequence
  Description of Artificial Sequence: Synthetic oligonucleotide
auuuccucggugugcagga

SEQ ID NO: 1269377 - RNA, 19 nt, Artificial Sequence
  Description of Artificial Sequence: Synthetic oligonucleotide
ucuucacgaaagcccgaag

SEQ ID NO: 1269378 - RNA, 19 nt, Artificial Sequence
  Description of Artificial Sequence: Synthetic oligonucleotide
uuuaucucucgcucuucac

SEQ ID NO: 1269379 - RNA, 19 nt, Artificial Sequence
  Description of Artificial Sequence: Synthetic oligonucleotide
uugacauauuugcuggguu

SEQ ID NO: 1269380 - RNA, 19 nt, Artificial Sequence
  Description of Artificial Sequence: Synthetic oligonucleotide
agcauuuggcuucuguaau

SEQ ID NO: 1269381 - RNA, 19 nt, Artificial Sequence
  Description of Artificial Sequence: Synthetic oligonucleotide
gauuaucuucgaagcaccc

SEQ ID NO: 1269382 - RNA, 19 nt, Artificial Sequence
  Description of Artificial Sequence: Synthetic oligonucleotide
agacccuaauggcaaacca

SEQ ID NO: 1269383 - RNA, 19 nt, Artificial Sequence
  Description of Artificial Sequence: Synthetic oligonucleotide
agccaaucgaggguuuagc

SEQ ID NO: 1269384 - RNA, 19 nt, Artificial Sequence
  Description of Artificial Sequence: Synthetic oligonucleotide
ggcuucuguaauuugacga

SEQ ID NO: 1269385 - RNA, 19 nt, Artificial Sequence
  Description of Artificial Sequence: Synthetic oligonucleotide
aagcccgaagcucgcucac

SEQ ID NO: 1269386 - RNA, 19 nt, Artificial Sequence
  Description of Artificial Sequence: Synthetic oligonucleotide
ucucgaauggcagcauuug

SEQ ID NO: 1269387 - RNA, 19 nt, Artificial Sequence
  Description of Artificial Sequence: Synthetic oligonucleotide
uuucccucgccacuuguau

SEQ ID NO: 1269388 - RNA, 19 nt, Artificial Sequence
  Description of Artificial Sequence: Synthetic oligonucleotide
cucgccacuuguauggcug

SEQ ID NO: 1269389 - RNA, 19 nt, Artificial Sequence
  Description of Artificial Sequence: Synthetic oligonucleotide
gaaacgcauuuccucggug

SEQ ID NO: 1269390 - RNA, 19 nt, Artificial Sequence
  Description of Artificial Sequence: Synthetic oligonucleotide
agugaacaagucaauggcu

SEQ ID NO: 1269391 - RNA, 19 nt, Artificial Sequence
  Description of Artificial Sequence: Synthetic oligonucleotide
cauuuccucggugugcagg

SEQ ID NO: 1269392 - RNA, 19 nt, Artificial Sequence
  Description of Artificial Sequence: Synthetic oligonucleotide
ugugugcuuucccucgcca

SEQ ID NO: 1269393 - RNA, 19 nt, Artificial Sequence
  Description of Artificial Sequence: Synthetic oligonucleotide
ggaauuaacaccccuaaau

SEQ ID NO: 1269394 - RNA, 19 nt, Artificial Sequence
  Description of Artificial Sequence: Synthetic oligonucleotide
ugacauuaugcuugaccuc

SEQ ID NO: 1269395 - RNA, 19 nt, Artificial Sequence
  Description of Artificial Sequence: Synthetic oligonucleotide
uuggguugcucugauauuu

SEQ ID NO: 1269396 - RNA, 19 nt, Artificial Sequence
  Description of Artificial Sequence: Synthetic oligonucleotide
guauggcugagcugaauca

SEQ ID NO: 1269397 - RNA, 19 nt, Artificial Sequence
  Description of Artificial Sequence: Synthetic oligonucleotide
aggucagagguacacuggu

SEQ ID NO: 1269398 - RNA, 19 nt, Artificial Sequence
  Description of Artificial Sequence: Synthetic oligonucleotide
ucugugugcuuucccucgc

SEQ ID NO: 1269399 - RNA, 19 nt, Artificial Sequence
  Description of Artificial Sequence: Synthetic oligonucleotide
gguucauccgucuuuaugu

SEQ ID NO: 1269400 - RNA, 19 nt, Artificial Sequence
  Description of Artificial Sequence: Synthetic oligonucleotide
ugacgaagacacuggcucu

SEQ ID NO: 1269401 - RNA, 19 nt, Artificial Sequence
  Description of Artificial Sequence: Synthetic oligonucleotide
uuccauucaugagagcagu

SEQ ID NO: 1269402 - RNA, 19 nt, Artificial Sequence
  Description of Artificial Sequence: Synthetic oligonucleotide
acaauuuacugaugagauu

SEQ ID NO: 1269403 - RNA, 19 nt, Artificial Sequence
  Description of Artificial Sequence: Synthetic oligonucleotide
ucuccgauguucagcaauu

SEQ ID NO: 1269404 - RNA, 19 nt, Artificial Sequence
  Description of Artificial Sequence: Synthetic oligonucleotide
gacccuaauggcaaaccac

SEQ ID NO: 1269405 - RNA, 19 nt, Artificial Sequence
  Description of Artificial Sequence: Synthetic oligonucleotide
ucgaggguuuagcuugaug

SEQ ID NO: 1269406 - RNA, 19 nt, Artificial Sequence
  Description of Artificial Sequence: Synthetic oligonucleotide
gucgaccauauucagcuuc

SEQ ID NO: 1269407 - RNA, 19 nt, Artificial Sequence
  Description of Artificial Sequence: Synthetic oligonucleotide
gaaaggaagggacuggauu

SEQ ID NO: 1269408 - RNA, 19 nt, Artificial Sequence
  Description of Artificial Sequence: Synthetic oligonucleotide
ucggguccugcuuacacau

SEQ ID NO: 1269409 - RNA, 19 nt, Artificial Sequence
  Description of Artificial Sequence: Synthetic oligonucleotide
gcuucagccgcauuugaug

SEQ ID NO: 1269410 - RNA, 19 nt, Artificial Sequence
  Description of Artificial Sequence: Synthetic oligonucleotide
uccgauguucagcaauuuu

SEQ ID NO: 1269411 - RNA, 19 nt, Artificial Sequence
  Description of Artificial Sequence: Synthetic oligonucleotide
cuguaauuugacgaagaca

SEQ ID NO: 1269412 - RNA, 19 nt, Artificial Sequence
  Description of Artificial Sequence: Synthetic oligonucleotide
cuugaccuccaaacuuggc

SEQ ID NO: 1269413 - RNA, 19 nt, Artificial Sequence
  Description of Artificial Sequence: Synthetic oligonucleotide
acccuaauggcaaaccacu

SEQ ID NO: 1269414 - RNA, 19 nt, Artificial Sequence
  Description of Artificial Sequence: Synthetic oligonucleotide
ucuccggaugaggucagag

SEQ ID NO: 1269415 - RNA, 19 nt, Artificial Sequence
  Description of Artificial Sequence: Synthetic oligonucleotide
acgcauuuccucggugugc

SEQ ID NO: 1269416 - RNA, 19 nt, Artificial Sequence
  Description of Artificial Sequence: Synthetic oligonucleotide
gauccugcauggccgcaag

SEQ ID NO: 1269417 - RNA, 19 nt, Artificial Sequence
  Description of Artificial Sequence: Synthetic oligonucleotide
aggguuuauuucaauggcu

SEQ ID NO: 1269418 - RNA, 19 nt, Artificial Sequence
  Description of Artificial Sequence: Synthetic oligonucleotide
uggcucaauuacaccguca

SEQ ID NO: 1269419 - RNA, 19 nt, Artificial Sequence
  Description of Artificial Sequence: Synthetic oligonucleotide
ggauuaucuucgaagcacc

SEQ ID NO: 1269420 - RNA, 19 nt, Artificial Sequence
  Description of Artificial Sequence: Synthetic oligonucleotide
ucacgaaagcccgaagcuc

SEQ ID NO: 1269421 - RNA, 19 nt, Artificial Sequence
  Description of Artificial Sequence: Synthetic oligonucleotide
cugaugagauucauaaccu

SEQ ID NO: 1269422 - RNA, 19 nt, Artificial Sequence
  Description of Artificial Sequence: Synthetic oligonucleotide
uaucugaaugaagacccua

SEQ ID NO: 1269423 - RNA, 19 nt, Artificial Sequence
  Description of Artificial Sequence: Synthetic oligonucleotide
ucagcauuguuaugacauu

SEQ ID NO: 1269424 - RNA, 19 nt, Artificial Sequence
  Description of Artificial Sequence: Synthetic oligonucleotide
agccauacugagcuccaga

SEQ ID NO: 1269425 - RNA, 19 nt, Artificial Sequence
  Description of Artificial Sequence: Synthetic oligonucleotide
uucccucgccacuuguaug

SEQ ID NO: 1269426 - RNA, 19 nt, Artificial Sequence
  Description of Artificial Sequence: Synthetic oligonucleotide
uucagccgcauuugaugca

SEQ ID NO: 1269427 - RNA, 19 nt, Artificial Sequence
  Description of Artificial Sequence: Synthetic oligonucleotide
auggcgucagugaacaagu

SEQ ID NO: 1269428 - RNA, 19 nt, Artificial Sequence
  Description of Artificial Sequence: Synthetic oligonucleotide
gaagacccuaauggcaaac

SEQ ID NO: 1269429 - RNA, 19 nt, Artificial Sequence
  Description of Artificial Sequence: Synthetic oligonucleotide
agcucuccggaugagguca

SEQ ID NO: 1269430 - RNA, 19 nt, Artificial Sequence
  Description of Artificial Sequence: Synthetic oligonucleotide
uagccaaucgaggguuuag

SEQ ID NO: 1269431 - RNA, 19 nt, Artificial Sequence
  Description of Artificial Sequence: Synthetic oligonucleotide
uccugcauggccgcaagaa

SEQ ID NO: 1269432 - RNA, 19 nt, Artificial Sequence
  Description of Artificial Sequence: Synthetic oligonucleotide
uugaugguucauccgucuu

SEQ ID NO: 1269433 - RNA, 19 nt, Artificial Sequence
  Description of Artificial Sequence: Synthetic oligonucleotide
ugaagacccuaauggcaaa

SEQ ID NO: 1269434 - RNA, 19 nt, Artificial Sequence
  Description of Artificial Sequence: Synthetic oligonucleotide
uuaugaguagcagguggua

SEQ ID NO: 1269435 - RNA, 19 nt, Artificial Sequence
  Description of Artificial Sequence: Synthetic oligonucleotide
aaccuuuggguugcucuga

SEQ ID NO: 1269436 - RNA, 19 nt, Artificial Sequence
  Description of Artificial Sequence: Synthetic oligonucleotide
ggguuuauuucaauggcuc

SEQ ID NO: 1269437 - RNA, 19 nt, Artificial Sequence
  Description of Artificial Sequence: Synthetic oligonucleotide
guuuacaggcaagggcaag

SEQ ID NO: 1269438 - RNA, 19 nt, Artificial Sequence
  Description of Artificial Sequence: Synthetic oligonucleotide
agugucuggcucaauuaca

SEQ ID NO: 1269439 - RNA, 19 nt, Artificial Sequence
  Description of Artificial Sequence: Synthetic oligonucleotide
uucauccgucuuuauguuu

SEQ ID NO: 1269440 - RNA, 19 nt, Artificial Sequence
  Description of Artificial Sequence: Synthetic oligonucleotide
cagcauuuggcuucuguaa

SEQ ID NO: 1269441 - RNA, 19 nt, Artificial Sequence
  Description of Artificial Sequence: Synthetic oligonucleotide
gguuuguauuauugcaaca

SEQ ID NO: 1269442 - RNA, 19 nt, Artificial Sequence
  Description of Artificial Sequence: Synthetic oligonucleotide
cuggauuaucuucgaagca

SEQ ID NO: 1269443 - RNA, 19 nt, Artificial Sequence
  Description of Artificial Sequence: Synthetic oligonucleotide
uuuggguugcucugauauu

SEQ ID NO: 1269444 - RNA, 19 nt, Artificial Sequence
  Description of Artificial Sequence: Synthetic oligonucleotide
aucugaaugaagacccuaa

SEQ ID NO: 1269445 - RNA, 19 nt, Artificial Sequence
  Description of Artificial Sequence: Synthetic oligonucleotide
uugcaacauccaguaagug

SEQ ID NO: 1269446 - RNA, 19 nt, Artificial Sequence
  Description of Artificial Sequence: Synthetic oligonucleotide
caguuaucucugcauuuuc

SEQ ID NO: 1269447 - RNA, 19 nt, Artificial Sequence
  Description of Artificial Sequence: Synthetic oligonucleotide
ccgagguugaacuucuuuc

SEQ ID NO: 1269448 - RNA, 19 nt, Artificial Sequence
  Description of Artificial Sequence: Synthetic oligonucleotide
agcauuguuaugacauuau

SEQ ID NO: 1269449 - RNA, 19 nt, Artificial Sequence
  Description of Artificial Sequence: Synthetic oligonucleotide
gguacacugguuuguauua

SEQ ID NO: 1269450 - RNA, 19 nt, Artificial Sequence
  Description of Artificial Sequence: Synthetic oligonucleotide
gcuucuguaauuugacgaa

SEQ ID NO: 1269451 - RNA, 19 nt, Artificial Sequence
  Description of Artificial Sequence: Synthetic oligonucleotide
acgaaagcccgaagcucgc

SEQ ID NO: 1269452 - RNA, 19 nt, Artificial Sequence
  Description of Artificial Sequence: Synthetic oligonucleotide
cacuuguauggcugagcug

SEQ ID NO: 1269453 - RNA, 19 nt, Artificial Sequence
  Description of Artificial Sequence: Synthetic oligonucleotide
agcugaaucaggguuuauu

SEQ ID NO: 1269454 - RNA, 19 nt, Artificial Sequence
  Description of Artificial Sequence: Synthetic oligonucleotide
gacgaagacacuggcucuc

SEQ ID NO: 1269455 - RNA, 19 nt, Artificial Sequence
  Description of Artificial Sequence: Synthetic oligonucleotide
uuugugcccgagguugaac

SEQ ID NO: 1269456 - RNA, 19 nt, Artificial Sequence
  Description of Artificial Sequence: Synthetic oligonucleotide
aaucgaggguuuagcuuga

SEQ ID NO: 1269457 - RNA, 19 nt, Artificial Sequence
  Description of Artificial Sequence: Synthetic oligonucleotide
cacuugaugguucauccgu

SEQ ID NO: 1269458 - RNA, 19 nt, Artificial Sequence
  Description of Artificial Sequence: Synthetic oligonucleotide
uccaaacuuggcugacaau

SEQ ID NO: 1269459 - RNA, 19 nt, Artificial Sequence
  Description of Artificial Sequence: Synthetic oligonucleotide
agcaccccagcucuccgga

SEQ ID NO: 1269460 - RNA, 19 nt, Artificial Sequence
  Description of Artificial Sequence: Synthetic oligonucleotide
accuccaaacuuggcugac

SEQ ID NO: 1269461 - RNA, 19 nt, Artificial Sequence
  Description of Artificial Sequence: Synthetic oligonucleotide
acaccgucauugucaauuu

SEQ ID NO: 1269462 - RNA, 19 nt, Artificial Sequence
  Description of Artificial Sequence: Synthetic oligonucleotide
gucagagguacacugguuu

SEQ ID NO: 1269463 - RNA, 19 nt, Artificial Sequence
  Description of Artificial Sequence: Synthetic oligonucleotide
ugcuuucccucgccacuug

SEQ ID NO: 1269464 - RNA, 19 nt, Artificial Sequence
  Description of Artificial Sequence: Synthetic oligonucleotide
cuggcucaauuacaccguc

SEQ ID NO: 1269465 - RNA, 19 nt, Artificial Sequence
  Description of Artificial Sequence: Synthetic oligonucleotide
gcauacagaauagccaauc

SEQ ID NO: 1269466 - RNA, 19 nt, Artificial Sequence
  Description of Artificial Sequence: Synthetic oligonucleotide
ucgccacuuguauggcuga

SEQ ID NO: 1269467 - RNA, 19 nt, Artificial Sequence
  Description of Artificial Sequence: Synthetic oligonucleotide
cgcauuugaugcagaaagg

SEQ ID NO: 1269468 - RNA, 19 nt, Artificial Sequence
  Description of Artificial Sequence: Synthetic oligonucleotide
guagcaggugguacuuuac

SEQ ID NO: 1269469 - RNA, 19 nt, Artificial Sequence
  Description of Artificial Sequence: Synthetic oligonucleotide
aucuucacgaaagcccgaa

SEQ ID NO: 1269470 - RNA, 19 nt, Artificial Sequence
  Description of Artificial Sequence: Synthetic oligonucleotide
aauagccaaucgaggguuu

SEQ ID NO: 1269471 - RNA, 19 nt, Artificial Sequence
  Description of Artificial Sequence: Synthetic oligonucleotide
cacguuugcgcucauacuu

SEQ ID NO: 1269472 - RNA, 19 nt, Artificial Sequence
  Description of Artificial Sequence: Synthetic oligonucleotide
cucggugugcaggacguuc

SEQ ID NO: 1269473 - RNA, 19 nt, Artificial Sequence
  Description of Artificial Sequence: Synthetic oligonucleotide
cuugaugguucauccgucu

SEQ ID NO: 1269474 - RNA, 19 nt, Artificial Sequence
  Description of Artificial Sequence: Synthetic oligonucleotide
ugugcccgagguugaacuu

SEQ ID NO: 1269475 - RNA, 19 nt, Artificial Sequence
  Description of Artificial Sequence: Synthetic oligonucleotide
ccgucuuuauguuuuccuc

SEQ ID NO: 1269476 - RNA, 19 nt, Artificial Sequence
  Description of Artificial Sequence: Synthetic oligonucleotide
gguugcucugauauuuuga

SEQ ID NO: 1269477 - RNA, 19 nt, Artificial Sequence
  Description of Artificial Sequence: Synthetic oligonucleotide
gcgucagugaacaagucaa

SEQ ID NO: 1269478 - RNA, 19 nt, Artificial Sequence
  Description of Artificial Sequence: Synthetic oligonucleotide
gugugcaggacguucgggu

SEQ ID NO: 1269479 - RNA, 19 nt, Artificial Sequence
  Description of Artificial Sequence: Synthetic oligonucleotide
uuuugugcccgagguugaa

SEQ ID NO: 1269480 - RNA, 19 nt, Artificial Sequence
  Description of Artificial Sequence: Synthetic oligonucleotide
gcucacuuugcggggaucc

SEQ ID NO: 1269481 - RNA, 19 nt, Artificial Sequence
  Description of Artificial Sequence: Synthetic oligonucleotide
aguuuacaggcaagggcaa

SEQ ID NO: 1269482 - RNA, 19 nt, Artificial Sequence
  Description of Artificial Sequence: Synthetic oligonucleotide
gcugaaucaggguuuauuu

SEQ ID NO: 1269483 - RNA, 19 nt, Artificial Sequence
  Description of Artificial Sequence: Synthetic oligonucleotide
uuucuccgauguucagcaa

SEQ ID NO: 1269484 - RNA, 19 nt, Artificial Sequence
  Description of Artificial Sequence: Synthetic oligonucleotide
uggcgucagugaacaaguc

SEQ ID NO: 1269485 - RNA, 19 nt, Artificial Sequence
  Description of Artificial Sequence: Synthetic oligonucleotide
ccgaagcucgcucacuuug

SEQ ID NO: 1269486 - RNA, 19 nt, Artificial Sequence
  Description of Artificial Sequence: Synthetic oligonucleotide
cauaaccuuuggguugcuc

SEQ ID NO: 1269487 - RNA, 19 nt, Artificial Sequence
  Description of Artificial Sequence: Synthetic oligonucleotide
ggugugcaggacguucggg

SEQ ID NO: 1269488 - RNA, 19 nt, Artificial Sequence
  Description of Artificial Sequence: Synthetic oligonucleotide
auggccgcaagaaccucug

SEQ ID NO: 1269489 - RNA, 19 nt, Artificial Sequence
  Description of Artificial Sequence: Synthetic oligonucleotide
uuguauggcugagcugaau

SEQ ID NO: 1269490 - RNA, 19 nt, Artificial Sequence
  Description of Artificial Sequence: Synthetic oligonucleotide
cagcauuguuaugacauua

SEQ ID NO: 1269491 - RNA, 19 nt, Artificial Sequence
  Description of Artificial Sequence: Synthetic oligonucleotide
acauuaugcuugaccucca

SEQ ID NO: 1269492 - RNA, 19 nt, Artificial Sequence
  Description of Artificial Sequence: Synthetic oligonucleotide
gcucaccaucauuuagggc

SEQ ID NO: 1269493 - RNA, 19 nt, Artificial Sequence
  Description of Artificial Sequence: Synthetic oligonucleotide
cccuaauggcaaaccacug

SEQ ID NO: 1269494 - RNA, 19 nt, Artificial Sequence
  Description of Artificial Sequence: Synthetic oligonucleotide
ggcucaauuacaccgucau

SEQ ID NO: 1269495 - RNA, 19 nt, Artificial Sequence
  Description of Artificial Sequence: Synthetic oligonucleotide
cauuaugcuugaccuccaa

SEQ ID NO: 1269496 - RNA, 19 nt, Artificial Sequence
  Description of Artificial Sequence: Synthetic oligonucleotide
gccaccaugacuucuggau

SEQ ID NO: 1269497 - RNA, 19 nt, Artificial Sequence
  Description of Artificial Sequence: Synthetic oligonucleotide
cacccacucccucaggaaa

SEQ ID NO: 1269498 - RNA, 19 nt, Artificial Sequence
  Description of Artificial Sequence: Synthetic oligonucleotide
auagccaaucgaggguuua

SEQ ID NO: 1269499 - RNA, 19 nt, Artificial Sequence
  Description of Artificial Sequence: Synthetic oligonucleotide
cgagguugaacuucuuuca

SEQ ID NO: 1269500 - RNA, 19 nt, Artificial Sequence
  Description of Artificial Sequence: Synthetic oligonucleotide
agucgaccauauucagcuu

SEQ ID NO: 1269501 - RNA, 19 nt, Artificial Sequence
  Description of Artificial Sequence: Synthetic oligonucleotide
caucuucacgaaagcccga

SEQ ID NO: 1269502 - RNA, 19 nt, Artificial Sequence
  Description of Artificial Sequence: Synthetic oligonucleotide
cuuucccucgccacuugua

SEQ ID NO: 1269503 - RNA, 19 nt, Artificial Sequence
  Description of Artificial Sequence: Synthetic oligonucleotide
caggacguucggguccugc

SEQ ID NO: 1269504 - RNA, 19 nt, Artificial Sequence
  Description of Artificial Sequence: Synthetic oligonucleotide
acguuugcgcucauacuuu

SEQ ID NO: 1269505 - RNA, 19 nt, Artificial Sequence
  Description of Artificial Sequence: Synthetic oligonucleotide
aucucucgcucuucacguu

SEQ ID NO: 1269506 - RNA, 19 nt, Artificial Sequence
  Description of Artificial Sequence: Synthetic oligonucleotide
cuuguauggcugagcugaa

SEQ ID NO: 1269507 - RNA, 19 nt, Artificial Sequence
  Description of Artificial Sequence: Synthetic oligonucleotide
gugcccgagguugaacuuc

SEQ ID NO: 1269508 - RNA, 19 nt, Artificial Sequence
  Description of Artificial Sequence: Synthetic oligonucleotide
cauggccgcaagaaccucu

SEQ ID NO: 1269509 - RNA, 19 nt, Artificial Sequence
  Description of Artificial Sequence: Synthetic oligonucleotide
gagguacacugguuuguau

SEQ ID NO: 1269510 - RNA, 19 nt, Artificial Sequence
  Description of Artificial Sequence: Synthetic oligonucleotide
guucauccgucuuuauguu

SEQ ID NO: 1269511 - RNA, 19 nt, Artificial Sequence
  Description of Artificial Sequence: Synthetic oligonucleotide
cgaagcucgcucacuuugc

SEQ ID NO: 1269512 - RNA, 19 nt, Artificial Sequence
  Description of Artificial Sequence: Synthetic oligonucleotide
gggacuggauuaucuucga

SEQ ID NO: 1269513 - RNA, 19 nt, Artificial Sequence
  Description of Artificial Sequence: Synthetic oligonucleotide
uuacaccgucauugucaau

SEQ ID NO: 1269514 - RNA, 19 nt, Artificial Sequence
  Description of Artificial Sequence: Synthetic oligonucleotide
guaagugagcuaagcugcu

SEQ ID NO: 1269515 - RNA, 19 nt, Artificial Sequence
  Description of Artificial Sequence: Synthetic oligonucleotide
gccacuuguauggcugagc

SEQ ID NO: 1269516 - RNA, 19 nt, Artificial Sequence
  Description of Artificial Sequence: Synthetic oligonucleotide
cuagaucacucuccucacu

SEQ ID NO: 1269517 - RNA, 19 nt, Artificial Sequence
  Description of Artificial Sequence: Synthetic oligonucleotide
gccgcaagaaccucugggu

SEQ ID NO: 1269518 - RNA, 19 nt, Artificial Sequence
  Description of Artificial Sequence: Synthetic oligonucleotide
ccgcaagaaccucuggguc

SEQ ID NO: 1269519 - RNA, 19 nt, Artificial Sequence
  Description of Artificial Sequence: Synthetic oligonucleotide
gccaaucgaggguuuagcu

SEQ ID NO: 1269520 - RNA, 19 nt, Artificial Sequence
  Description of Artificial Sequence: Synthetic oligonucleotide
ccaaacuuggcugacaauu

SEQ ID NO: 1269521 - RNA, 19 nt, Artificial Sequence
  Description of Artificial Sequence: Synthetic oligonucleotide
ccuaauggcaaaccacugu

SEQ ID NO: 1269522 - RNA, 19 nt, Artificial Sequence
  Description of Artificial Sequence: Synthetic oligonucleotide
ccgggcgcggcuaaacgug

SEQ ID NO: 1269523 - RNA, 19 nt, Artificial Sequence
  Description of Artificial Sequence: Synthetic oligonucleotide
cgcaagaaccucuggguca

SEQ ID NO: 1269524 - RNA, 19 nt, Artificial Sequence
  Description of Artificial Sequence: Synthetic oligonucleotide
uccucacuugaugguucau

SEQ ID NO: 1269525 - RNA, 19 nt, Artificial Sequence
  Description of Artificial Sequence: Synthetic oligonucleotide
ggaaacgcauuuccucggu

SEQ ID NO: 1269526 - RNA, 19 nt, Artificial Sequence
  Description of Artificial Sequence: Synthetic oligonucleotide
gcucuucacguuugcgcuc

SEQ ID NO: 1269527 - RNA, 19 nt, Artificial Sequence
  Description of Artificial Sequence: Synthetic oligonucleotide
ccacuuguauggcugagcu

SEQ ID NO: 1269528 - RNA, 19 nt, Artificial Sequence
  Description of Artificial Sequence: Synthetic oligonucleotide
gcccgggcgcggcuaaacg

SEQ ID NO: 1269529 - RNA, 19 nt, Artificial Sequence
  Description of Artificial Sequence: Synthetic oligonucleotide
ggguuuagcuugauggcgu

SEQ ID NO: 1269530 - RNA, 19 nt, Artificial Sequence
  Description of Artificial Sequence: Synthetic oligonucleotide
cccacucccucaggaaacg

SEQ ID NO: 1269531 - RNA, 19 nt, Artificial Sequence
  Description of Artificial Sequence: Synthetic oligonucleotide
ggcagcauuuggcuucugu

SEQ ID NO: 1269532 - RNA, 19 nt, Artificial Sequence
  Description of Artificial Sequence: Synthetic oligonucleotide
gcgcucauacuuucuccga

SEQ ID NO: 1269533 - RNA, 19 nt, Artificial Sequence
  Description of Artificial Sequence: Synthetic oligonucleotide
agcccgaagcucgcucacu

SEQ ID NO: 1269534 - RNA, 19 nt, Artificial Sequence
  Description of Artificial Sequence: Synthetic oligonucleotide
ccgucauugucaauuucua

SEQ ID NO: 1269535 - RNA, 19 nt, Artificial Sequence
  Description of Artificial Sequence: Synthetic oligonucleotide
gugacccaggagucugugu

SEQ ID NO: 1269536 - RNA, 19 nt, Artificial Sequence
  Description of Artificial Sequence: Synthetic oligonucleotide
gcccaguaauucaaaggaa

SEQ ID NO: 1269537 - RNA, 19 nt, Artificial Sequence
  Description of Artificial Sequence: Synthetic oligonucleotide
ggggcggcgguggaagccc

SEQ ID NO: 1269538 - RNA, 19 nt, Artificial Sequence
  Description of Artificial Sequence: Synthetic oligonucleotide
aucgaggguuuagcuugau

SEQ ID NO: 1269539 - RNA, 19 nt, Artificial Sequence
  Description of Artificial Sequence: Synthetic oligonucleotide
ccaaucgaggguuuagcuu

SEQ ID NO: 1269540 - RNA, 19 nt, Artificial Sequence
  Description of Artificial Sequence: Synthetic oligonucleotide
gccuggcaugccuccuccc

SEQ ID NO: 1269541 - RNA, 19 nt, Artificial Sequence
  Description of Artificial Sequence: Synthetic oligonucleotide
cggugugcaggacguucgg

SEQ ID NO: 1269542 - RNA, 19 nt, Artificial Sequence
  Description of Artificial Sequence: Synthetic oligonucleotide
ggaugaggucagagguaca

SEQ ID NO: 1269543 - RNA, 19 nt, Artificial Sequence
  Description of Artificial Sequence: Synthetic oligonucleotide
ccacucccucaggaaacgc

SEQ ID NO: 1269544 - RNA, 19 nt, Artificial Sequence
  Description of Artificial Sequence: Synthetic oligonucleotide
cuucacguuugcgcucaua

SEQ ID NO: 1269545 - RNA, 19 nt, Artificial Sequence
  Description of Artificial Sequence: Synthetic oligonucleotide
gggccacauccuggaaagc

SEQ ID NO: 1269546 - RNA, 19 nt, Artificial Sequence
  Description of Artificial Sequence: Synthetic oligonucleotide
ggacguucggguccugcuu

SEQ ID NO: 1269547 - RNA, 19 nt, Artificial Sequence
  Description of Artificial Sequence: Synthetic oligonucleotide
cccucgccacuuguauggc

SEQ ID NO: 1269548 - RNA, 19 nt, Artificial Sequence
  Description of Artificial Sequence: Synthetic oligonucleotide
gcaguaagucgaccauauu

SEQ ID NO: 1269549 - RNA, 19 nt, Artificial Sequence
  Description of Artificial Sequence: Synthetic oligonucleotide
ggcccgggcgcggcuaaac

SEQ ID NO: 1269550 - RNA, 19 nt, Artificial Sequence
  Description of Artificial Sequence: Synthetic oligonucleotide
cuccgauguucagcaauuu

SEQ ID NO: 1269551 - RNA, 19 nt, Artificial Sequence
  Description of Artificial Sequence: Synthetic oligonucleotide
gcaagaucaugagcugcuu

SEQ ID NO: 1269552 - RNA, 19 nt, Artificial Sequence
  Description of Artificial Sequence: Synthetic oligonucleotide
cccgagguugaacuucuuu

SEQ ID NO: 1269553 - RNA, 19 nt, Artificial Sequence
  Description of Artificial Sequence: Synthetic oligonucleotide
cccgggcgcggcuaaacgu

SEQ ID NO: 1269554 - RNA, 19 nt, Artificial Sequence
  Description of Artificial Sequence: Synthetic oligonucleotide
ccucgccacuuguauggcu

SEQ ID NO: 1269555 - RNA, 19 nt, Artificial Sequence
  Description of Artificial Sequence: Synthetic oligonucleotide
gguccugcuuacacaucuu

SEQ ID NO: 1269556 - RNA, 19 nt, Artificial Sequence
  Description of Artificial Sequence: Synthetic oligonucleotide
cgggcgcggcuaaacguga

SEQ ID NO: 1269557 - RNA, 19 nt, Artificial Sequence
  Description of Artificial Sequence: Synthetic oligonucleotide
gcaggacguucggguccug

SEQ ID NO: 1269558 - RNA, 19 nt, Artificial Sequence
  Description of Artificial Sequence: Synthetic oligonucleotide
cccgaagcucgcucacuuu

SEQ ID NO: 1269559 - RNA, 19 nt, Artificial Sequence
  Description of Artificial Sequence: Synthetic oligonucleotide
cgaccauauucagcuuccu

SEQ ID NO: 1269560 - RNA, 19 nt, Artificial Sequence
  Description of Artificial Sequence: Synthetic oligonucleotide
cccaggagucugugugcuu

SEQ ID NO: 1269561 - RNA, 19 nt, Artificial Sequence
  Description of Artificial Sequence: Synthetic oligonucleotide
ccucggugugcaggacguu

SEQ ID NO: 1269562 - RNA, 19 nt, Artificial Sequence
  Description of Artificial Sequence: Synthetic oligonucleotide
uaucauaugacccagagau

SEQ ID NO: 1269563 - RNA, 19 nt, Artificial Sequence
  Description of Artificial Sequence: Synthetic oligonucleotide
aaaggcauaaacaaauggc

SEQ ID NO: 1269564 - RNA, 19 nt, Artificial Sequence
  Description of Artificial Sequence: Synthetic oligonucleotide
acugacuuaucauaugacc

SEQ ID NO: 1269565 - RNA, 19 nt, Artificial Sequence
  Description of Artificial Sequence: Synthetic oligonucleotide
uauaauuuccagaggaagc

SEQ ID NO: 1269566 - RNA, 19 nt, Artificial Sequence
  Description of Artificial Sequence: Synthetic oligonucleotide
gacauauggaucuugauca

SEQ ID NO: 1269567 - RNA, 19 nt, Artificial Sequence
  Description of Artificial Sequence: Synthetic oligonucleotide
aauuauccaagucguacuc

SEQ ID NO: 1269568 - RNA, 19 nt, Artificial Sequence
  Description of Artificial Sequence: Synthetic oligonucleotide
uguuccguaucuuucaggg

SEQ ID NO: 1269569 - RNA, 19 nt, Artificial Sequence
  Description of Artificial Sequence: Synthetic oligonucleotide
uggaucuugaucauuacug

SEQ ID NO: 1269570 - RNA, 19 nt, Artificial Sequence
  Description of Artificial Sequence: Synthetic oligonucleotide
cagagauucaccaagaguc

SEQ ID NO: 1269571 - RNA, 19 nt, Artificial Sequence
  Description of Artificial Sequence: Synthetic oligonucleotide
uucgucauaauuauccaag

SEQ ID NO: 1269572 - RNA, 19 nt, Artificial Sequence
  Description of Artificial Sequence: Synthetic oligonucleotide
uugauuguagacaugcacc

SEQ ID NO: 1269573 - RNA, 19 nt, Artificial Sequence
  Description of Artificial Sequence: Synthetic oligonucleotide
auaauuauccaagucguac

SEQ ID NO: 1269574 - RNA, 19 nt, Artificial Sequence
  Description of Artificial Sequence: Synthetic oligonucleotide
uagagaguccacuauaucc

SEQ ID NO: 1269575 - RNA, 19 nt, Artificial Sequence
  Description of Artificial Sequence: Synthetic oligonucleotide
aaagccgucaucuguacug

SEQ ID NO: 1269576 - RNA, 19 nt, Artificial Sequence
  Description of Artificial Sequence: Synthetic oligonucleotide
auauaaacaucccaggaga

SEQ ID NO: 1269577 - RNA, 19 nt, Artificial Sequence
  Description of Artificial Sequence: Synthetic oligonucleotide
acaaauggcaaaucaggac

SEQ ID NO: 1269578 - RNA, 19 nt, Artificial Sequence
  Description of Artificial Sequence: Synthetic oligonucleotide
agacauaucccagagaauc

SEQ ID NO: 1269579 - RNA, 19 nt, Artificial Sequence
  Description of Artificial Sequence: Synthetic oligonucleotide
cugacuuaucauaugaccc

SEQ ID NO: 1269580 - RNA, 19 nt, Artificial Sequence
  Description of Artificial Sequence: Synthetic oligonucleotide
gaucauuacugccauauac

SEQ ID NO: 1269581 - RNA, 19 nt, Artificial Sequence
  Description of Artificial Sequence: Synthetic oligonucleotide
ucgugguggacauagaaag

SEQ ID NO: 1269582 - RNA, 19 nt, Artificial Sequence
  Description of Artificial Sequence: Synthetic oligonucleotide
ugagaggguaugcagacag

SEQ ID NO: 1269583 - RNA, 19 nt, Artificial Sequence
  Description of Artificial Sequence: Synthetic oligonucleotide
aaagcuuacuucccaaugu

SEQ ID NO: 1269584 - RNA, 19 nt, Artificial Sequence
  Description of Artificial Sequence: Synthetic oligonucleotide
aaaucaggacaacaugaag

SEQ ID NO: 1269585 - RNA, 19 nt, Artificial Sequence
  Description of Artificial Sequence: Synthetic oligonucleotide
cauauaaacaucccaggag

SEQ ID NO: 1269586 - RNA, 19 nt, Artificial Sequence
  Description of Artificial Sequence: Synthetic oligonucleotide
aaucaggacaacaugaaga

SEQ ID NO: 1269587 - RNA, 19 nt, Artificial Sequence
  Description of Artificial Sequence: Synthetic oligonucleotide
aggagauugaacuuuguca

SEQ ID NO: 1269588 - RNA, 19 nt, Artificial Sequence
  Description of Artificial Sequence: Synthetic oligonucleotide
ugagcauugaguguaaaga

SEQ ID NO: 1269589 - RNA, 19 nt, Artificial Sequence
  Description of Artificial Sequence: Synthetic oligonucleotide
uugaguguaaagauuggcu

SEQ ID NO: 1269590 - RNA, 19 nt, Artificial Sequence
  Description of Artificial Sequence: Synthetic oligonucleotide
acaaaagagaacucccauc

SEQ ID NO: 1269591 - RNA, 19 nt, Artificial Sequence
  Description of Artificial Sequence: Synthetic oligonucleotide
ugaacgugcauccagguua

SEQ ID NO: 1269592 - RNA, 19 nt, Artificial Sequence
  Description of Artificial Sequence: Synthetic oligonucleotide
uguaaagauuggcuuaucu

SEQ ID NO: 1269593 - RNA, 19 nt, Artificial Sequence
  Description of Artificial Sequence: Synthetic oligonucleotide
cucuaaguugcauugcucc

SEQ ID NO: 1269594 - RNA, 19 nt, Artificial Sequence
  Description of Artificial Sequence: Synthetic oligonucleotide
uaggccagcuuuuaaaacc

SEQ ID NO: 1269595 - RNA, 19 nt, Artificial Sequence
  Description of Artificial Sequence: Synthetic oligonucleotide
ggagauugaacuuugucag

SEQ ID NO: 1269596 - RNA, 19 nt, Artificial Sequence
  Description of Artificial Sequence: Synthetic oligonucleotide
ucauuacugccauauacug

SEQ ID NO: 1269597 - RNA, 19 nt, Artificial Sequence
  Description of Artificial Sequence: Synthetic oligonucleotide
acaugcaccucuaaguugc

SEQ ID NO: 1269598 - RNA, 19 nt, Artificial Sequence
  Description of Artificial Sequence: Synthetic oligonucleotide
auuacugccauauacugua

SEQ ID NO: 1269599 - RNA, 19 nt, Artificial Sequence
  Description of Artificial Sequence: Synthetic oligonucleotide
ugcagcuacacaaggaaca

SEQ ID NO: 1269600 - RNA, 19 nt, Artificial Sequence
  Description of Artificial Sequence: Synthetic oligonucleotide
uuauccaagucguacucag

SEQ ID NO: 1269601 - RNA, 19 nt, Artificial Sequence
  Description of Artificial Sequence: Synthetic oligonucleotide
uccacuauauccagguccc

SEQ ID NO: 1269602 - RNA, 19 nt, Artificial Sequence
  Description of Artificial Sequence: Synthetic oligonucleotide
aacagagauucaccaagag

SEQ ID NO: 1269603 - RNA, 19 nt, Artificial Sequence
  Description of Artificial Sequence: Synthetic oligonucleotide
ugcuuaugucccaaacucg

SEQ ID NO: 1269604 - RNA, 19 nt, Artificial Sequence
  Description of Artificial Sequence: Synthetic oligonucleotide
caaggaacauucuuaggcc

SEQ ID NO: 1269605 - RNA, 19 nt, Artificial Sequence
  Description of Artificial Sequence: Synthetic oligonucleotide
aaaaugacacggugagaag

SEQ ID NO: 1269606 - RNA, 19 nt, Artificial Sequence
  Description of Artificial Sequence: Synthetic oligonucleotide
uaauuauccaagucguacu

SEQ ID NO: 1269607 - RNA, 19 nt, Artificial Sequence
  Description of Artificial Sequence: Synthetic oligonucleotide
aguggguuuaaucaggaaa

SEQ ID NO: 1269608 - RNA, 19 nt, Artificial Sequence
  Description of Artificial Sequence: Synthetic oligonucleotide
ugacuuaucauaugaccca

SEQ ID NO: 1269609 - RNA, 19 nt, Artificial Sequence
  Description of Artificial Sequence: Synthetic oligonucleotide
ucguugugagcauugagug

SEQ ID NO: 1269610 - RNA, 19 nt, Artificial Sequence
  Description of Artificial Sequence: Synthetic oligonucleotide
ugauuguagacaugcaccu

SEQ ID NO: 1269611 - RNA, 19 nt, Artificial Sequence
  Description of Artificial Sequence: Synthetic oligonucleotide
gaucucaucguugugagca

SEQ ID NO: 1269612 - RNA, 19 nt, Artificial Sequence
  Description of Artificial Sequence: Synthetic oligonucleotide
aagcuuacuucccaaugug

SEQ ID NO: 1269613 - RNA, 19 nt, Artificial Sequence
  Description of Artificial Sequence: Synthetic oligonucleotide
ucucauugggauuucggca

SEQ ID NO: 1269614 - RNA, 19 nt, Artificial Sequence
  Description of Artificial Sequence: Synthetic oligonucleotide
acuguaagacccaacagag

SEQ ID NO: 1269615 - RNA, 19 nt, Artificial Sequence
  Description of Artificial Sequence: Synthetic oligonucleotide
uuugugcugccaauaacca

SEQ ID NO: 1269616 - RNA, 19 nt, Artificial Sequence
  Description of Artificial Sequence: Synthetic oligonucleotide
gaccugacugcucagauca

SEQ ID NO: 1269617 - RNA, 19 nt, Artificial Sequence
  Description of Artificial Sequence: Synthetic oligonucleotide
auaacaggggucauguuuc

SEQ ID NO: 1269618 - RNA, 19 nt, Artificial Sequence
  Description of Artificial Sequence: Synthetic oligonucleotide
uaagacccaacagagauuc

SEQ ID NO: 1269619 - RNA, 19 nt, Artificial Sequence
  Description of Artificial Sequence: Synthetic oligonucleotide
augucccaaacucgaagcc

SEQ ID NO: 1269620 - RNA, 19 nt, Artificial Sequence
  Description of Artificial Sequence: Synthetic oligonucleotide
cuaucugcccacugaaccg

SEQ ID NO: 1269621 - RNA, 19 nt, Artificial Sequence
  Description of Artificial Sequence: Synthetic oligonucleotide
ugucuuauuccaggaaagg

SEQ ID NO: 1269622 - RNA, 19 nt, Artificial Sequence
  Description of Artificial Sequence: Synthetic oligonucleotide
uaguguacggucauccugu

SEQ ID NO: 1269623 - RNA, 19 nt, Artificial Sequence
  Description of Artificial Sequence: Synthetic oligonucleotide
guagacaugcaccucuaag

SEQ ID NO: 1269624 - RNA, 19 nt, Artificial Sequence
  Description of Artificial Sequence: Synthetic oligonucleotide
uuggcuuaucugaacgugc

SEQ ID NO: 1269625 - RNA, 19 nt, Artificial Sequence
  Description of Artificial Sequence: Synthetic oligonucleotide
ucuagagaguccacuauau

SEQ ID NO: 1269626 - RNA, 19 nt, Artificial Sequence
  Description of Artificial Sequence: Synthetic oligonucleotide
gagauugaacuuugucagg

SEQ ID NO: 1269627 - RNA, 19 nt, Artificial Sequence
  Description of Artificial Sequence: Synthetic oligonucleotide
accccgaguucauauaaac

SEQ ID NO: 1269628 - RNA, 19 nt, Artificial Sequence
  Description of Artificial Sequence: Synthetic oligonucleotide
agugcuuaugucccaaacu

SEQ ID NO: 1269629 - RNA, 19 nt, Artificial Sequence
  Description of Artificial Sequence: Synthetic oligonucleotide
acagagauucaccaagagu

SEQ ID NO: 1269630 - RNA, 19 nt, Artificial Sequence
  Description of Artificial Sequence: Synthetic oligonucleotide
uuucggcagucauacagag

SEQ ID NO: 1269631 - RNA, 19 nt, Artificial Sequence
  Description of Artificial Sequence: Synthetic oligonucleotide
ucugcugaagcagucacga

SEQ ID NO: 1269632 - RNA, 19 nt, Artificial Sequence
  Description of Artificial Sequence: Synthetic oligonucleotide
uuacuucccaaugugaaaa

SEQ ID NO: 1269633 - RNA, 19 nt, Artificial Sequence
  Description of Artificial Sequence: Synthetic oligonucleotide
aaugacacggugagaagug

SEQ ID NO: 1269634 - RNA, 19 nt, Artificial Sequence
  Description of Artificial Sequence: Synthetic oligonucleotide
uuacuuccucuuuacuuag

SEQ ID NO: 1269635 - RNA, 19 nt, Artificial Sequence
  Description of Artificial Sequence: Synthetic oligonucleotide
uucggcacggccacaaaug

SEQ ID NO: 1269636 - RNA, 19 nt, Artificial Sequence
  Description of Artificial Sequence: Synthetic oligonucleotide
uauaaacaucccaggagau

SEQ ID NO: 1269637 - RNA, 19 nt, Artificial Sequence
  Description of Artificial Sequence: Synthetic oligonucleotide
acauucuuaggccagcuuu

SEQ ID NO: 1269638 - RNA, 19 nt, Artificial Sequence
  Description of Artificial Sequence: Synthetic oligonucleotide
aucgaugagacgcuuuacu

SEQ ID NO: 1269639 - RNA, 19 nt, Artificial Sequence
  Description of Artificial Sequence: Synthetic oligonucleotide
acuauauccaggucccaca

SEQ ID NO: 1269640 - RNA, 19 nt, Artificial Sequence
  Description of Artificial Sequence: Synthetic oligonucleotide
agugaaugaggcuuggcuu

SEQ ID NO: 1269641 - RNA, 19 nt, Artificial Sequence
  Description of Artificial Sequence: Synthetic oligonucleotide
auuguuccguaucuuucag

SEQ ID NO: 1269642 - RNA, 19 nt, Artificial Sequence
  Description of Artificial Sequence: Synthetic oligonucleotide
uggcaaaucaggacaacau

SEQ ID NO: 1269643 - RNA, 19 nt, Artificial Sequence
  Description of Artificial Sequence: Synthetic oligonucleotide
agugcuaucugcugaugca

SEQ ID NO: 1269644 - RNA, 19 nt, Artificial Sequence
  Description of Artificial Sequence: Synthetic oligonucleotide
ucgauaacaggggucaugu

SEQ ID NO: 1269645 - RNA, 19 nt, Artificial Sequence
  Description of Artificial Sequence: Synthetic oligonucleotide
agcuuuuaaaaccccgagu

SEQ ID NO: 1269646 - RNA, 19 nt, Artificial Sequence
  Description of Artificial Sequence: Synthetic oligonucleotide
agguuauacacaaagccgu

SEQ ID NO: 1269647 - RNA, 19 nt, Artificial Sequence
  Description of Artificial Sequence: Synthetic oligonucleotide
agauugaacuuugucagga

SEQ ID NO: 1269648 - RNA, 19 nt, Artificial Sequence
  Description of Artificial Sequence: Synthetic oligonucleotide
cacugaaccgccacaggcg

SEQ ID NO: 1269649 - RNA, 19 nt, Artificial Sequence
  Description of Artificial Sequence: Synthetic oligonucleotide
agcucaucaucaucuagug

SEQ ID NO: 1269650 - RNA, 19 nt, Artificial Sequence
  Description of Artificial Sequence: Synthetic oligonucleotide
uuuaaaaccccgaguucau

SEQ ID NO: 1269651 - RNA, 19 nt, Artificial Sequence
  Description of Artificial Sequence: Synthetic oligonucleotide
aagugguuccaggucacuc

SEQ ID NO: 1269652 - RNA, 19 nt, Artificial Sequence
  Description of Artificial Sequence: Synthetic oligonucleotide
ucucuaucugcccacugaa

SEQ ID NO: 1269653 - RNA, 19 nt, Artificial Sequence
  Description of Artificial Sequence: Synthetic oligonucleotide
acaaagccgucaucuguac

SEQ ID NO: 1269654 - RNA, 19 nt, Artificial Sequence
  Description of Artificial Sequence: Synthetic oligonucleotide
ugucgugguggacauagaa

SEQ ID NO: 1269655 - RNA, 19 nt, Artificial Sequence
  Description of Artificial Sequence: Synthetic oligonucleotide
uuaggccagcuuuuaaaac

SEQ ID NO: 1269656 - RNA, 19 nt, Artificial Sequence
  Description of Artificial Sequence: Synthetic oligonucleotide
ucuuuggccacgccgcggc

SEQ ID NO: 1269657 - RNA, 19 nt, Artificial Sequence
  Description of Artificial Sequence: Synthetic oligonucleotide
uggcuuaucugaacgugca

SEQ ID NO: 1269658 - RNA, 19 nt, Artificial Sequence
  Description of Artificial Sequence: Synthetic oligonucleotide
aucauuacugccauauacu

SEQ ID NO: 1269659 - RNA, 19 nt, Artificial Sequence
  Description of Artificial Sequence: Synthetic oligonucleotide
gacuuaucauaugacccag

SEQ ID NO: 1269660 - RNA, 19 nt, Artificial Sequence
  Description of Artificial Sequence: Synthetic oligonucleotide
gagaguccacuauauccag

SEQ ID NO: 1269661 - RNA, 19 nt, Artificial Sequence
  Description of Artificial Sequence: Synthetic oligonucleotide
uaaccagucucucccgucu

SEQ ID NO: 1269662 - RNA, 19 nt, Artificial Sequence
  Description of Artificial Sequence: Synthetic oligonucleotide
aggccagcuuuuaaaaccc

SEQ ID NO: 1269663 - RNA, 19 nt, Artificial Sequence
  Description of Artificial Sequence: Synthetic oligonucleotide
aaagauuggcuuaucugaa

SEQ ID NO: 1269664 - RNA, 19 nt, Artificial Sequence
  Description of Artificial Sequence: Synthetic oligonucleotide
uuucagggugacauaugga

SEQ ID NO: 1269665 - RNA, 19 nt, Artificial Sequence
  Description of Artificial Sequence: Synthetic oligonucleotide
ucaguaugcccuucugcug

SEQ ID NO: 1269666 - RNA, 19 nt, Artificial Sequence
  Description of Artificial Sequence: Synthetic oligonucleotide
cuagagugaaugaggcuug

SEQ ID NO: 1269667 - RNA, 19 nt, Artificial Sequence
  Description of Artificial Sequence: Synthetic oligonucleotide
agagaguccacuauaucca

SEQ ID NO: 1269668 - RNA, 19 nt, Artificial Sequence
  Description of Artificial Sequence: Synthetic oligonucleotide
acgugcauccagguuauac

SEQ ID NO: 1269669 - RNA, 19 nt, Artificial Sequence
  Description of Artificial Sequence: Synthetic oligonucleotide
caauaaccagucucucccg

SEQ ID NO: 1269670 - RNA, 19 nt, Artificial Sequence
  Description of Artificial Sequence: Synthetic oligonucleotide
uccggcgucucuuuggcca

SEQ ID NO: 1269671 - RNA, 19 nt, Artificial Sequence
  Description of Artificial Sequence: Synthetic oligonucleotide
gcaauauaauuuccagagg

SEQ ID NO: 1269672 - RNA, 19 nt, Artificial Sequence
  Description of Artificial Sequence: Synthetic oligonucleotide
aucguugugagcauugagu

SEQ ID NO: 1269673 - RNA, 19 nt, Artificial Sequence
  Description of Artificial Sequence: Synthetic oligonucleotide
caacugacuuaucauauga

SEQ ID NO: 1269674 - RNA, 19 nt, Artificial Sequence
  Description of Artificial Sequence: Synthetic oligonucleotide
agagaaucacagugcuauc

SEQ ID NO: 1269675 - RNA, 19 nt, Artificial Sequence
  Description of Artificial Sequence: Synthetic oligonucleotide
cugccauauacuguaagac

SEQ ID NO: 1269676 - RNA, 19 nt, Artificial Sequence
  Description of Artificial Sequence: Synthetic oligonucleotide
ugucccaaacucgaagccc

SEQ ID NO: 1269677 - RNA, 19 nt, Artificial Sequence
  Description of Artificial Sequence: Synthetic oligonucleotide
accucuaaguugcauugcu

SEQ ID NO: 1269678 - RNA, 19 nt, Artificial Sequence
  Description of Artificial Sequence: Synthetic oligonucleotide
gauucucauugggauuucg

SEQ ID NO: 1269679 - RNA, 19 nt, Artificial Sequence
  Description of Artificial Sequence: Synthetic oligonucleotide
aaugugaaaacuggcucua

SEQ ID NO: 1269680 - RNA, 19 nt, Artificial Sequence
  Description of Artificial Sequence: Synthetic oligonucleotide
uuguccggcgucucuuugg

SEQ ID NO: 1269681 - RNA, 19 nt, Artificial Sequence
  Description of Artificial Sequence: Synthetic oligonucleotide
ccaacagagauucaccaag

SEQ ID NO: 1269682 - RNA, 19 nt, Artificial Sequence
  Description of Artificial Sequence: Synthetic oligonucleotide
uugcagcuacacaaggaac

SEQ ID NO: 1269683 - RNA, 19 nt, Artificial Sequence
  Description of Artificial Sequence: Synthetic oligonucleotide
cuauauccaggucccacac

SEQ ID NO: 1269684 - RNA, 19 nt, Artificial Sequence
  Description of Artificial Sequence: Synthetic oligonucleotide
caggaguaugucguggugg

SEQ ID NO: 1269685 - RNA, 19 nt, Artificial Sequence
  Description of Artificial Sequence: Synthetic oligonucleotide
ucaucuaguguacggucau

SEQ ID NO: 1269686 - RNA, 19 nt, Artificial Sequence
  Description of Artificial Sequence: Synthetic oligonucleotide
ucgaugagacgcuuuacuu

SEQ ID NO: 1269687 - RNA, 19 nt, Artificial Sequence
  Description of Artificial Sequence: Synthetic oligonucleotide
cagugcuaucugcugaugc

SEQ ID NO: 1269688 - RNA, 19 nt, Artificial Sequence
  Description of Artificial Sequence: Synthetic oligonucleotide
ucccgcaagggccacuacc

SEQ ID NO: 1269689 - RNA, 19 nt, Artificial Sequence
  Description of Artificial Sequence: Synthetic oligonucleotide
cacgcaggucacuuggcgg

SEQ ID NO: 1269690 - RNA, 19 nt, Artificial Sequence
  Description of Artificial Sequence: Synthetic oligonucleotide
ugacacggugagaaguggu

SEQ ID NO: 1269691 - RNA, 19 nt, Artificial Sequence
  Description of Artificial Sequence: Synthetic oligonucleotide
cauaugacccagagaucag

SEQ ID NO: 1269692 - RNA, 19 nt, Artificial Sequence
  Description of Artificial Sequence: Synthetic oligonucleotide
agaggguaugcagacagga

SEQ ID NO: 1269693 - RNA, 19 nt, Artificial Sequence
  Description of Artificial Sequence: Synthetic oligonucleotide
ugcaccucuaaguugcauu

SEQ ID NO: 1269694 - RNA, 19 nt, Artificial Sequence
  Description of Artificial Sequence: Synthetic oligonucleotide
aucugaacgugcauccagg

SEQ ID NO: 1269695 - RNA, 19 nt, Artificial Sequence
  Description of Artificial Sequence: Synthetic oligonucleotide
gagugaaugaggcuuggcu

SEQ ID NO: 1269696 - RNA, 19 nt, Artificial Sequence
  Description of Artificial Sequence: Synthetic oligonucleotide
agagugaaugaggcuuggc

SEQ ID NO: 1269697 - RNA, 19 nt, Artificial Sequence
  Description of Artificial Sequence: Synthetic oligonucleotide
cauugcuccuguucggcac

SEQ ID NO: 1269698 - RNA, 19 nt, Artificial Sequence
  Description of Artificial Sequence: Synthetic oligonucleotide
cacgaggcagcccuugacc

SEQ ID NO: 1269699 - RNA, 19 nt, Artificial Sequence
  Description of Artificial Sequence: Synthetic oligonucleotide
accucgauaacagggguca

SEQ ID NO: 1269700 - RNA, 19 nt, Artificial Sequence
  Description of Artificial Sequence: Synthetic oligonucleotide
gaguccacuauauccaggu

SEQ ID NO: 1269701 - RNA, 19 nt, Artificial Sequence
  Description of Artificial Sequence: Synthetic oligonucleotide
auggcaaaucaggacaaca

SEQ ID NO: 1269702 - RNA, 19 nt, Artificial Sequence
  Description of Artificial Sequence: Synthetic oligonucleotide
uccggauacucuguaugcc

SEQ ID NO: 1269703 - RNA, 19 nt, Artificial Sequence
  Description of Artificial Sequence: Synthetic oligonucleotide
guggacauagaaagacucc

SEQ ID NO: 1269704 - RNA, 19 nt, Artificial Sequence
  Description of Artificial Sequence: Synthetic oligonucleotide
agacaagccuuuugugcug

SEQ ID NO: 1269705 - RNA, 19 nt, Artificial Sequence
  Description of Artificial Sequence: Synthetic oligonucleotide
auuauccaagucguacuca

SEQ ID NO: 1269706 - RNA, 19 nt, Artificial Sequence
  Description of Artificial Sequence: Synthetic oligonucleotide
ucggcaucuggguuguccu

SEQ ID NO: 1269707 - RNA, 19 nt, Artificial Sequence
  Description of Artificial Sequence: Synthetic oligonucleotide
ugaaccgccacaggcgaug

SEQ ID NO: 1269708 - RNA, 19 nt, Artificial Sequence
  Description of Artificial Sequence: Synthetic oligonucleotide
uacuucccaaugugaaaac

SEQ ID NO: 1269709 - RNA, 19 nt, Artificial Sequence
  Description of Artificial Sequence: Synthetic oligonucleotide
cuagagaguccacuauauc

SEQ ID NO: 1269710 - RNA, 19 nt, Artificial Sequence
  Description of Artificial Sequence: Synthetic oligonucleotide
uaacaggggucauguuucc

SEQ ID NO: 1269711 - RNA, 19 nt, Artificial Sequence
  Description of Artificial Sequence: Synthetic oligonucleotide
gacauaucccagagaauca

SEQ ID NO: 1269712 - RNA, 19 nt, Artificial Sequence
  Description of Artificial Sequence: Synthetic oligonucleotide
ucgaagcccuucuuucuga

SEQ ID NO: 1269713 - RNA, 19 nt, Artificial Sequence
  Description of Artificial Sequence: Synthetic oligonucleotide
ggcauaaacaaauggcaaa

SEQ ID NO: 1269714 - RNA, 19 nt, Artificial Sequence
  Description of Artificial Sequence: Synthetic oligonucleotide
gguccggauacucuguaug

SEQ ID NO: 1269715 - RNA, 19 nt, Artificial Sequence
  Description of Artificial Sequence: Synthetic oligonucleotide
ugaucauuacugccauaua

SEQ ID NO: 1269716 - RNA, 19 nt, Artificial Sequence
  Description of Artificial Sequence: Synthetic oligonucleotide
uccuguucggcacggccac

SEQ ID NO: 1269717 - RNA, 19 nt, Artificial Sequence
  Description of Artificial Sequence: Synthetic oligonucleotide
gagcauugaguguaaagau

SEQ ID NO: 1269718 - RNA, 19 nt, Artificial Sequence
  Description of Artificial Sequence: Synthetic oligonucleotide
aucauaugacccagagauc

SEQ ID NO: 1269719 - RNA, 19 nt, Artificial Sequence
  Description of Artificial Sequence: Synthetic oligonucleotide
guuauacacaaagccguca

SEQ ID NO: 1269720 - RNA, 19 nt, Artificial Sequence
  Description of Artificial Sequence: Synthetic oligonucleotide
aucaucuaguguacgguca

SEQ ID NO: 1269721 - RNA, 19 nt, Artificial Sequence
  Description of Artificial Sequence: Synthetic oligonucleotide
acaccucgauaacaggggu

SEQ ID NO: 1269722 - RNA, 19 nt, Artificial Sequence
  Description of Artificial Sequence: Synthetic oligonucleotide
cucgaagcccuucuuucug

SEQ ID NO: 1269723 - RNA, 19 nt, Artificial Sequence
  Description of Artificial Sequence: Synthetic oligonucleotide
acggucauccuguggguca

SEQ ID NO: 1269724 - RNA, 19 nt, Artificial Sequence
  Description of Artificial Sequence: Synthetic oligonucleotide
auaugacccagagaucaga

SEQ ID NO: 1269725 - RNA, 19 nt, Artificial Sequence
  Description of Artificial Sequence: Synthetic oligonucleotide
aguaugcccuucugcugag

SEQ ID NO: 1269726 - RNA, 19 nt, Artificial Sequence
  Description of Artificial Sequence: Synthetic oligonucleotide
auuucggcagucauacaga

SEQ ID NO: 1269727 - RNA, 19 nt, Artificial Sequence
  Description of Artificial Sequence: Synthetic oligonucleotide
agccgucaucuguacuggc

SEQ ID NO: 1269728 - RNA, 19 nt, Artificial Sequence
  Description of Artificial Sequence: Synthetic oligonucleotide
cagugcuuaugucccaaac

SEQ ID NO: 1269729 - RNA, 19 nt, Artificial Sequence
  Description of Artificial Sequence: Synthetic oligonucleotide
gcaccucuaaguugcauug

SEQ ID NO: 1269730 - RNA, 19 nt, Artificial Sequence
  Description of Artificial Sequence: Synthetic oligonucleotide
acauauggaucuugaucau

SEQ ID NO: 1269731 - RNA, 19 nt, Artificial Sequence
  Description of Artificial Sequence: Synthetic oligonucleotide
gauuggcuuaucugaacgu

SEQ ID NO: 1269732 - RNA, 19 nt, Artificial Sequence
  Description of Artificial Sequence: Synthetic oligonucleotide
ucacgaggcagcccuugac

SEQ ID NO: 1269733 - RNA, 19 nt, Artificial Sequence
  Description of Artificial Sequence: Synthetic oligonucleotide
guaugcagacaggaguaug

SEQ ID NO: 1269734 - RNA, 19 nt, Artificial Sequence
  Description of Artificial Sequence: Synthetic oligonucleotide
ucaucuguacuggccaaaa

SEQ ID NO: 1269735 - RNA, 19 nt, Artificial Sequence
  Description of Artificial Sequence: Synthetic oligonucleotide
cacuauauccaggucccac

SEQ ID NO: 1269736 - RNA, 19 nt, Artificial Sequence
  Description of Artificial Sequence: Synthetic oligonucleotide
caguaugcccuucugcuga

SEQ ID NO: 1269737 - RNA, 19 nt, Artificial Sequence
  Description of Artificial Sequence: Synthetic oligonucleotide
agaguccacuauauccagg

SEQ ID NO: 1269738 - RNA, 19 nt, Artificial Sequence
  Description of Artificial Sequence: Synthetic oligonucleotide
ggcacggccacaaaugaug

SEQ ID NO: 1269739 - RNA, 19 nt, Artificial Sequence
  Description of Artificial Sequence: Synthetic oligonucleotide
aggcauaaacaaauggcaa

SEQ ID NO: 1269740 - RNA, 19 nt, Artificial Sequence
  Description of Artificial Sequence: Synthetic oligonucleotide
ccaagucguacucagccag

SEQ ID NO: 1269741 - RNA, 19 nt, Artificial Sequence
  Description of Artificial Sequence: Synthetic oligonucleotide
ugaccugacugcucagauc

SEQ ID NO: 1269742 - RNA, 19 nt, Artificial Sequence
  Description of Artificial Sequence: Synthetic oligonucleotide
auaaacaucccaggagauu

SEQ ID NO: 1269743 - RNA, 19 nt, Artificial Sequence
  Description of Artificial Sequence: Synthetic oligonucleotide
uuacugccauauacuguaa

SEQ ID NO: 1269744 - RNA, 19 nt, Artificial Sequence
  Description of Artificial Sequence: Synthetic oligonucleotide
gcaacugacuuaucauaug

SEQ ID NO: 1269745 - RNA, 19 nt, Artificial Sequence
  Description of Artificial Sequence: Synthetic oligonucleotide
agcauugaguguaaagauu

SEQ ID NO: 1269746 - RNA, 19 nt, Artificial Sequence
  Description of Artificial Sequence: Synthetic oligonucleotide
ucauauuguuccguaucuu

SEQ ID NO: 1269747 - RNA, 19 nt, Artificial Sequence
  Description of Artificial Sequence: Synthetic oligonucleotide
cagagaaucacagugcuau

SEQ ID NO: 1269748 - RNA, 19 nt, Artificial Sequence
  Description of Artificial Sequence: Synthetic oligonucleotide
uaggccgugccuggguccg

SEQ ID NO: 1269749 - RNA, 19 nt, Artificial Sequence
  Description of Artificial Sequence: Synthetic oligonucleotide
uugugagcauugaguguaa

SEQ ID NO: 1269750 - RNA, 19 nt, Artificial Sequence
  Description of Artificial Sequence: Synthetic oligonucleotide
ugcucagaucaagaccaga

SEQ ID NO: 1269751 - RNA, 19 nt, Artificial Sequence
  Description of Artificial Sequence: Synthetic oligonucleotide
uacuuagcucuaccuuguc

SEQ ID NO: 1269752 - RNA, 19 nt, Artificial Sequence
  Description of Artificial Sequence: Synthetic oligonucleotide
agcuuacuucccaauguga

SEQ ID NO: 1269753 - RNA, 19 nt, Artificial Sequence
  Description of Artificial Sequence: Synthetic oligonucleotide
ucguacucagccagcucau

SEQ ID NO: 1269754 - RNA, 19 nt, Artificial Sequence
  Description of Artificial Sequence: Synthetic oligonucleotide
gcuuaucugaacgugcauc

SEQ ID NO: 1269755 - RNA, 19 nt, Artificial Sequence
  Description of Artificial Sequence: Synthetic oligonucleotide
cauuacugccauauacugu

SEQ ID NO: 1269756 - RNA, 19 nt, Artificial Sequence
  Description of Artificial Sequence: Synthetic oligonucleotide
ucaugucucuagagugaau

SEQ ID NO: 1269757 - RNA, 19 nt, Artificial Sequence
  Description of Artificial Sequence: Synthetic oligonucleotide
ccgaguucauauaaacauc

SEQ ID NO: 1269758 - RNA, 19 nt, Artificial Sequence
  Description of Artificial Sequence: Synthetic oligonucleotide
cucuagagaguccacuaua

SEQ ID NO: 1269759 - RNA, 19 nt, Artificial Sequence
  Description of Artificial Sequence: Synthetic oligonucleotide
agggccacuaccagacaag

SEQ ID NO: 1269760 - RNA, 19 nt, Artificial Sequence
  Description of Artificial Sequence: Synthetic oligonucleotide
uaccuuguccggcgucucu

SEQ ID NO: 1269761 - RNA, 19 nt, Artificial Sequence
  Description of Artificial Sequence: Synthetic oligonucleotide
cuuguccggcgucucuuug

SEQ ID NO: 1269762 - RNA, 19 nt, Artificial Sequence
  Description of Artificial Sequence: Synthetic oligonucleotide
acguaucugucugcugaag

SEQ ID NO: 1269763 - RNA, 19 nt, Artificial Sequence
  Description of Artificial Sequence: Synthetic oligonucleotide
aaccagucucucccgucuu

SEQ ID NO: 1269764 - RNA, 19 nt, Artificial Sequence
  Description of Artificial Sequence: Synthetic oligonucleotide
cuccuguucggcacggcca

SEQ ID NO: 1269765 - RNA, 19 nt, Artificial Sequence
  Description of Artificial Sequence: Synthetic oligonucleotide
gaacuuugucaggacucca

SEQ ID NO: 1269766 - RNA, 19 nt, Artificial Sequence
  Description of Artificial Sequence: Synthetic oligonucleotide
ggcagucauacagagcaac

SEQ ID NO: 1269767 - RNA, 19 nt, Artificial Sequence
  Description of Artificial Sequence: Synthetic oligonucleotide
cugcugaagcagucacgag

SEQ ID NO: 1269768 - RNA, 19 nt, Artificial Sequence
  Description of Artificial Sequence: Synthetic oligonucleotide
caccucuaaguugcauugc

SEQ ID NO: 1269769 - RNA, 19 nt, Artificial Sequence
  Description of Artificial Sequence: Synthetic oligonucleotide
caucgaugagacgcuuuac

SEQ ID NO: 1269770 - RNA, 19 nt, Artificial Sequence
  Description of Artificial Sequence: Synthetic oligonucleotide
ugugagcauugaguguaaa

SEQ ID NO: 1269771 - RNA, 19 nt, Artificial Sequence
  Description of Artificial Sequence: Synthetic oligonucleotide
gaacucccaucuucauguc

SEQ ID NO: 1269772 - RNA, 19 nt, Artificial Sequence
  Description of Artificial Sequence: Synthetic oligonucleotide
uggguccggauacucugua

SEQ ID NO: 1269773 - RNA, 19 nt, Artificial Sequence
  Description of Artificial Sequence: Synthetic oligonucleotide
gucgugguggacauagaaa

SEQ ID NO: 1269774 - RNA, 19 nt, Artificial Sequence
  Description of Artificial Sequence: Synthetic oligonucleotide
gcgguugcgguucaugauc

SEQ ID NO: 1269775 - RNA, 19 nt, Artificial Sequence
  Description of Artificial Sequence: Synthetic oligonucleotide
gagaucagaguuugugcuu

SEQ ID NO: 1269776 - RNA, 19 nt, Artificial Sequence
  Description of Artificial Sequence: Synthetic oligonucleotide
gguuauacacaaagccguc

SEQ ID NO: 1269777 - RNA, 19 nt, Artificial Sequence
  Description of Artificial Sequence: Synthetic oligonucleotide
agucacgaggcagcccuug

SEQ ID NO: 1269778 - RNA, 19 nt, Artificial Sequence
  Description of Artificial Sequence: Synthetic oligonucleotide
ggcuaggaucaaaauucag

SEQ ID NO: 1269779 - RNA, 19 nt, Artificial Sequence
  Description of Artificial Sequence: Synthetic oligonucleotide
gcuccuguucggcacggcc

SEQ ID NO: 1269780 - RNA, 19 nt, Artificial Sequence
  Description of Artificial Sequence: Synthetic oligonucleotide
gcaucaguaugcccuucug

SEQ ID NO: 1269781 - RNA, 19 nt, Artificial Sequence
  Description of Artificial Sequence: Synthetic oligonucleotide
auacucuguaugccaucuu

SEQ ID NO: 1269782 - RNA, 19 nt, Artificial Sequence
  Description of Artificial Sequence: Synthetic oligonucleotide
cuuuggccacgccgcggcg

SEQ ID NO: 1269783 - RNA, 19 nt, Artificial Sequence
  Description of Artificial Sequence: Synthetic oligonucleotide
gacgcuuuacuuccucuuu

SEQ ID NO: 1269784 - RNA, 19 nt, Artificial Sequence
  Description of Artificial Sequence: Synthetic oligonucleotide
ggacauagaaagacuccuc

SEQ ID NO: 1269785 - RNA, 19 nt, Artificial Sequence
  Description of Artificial Sequence: Synthetic oligonucleotide
guaugcccuucugcugagg

SEQ ID NO: 1269786 - RNA, 19 nt, Artificial Sequence
  Description of Artificial Sequence: Synthetic oligonucleotide
gaccagagaucucaucguu

SEQ ID NO: 1269787 - RNA, 19 nt, Artificial Sequence
  Description of Artificial Sequence: Synthetic oligonucleotide
ucacugcuaccuucuucuu

SEQ ID NO: 1269788 - RNA, 19 nt, Artificial Sequence
  Description of Artificial Sequence: Synthetic oligonucleotide
caucuaguguacggucauc

SEQ ID NO: 1269789 - RNA, 19 nt, Artificial Sequence
  Description of Artificial Sequence: Synthetic oligonucleotide
ggaccuugucugugugugc

SEQ ID NO: 1269790 - RNA, 19 nt, Artificial Sequence
  Description of Artificial Sequence: Synthetic oligonucleotide
cgugcauccagguuauaca

SEQ ID NO: 1269791 - RNA, 19 nt, Artificial Sequence
  Description of Artificial Sequence: Synthetic oligonucleotide
gucacgaggcagcccuuga

SEQ ID NO: 1269792 - RNA, 19 nt, Artificial Sequence
  Description of Artificial Sequence: Synthetic oligonucleotide
cucuagagugaaugaggcu

SEQ ID NO: 1269793 - RNA, 19 nt, Artificial Sequence
  Description of Artificial Sequence: Synthetic oligonucleotide
cucucccgucuuccaaaug

SEQ ID NO: 1269794 - RNA, 19 nt, Artificial Sequence
  Description of Artificial Sequence: Synthetic oligonucleotide
cauucacugaagagacagu

SEQ ID NO: 1269795 - RNA, 19 nt, Artificial Sequence
  Description of Artificial Sequence: Synthetic oligonucleotide
ccggauacucuguaugcca

SEQ ID NO: 1269796 - RNA, 19 nt, Artificial Sequence
  Description of Artificial Sequence: Synthetic oligonucleotide
guucggcacggccacaaau

SEQ ID NO: 1269797 - RNA, 19 nt, Artificial Sequence
  Description of Artificial Sequence: Synthetic oligonucleotide
gcucccuaggccgugccug

SEQ ID NO: 1269798 - RNA, 19 nt, Artificial Sequence
  Description of Artificial Sequence: Synthetic oligonucleotide
aaccgccacaggcgaugau

SEQ ID NO: 1269799 - RNA, 19 nt, Artificial Sequence
  Description of Artificial Sequence: Synthetic oligonucleotide
caugcaccucuaaguugca

SEQ ID NO: 1269800 - RNA, 19 nt, Artificial Sequence
  Description of Artificial Sequence: Synthetic oligonucleotide
ccccgaguucauauaaaca

SEQ ID NO: 1269801 - RNA, 19 nt, Artificial Sequence
  Description of Artificial Sequence: Synthetic oligonucleotide
gggugacauauggaucuug

SEQ ID NO: 1269802 - RNA, 19 nt, Artificial Sequence
  Description of Artificial Sequence: Synthetic oligonucleotide
cauccagguuauacacaaa

SEQ ID NO: 1269803 - RNA, 19 nt, Artificial Sequence
  Description of Artificial Sequence: Synthetic oligonucleotide
cauuccacacugagagggu

SEQ ID NO: 1269804 - RNA, 19 nt, Artificial Sequence
  Description of Artificial Sequence: Synthetic oligonucleotide
gaacgugcauccagguuau

SEQ ID NO: 1269805 - RNA, 19 nt, Artificial Sequence
  Description of Artificial Sequence: Synthetic oligonucleotide
guccggcgucucuuuggcc

SEQ ID NO: 1269806 - RNA, 19 nt, Artificial Sequence
  Description of Artificial Sequence: Synthetic oligonucleotide
caguggguuuaaucaggaa

SEQ ID NO: 1269807 - RNA, 19 nt, Artificial Sequence
  Description of Artificial Sequence: Synthetic oligonucleotide
ggcuuggcuuguccccuag

SEQ ID NO: 1269808 - RNA, 19 nt, Artificial Sequence
  Description of Artificial Sequence: Synthetic oligonucleotide
gggcuaggaucaaaauuca

SEQ ID NO: 1269809 - RNA, 19 nt, Artificial Sequence
  Description of Artificial Sequence: Synthetic oligonucleotide
augcaccucuaaguugcau

SEQ ID NO: 1269810 - RNA, 19 nt, Artificial Sequence
  Description of Artificial Sequence: Synthetic oligonucleotide
cuaccuuguccggcgucuc

SEQ ID NO: 1269811 - RNA, 19 nt, Artificial Sequence
  Description of Artificial Sequence: Synthetic oligonucleotide
caaagccgucaucuguacu

SEQ ID NO: 1269812 - RNA, 19 nt, Artificial Sequence
  Description of Artificial Sequence: Synthetic oligonucleotide
cagacauaucccagagaau

SEQ ID NO: 1269813 - RNA, 19 nt, Artificial Sequence
  Description of Artificial Sequence: Synthetic oligonucleotide
guaagacccaacagagauu

SEQ ID NO: 1269814 - RNA, 19 nt, Artificial Sequence
  Description of Artificial Sequence: Synthetic oligonucleotide
cacggccacaaaugaugaa

SEQ ID NO: 1269815 - RNA, 19 nt, Artificial Sequence
  Description of Artificial Sequence: Synthetic oligonucleotide
gcacggccacaaaugauga

SEQ ID NO: 1269816 - RNA, 19 nt, Artificial Sequence
  Description of Artificial Sequence: Synthetic oligonucleotide
cauauggaucuugaucauu

SEQ ID NO: 1269817 - RNA, 19 nt, Artificial Sequence
  Description of Artificial Sequence: Synthetic oligonucleotide
cuguucggcacggccacaa

SEQ ID NO: 1269818 - RNA, 19 nt, Artificial Sequence
  Description of Artificial Sequence: Synthetic oligonucleotide
ggauuucggcagucauaca

SEQ ID NO: 1269819 - RNA, 19 nt, Artificial Sequence
  Description of Artificial Sequence: Synthetic oligonucleotide
caaacucgaagcccuucuu

SEQ ID NO: 1269820 - RNA, 19 nt, Artificial Sequence
  Description of Artificial Sequence: Synthetic oligonucleotide
cugaacgugcauccagguu

SEQ ID NO: 1269821 - RNA, 19 nt, Artificial Sequence
  Description of Artificial Sequence: Synthetic oligonucleotide
augucgugguggacauaga

SEQ ID NO: 1269822 - RNA, 19 nt, Artificial Sequence
  Description of Artificial Sequence: Synthetic oligonucleotide
aggcuuggcuuguccccua

SEQ ID NO: 1269823 - RNA, 19 nt, Artificial Sequence
  Description of Artificial Sequence: Synthetic oligonucleotide
ccaaacucgaagcccuucu

SEQ ID NO: 1269824 - RNA, 19 nt, Artificial Sequence
  Description of Artificial Sequence: Synthetic oligonucleotide
cucccgcaagggccacuac

SEQ ID NO: 1269825 - RNA, 19 nt, Artificial Sequence
  Description of Artificial Sequence: Synthetic oligonucleotide
ccgcaagggccacuaccag

SEQ ID NO: 1269826 - RNA, 19 nt, Artificial Sequence
  Description of Artificial Sequence: Synthetic oligonucleotide
aacgugcauccagguuaua

SEQ ID NO: 1269827 - RNA, 19 nt, Artificial Sequence
  Description of Artificial Sequence: Synthetic oligonucleotide
gcuucaucgaugagacgcu

SEQ ID NO: 1269828 - RNA, 19 nt, Artificial Sequence
  Description of Artificial Sequence: Synthetic oligonucleotide
ggccacaaaugaugaaguu

SEQ ID NO: 1269829 - RNA, 19 nt, Artificial Sequence
  Description of Artificial Sequence: Synthetic oligonucleotide
ccggcgucucuuuggccac

SEQ ID NO: 1269830 - RNA, 19 nt, Artificial Sequence
  Description of Artificial Sequence: Synthetic oligonucleotide
ccagagaaucacagugcua

SEQ ID NO: 1269831 - RNA, 19 nt, Artificial Sequence
  Description of Artificial Sequence: Synthetic oligonucleotide
cgcaagggccacuaccaga

SEQ ID NO: 1269832 - RNA, 19 nt, Artificial Sequence
  Description of Artificial Sequence: Synthetic oligonucleotide
ggcuuaucugaacgugcau

SEQ ID NO: 1269833 - RNA, 19 nt, Artificial Sequence
  Description of Artificial Sequence: Synthetic oligonucleotide
accugacugcucagaucaa

SEQ ID NO: 1269834 - RNA, 19 nt, Artificial Sequence
  Description of Artificial Sequence: Synthetic oligonucleotide
ggcgguugcgguucaugau

SEQ ID NO: 1269835 - RNA, 19 nt, Artificial Sequence
  Description of Artificial Sequence: Synthetic oligonucleotide
cuucaucgaugagacgcuu

SEQ ID NO: 1269836 - RNA, 19 nt, Artificial Sequence
  Description of Artificial Sequence: Synthetic oligonucleotide
ggcggacccaggccacgca

SEQ ID NO: 1269837 - RNA, 19 nt, Artificial Sequence
  Description of Artificial Sequence: Synthetic oligonucleotide
cacaggcgaugauucucau

SEQ ID NO: 1269838 - RNA, 19 nt, Artificial Sequence
  Description of Artificial Sequence: Synthetic oligonucleotide
guaugucgugguggacaua

SEQ ID NO: 1269839 - RNA, 19 nt, Artificial Sequence
  Description of Artificial Sequence: Synthetic oligonucleotide
cggccacaaaugaugaagu

SEQ ID NO: 1269840 - RNA, 19 nt, Artificial Sequence
  Description of Artificial Sequence: Synthetic oligonucleotide
cguugugagcauugagugu

SEQ ID NO: 1269841 - RNA, 19 nt, Artificial Sequence
  Description of Artificial Sequence: Synthetic oligonucleotide
cugaaccgccacaggcgau

SEQ ID NO: 1269842 - RNA, 19 nt, Artificial Sequence
  Description of Artificial Sequence: Synthetic oligonucleotide
ggguccggauacucuguau

SEQ ID NO: 1269843 - RNA, 19 nt, Artificial Sequence
  Description of Artificial Sequence: Synthetic oligonucleotide
gcggcggacccaggccacg

SEQ ID NO: 1269844 - RNA, 19 nt, Artificial Sequence
  Description of Artificial Sequence: Synthetic oligonucleotide
ccacuaccagacaagccuu

SEQ ID NO: 1269845 - RNA, 19 nt, Artificial Sequence
  Description of Artificial Sequence: Synthetic oligonucleotide
ucucggcaucuggguuguc

SEQ ID NO: 1269846 - RNA, 19 nt, Artificial Sequence
  Description of Artificial Sequence: Synthetic oligonucleotide
gcccuugaccugacugcuc

SEQ ID NO: 1269847 - RNA, 19 nt, Artificial Sequence
  Description of Artificial Sequence: Synthetic oligonucleotide
cggauacucuguaugccau

SEQ ID NO: 1269848 - RNA, 19 nt, Artificial Sequence
  Description of Artificial Sequence: Synthetic oligonucleotide
ggcucccuaggccgugccu

SEQ ID NO: 1269849 - RNA, 19 nt, Artificial Sequence
  Description of Artificial Sequence: Synthetic oligonucleotide
ccacuauauccagguccca

SEQ ID NO: 1269850 - RNA, 19 nt, Artificial Sequence
  Description of Artificial Sequence: Synthetic oligonucleotide
gugccuggguccggauacu

SEQ ID NO: 1269851 - RNA, 19 nt, Artificial Sequence
  Description of Artificial Sequence: Synthetic oligonucleotide
cgcggcggacccaggccac

SEQ ID NO: 1269852 - RNA, 19 nt, Artificial Sequence
  Description of Artificial Sequence: Synthetic oligonucleotide
ccgugccuggguccggaua

SEQ ID NO: 1269853 - RNA, 19 nt, Artificial Sequence
  Description of Artificial Sequence: Synthetic oligonucleotide
ccuguucggcacggccaca

SEQ ID NO: 1269854 - RNA, 19 nt, Artificial Sequence
  Description of Artificial Sequence: Synthetic oligonucleotide
cgccacaggcgaugauucu

SEQ ID NO: 1269855 - RNA, 19 nt, Artificial Sequence
  Description of Artificial Sequence: Synthetic oligonucleotide
cggcacggccacaaaugau

SEQ ID NO: 1269856 - RNA, 19 nt, Artificial Sequence
  Description of Artificial Sequence: Synthetic oligonucleotide
ccucgauaacaggggucau

SEQ ID NO: 1269857 - RNA, 19 nt, Artificial Sequence
  Description of Artificial Sequence: Synthetic oligonucleotide
gccgugccuggguccggau

SEQ ID NO: 1269858 - RNA, 19 nt, Artificial Sequence
  Description of Artificial Sequence: Synthetic oligonucleotide
ccacgccgcggcggaccca

SEQ ID NO: 1269859 - RNA, 19 nt, Artificial Sequence
  Description of Artificial Sequence: Synthetic oligonucleotide
uggaacguagcacugaucg

SEQ ID NO: 1269860 - RNA, 19 nt, Artificial Sequence
  Description of Artificial Sequence: Synthetic oligonucleotide
ugaauuauugcucgcaacc

SEQ ID NO: 1269861 - RNA, 19 nt, Artificial Sequence
  Description of Artificial Sequence: Synthetic oligonucleotide
gaagauaaagggcuggcgg

SEQ ID NO: 1269862 - RNA, 19 nt, Artificial Sequence
  Description of Artificial Sequence: Synthetic oligonucleotide
cauaaauggaaaucugugg

SEQ ID NO: 1269863 - RNA, 19 nt, Artificial Sequence
  Description of Artificial Sequence: Synthetic oligonucleotide
  modified_base (10)..(10): a, c, u, g, unknown or other
ugugguuacncaaggcagg

SEQ ID NO: 1269864 - RNA, 19 nt, Artificial Sequence
  Description of Artificial Sequence: Synthetic oligonucleotide
aauuauugcucgcaaccuc

SEQ ID NO: 1269865 - RNA, 19 nt, Artificial Sequence
  Description of Artificial Sequence: Synthetic oligonucleotide
aagcaaaaggccucauccc

SEQ ID NO: 1269866 - RNA, 19 nt, Artificial Sequence
  Description of Artificial Sequence: Synthetic oligonucleotide
uguucaugggccaguaucg

SEQ ID NO: 1269867 - RNA, 19 nt, Artificial Sequence
  Description of Artificial Sequence: Synthetic oligonucleotide
agcaaugucaaucaacaug

SEQ ID NO: 1269868 - RNA, 19 nt, Artificial Sequence
  Description of Artificial Sequence: Synthetic oligonucleotide
uuagguaggucucagcagc

SEQ ID NO: 1269869 - RNA, 19 nt, Artificial Sequence
  Description of Artificial Sequence: Synthetic oligonucleotide
aauggaaaucugugguuac

SEQ ID NO: 1269870 - RNA, 19 nt, Artificial Sequence
  Description of Artificial Sequence: Synthetic oligonucleotide
uaaaguaccgagcacacau

SEQ ID NO: 1269871 - RNA, 19 nt, Artificial Sequence
  Description of Artificial Sequence: Synthetic oligonucleotide
aggguuuaauucuuucucc

SEQ ID NO: 1269872 - RNA, 19 nt, Artificial Sequence
  Description of Artificial Sequence: Synthetic oligonucleotide
gaugagaacaucccuucgg

SEQ ID NO: 1269873 - RNA, 19 nt, Artificial Sequence
  Description of Artificial Sequence: Synthetic oligonucleotide
aacaugucaacccagccau

SEQ ID NO: 1269874 - RNA, 19 nt, Artificial Sequence
  Description of Artificial Sequence: Synthetic oligonucleotide
uugugaaaugcuuucuggg

SEQ ID NO: 1269875 - RNA, 19 nt, Artificial Sequence
  Description of Artificial Sequence: Synthetic oligonucleotide
ucuagguagaauuccacca

SEQ ID NO: 1269876 - RNA, 19 nt, Artificial Sequence
  Description of Artificial Sequence: Synthetic oligonucleotide
ucaccuaaggaguccaugg

SEQ ID NO: 1269877 - RNA, 19 nt, Artificial Sequence
  Description of Artificial Sequence: Synthetic oligonucleotide
uucacuuucgagaugccca

SEQ ID NO: 1269878 - RNA, 19 nt, Artificial Sequence
  Description of Artificial Sequence: Synthetic oligonucleotide
uuucgagaugcccaagggg

SEQ ID NO: 1269879 - RNA, 19 nt, Artificial Sequence
  Description of Artificial Sequence: Synthetic oligonucleotide
guugaagaggguuucgggg

SEQ ID NO: 1269880 - RNA, 19 nt, Artificial Sequence
  Description of Artificial Sequence: Synthetic oligonucleotide
cuugugaaaugcuuucugg

SEQ ID NO: 1269881 - RNA, 19 nt, Artificial Sequence
  Description of Artificial Sequence: Synthetic oligonucleotide
ugugaaaugcuuucugggc

SEQ ID NO: 1269882 - RNA, 19 nt, Artificial Sequence
  Description of Artificial Sequence: Synthetic oligonucleotide
ucucacccaaagcaaaagg

SEQ ID NO: 1269883 - RNA, 19 nt, Artificial Sequence
  Description of Artificial Sequence: Synthetic oligonucleotide
gaauuugucaagcaucaca

SEQ ID NO: 1269884 - RNA, 19 nt, Artificial Sequence
  Description of Artificial Sequence: Synthetic oligonucleotide
uugcucaaagcucagcuug

SEQ ID NO: 1269885 - RNA, 19 nt, Artificial Sequence
  Description of Artificial Sequence: Synthetic oligonucleotide
agcauugugugugagcugc

SEQ ID NO: 1269886 - RNA, 19 nt, Artificial Sequence
  Description of Artificial Sequence: Synthetic oligonucleotide
auuauugcucgcaaccucc

SEQ ID NO: 1269887 - RNA, 19 nt, Artificial Sequence
  Description of Artificial Sequence: Synthetic oligonucleotide
aggcggagaagauaaaggg

SEQ ID NO: 1269888 - RNA, 19 nt, Artificial Sequence
  Description of Artificial Sequence: Synthetic oligonucleotide
aauaauaggcagcaucguu

SEQ ID NO: 1269889 - RNA, 19 nt, Artificial Sequence
  Description of Artificial Sequence: Synthetic oligonucleotide
uguugaagaggguuucggg

SEQ ID NO: 1269890 - RNA, 19 nt, Artificial Sequence
  Description of Artificial Sequence: Synthetic oligonucleotide
cuagccacugagcauaggg

SEQ ID NO: 1269891 - RNA, 19 nt, Artificial Sequence
  Description of Artificial Sequence: Synthetic oligonucleotide
cucagcuuggcugugaacg

SEQ ID NO: 1269892 - RNA, 19 nt, Artificial Sequence
  Description of Artificial Sequence: Synthetic oligonucleotide
ucugcuugcgccaugucga

SEQ ID NO: 1269893 - RNA, 19 nt, Artificial Sequence
  Description of Artificial Sequence: Synthetic oligonucleotide
uuuagguaggucucagcag

SEQ ID NO: 1269894 - RNA, 19 nt, Artificial Sequence
  Description of Artificial Sequence: Synthetic oligonucleotide
agcaucacauccuucuggg

SEQ ID NO: 1269895 - RNA, 19 nt, Artificial Sequence
  Description of Artificial Sequence: Synthetic oligonucleotide
cuccguauagcgaugaaug

SEQ ID NO: 1269896 - RNA, 19 nt, Artificial Sequence
  Description of Artificial Sequence: Synthetic oligonucleotide
aaagcggucguucuccgcu

SEQ ID NO: 1269897 - RNA, 19 nt, Artificial Sequence
  Description of Artificial Sequence: Synthetic oligonucleotide
cucgcugucauggaaaagg

SEQ ID NO: 1269898 - RNA, 19 nt, Artificial Sequence
  Description of Artificial Sequence: Synthetic oligonucleotide
uuucgagcaaugucaauca

SEQ ID NO: 1269899 - RNA, 19 nt, Artificial Sequence
  Description of Artificial Sequence: Synthetic oligonucleotide
ugugaagaggguauucacu

SEQ ID NO: 1269900 - RNA, 19 nt, Artificial Sequence
  Description of Artificial Sequence: Synthetic oligonucleotide
uccuggugcuauuucaagg

SEQ ID NO: 1269901 - RNA, 19 nt, Artificial Sequence
  Description of Artificial Sequence: Synthetic oligonucleotide
gucaccgaccuuuagguag

SEQ ID NO: 1269902 - RNA, 19 nt, Artificial Sequence
  Description of Artificial Sequence: Synthetic oligonucleotide
  modified_base (7)..(7): a, c, u, g, unknown or other
gguuacncaaggcaggccc

SEQ ID NO: 1269903 - RNA, 19 nt, Artificial Sequence
  Description of Artificial Sequence: Synthetic oligonucleotide
aucugcuugcgccaugucg

SEQ ID NO: 1269904 - RNA, 19 nt, Artificial Sequence
  Description of Artificial Sequence: Synthetic oligonucleotide
auagcgaugaaugguuugg

SEQ ID NO: 1269905 - RNA, 19 nt, Artificial Sequence
  Description of Artificial Sequence: Synthetic oligonucleotide
uccguauagcgaugaaugg

SEQ ID NO: 1269906 - RNA, 19 nt, Artificial Sequence
  Description of Artificial Sequence: Synthetic oligonucleotide
ucaacaugucaacccagcc

SEQ ID NO: 1269907 - RNA, 19 nt, Artificial Sequence
  Description of Artificial Sequence: Synthetic oligonucleotide
gaggguuuaauucuuucuc

SEQ ID NO: 1269908 - RNA, 19 nt, Artificial Sequence
  Description of Artificial Sequence: Synthetic oligonucleotide
agcacacaugagcaggggc

SEQ ID NO: 1269909 - RNA, 19 nt, Artificial Sequence
  Description of Artificial Sequence: Synthetic oligonucleotide
aguaucgucaaugcgucuc

SEQ ID NO: 1269910 - RNA, 19 nt, Artificial Sequence
  Description of Artificial Sequence: Synthetic oligonucleotide
acacacguugcccagguug

SEQ ID NO: 1269911 - RNA, 19 nt, Artificial Sequence
  Description of Artificial Sequence: Synthetic oligonucleotide
ugaggguuuaauucuuucu

SEQ ID NO: 1269912 - RNA, 19 nt, Artificial Sequence
  Description of Artificial Sequence: Synthetic oligonucleotide
  modified_base (11)..(11): a, c, u, g, unknown or other
cugugguuacncaaggcag

SEQ ID NO: 1269913 - RNA, 19 nt, Artificial Sequence
  Description of Artificial Sequence: Synthetic oligonucleotide
gagacuucaggucaccgac

SEQ ID NO: 1269914 - RNA, 19 nt, Artificial Sequence
  Description of Artificial Sequence: Synthetic oligonucleotide
ugugaauuauugcucgcaa

SEQ ID NO: 1269915 - RNA, 19 nt, Artificial Sequence
  Description of Artificial Sequence: Synthetic oligonucleotide
uggugauggaggcaucggg

SEQ ID NO: 1269916 - RNA, 19 nt, Artificial Sequence
  Description of Artificial Sequence: Synthetic oligonucleotide
guaccgagcacacaugagc

SEQ ID NO: 1269917 - RNA, 19 nt, Artificial Sequence
  Description of Artificial Sequence: Synthetic oligonucleotide
guacagcucagccaggugc

SEQ ID NO: 1269918 - RNA, 19 nt, Artificial Sequence
  Description of Artificial Sequence: Synthetic oligonucleotide
auucacuuucgagaugccc

SEQ ID NO: 1269919 - RNA, 19 nt, Artificial Sequence
  Description of Artificial Sequence: Synthetic oligonucleotide
uuucggggaggucaaagcu

SEQ ID NO: 1269920 - RNA, 19 nt, Artificial Sequence
  Description of Artificial Sequence: Synthetic oligonucleotide
uaggcagcaucguuaaacc

SEQ ID NO: 1269921 - RNA, 19 nt, Artificial Sequence
  Description of Artificial Sequence: Synthetic oligonucleotide
cagucaguguucaugggcc

SEQ ID NO: 1269922 - RNA, 19 nt, Artificial Sequence
  Description of Artificial Sequence: Synthetic oligonucleotide
guggcuuuuggucaggcug

SEQ ID NO: 1269923 - RNA, 19 nt, Artificial Sequence
  Description of Artificial Sequence: Synthetic oligonucleotide
cuagguagaauuccaccag

SEQ ID NO: 1269924 - RNA, 19 nt, Artificial Sequence
  Description of Artificial Sequence: Synthetic oligonucleotide
uuaaaccugcucuccacca

SEQ ID NO: 1269925 - RNA, 19 nt, Artificial Sequence
  Description of Artificial Sequence: Synthetic oligonucleotide
aucguuaaaccugcucucc

SEQ ID NO: 1269926 - RNA, 19 nt, Artificial Sequence
  Description of Artificial Sequence: Synthetic oligonucleotide
ucgagcaaugucaaucaac

SEQ ID NO: 1269927 - RNA, 19 nt, Artificial Sequence
  Description of Artificial Sequence: Synthetic oligonucleotide
uaccgagcacacaugagca

SEQ ID NO: 1269928 - RNA, 19 nt, Artificial Sequence
  Description of Artificial Sequence: Synthetic oligonucleotide
ucaccgaccuuuagguagg

SEQ ID NO: 1269929 - RNA, 19 nt, Artificial Sequence
  Description of Artificial Sequence: Synthetic oligonucleotide
  modified_base (3)..(3): a, c, u, g, unknown or other
aunuccuggugcuauuuca

SEQ ID NO: 1269930 - RNA, 19 nt, Artificial Sequence
  Description of Artificial Sequence: Synthetic oligonucleotide
cugagcauagggcacguag

SEQ ID NO: 1269931 - RNA, 19 nt, Artificial Sequence
  Description of Artificial Sequence: Synthetic oligonucleotide
ugucaacccagccauggcu

SEQ ID NO: 1269932 - RNA, 19 nt, Artificial Sequence
  Description of Artificial Sequence: Synthetic oligonucleotide
ucgucaaugcgucuccggc

SEQ ID NO: 1269933 - RNA, 19 nt, Artificial Sequence
  Description of Artificial Sequence: Synthetic oligonucleotide
cuuucgagaugcccaaggg

SEQ ID NO: 1269934 - RNA, 19 nt, Artificial Sequence
  Description of Artificial Sequence: Synthetic oligonucleotide
ugggcuuccucaaagcggu

SEQ ID NO: 1269935 - RNA, 19 nt, Artificial Sequence
  Description of Artificial Sequence: Synthetic oligonucleotide
uuugguagccaugguacag

SEQ ID NO: 1269936 - RNA, 19 nt, Artificial Sequence
  Description of Artificial Sequence: Synthetic oligonucleotide
cauccaguaauaauaggca

SEQ ID NO: 1269937 - RNA, 19 nt, Artificial Sequence
  Description of Artificial Sequence: Synthetic oligonucleotide
augucaaucaacaugucaa

SEQ ID NO: 1269938 - RNA, 19 nt, Artificial Sequence
  Description of Artificial Sequence: Synthetic oligonucleotide
uaauaggcagcaucguuaa

SEQ ID NO: 1269939 - RNA, 19 nt, Artificial Sequence
  Description of Artificial Sequence: Synthetic oligonucleotide
augucgaggcacugcaugg

SEQ ID NO: 1269940 - RNA, 19 nt, Artificial Sequence
  Description of Artificial Sequence: Synthetic oligonucleotide
aacggcuccuccguauagc

SEQ ID NO: 1269941 - RNA, 19 nt, Artificial Sequence
  Description of Artificial Sequence: Synthetic oligonucleotide
agcgguagcacaaggguac

SEQ ID NO: 1269942 - RNA, 19 nt, Artificial Sequence
  Description of Artificial Sequence: Synthetic oligonucleotide
uuaauucuuucuccacgac

SEQ ID NO: 1269943 - RNA, 19 nt, Artificial Sequence
  Description of Artificial Sequence: Synthetic oligonucleotide
cugggcuuccucaaagcgg

SEQ ID NO: 1269944 - RNA, 19 nt, Artificial Sequence
  Description of Artificial Sequence: Synthetic oligonucleotide
agcauccaguaauaauagg

SEQ ID NO: 1269945 - RNA, 19 nt, Artificial Sequence
  Description of Artificial Sequence: Synthetic oligonucleotide
uucggcucauggaacguag

SEQ ID NO: 1269946 - RNA, 19 nt, Artificial Sequence
  Description of Artificial Sequence: Synthetic oligonucleotide
aguaccucauaggaagagg

SEQ ID NO: 1269947 - RNA, 19 nt, Artificial Sequence
  Description of Artificial Sequence: Synthetic oligonucleotide
agcgagcggaaguacugcc

SEQ ID NO: 1269948 - RNA, 19 nt, Artificial Sequence
  Description of Artificial Sequence: Synthetic oligonucleotide
aggucaccgaccuuuaggu

SEQ ID NO: 1269949 - RNA, 19 nt, Artificial Sequence
  Description of Artificial Sequence: Synthetic oligonucleotide
aaucaacaugucaacccag

SEQ ID NO: 1269950 - RNA, 19 nt, Artificial Sequence
  Description of Artificial Sequence: Synthetic oligonucleotide
ugaucgguucaccaccaca

SEQ ID NO: 1269951 - RNA, 19 nt, Artificial Sequence
  Description of Artificial Sequence: Synthetic oligonucleotide
caugucaacccagccaugg

SEQ ID NO: 1269952 - RNA, 19 nt, Artificial Sequence
  Description of Artificial Sequence: Synthetic oligonucleotide
augccauaaauggaaaucu

SEQ ID NO: 1269953 - RNA, 19 nt, Artificial Sequence
  Description of Artificial Sequence: Synthetic oligonucleotide
ugauacacacguugcccag

SEQ ID NO: 1269954 - RNA, 19 nt, Artificial Sequence
  Description of Artificial Sequence: Synthetic oligonucleotide
uccuccgaauggaacaucu

SEQ ID NO: 1269955 - RNA, 19 nt, Artificial Sequence
  Description of Artificial Sequence: Synthetic oligonucleotide
augucaacccagccauggc

SEQ ID NO: 1269956 - RNA, 19 nt, Artificial Sequence
  Description of Artificial Sequence: Synthetic oligonucleotide
guaccucauaggaagaggc

SEQ ID NO: 1269957 - RNA, 19 nt, Artificial Sequence
  Description of Artificial Sequence: Synthetic oligonucleotide
  modified_base (2)..(2): a, c, u, g, unknown or other
unuccuggugcuauuucaa

SEQ ID NO: 1269958 - RNA, 19 nt, Artificial Sequence
  Description of Artificial Sequence: Synthetic oligonucleotide
cacugaucgguucaccacc

SEQ ID NO: 1269959 - RNA, 19 nt, Artificial Sequence
  Description of Artificial Sequence: Synthetic oligonucleotide
aggugcaguaccucauagg

SEQ ID NO: 1269960 - RNA, 19 nt, Artificial Sequence
  Description of Artificial Sequence: Synthetic oligonucleotide
guguucaugggccaguauc

SEQ ID NO: 1269961 - RNA, 19 nt, Artificial Sequence
  Description of Artificial Sequence: Synthetic oligonucleotide
cagugauucccucuucuag

SEQ ID NO: 1269962 - RNA, 19 nt, Artificial Sequence
  Description of Artificial Sequence: Synthetic oligonucleotide
uccacgacagucuggggac

SEQ ID NO: 1269963 - RNA, 19 nt, Artificial Sequence
  Description of Artificial Sequence: Synthetic oligonucleotide
  modified_base (3)..(3): a, c, u, g, unknown or other
acncaaggcaggcccuccc

SEQ ID NO: 1269964 - RNA, 19 nt, Artificial Sequence
  Description of Artificial Sequence: Synthetic oligonucleotide
ucgcugucauggaaaaggc

SEQ ID NO: 1269965 - RNA, 19 nt, Artificial Sequence
  Description of Artificial Sequence: Synthetic oligonucleotide
ugggccaguaucgucaaug

SEQ ID NO: 1269966 - RNA, 19 nt, Artificial Sequence
  Description of Artificial Sequence: Synthetic oligonucleotide
cugucauggaaaaggcuug

SEQ ID NO: 1269967 - RNA, 19 nt, Artificial Sequence
  Description of Artificial Sequence: Synthetic oligonucleotide
ucguuaaaccugcucucca

SEQ ID NO: 1269968 - RNA, 19 nt, Artificial Sequence
  Description of Artificial Sequence: Synthetic oligonucleotide
guuucggggaggucaaagc

SEQ ID NO: 1269969 - RNA, 19 nt, Artificial Sequence
  Description of Artificial Sequence: Synthetic oligonucleotide
agcagcauagccaggacug

SEQ ID NO: 1269970 - RNA, 19 nt, Artificial Sequence
  Description of Artificial Sequence: Synthetic oligonucleotide
caugucgaggcacugcaug

SEQ ID NO: 1269971 - RNA, 19 nt, Artificial Sequence
  Description of Artificial Sequence: Synthetic oligonucleotide
ugguuugguagccauggua

SEQ ID NO: 1269972 - RNA, 19 nt, Artificial Sequence
  Description of Artificial Sequence: Synthetic oligonucleotide
agagacuucaggucaccga

SEQ ID NO: 1269973 - RNA, 19 nt, Artificial Sequence
  Description of Artificial Sequence: Synthetic oligonucleotide
cucaaagcggucguucucc

SEQ ID NO: 1269974 - RNA, 19 nt, Artificial Sequence
  Description of Artificial Sequence: Synthetic oligonucleotide
uggcuuuuggucaggcugu

SEQ ID NO: 1269975 - RNA, 19 nt, Artificial Sequence
  Description of Artificial Sequence: Synthetic oligonucleotide
gaacaucugaaagcaggag

SEQ ID NO: 1269976 - RNA, 19 nt, Artificial Sequence
  Description of Artificial Sequence: Synthetic oligonucleotide
acggcuccuccguauagcg

SEQ ID NO: 1269977 - RNA, 19 nt, Artificial Sequence
  Description of Artificial Sequence: Synthetic oligonucleotide
uucucacccaaagcaaaag

SEQ ID NO: 1269978 - RNA, 19 nt, Artificial Sequence
  Description of Artificial Sequence: Synthetic oligonucleotide
auaauaggcagcaucguua

SEQ ID NO: 1269979 - RNA, 19 nt, Artificial Sequence
  Description of Artificial Sequence: Synthetic oligonucleotide
agcacugaucgguucacca

SEQ ID NO: 1269980 - RNA, 19 nt, Artificial Sequence
  Description of Artificial Sequence: Synthetic oligonucleotide
aucgucaaugcgucuccgg

SEQ ID NO: 1269981 - RNA, 19 nt, Artificial Sequence
  Description of Artificial Sequence: Synthetic oligonucleotide
uggaguaccagcagcucau

SEQ ID NO: 1269982 - RNA, 19 nt, Artificial Sequence
  Description of Artificial Sequence: Synthetic oligonucleotide
gucaaagcugaacggcucc

SEQ ID NO: 1269983 - RNA, 19 nt, Artificial Sequence
  Description of Artificial Sequence: Synthetic oligonucleotide
cagcaucugugaauuauug

SEQ ID NO: 1269984 - RNA, 19 nt, Artificial Sequence
  Description of Artificial Sequence: Synthetic oligonucleotide
cacguagaugucauccuug

SEQ ID NO: 1269985 - RNA, 19 nt, Artificial Sequence
  Description of Artificial Sequence: Synthetic oligonucleotide
caucguuaaaccugcucuc

SEQ ID NO: 1269986 - RNA, 19 nt, Artificial Sequence
  Description of Artificial Sequence: Synthetic oligonucleotide
caguuccucgcugucaugg

SEQ ID NO: 1269987 - RNA, 19 nt, Artificial Sequence
  Description of Artificial Sequence: Synthetic oligonucleotide
uggaaaaggcuuggagcgg

SEQ ID NO: 1269988 - RNA, 19 nt, Artificial Sequence
  Description of Artificial Sequence: Synthetic oligonucleotide
guaucgucaaugcgucucc

SEQ ID NO: 1269989 - RNA, 19 nt, Artificial Sequence
  Description of Artificial Sequence: Synthetic oligonucleotide
aucgguucaccaccacagg

SEQ ID NO: 1269990 - RNA, 19 nt, Artificial Sequence
  Description of Artificial Sequence: Synthetic oligonucleotide
agcggaaguacugccauug

SEQ ID NO: 1269991 - RNA, 19 nt, Artificial Sequence
  Description of Artificial Sequence: Synthetic oligonucleotide
aaaguaccgagcacacaug

SEQ ID NO: 1269992 - RNA, 19 nt, Artificial Sequence
  Description of Artificial Sequence: Synthetic oligonucleotide
ucaucaccuaaggagucca

SEQ ID NO: 1269993 - RNA, 19 nt, Artificial Sequence
  Description of Artificial Sequence: Synthetic oligonucleotide
uugcucgcaaccuccugcc

SEQ ID NO: 1269994 - RNA, 19 nt, Artificial Sequence
  Description of Artificial Sequence: Synthetic oligonucleotide
ucaucccagcgcuuggugu

SEQ ID NO: 1269995 - RNA, 19 nt, Artificial Sequence
  Description of Artificial Sequence: Synthetic oligonucleotide
agcggguuguugguggagc

SEQ ID NO: 1269996 - RNA, 19 nt, Artificial Sequence
  Description of Artificial Sequence: Synthetic oligonucleotide
uauugcucgcaaccuccug

SEQ ID NO: 1269997 - RNA, 19 nt, Artificial Sequence
  Description of Artificial Sequence: Synthetic oligonucleotide
ucaaggcaugaaaugccau

SEQ ID NO: 1269998 - RNA, 19 nt, Artificial Sequence
  Description of Artificial Sequence: Synthetic oligonucleotide
acggacugcuuccccuugc

SEQ ID NO: 1269999 - RNA, 19 nt, Artificial Sequence
  Description of Artificial Sequence: Synthetic oligonucleotide
ucacuuucgagaugcccaa

SEQ ID NO: 1270000 - RNA, 19 nt, Artificial Sequence
  Description of Artificial Sequence: Synthetic oligonucleotide
acacacggacugcuucccc

SEQ ID NO: 1270001 - RNA, 19 nt, Artificial Sequence
  Description of Artificial Sequence: Synthetic oligonucleotide
gauaaagggcuggcggcag

SEQ ID NO: 1270002 - RNA, 19 nt, Artificial Sequence
  Description of Artificial Sequence: Synthetic oligonucleotide
auacacacguugcccaggu

SEQ ID NO: 1270003 - RNA, 19 nt, Artificial Sequence
  Description of Artificial Sequence: Synthetic oligonucleotide
uggacagcauccaguaaua

SEQ ID NO: 1270004 - RNA, 19 nt, Artificial Sequence
  Description of Artificial Sequence: Synthetic oligonucleotide
uuaaaguaccgagcacaca

SEQ ID NO: 1270005 - RNA, 19 nt, Artificial Sequence
  Description of Artificial Sequence: Synthetic oligonucleotide
  modified_base (4)..(4): a, c, u, g, unknown or other
caunuccuggugcuauuuc

SEQ ID NO: 1270006 - RNA, 19 nt, Artificial Sequence
  Description of Artificial Sequence: Synthetic oligonucleotide
aggucgaugagggcaacag

SEQ ID NO: 1270007 - RNA, 19 nt, Artificial Sequence
  Description of Artificial Sequence: Synthetic oligonucleotide
cuccgaauggaacaucuga

SEQ ID NO: 1270008 - RNA, 19 nt, Artificial Sequence
  Description of Artificial Sequence: Synthetic oligonucleotide
gaacgggucaucaucaccu

SEQ ID NO: 1270009 - RNA, 19 nt, Artificial Sequence
  Description of Artificial Sequence: Synthetic oligonucleotide
ugucauaggcaugccgggc

SEQ ID NO: 1270010 - RNA, 19 nt, Artificial Sequence
  Description of Artificial Sequence: Synthetic oligonucleotide
gaaguacugccauugcagu

SEQ ID NO: 1270011 - RNA, 19 nt, Artificial Sequence
  Description of Artificial Sequence: Synthetic oligonucleotide
ucauggaacguagcacuga

SEQ ID NO: 1270012 - RNA, 19 nt, Artificial Sequence
  Description of Artificial Sequence: Synthetic oligonucleotide
agacuucaggucaccgacc

SEQ ID NO: 1270013 - RNA, 19 nt, Artificial Sequence
  Description of Artificial Sequence: Synthetic oligonucleotide
gaacggcuccuccguauag

SEQ ID NO: 1270014 - RNA, 19 nt, Artificial Sequence
  Description of Artificial Sequence: Synthetic oligonucleotide
agcagcgguagcacaaggg

SEQ ID NO: 1270015 - RNA, 19 nt, Artificial Sequence
  Description of Artificial Sequence: Synthetic oligonucleotide
gagcggauggucagggugc

SEQ ID NO: 1270016 - RNA, 19 nt, Artificial Sequence
  Description of Artificial Sequence: Synthetic oligonucleotide
agauaaagggcuggcggca

SEQ ID NO: 1270017 - RNA, 19 nt, Artificial Sequence
  Description of Artificial Sequence: Synthetic oligonucleotide
gcuugcgccaugucgaggc

SEQ ID NO: 1270018 - RNA, 19 nt, Artificial Sequence
  Description of Artificial Sequence: Synthetic oligonucleotide
cuaaggaguccauggucuc

SEQ ID NO: 1270019 - RNA, 19 nt, Artificial Sequence
  Description of Artificial Sequence: Synthetic oligonucleotide
  modified_base (9)..(9): a, c, u, g, unknown or other
gugguuacncaaggcaggc

SEQ ID NO: 1270020 - RNA, 19 nt, Artificial Sequence
  Description of Artificial Sequence: Synthetic oligonucleotide
caggugcaguaccucauag

SEQ ID NO: 1270021 - RNA, 19 nt, Artificial Sequence
  Description of Artificial Sequence: Synthetic oligonucleotide
uaaggaguccauggucuca

SEQ ID NO: 1270022 - RNA, 19 nt, Artificial Sequence
  Description of Artificial Sequence: Synthetic oligonucleotide
aaggaguccauggucucau

SEQ ID NO: 1270023 - RNA, 19 nt, Artificial Sequence
  Description of Artificial Sequence: Synthetic oligonucleotide
acguagcacugaucgguuc

SEQ ID NO: 1270024 - RNA, 19 nt, Artificial Sequence
  Description of Artificial Sequence: Synthetic oligonucleotide
uucgagcaaugucaaucaa

SEQ ID NO: 1270025 - RNA, 19 nt, Artificial Sequence
  Description of Artificial Sequence: Synthetic oligonucleotide
aucaccuaaggaguccaug

SEQ ID NO: 1270026 - RNA, 19 nt, Artificial Sequence
  Description of Artificial Sequence: Synthetic oligonucleotide
ggaacguagcacugaucgg

SEQ ID NO: 1270027 - RNA, 19 nt, Artificial Sequence
  Description of Artificial Sequence: Synthetic oligonucleotide
gcauagggcacguagaugu

SEQ ID NO: 1270028 - RNA, 19 nt, Artificial Sequence
  Description of Artificial Sequence: Synthetic oligonucleotide
gauccuggcggggaucugc

SEQ ID NO: 1270029 - RNA, 19 nt, Artificial Sequence
  Description of Artificial Sequence: Synthetic oligonucleotide
uguugguggagcagcggua

SEQ ID NO: 1270030 - RNA, 19 nt, Artificial Sequence
  Description of Artificial Sequence: Synthetic oligonucleotide
accgagcacacaugagcag

SEQ ID NO: 1270031 - RNA, 19 nt, Artificial Sequence
  Description of Artificial Sequence: Synthetic oligonucleotide
gaauuauugcucgcaaccu

SEQ ID NO: 1270032 - RNA, 19 nt, Artificial Sequence
  Description of Artificial Sequence: Synthetic oligonucleotide
auaggcaugccgggccagc

SEQ ID NO: 1270033 - RNA, 19 nt, Artificial Sequence
  Description of Artificial Sequence: Synthetic oligonucleotide
agccaugguacagcucagc

SEQ ID NO: 1270034 - RNA, 19 nt, Artificial Sequence
  Description of Artificial Sequence: Synthetic oligonucleotide
agcugaacggcuccuccgu

SEQ ID NO: 1270035 - RNA, 19 nt, Artificial Sequence
  Description of Artificial Sequence: Synthetic oligonucleotide
gguagcacaaggguaccag

SEQ ID NO: 1270036 - RNA, 19 nt, Artificial Sequence
  Description of Artificial Sequence: Synthetic oligonucleotide
ucguucuccgcuagccacu

SEQ ID NO: 1270037 - RNA, 19 nt, Artificial Sequence
  Description of Artificial Sequence: Synthetic oligonucleotide
ucggcucauggaacguagc

SEQ ID NO: 1270038 - RNA, 19 nt, Artificial Sequence
  Description of Artificial Sequence: Synthetic oligonucleotide
ugaacggcuccuccguaua

SEQ ID NO: 1270039 - RNA, 19 nt, Artificial Sequence
  Description of Artificial Sequence: Synthetic oligonucleotide
ucgaugagggcaacagcuu

SEQ ID NO: 1270040 - RNA, 19 nt, Artificial Sequence
  Description of Artificial Sequence: Synthetic oligonucleotide
agucaguguucaugggcca

SEQ ID NO: 1270041 - RNA, 19 nt, Artificial Sequence
  Description of Artificial Sequence: Synthetic oligonucleotide
caucggggagcagcgagcg

SEQ ID NO: 1270042 - RNA, 19 nt, Artificial Sequence
  Description of Artificial Sequence: Synthetic oligonucleotide
  modified_base (19)..(19): a, c, u, g, unknown or other
auggaaaucugugguuacn

SEQ ID NO: 1270043 - RNA, 19 nt, Artificial Sequence
  Description of Artificial Sequence: Synthetic oligonucleotide
  modified_base (4)..(4): a, c, u, g, unknown or other
uacncaaggcaggcccucc

SEQ ID NO: 1270044 - RNA, 19 nt, Artificial Sequence
  Description of Artificial Sequence: Synthetic oligonucleotide
  modified_base (2)..(2): a, c, u, g, unknown or other
cncaaggcaggcccucccc

SEQ ID NO: 1270045 - RNA, 19 nt, Artificial Sequence
  Description of Artificial Sequence: Synthetic oligonucleotide
gucgaugagggcaacagcu

SEQ ID NO: 1270046 - RNA, 19 nt, Artificial Sequence
  Description of Artificial Sequence: Synthetic oligonucleotide
aggcacugcauggacagca

SEQ ID NO: 1270047 - RNA, 19 nt, Artificial Sequence
  Description of Artificial Sequence: Synthetic oligonucleotide
cucauaggaagaggcggag

SEQ ID NO: 1270048 - RNA, 19 nt, Artificial Sequence
  Description of Artificial Sequence: Synthetic oligonucleotide
caguaccucauaggaagag

SEQ ID NO: 1270049 - RNA, 19 nt, Artificial Sequence
  Description of Artificial Sequence: Synthetic oligonucleotide
aggucaaagcugaacggcu

SEQ ID NO: 1270050 - RNA, 19 nt, Artificial Sequence
  Description of Artificial Sequence: Synthetic oligonucleotide
cuuggagcggauggucagg

SEQ ID NO: 1270051 - RNA, 19 nt, Artificial Sequence
  Description of Artificial Sequence: Synthetic oligonucleotide
aggcagcaucguuaaaccu

SEQ ID NO: 1270052 - RNA, 19 nt, Artificial Sequence
  Description of Artificial Sequence: Synthetic oligonucleotide
ccucuugugucuuggggcc

SEQ ID NO: 1270053 - RNA, 19 nt, Artificial Sequence
  Description of Artificial Sequence: Synthetic oligonucleotide
cgagcaaugucaaucaaca

SEQ ID NO: 1270054 - RNA, 19 nt, Artificial Sequence
  Description of Artificial Sequence: Synthetic oligonucleotide
  modified_base (17)..(17): a, c, u, g, unknown or other
ggaaaucugugguuacnca

SEQ ID NO: 1270055 - RNA, 19 nt, Artificial Sequence
  Description of Artificial Sequence: Synthetic oligonucleotide
accuuuagguaggucucag

SEQ ID NO: 1270056 - RNA, 19 nt, Artificial Sequence
  Description of Artificial Sequence: Synthetic oligonucleotide
gagcacacaugagcagggg

SEQ ID NO: 1270057 - RNA, 19 nt, Artificial Sequence
  Description of Artificial Sequence: Synthetic oligonucleotide
aacgggucaucaucaccua

SEQ ID NO: 1270058 - RNA, 19 nt, Artificial Sequence
  Description of Artificial Sequence: Synthetic oligonucleotide
agggacagcaggcgugcug

SEQ ID NO: 1270059 - RNA, 19 nt, Artificial Sequence
  Description of Artificial Sequence: Synthetic oligonucleotide
gcagcaucguuaaaccugc

SEQ ID NO: 1270060 - RNA, 19 nt, Artificial Sequence
  Description of Artificial Sequence: Synthetic oligonucleotide
cagcaaggaggccagguga

SEQ ID NO: 1270061 - RNA, 19 nt, Artificial Sequence
  Description of Artificial Sequence: Synthetic oligonucleotide
ggccaguaucgucaaugcg

SEQ ID NO: 1270062 - RNA, 19 nt, Artificial Sequence
  Description of Artificial Sequence: Synthetic oligonucleotide
caaagcggucguucuccgc

SEQ ID NO: 1270063 - RNA, 19 nt, Artificial Sequence
  Description of Artificial Sequence: Synthetic oligonucleotide
  modified_base (8)..(8): a, c, u, g, unknown or other
ugguuacncaaggcaggcc

SEQ ID NO: 1270064 - RNA, 19 nt, Artificial Sequence
  Description of Artificial Sequence: Synthetic oligonucleotide
ccaguaucgucaaugcguc

SEQ ID NO: 1270065 - RNA, 19 nt, Artificial Sequence
  Description of Artificial Sequence: Synthetic oligonucleotide
gggugcuucucacccaaag

SEQ ID NO: 1270066 - RNA, 19 nt, Artificial Sequence
  Description of Artificial Sequence: Synthetic oligonucleotide
agccuuguccagcuuucga

SEQ ID NO: 1270067 - RNA, 19 nt, Artificial Sequence
  Description of Artificial Sequence: Synthetic oligonucleotide
uccgcuagccacugagcau

SEQ ID NO: 1270068 - RNA, 19 nt, Artificial Sequence
  Description of Artificial Sequence: Synthetic oligonucleotide
  modified_base (5)..(5): a, c, u, g, unknown or other
uuacncaaggcaggcccuc

SEQ ID NO: 1270069 - RNA, 19 nt, Artificial Sequence
  Description of Artificial Sequence: Synthetic oligonucleotide
gucaguguucaugggccag

SEQ ID NO: 1270070 - RNA, 19 nt, Artificial Sequence
  Description of Artificial Sequence: Synthetic oligonucleotide
caaagcucagcuuggcugu

SEQ ID NO: 1270071 - RNA, 19 nt, Artificial Sequence
  Description of Artificial Sequence: Synthetic oligonucleotide
ggcggcaguugauacacac

SEQ ID NO: 1270072 - RNA, 19 nt, Artificial Sequence
  Description of Artificial Sequence: Synthetic oligonucleotide
acgacagucuggggacagc

SEQ ID NO: 1270073 - RNA, 19 nt, Artificial Sequence
  Description of Artificial Sequence: Synthetic oligonucleotide
cucccucuugugucuuggg

SEQ ID NO: 1270074 - RNA, 19 nt, Artificial Sequence
  Description of Artificial Sequence: Synthetic oligonucleotide
gggccaguaucgucaaugc

SEQ ID NO: 1270075 - RNA, 19 nt, Artificial Sequence
  Description of Artificial Sequence: Synthetic oligonucleotide
caucccuucggcucaugga

SEQ ID NO: 1270076 - RNA, 19 nt, Artificial Sequence
  Description of Artificial Sequence: Synthetic oligonucleotide
auggaacguagcacugauc

SEQ ID NO: 1270077 - RNA, 19 nt, Artificial Sequence
  Description of Artificial Sequence: Synthetic oligonucleotide
gagacauauucugaggguu

SEQ ID NO: 1270078 - RNA, 19 nt, Artificial Sequence
  Description of Artificial Sequence: Synthetic oligonucleotide
gcuuggagcggauggucag

SEQ ID NO: 1270079 - RNA, 19 nt, Artificial Sequence
  Description of Artificial Sequence: Synthetic oligonucleotide
cagcuuggcugugaacggg

SEQ ID NO: 1270080 - RNA, 19 nt, Artificial Sequence
  Description of Artificial Sequence: Synthetic oligonucleotide
augguuugguagccauggu

SEQ ID NO: 1270081 - RNA, 19 nt, Artificial Sequence
  Description of Artificial Sequence: Synthetic oligonucleotide
aacguagcacugaucgguu

SEQ ID NO: 1270082 - RNA, 19 nt, Artificial Sequence
  Description of Artificial Sequence: Synthetic oligonucleotide
gugaacgggucaucaucac

SEQ ID NO: 1270083 - RNA, 19 nt, Artificial Sequence
  Description of Artificial Sequence: Synthetic oligonucleotide
ggucaucaucaccuaagga

SEQ ID NO: 1270084 - RNA, 19 nt, Artificial Sequence
  Description of Artificial Sequence: Synthetic oligonucleotide
aguguucaugggccaguau

SEQ ID NO: 1270085 - RNA, 19 nt, Artificial Sequence
  Description of Artificial Sequence: Synthetic oligonucleotide
gcgcuugguguccacauac

SEQ ID NO: 1270086 - RNA, 19 nt, Artificial Sequence
  Description of Artificial Sequence: Synthetic oligonucleotide
acugaucgguucaccacca

SEQ ID NO: 1270087 - RNA, 19 nt, Artificial Sequence
  Description of Artificial Sequence: Synthetic oligonucleotide
ucaaugcgucuccggcagu

SEQ ID NO: 1270088 - RNA, 19 nt, Artificial Sequence
  Description of Artificial Sequence: Synthetic oligonucleotide
aaacuucaucugggcagga

SEQ ID NO: 1270089 - RNA, 19 nt, Artificial Sequence
  Description of Artificial Sequence: Synthetic oligonucleotide
cauugugugugagcugcuc

SEQ ID NO: 1270090 - RNA, 19 nt, Artificial Sequence
  Description of Artificial Sequence: Synthetic oligonucleotide
ucuugugucuuggggccuc

SEQ ID NO: 1270091 - RNA, 19 nt, Artificial Sequence
  Description of Artificial Sequence: Synthetic oligonucleotide
guagcacugaucgguucac

SEQ ID NO: 1270092 - RNA, 19 nt, Artificial Sequence
  Description of Artificial Sequence: Synthetic oligonucleotide
  modified_base (6)..(6): a, c, u, g, unknown or other
uccaunuccuggugcuauu

SEQ ID NO: 1270093 - RNA, 19 nt, Artificial Sequence
  Description of Artificial Sequence: Synthetic oligonucleotide
cccuucggcucauggaacg

SEQ ID NO: 1270094 - RNA, 19 nt, Artificial Sequence
  Description of Artificial Sequence: Synthetic oligonucleotide
ccgagcacacaugagcagg

SEQ ID NO: 1270095 - RNA, 19 nt, Artificial Sequence
  Description of Artificial Sequence: Synthetic oligonucleotide
gcacugaucgguucaccac

SEQ ID NO: 1270096 - RNA, 19 nt, Artificial Sequence
  Description of Artificial Sequence: Synthetic oligonucleotide
aguccuccgaauggaacau

SEQ ID NO: 1270097 - RNA, 19 nt, Artificial Sequence
  Description of Artificial Sequence: Synthetic oligonucleotide
aggguaccaguuccucgcu

SEQ ID NO: 1270098 - RNA, 19 nt, Artificial Sequence
  Description of Artificial Sequence: Synthetic oligonucleotide
ccucuucuagguagaauuc

SEQ ID NO: 1270099 - RNA, 19 nt, Artificial Sequence
  Description of Artificial Sequence: Synthetic oligonucleotide
cagugugaagaggguauuc

SEQ ID NO: 1270100 - RNA, 19 nt, Artificial Sequence
  Description of Artificial Sequence: Synthetic oligonucleotide
gccaguaucgucaaugcgu

SEQ ID NO: 1270101 - RNA, 19 nt, Artificial Sequence
  Description of Artificial Sequence: Synthetic oligonucleotide
cagcgagcggaaguacugc

SEQ ID NO: 1270102 - RNA, 19 nt, Artificial Sequence
  Description of Artificial Sequence: Synthetic oligonucleotide
aagcggucguucuccgcua

SEQ ID NO: 1270103 - RNA, 19 nt, Artificial Sequence
  Description of Artificial Sequence: Synthetic oligonucleotide
ucccggccuugugaaaugc

SEQ ID NO: 1270104 - RNA, 19 nt, Artificial Sequence
  Description of Artificial Sequence: Synthetic oligonucleotide
acgggucaucaucaccuaa

SEQ ID NO: 1270105 - RNA, 19 nt, Artificial Sequence
  Description of Artificial Sequence: Synthetic oligonucleotide
uccugccauuugcucuccc

SEQ ID NO: 1270106 - RNA, 19 nt, Artificial Sequence
  Description of Artificial Sequence: Synthetic oligonucleotide
ggguauucacuuucgagau

SEQ ID NO: 1270107 - RNA, 19 nt, Artificial Sequence
  Description of Artificial Sequence: Synthetic oligonucleotide
ggaaaaggcuuggagcgga

SEQ ID NO: 1270108 - RNA, 19 nt, Artificial Sequence
  Description of Artificial Sequence: Synthetic oligonucleotide
agcagcgagcggaaguacu

SEQ ID NO: 1270109 - RNA, 19 nt, Artificial Sequence
  Description of Artificial Sequence: Synthetic oligonucleotide
uccuccguauagcgaugaa

SEQ ID NO: 1270110 - RNA, 19 nt, Artificial Sequence
  Description of Artificial Sequence: Synthetic oligonucleotide
cacgacagucuggggacag

SEQ ID NO: 1270111 - RNA, 19 nt, Artificial Sequence
  Description of Artificial Sequence: Synthetic oligonucleotide
cuucuggauccuggcgggg

SEQ ID NO: 1270112 - RNA, 19 nt, Artificial Sequence
  Description of Artificial Sequence: Synthetic oligonucleotide
guaccaguuccucgcuguc

SEQ ID NO: 1270113 - RNA, 19 nt, Artificial Sequence
  Description of Artificial Sequence: Synthetic oligonucleotide
cuugccucccggccuugug

SEQ ID NO: 1270114 - RNA, 19 nt, Artificial Sequence
  Description of Artificial Sequence: Synthetic oligonucleotide
ccuaaggaguccauggucu

SEQ ID NO: 1270115 - RNA, 19 nt, Artificial Sequence
  Description of Artificial Sequence: Synthetic oligonucleotide
cacguugcccagguuguuc

SEQ ID NO: 1270116 - RNA, 19 nt, Artificial Sequence
  Description of Artificial Sequence: Synthetic oligonucleotide
uccuggcggggaucugcag

SEQ ID NO: 1270117 - RNA, 19 nt, Artificial Sequence
  Description of Artificial Sequence: Synthetic oligonucleotide
ccuggcggggaucugcagc

SEQ ID NO: 1270118 - RNA, 19 nt, Artificial Sequence
  Description of Artificial Sequence: Synthetic oligonucleotide
cucccggccuugugaaaug

SEQ ID NO: 1270119 - RNA, 19 nt, Artificial Sequence
  Description of Artificial Sequence: Synthetic oligonucleotide
gucuccggcaguagggaca

SEQ ID NO: 1270120 - RNA, 19 nt, Artificial Sequence
  Description of Artificial Sequence: Synthetic oligonucleotide
gccagucaguguucauggg

SEQ ID NO: 1270121 - RNA, 19 nt, Artificial Sequence
  Description of Artificial Sequence: Synthetic oligonucleotide
cguuaaaccugcucuccac

SEQ ID NO: 1270122 - RNA, 19 nt, Artificial Sequence
  Description of Artificial Sequence: Synthetic oligonucleotide
uugcgccaugucgaggcac

SEQ ID NO: 1270123 - RNA, 19 nt, Artificial Sequence
  Description of Artificial Sequence: Synthetic oligonucleotide
gcggcaguugauacacacg

SEQ ID NO: 1270124 - RNA, 19 nt, Artificial Sequence
  Description of Artificial Sequence: Synthetic oligonucleotide
gugcuauuucaaggcauga

SEQ ID NO: 1270125 - RNA, 19 nt, Artificial Sequence
  Description of Artificial Sequence: Synthetic oligonucleotide
accgaccuuuagguagguc

SEQ ID NO: 1270126 - RNA, 19 nt, Artificial Sequence
  Description of Artificial Sequence: Synthetic oligonucleotide
cugaucgguucaccaccac

SEQ ID NO: 1270127 - RNA, 19 nt, Artificial Sequence
  Description of Artificial Sequence: Synthetic oligonucleotide
gagcaaugucaaucaacau

SEQ ID NO: 1270128 - RNA, 19 nt, Artificial Sequence
  Description of Artificial Sequence: Synthetic oligonucleotide
  modified_base (8)..(8): a, c, u, g, unknown or other
ucuccaunuccuggugcua

SEQ ID NO: 1270129 - RNA, 19 nt, Artificial Sequence
  Description of Artificial Sequence: Synthetic oligonucleotide
cuugugucuuggggccucc

SEQ ID NO: 1270130 - RNA, 19 nt, Artificial Sequence
  Description of Artificial Sequence: Synthetic oligonucleotide
ccgaccuuuagguaggucu

SEQ ID NO: 1270131 - RNA, 19 nt, Artificial Sequence
  Description of Artificial Sequence: Synthetic oligonucleotide
cacacguugcccagguugu

SEQ ID NO: 1270132 - RNA, 19 nt, Artificial Sequence
  Description of Artificial Sequence: Synthetic oligonucleotide
cauggaacguagcacugau

SEQ ID NO: 1270133 - RNA, 19 nt, Artificial Sequence
  Description of Artificial Sequence: Synthetic oligonucleotide
ccucauaggaagaggcgga

SEQ ID NO: 1270134 - RNA, 19 nt, Artificial Sequence
  Description of Artificial Sequence: Synthetic oligonucleotide
cacggacugcuuccccuug

SEQ ID NO: 1270135 - RNA, 19 nt, Artificial Sequence
  Description of Artificial Sequence: Synthetic oligonucleotide
cacuuucgagaugcccaag

SEQ ID NO: 1270136 - RNA, 19 nt, Artificial Sequence
  Description of Artificial Sequence: Synthetic oligonucleotide
aacaucccuucggcucaug

SEQ ID NO: 1270137 - RNA, 19 nt, Artificial Sequence
  Description of Artificial Sequence: Synthetic oligonucleotide
  modified_base (6)..(6): a, c, u, g, unknown or other
guuacncaaggcaggcccu

SEQ ID NO: 1270138 - RNA, 19 nt, Artificial Sequence
  Description of Artificial Sequence: Synthetic oligonucleotide
ggagcagcgguagcacaag

SEQ ID NO: 1270139 - RNA, 19 nt, Artificial Sequence
  Description of Artificial Sequence: Synthetic oligonucleotide
uacacacguugcccagguu

SEQ ID NO: 1270140 - RNA, 19 nt, Artificial Sequence
  Description of Artificial Sequence: Synthetic oligonucleotide
cuugcucaaagcucagcuu

SEQ ID NO: 1270141 - RNA, 19 nt, Artificial Sequence
  Description of Artificial Sequence: Synthetic oligonucleotide
uucccucuucuagguagaa

SEQ ID NO: 1270142 - RNA, 19 nt, Artificial Sequence
  Description of Artificial Sequence: Synthetic oligonucleotide
ccgaauggaacaucugaaa

SEQ ID NO: 1270143 - RNA, 19 nt, Artificial Sequence
  Description of Artificial Sequence: Synthetic oligonucleotide
gagcagcgagcggaaguac

SEQ ID NO: 1270144 - RNA, 19 nt, Artificial Sequence
  Description of Artificial Sequence: Synthetic oligonucleotide
uggcggcaguugauacaca

SEQ ID NO: 1270145 - RNA, 19 nt, Artificial Sequence
  Description of Artificial Sequence: Synthetic oligonucleotide
gcggaaguacugccauugc

SEQ ID NO: 1270146 - RNA, 19 nt, Artificial Sequence
  Description of Artificial Sequence: Synthetic oligonucleotide
acaugucaacccagccaug

SEQ ID NO: 1270147 - RNA, 19 nt, Artificial Sequence
  Description of Artificial Sequence: Synthetic oligonucleotide
gcaggcgugcuggaguacc

SEQ ID NO: 1270148 - RNA, 19 nt, Artificial Sequence
  Description of Artificial Sequence: Synthetic oligonucleotide
ggucguucuccgcuagcca

SEQ ID NO: 1270149 - RNA, 19 nt, Artificial Sequence
  Description of Artificial Sequence: Synthetic oligonucleotide
ggcuccuccguauagcgau

SEQ ID NO: 1270150 - RNA, 19 nt, Artificial Sequence
  Description of Artificial Sequence: Synthetic oligonucleotide
guaggcacccagggccuug

SEQ ID NO: 1270151 - RNA, 19 nt, Artificial Sequence
  Description of Artificial Sequence: Synthetic oligonucleotide
  modified_base (7)..(7): a, c, u, g, unknown or other
cuccaunuccuggugcuau

SEQ ID NO: 1270152 - RNA, 19 nt, Artificial Sequence
  Description of Artificial Sequence: Synthetic oligonucleotide
cacacggacugcuuccccu

SEQ ID NO: 1270153 - RNA, 19 nt, Artificial Sequence
  Description of Artificial Sequence: Synthetic oligonucleotide
cccucuucuagguagaauu

SEQ ID NO: 1270154 - RNA, 19 nt, Artificial Sequence
  Description of Artificial Sequence: Synthetic oligonucleotide
ccuccgaauggaacaucug

SEQ ID NO: 1270155 - RNA, 19 nt, Artificial Sequence
  Description of Artificial Sequence: Synthetic oligonucleotide
caccuaaggaguccauggu

SEQ ID NO: 1270156 - RNA, 19 nt, Artificial Sequence
  Description of Artificial Sequence: Synthetic oligonucleotide
caggcgugcuggaguacca

SEQ ID NO: 1270157 - RNA, 19 nt, Artificial Sequence
  Description of Artificial Sequence: Synthetic oligonucleotide
auccuggcggggaucugca

SEQ ID NO: 1270158 - RNA, 19 nt, Artificial Sequence
  Description of Artificial Sequence: Synthetic oligonucleotide
cacgaacucagagccaccu

SEQ ID NO: 1270159 - RNA, 19 nt, Artificial Sequence
  Description of Artificial Sequence: Synthetic oligonucleotide
cuccuccguauagcgauga

SEQ ID NO: 1270160 - RNA, 19 nt, Artificial Sequence
  Description of Artificial Sequence: Synthetic oligonucleotide
cuugcgccaugucgaggca

SEQ ID NO: 1270161 - RNA, 19 nt, Artificial Sequence
  Description of Artificial Sequence: Synthetic oligonucleotide
cguagcacugaucgguuca

SEQ ID NO: 1270162 - RNA, 19 nt, Artificial Sequence
  Description of Artificial Sequence: Synthetic oligonucleotide
gcaucggggagcagcgagc

SEQ ID NO: 1270163 - RNA, 19 nt, Artificial Sequence
  Description of Artificial Sequence: Synthetic oligonucleotide
ccccguagcuugucauagg

SEQ ID NO: 1270164 - RNA, 19 nt, Artificial Sequence
  Description of Artificial Sequence: Synthetic oligonucleotide
caaugcgucuccggcagua

SEQ ID NO: 1270165 - RNA, 19 nt, Artificial Sequence
  Description of Artificial Sequence: Synthetic oligonucleotide
cagcaggcgugcuggagua

SEQ ID NO: 1270166 - RNA, 19 nt, Artificial Sequence
  Description of Artificial Sequence: Synthetic oligonucleotide
guccagcuuucgagcaaug

SEQ ID NO: 1270167 - RNA, 19 nt, Artificial Sequence
  Description of Artificial Sequence: Synthetic oligonucleotide
cugaacggcuccuccguau

SEQ ID NO: 1270168 - RNA, 19 nt, Artificial Sequence
  Description of Artificial Sequence: Synthetic oligonucleotide
guauagcgaugaaugguuu

SEQ ID NO: 1270169 - RNA, 19 nt, Artificial Sequence
  Description of Artificial Sequence: Synthetic oligonucleotide
cuucggcucauggaacgua

SEQ ID NO: 1270170 - RNA, 19 nt, Artificial Sequence
  Description of Artificial Sequence: Synthetic oligonucleotide
cguauagcgaugaaugguu

SEQ ID NO: 1270171 - RNA, 19 nt, Artificial Sequence
  Description of Artificial Sequence: Synthetic oligonucleotide
augggccaguaucgucaau

SEQ ID NO: 1270172 - RNA, 19 nt, Artificial Sequence
  Description of Artificial Sequence: Synthetic oligonucleotide
gcuagccacugagcauagg

SEQ ID NO: 1270173 - RNA, 19 nt, Artificial Sequence
  Description of Artificial Sequence: Synthetic oligonucleotide
ccguagcuugucauaggca

SEQ ID NO: 1270174 - RNA, 19 nt, Artificial Sequence
  Description of Artificial Sequence: Synthetic oligonucleotide
guccuccgaauggaacauc

SEQ ID NO: 1270175 - RNA, 19 nt, Artificial Sequence
  Description of Artificial Sequence: Synthetic oligonucleotide
gaaaaggcuuggagcggau

SEQ ID NO: 1270176 - RNA, 19 nt, Artificial Sequence
  Description of Artificial Sequence: Synthetic oligonucleotide
cggucguucuccgcuagcc

SEQ ID NO: 1270177 - RNA, 19 nt, Artificial Sequence
  Description of Artificial Sequence: Synthetic oligonucleotide
ggacagcauccaguaauaa

SEQ ID NO: 1270178 - RNA, 19 nt, Artificial Sequence
  Description of Artificial Sequence: Synthetic oligonucleotide
cgucaaugcgucuccggca

SEQ ID NO: 1270179 - RNA, 19 nt, Artificial Sequence
  Description of Artificial Sequence: Synthetic oligonucleotide
gcgguagcacaaggguacc

SEQ ID NO: 1270180 - RNA, 19 nt, Artificial Sequence
  Description of Artificial Sequence: Synthetic oligonucleotide
gcgagcggaaguacugcca

SEQ ID NO: 1270181 - RNA, 19 nt, Artificial Sequence
  Description of Artificial Sequence: Synthetic oligonucleotide
gccagcgcuugaugagaac

SEQ ID NO: 1270182 - RNA, 19 nt, Artificial Sequence
  Description of Artificial Sequence: Synthetic oligonucleotide
gggguggcuuuuggucagg

SEQ ID NO: 1270183 - RNA, 19 nt, Artificial Sequence
  Description of Artificial Sequence: Synthetic oligonucleotide
caguguucaugggccagua

SEQ ID NO: 1270184 - RNA, 19 nt, Artificial Sequence
  Description of Artificial Sequence: Synthetic oligonucleotide
gcggucguucuccgcuagc

SEQ ID NO: 1270185 - RNA, 19 nt, Artificial Sequence
  Description of Artificial Sequence: Synthetic oligonucleotide
caguaucgucaaugcgucu

SEQ ID NO: 1270186 - RNA, 19 nt, Artificial Sequence
  Description of Artificial Sequence: Synthetic oligonucleotide
gcugugaacgggucaucau

SEQ ID NO: 1270187 - RNA, 19 nt, Artificial Sequence
  Description of Artificial Sequence: Synthetic oligonucleotide
gcacgaacucagagccacc

SEQ ID NO: 1270188 - RNA, 19 nt, Artificial Sequence
  Description of Artificial Sequence: Synthetic oligonucleotide
caauggacuucuggauccu

SEQ ID NO: 1270189 - RNA, 19 nt, Artificial Sequence
  Description of Artificial Sequence: Synthetic oligonucleotide
caucaccuaaggaguccau

SEQ ID NO: 1270190 - RNA, 19 nt, Artificial Sequence
  Description of Artificial Sequence: Synthetic oligonucleotide
gcuccuccguauagcgaug

SEQ ID NO: 1270191 - RNA, 19 nt, Artificial Sequence
  Description of Artificial Sequence: Synthetic oligonucleotide
ccucgcugucauggaaaag

SEQ ID NO: 1270192 - RNA, 19 nt, Artificial Sequence
  Description of Artificial Sequence: Synthetic oligonucleotide
cgucuccggcaguagggac

SEQ ID NO: 1270193 - RNA, 19 nt, Artificial Sequence
  Description of Artificial Sequence: Synthetic oligonucleotide
ccgcuagccacugagcaua

SEQ ID NO: 1270194 - RNA, 19 nt, Artificial Sequence
  Description of Artificial Sequence: Synthetic oligonucleotide
gcgucuccggcaguaggga

SEQ ID NO: 1270195 - RNA, 19 nt, Artificial Sequence
  Description of Artificial Sequence: Synthetic oligonucleotide
agggugcuucucacccaaa

SEQ ID NO: 1270196 - RNA, 19 nt, Artificial Sequence
  Description of Artificial Sequence: Synthetic oligonucleotide
gaacaucccuucggcucau

SEQ ID NO: 1270197 - RNA, 19 nt, Artificial Sequence
  Description of Artificial Sequence: Synthetic oligonucleotide
cgccaugucgaggcacugc

SEQ ID NO: 1270198 - RNA, 19 nt, Artificial Sequence
  Description of Artificial Sequence: Synthetic oligonucleotide
cguucuccgcuagccacug

SEQ ID NO: 1270199 - RNA, 19 nt, Artificial Sequence
  Description of Artificial Sequence: Synthetic oligonucleotide
ggauccuggcggggaucug

SEQ ID NO: 1270200 - RNA, 19 nt, Artificial Sequence
  Description of Artificial Sequence: Synthetic oligonucleotide
cacugagcauagggcacgu

SEQ ID NO: 1270201 - RNA, 19 nt, Artificial Sequence
  Description of Artificial Sequence: Synthetic oligonucleotide
ccuccguauagcgaugaau

SEQ ID NO: 1270202 - RNA, 19 nt, Artificial Sequence
  Description of Artificial Sequence: Synthetic oligonucleotide
gccaggugcuggaaauggu

SEQ ID NO: 1270203 - RNA, 19 nt, Artificial Sequence
  Description of Artificial Sequence: Synthetic oligonucleotide
ccaggucgaugagggcaac

SEQ ID NO: 1270204 - RNA, 19 nt, Artificial Sequence
  Description of Artificial Sequence: Synthetic oligonucleotide
ggcacugcauggacagcau

SEQ ID NO: 1270205 - RNA, 19 nt, Artificial Sequence
  Description of Artificial Sequence: Synthetic oligonucleotide
  modified_base (5)..(5): a, c, u, g, unknown or other
ccaunuccuggugcuauuu

SEQ ID NO: 1270206 - RNA, 19 nt, Artificial Sequence
  Description of Artificial Sequence: Synthetic oligonucleotide
cccggccuugugaaaugcu

SEQ ID NO: 1270207 - RNA, 19 nt, Artificial Sequence
  Description of Artificial Sequence: Synthetic oligonucleotide
cggcuccuccguauagcga

SEQ ID NO: 1270208 - RNA, 19 nt, Artificial Sequence
  Description of Artificial Sequence: Synthetic oligonucleotide
ccacgacagucuggggaca

SEQ ID NO: 1270209 - RNA, 19 nt, Artificial Sequence
  Description of Artificial Sequence: Synthetic oligonucleotide
ccaugucgaggcacugcau

SEQ ID NO: 1270210 - RNA, 19 nt, Artificial Sequence
  Description of Artificial Sequence: Synthetic oligonucleotide
caccgaccuuuagguaggu

SEQ ID NO: 1270211 - RNA, 19 nt, Artificial Sequence
  Description of Artificial Sequence: Synthetic oligonucleotide
cgguagcacaaggguacca

SEQ ID NO: 1270212 - RNA, 19 nt, Artificial Sequence
  Description of Artificial Sequence: Synthetic oligonucleotide
caggacuguccagcuucuu

SEQ ID NO: 1270213 - RNA, 19 nt, Artificial Sequence
  Description of Artificial Sequence: Synthetic oligonucleotide
ccccuugccucccggccuu

SEQ ID NO: 1270214 - RNA, 19 nt, Artificial Sequence
  Description of Artificial Sequence: Synthetic oligonucleotide
aaguaauuggcccaggucc

SEQ ID NO: 1270215 - RNA, 19 nt, Artificial Sequence
  Description of Artificial Sequence: Synthetic oligonucleotide
aauccuaugagccuggcag

SEQ ID NO: 1270216 - RNA, 19 nt, Artificial Sequence
  Description of Artificial Sequence: Synthetic oligonucleotide
aagaagaauccuaugagcc

SEQ ID NO: 1270217 - RNA, 19 nt, Artificial Sequence
  Description of Artificial Sequence: Synthetic oligonucleotide
uuuaacacgaccacaacug

SEQ ID NO: 1270218 - RNA, 19 nt, Artificial Sequence
  Description of Artificial Sequence: Synthetic oligonucleotide
agaaguaugauuugagcag

SEQ ID NO: 1270219 - RNA, 19 nt, Artificial Sequence
  Description of Artificial Sequence: Synthetic oligonucleotide
agagaaguaugauuugagc

SEQ ID NO: 1270220 - RNA, 19 nt, Artificial Sequence
  Description of Artificial Sequence: Synthetic oligonucleotide
uuaugagcccugcagaagg

SEQ ID NO: 1270221 - RNA, 19 nt, Artificial Sequence
  Description of Artificial Sequence: Synthetic oligonucleotide
aggguugugcaccauaugc

SEQ ID NO: 1270222 - RNA, 19 nt, Artificial Sequence
  Description of Artificial Sequence: Synthetic oligonucleotide
aaacuugacaaaguaauug

SEQ ID NO: 1270223 - RNA, 19 nt, Artificial Sequence
  Description of Artificial Sequence: Synthetic oligonucleotide
uccgaguacucucauagcg

SEQ ID NO: 1270224 - RNA, 19 nt, Artificial Sequence
  Description of Artificial Sequence: Synthetic oligonucleotide
aguccauccagcuacgugg

SEQ ID NO: 1270225 - RNA, 19 nt, Artificial Sequence
  Description of Artificial Sequence: Synthetic oligonucleotide
aaaguugcggacccaauug

SEQ ID NO: 1270226 - RNA, 19 nt, Artificial Sequence
  Description of Artificial Sequence: Synthetic oligonucleotide
guaaaaugugucuuugggg

SEQ ID NO: 1270227 - RNA, 19 nt, Artificial Sequence
  Description of Artificial Sequence: Synthetic oligonucleotide
ugaucaucgagcaugaaua

SEQ ID NO: 1270228 - RNA, 19 nt, Artificial Sequence
  Description of Artificial Sequence: Synthetic oligonucleotide
ucaucgagcaugaauagcu

SEQ ID NO: 1270229 - RNA, 19 nt, Artificial Sequence
  Description of Artificial Sequence: Synthetic oligonucleotide
ucaguaguagaccugugcc

SEQ ID NO: 1270230 - RNA, 19 nt, Artificial Sequence
  Description of Artificial Sequence: Synthetic oligonucleotide
acuaucaacaaaguugcgg

SEQ ID NO: 1270231 - RNA, 19 nt, Artificial Sequence
  Description of Artificial Sequence: Synthetic oligonucleotide
uguacauagcauaagcauc

SEQ ID NO: 1270232 - RNA, 19 nt, Artificial Sequence
  Description of Artificial Sequence: Synthetic oligonucleotide
gaugguagaacaugggcug

SEQ ID NO: 1270233 - RNA, 19 nt, Artificial Sequence
  Description of Artificial Sequence: Synthetic oligonucleotide
caccauaugcccaugauac

SEQ ID NO: 1270234 - RNA, 19 nt, Artificial Sequence
  Description of Artificial Sequence: Synthetic oligonucleotide
ugaaguaagaagaauccua

SEQ ID NO: 1270235 - RNA, 19 nt, Artificial Sequence
  Description of Artificial Sequence: Synthetic oligonucleotide
agaacuguugguaagcgcg

SEQ ID NO: 1270236 - RNA, 19 nt, Artificial Sequence
  Description of Artificial Sequence: Synthetic oligonucleotide
ugauuugagcagcagauuc

SEQ ID NO: 1270237 - RNA, 19 nt, Artificial Sequence
  Description of Artificial Sequence: Synthetic oligonucleotide
agaggagcgguuuaacacg

SEQ ID NO: 1270238 - RNA, 19 nt, Artificial Sequence
  Description of Artificial Sequence: Synthetic oligonucleotide
augucuacaaugaugggac

SEQ ID NO: 1270239 - RNA, 19 nt, Artificial Sequence
  Description of Artificial Sequence: Synthetic oligonucleotide
aaguggguuuagcuggagc

SEQ ID NO: 1270240 - RNA, 19 nt, Artificial Sequence
  Description of Artificial Sequence: Synthetic oligonucleotide
aaguuggauaacuggaagu

SEQ ID NO: 1270241 - RNA, 19 nt, Artificial Sequence
  Description of Artificial Sequence: Synthetic oligonucleotide
aaguugcggacccaauugg

SEQ ID NO: 1270242 - RNA, 19 nt, Artificial Sequence
  Description of Artificial Sequence: Synthetic oligonucleotide
uucgugaugaugcugugac

SEQ ID NO: 1270243 - RNA, 19 nt, Artificial Sequence
  Description of Artificial Sequence: Synthetic oligonucleotide
uuguguuggggaacaagcg

SEQ ID NO: 1270244 - RNA, 19 nt, Artificial Sequence
  Description of Artificial Sequence: Synthetic oligonucleotide
uguuccaucacuggcgacg

SEQ ID NO: 1270245 - RNA, 19 nt, Artificial Sequence
  Description of Artificial Sequence: Synthetic oligonucleotide
uaggucacgggcaaugaag

SEQ ID NO: 1270246 - RNA, 19 nt, Artificial Sequence
  Description of Artificial Sequence: Synthetic oligonucleotide
ugaauagcuggacaucaug

SEQ ID NO: 1270247 - RNA, 19 nt, Artificial Sequence
  Description of Artificial Sequence: Synthetic oligonucleotide
aauugggcccuccuucagg

SEQ ID NO: 1270248 - RNA, 19 nt, Artificial Sequence
  Description of Artificial Sequence: Synthetic oligonucleotide
uggcauugcagacacagac

SEQ ID NO: 1270249 - RNA, 19 nt, Artificial Sequence
  Description of Artificial Sequence: Synthetic oligonucleotide
caaggagugagauggggcg

SEQ ID NO: 1270250 - RNA, 19 nt, Artificial Sequence
  Description of Artificial Sequence: Synthetic oligonucleotide
ugauacugccugaaguaag

SEQ ID NO: 1270251 - RNA, 19 nt, Artificial Sequence
  Description of Artificial Sequence: Synthetic oligonucleotide
cauggacguacuuagcugc

SEQ ID NO: 1270252 - RNA, 19 nt, Artificial Sequence
  Description of Artificial Sequence: Synthetic oligonucleotide
uacaaugaugggacuauca

SEQ ID NO: 1270253 - RNA, 19 nt, Artificial Sequence
  Description of Artificial Sequence: Synthetic oligonucleotide
uagaggagcgguuuaacac

SEQ ID NO: 1270254 - RNA, 19 nt, Artificial Sequence
  Description of Artificial Sequence: Synthetic oligonucleotide
gggacuaucaacaaaguug

SEQ ID NO: 1270255 - RNA, 19 nt, Artificial Sequence
  Description of Artificial Sequence: Synthetic oligonucleotide
cuaucaacaaaguugcgga

SEQ ID NO: 1270256 - RNA, 19 nt, Artificial Sequence
  Description of Artificial Sequence: Synthetic oligonucleotide
caaacgcugaucaucgagc

SEQ ID NO: 1270257 - RNA, 19 nt, Artificial Sequence
  Description of Artificial Sequence: Synthetic oligonucleotide
uguaccaguguacagcaau

SEQ ID NO: 1270258 - RNA, 19 nt, Artificial Sequence
  Description of Artificial Sequence: Synthetic oligonucleotide
ugguaaaggagguucguga

SEQ ID NO: 1270259 - RNA, 19 nt, Artificial Sequence
  Description of Artificial Sequence: Synthetic oligonucleotide
uuaacacgaccacaacugc

SEQ ID NO: 1270260 - RNA, 19 nt, Artificial Sequence
  Description of Artificial Sequence: Synthetic oligonucleotide
uguacugcaccccucgacu

SEQ ID NO: 1270261 - RNA, 19 nt, Artificial Sequence
  Description of Artificial Sequence: Synthetic oligonucleotide
aagagcguuguguugggga

SEQ ID NO: 1270262 - RNA, 19 nt, Artificial Sequence
  Description of Artificial Sequence: Synthetic oligonucleotide
aaacgcugaucaucgagca

SEQ ID NO: 1270263 - RNA, 19 nt, Artificial Sequence
  Description of Artificial Sequence: Synthetic oligonucleotide
aucgagcaugaauagcugg

SEQ ID NO: 1270264 - RNA, 19 nt, Artificial Sequence
  Description of Artificial Sequence: Synthetic oligonucleotide
gaaguaugauuugagcagc

SEQ ID NO: 1270265 - RNA, 19 nt, Artificial Sequence
  Description of Artificial Sequence: Synthetic oligonucleotide
auauucaauuccuucacua

SEQ ID NO: 1270266 - RNA, 19 nt, Artificial Sequence
  Description of Artificial Sequence: Synthetic oligonucleotide
uccaugcuaaguccaagug

SEQ ID NO: 1270267 - RNA, 19 nt, Artificial Sequence
  Description of Artificial Sequence: Synthetic oligonucleotide
gcagauucugggcagaggg

SEQ ID NO: 1270268 - RNA, 19 nt, Artificial Sequence
  Description of Artificial Sequence: Synthetic oligonucleotide
uccggugauagacaucccc

SEQ ID NO: 1270269 - RNA, 19 nt, Artificial Sequence
  Description of Artificial Sequence: Synthetic oligonucleotide
acuuagcugccucuggguc

SEQ ID NO: 1270270 - RNA, 19 nt, Artificial Sequence
  Description of Artificial Sequence: Synthetic oligonucleotide
agaagaauccuaugagccu

SEQ ID NO: 1270271 - RNA, 19 nt, Artificial Sequence
  Description of Artificial Sequence: Synthetic oligonucleotide
cauaugcccaugauacugc

SEQ ID NO: 1270272 - RNA, 19 nt, Artificial Sequence
  Description of Artificial Sequence: Synthetic oligonucleotide
uuuuagggaugcaggguug

SEQ ID NO: 1270273 - RNA, 19 nt, Artificial Sequence
  Description of Artificial Sequence: Synthetic oligonucleotide
acgaccacaacugcagagc

SEQ ID NO: 1270274 - RNA, 19 nt, Artificial Sequence
  Description of Artificial Sequence: Synthetic oligonucleotide
acuguugguaagcgcgggc

SEQ ID NO: 1270275 - RNA, 19 nt, Artificial Sequence
  Description of Artificial Sequence: Synthetic oligonucleotide
acaaugaugggacuaucaa

SEQ ID NO: 1270276 - RNA, 19 nt, Artificial Sequence
  Description of Artificial Sequence: Synthetic oligonucleotide
aucaucgagcaugaauagc

SEQ ID NO: 1270277 - RNA, 19 nt, Artificial Sequence
  Description of Artificial Sequence: Synthetic oligonucleotide
uccagcuacgugguaaagg

SEQ ID NO: 1270278 - RNA, 19 nt, Artificial Sequence
  Description of Artificial Sequence: Synthetic oligonucleotide
guacuuagcugccucuggg

SEQ ID NO: 1270279 - RNA, 19 nt, Artificial Sequence
  Description of Artificial Sequence: Synthetic oligonucleotide
gaaccucucuucuggacgc

SEQ ID NO: 1270280 - RNA, 19 nt, Artificial Sequence
  Description of Artificial Sequence: Synthetic oligonucleotide
agugagauggggcgugggg

SEQ ID NO: 1270281 - RNA, 19 nt, Artificial Sequence
  Description of Artificial Sequence: Synthetic oligonucleotide
gauggaguagccaggugag

SEQ ID NO: 1270282 - RNA, 19 nt, Artificial Sequence
  Description of Artificial Sequence: Synthetic oligonucleotide
auaagcauccagaaacuug

SEQ ID NO: 1270283 - RNA, 19 nt, Artificial Sequence
  Description of Artificial Sequence: Synthetic oligonucleotide
gacgccacagguaagugug

SEQ ID NO: 1270284 - RNA, 19 nt, Artificial Sequence
  Description of Artificial Sequence: Synthetic oligonucleotide
ggaaccucucuucuggacg

SEQ ID NO: 1270285 - RNA, 19 nt, Artificial Sequence
  Description of Artificial Sequence: Synthetic oligonucleotide
aggcucauucucuacuguc

SEQ ID NO: 1270286 - RNA, 19 nt, Artificial Sequence
  Description of Artificial Sequence: Synthetic oligonucleotide
aguaauuggcccagguccg

SEQ ID NO: 1270287 - RNA, 19 nt, Artificial Sequence
  Description of Artificial Sequence: Synthetic oligonucleotide
aaccccacucucugggauc

SEQ ID NO: 1270288 - RNA, 19 nt, Artificial Sequence
  Description of Artificial Sequence: Synthetic oligonucleotide
uugcggacccaauugggcc

SEQ ID NO: 1270289 - RNA, 19 nt, Artificial Sequence
  Description of Artificial Sequence: Synthetic oligonucleotide
aguagaccugugccugugc

SEQ ID NO: 1270290 - RNA, 19 nt, Artificial Sequence
  Description of Artificial Sequence: Synthetic oligonucleotide
aguuaugagcccugcagaa

SEQ ID NO: 1270291 - RNA, 19 nt, Artificial Sequence
  Description of Artificial Sequence: Synthetic oligonucleotide
gugauagacauccccugcc

SEQ ID NO: 1270292 - RNA, 19 nt, Artificial Sequence
  Description of Artificial Sequence: Synthetic oligonucleotide
uccauguaccaguguacag

SEQ ID NO: 1270293 - RNA, 19 nt, Artificial Sequence
  Description of Artificial Sequence: Synthetic oligonucleotide
aguacucucauagcggcug

SEQ ID NO: 1270294 - RNA, 19 nt, Artificial Sequence
  Description of Artificial Sequence: Synthetic oligonucleotide
uguugguaagcgcgggccc

SEQ ID NO: 1270295 - RNA, 19 nt, Artificial Sequence
  Description of Artificial Sequence: Synthetic oligonucleotide
cuucacuagagaaguauga

SEQ ID NO: 1270296 - RNA, 19 nt, Artificial Sequence
  Description of Artificial Sequence: Synthetic oligonucleotide
ucuacaaugaugggacuau

SEQ ID NO: 1270297 - RNA, 19 nt, Artificial Sequence
  Description of Artificial Sequence: Synthetic oligonucleotide
gucacgggcaaugaagucc

SEQ ID NO: 1270298 - RNA, 19 nt, Artificial Sequence
  Description of Artificial Sequence: Synthetic oligonucleotide
ggacccgacacucagcucc

SEQ ID NO: 1270299 - RNA, 19 nt, Artificial Sequence
  Description of Artificial Sequence: Synthetic oligonucleotide
ccuaaaguggguuuagcug

SEQ ID NO: 1270300 - RNA, 19 nt, Artificial Sequence
  Description of Artificial Sequence: Synthetic oligonucleotide
aagggguacccaguuauga

SEQ ID NO: 1270301 - RNA, 19 nt, Artificial Sequence
  Description of Artificial Sequence: Synthetic oligonucleotide
gacgcaaggucaguaguag

SEQ ID NO: 1270302 - RNA, 19 nt, Artificial Sequence
  Description of Artificial Sequence: Synthetic oligonucleotide
gguugugcaccauaugccc

SEQ ID NO: 1270303 - RNA, 19 nt, Artificial Sequence
  Description of Artificial Sequence: Synthetic oligonucleotide
aacuguugguaagcgcggg

SEQ ID NO: 1270304 - RNA, 19 nt, Artificial Sequence
  Description of Artificial Sequence: Synthetic oligonucleotide
aacaagcggugugucuccc

SEQ ID NO: 1270305 - RNA, 19 nt, Artificial Sequence
  Description of Artificial Sequence: Synthetic oligonucleotide
agggguacccaguuaugag

SEQ ID NO: 1270306 - RNA, 19 nt, Artificial Sequence
  Description of Artificial Sequence: Synthetic oligonucleotide
gaagcaaagagcguugugu

SEQ ID NO: 1270307 - RNA, 19 nt, Artificial Sequence
  Description of Artificial Sequence: Synthetic oligonucleotide
uucacuagagaaguaugau

SEQ ID NO: 1270308 - RNA, 19 nt, Artificial Sequence
  Description of Artificial Sequence: Synthetic oligonucleotide
acgcugaucaucgagcaug

SEQ ID NO: 1270309 - RNA, 19 nt, Artificial Sequence
  Description of Artificial Sequence: Synthetic oligonucleotide
gaacuguugguaagcgcgg

SEQ ID NO: 1270310 - RNA, 19 nt, Artificial Sequence
  Description of Artificial Sequence: Synthetic oligonucleotide
cauguaccaguguacagca

SEQ ID NO: 1270311 - RNA, 19 nt, Artificial Sequence
  Description of Artificial Sequence: Synthetic oligonucleotide
uugagugacccuuucccau

SEQ ID NO: 1270312 - RNA, 19 nt, Artificial Sequence
  Description of Artificial Sequence: Synthetic oligonucleotide
uggacgcaaggucaguagu

SEQ ID NO: 1270313 - RNA, 19 nt, Artificial Sequence
  Description of Artificial Sequence: Synthetic oligonucleotide
caugauacugccugaagua

SEQ ID NO: 1270314 - RNA, 19 nt, Artificial Sequence
  Description of Artificial Sequence: Synthetic oligonucleotide
ucauagcggcugaagguac

SEQ ID NO: 1270315 - RNA, 19 nt, Artificial Sequence
  Description of Artificial Sequence: Synthetic oligonucleotide
aaagagcguuguguugggg

SEQ ID NO: 1270316 - RNA, 19 nt, Artificial Sequence
  Description of Artificial Sequence: Synthetic oligonucleotide
accccucgacuccaggagc

SEQ ID NO: 1270317 - RNA, 19 nt, Artificial Sequence
  Description of Artificial Sequence: Synthetic oligonucleotide
acaagcggugugucucccc

SEQ ID NO: 1270318 - RNA, 19 nt, Artificial Sequence
  Description of Artificial Sequence: Synthetic oligonucleotide
ucagcuccauccgacgucc

SEQ ID NO: 1270319 - RNA, 19 nt, Artificial Sequence
  Description of Artificial Sequence: Synthetic oligonucleotide
cacgaccacaacugcagag

SEQ ID NO: 1270320 - RNA, 19 nt, Artificial Sequence
  Description of Artificial Sequence: Synthetic oligonucleotide
ggauggaguagccagguga

SEQ ID NO: 1270321 - RNA, 19 nt, Artificial Sequence
  Description of Artificial Sequence: Synthetic oligonucleotide
agcccaaccggacacucug

SEQ ID NO: 1270322 - RNA, 19 nt, Artificial Sequence
  Description of Artificial Sequence: Synthetic oligonucleotide
cacuagagaaguaugauuu

SEQ ID NO: 1270323 - RNA, 19 nt, Artificial Sequence
  Description of Artificial Sequence: Synthetic oligonucleotide
caaagagcguuguguuggg

SEQ ID NO: 1270324 - RNA, 19 nt, Artificial Sequence
  Description of Artificial Sequence: Synthetic oligonucleotide
ugcggacccaauugggccc

SEQ ID NO: 1270325 - RNA, 19 nt, Artificial Sequence
  Description of Artificial Sequence: Synthetic oligonucleotide
uacugcaccccucgacucc

SEQ ID NO: 1270326 - RNA, 19 nt, Artificial Sequence
  Description of Artificial Sequence: Synthetic oligonucleotide
caucagggcguaucagugc

SEQ ID NO: 1270327 - RNA, 19 nt, Artificial Sequence
  Description of Artificial Sequence: Synthetic oligonucleotide
gcaaacgcugaucaucgag

SEQ ID NO: 1270328 - RNA, 19 nt, Artificial Sequence
  Description of Artificial Sequence: Synthetic oligonucleotide
acauccuuagaggagcggu

SEQ ID NO: 1270329 - RNA, 19 nt, Artificial Sequence
  Description of Artificial Sequence: Synthetic oligonucleotide
uuaggggugucagcauagg

SEQ ID NO: 1270330 - RNA, 19 nt, Artificial Sequence
  Description of Artificial Sequence: Synthetic oligonucleotide
ccaguuaugagcccugcag

SEQ ID NO: 1270331 - RNA, 19 nt, Artificial Sequence
  Description of Artificial Sequence: Synthetic oligonucleotide
cuucuggacgcaaggucag

SEQ ID NO: 1270332 - RNA, 19 nt, Artificial Sequence
  Description of Artificial Sequence: Synthetic oligonucleotide
gcauugcagacacagacca

SEQ ID NO: 1270333 - RNA, 19 nt, Artificial Sequence
  Description of Artificial Sequence: Synthetic oligonucleotide
aguugcggacccaauuggg

SEQ ID NO: 1270334 - RNA, 19 nt, Artificial Sequence
  Description of Artificial Sequence: Synthetic oligonucleotide
gcugugacuguacugcacc

SEQ ID NO: 1270335 - RNA, 19 nt, Artificial Sequence
  Description of Artificial Sequence: Synthetic oligonucleotide
cacaguauguggcauugca

SEQ ID NO: 1270336 - RNA, 19 nt, Artificial Sequence
  Description of Artificial Sequence: Synthetic oligonucleotide
ggugauagacauccccugc

SEQ ID NO: 1270337 - RNA, 19 nt, Artificial Sequence
  Description of Artificial Sequence: Synthetic oligonucleotide
ggaucacugaugguaagag

SEQ ID NO: 1270338 - RNA, 19 nt, Artificial Sequence
  Description of Artificial Sequence: Synthetic oligonucleotide
cucgggaaugaacuugcug

SEQ ID NO: 1270339 - RNA, 19 nt, Artificial Sequence
  Description of Artificial Sequence: Synthetic oligonucleotide
guaccagcagcagguaagg

SEQ ID NO: 1270340 - RNA, 19 nt, Artificial Sequence
  Description of Artificial Sequence: Synthetic oligonucleotide
cauagcggcugaagguacc

SEQ ID NO: 1270341 - RNA, 19 nt, Artificial Sequence
  Description of Artificial Sequence: Synthetic oligonucleotide
aaguaugauuugagcagca

SEQ ID NO: 1270342 - RNA, 19 nt, Artificial Sequence
  Description of Artificial Sequence: Synthetic oligonucleotide
agagcguuguguuggggaa

SEQ ID NO: 1270343 - RNA, 19 nt, Artificial Sequence
  Description of Artificial Sequence: Synthetic oligonucleotide
aggcauuggaagggguacc

SEQ ID NO: 1270344 - RNA, 19 nt, Artificial Sequence
  Description of Artificial Sequence: Synthetic oligonucleotide
guuccagucaguccaucca

SEQ ID NO: 1270345 - RNA, 19 nt, Artificial Sequence
  Description of Artificial Sequence: Synthetic oligonucleotide
gucauugcuccuccaaauc

SEQ ID NO: 1270346 - RNA, 19 nt, Artificial Sequence
  Description of Artificial Sequence: Synthetic oligonucleotide
cugugacuguacugcaccc

SEQ ID NO: 1270347 - RNA, 19 nt, Artificial Sequence
  Description of Artificial Sequence: Synthetic oligonucleotide
cuugagugacccuuuccca

SEQ ID NO: 1270348 - RNA, 19 nt, Artificial Sequence
  Description of Artificial Sequence: Synthetic oligonucleotide
auggacguacuuagcugcc

SEQ ID NO: 1270349 - RNA, 19 nt, Artificial Sequence
  Description of Artificial Sequence: Synthetic oligonucleotide
ccaugcuaaguccaagugc

SEQ ID NO: 1270350 - RNA, 19 nt, Artificial Sequence
  Description of Artificial Sequence: Synthetic oligonucleotide
gacuaucaacaaaguugcg

SEQ ID NO: 1270351 - RNA, 19 nt, Artificial Sequence
  Description of Artificial Sequence: Synthetic oligonucleotide
guugcggacccaauugggc

SEQ ID NO: 1270352 - RNA, 19 nt, Artificial Sequence
  Description of Artificial Sequence: Synthetic oligonucleotide
agguucgugaugaugcugu

SEQ ID NO: 1270353 - RNA, 19 nt, Artificial Sequence
  Description of Artificial Sequence: Synthetic oligonucleotide
gaucccucgggaaugaacu

SEQ ID NO: 1270354 - RNA, 19 nt, Artificial Sequence
  Description of Artificial Sequence: Synthetic oligonucleotide
ggagcgguuuaacacgacc

SEQ ID NO: 1270355 - RNA, 19 nt, Artificial Sequence
  Description of Artificial Sequence: Synthetic oligonucleotide
gggcguaucagugccacgg

SEQ ID NO: 1270356 - RNA, 19 nt, Artificial Sequence
  Description of Artificial Sequence: Synthetic oligonucleotide
ccgacacucagcuccaucc

SEQ ID NO: 1270357 - RNA, 19 nt, Artificial Sequence
  Description of Artificial Sequence: Synthetic oligonucleotide
aacgcugaucaucgagcau

SEQ ID NO: 1270358 - RNA, 19 nt, Artificial Sequence
  Description of Artificial Sequence: Synthetic oligonucleotide
gacauccuuagaggagcgg

SEQ ID NO: 1270359 - RNA, 19 nt, Artificial Sequence
  Description of Artificial Sequence: Synthetic oligonucleotide
gagcucggugaaucagggg

SEQ ID NO: 1270360 - RNA, 19 nt, Artificial Sequence
  Description of Artificial Sequence: Synthetic oligonucleotide
ugucuacaaugaugggacu

SEQ ID NO: 1270361 - RNA, 19 nt, Artificial Sequence
  Description of Artificial Sequence: Synthetic oligonucleotide
uccauuggucuugagccaa

SEQ ID NO: 1270362 - RNA, 19 nt, Artificial Sequence
  Description of Artificial Sequence: Synthetic oligonucleotide
caguuaugagcccugcaga

SEQ ID NO: 1270363 - RNA, 19 nt, Artificial Sequence
  Description of Artificial Sequence: Synthetic oligonucleotide
gguuccagucaguccaucc

SEQ ID NO: 1270364 - RNA, 19 nt, Artificial Sequence
  Description of Artificial Sequence: Synthetic oligonucleotide
ggggaugucuacaaugaug

SEQ ID NO: 1270365 - RNA, 19 nt, Artificial Sequence
  Description of Artificial Sequence: Synthetic oligonucleotide
ccauguaccaguguacagc

SEQ ID NO: 1270366 - RNA, 19 nt, Artificial Sequence
  Description of Artificial Sequence: Synthetic oligonucleotide
gaagcccaggccaggauca

SEQ ID NO: 1270367 - RNA, 19 nt, Artificial Sequence
  Description of Artificial Sequence: Synthetic oligonucleotide
ccgaguacucucauagcgg

SEQ ID NO: 1270368 - RNA, 19 nt, Artificial Sequence
  Description of Artificial Sequence: Synthetic oligonucleotide
ugacccuugagugacccuu

SEQ ID NO: 1270369 - RNA, 19 nt, Artificial Sequence
  Description of Artificial Sequence: Synthetic oligonucleotide
ugccugacccuugagugac

SEQ ID NO: 1270370 - RNA, 19 nt, Artificial Sequence
  Description of Artificial Sequence: Synthetic oligonucleotide
acgugguaaaggagguucg

SEQ ID NO: 1270371 - RNA, 19 nt, Artificial Sequence
  Description of Artificial Sequence: Synthetic oligonucleotide
aggaucacugaugguaaga

SEQ ID NO: 1270372 - RNA, 19 nt, Artificial Sequence
  Description of Artificial Sequence: Synthetic oligonucleotide
uggggaacaagcggugugu

SEQ ID NO: 1270373 - RNA, 19 nt, Artificial Sequence
  Description of Artificial Sequence: Synthetic oligonucleotide
gggacauccuuagaggagc

SEQ ID NO: 1270374 - RNA, 19 nt, Artificial Sequence
  Description of Artificial Sequence: Synthetic oligonucleotide
uaagcgcgggcccuagguc

SEQ ID NO: 1270375 - RNA, 19 nt, Artificial Sequence
  Description of Artificial Sequence: Synthetic oligonucleotide
gauuugagcagcagauucu

SEQ ID NO: 1270376 - RNA, 19 nt, Artificial Sequence
  Description of Artificial Sequence: Synthetic oligonucleotide
agcagauucugggcagagg

SEQ ID NO: 1270377 - RNA, 19 nt, Artificial Sequence
  Description of Artificial Sequence: Synthetic oligonucleotide
cuccgaguacucucauagc

SEQ ID NO: 1270378 - RNA, 19 nt, Artificial Sequence
  Description of Artificial Sequence: Synthetic oligonucleotide
caguccauccagcuacgug

SEQ ID NO: 1270379 - RNA, 19 nt, Artificial Sequence
  Description of Artificial Sequence: Synthetic oligonucleotide
ccuucacuagagaaguaug

SEQ ID NO: 1270380 - RNA, 19 nt, Artificial Sequence
  Description of Artificial Sequence: Synthetic oligonucleotide
cagcagcaaacgcugauca

SEQ ID NO: 1270381 - RNA, 19 nt, Artificial Sequence
  Description of Artificial Sequence: Synthetic oligonucleotide
caggagcccaaccggacac

SEQ ID NO: 1270382 - RNA, 19 nt, Artificial Sequence
  Description of Artificial Sequence: Synthetic oligonucleotide
agguaaguguggauggagu

SEQ ID NO: 1270383 - RNA, 19 nt, Artificial Sequence
  Description of Artificial Sequence: Synthetic oligonucleotide
uaucagugccacggugucc

SEQ ID NO: 1270384 - RNA, 19 nt, Artificial Sequence
  Description of Artificial Sequence: Synthetic oligonucleotide
guauguggcauugcagaca

SEQ ID NO: 1270385 - RNA, 19 nt, Artificial Sequence
  Description of Artificial Sequence: Synthetic oligonucleotide
gagguucgugaugaugcug

SEQ ID NO: 1270386 - RNA, 19 nt, Artificial Sequence
  Description of Artificial Sequence: Synthetic oligonucleotide
caaggucaguaguagaccu

SEQ ID NO: 1270387 - RNA, 19 nt, Artificial Sequence
  Description of Artificial Sequence: Synthetic oligonucleotide
ggaugcaggguugugcacc

SEQ ID NO: 1270388 - RNA, 19 nt, Artificial Sequence
  Description of Artificial Sequence: Synthetic oligonucleotide
gagccaucagggcguauca

SEQ ID NO: 1270389 - RNA, 19 nt, Artificial Sequence
  Description of Artificial Sequence: Synthetic oligonucleotide
uaguagaccugugccugug

SEQ ID NO: 1270390 - RNA, 19 nt, Artificial Sequence
  Description of Artificial Sequence: Synthetic oligonucleotide
acccaguuaugagcccugc

SEQ ID NO: 1270391 - RNA, 19 nt, Artificial Sequence
  Description of Artificial Sequence: Synthetic oligonucleotide
cuccauccgacguccacuc

SEQ ID NO: 1270392 - RNA, 19 nt, Artificial Sequence
  Description of Artificial Sequence: Synthetic oligonucleotide
ucuggacgcaaggucagua

SEQ ID NO: 1270393 - RNA, 19 nt, Artificial Sequence
  Description of Artificial Sequence: Synthetic oligonucleotide
cuggcgacgccacagguaa

SEQ ID NO: 1270394 - RNA, 19 nt, Artificial Sequence
  Description of Artificial Sequence: Synthetic oligonucleotide
cccggaugauguuauauuc

SEQ ID NO: 1270395 - RNA, 19 nt, Artificial Sequence
  Description of Artificial Sequence: Synthetic oligonucleotide
cucagcuccauccgacguc

SEQ ID NO: 1270396 - RNA, 19 nt, Artificial Sequence
  Description of Artificial Sequence: Synthetic oligonucleotide
ucagggcguaucagugcca

SEQ ID NO: 1270397 - RNA, 19 nt, Artificial Sequence
  Description of Artificial Sequence: Synthetic oligonucleotide
ggcaaggagugagaugggg

SEQ ID NO: 1270398 - RNA, 19 nt, Artificial Sequence
  Description of Artificial Sequence: Synthetic oligonucleotide
ggguugugcaccauaugcc

SEQ ID NO: 1270399 - RNA, 19 nt, Artificial Sequence
  Description of Artificial Sequence: Synthetic oligonucleotide
gguuuaacacgaccacaac

SEQ ID NO: 1270400 - RNA, 19 nt, Artificial Sequence
  Description of Artificial Sequence: Synthetic oligonucleotide
cgaguacucucauagcggc

SEQ ID NO: 1270401 - RNA, 19 nt, Artificial Sequence
  Description of Artificial Sequence: Synthetic oligonucleotide
acgcaaggucaguaguaga

SEQ ID NO: 1270402 - RNA, 19 nt, Artificial Sequence
  Description of Artificial Sequence: Synthetic oligonucleotide
cuuuuagggaugcaggguu

SEQ ID NO: 1270403 - RNA, 19 nt, Artificial Sequence
  Description of Artificial Sequence: Synthetic oligonucleotide
agcguuguguuggggaaca

SEQ ID NO: 1270404 - RNA, 19 nt, Artificial Sequence
  Description of Artificial Sequence: Synthetic oligonucleotide
gcaaggagugagauggggc

SEQ ID NO: 1270405 - RNA, 19 nt, Artificial Sequence
  Description of Artificial Sequence: Synthetic oligonucleotide
cugaucaucgagcaugaau

SEQ ID NO: 1270406 - RNA, 19 nt, Artificial Sequence
  Description of Artificial Sequence: Synthetic oligonucleotide
ccauggacguacuuagcug

SEQ ID NO: 1270407 - RNA, 19 nt, Artificial Sequence
  Description of Artificial Sequence: Synthetic oligonucleotide
gaggagcgguuuaacacga

SEQ ID NO: 1270408 - RNA, 19 nt, Artificial Sequence
  Description of Artificial Sequence: Synthetic oligonucleotide
guacugcaccccucgacuc

SEQ ID NO: 1270409 - RNA, 19 nt, Artificial Sequence
  Description of Artificial Sequence: Synthetic oligonucleotide
gaaacuugacaaaguaauu

SEQ ID NO: 1270410 - RNA, 19 nt, Artificial Sequence
  Description of Artificial Sequence: Synthetic oligonucleotide
agcagcaaacgcugaucau

SEQ ID NO: 1270411 - RNA, 19 nt, Artificial Sequence
  Description of Artificial Sequence: Synthetic oligonucleotide
agggcguaucagugccacg

SEQ ID NO: 1270412 - RNA, 19 nt, Artificial Sequence
  Description of Artificial Sequence: Synthetic oligonucleotide
cugggaucccucgggaaug

SEQ ID NO: 1270413 - RNA, 19 nt, Artificial Sequence
  Description of Artificial Sequence: Synthetic oligonucleotide
cauuaggggugucagcaua

SEQ ID NO: 1270414 - RNA, 19 nt, Artificial Sequence
  Description of Artificial Sequence: Synthetic oligonucleotide
gucaguccauccagcuacg

SEQ ID NO: 1270415 - RNA, 19 nt, Artificial Sequence
  Description of Artificial Sequence: Synthetic oligonucleotide
cuacaaugaugggacuauc

SEQ ID NO: 1270416 - RNA, 19 nt, Artificial Sequence
  Description of Artificial Sequence: Synthetic oligonucleotide
caagagagucacaguaugu

SEQ ID NO: 1270417 - RNA, 19 nt, Artificial Sequence
  Description of Artificial Sequence: Synthetic oligonucleotide
cccucgggaaugaacuugc

SEQ ID NO: 1270418 - RNA, 19 nt, Artificial Sequence
  Description of Artificial Sequence: Synthetic oligonucleotide
gugacuguacugcaccccu

SEQ ID NO: 1270419 - RNA, 19 nt, Artificial Sequence
  Description of Artificial Sequence: Synthetic oligonucleotide
agcaaacgcugaucaucga

SEQ ID NO: 1270420 - RNA, 19 nt, Artificial Sequence
  Description of Artificial Sequence: Synthetic oligonucleotide
caggguugugcaccauaug

SEQ ID NO: 1270421 - RNA, 19 nt, Artificial Sequence
  Description of Artificial Sequence: Synthetic oligonucleotide
gacguacuuagcugccucu

SEQ ID NO: 1270422 - RNA, 19 nt, Artificial Sequence
  Description of Artificial Sequence: Synthetic oligonucleotide
cuccauuggucuugagcca

SEQ ID NO: 1270423 - RNA, 19 nt, Artificial Sequence
  Description of Artificial Sequence: Synthetic oligonucleotide
ggcguggggacaucuucag

SEQ ID NO: 1270424 - RNA, 19 nt, Artificial Sequence
  Description of Artificial Sequence: Synthetic oligonucleotide
cccaauugggcccuccuuc

SEQ ID NO: 1270425 - RNA, 19 nt, Artificial Sequence
  Description of Artificial Sequence: Synthetic oligonucleotide
guaagcgcgggcccuaggu

SEQ ID NO: 1270426 - RNA, 19 nt, Artificial Sequence
  Description of Artificial Sequence: Synthetic oligonucleotide
cagggcguaucagugccac

SEQ ID NO: 1270427 - RNA, 19 nt, Artificial Sequence
  Description of Artificial Sequence: Synthetic oligonucleotide
caguaguagaccugugccu

SEQ ID NO: 1270428 - RNA, 19 nt, Artificial Sequence
  Description of Artificial Sequence: Synthetic oligonucleotide
ggacauccuuagaggagcg

SEQ ID NO: 1270429 - RNA, 19 nt, Artificial Sequence
  Description of Artificial Sequence: Synthetic oligonucleotide
ggacguacuuagcugccuc

SEQ ID NO: 1270430 - RNA, 19 nt, Artificial Sequence
  Description of Artificial Sequence: Synthetic oligonucleotide
acagaccacugagcuguag

SEQ ID NO: 1270431 - RNA, 19 nt, Artificial Sequence
  Description of Artificial Sequence: Synthetic oligonucleotide
gagcguuguguuggggaac

SEQ ID NO: 1270432 - RNA, 19 nt, Artificial Sequence
  Description of Artificial Sequence: Synthetic oligonucleotide
ucaguccauccagcuacgu

SEQ ID NO: 1270433 - RNA, 19 nt, Artificial Sequence
  Description of Artificial Sequence: Synthetic oligonucleotide
cguacuuagcugccucugg

SEQ ID NO: 1270434 - RNA, 19 nt, Artificial Sequence
  Description of Artificial Sequence: Synthetic oligonucleotide
ugccugcucuuaucuguuc

SEQ ID NO: 1270435 - RNA, 19 nt, Artificial Sequence
  Description of Artificial Sequence: Synthetic oligonucleotide
ugggaucccucgggaauga

SEQ ID NO: 1270436 - RNA, 19 nt, Artificial Sequence
  Description of Artificial Sequence: Synthetic oligonucleotide
acccaauugggcccuccuu

SEQ ID NO: 1270437 - RNA, 19 nt, Artificial Sequence
  Description of Artificial Sequence: Synthetic oligonucleotide
gguucgugaugaugcugug

SEQ ID NO: 1270438 - RNA, 19 nt, Artificial Sequence
  Description of Artificial Sequence: Synthetic oligonucleotide
uggcgacgccacagguaag

SEQ ID NO: 1270439 - RNA, 19 nt, Artificial Sequence
  Description of Artificial Sequence: Synthetic oligonucleotide
gccauggacguacuuagcu

SEQ ID NO: 1270440 - RNA, 19 nt, Artificial Sequence
  Description of Artificial Sequence: Synthetic oligonucleotide
aagguuccagucaguccau

SEQ ID NO: 1270441 - RNA, 19 nt, Artificial Sequence
  Description of Artificial Sequence: Synthetic oligonucleotide
caaaguugcggacccaauu

SEQ ID NO: 1270442 - RNA, 19 nt, Artificial Sequence
  Description of Artificial Sequence: Synthetic oligonucleotide
gcguaucagugccacggug

SEQ ID NO: 1270443 - RNA, 19 nt, Artificial Sequence
  Description of Artificial Sequence: Synthetic oligonucleotide
ugguaagcgcgggcccuag

SEQ ID NO: 1270444 - RNA, 19 nt, Artificial Sequence
  Description of Artificial Sequence: Synthetic oligonucleotide
caaaacuuuuagggaugca

SEQ ID NO: 1270445 - RNA, 19 nt, Artificial Sequence
  Description of Artificial Sequence: Synthetic oligonucleotide
uucuggacgcaaggucagu

SEQ ID NO: 1270446 - RNA, 19 nt, Artificial Sequence
  Description of Artificial Sequence: Synthetic oligonucleotide
cccaugauacugccugaag

SEQ ID NO: 1270447 - RNA, 19 nt, Artificial Sequence
  Description of Artificial Sequence: Synthetic oligonucleotide
uaccagcagcagguaaggu

SEQ ID NO: 1270448 - RNA, 19 nt, Artificial Sequence
  Description of Artificial Sequence: Synthetic oligonucleotide
gguaagcgcgggcccuagg

SEQ ID NO: 1270449 - RNA, 19 nt, Artificial Sequence
  Description of Artificial Sequence: Synthetic oligonucleotide
gguuuagcuggagccagga

SEQ ID NO: 1270450 - RNA, 19 nt, Artificial Sequence
  Description of Artificial Sequence: Synthetic oligonucleotide
ccaugauacugccugaagu

SEQ ID NO: 1270451 - RNA, 19 nt, Artificial Sequence
  Description of Artificial Sequence: Synthetic oligonucleotide
guaguagaccugugccugu

SEQ ID NO: 1270452 - RNA, 19 nt, Artificial Sequence
  Description of Artificial Sequence: Synthetic oligonucleotide
agguccggugauagacauc

SEQ ID NO: 1270453 - RNA, 19 nt, Artificial Sequence
  Description of Artificial Sequence: Synthetic oligonucleotide
uggacccgacacucagcuc

SEQ ID NO: 1270454 - RNA, 19 nt, Artificial Sequence
  Description of Artificial Sequence: Synthetic oligonucleotide
ccaggaucacugaugguaa

SEQ ID NO: 1270455 - RNA, 19 nt, Artificial Sequence
  Description of Artificial Sequence: Synthetic oligonucleotide
ggguuuagcuggagccagg

SEQ ID NO: 1270456 - RNA, 19 nt, Artificial Sequence
  Description of Artificial Sequence: Synthetic oligonucleotide
gacccaauugggcccuccu

SEQ ID NO: 1270457 - RNA, 19 nt, Artificial Sequence
  Description of Artificial Sequence: Synthetic oligonucleotide
ccaauugggcccuccuuca

SEQ ID NO: 1270458 - RNA, 19 nt, Artificial Sequence
  Description of Artificial Sequence: Synthetic oligonucleotide
uugguaagcgcgggcccua

SEQ ID NO: 1270459 - RNA, 19 nt, Artificial Sequence
  Description of Artificial Sequence: Synthetic oligonucleotide
auggggcguggggacaucu

SEQ ID NO: 1270460 - RNA, 19 nt, Artificial Sequence
  Description of Artificial Sequence: Synthetic oligonucleotide
gacguccacuccgaguacu

SEQ ID NO: 1270461 - RNA, 19 nt, Artificial Sequence
  Description of Artificial Sequence: Synthetic oligonucleotide
ccauuggucuugagccaag

SEQ ID NO: 1270462 - RNA, 19 nt, Artificial Sequence
  Description of Artificial Sequence: Synthetic oligonucleotide
acuggcgacgccacaggua

SEQ ID NO: 1270463 - RNA, 19 nt, Artificial Sequence
  Description of Artificial Sequence: Synthetic oligonucleotide
ucggugaaucagggguauc

SEQ ID NO: 1270464 - RNA, 19 nt, Artificial Sequence
  Description of Artificial Sequence: Synthetic oligonucleotide
guggauggaguagccaggu

SEQ ID NO: 1270465 - RNA, 19 nt, Artificial Sequence
  Description of Artificial Sequence: Synthetic oligonucleotide
uggggcguggggacaucuu

SEQ ID NO: 1270466 - RNA, 19 nt, Artificial Sequence
  Description of Artificial Sequence: Synthetic oligonucleotide
cggugauagacauccccug

SEQ ID NO: 1270467 - RNA, 19 nt, Artificial Sequence
  Description of Artificial Sequence: Synthetic oligonucleotide
gcgguuuaacacgaccaca

SEQ ID NO: 1270468 - RNA, 19 nt, Artificial Sequence
  Description of Artificial Sequence: Synthetic oligonucleotide
gacccgacacucagcucca

SEQ ID NO: 1270469 - RNA, 19 nt, Artificial Sequence
  Description of Artificial Sequence: Synthetic oligonucleotide
cccuaaaguggguuuagcu

SEQ ID NO: 1270470 - RNA, 19 nt, Artificial Sequence
  Description of Artificial Sequence: Synthetic oligonucleotide
gaguacucucauagcggcu

SEQ ID NO: 1270471 - RNA, 19 nt, Artificial Sequence
  Description of Artificial Sequence: Synthetic oligonucleotide
aggagcccaaccggacacu

SEQ ID NO: 1270472 - RNA, 19 nt, Artificial Sequence
  Description of Artificial Sequence: Synthetic oligonucleotide
cccuaggucacgggcaaug

SEQ ID NO: 1270473 - RNA, 19 nt, Artificial Sequence
  Description of Artificial Sequence: Synthetic oligonucleotide
cacugagcuguagccaaaa

SEQ ID NO: 1270474 - RNA, 19 nt, Artificial Sequence
  Description of Artificial Sequence: Synthetic oligonucleotide
gcuacgugguaaaggaggu

SEQ ID NO: 1270475 - RNA, 19 nt, Artificial Sequence
  Description of Artificial Sequence: Synthetic oligonucleotide
cuccccuaaaguggguuua

SEQ ID NO: 1270476 - RNA, 19 nt, Artificial Sequence
  Description of Artificial Sequence: Synthetic oligonucleotide
caacaaaguugcggaccca

SEQ ID NO: 1270477 - RNA, 19 nt, Artificial Sequence
  Description of Artificial Sequence: Synthetic oligonucleotide
ggagguucgugaugaugcu

SEQ ID NO: 1270478 - RNA, 19 nt, Artificial Sequence
  Description of Artificial Sequence: Synthetic oligonucleotide
cugcaccccucgacuccag

SEQ ID NO: 1270479 - RNA, 19 nt, Artificial Sequence
  Description of Artificial Sequence: Synthetic oligonucleotide
cugcuccauuggucuugag

SEQ ID NO: 1270480 - RNA, 19 nt, Artificial Sequence
  Description of Artificial Sequence: Synthetic oligonucleotide
caucacuggcgacgccaca

SEQ ID NO: 1270481 - RNA, 19 nt, Artificial Sequence
  Description of Artificial Sequence: Synthetic oligonucleotide
cacuccgaguacucucaua

SEQ ID NO: 1270482 - RNA, 19 nt, Artificial Sequence
  Description of Artificial Sequence: Synthetic oligonucleotide
ggagcccaaccggacacuc

SEQ ID NO: 1270483 - RNA, 19 nt, Artificial Sequence
  Description of Artificial Sequence: Synthetic oligonucleotide
auguaccaguguacagcaa

SEQ ID NO: 1270484 - RNA, 19 nt, Artificial Sequence
  Description of Artificial Sequence: Synthetic oligonucleotide
ccggugauagacauccccu

SEQ ID NO: 1270485 - RNA, 19 nt, Artificial Sequence
  Description of Artificial Sequence: Synthetic oligonucleotide
cguaucagugccacggugu

SEQ ID NO: 1270486 - RNA, 19 nt, Artificial Sequence
  Description of Artificial Sequence: Synthetic oligonucleotide
caugggcugcuuguaaaau

SEQ ID NO: 1270487 - RNA, 19 nt, Artificial Sequence
  Description of Artificial Sequence: Synthetic oligonucleotide
ggggaacaagcgguguguc

SEQ ID NO: 1270488 - RNA, 19 nt, Artificial Sequence
  Description of Artificial Sequence: Synthetic oligonucleotide
gggucaagagagucacagu

SEQ ID NO: 1270489 - RNA, 19 nt, Artificial Sequence
  Description of Artificial Sequence: Synthetic oligonucleotide
guccauccagcuacguggu

SEQ ID NO: 1270490 - RNA, 19 nt, Artificial Sequence
  Description of Artificial Sequence: Synthetic oligonucleotide
cauuggucuugagccaagu

SEQ ID NO: 1270491 - RNA, 19 nt, Artificial Sequence
  Description of Artificial Sequence: Synthetic oligonucleotide
cagcaccaccugugcccag

SEQ ID NO: 1270492 - RNA, 19 nt, Artificial Sequence
  Description of Artificial Sequence: Synthetic oligonucleotide
ggacccaauugggcccucc

SEQ ID NO: 1270493 - RNA, 19 nt, Artificial Sequence
  Description of Artificial Sequence: Synthetic oligonucleotide
gggcccuaggucacgggca

SEQ ID NO: 1270494 - RNA, 19 nt, Artificial Sequence
  Description of Artificial Sequence: Synthetic oligonucleotide
ggcaguggcaucugucauu

SEQ ID NO: 1270495 - RNA, 19 nt, Artificial Sequence
  Description of Artificial Sequence: Synthetic oligonucleotide
gcgacgccacagguaagug

SEQ ID NO: 1270496 - RNA, 19 nt, Artificial Sequence
  Description of Artificial Sequence: Synthetic oligonucleotide
ggcgacgccacagguaagu

SEQ ID NO: 1270497 - RNA, 19 nt, Artificial Sequence
  Description of Artificial Sequence: Synthetic oligonucleotide
gagcccaaccggacacucu

SEQ ID NO: 1270498 - RNA, 19 nt, Artificial Sequence
  Description of Artificial Sequence: Synthetic oligonucleotide
ggaagucauuagggguguc

SEQ ID NO: 1270499 - RNA, 19 nt, Artificial Sequence
  Description of Artificial Sequence: Synthetic oligonucleotide
cucggugaaucagggguau

SEQ ID NO: 1270500 - RNA, 19 nt, Artificial Sequence
  Description of Artificial Sequence: Synthetic oligonucleotide
ggcguaucagugccacggu

SEQ ID NO: 1270501 - RNA, 19 nt, Artificial Sequence
  Description of Artificial Sequence: Synthetic oligonucleotide
cgcugaucaucgagcauga

SEQ ID NO: 1270502 - RNA, 19 nt, Artificial Sequence
  Description of Artificial Sequence: Synthetic oligonucleotide
gacccuugagugacccuuu

SEQ ID NO: 1270503 - RNA, 19 nt, Artificial Sequence
  Description of Artificial Sequence: Synthetic oligonucleotide
gugccugcucuuaucuguu

SEQ ID NO: 1270504 - RNA, 19 nt, Artificial Sequence
  Description of Artificial Sequence: Synthetic oligonucleotide
cuacgugguaaaggagguu

SEQ ID NO: 1270505 - RNA, 19 nt, Artificial Sequence
  Description of Artificial Sequence: Synthetic oligonucleotide
gaccugugccugugcgauu

SEQ ID NO: 1270506 - RNA, 19 nt, Artificial Sequence
  Description of Artificial Sequence: Synthetic oligonucleotide
ccagaacuuggagcccaca

SEQ ID NO: 1270507 - RNA, 19 nt, Artificial Sequence
  Description of Artificial Sequence: Synthetic oligonucleotide
gcugaucaucgagcaugaa

SEQ ID NO: 1270508 - RNA, 19 nt, Artificial Sequence
  Description of Artificial Sequence: Synthetic oligonucleotide
cgacguccacuccgaguac

SEQ ID NO: 1270509 - RNA, 19 nt, Artificial Sequence
  Description of Artificial Sequence: Synthetic oligonucleotide
gggugucagcauaggugua

SEQ ID NO: 1270510 - RNA, 19 nt, Artificial Sequence
  Description of Artificial Sequence: Synthetic oligonucleotide
gcggugugucuccccuaaa

SEQ ID NO: 1270511 - RNA, 19 nt, Artificial Sequence
  Description of Artificial Sequence: Synthetic oligonucleotide
gcacccggaugauguuaua

SEQ ID NO: 1270512 - RNA, 19 nt, Artificial Sequence
  Description of Artificial Sequence: Synthetic oligonucleotide
cgacgccacagguaagugu

SEQ ID NO: 1270513 - RNA, 19 nt, Artificial Sequence
  Description of Artificial Sequence: Synthetic oligonucleotide
cgcgggcccuaggucacgg

SEQ ID NO: 1270514 - RNA, 19 nt, Artificial Sequence
  Description of Artificial Sequence: Synthetic oligonucleotide
gcgcgggcccuaggucacg

SEQ ID NO: 1270515 - RNA, 19 nt, Artificial Sequence
  Description of Artificial Sequence: Synthetic oligonucleotide
cgugguaaaggagguucgu

SEQ ID NO: 1270516 - RNA, 19 nt, Artificial Sequence
  Description of Artificial Sequence: Synthetic oligonucleotide
cccaaccggacacucuguu

SEQ ID NO: 1270517 - RNA, 19 nt, Artificial Sequence
  Description of Artificial Sequence: Synthetic oligonucleotide
gcguuguguuggggaacaa

SEQ ID NO: 1270518 - RNA, 19 nt, Artificial Sequence
  Description of Artificial Sequence: Synthetic oligonucleotide
gcccaaccggacacucugu

SEQ ID NO: 1270519 - RNA, 19 nt, Artificial Sequence
  Description of Artificial Sequence: Synthetic oligonucleotide
ccacuccgaguacucucau

SEQ ID NO: 1270520 - RNA, 19 nt, Artificial Sequence
  Description of Artificial Sequence: Synthetic oligonucleotide
gcccuaggucacgggcaau

SEQ ID NO: 1270521 - RNA, 19 nt, Artificial Sequence
  Description of Artificial Sequence: Synthetic oligonucleotide
aauuucuagauacaaauac

SEQ ID NO: 1270522 - RNA, 19 nt, Artificial Sequence
  Description of Artificial Sequence: Synthetic oligonucleotide
uuuaagaugacuaugcagc

SEQ ID NO: 1270523 - RNA, 19 nt, Artificial Sequence
  Description of Artificial Sequence: Synthetic oligonucleotide
ucuagauacaaauacaucu

SEQ ID NO: 1270524 - RNA, 19 nt, Artificial Sequence
  Description of Artificial Sequence: Synthetic oligonucleotide
agaauagugagguauaauc

SEQ ID NO: 1270525 - RNA, 19 nt, Artificial Sequence
  Description of Artificial Sequence: Synthetic oligonucleotide
aguuaucaaauacacaacg

SEQ ID NO: 1270526 - RNA, 19 nt, Artificial Sequence
  Description of Artificial Sequence: Synthetic oligonucleotide
acuaaguaauaacaguacc

SEQ ID NO: 1270527 - RNA, 19 nt, Artificial Sequence
  Description of Artificial Sequence: Synthetic oligonucleotide
ugaagauuguucuauaggc

SEQ ID NO: 1270528 - RNA, 19 nt, Artificial Sequence
  Description of Artificial Sequence: Synthetic oligonucleotide
auacugaugauagaaaagc

SEQ ID NO: 1270529 - RNA, 19 nt, Artificial Sequence
  Description of Artificial Sequence: Synthetic oligonucleotide
aagauuguucuauaggcag

SEQ ID NO: 1270530 - RNA, 19 nt, Artificial Sequence
  Description of Artificial Sequence: Synthetic oligonucleotide
aagaguaaccaguaacugg

SEQ ID NO: 1270531 - RNA, 19 nt, Artificial Sequence
  Description of Artificial Sequence: Synthetic oligonucleotide
aauacacaacgguagcagc

SEQ ID NO: 1270532 - RNA, 19 nt, Artificial Sequence
  Description of Artificial Sequence: Synthetic oligonucleotide
aaauucaugccacugucag

SEQ ID NO: 1270533 - RNA, 19 nt, Artificial Sequence
  Description of Artificial Sequence: Synthetic oligonucleotide
uuuuaagcugcucagugcc

SEQ ID NO: 1270534 - RNA, 19 nt, Artificial Sequence
  Description of Artificial Sequence: Synthetic oligonucleotide
aacaccaugaagaguaacc

SEQ ID NO: 1270535 - RNA, 19 nt, Artificial Sequence
  Description of Artificial Sequence: Synthetic oligonucleotide
ugagguauaaucuucugca

SEQ ID NO: 1270536 - RNA, 19 nt, Artificial Sequence
  Description of Artificial Sequence: Synthetic oligonucleotide
  modified_base (16)..(16): a, c, u, g, unknown or other
ugaucuacgcauuucnggc

SEQ ID NO: 1270537 - RNA, 19 nt, Artificial Sequence
  Description of Artificial Sequence: Synthetic oligonucleotide
ucucaaacugccauuacag

SEQ ID NO: 1270538 - RNA, 19 nt, Artificial Sequence
  Description of Artificial Sequence: Synthetic oligonucleotide
caauuuaagaugacuaugc

SEQ ID NO: 1270539 - RNA, 19 nt, Artificial Sequence
  Description of Artificial Sequence: Synthetic oligonucleotide
uuaucaaauacacaacggu

SEQ ID NO: 1270540 - RNA, 19 nt, Artificial Sequence
  Description of Artificial Sequence: Synthetic oligonucleotide
uuuuagauuaaacguaacu

SEQ ID NO: 1270541 - RNA, 19 nt, Artificial Sequence
  Description of Artificial Sequence: Synthetic oligonucleotide
auuaaacguaacuauguag

SEQ ID NO: 1270542 - RNA, 19 nt, Artificial Sequence
  Description of Artificial Sequence: Synthetic oligonucleotide
uuugcuacucucaaguagc

SEQ ID NO: 1270543 - RNA, 19 nt, Artificial Sequence
  Description of Artificial Sequence: Synthetic oligonucleotide
  modified_base (6)..(6): a, c, u, g, unknown or other
uuuucnguagcucaacugu

SEQ ID NO: 1270544 - RNA, 19 nt, Artificial Sequence
  Description of Artificial Sequence: Synthetic oligonucleotide
uguaauagacuucaguuau

SEQ ID NO: 1270545 - RNA, 19 nt, Artificial Sequence
  Description of Artificial Sequence: Synthetic oligonucleotide
accuaucacacccauaacg

SEQ ID NO: 1270546 - RNA, 19 nt, Artificial Sequence
  Description of Artificial Sequence: Synthetic oligonucleotide
uuagauuaaacguaacuau

SEQ ID NO: 1270547 - RNA, 19 nt, Artificial Sequence
  Description of Artificial Sequence: Synthetic oligonucleotide
aaugcuagaauauccacuu

SEQ ID NO: 1270548 - RNA, 19 nt, Artificial Sequence
  Description of Artificial Sequence: Synthetic oligonucleotide
agaacuuucaagcuuggug

SEQ ID NO: 1270549 - RNA, 19 nt, Artificial Sequence
  Description of Artificial Sequence: Synthetic oligonucleotide
aaaucaguuuugaacauuc

SEQ ID NO: 1270550 - RNA, 19 nt, Artificial Sequence
  Description of Artificial Sequence: Synthetic oligonucleotide
  modified_base (9)..(9): a, c, u, g, unknown or other
aaguuuaanaugcuuguau

SEQ ID NO: 1270551 - RNA, 19 nt, Artificial Sequence
  Description of Artificial Sequence: Synthetic oligonucleotide
  modified_base (6)..(6): a, c, u, g, unknown or other
uuuaanaugcuuguauuca

SEQ ID NO: 1270552 - RNA, 19 nt, Artificial Sequence
  Description of Artificial Sequence: Synthetic oligonucleotide
aaugcaaugcuagaauauc

SEQ ID NO: 1270553 - RNA, 19 nt, Artificial Sequence
  Description of Artificial Sequence: Synthetic oligonucleotide
aaaaugacagaaguccccg

SEQ ID NO: 1270554 - RNA, 19 nt, Artificial Sequence
  Description of Artificial Sequence: Synthetic oligonucleotide
  modified_base (2)..(2): a, c, u, g, unknown or other
anaugcuuguauucauuuc

SEQ ID NO: 1270555 - RNA, 19 nt, Artificial Sequence
  Description of Artificial Sequence: Synthetic oligonucleotide
uccauucaauuuaagauga

SEQ ID NO: 1270556 - RNA, 19 nt, Artificial Sequence
  Description of Artificial Sequence: Synthetic oligonucleotide
aacuauguaggaaucaaag

SEQ ID NO: 1270557 - RNA, 19 nt, Artificial Sequence
  Description of Artificial Sequence: Synthetic oligonucleotide
uauguaggaaucaaaguaa

SEQ ID NO: 1270558 - RNA, 19 nt, Artificial Sequence
  Description of Artificial Sequence: Synthetic oligonucleotide
uagauuaaacguaacuaug

SEQ ID NO: 1270559 - RNA, 19 nt, Artificial Sequence
  Description of Artificial Sequence: Synthetic oligonucleotide
uggcauacguuuuaaacag

SEQ ID NO: 1270560 - RNA, 19 nt, Artificial Sequence
  Description of Artificial Sequence: Synthetic oligonucleotide
  modified_base (17)..(17): a, c, u, g, unknown or other
uugaucuacgcauuucngg

SEQ ID NO: 1270561 - RNA, 19 nt, Artificial Sequence
  Description of Artificial Sequence: Synthetic oligonucleotide
guaacaaccagcuguauac

SEQ ID NO: 1270562 - RNA, 19 nt, Artificial Sequence
  Description of Artificial Sequence: Synthetic oligonucleotide
uuuagauuaaacguaacua

SEQ ID NO: 1270563 - RNA, 19 nt, Artificial Sequence
  Description of Artificial Sequence: Synthetic oligonucleotide
cuguauaccuaucacaccc

SEQ ID NO: 1270564 - RNA, 19 nt, Artificial Sequence
  Description of Artificial Sequence: Synthetic oligonucleotide
ucaacuguacuuauucggc

SEQ ID NO: 1270565 - RNA, 19 nt, Artificial Sequence
  Description of Artificial Sequence: Synthetic oligonucleotide
uagccaacgagcaagagaa

SEQ ID NO: 1270566 - RNA, 19 nt, Artificial Sequence
  Description of Artificial Sequence: Synthetic oligonucleotide
cuucaugaaacuguaauag

SEQ ID NO: 1270567 - RNA, 19 nt, Artificial Sequence
  Description of Artificial Sequence: Synthetic oligonucleotide
aacgguagcagccacugug

SEQ ID NO: 1270568 - RNA, 19 nt, Artificial Sequence
  Description of Artificial Sequence: Synthetic oligonucleotide
uguaauauacagcagcauu

SEQ ID NO: 1270569 - RNA, 19 nt, Artificial Sequence
  Description of Artificial Sequence: Synthetic oligonucleotide
cucaacuguacuuauucgg

SEQ ID NO: 1270570 - RNA, 19 nt, Artificial Sequence
  Description of Artificial Sequence: Synthetic oligonucleotide
agggagguuauucacuggc

SEQ ID NO: 1270571 - RNA, 19 nt, Artificial Sequence
  Description of Artificial Sequence: Synthetic oligonucleotide
uuuucccuccccuagagca

SEQ ID NO: 1270572 - RNA, 19 nt, Artificial Sequence
  Description of Artificial Sequence: Synthetic oligonucleotide
  modified_base (2)..(2): a, c, u, g, unknown or other
  modified_base (15)..(15): a, c, u, g, unknown or other
cnggccaaguuuaanaugc

SEQ ID NO: 1270573 - RNA, 19 nt, Artificial Sequence
  Description of Artificial Sequence: Synthetic oligonucleotide
uagacuucaguuaucaaau

SEQ ID NO: 1270574 - RNA, 19 nt, Artificial Sequence
  Description of Artificial Sequence: Synthetic oligonucleotide
ucaaauacacaacgguagc

SEQ ID NO: 1270575 - RNA, 19 nt, Artificial Sequence
  Description of Artificial Sequence: Synthetic oligonucleotide
  modified_base (3)..(3): a, c, u, g, unknown or other
aanaugcuuguauucauuu

SEQ ID NO: 1270576 - RNA, 19 nt, Artificial Sequence
  Description of Artificial Sequence: Synthetic oligonucleotide
aauauacagcagcauucuc

SEQ ID NO: 1270577 - RNA, 19 nt, Artificial Sequence
  Description of Artificial Sequence: Synthetic oligonucleotide
guaacagucaccuucaucu

SEQ ID NO: 1270578 - RNA, 19 nt, Artificial Sequence
  Description of Artificial Sequence: Synthetic oligonucleotide
ugaguuuaugucuuuuccc

SEQ ID NO: 1270579 - RNA, 19 nt, Artificial Sequence
  Description of Artificial Sequence: Synthetic oligonucleotide
  modified_base (7)..(7): a, c, u, g, unknown or other
auuuucnguagcucaacug

SEQ ID NO: 1270580 - RNA, 19 nt, Artificial Sequence
  Description of Artificial Sequence: Synthetic oligonucleotide
auaccuaucacacccauaa

SEQ ID NO: 1270581 - RNA, 19 nt, Artificial Sequence
  Description of Artificial Sequence: Synthetic oligonucleotide
  modified_base (7)..(7): a, c, u, g, unknown or other
guuuaanaugcuuguauuc

SEQ ID NO: 1270582 - RNA, 19 nt, Artificial Sequence
  Description of Artificial Sequence: Synthetic oligonucleotide
gauuaauagauuaccaaca

SEQ ID NO: 1270583 - RNA, 19 nt, Artificial Sequence
  Description of Artificial Sequence: Synthetic oligonucleotide
ugugaagcagcauuaccag

SEQ ID NO: 1270584 - RNA, 19 nt, Artificial Sequence
  Description of Artificial Sequence: Synthetic oligonucleotide
aauguucagauagccaauc

SEQ ID NO: 1270585 - RNA, 19 nt, Artificial Sequence
  Description of Artificial Sequence: Synthetic oligonucleotide
agacauuaggcauuuauau

SEQ ID NO: 1270586 - RNA, 19 nt, Artificial Sequence
  Description of Artificial Sequence: Synthetic oligonucleotide
auuuguguaacagucaccu

SEQ ID NO: 1270587 - RNA, 19 nt, Artificial Sequence
  Description of Artificial Sequence: Synthetic oligonucleotide
  modified_base (18)..(18): a, c, u, g, unknown or other
uuugaucuacgcauuucng

SEQ ID NO: 1270588 - RNA, 19 nt, Artificial Sequence
  Description of Artificial Sequence: Synthetic oligonucleotide
ucagauacugaugauagaa

SEQ ID NO: 1270589 - RNA, 19 nt, Artificial Sequence
  Description of Artificial Sequence: Synthetic oligonucleotide
uacuuguagacauuaggca

SEQ ID NO: 1270590 - RNA, 19 nt, Artificial Sequence
  Description of Artificial Sequence: Synthetic oligonucleotide
  modified_base (19)..(19): a, c, u, g, unknown or other
auuugaucuacgcauuucn

SEQ ID NO: 1270591 - RNA, 19 nt, Artificial Sequence
  Description of Artificial Sequence: Synthetic oligonucleotide
aucaaauacacaacgguag

SEQ ID NO: 1270592 - RNA, 19 nt, Artificial Sequence
  Description of Artificial Sequence: Synthetic oligonucleotide
ugaauuugaagugugacuu

SEQ ID NO: 1270593 - RNA, 19 nt, Artificial Sequence
  Description of Artificial Sequence: Synthetic oligonucleotide
auuuuaaucucauuccaaa

SEQ ID NO: 1270594 - RNA, 19 nt, Artificial Sequence
  Description of Artificial Sequence: Synthetic oligonucleotide
agcuguauaccuaucacac

SEQ ID NO: 1270595 - RNA, 19 nt, Artificial Sequence
  Description of Artificial Sequence: Synthetic oligonucleotide
cuaaguaauaacaguacca

SEQ ID NO: 1270596 - RNA, 19 nt, Artificial Sequence
  Description of Artificial Sequence: Synthetic oligonucleotide
ucaauaucuuuuggaaugg

SEQ ID NO: 1270597 - RNA, 19 nt, Artificial Sequence
  Description of Artificial Sequence: Synthetic oligonucleotide
cucaguuugaagauuguuc

SEQ ID NO: 1270598 - RNA, 19 nt, Artificial Sequence
  Description of Artificial Sequence: Synthetic oligonucleotide
  modified_base (5)..(5): a, c, u, g, unknown or other
  modified_base (18)..(18): a, c, u, g, unknown or other
uuucnggccaaguuuaana

SEQ ID NO: 1270599 - RNA, 19 nt, Artificial Sequence
  Description of Artificial Sequence: Synthetic oligonucleotide
  modified_base (3)..(3): a, c, u, g, unknown or other
  modified_base (16)..(16): a, c, u, g, unknown or other
ucnggccaaguuuaanaug

SEQ ID NO: 1270600 - RNA, 19 nt, Artificial Sequence
  Description of Artificial Sequence: Synthetic oligonucleotide
aaugguuaguggcuuauuu

SEQ ID NO: 1270601 - RNA, 19 nt, Artificial Sequence
  Description of Artificial Sequence: Synthetic oligonucleotide
aacuguacuuauucggccu

SEQ ID NO: 1270602 - RNA, 19 nt, Artificial Sequence
  Description of Artificial Sequence: Synthetic oligonucleotide
uacuuauucggccugcuuc

SEQ ID NO: 1270603 - RNA, 19 nt, Artificial Sequence
  Description of Artificial Sequence: Synthetic oligonucleotide
agauacugaugauagaaaa

SEQ ID NO: 1270604 - RNA, 19 nt, Artificial Sequence
  Description of Artificial Sequence: Synthetic oligonucleotide
aauauccacuucuguaaca

SEQ ID NO: 1270605 - RNA, 19 nt, Artificial Sequence
  Description of Artificial Sequence: Synthetic oligonucleotide
acuauguaggaaucaaagu

SEQ ID NO: 1270606 - RNA, 19 nt, Artificial Sequence
  Description of Artificial Sequence: Synthetic oligonucleotide
guacuuguagacauuaggc

SEQ ID NO: 1270607 - RNA, 19 nt, Artificial Sequence
  Description of Artificial Sequence: Synthetic oligonucleotide
caaauguucagauagccaa

SEQ ID NO: 1270608 - RNA, 19 nt, Artificial Sequence
  Description of Artificial Sequence: Synthetic oligonucleotide
ugggaaguaaugcaaugcu

SEQ ID NO: 1270609 - RNA, 19 nt, Artificial Sequence
  Description of Artificial Sequence: Synthetic oligonucleotide
guaaccaguaacuggaguc

SEQ ID NO: 1270610 - RNA, 19 nt, Artificial Sequence
  Description of Artificial Sequence: Synthetic oligonucleotide
ugugugaagcagcauuacc

SEQ ID NO: 1270611 - RNA, 19 nt, Artificial Sequence
  Description of Artificial Sequence: Synthetic oligonucleotide
aguaacuggaguccuauaa

SEQ ID NO: 1270612 - RNA, 19 nt, Artificial Sequence
  Description of Artificial Sequence: Synthetic oligonucleotide
auacacaacgguagcagcc

SEQ ID NO: 1270613 - RNA, 19 nt, Artificial Sequence
  Description of Artificial Sequence: Synthetic oligonucleotide
agcaagagaauagugaggu

SEQ ID NO: 1270614 - RNA, 19 nt, Artificial Sequence
  Description of Artificial Sequence: Synthetic oligonucleotide
ucuagaugaaggucaauau

SEQ ID NO: 1270615 - RNA, 19 nt, Artificial Sequence
  Description of Artificial Sequence: Synthetic oligonucleotide
  modified_base (5)..(5): a, c, u, g, unknown or other
uuaanaugcuuguauucau

SEQ ID NO: 1270616 - RNA, 19 nt, Artificial Sequence
  Description of Artificial Sequence: Synthetic oligonucleotide
uucagauagccaaucauuu

SEQ ID NO: 1270617 - RNA, 19 nt, Artificial Sequence
  Description of Artificial Sequence: Synthetic oligonucleotide
agguuauucacuggcaagg

SEQ ID NO: 1270618 - RNA, 19 nt, Artificial Sequence
  Description of Artificial Sequence: Synthetic oligonucleotide
cuauguaggaaucaaagua

SEQ ID NO: 1270619 - RNA, 19 nt, Artificial Sequence
  Description of Artificial Sequence: Synthetic oligonucleotide
uugaucaguauugauaaau

SEQ ID NO: 1270620 - RNA, 19 nt, Artificial Sequence
  Description of Artificial Sequence: Synthetic oligonucleotide
  modified_base (8)..(8): a, c, u, g, unknown or other
aguuuaanaugcuuguauu

SEQ ID NO: 1270621 - RNA, 19 nt, Artificial Sequence
  Description of Artificial Sequence: Synthetic oligonucleotide
gacccaaauuaacagugag

SEQ ID NO: 1270622 - RNA, 19 nt, Artificial Sequence
  Description of Artificial Sequence: Synthetic oligonucleotide
gugaguuuaugucuuuucc

SEQ ID NO: 1270623 - RNA, 19 nt, Artificial Sequence
  Description of Artificial Sequence: Synthetic oligonucleotide
uucaugaaacuguaauaga

SEQ ID NO: 1270624 - RNA, 19 nt, Artificial Sequence
  Description of Artificial Sequence: Synthetic oligonucleotide
ugucuuuucccuccccuag

SEQ ID NO: 1270625 - RNA, 19 nt, Artificial Sequence
  Description of Artificial Sequence: Synthetic oligonucleotide
uucaguuaucaaauacaca

SEQ ID NO: 1270626 - RNA, 19 nt, Artificial Sequence
  Description of Artificial Sequence: Synthetic oligonucleotide
uuaagaugacuaugcagcu

SEQ ID NO: 1270627 - RNA, 19 nt, Artificial Sequence
  Description of Artificial Sequence: Synthetic oligonucleotide
agguauaaucuucugcaug

SEQ ID NO: 1270628 - RNA, 19 nt, Artificial Sequence
  Description of Artificial Sequence: Synthetic oligonucleotide
ucagauagccaaucauuug

SEQ ID NO: 1270629 - RNA, 19 nt, Artificial Sequence
  Description of Artificial Sequence: Synthetic oligonucleotide
  modified_base (4)..(4): a, c, u, g, unknown or other
uucnguagcucaacuguac

SEQ ID NO: 1270630 - RNA, 19 nt, Artificial Sequence
  Description of Artificial Sequence: Synthetic oligonucleotide
agcaacuaaguaauaacag

SEQ ID NO: 1270631 - RNA, 19 nt, Artificial Sequence
  Description of Artificial Sequence: Synthetic oligonucleotide
caaguagcaguacuuguag

SEQ ID NO: 1270632 - RNA, 19 nt, Artificial Sequence
  Description of Artificial Sequence: Synthetic oligonucleotide
ugaucaguauugauaaaua

SEQ ID NO: 1270633 - RNA, 19 nt, Artificial Sequence
  Description of Artificial Sequence: Synthetic oligonucleotide
gaccauuauauuuucuguc

SEQ ID NO: 1270634 - RNA, 19 nt, Artificial Sequence
  Description of Artificial Sequence: Synthetic oligonucleotide
uaggaaucaaaguaauaau

SEQ ID NO: 1270635 - RNA, 19 nt, Artificial Sequence
  Description of Artificial Sequence: Synthetic oligonucleotide
uucuagauacaaauacauc

SEQ ID NO: 1270636 - RNA, 19 nt, Artificial Sequence
  Description of Artificial Sequence: Synthetic oligonucleotide
agaguaaccaguaacugga

SEQ ID NO: 1270637 - RNA, 19 nt, Artificial Sequence
  Description of Artificial Sequence: Synthetic oligonucleotide
ucuucccaucaguugacgg

SEQ ID NO: 1270638 - RNA, 19 nt, Artificial Sequence
  Description of Artificial Sequence: Synthetic oligonucleotide
guaauauacagcagcauuc

SEQ ID NO: 1270639 - RNA, 19 nt, Artificial Sequence
  Description of Artificial Sequence: Synthetic oligonucleotide
augacuaugcagcuuuucu

SEQ ID NO: 1270640 - RNA, 19 nt, Artificial Sequence
  Description of Artificial Sequence: Synthetic oligonucleotide
ugacugaaauucaugccac

SEQ ID NO: 1270641 - RNA, 19 nt, Artificial Sequence
  Description of Artificial Sequence: Synthetic oligonucleotide
uagacauuaggcauuuaua

SEQ ID NO: 1270642 - RNA, 19 nt, Artificial Sequence
  Description of Artificial Sequence: Synthetic oligonucleotide
uuuaugucuuuucccuccc

SEQ ID NO: 1270643 - RNA, 19 nt, Artificial Sequence
  Description of Artificial Sequence: Synthetic oligonucleotide
caagcugcaauccaccaug

SEQ ID NO: 1270644 - RNA, 19 nt, Artificial Sequence
  Description of Artificial Sequence: Synthetic oligonucleotide
ggaaguaaugcaaugcuag

SEQ ID NO: 1270645 - RNA, 19 nt, Artificial Sequence
  Description of Artificial Sequence: Synthetic oligonucleotide
cuagaugaaggucaauauc

SEQ ID NO: 1270646 - RNA, 19 nt, Artificial Sequence
  Description of Artificial Sequence: Synthetic oligonucleotide
auauccacuucuguaacag

SEQ ID NO: 1270647 - RNA, 19 nt, Artificial Sequence
  Description of Artificial Sequence: Synthetic oligonucleotide
agauuaaacguaacuaugu

SEQ ID NO: 1270648 - RNA, 19 nt, Artificial Sequence
  Description of Artificial Sequence: Synthetic oligonucleotide
ugcaaggauucuuaauucu

SEQ ID NO: 1270649 - RNA, 19 nt, Artificial Sequence
  Description of Artificial Sequence: Synthetic oligonucleotide
ucaguugacgguaguucag

SEQ ID NO: 1270650 - RNA, 19 nt, Artificial Sequence
  Description of Artificial Sequence: Synthetic oligonucleotide
acagacuugguuucuagau

SEQ ID NO: 1270651 - RNA, 19 nt, Artificial Sequence
  Description of Artificial Sequence: Synthetic oligonucleotide
aucuuauucaaaucaguuu

SEQ ID NO: 1270652 - RNA, 19 nt, Artificial Sequence
  Description of Artificial Sequence: Synthetic oligonucleotide
gugagguauaaucuucugc

SEQ ID NO: 1270653 - RNA, 19 nt, Artificial Sequence
  Description of Artificial Sequence: Synthetic oligonucleotide
uuauaucuccauucaauuu

SEQ ID NO: 1270654 - RNA, 19 nt, Artificial Sequence
  Description of Artificial Sequence: Synthetic oligonucleotide
aaauguauuuuaaucucau

SEQ ID NO: 1270655 - RNA, 19 nt, Artificial Sequence
  Description of Artificial Sequence: Synthetic oligonucleotide
gguauaaucuucugcauga

SEQ ID NO: 1270656 - RNA, 19 nt, Artificial Sequence
  Description of Artificial Sequence: Synthetic oligonucleotide
  modified_base (4)..(4): a, c, u, g, unknown or other
uaanaugcuuguauucauu

SEQ ID NO: 1270657 - RNA, 19 nt, Artificial Sequence
  Description of Artificial Sequence: Synthetic oligonucleotide
  modified_base (4)..(4): a, c, u, g, unknown or other
  modified_base (17)..(17): a, c, u, g, unknown or other
uucnggccaaguuuaanau

SEQ ID NO: 1270658 - RNA, 19 nt, Artificial Sequence
  Description of Artificial Sequence: Synthetic oligonucleotide
uuaccaacagaagugaguu

SEQ ID NO: 1270659 - RNA, 19 nt, Artificial Sequence
  Description of Artificial Sequence: Synthetic oligonucleotide
agauuguucuauaggcagc

SEQ ID NO: 1270660 - RNA, 19 nt, Artificial Sequence
  Description of Artificial Sequence: Synthetic oligonucleotide
ugccuaguguuuucaaaag

SEQ ID NO: 1270661 - RNA, 19 nt, Artificial Sequence
  Description of Artificial Sequence: Synthetic oligonucleotide
aagaggucgugagacggac

SEQ ID NO: 1270662 - RNA, 19 nt, Artificial Sequence
  Description of Artificial Sequence: Synthetic oligonucleotide
aaguaaugcaaugcuagaa

SEQ ID NO: 1270663 - RNA, 19 nt, Artificial Sequence
  Description of Artificial Sequence: Synthetic oligonucleotide
aguugacgguaguucagac

SEQ ID NO: 1270664 - RNA, 19 nt, Artificial Sequence
  Description of Artificial Sequence: Synthetic oligonucleotide
caacuaaguaauaacagua

SEQ ID NO: 1270665 - RNA, 19 nt, Artificial Sequence
  Description of Artificial Sequence: Synthetic oligonucleotide
uaaccaguaacuggagucc

SEQ ID NO: 1270666 - RNA, 19 nt, Artificial Sequence
  Description of Artificial Sequence: Synthetic oligonucleotide
uuggaagggagguuauuca

SEQ ID NO: 1270667 - RNA, 19 nt, Artificial Sequence
  Description of Artificial Sequence: Synthetic oligonucleotide
  modified_base (3)..(3): a, c, u, g, unknown or other
ucnguagcucaacuguacu

SEQ ID NO: 1270668 - RNA, 19 nt, Artificial Sequence
  Description of Artificial Sequence: Synthetic oligonucleotide
  modified_base (14)..(14): a, c, u, g, unknown or other
aucuacgcauuucnggcca

SEQ ID NO: 1270669 - RNA, 19 nt, Artificial Sequence
  Description of Artificial Sequence: Synthetic oligonucleotide
uucuauaggcagcaacuaa

SEQ ID NO: 1270670 - RNA, 19 nt, Artificial Sequence
  Description of Artificial Sequence: Synthetic oligonucleotide
agacggacacucuggaguc

SEQ ID NO: 1270671 - RNA, 19 nt, Artificial Sequence
  Description of Artificial Sequence: Synthetic oligonucleotide
acuuauucggccugcuucu

SEQ ID NO: 1270672 - RNA, 19 nt, Artificial Sequence
  Description of Artificial Sequence: Synthetic oligonucleotide
uagugagguauaaucuucu

SEQ ID NO: 1270673 - RNA, 19 nt, Artificial Sequence
  Description of Artificial Sequence: Synthetic oligonucleotide
  modified_base (15)..(15): a, c, u, g, unknown or other
gaucuacgcauuucnggcc

SEQ ID NO: 1270674 - RNA, 19 nt, Artificial Sequence
  Description of Artificial Sequence: Synthetic oligonucleotide
uguauaccuaucacaccca

SEQ ID NO: 1270675 - RNA, 19 nt, Artificial Sequence
  Description of Artificial Sequence: Synthetic oligonucleotide
caacuguacuuauucggcc

SEQ ID NO: 1270676 - RNA, 19 nt, Artificial Sequence
  Description of Artificial Sequence: Synthetic oligonucleotide
aaugauugccuaguguuuu

SEQ ID NO: 1270677 - RNA, 19 nt, Artificial Sequence
  Description of Artificial Sequence: Synthetic oligonucleotide
auacagcagacccaaauua

SEQ ID NO: 1270678 - RNA, 19 nt, Artificial Sequence
  Description of Artificial Sequence: Synthetic oligonucleotide
ccuaucacacccauaacgc

SEQ ID NO: 1270679 - RNA, 19 nt, Artificial Sequence
  Description of Artificial Sequence: Synthetic oligonucleotide
acacccauaacgccgagaa

SEQ ID NO: 1270680 - RNA, 19 nt, Artificial Sequence
  Description of Artificial Sequence: Synthetic oligonucleotide
gauuaaacguaacuaugua

SEQ ID NO: 1270681 - RNA, 19 nt, Artificial Sequence
  Description of Artificial Sequence: Synthetic oligonucleotide
aaguagcaguacuuguaga

SEQ ID NO: 1270682 - RNA, 19 nt, Artificial Sequence
  Description of Artificial Sequence: Synthetic oligonucleotide
gaaguaaugcaaugcuaga

SEQ ID NO: 1270683 - RNA, 19 nt, Artificial Sequence
  Description of Artificial Sequence: Synthetic oligonucleotide
cccaaauuaacagugagac

SEQ ID NO: 1270684 - RNA, 19 nt, Artificial Sequence
  Description of Artificial Sequence: Synthetic oligonucleotide
cagauagccaaucauuuga

SEQ ID NO: 1270685 - RNA, 19 nt, Artificial Sequence
  Description of Artificial Sequence: Synthetic oligonucleotide
uacuuuugcuacucucaag

SEQ ID NO: 1270686 - RNA, 19 nt, Artificial Sequence
  Description of Artificial Sequence: Synthetic oligonucleotide
aguuugaagauuguucuau

SEQ ID NO: 1270687 - RNA, 19 nt, Artificial Sequence
  Description of Artificial Sequence: Synthetic oligonucleotide
ugaugauagaaaagcccaa

SEQ ID NO: 1270688 - RNA, 19 nt, Artificial Sequence
  Description of Artificial Sequence: Synthetic oligonucleotide
  modified_base (5)..(5): a, c, u, g, unknown or other
uuucnguagcucaacugua

SEQ ID NO: 1270689 - RNA, 19 nt, Artificial Sequence
  Description of Artificial Sequence: Synthetic oligonucleotide
cagcaacuaaguaauaaca

SEQ ID NO: 1270690 - RNA, 19 nt, Artificial Sequence
  Description of Artificial Sequence: Synthetic oligonucleotide
gaggucgugagacggacac

SEQ ID NO: 1270691 - RNA, 19 nt, Artificial Sequence
  Description of Artificial Sequence: Synthetic oligonucleotide
gaagauuguucuauaggca

SEQ ID NO: 1270692 - RNA, 19 nt, Artificial Sequence
  Description of Artificial Sequence: Synthetic oligonucleotide
auaucuuuuggaaugguua

SEQ ID NO: 1270693 - RNA, 19 nt, Artificial Sequence
  Description of Artificial Sequence: Synthetic oligonucleotide
aauaucuuuuggaaugguu

SEQ ID NO: 1270694 - RNA, 19 nt, Artificial Sequence
  Description of Artificial Sequence: Synthetic oligonucleotide
gagcaagagaauagugagg

SEQ ID NO: 1270695 - RNA, 19 nt, Artificial Sequence
  Description of Artificial Sequence: Synthetic oligonucleotide
aacgagcaagagaauagug

SEQ ID NO: 1270696 - RNA, 19 nt, Artificial Sequence
  Description of Artificial Sequence: Synthetic oligonucleotide
aggaaugauugccuagugu

SEQ ID NO: 1270697 - RNA, 19 nt, Artificial Sequence
  Description of Artificial Sequence: Synthetic oligonucleotide
gaauagugagguauaaucu

SEQ ID NO: 1270698 - RNA, 19 nt, Artificial Sequence
  Description of Artificial Sequence: Synthetic oligonucleotide
gacuaugcagcuuuucuua

SEQ ID NO: 1270699 - RNA, 19 nt, Artificial Sequence
  Description of Artificial Sequence: Synthetic oligonucleotide
augauugccuaguguuuuc

SEQ ID NO: 1270700 - RNA, 19 nt, Artificial Sequence
  Description of Artificial Sequence: Synthetic oligonucleotide
uucauuugaucuacgcauu

SEQ ID NO: 1270701 - RNA, 19 nt, Artificial Sequence
  Description of Artificial Sequence: Synthetic oligonucleotide
accaugaagaguaaccagu

SEQ ID NO: 1270702 - RNA, 19 nt, Artificial Sequence
  Description of Artificial Sequence: Synthetic oligonucleotide
agugagguauaaucuucug

SEQ ID NO: 1270703 - RNA, 19 nt, Artificial Sequence
  Description of Artificial Sequence: Synthetic oligonucleotide
acuguacuuauucggccug

SEQ ID NO: 1270704 - RNA, 19 nt, Artificial Sequence
  Description of Artificial Sequence: Synthetic oligonucleotide
cauaacgccgagaagaggu

SEQ ID NO: 1270705 - RNA, 19 nt, Artificial Sequence
  Description of Artificial Sequence: Synthetic oligonucleotide
ucgugagacggacacucug

SEQ ID NO: 1270706 - RNA, 19 nt, Artificial Sequence
  Description of Artificial Sequence: Synthetic oligonucleotide
cagcuucuggauaaauccc

SEQ ID NO: 1270707 - RNA, 19 nt, Artificial Sequence
  Description of Artificial Sequence: Synthetic oligonucleotide
guaaugcaaugcuagaaua

SEQ ID NO: 1270708 - RNA, 19 nt, Artificial Sequence
  Description of Artificial Sequence: Synthetic oligonucleotide
gugugaagcagcauuacca

SEQ ID NO: 1270709 - RNA, 19 nt, Artificial Sequence
  Description of Artificial Sequence: Synthetic oligonucleotide
ucaagcuugguggcauacg

SEQ ID NO: 1270710 - RNA, 19 nt, Artificial Sequence
  Description of Artificial Sequence: Synthetic oligonucleotide
cugcaaggauucuuaauuc

SEQ ID NO: 1270711 - RNA, 19 nt, Artificial Sequence
  Description of Artificial Sequence: Synthetic oligonucleotide
ugcuuguauucauuuccug

SEQ ID NO: 1270712 - RNA, 19 nt, Artificial Sequence
  Description of Artificial Sequence: Synthetic oligonucleotide
ugacuaugcagcuuuucuu

SEQ ID NO: 1270713 - RNA, 19 nt, Artificial Sequence
  Description of Artificial Sequence: Synthetic oligonucleotide
uaacgccgagaagaggucg

SEQ ID NO: 1270714 - RNA, 19 nt, Artificial Sequence
  Description of Artificial Sequence: Synthetic oligonucleotide
uguuuguuugaagauuaau

SEQ ID NO: 1270715 - RNA, 19 nt, Artificial Sequence
  Description of Artificial Sequence: Synthetic oligonucleotide
guagccaacgagcaagaga

SEQ ID NO: 1270716 - RNA, 19 nt, Artificial Sequence
  Description of Artificial Sequence: Synthetic oligonucleotide
gagacggacacucuggagu

SEQ ID NO: 1270717 - RNA, 19 nt, Artificial Sequence
  Description of Artificial Sequence: Synthetic oligonucleotide
uaggcuucaugaaacugua

SEQ ID NO: 1270718 - RNA, 19 nt, Artificial Sequence
  Description of Artificial Sequence: Synthetic oligonucleotide
cagacuugguuucuagaug

SEQ ID NO: 1270719 - RNA, 19 nt, Artificial Sequence
  Description of Artificial Sequence: Synthetic oligonucleotide
acggugauuuguguaacag

SEQ ID NO: 1270720 - RNA, 19 nt, Artificial Sequence
  Description of Artificial Sequence: Synthetic oligonucleotide
gguuucuagaugaagguca

SEQ ID NO: 1270721 - RNA, 19 nt, Artificial Sequence
  Description of Artificial Sequence: Synthetic oligonucleotide
augacacaaagguaauaaa

SEQ ID NO: 1270722 - RNA, 19 nt, Artificial Sequence
  Description of Artificial Sequence: Synthetic oligonucleotide
gcagcaacuaaguaauaac

SEQ ID NO: 1270723 - RNA, 19 nt, Artificial Sequence
  Description of Artificial Sequence: Synthetic oligonucleotide
agcauuaccagaggggcca

SEQ ID NO: 1270724 - RNA, 19 nt, Artificial Sequence
  Description of Artificial Sequence: Synthetic oligonucleotide
acaacuauuugaauuugaa

SEQ ID NO: 1270725 - RNA, 19 nt, Artificial Sequence
  Description of Artificial Sequence: Synthetic oligonucleotide
uccccuagagcauggcuca

SEQ ID NO: 1270726 - RNA, 19 nt, Artificial Sequence
  Description of Artificial Sequence: Synthetic oligonucleotide
uuaguggcuuauuuucaau

SEQ ID NO: 1270727 - RNA, 19 nt, Artificial Sequence
  Description of Artificial Sequence: Synthetic oligonucleotide
acgagcaagagaauaguga

SEQ ID NO: 1270728 - RNA, 19 nt, Artificial Sequence
  Description of Artificial Sequence: Synthetic oligonucleotide
uuaagcugcucagugccac

SEQ ID NO: 1270729 - RNA, 19 nt, Artificial Sequence
  Description of Artificial Sequence: Synthetic oligonucleotide
gaugauagaaaagcccaaa

SEQ ID NO: 1270730 - RNA, 19 nt, Artificial Sequence
  Description of Artificial Sequence: Synthetic oligonucleotide
uaacaaccagcuguauacc

SEQ ID NO: 1270731 - RNA, 19 nt, Artificial Sequence
  Description of Artificial Sequence: Synthetic oligonucleotide
cuccccuagagcauggcuc

SEQ ID NO: 1270732 - RNA, 19 nt, Artificial Sequence
  Description of Artificial Sequence: Synthetic oligonucleotide
aaauguucagauagccaau

SEQ ID NO: 1270733 - RNA, 19 nt, Artificial Sequence
  Description of Artificial Sequence: Synthetic oligonucleotide
ccaacgagcaagagaauag

SEQ ID NO: 1270734 - RNA, 19 nt, Artificial Sequence
  Description of Artificial Sequence: Synthetic oligonucleotide
acaacgguagcagccacug

SEQ ID NO: 1270735 - RNA, 19 nt, Artificial Sequence
  Description of Artificial Sequence: Synthetic oligonucleotide
augcuagaauauccacuuc

SEQ ID NO: 1270736 - RNA, 19 nt, Artificial Sequence
  Description of Artificial Sequence: Synthetic oligonucleotide
aaccacugguauucuggga

SEQ ID NO: 1270737 - RNA, 19 nt, Artificial Sequence
  Description of Artificial Sequence: Synthetic oligonucleotide
cuguaauagacuucaguua

SEQ ID NO: 1270738 - RNA, 19 nt, Artificial Sequence
  Description of Artificial Sequence: Synthetic oligonucleotide
caucaguugacgguaguuc

SEQ ID NO: 1270739 - RNA, 19 nt, Artificial Sequence
  Description of Artificial Sequence: Synthetic oligonucleotide
uugcuacucucaaguagca

SEQ ID NO: 1270740 - RNA, 19 nt, Artificial Sequence
  Description of Artificial Sequence: Synthetic oligonucleotide
acacaacgguagcagccac

SEQ ID NO: 1270741 - RNA, 19 nt, Artificial Sequence
  Description of Artificial Sequence: Synthetic oligonucleotide
ccuaguguuuucaaaagca

SEQ ID NO: 1270742 - RNA, 19 nt, Artificial Sequence
  Description of Artificial Sequence: Synthetic oligonucleotide
uguaacagacuugguuucu

SEQ ID NO: 1270743 - RNA, 19 nt, Artificial Sequence
  Description of Artificial Sequence: Synthetic oligonucleotide
agcauggcucaguuugaag

SEQ ID NO: 1270744 - RNA, 19 nt, Artificial Sequence
  Description of Artificial Sequence: Synthetic oligonucleotide
cgagcaagagaauagugag

SEQ ID NO: 1270745 - RNA, 19 nt, Artificial Sequence
  Description of Artificial Sequence: Synthetic oligonucleotide
gugaaaucaaccaaccacu

SEQ ID NO: 1270746 - RNA, 19 nt, Artificial Sequence
  Description of Artificial Sequence: Synthetic oligonucleotide
aucaaccaaccacugguau

SEQ ID NO: 1270747 - RNA, 19 nt, Artificial Sequence
  Description of Artificial Sequence: Synthetic oligonucleotide
gcucaacuguacuuauucg

SEQ ID NO: 1270748 - RNA, 19 nt, Artificial Sequence
  Description of Artificial Sequence: Synthetic oligonucleotide
guagacauuaggcauuuau

SEQ ID NO: 1270749 - RNA, 19 nt, Artificial Sequence
  Description of Artificial Sequence: Synthetic oligonucleotide
acggacacucuggagucgc

SEQ ID NO: 1270750 - RNA, 19 nt, Artificial Sequence
  Description of Artificial Sequence: Synthetic oligonucleotide
aagagaauagugagguaua

SEQ ID NO: 1270751 - RNA, 19 nt, Artificial Sequence
  Description of Artificial Sequence: Synthetic oligonucleotide
uuguuuguuugaagauuaa

SEQ ID NO: 1270752 - RNA, 19 nt, Artificial Sequence
  Description of Artificial Sequence: Synthetic oligonucleotide
uauaccuaucacacccaua

SEQ ID NO: 1270753 - RNA, 19 nt, Artificial Sequence
  Description of Artificial Sequence: Synthetic oligonucleotide
guuauucacuggcaaggga

SEQ ID NO: 1270754 - RNA, 19 nt, Artificial Sequence
  Description of Artificial Sequence: Synthetic oligonucleotide
ugguuucuagaugaagguc

SEQ ID NO: 1270755 - RNA, 19 nt, Artificial Sequence
  Description of Artificial Sequence: Synthetic oligonucleotide
cagaagugaguuuaugucu

SEQ ID NO: 1270756 - RNA, 19 nt, Artificial Sequence
  Description of Artificial Sequence: Synthetic oligonucleotide
  modified_base (10)..(10): a, c, u, g, unknown or other
acgcauuucnggccaaguu

SEQ ID NO: 1270757 - RNA, 19 nt, Artificial Sequence
  Description of Artificial Sequence: Synthetic oligonucleotide
acguaacuauguaggaauc

SEQ ID NO: 1270758 - RNA, 19 nt, Artificial Sequence
  Description of Artificial Sequence: Synthetic oligonucleotide
aaacuguaauagacuucag

SEQ ID NO: 1270759 - RNA, 19 nt, Artificial Sequence
  Description of Artificial Sequence: Synthetic oligonucleotide
agaguugugugaagcagca

SEQ ID NO: 1270760 - RNA, 19 nt, Artificial Sequence
  Description of Artificial Sequence: Synthetic oligonucleotide
gcaagggagagacagcuuc

SEQ ID NO: 1270761 - RNA, 19 nt, Artificial Sequence
  Description of Artificial Sequence: Synthetic oligonucleotide
aucuucugcaugacacugg

SEQ ID NO: 1270762 - RNA, 19 nt, Artificial Sequence
  Description of Artificial Sequence: Synthetic oligonucleotide
cagcuguauaccuaucaca

SEQ ID NO: 1270763 - RNA, 19 nt, Artificial Sequence
  Description of Artificial Sequence: Synthetic oligonucleotide
ucccaucaguugacgguag

SEQ ID NO: 1270764 - RNA, 19 nt, Artificial Sequence
  Description of Artificial Sequence: Synthetic oligonucleotide
cauuugaucuacgcauuuc

SEQ ID NO: 1270765 - RNA, 19 nt, Artificial Sequence
  Description of Artificial Sequence: Synthetic oligonucleotide
cagcauuaccagaggggcc

SEQ ID NO: 1270766 - RNA, 19 nt, Artificial Sequence
  Description of Artificial Sequence: Synthetic oligonucleotide
ggaaugauugccuaguguu

SEQ ID NO: 1270767 - RNA, 19 nt, Artificial Sequence
  Description of Artificial Sequence: Synthetic oligonucleotide
caagagaauagugagguau

SEQ ID NO: 1270768 - RNA, 19 nt, Artificial Sequence
  Description of Artificial Sequence: Synthetic oligonucleotide
gaugacuaugcagcuuuuc

SEQ ID NO: 1270769 - RNA, 19 nt, Artificial Sequence
  Description of Artificial Sequence: Synthetic oligonucleotide
gcaaugcuagaauauccac

SEQ ID NO: 1270770 - RNA, 19 nt, Artificial Sequence
  Description of Artificial Sequence: Synthetic oligonucleotide
aaucaaccaaccacuggua

SEQ ID NO: 1270771 - RNA, 19 nt, Artificial Sequence
  Description of Artificial Sequence: Synthetic oligonucleotide
auaacgccgagaagagguc

SEQ ID NO: 1270772 - RNA, 19 nt, Artificial Sequence
  Description of Artificial Sequence: Synthetic oligonucleotide
uaccuaucacacccauaac

SEQ ID NO: 1270773 - RNA, 19 nt, Artificial Sequence
  Description of Artificial Sequence: Synthetic oligonucleotide
agagaauagugagguauaa

SEQ ID NO: 1270774 - RNA, 19 nt, Artificial Sequence
  Description of Artificial Sequence: Synthetic oligonucleotide
gcaacuaaguaauaacagu

SEQ ID NO: 1270775 - RNA, 19 nt, Artificial Sequence
  Description of Artificial Sequence: Synthetic oligonucleotide
uguacuuauucggccugcu

SEQ ID NO: 1270776 - RNA, 19 nt, Artificial Sequence
  Description of Artificial Sequence: Synthetic oligonucleotide
cagauacugaugauagaaa

SEQ ID NO: 1270777 - RNA, 19 nt, Artificial Sequence
  Description of Artificial Sequence: Synthetic oligonucleotide
acccaaauuaacagugaga

SEQ ID NO: 1270778 - RNA, 19 nt, Artificial Sequence
  Description of Artificial Sequence: Synthetic oligonucleotide
uucccaucaguugacggua

SEQ ID NO: 1270779 - RNA, 19 nt, Artificial Sequence
  Description of Artificial Sequence: Synthetic oligonucleotide
uugugugaagcagcauuac

SEQ ID NO: 1270780 - RNA, 19 nt, Artificial Sequence
  Description of Artificial Sequence: Synthetic oligonucleotide
acugucagauacugaugau

SEQ ID NO: 1270781 - RNA, 19 nt, Artificial Sequence
  Description of Artificial Sequence: Synthetic oligonucleotide
uuauucggccugcuucuuu

SEQ ID NO: 1270782 - RNA, 19 nt, Artificial Sequence
  Description of Artificial Sequence: Synthetic oligonucleotide
cuacucucaaguagcagua

SEQ ID NO: 1270783 - RNA, 19 nt, Artificial Sequence
  Description of Artificial Sequence: Synthetic oligonucleotide
gcuacucucaaguagcagu

SEQ ID NO: 1270784 - RNA, 19 nt, Artificial Sequence
  Description of Artificial Sequence: Synthetic oligonucleotide
  modified_base (11)..(11): a, c, u, g, unknown or other
uacgcauuucnggccaagu

SEQ ID NO: 1270785 - RNA, 19 nt, Artificial Sequence
  Description of Artificial Sequence: Synthetic oligonucleotide
  modified_base (13)..(13): a, c, u, g, unknown or other
ucuacgcauuucnggccaa

SEQ ID NO: 1270786 - RNA, 19 nt, Artificial Sequence
  Description of Artificial Sequence: Synthetic oligonucleotide
uuguagacauuaggcauuu

SEQ ID NO: 1270787 - RNA, 19 nt, Artificial Sequence
  Description of Artificial Sequence: Synthetic oligonucleotide
guaacuggaguccuauaau

SEQ ID NO: 1270788 - RNA, 19 nt, Artificial Sequence
  Description of Artificial Sequence: Synthetic oligonucleotide
aacgccgagaagaggucgu

SEQ ID NO: 1270789 - RNA, 19 nt, Artificial Sequence
  Description of Artificial Sequence: Synthetic oligonucleotide
  modified_base (6)..(6): a, c, u, g, unknown or other
  modified_base (19)..(19): a, c, u, g, unknown or other
auuucnggccaaguuuaan

SEQ ID NO: 1270790 - RNA, 19 nt, Artificial Sequence
  Description of Artificial Sequence: Synthetic oligonucleotide
augcugauaccaucucaaa

SEQ ID NO: 1270791 - RNA, 19 nt, Artificial Sequence
  Description of Artificial Sequence: Synthetic oligonucleotide
agacuucaguuaucaaaua

SEQ ID NO: 1270792 - RNA, 19 nt, Artificial Sequence
  Description of Artificial Sequence: Synthetic oligonucleotide
  modified_base (10)..(10): a, c, u, g, unknown or other
caaguuuaanaugcuugua

SEQ ID NO: 1270793 - RNA, 19 nt, Artificial Sequence
  Description of Artificial Sequence: Synthetic oligonucleotide
cuagaauauccacuucugu

SEQ ID NO: 1270794 - RNA, 19 nt, Artificial Sequence
  Description of Artificial Sequence: Synthetic oligonucleotide
aaccagcuguauaccuauc

SEQ ID NO: 1270795 - RNA, 19 nt, Artificial Sequence
  Description of Artificial Sequence: Synthetic oligonucleotide
gucagauacugaugauaga

SEQ ID NO: 1270796 - RNA, 19 nt, Artificial Sequence
  Description of Artificial Sequence: Synthetic oligonucleotide
gacugcaaauguucagaua

SEQ ID NO: 1270797 - RNA, 19 nt, Artificial Sequence
  Description of Artificial Sequence: Synthetic oligonucleotide
cuguacuuauucggccugc

SEQ ID NO: 1270798 - RNA, 19 nt, Artificial Sequence
  Description of Artificial Sequence: Synthetic oligonucleotide
uacucucaaguagcaguac

SEQ ID NO: 1270799 - RNA, 19 nt, Artificial Sequence
  Description of Artificial Sequence: Synthetic oligonucleotide
uggaaugguuaguggcuua

SEQ ID NO: 1270800 - RNA, 19 nt, Artificial Sequence
  Description of Artificial Sequence: Synthetic oligonucleotide
ugcaauccaccaugucaaa

SEQ ID NO: 1270801 - RNA, 19 nt, Artificial Sequence
  Description of Artificial Sequence: Synthetic oligonucleotide
agacccaaauuaacaguga

SEQ ID NO: 1270802 - RNA, 19 nt, Artificial Sequence
  Description of Artificial Sequence: Synthetic oligonucleotide
gacggacacucuggagucg

SEQ ID NO: 1270803 - RNA, 19 nt, Artificial Sequence
  Description of Artificial Sequence: Synthetic oligonucleotide
cgugagacggacacucugg

SEQ ID NO: 1270804 - RNA, 19 nt, Artificial Sequence
  Description of Artificial Sequence: Synthetic oligonucleotide
ggaugcugauaccaucuca

SEQ ID NO: 1270805 - RNA, 19 nt, Artificial Sequence
  Description of Artificial Sequence: Synthetic oligonucleotide
agggcacaacuauuugaau

SEQ ID NO: 1270806 - RNA, 19 nt, Artificial Sequence
  Description of Artificial Sequence: Synthetic oligonucleotide
ggucgugagacggacacuc

SEQ ID NO: 1270807 - RNA, 19 nt, Artificial Sequence
  Description of Artificial Sequence: Synthetic oligonucleotide
cccauaacgccgagaagag

SEQ ID NO: 1270808 - RNA, 19 nt, Artificial Sequence
  Description of Artificial Sequence: Synthetic oligonucleotide
gagguauaaucuucugcau

SEQ ID NO: 1270809 - RNA, 19 nt, Artificial Sequence
  Description of Artificial Sequence: Synthetic oligonucleotide
  modified_base (7)..(7): a, c, u, g, unknown or other
cauuucnggccaaguuuaa

SEQ ID NO: 1270810 - RNA, 19 nt, Artificial Sequence
  Description of Artificial Sequence: Synthetic oligonucleotide
uagcucaacuguacuuauu

SEQ ID NO: 1270811 - RNA, 19 nt, Artificial Sequence
  Description of Artificial Sequence: Synthetic oligonucleotide
gaagaggucgugagacgga

SEQ ID NO: 1270812 - RNA, 19 nt, Artificial Sequence
  Description of Artificial Sequence: Synthetic oligonucleotide
aagcugcaauccaccaugu

SEQ ID NO: 1270813 - RNA, 19 nt, Artificial Sequence
  Description of Artificial Sequence: Synthetic oligonucleotide
cugucagauacugaugaua

SEQ ID NO: 1270814 - RNA, 19 nt, Artificial Sequence
  Description of Artificial Sequence: Synthetic oligonucleotide
  modified_base (8)..(8): a, c, u, g, unknown or other
cauuuucnguagcucaacu

SEQ ID NO: 1270815 - RNA, 19 nt, Artificial Sequence
  Description of Artificial Sequence: Synthetic oligonucleotide
ucccugcaaggauucuuaa

SEQ ID NO: 1270816 - RNA, 19 nt, Artificial Sequence
  Description of Artificial Sequence: Synthetic oligonucleotide
  modified_base (16)..(16): a, c, u, g, unknown or other
cgagccaccauuuucngua

SEQ ID NO: 1270817 - RNA, 19 nt, Artificial Sequence
  Description of Artificial Sequence: Synthetic oligonucleotide
aaccaaccacugguauucu

SEQ ID NO: 1270818 - RNA, 19 nt, Artificial Sequence
  Description of Artificial Sequence: Synthetic oligonucleotide
cuugguggcauacguuuua

SEQ ID NO: 1270819 - RNA, 19 nt, Artificial Sequence
  Description of Artificial Sequence: Synthetic oligonucleotide
  modified_base (11)..(11): a, c, u, g, unknown or other
ccaaguuuaanaugcuugu

SEQ ID NO: 1270820 - RNA, 19 nt, Artificial Sequence
  Description of Artificial Sequence: Synthetic oligonucleotide
  modified_base (12)..(12): a, c, u, g, unknown or other
cuacgcauuucnggccaag

SEQ ID NO: 1270821 - RNA, 19 nt, Artificial Sequence
  Description of Artificial Sequence: Synthetic oligonucleotide
ggucaauaucuuuuggaau

SEQ ID NO: 1270822 - RNA, 19 nt, Artificial Sequence
  Description of Artificial Sequence: Synthetic oligonucleotide
cacccauaacgccgagaag

SEQ ID NO: 1270823 - RNA, 19 nt, Artificial Sequence
  Description of Artificial Sequence: Synthetic oligonucleotide
acgguagcagccacuguga

SEQ ID NO: 1270824 - RNA, 19 nt, Artificial Sequence
  Description of Artificial Sequence: Synthetic oligonucleotide
gagaauagugagguauaau

SEQ ID NO: 1270825 - RNA, 19 nt, Artificial Sequence
  Description of Artificial Sequence: Synthetic oligonucleotide
gcauacguuuuaaacagua

SEQ ID NO: 1270826 - RNA, 19 nt, Artificial Sequence
  Description of Artificial Sequence: Synthetic oligonucleotide
ggagcguccucaguuuccc

SEQ ID NO: 1270827 - RNA, 19 nt, Artificial Sequence
  Description of Artificial Sequence: Synthetic oligonucleotide
caguugacgguaguucaga

SEQ ID NO: 1270828 - RNA, 19 nt, Artificial Sequence
  Description of Artificial Sequence: Synthetic oligonucleotide
guauaccuaucacacccau

SEQ ID NO: 1270829 - RNA, 19 nt, Artificial Sequence
  Description of Artificial Sequence: Synthetic oligonucleotide
  modified_base (8)..(8): a, c, u, g, unknown or other
gcauuucnggccaaguuua

SEQ ID NO: 1270830 - RNA, 19 nt, Artificial Sequence
  Description of Artificial Sequence: Synthetic oligonucleotide
ccauucaauuuaagaugac

SEQ ID NO: 1270831 - RNA, 19 nt, Artificial Sequence
  Description of Artificial Sequence: Synthetic oligonucleotide
guagcucaacuguacuuau

SEQ ID NO: 1270832 - RNA, 19 nt, Artificial Sequence
  Description of Artificial Sequence: Synthetic oligonucleotide
auuguucuauaggcagcaa

SEQ ID NO: 1270833 - RNA, 19 nt, Artificial Sequence
  Description of Artificial Sequence: Synthetic oligonucleotide
cucucaaguagcaguacuu

SEQ ID NO: 1270834 - RNA, 19 nt, Artificial Sequence
  Description of Artificial Sequence: Synthetic oligonucleotide
guaacagacuugguuucua

SEQ ID NO: 1270835 - RNA, 19 nt, Artificial Sequence
  Description of Artificial Sequence: Synthetic oligonucleotide
uucaugccacugucagaua

SEQ ID NO: 1270836 - RNA, 19 nt, Artificial Sequence
  Description of Artificial Sequence: Synthetic oligonucleotide
gaagugaguuuaugucuuu

SEQ ID NO: 1270837 - RNA, 19 nt, Artificial Sequence
  Description of Artificial Sequence: Synthetic oligonucleotide
caacccuucaagggcacaa

SEQ ID NO: 1270838 - RNA, 19 nt, Artificial Sequence
  Description of Artificial Sequence: Synthetic oligonucleotide
  modified_base (9)..(9): a, c, u, g, unknown or other
ccauuuucnguagcucaac

SEQ ID NO: 1270839 - RNA, 19 nt, Artificial Sequence
  Description of Artificial Sequence: Synthetic oligonucleotide
ugguaacaaccagcuguau

SEQ ID NO: 1270840 - RNA, 19 nt, Artificial Sequence
  Description of Artificial Sequence: Synthetic oligonucleotide
ccaugaagaguaaccagua

SEQ ID NO: 1270841 - RNA, 19 nt, Artificial Sequence
  Description of Artificial Sequence: Synthetic oligonucleotide
cuuucaagcuugguggcau

SEQ ID NO: 1270842 - RNA, 19 nt, Artificial Sequence
  Description of Artificial Sequence: Synthetic oligonucleotide
caacgagcaagagaauagu

SEQ ID NO: 1270843 - RNA, 19 nt, Artificial Sequence
  Description of Artificial Sequence: Synthetic oligonucleotide
gggaaguaaugcaaugcua

SEQ ID NO: 1270844 - RNA, 19 nt, Artificial Sequence
  Description of Artificial Sequence: Synthetic oligonucleotide
gucgccgggagcguccuca

SEQ ID NO: 1270845 - RNA, 19 nt, Artificial Sequence
  Description of Artificial Sequence: Synthetic oligonucleotide
ccauaacgccgagaagagg

SEQ ID NO: 1270846 - RNA, 19 nt, Artificial Sequence
  Description of Artificial Sequence: Synthetic oligonucleotide
gccaacgagcaagagaaua

SEQ ID NO: 1270847 - RNA, 19 nt, Artificial Sequence
  Description of Artificial Sequence: Synthetic oligonucleotide
uguagacauuaggcauuua

SEQ ID NO: 1270848 - RNA, 19 nt, Artificial Sequence
  Description of Artificial Sequence: Synthetic oligonucleotide
agaggucgugagacggaca

SEQ ID NO: 1270849 - RNA, 19 nt, Artificial Sequence
  Description of Artificial Sequence: Synthetic oligonucleotide
  modified_base (2)..(2): a, c, u, g, unknown or other
cnguagcucaacuguacuu

SEQ ID NO: 1270850 - RNA, 19 nt, Artificial Sequence
  Description of Artificial Sequence: Synthetic oligonucleotide
gucaacccuucaagggcac

SEQ ID NO: 1270851 - RNA, 19 nt, Artificial Sequence
  Description of Artificial Sequence: Synthetic oligonucleotide
ggaagggagguuauucacu

SEQ ID NO: 1270852 - RNA, 19 nt, Artificial Sequence
  Description of Artificial Sequence: Synthetic oligonucleotide
ccacugugaaaucaaccaa

SEQ ID NO: 1270853 - RNA, 19 nt, Artificial Sequence
  Description of Artificial Sequence: Synthetic oligonucleotide
gggagcguccucaguuucc

SEQ ID NO: 1270854 - RNA, 19 nt, Artificial Sequence
  Description of Artificial Sequence: Synthetic oligonucleotide
uggagucgccgggagcguc

SEQ ID NO: 1270855 - RNA, 19 nt, Artificial Sequence
  Description of Artificial Sequence: Synthetic oligonucleotide
acgccgagaagaggucgug

SEQ ID NO: 1270856 - RNA, 19 nt, Artificial Sequence
  Description of Artificial Sequence: Synthetic oligonucleotide
caauaucuuuuggaauggu

SEQ ID NO: 1270857 - RNA, 19 nt, Artificial Sequence
  Description of Artificial Sequence: Synthetic oligonucleotide
aggucgugagacggacacu

SEQ ID NO: 1270858 - RNA, 19 nt, Artificial Sequence
  Description of Artificial Sequence: Synthetic oligonucleotide
ccuucaagggcacaacuau

SEQ ID NO: 1270859 - RNA, 19 nt, Artificial Sequence
  Description of Artificial Sequence: Synthetic oligonucleotide
cacaacgguagcagccacu

SEQ ID NO: 1270860 - RNA, 19 nt, Artificial Sequence
  Description of Artificial Sequence: Synthetic oligonucleotide
agaugacuaugcagcuuuu

SEQ ID NO: 1270861 - RNA, 19 nt, Artificial Sequence
  Description of Artificial Sequence: Synthetic oligonucleotide
cguaacuauguaggaauca

SEQ ID NO: 1270862 - RNA, 19 nt, Artificial Sequence
  Description of Artificial Sequence: Synthetic oligonucleotide
acgguaguucagacacaga

SEQ ID NO: 1270863 - RNA, 19 nt, Artificial Sequence
  Description of Artificial Sequence: Synthetic oligonucleotide
guacuuauucggccugcuu

SEQ ID NO: 1270864 - RNA, 19 nt, Artificial Sequence
  Description of Artificial Sequence: Synthetic oligonucleotide
ccaaauuaacagugagacu

SEQ ID NO: 1270865 - RNA, 19 nt, Artificial Sequence
  Description of Artificial Sequence: Synthetic oligonucleotide
gugugacuuggacauccau

SEQ ID NO: 1270866 - RNA, 19 nt, Artificial Sequence
  Description of Artificial Sequence: Synthetic oligonucleotide
gcaagagaauagugaggua

SEQ ID NO: 1270867 - RNA, 19 nt, Artificial Sequence
  Description of Artificial Sequence: Synthetic oligonucleotide
gaaugguuaguggcuuauu

SEQ ID NO: 1270868 - RNA, 19 nt, Artificial Sequence
  Description of Artificial Sequence: Synthetic oligonucleotide
cacacccauaacgccgaga

SEQ ID NO: 1270869 - RNA, 19 nt, Artificial Sequence
  Description of Artificial Sequence: Synthetic oligonucleotide
ccacggugauuuguguaac

SEQ ID NO: 1270870 - RNA, 19 nt, Artificial Sequence
  Description of Artificial Sequence: Synthetic oligonucleotide
cauuaccagaggggccaca

SEQ ID NO: 1270871 - RNA, 19 nt, Artificial Sequence
  Description of Artificial Sequence: Synthetic oligonucleotide
ggaaugguuaguggcuuau

SEQ ID NO: 1270872 - RNA, 19 nt, Artificial Sequence
  Description of Artificial Sequence: Synthetic oligonucleotide
agccaacgagcaagagaau

SEQ ID NO: 1270873 - RNA, 19 nt, Artificial Sequence
  Description of Artificial Sequence: Synthetic oligonucleotide
  modified_base (9)..(9): a, c, u, g, unknown or other
cgcauuucnggccaaguuu

SEQ ID NO: 1270874 - RNA, 19 nt, Artificial Sequence
  Description of Artificial Sequence: Synthetic oligonucleotide
ggcauacguuuuaaacagu

SEQ ID NO: 1270875 - RNA, 19 nt, Artificial Sequence
  Description of Artificial Sequence: Synthetic oligonucleotide
gucgugagacggacacucu

SEQ ID NO: 1270876 - RNA, 19 nt, Artificial Sequence
  Description of Artificial Sequence: Synthetic oligonucleotide
gcauuaccagaggggccac

SEQ ID NO: 1270877 - RNA, 19 nt, Artificial Sequence
  Description of Artificial Sequence: Synthetic oligonucleotide
ccaguaacuggaguccuau

SEQ ID NO: 1270878 - RNA, 19 nt, Artificial Sequence
  Description of Artificial Sequence: Synthetic oligonucleotide
ccccaggaaugauugccua

SEQ ID NO: 1270879 - RNA, 19 nt, Artificial Sequence
  Description of Artificial Sequence: Synthetic oligonucleotide
cuuauucggccugcuucuu

SEQ ID NO: 1270880 - RNA, 19 nt, Artificial Sequence
  Description of Artificial Sequence: Synthetic oligonucleotide
cccugcaaggauucuuaau

SEQ ID NO: 1270881 - RNA, 19 nt, Artificial Sequence
  Description of Artificial Sequence: Synthetic oligonucleotide
ccuccccuagagcauggcu

SEQ ID NO: 1270882 - RNA, 19 nt, Artificial Sequence
  Description of Artificial Sequence: Synthetic oligonucleotide
ccaucaguugacgguaguu

SEQ ID NO: 1270883 - RNA, 19 nt, Artificial Sequence
  Description of Artificial Sequence: Synthetic oligonucleotide
cccaucaguugacgguagu

SEQ ID NO: 1270884 - RNA, 19 nt, Artificial Sequence
  Description of Artificial Sequence: Synthetic oligonucleotide
cuggagucgccgggagcgu

SEQ ID NO: 1270885 - RNA, 19 nt, Artificial Sequence
  Description of Artificial Sequence: Synthetic oligonucleotide
ggcaagggagagacagcuu

SEQ ID NO: 1270886 - RNA, 19 nt, Artificial Sequence
  Description of Artificial Sequence: Synthetic oligonucleotide
cgccgagaagaggucguga

SEQ ID NO: 1270887 - RNA, 19 nt, Artificial Sequence
  Description of Artificial Sequence: Synthetic oligonucleotide
  modified_base (1)..(1): a, c, u, g, unknown or other
nguagcucaacuguacuua

SEQ ID NO: 1270888 - RNA, 19 nt, Artificial Sequence
  Description of Artificial Sequence: Synthetic oligonucleotide
  modified_base (1)..(1): a, c, u, g, unknown or other
  modified_base (14)..(14): a, c, u, g, unknown or other
nggccaaguuuaanaugcu

SEQ ID NO: 1270889 - RNA, 19 nt, Artificial Sequence
  Description of Artificial Sequence: Synthetic oligonucleotide
uaaacugugaaacaggugu

SEQ ID NO: 1270890 - RNA, 19 nt, Artificial Sequence
  Description of Artificial Sequence: Synthetic oligonucleotide
uaguauauaaauuaaccac

SEQ ID NO: 1270891 - RNA, 19 nt, Artificial Sequence
  Description of Artificial Sequence: Synthetic oligonucleotide
uuauugaguaucaauaaac

SEQ ID NO: 1270892 - RNA, 19 nt, Artificial Sequence
  Description of Artificial Sequence: Synthetic oligonucleotide
aaauaguucugggagacac

SEQ ID NO: 1270893 - RNA, 19 nt, Artificial Sequence
  Description of Artificial Sequence: Synthetic oligonucleotide
agaaagugcgggcacaugc

SEQ ID NO: 1270894 - RNA, 19 nt, Artificial Sequence
  Description of Artificial Sequence: Synthetic oligonucleotide
gagacuauugcauagucug

SEQ ID NO: 1270895 - RNA, 19 nt, Artificial Sequence
  Description of Artificial Sequence: Synthetic oligonucleotide
cugcuuacaauauaaauac

SEQ ID NO: 1270896 - RNA, 19 nt, Artificial Sequence
  Description of Artificial Sequence: Synthetic oligonucleotide
uguaccuugaggaaguugu

SEQ ID NO: 1270897 - RNA, 19 nt, Artificial Sequence
  Description of Artificial Sequence: Synthetic oligonucleotide
uuaugaagcaaggacaucc

SEQ ID NO: 1270898 - RNA, 19 nt, Artificial Sequence
  Description of Artificial Sequence: Synthetic oligonucleotide
aauuaaccacuuuauugag

SEQ ID NO: 1270899 - RNA, 19 nt, Artificial Sequence
  Description of Artificial Sequence: Synthetic oligonucleotide
uauugaguaucaauaaacu

SEQ ID NO: 1270900 - RNA, 19 nt, Artificial Sequence
  Description of Artificial Sequence: Synthetic oligonucleotide
caguauuugcaguugaagg

SEQ ID NO: 1270901 - RNA, 19 nt, Artificial Sequence
  Description of Artificial Sequence: Synthetic oligonucleotide
aaccgguugcacuuggggc

SEQ ID NO: 1270902 - RNA, 19 nt, Artificial Sequence
  Description of Artificial Sequence: Synthetic oligonucleotide
ugcaacucgcuauaguugg

SEQ ID NO: 1270903 - RNA, 19 nt, Artificial Sequence
  Description of Artificial Sequence: Synthetic oligonucleotide
aggagaaugguuucucacc

SEQ ID NO: 1270904 - RNA, 19 nt, Artificial Sequence
  Description of Artificial Sequence: Synthetic oligonucleotide
aaccacuuuauugaguauc

SEQ ID NO: 1270905 - RNA, 19 nt, Artificial Sequence
  Description of Artificial Sequence: Synthetic oligonucleotide
uuaaccacuuuauugagua

SEQ ID NO: 1270906 - RNA, 19 nt, Artificial Sequence
  Description of Artificial Sequence: Synthetic oligonucleotide
aauaccuuuaaaauguaaa

SEQ ID NO: 1270907 - RNA, 19 nt, Artificial Sequence
  Description of Artificial Sequence: Synthetic oligonucleotide
acauauuaacuauacaaaa

SEQ ID NO: 1270908 - RNA, 19 nt, Artificial Sequence
  Description of Artificial Sequence: Synthetic oligonucleotide
gaagagaaggacgacggcg

SEQ ID NO: 1270909 - RNA, 19 nt, Artificial Sequence
  Description of Artificial Sequence: Synthetic oligonucleotide
aagcuucccagccaguggg

SEQ ID NO: 1270910 - RNA, 19 nt, Artificial Sequence
  Description of Artificial Sequence: Synthetic oligonucleotide
acggccauuacucaugguc

SEQ ID NO: 1270911 - RNA, 19 nt, Artificial Sequence
  Description of Artificial Sequence: Synthetic oligonucleotide
aguauauaaauuaaccacu

SEQ ID NO: 1270912 - RNA, 19 nt, Artificial Sequence
  Description of Artificial Sequence: Synthetic oligonucleotide
uauggcucgaaguagcugu

SEQ ID NO: 1270913 - RNA, 19 nt, Artificial Sequence
  Description of Artificial Sequence: Synthetic oligonucleotide
cuauaccucaugaauacug

SEQ ID NO: 1270914 - RNA, 19 nt, Artificial Sequence
  Description of Artificial Sequence: Synthetic oligonucleotide
aauacugagggguggcuca

SEQ ID NO: 1270915 - RNA, 19 nt, Artificial Sequence
  Description of Artificial Sequence: Synthetic oligonucleotide
auugcauagucuguuguac

SEQ ID NO: 1270916 - RNA, 19 nt, Artificial Sequence
  Description of Artificial Sequence: Synthetic oligonucleotide
ucuucaucggacagcgagg

SEQ ID NO: 1270917 - RNA, 19 nt, Artificial Sequence
  Description of Artificial Sequence: Synthetic oligonucleotide
cuauaguugggcuuccggc

SEQ ID NO: 1270918 - RNA, 19 nt, Artificial Sequence
  Description of Artificial Sequence: Synthetic oligonucleotide
aggguugaggaccucgggc

SEQ ID NO: 1270919 - RNA, 19 nt, Artificial Sequence
  Description of Artificial Sequence: Synthetic oligonucleotide
gaugugcaucuucagggcg

SEQ ID NO: 1270920 - RNA, 19 nt, Artificial Sequence
  Description of Artificial Sequence: Synthetic oligonucleotide
gucuucaucggacagcgag

SEQ ID NO: 1270921 - RNA, 19 nt, Artificial Sequence
  Description of Artificial Sequence: Synthetic oligonucleotide
uuaaacugugaaacaggug

SEQ ID NO: 1270922 - RNA, 19 nt, Artificial Sequence
  Description of Artificial Sequence: Synthetic oligonucleotide
aguuaaacugugaaacagg

SEQ ID NO: 1270923 - RNA, 19 nt, Artificial Sequence
  Description of Artificial Sequence: Synthetic oligonucleotide
ugaauguagccgcgggugg

SEQ ID NO: 1270924 - RNA, 19 nt, Artificial Sequence
  Description of Artificial Sequence: Synthetic oligonucleotide
agucuguuguaccuugagg

SEQ ID NO: 1270925 - RNA, 19 nt, Artificial Sequence
  Description of Artificial Sequence: Synthetic oligonucleotide
augaacucuacacacgcgu

SEQ ID NO: 1270926 - RNA, 19 nt, Artificial Sequence
  Description of Artificial Sequence: Synthetic oligonucleotide
uccuaaccaggaaggagcg

SEQ ID NO: 1270927 - RNA, 19 nt, Artificial Sequence
  Description of Artificial Sequence: Synthetic oligonucleotide
acauccuggagaaagugcg

SEQ ID NO: 1270928 - RNA, 19 nt, Artificial Sequence
  Description of Artificial Sequence: Synthetic oligonucleotide
ucaugaauacugaggggug

SEQ ID NO: 1270929 - RNA, 19 nt, Artificial Sequence
  Description of Artificial Sequence: Synthetic oligonucleotide
acaagugacggccauuacu

SEQ ID NO: 1270930 - RNA, 19 nt, Artificial Sequence
  Description of Artificial Sequence: Synthetic oligonucleotide
ucagcgaaggcacgguugc

SEQ ID NO: 1270931 - RNA, 19 nt, Artificial Sequence
  Description of Artificial Sequence: Synthetic oligonucleotide
guauuugcaguugaaggcc

SEQ ID NO: 1270932 - RNA, 19 nt, Artificial Sequence
  Description of Artificial Sequence: Synthetic oligonucleotide
ucggaauccagggaugagg

SEQ ID NO: 1270933 - RNA, 19 nt, Artificial Sequence
  Description of Artificial Sequence: Synthetic oligonucleotide
acguuggccaggccgaagc

SEQ ID NO: 1270934 - RNA, 19 nt, Artificial Sequence
  Description of Artificial Sequence: Synthetic oligonucleotide
aacaagugacggccauuac

SEQ ID NO: 1270935 - RNA, 19 nt, Artificial Sequence
  Description of Artificial Sequence: Synthetic oligonucleotide
aggagcgagucccagauga

SEQ ID NO: 1270936 - RNA, 19 nt, Artificial Sequence
  Description of Artificial Sequence: Synthetic oligonucleotide
ugcuuacaauauaaauacc

SEQ ID NO: 1270937 - RNA, 19 nt, Artificial Sequence
  Description of Artificial Sequence: Synthetic oligonucleotide
aauaguucugggagacacg

SEQ ID NO: 1270938 - RNA, 19 nt, Artificial Sequence
  Description of Artificial Sequence: Synthetic oligonucleotide
ugcauagucuguuguaccu

SEQ ID NO: 1270939 - RNA, 19 nt, Artificial Sequence
  Description of Artificial Sequence: Synthetic oligonucleotide
gagggagacuauugcauag

SEQ ID NO: 1270940 - RNA, 19 nt, Artificial Sequence
  Description of Artificial Sequence: Synthetic oligonucleotide
augaauacugagggguggc

SEQ ID NO: 1270941 - RNA, 19 nt, Artificial Sequence
  Description of Artificial Sequence: Synthetic oligonucleotide
ugggcaguugacccaagcc

SEQ ID NO: 1270942 - RNA, 19 nt, Artificial Sequence
  Description of Artificial Sequence: Synthetic oligonucleotide
ccgaaaauaguucugggag

SEQ ID NO: 1270943 - RNA, 19 nt, Artificial Sequence
  Description of Artificial Sequence: Synthetic oligonucleotide
auaccucaugaauacugag

SEQ ID NO: 1270944 - RNA, 19 nt, Artificial Sequence
  Description of Artificial Sequence: Synthetic oligonucleotide
uugcaaugggagcaggaga

SEQ ID NO: 1270945 - RNA, 19 nt, Artificial Sequence
  Description of Artificial Sequence: Synthetic oligonucleotide
auuacucaugguccccuuc

SEQ ID NO: 1270946 - RNA, 19 nt, Artificial Sequence
  Description of Artificial Sequence: Synthetic oligonucleotide
ugacggccauuacucaugg

SEQ ID NO: 1270947 - RNA, 19 nt, Artificial Sequence
  Description of Artificial Sequence: Synthetic oligonucleotide
aacgcugcuuacaauauaa

SEQ ID NO: 1270948 - RNA, 19 nt, Artificial Sequence
  Description of Artificial Sequence: Synthetic oligonucleotide
uuggcccgaaaauaguucu

SEQ ID NO: 1270949 - RNA, 19 nt, Artificial Sequence
  Description of Artificial Sequence: Synthetic oligonucleotide
agagaaggacgacggcgcc

SEQ ID NO: 1270950 - RNA, 19 nt, Artificial Sequence
  Description of Artificial Sequence: Synthetic oligonucleotide
guggaaaggccaccgagag

SEQ ID NO: 1270951 - RNA, 19 nt, Artificial Sequence
  Description of Artificial Sequence: Synthetic oligonucleotide
cauagucuguuguaccuug

SEQ ID NO: 1270952 - RNA, 19 nt, Artificial Sequence
  Description of Artificial Sequence: Synthetic oligonucleotide
aacucgcuauaguugggcu

SEQ ID NO: 1270953 - RNA, 19 nt, Artificial Sequence
  Description of Artificial Sequence: Synthetic oligonucleotide
uggagggagacuauugcau

SEQ ID NO: 1270954 - RNA, 19 nt, Artificial Sequence
  Description of Artificial Sequence: Synthetic oligonucleotide
ucagacaguuaaacuguga

SEQ ID NO: 1270955 - RNA, 19 nt, Artificial Sequence
  Description of Artificial Sequence: Synthetic oligonucleotide
uguccugaaggguccuugg

SEQ ID NO: 1270956 - RNA, 19 nt, Artificial Sequence
  Description of Artificial Sequence: Synthetic oligonucleotide
uggacauguguccagcaau

SEQ ID NO: 1270957 - RNA, 19 nt, Artificial Sequence
  Description of Artificial Sequence: Synthetic oligonucleotide
cagguuagagcggucagcg

SEQ ID NO: 1270958 - RNA, 19 nt, Artificial Sequence
  Description of Artificial Sequence: Synthetic oligonucleotide
caaaacgcugcuuacaaua

SEQ ID NO: 1270959 - RNA, 19 nt, Artificial Sequence
  Description of Artificial Sequence: Synthetic oligonucleotide
aguccuauggcucgaagua

SEQ ID NO: 1270960 - RNA, 19 nt, Artificial Sequence
  Description of Artificial Sequence: Synthetic oligonucleotide
ucuguuguaccuugaggaa

SEQ ID NO: 1270961 - RNA, 19 nt, Artificial Sequence
  Description of Artificial Sequence: Synthetic oligonucleotide
uaguccuauggcucgaagu

SEQ ID NO: 1270962 - RNA, 19 nt, Artificial Sequence
  Description of Artificial Sequence: Synthetic oligonucleotide
gaugaacucuacacacgcg

SEQ ID NO: 1270963 - RNA, 19 nt, Artificial Sequence
  Description of Artificial Sequence: Synthetic oligonucleotide
uuaguccuauggcucgaag

SEQ ID NO: 1270964 - RNA, 19 nt, Artificial Sequence
  Description of Artificial Sequence: Synthetic oligonucleotide
uauugcauagucuguugua

SEQ ID NO: 1270965 - RNA, 19 nt, Artificial Sequence
  Description of Artificial Sequence: Synthetic oligonucleotide
aggaaccagggccagacgu

SEQ ID NO: 1270966 - RNA, 19 nt, Artificial Sequence
  Description of Artificial Sequence: Synthetic oligonucleotide
ucggacgccuuccuaacca

SEQ ID NO: 1270967 - RNA, 19 nt, Artificial Sequence
  Description of Artificial Sequence: Synthetic oligonucleotide
auaguucugggagacacgu

SEQ ID NO: 1270968 - RNA, 19 nt, Artificial Sequence
  Description of Artificial Sequence: Synthetic oligonucleotide
agacaguuaaacugugaaa

SEQ ID NO: 1270969 - RNA, 19 nt, Artificial Sequence
  Description of Artificial Sequence: Synthetic oligonucleotide
aggagcgcggcaugguggc

SEQ ID NO: 1270970 - RNA, 19 nt, Artificial Sequence
  Description of Artificial Sequence: Synthetic oligonucleotide
cuggaccaaggcuggaugg

SEQ ID NO: 1270971 - RNA, 19 nt, Artificial Sequence
  Description of Artificial Sequence: Synthetic oligonucleotide
gauguugagacaguggggu

SEQ ID NO: 1270972 - RNA, 19 nt, Artificial Sequence
  Description of Artificial Sequence: Synthetic oligonucleotide
ugaacucuacacacgcguc

SEQ ID NO: 1270973 - RNA, 19 nt, Artificial Sequence
  Description of Artificial Sequence: Synthetic oligonucleotide
uguuggcccgaaaauaguu

SEQ ID NO: 1270974 - RNA, 19 nt, Artificial Sequence
  Description of Artificial Sequence: Synthetic oligonucleotide
accgguugcacuuggggca

SEQ ID NO: 1270975 - RNA, 19 nt, Artificial Sequence
  Description of Artificial Sequence: Synthetic oligonucleotide
guugcaaugggagcaggag

SEQ ID NO: 1270976 - RNA, 19 nt, Artificial Sequence
  Description of Artificial Sequence: Synthetic oligonucleotide
caaccgguugcacuugggg

SEQ ID NO: 1270977 - RNA, 19 nt, Artificial Sequence
  Description of Artificial Sequence: Synthetic oligonucleotide
gaaguagggguccccugag

SEQ ID NO: 1270978 - RNA, 19 nt, Artificial Sequence
  Description of Artificial Sequence: Synthetic oligonucleotide
agaaggacgacggcgccgg

SEQ ID NO: 1270979 - RNA, 19 nt, Artificial Sequence
  Description of Artificial Sequence: Synthetic oligonucleotide
gaaagugcgggcacaugcc

SEQ ID NO: 1270980 - RNA, 19 nt, Artificial Sequence
  Description of Artificial Sequence: Synthetic oligonucleotide
cuaccgagagccuggcuag

SEQ ID NO: 1270981 - RNA, 19 nt, Artificial Sequence
  Description of Artificial Sequence: Synthetic oligonucleotide
cugcaacucgcuauaguug

SEQ ID NO: 1270982 - RNA, 19 nt, Artificial Sequence
  Description of Artificial Sequence: Synthetic oligonucleotide
cuuccuaaccaggaaggag

SEQ ID NO: 1270983 - RNA, 19 nt, Artificial Sequence
  Description of Artificial Sequence: Synthetic oligonucleotide
aguugaaggccuuccggga

SEQ ID NO: 1270984 - RNA, 19 nt, Artificial Sequence
  Description of Artificial Sequence: Synthetic oligonucleotide
aacucuacacacgcguccu

SEQ ID NO: 1270985 - RNA, 19 nt, Artificial Sequence
  Description of Artificial Sequence: Synthetic oligonucleotide
aaaacgcugcuuacaauau

SEQ ID NO: 1270986 - RNA, 19 nt, Artificial Sequence
  Description of Artificial Sequence: Synthetic oligonucleotide
acacgcguccugcaacucg

SEQ ID NO: 1270987 - RNA, 19 nt, Artificial Sequence
  Description of Artificial Sequence: Synthetic oligonucleotide
uaacaagugacggccauua

SEQ ID NO: 1270988 - RNA, 19 nt, Artificial Sequence
  Description of Artificial Sequence: Synthetic oligonucleotide
uguaaacaucuuccuccca

SEQ ID NO: 1270989 - RNA, 19 nt, Artificial Sequence
  Description of Artificial Sequence: Synthetic oligonucleotide
ggcuauaccucaugaauac

SEQ ID NO: 1270990 - RNA, 19 nt, Artificial Sequence
  Description of Artificial Sequence: Synthetic oligonucleotide
agcgugggccuccagagca

SEQ ID NO: 1270991 - RNA, 19 nt, Artificial Sequence
  Description of Artificial Sequence: Synthetic oligonucleotide
aucuguggaaaggccaccg

SEQ ID NO: 1270992 - RNA, 19 nt, Artificial Sequence
  Description of Artificial Sequence: Synthetic oligonucleotide
gaaggagacgaaggccucg

SEQ ID NO: 1270993 - RNA, 19 nt, Artificial Sequence
  Description of Artificial Sequence: Synthetic oligonucleotide
accgggucacguaaggucg

SEQ ID NO: 1270994 - RNA, 19 nt, Artificial Sequence
  Description of Artificial Sequence: Synthetic oligonucleotide
gaaggagcgcggcauggug

SEQ ID NO: 1270995 - RNA, 19 nt, Artificial Sequence
  Description of Artificial Sequence: Synthetic oligonucleotide
gaaacaggugucaccagga

SEQ ID NO: 1270996 - RNA, 19 nt, Artificial Sequence
  Description of Artificial Sequence: Synthetic oligonucleotide
aaaauaguucugggagaca

SEQ ID NO: 1270997 - RNA, 19 nt, Artificial Sequence
  Description of Artificial Sequence: Synthetic oligonucleotide
cagacaguuaaacugugaa

SEQ ID NO: 1270998 - RNA, 19 nt, Artificial Sequence
  Description of Artificial Sequence: Synthetic oligonucleotide
gcuauaguugggcuuccgg

SEQ ID NO: 1270999 - RNA, 19 nt, Artificial Sequence
  Description of Artificial Sequence: Synthetic oligonucleotide
auacaaaacgcugcuuaca

SEQ ID NO: 1271000 - RNA, 19 nt, Artificial Sequence
  Description of Artificial Sequence: Synthetic oligonucleotide
gagcgagucccagaugagg

SEQ ID NO: 1271001 - RNA, 19 nt, Artificial Sequence
  Description of Artificial Sequence: Synthetic oligonucleotide
gaguccuguggugaggacc

SEQ ID NO: 1271002 - RNA, 19 nt, Artificial Sequence
  Description of Artificial Sequence: Synthetic oligonucleotide
aaacgcugcuuacaauaua

SEQ ID NO: 1271003 - RNA, 19 nt, Artificial Sequence
  Description of Artificial Sequence: Synthetic oligonucleotide
agugacggccauuacucau

SEQ ID NO: 1271004 - RNA, 19 nt, Artificial Sequence
  Description of Artificial Sequence: Synthetic oligonucleotide
agaggcuauaccucaugaa

SEQ ID NO: 1271005 - RNA, 19 nt, Artificial Sequence
  Description of Artificial Sequence: Synthetic oligonucleotide
auuaaccacuuuauugagu

SEQ ID NO: 1271006 - RNA, 19 nt, Artificial Sequence
  Description of Artificial Sequence: Synthetic oligonucleotide
cucagacaguuaaacugug

SEQ ID NO: 1271007 - RNA, 19 nt, Artificial Sequence
  Description of Artificial Sequence: Synthetic oligonucleotide
gguggagggagacuauugc

SEQ ID NO: 1271008 - RNA, 19 nt, Artificial Sequence
  Description of Artificial Sequence: Synthetic oligonucleotide
guuaaacugugaaacaggu

SEQ ID NO: 1271009 - RNA, 19 nt, Artificial Sequence
  Description of Artificial Sequence: Synthetic oligonucleotide
gccggggcgaccuagguag

SEQ ID NO: 1271010 - RNA, 19 nt, Artificial Sequence
  Description of Artificial Sequence: Synthetic oligonucleotide
cucgcuauaguugggcuuc

SEQ ID NO: 1271011 - RNA, 19 nt, Artificial Sequence
  Description of Artificial Sequence: Synthetic oligonucleotide
acucaugguccccuucuca

SEQ ID NO: 1271012 - RNA, 19 nt, Artificial Sequence
  Description of Artificial Sequence: Synthetic oligonucleotide
ggcaguugacccaagccgg

SEQ ID NO: 1271013 - RNA, 19 nt, Artificial Sequence
  Description of Artificial Sequence: Synthetic oligonucleotide
cagcguguggcuucggaug

SEQ ID NO: 1271014 - RNA, 19 nt, Artificial Sequence
  Description of Artificial Sequence: Synthetic oligonucleotide
gcuuacaauauaaauaccu

SEQ ID NO: 1271015 - RNA, 19 nt, Artificial Sequence
  Description of Artificial Sequence: Synthetic oligonucleotide
cacgcguccugcaacucgc

SEQ ID NO: 1271016 - RNA, 19 nt, Artificial Sequence
  Description of Artificial Sequence: Synthetic oligonucleotide
ucguagggcugcuggaaga

SEQ ID NO: 1271017 - RNA, 19 nt, Artificial Sequence
  Description of Artificial Sequence: Synthetic oligonucleotide
gagaaggacgacggcgccg

SEQ ID NO: 1271018 - RNA, 19 nt, Artificial Sequence
  Description of Artificial Sequence: Synthetic oligonucleotide
aguugacccaagccgggga

SEQ ID NO: 1271019 - RNA, 19 nt, Artificial Sequence
  Description of Artificial Sequence: Synthetic oligonucleotide
acuuggcccuaacaaguga

SEQ ID NO: 1271020 - RNA, 19 nt, Artificial Sequence
  Description of Artificial Sequence: Synthetic oligonucleotide
gaauacugagggguggcuc

SEQ ID NO: 1271021 - RNA, 19 nt, Artificial Sequence
  Description of Artificial Sequence: Synthetic oligonucleotide
caccgggucacguaagguc

SEQ ID NO: 1271022 - RNA, 19 nt, Artificial Sequence
  Description of Artificial Sequence: Synthetic oligonucleotide
uggcccgaaaauaguucug

SEQ ID NO: 1271023 - RNA, 19 nt, Artificial Sequence
  Description of Artificial Sequence: Synthetic oligonucleotide
ucggacagcgaggucagcu

SEQ ID NO: 1271024 - RNA, 19 nt, Artificial Sequence
  Description of Artificial Sequence: Synthetic oligonucleotide
caucugagugugucugaag

SEQ ID NO: 1271025 - RNA, 19 nt, Artificial Sequence
  Description of Artificial Sequence: Synthetic oligonucleotide
cucgaaguagcugugucca

SEQ ID NO: 1271026 - RNA, 19 nt, Artificial Sequence
  Description of Artificial Sequence: Synthetic oligonucleotide
ucgaaguagcuguguccag

SEQ ID NO: 1271027 - RNA, 19 nt, Artificial Sequence
  Description of Artificial Sequence: Synthetic oligonucleotide
gguuagagcggucagcgaa

SEQ ID NO: 1271028 - RNA, 19 nt, Artificial Sequence
  Description of Artificial Sequence: Synthetic oligonucleotide
caucggacagcgaggucag

SEQ ID NO: 1271029 - RNA, 19 nt, Artificial Sequence
  Description of Artificial Sequence: Synthetic oligonucleotide
acacacgcguccugcaacu

SEQ ID NO: 1271030 - RNA, 19 nt, Artificial Sequence
  Description of Artificial Sequence: Synthetic oligonucleotide
aguccuguggugaggacca

SEQ ID NO: 1271031 - RNA, 19 nt, Artificial Sequence
  Description of Artificial Sequence: Synthetic oligonucleotide
ggcacgguugcaaugggag

SEQ ID NO: 1271032 - RNA, 19 nt, Artificial Sequence
  Description of Artificial Sequence: Synthetic oligonucleotide
cacuuggcccuaacaagug

SEQ ID NO: 1271033 - RNA, 19 nt, Artificial Sequence
  Description of Artificial Sequence: Synthetic oligonucleotide
ggcccgaaaauaguucugg

SEQ ID NO: 1271034 - RNA, 19 nt, Artificial Sequence
  Description of Artificial Sequence: Synthetic oligonucleotide
cuuuccgcaggucgcgcag

SEQ ID NO: 1271035 - RNA, 19 nt, Artificial Sequence
  Description of Artificial Sequence: Synthetic oligonucleotide
gacggcgccggggagggcg

SEQ ID NO: 1271036 - RNA, 19 nt, Artificial Sequence
  Description of Artificial Sequence: Synthetic oligonucleotide
aggucgcgcagacgcaggg

SEQ ID NO: 1271037 - RNA, 19 nt, Artificial Sequence
  Description of Artificial Sequence: Synthetic oligonucleotide
guccagaggcuauaccuca

SEQ ID NO: 1271038 - RNA, 19 nt, Artificial Sequence
  Description of Artificial Sequence: Synthetic oligonucleotide
aggccuuuccgcaggucgc

SEQ ID NO: 1271039 - RNA, 19 nt, Artificial Sequence
  Description of Artificial Sequence: Synthetic oligonucleotide
gugaaacaggugucaccag

SEQ ID NO: 1271040 - RNA, 19 nt, Artificial Sequence
  Description of Artificial Sequence: Synthetic oligonucleotide
guccuauggcucgaaguag

SEQ ID NO: 1271041 - RNA, 19 nt, Artificial Sequence
  Description of Artificial Sequence: Synthetic oligonucleotide
gacacguuggccaggccga

SEQ ID NO: 1271042 - RNA, 19 nt, Artificial Sequence
  Description of Artificial Sequence: Synthetic oligonucleotide
gcucgaaguagcugugucc

SEQ ID NO: 1271043 - RNA, 19 nt, Artificial Sequence
  Description of Artificial Sequence: Synthetic oligonucleotide
uaaccacuuuauugaguau

SEQ ID NO: 1271044 - RNA, 19 nt, Artificial Sequence
  Description of Artificial Sequence: Synthetic oligonucleotide
guuggcccgaaaauaguuc

SEQ ID NO: 1271045 - RNA, 19 nt, Artificial Sequence
  Description of Artificial Sequence: Synthetic oligonucleotide
acucgcuauaguugggcuu

SEQ ID NO: 1271046 - RNA, 19 nt, Artificial Sequence
  Description of Artificial Sequence: Synthetic oligonucleotide
gucagcgaaggcacgguug

SEQ ID NO: 1271047 - RNA, 19 nt, Artificial Sequence
  Description of Artificial Sequence: Synthetic oligonucleotide
uuuugccgcugucuucauc

SEQ ID NO: 1271048 - RNA, 19 nt, Artificial Sequence
  Description of Artificial Sequence: Synthetic oligonucleotide
gccuuccuaaccaggaagg

SEQ ID NO: 1271049 - RNA, 19 nt, Artificial Sequence
  Description of Artificial Sequence: Synthetic oligonucleotide
gagcgcggcaugguggccg

SEQ ID NO: 1271050 - RNA, 19 nt, Artificial Sequence
  Description of Artificial Sequence: Synthetic oligonucleotide
gugacggccauuacucaug

SEQ ID NO: 1271051 - RNA, 19 nt, Artificial Sequence
  Description of Artificial Sequence: Synthetic oligonucleotide
gacgccuuccuaaccagga

SEQ ID NO: 1271052 - RNA, 19 nt, Artificial Sequence
  Description of Artificial Sequence: Synthetic oligonucleotide
uagagcggucagcgaaggc

SEQ ID NO: 1271053 - RNA, 19 nt, Artificial Sequence
  Description of Artificial Sequence: Synthetic oligonucleotide
cagaggcuauaccucauga

SEQ ID NO: 1271054 - RNA, 19 nt, Artificial Sequence
  Description of Artificial Sequence: Synthetic oligonucleotide
gacgacggcgccggggagg

SEQ ID NO: 1271055 - RNA, 19 nt, Artificial Sequence
  Description of Artificial Sequence: Synthetic oligonucleotide
gacauguguccagcaauca

SEQ ID NO: 1271056 - RNA, 19 nt, Artificial Sequence
  Description of Artificial Sequence: Synthetic oligonucleotide
aggcuauaccucaugaaua

SEQ ID NO: 1271057 - RNA, 19 nt, Artificial Sequence
  Description of Artificial Sequence: Synthetic oligonucleotide
gugggcacgcagguuagag

SEQ ID NO: 1271058 - RNA, 19 nt, Artificial Sequence
  Description of Artificial Sequence: Synthetic oligonucleotide
accucgggcggagggaugg

SEQ ID NO: 1271059 - RNA, 19 nt, Artificial Sequence
  Description of Artificial Sequence: Synthetic oligonucleotide
uucaagcuucccagccagu

SEQ ID NO: 1271060 - RNA, 19 nt, Artificial Sequence
  Description of Artificial Sequence: Synthetic oligonucleotide
ccucaugaauacugagggg

SEQ ID NO: 1271061 - RNA, 19 nt, Artificial Sequence
  Description of Artificial Sequence: Synthetic oligonucleotide
uggucguagggcugcugga

SEQ ID NO: 1271062 - RNA, 19 nt, Artificial Sequence
  Description of Artificial Sequence: Synthetic oligonucleotide
gucgcgcagacgcagggca

SEQ ID NO: 1271063 - RNA, 19 nt, Artificial Sequence
  Description of Artificial Sequence: Synthetic oligonucleotide
uccagaggcuauaccucau

SEQ ID NO: 1271064 - RNA, 19 nt, Artificial Sequence
  Description of Artificial Sequence: Synthetic oligonucleotide
uuuaguccuauggcucgaa

SEQ ID NO: 1271065 - RNA, 19 nt, Artificial Sequence
  Description of Artificial Sequence: Synthetic oligonucleotide
agggagacuauugcauagu

SEQ ID NO: 1271066 - RNA, 19 nt, Artificial Sequence
  Description of Artificial Sequence: Synthetic oligonucleotide
accuagguagccgggguca

SEQ ID NO: 1271067 - RNA, 19 nt, Artificial Sequence
  Description of Artificial Sequence: Synthetic oligonucleotide
gcgaggucagcucugccgc

SEQ ID NO: 1271068 - RNA, 19 nt, Artificial Sequence
  Description of Artificial Sequence: Synthetic oligonucleotide
ucgcgcagacgcagggcag

SEQ ID NO: 1271069 - RNA, 19 nt, Artificial Sequence
  Description of Artificial Sequence: Synthetic oligonucleotide
gaccuagguagccgggguc

SEQ ID NO: 1271070 - RNA, 19 nt, Artificial Sequence
  Description of Artificial Sequence: Synthetic oligonucleotide
gaauguagccgcgggugga

SEQ ID NO: 1271071 - RNA, 19 nt, Artificial Sequence
  Description of Artificial Sequence: Synthetic oligonucleotide
gccugaauguagccgcggg

SEQ ID NO: 1271072 - RNA, 19 nt, Artificial Sequence
  Description of Artificial Sequence: Synthetic oligonucleotide
gguggcugggagcuuuugc

SEQ ID NO: 1271073 - RNA, 19 nt, Artificial Sequence
  Description of Artificial Sequence: Synthetic oligonucleotide
acucuacacacgcguccug

SEQ ID NO: 1271074 - RNA, 19 nt, Artificial Sequence
  Description of Artificial Sequence: Synthetic oligonucleotide
uccuguggugaggaccagc

SEQ ID NO: 1271075 - RNA, 19 nt, Artificial Sequence
  Description of Artificial Sequence: Synthetic oligonucleotide
gggagacuauugcauaguc

SEQ ID NO: 1271076 - RNA, 19 nt, Artificial Sequence
  Description of Artificial Sequence: Synthetic oligonucleotide
aagcaaccgguugcacuug

SEQ ID NO: 1271077 - RNA, 19 nt, Artificial Sequence
  Description of Artificial Sequence: Synthetic oligonucleotide
gagaaagugcgggcacaug

SEQ ID NO: 1271078 - RNA, 19 nt, Artificial Sequence
  Description of Artificial Sequence: Synthetic oligonucleotide
caguugacccaagccgggg

SEQ ID NO: 1271079 - RNA, 19 nt, Artificial Sequence
  Description of Artificial Sequence: Synthetic oligonucleotide
cggccauuacucauggucc

SEQ ID NO: 1271080 - RNA, 19 nt, Artificial Sequence
  Description of Artificial Sequence: Synthetic oligonucleotide
aggccgaaguggaagagaa

SEQ ID NO: 1271081 - RNA, 19 nt, Artificial Sequence
  Description of Artificial Sequence: Synthetic oligonucleotide
ucccgcggcgggagggugg

SEQ ID NO: 1271082 - RNA, 19 nt, Artificial Sequence
  Description of Artificial Sequence: Synthetic oligonucleotide
gcagacgcagggcagcgug

SEQ ID NO: 1271083 - RNA, 19 nt, Artificial Sequence
  Description of Artificial Sequence: Synthetic oligonucleotide
gucggacgccuuccuaacc

SEQ ID NO: 1271084 - RNA, 19 nt, Artificial Sequence
  Description of Artificial Sequence: Synthetic oligonucleotide
ggaaccagggagaugcaga

SEQ ID NO: 1271085 - RNA, 19 nt, Artificial Sequence
  Description of Artificial Sequence: Synthetic oligonucleotide
caggaaccagggccagacg

SEQ ID NO: 1271086 - RNA, 19 nt, Artificial Sequence
  Description of Artificial Sequence: Synthetic oligonucleotide
uucaucggacagcgagguc

SEQ ID NO: 1271087 - RNA, 19 nt, Artificial Sequence
  Description of Artificial Sequence: Synthetic oligonucleotide
cgaagcaccccacuuggcc

SEQ ID NO: 1271088 - RNA, 19 nt, Artificial Sequence
  Description of Artificial Sequence: Synthetic oligonucleotide
agcgcggcaugguggccgg

SEQ ID NO: 1271089 - RNA, 19 nt, Artificial Sequence
  Description of Artificial Sequence: Synthetic oligonucleotide
gaggccgaaguggaagaga

SEQ ID NO: 1271090 - RNA, 19 nt, Artificial Sequence
  Description of Artificial Sequence: Synthetic oligonucleotide
caagcaaccgguugcacuu

SEQ ID NO: 1271091 - RNA, 19 nt, Artificial Sequence
  Description of Artificial Sequence: Synthetic oligonucleotide
acgcagguuagagcgguca

SEQ ID NO: 1271092 - RNA, 19 nt, Artificial Sequence
  Description of Artificial Sequence: Synthetic oligonucleotide
gagggauggcggccagcag

SEQ ID NO: 1271093 - RNA, 19 nt, Artificial Sequence
  Description of Artificial Sequence: Synthetic oligonucleotide
auagucuguuguaccuuga

SEQ ID NO: 1271094 - RNA, 19 nt, Artificial Sequence
  Description of Artificial Sequence: Synthetic oligonucleotide
ggccgaagcaccccacuug

SEQ ID NO: 1271095 - RNA, 19 nt, Artificial Sequence
  Description of Artificial Sequence: Synthetic oligonucleotide
augccuggcacugguauuu

SEQ ID NO: 1271096 - RNA, 19 nt, Artificial Sequence
  Description of Artificial Sequence: Synthetic oligonucleotide
cccgaaaauaguucuggga

SEQ ID NO: 1271097 - RNA, 19 nt, Artificial Sequence
  Description of Artificial Sequence: Synthetic oligonucleotide
gggcgaccuagguagccgg

SEQ ID NO: 1271098 - RNA, 19 nt, Artificial Sequence
  Description of Artificial Sequence: Synthetic oligonucleotide
gggguccuuggcuaccgag

SEQ ID NO: 1271099 - RNA, 19 nt, Artificial Sequence
  Description of Artificial Sequence: Synthetic oligonucleotide
cucggaauccagggaugag

SEQ ID NO: 1271100 - RNA, 19 nt, Artificial Sequence
  Description of Artificial Sequence: Synthetic oligonucleotide
cagggcagcguguggcuuc

SEQ ID NO: 1271101 - RNA, 19 nt, Artificial Sequence
  Description of Artificial Sequence: Synthetic oligonucleotide
cacaucugagugugucuga

SEQ ID NO: 1271102 - RNA, 19 nt, Artificial Sequence
  Description of Artificial Sequence: Synthetic oligonucleotide
uaguucugggagacacguu

SEQ ID NO: 1271103 - RNA, 19 nt, Artificial Sequence
  Description of Artificial Sequence: Synthetic oligonucleotide
ggagacgaaggccucggaa

SEQ ID NO: 1271104 - RNA, 19 nt, Artificial Sequence
  Description of Artificial Sequence: Synthetic oligonucleotide
cuagguagccggggucacc

SEQ ID NO: 1271105 - RNA, 19 nt, Artificial Sequence
  Description of Artificial Sequence: Synthetic oligonucleotide
uccgcaggucgcgcagacg

SEQ ID NO: 1271106 - RNA, 19 nt, Artificial Sequence
  Description of Artificial Sequence: Synthetic oligonucleotide
ggcucgaaguagcuguguc

SEQ ID NO: 1271107 - RNA, 19 nt, Artificial Sequence
  Description of Artificial Sequence: Synthetic oligonucleotide
gcacgguugcaaugggagc

SEQ ID NO: 1271108 - RNA, 19 nt, Artificial Sequence
  Description of Artificial Sequence: Synthetic oligonucleotide
gaaggacgacggcgccggg

SEQ ID NO: 1271109 - RNA, 19 nt, Artificial Sequence
  Description of Artificial Sequence: Synthetic oligonucleotide
ccgucaucuguggaaaggc

SEQ ID NO: 1271110 - RNA, 19 nt, Artificial Sequence
  Description of Artificial Sequence: Synthetic oligonucleotide
cauccgucaucuguggaaa

SEQ ID NO: 1271111 - RNA, 19 nt, Artificial Sequence
  Description of Artificial Sequence: Synthetic oligonucleotide
ggagggagacuauugcaua

SEQ ID NO: 1271112 - RNA, 19 nt, Artificial Sequence
  Description of Artificial Sequence: Synthetic oligonucleotide
aggccugaauguagccgcg

SEQ ID NO: 1271113 - RNA, 19 nt, Artificial Sequence
  Description of Artificial Sequence: Synthetic oligonucleotide
gggaggguggcccaagcaa

SEQ ID NO: 1271114 - RNA, 19 nt, Artificial Sequence
  Description of Artificial Sequence: Synthetic oligonucleotide
cucgggcggagggauggcg

SEQ ID NO: 1271115 - RNA, 19 nt, Artificial Sequence
  Description of Artificial Sequence: Synthetic oligonucleotide
guagggcugcuggaagaug

SEQ ID NO: 1271116 - RNA, 19 nt, Artificial Sequence
  Description of Artificial Sequence: Synthetic oligonucleotide
guaccuugaggaaguuguc

SEQ ID NO: 1271117 - RNA, 19 nt, Artificial Sequence
  Description of Artificial Sequence: Synthetic oligonucleotide
gcaguugacccaagccggg

SEQ ID NO: 1271118 - RNA, 19 nt, Artificial Sequence
  Description of Artificial Sequence: Synthetic oligonucleotide
ucgcuauaguugggcuucc

SEQ ID NO: 1271119 - RNA, 19 nt, Artificial Sequence
  Description of Artificial Sequence: Synthetic oligonucleotide
aggagacgaaggccucgga

SEQ ID NO: 1271120 - RNA, 19 nt, Artificial Sequence
  Description of Artificial Sequence: Synthetic oligonucleotide
aggccgaagcaccccacuu

SEQ ID NO: 1271121 - RNA, 19 nt, Artificial Sequence
  Description of Artificial Sequence: Synthetic oligonucleotide
aaggccaccgagagagcua

SEQ ID NO: 1271122 - RNA, 19 nt, Artificial Sequence
  Description of Artificial Sequence: Synthetic oligonucleotide
gggaaccagggagaugcag

SEQ ID NO: 1271123 - RNA, 19 nt, Artificial Sequence
  Description of Artificial Sequence: Synthetic oligonucleotide
cuuuaguccuauggcucga

SEQ ID NO: 1271124 - RNA, 19 nt, Artificial Sequence
  Description of Artificial Sequence: Synthetic oligonucleotide
cucucccgcggcgggaggg

SEQ ID NO: 1271125 - RNA, 19 nt, Artificial Sequence
  Description of Artificial Sequence: Synthetic oligonucleotide
gagggaacccaggcaccug

SEQ ID NO: 1271126 - RNA, 19 nt, Artificial Sequence
  Description of Artificial Sequence: Synthetic oligonucleotide
ggucggacgccuuccuaac

SEQ ID NO: 1271127 - RNA, 19 nt, Artificial Sequence
  Description of Artificial Sequence: Synthetic oligonucleotide
gcaacucgcuauaguuggg

SEQ ID NO: 1271128 - RNA, 19 nt, Artificial Sequence
  Description of Artificial Sequence: Synthetic oligonucleotide
ggacgccuuccuaaccagg

SEQ ID NO: 1271129 - RNA, 19 nt, Artificial Sequence
  Description of Artificial Sequence: Synthetic oligonucleotide
gccgcugucuucaucggac

SEQ ID NO: 1271130 - RNA, 19 nt, Artificial Sequence
  Description of Artificial Sequence: Synthetic oligonucleotide
cuucaucggacagcgaggu

SEQ ID NO: 1271131 - RNA, 19 nt, Artificial Sequence
  Description of Artificial Sequence: Synthetic oligonucleotide
cuacacacgcguccugcaa

SEQ ID NO: 1271132 - RNA, 19 nt, Artificial Sequence
  Description of Artificial Sequence: Synthetic oligonucleotide
aucggacagcgaggucagc

SEQ ID NO: 1271133 - RNA, 19 nt, Artificial Sequence
  Description of Artificial Sequence: Synthetic oligonucleotide
uaccgagagccuggcuagc

SEQ ID NO: 1271134 - RNA, 19 nt, Artificial Sequence
  Description of Artificial Sequence: Synthetic oligonucleotide
gggucggacgccuuccuaa

SEQ ID NO: 1271135 - RNA, 19 nt, Artificial Sequence
  Description of Artificial Sequence: Synthetic oligonucleotide
ccagaggcuauaccucaug

SEQ ID NO: 1271136 - RNA, 19 nt, Artificial Sequence
  Description of Artificial Sequence: Synthetic oligonucleotide
gguugcaaugggagcagga

SEQ ID NO: 1271137 - RNA, 19 nt, Artificial Sequence
  Description of Artificial Sequence: Synthetic oligonucleotide
ggaaguuguccugaagggu

SEQ ID NO: 1271138 - RNA, 19 nt, Artificial Sequence
  Description of Artificial Sequence: Synthetic oligonucleotide
gcgaccuagguagccgggg

SEQ ID NO: 1271139 - RNA, 19 nt, Artificial Sequence
  Description of Artificial Sequence: Synthetic oligonucleotide
ggagacuauugcauagucu

SEQ ID NO: 1271140 - RNA, 19 nt, Artificial Sequence
  Description of Artificial Sequence: Synthetic oligonucleotide
caggagcgagucccagaug

SEQ ID NO: 1271141 - RNA, 19 nt, Artificial Sequence
  Description of Artificial Sequence: Synthetic oligonucleotide
gccauuacucauggucccc

SEQ ID NO: 1271142 - RNA, 19 nt, Artificial Sequence
  Description of Artificial Sequence: Synthetic oligonucleotide
ccaagccggggaaggagac

SEQ ID NO: 1271143 - RNA, 19 nt, Artificial Sequence
  Description of Artificial Sequence: Synthetic oligonucleotide
ccaccgagagagcuaagca

SEQ ID NO: 1271144 - RNA, 19 nt, Artificial Sequence
  Description of Artificial Sequence: Synthetic oligonucleotide
ggagcgagucccagaugag

SEQ ID NO: 1271145 - RNA, 19 nt, Artificial Sequence
  Description of Artificial Sequence: Synthetic oligonucleotide
acgcugcuuacaauauaaa

SEQ ID NO: 1271146 - RNA, 19 nt, Artificial Sequence
  Description of Artificial Sequence: Synthetic oligonucleotide
ggcacgcagguuagagcgg

SEQ ID NO: 1271147 - RNA, 19 nt, Artificial Sequence
  Description of Artificial Sequence: Synthetic oligonucleotide
aggcacgguugcaauggga

SEQ ID NO: 1271148 - RNA, 19 nt, Artificial Sequence
  Description of Artificial Sequence: Synthetic oligonucleotide
gcaaccgguugcacuuggg

SEQ ID NO: 1271149 - RNA, 19 nt, Artificial Sequence
  Description of Artificial Sequence: Synthetic oligonucleotide
ccugcaacucgcuauaguu

SEQ ID NO: 1271150 - RNA, 19 nt, Artificial Sequence
  Description of Artificial Sequence: Synthetic oligonucleotide
gggucaccgggucacguaa

SEQ ID NO: 1271151 - RNA, 19 nt, Artificial Sequence
  Description of Artificial Sequence: Synthetic oligonucleotide
caccaggagcgagucccag

SEQ ID NO: 1271152 - RNA, 19 nt, Artificial Sequence
  Description of Artificial Sequence: Synthetic oligonucleotide
cacguuggccaggccgaag

SEQ ID NO: 1271153 - RNA, 19 nt, Artificial Sequence
  Description of Artificial Sequence: Synthetic oligonucleotide
ccccuucucagacaguuaa

SEQ ID NO: 1271154 - RNA, 19 nt, Artificial Sequence
  Description of Artificial Sequence: Synthetic oligonucleotide
cacgcagguuagagcgguc

SEQ ID NO: 1271155 - RNA, 19 nt, Artificial Sequence
  Description of Artificial Sequence: Synthetic oligonucleotide
ggguccuuggcuaccgaga

SEQ ID NO: 1271156 - RNA, 19 nt, Artificial Sequence
  Description of Artificial Sequence: Synthetic oligonucleotide
ccgggucacguaaggucgg

SEQ ID NO: 1271157 - RNA, 19 nt, Artificial Sequence
  Description of Artificial Sequence: Synthetic oligonucleotide
ggcgaccuagguagccggg

SEQ ID NO: 1271158 - RNA, 19 nt, Artificial Sequence
  Description of Artificial Sequence: Synthetic oligonucleotide
ccaccuguuggcccgaaaa

SEQ ID NO: 1271159 - RNA, 19 nt, Artificial Sequence
  Description of Artificial Sequence: Synthetic oligonucleotide
guagccgcggguggaggga

SEQ ID NO: 1271160 - RNA, 19 nt, Artificial Sequence
  Description of Artificial Sequence: Synthetic oligonucleotide
ggucaccgggucacguaag

SEQ ID NO: 1271161 - RNA, 19 nt, Artificial Sequence
  Description of Artificial Sequence: Synthetic oligonucleotide
gggagacacguuggccagg

SEQ ID NO: 1271162 - RNA, 19 nt, Artificial Sequence
  Description of Artificial Sequence: Synthetic oligonucleotide
ggccucggaauccagggau

SEQ ID NO: 1271163 - RNA, 19 nt, Artificial Sequence
  Description of Artificial Sequence: Synthetic oligonucleotide
ggacagcgaggucagcucu

SEQ ID NO: 1271164 - RNA, 19 nt, Artificial Sequence
  Description of Artificial Sequence: Synthetic oligonucleotide
ggcagcguguggcuucgga

SEQ ID NO: 1271165 - RNA, 19 nt, Artificial Sequence
  Description of Artificial Sequence: Synthetic oligonucleotide
ccaagcaaccgguugcacu

SEQ ID NO: 1271166 - RNA, 19 nt, Artificial Sequence
  Description of Artificial Sequence: Synthetic oligonucleotide
caccccacuuggcccuaac

SEQ ID NO: 1271167 - RNA, 19 nt, Artificial Sequence
  Description of Artificial Sequence: Synthetic oligonucleotide
ggucguagggcugcuggaa

SEQ ID NO: 1271168 - RNA, 19 nt, Artificial Sequence
  Description of Artificial Sequence: Synthetic oligonucleotide
agggguccccugagugggg

SEQ ID NO: 1271169 - RNA, 19 nt, Artificial Sequence
  Description of Artificial Sequence: Synthetic oligonucleotide
ccgagagagcuaagcagga

SEQ ID NO: 1271170 - RNA, 19 nt, Artificial Sequence
  Description of Artificial Sequence: Synthetic oligonucleotide
ccgaagcaccccacuuggc

SEQ ID NO: 1271171 - RNA, 19 nt, Artificial Sequence
  Description of Artificial Sequence: Synthetic oligonucleotide
caguggggucagcgugggc

SEQ ID NO: 1271172 - RNA, 19 nt, Artificial Sequence
  Description of Artificial Sequence: Synthetic oligonucleotide
cacacgcguccugcaacuc

SEQ ID NO: 1271173 - RNA, 19 nt, Artificial Sequence
  Description of Artificial Sequence: Synthetic oligonucleotide
agccagacuccugguguuu

SEQ ID NO: 1271174 - RNA, 19 nt, Artificial Sequence
  Description of Artificial Sequence: Synthetic oligonucleotide
acggccuggagaaggccuu

SEQ ID NO: 1271175 - RNA, 19 nt, Artificial Sequence
  Description of Artificial Sequence: Synthetic oligonucleotide
ucacccgcugaggccugaa

SEQ ID NO: 1271176 - RNA, 19 nt, Artificial Sequence
  Description of Artificial Sequence: Synthetic oligonucleotide
gggaacccaggcaccuggc

SEQ ID NO: 1271177 - RNA, 19 nt, Artificial Sequence
  Description of Artificial Sequence: Synthetic oligonucleotide
gagugcggacguggcccug

SEQ ID NO: 1271178 - RNA, 19 nt, Artificial Sequence
  Description of Artificial Sequence: Synthetic oligonucleotide
gcguccugcaacucgcuau

SEQ ID NO: 1271179 - RNA, 19 nt, Artificial Sequence
  Description of Artificial Sequence: Synthetic oligonucleotide
cggacagcgaggucagcuc

SEQ ID NO: 1271180 - RNA, 19 nt, Artificial Sequence
  Description of Artificial Sequence: Synthetic oligonucleotide
cuaacaagugacggccauu

SEQ ID NO: 1271181 - RNA, 19 nt, Artificial Sequence
  Description of Artificial Sequence: Synthetic oligonucleotide
gcuauaccucaugaauacu

SEQ ID NO: 1271182 - RNA, 19 nt, Artificial Sequence
  Description of Artificial Sequence: Synthetic oligonucleotide
guagccggggucaccgggu

SEQ ID NO: 1271183 - RNA, 19 nt, Artificial Sequence
  Description of Artificial Sequence: Synthetic oligonucleotide
cauuacucaugguccccuu

SEQ ID NO: 1271184 - RNA, 19 nt, Artificial Sequence
  Description of Artificial Sequence: Synthetic oligonucleotide
cccgcugaggccugaaugu

SEQ ID NO: 1271185 - RNA, 19 nt, Artificial Sequence
  Description of Artificial Sequence: Synthetic oligonucleotide
acacguuggccaggccgaa

SEQ ID NO: 1271186 - RNA, 19 nt, Artificial Sequence
  Description of Artificial Sequence: Synthetic oligonucleotide
ccuuccuaaccaggaagga

SEQ ID NO: 1271187 - RNA, 19 nt, Artificial Sequence
  Description of Artificial Sequence: Synthetic oligonucleotide
ggacgacggcgccggggag

SEQ ID NO: 1271188 - RNA, 19 nt, Artificial Sequence
  Description of Artificial Sequence: Synthetic oligonucleotide
gcagcguguggcuucggau

SEQ ID NO: 1271189 - RNA, 19 nt, Artificial Sequence
  Description of Artificial Sequence: Synthetic oligonucleotide
cgcugcuuacaauauaaau

SEQ ID NO: 1271190 - RNA, 19 nt, Artificial Sequence
  Description of Artificial Sequence: Synthetic oligonucleotide
gugcgggcacaugccuggc

SEQ ID NO: 1271191 - RNA, 19 nt, Artificial Sequence
  Description of Artificial Sequence: Synthetic oligonucleotide
ccucggaauccagggauga

SEQ ID NO: 1271192 - RNA, 19 nt, Artificial Sequence
  Description of Artificial Sequence: Synthetic oligonucleotide
gcagcgaggcugcaggguu

SEQ ID NO: 1271193 - RNA, 19 nt, Artificial Sequence
  Description of Artificial Sequence: Synthetic oligonucleotide
cagacgcagggcagcgugu

SEQ ID NO: 1271194 - RNA, 19 nt, Artificial Sequence
  Description of Artificial Sequence: Synthetic oligonucleotide
gcccaagcaaccgguugca

SEQ ID NO: 1271195 - RNA, 19 nt, Artificial Sequence
  Description of Artificial Sequence: Synthetic oligonucleotide
gcgagucccagaugagggu

SEQ ID NO: 1271196 - RNA, 19 nt, Artificial Sequence
  Description of Artificial Sequence: Synthetic oligonucleotide
ggggucaccgggucacgua

SEQ ID NO: 1271197 - RNA, 19 nt, Artificial Sequence
  Description of Artificial Sequence: Synthetic oligonucleotide
ccugaauguagccgcgggu

SEQ ID NO: 1271198 - RNA, 19 nt, Artificial Sequence
  Description of Artificial Sequence: Synthetic oligonucleotide
gcucucccgcggcgggagg

SEQ ID NO: 1271199 - RNA, 19 nt, Artificial Sequence
  Description of Artificial Sequence: Synthetic oligonucleotide
ccgguugcacuuggggcac

SEQ ID NO: 1271200 - RNA, 19 nt, Artificial Sequence
  Description of Artificial Sequence: Synthetic oligonucleotide
acgcguccugcaacucgcu

SEQ ID NO: 1271201 - RNA, 19 nt, Artificial Sequence
  Description of Artificial Sequence: Synthetic oligonucleotide
ccuaacaagugacggccau

SEQ ID NO: 1271202 - RNA, 19 nt, Artificial Sequence
  Description of Artificial Sequence: Synthetic oligonucleotide
ggcgggaggguggcccaag

SEQ ID NO: 1271203 - RNA, 19 nt, Artificial Sequence
  Description of Artificial Sequence: Synthetic oligonucleotide
cgcuauaguugggcuuccg

SEQ ID NO: 1271204 - RNA, 19 nt, Artificial Sequence
  Description of Artificial Sequence: Synthetic oligonucleotide
cagcgaaggcacgguugca

SEQ ID NO: 1271205 - RNA, 19 nt, Artificial Sequence
  Description of Artificial Sequence: Synthetic oligonucleotide
guuguaccuugaggaaguu

SEQ ID NO: 1271206 - RNA, 19 nt, Artificial Sequence
  Description of Artificial Sequence: Synthetic oligonucleotide
gcacgcagguuagagcggu

SEQ ID NO: 1271207 - RNA, 19 nt, Artificial Sequence
  Description of Artificial Sequence: Synthetic oligonucleotide
cccaagcaaccgguugcac

SEQ ID NO: 1271208 - RNA, 19 nt, Artificial Sequence
  Description of Artificial Sequence: Synthetic oligonucleotide
ggaaggagcgcggcauggu

SEQ ID NO: 1271209 - RNA, 19 nt, Artificial Sequence
  Description of Artificial Sequence: Synthetic oligonucleotide
gcauagucuguuguaccuu

SEQ ID NO: 1271210 - RNA, 19 nt, Artificial Sequence
  Description of Artificial Sequence: Synthetic oligonucleotide
gccgcggguggagggagac

SEQ ID NO: 1271211 - RNA, 19 nt, Artificial Sequence
  Description of Artificial Sequence: Synthetic oligonucleotide
ggagcgcggcaugguggcc

SEQ ID NO: 1271212 - RNA, 19 nt, Artificial Sequence
  Description of Artificial Sequence: Synthetic oligonucleotide
ggccggggcgaccuaggua

SEQ ID NO: 1271213 - RNA, 19 nt, Artificial Sequence
  Description of Artificial Sequence: Synthetic oligonucleotide
caggggcaccuggacaugu

SEQ ID NO: 1271214 - RNA, 19 nt, Artificial Sequence
  Description of Artificial Sequence: Synthetic oligonucleotide
ccauuacucaugguccccu

SEQ ID NO: 1271215 - RNA, 19 nt, Artificial Sequence
  Description of Artificial Sequence: Synthetic oligonucleotide
gccagacuccugguguuua

SEQ ID NO: 1271216 - RNA, 19 nt, Artificial Sequence
  Description of Artificial Sequence: Synthetic oligonucleotide
ccggggcgaccuagguagc

SEQ ID NO: 1271217 - RNA, 19 nt, Artificial Sequence
  Description of Artificial Sequence: Synthetic oligonucleotide
ggggucggacgccuuccua

SEQ ID NO: 1271218 - RNA, 19 nt, Artificial Sequence
  Description of Artificial Sequence: Synthetic oligonucleotide
agccggggaaggagacgaa

SEQ ID NO: 1271219 - RNA, 19 nt, Artificial Sequence
  Description of Artificial Sequence: Synthetic oligonucleotide
ggugggcacgcagguuaga

SEQ ID NO: 1271220 - RNA, 19 nt, Artificial Sequence
  Description of Artificial Sequence: Synthetic oligonucleotide
ggcagcgaggcugcagggu

SEQ ID NO: 1271221 - RNA, 19 nt, Artificial Sequence
  Description of Artificial Sequence: Synthetic oligonucleotide
cggggcgaccuagguagcc

SEQ ID NO: 1271222 - RNA, 19 nt, Artificial Sequence
  Description of Artificial Sequence: Synthetic oligonucleotide
gccaccuguuggcccgaaa

SEQ ID NO: 1271223 - RNA, 19 nt, Artificial Sequence
  Description of Artificial Sequence: Synthetic oligonucleotide
cgcggguggagggagacua

SEQ ID NO: 1271224 - RNA, 19 nt, Artificial Sequence
  Description of Artificial Sequence: Synthetic oligonucleotide
ggguuggcuuuaguccuau

SEQ ID NO: 1271225 - RNA, 19 nt, Artificial Sequence
  Description of Artificial Sequence: Synthetic oligonucleotide
ccucgggcggagggauggc

SEQ ID NO: 1271226 - RNA, 19 nt, Artificial Sequence
  Description of Artificial Sequence: Synthetic oligonucleotide
ccggggucaccgggucacg

SEQ ID NO: 1271227 - RNA, 19 nt, Artificial Sequence
  Description of Artificial Sequence: Synthetic oligonucleotide
cacccgcugaggccugaau

SEQ ID NO: 1271228 - RNA, 19 nt, Artificial Sequence
  Description of Artificial Sequence: Synthetic oligonucleotide
cgaccuagguagccggggu

SEQ ID NO: 1271229 - RNA, 19 nt, Artificial Sequence
  Description of Artificial Sequence: Synthetic oligonucleotide
gggcucucccgcggcggga

SEQ ID NO: 1271230 - RNA, 19 nt, Artificial Sequence
  Description of Artificial Sequence: Synthetic oligonucleotide
ccuuggcuaccgagagccu

SEQ ID NO: 1271231 - RNA, 19 nt, Artificial Sequence
  Description of Artificial Sequence: Synthetic oligonucleotide
gcgcggcaugguggccggg

SEQ ID NO: 1271232 - RNA, 19 nt, Artificial Sequence
  Description of Artificial Sequence: Synthetic oligonucleotide
cgcguccugcaacucgcua

SEQ ID NO: 1271233 - RNA, 19 nt, Artificial Sequence
  Description of Artificial Sequence: Synthetic oligonucleotide
ggcuucggaugugcaucuu

SEQ ID NO: 1271234 - RNA, 19 nt, Artificial Sequence
  Description of Artificial Sequence: Synthetic oligonucleotide
gcggguggagggagacuau

SEQ ID NO: 1271235 - RNA, 19 nt, Artificial Sequence
  Description of Artificial Sequence: Synthetic oligonucleotide
aacccuaagccucuuaucc

SEQ ID NO: 1271236 - RNA, 19 nt, Artificial Sequence
  Description of Artificial Sequence: Synthetic oligonucleotide
uacauagagauccagaaca

SEQ ID NO: 1271237 - RNA, 19 nt, Artificial Sequence
  Description of Artificial Sequence: Synthetic oligonucleotide
ugagcuguaacccuaagcc

SEQ ID NO: 1271238 - RNA, 19 nt, Artificial Sequence
  Description of Artificial Sequence: Synthetic oligonucleotide
aguacuaaagccuuacagg

SEQ ID NO: 1271239 - RNA, 19 nt, Artificial Sequence
  Description of Artificial Sequence: Synthetic oligonucleotide
auuacaguaaauucacugg

SEQ ID NO: 1271240 - RNA, 19 nt, Artificial Sequence
  Description of Artificial Sequence: Synthetic oligonucleotide
aaccuaaagaaacaaaacu

SEQ ID NO: 1271241 - RNA, 19 nt, Artificial Sequence
  Description of Artificial Sequence: Synthetic oligonucleotide
aaaccuaagaauuuauaga

SEQ ID NO: 1271242 - RNA, 19 nt, Artificial Sequence
  Description of Artificial Sequence: Synthetic oligonucleotide
gaugguaucaucucuaaac

SEQ ID NO: 1271243 - RNA, 19 nt, Artificial Sequence
  Description of Artificial Sequence: Synthetic oligonucleotide
uguagauuaauaauaguaa

SEQ ID NO: 1271244 - RNA, 19 nt, Artificial Sequence
  Description of Artificial Sequence: Synthetic oligonucleotide
aauccuuacugauaacagg

SEQ ID NO: 1271245 - RNA, 19 nt, Artificial Sequence
  Description of Artificial Sequence: Synthetic oligonucleotide
aaccuaagaauuuauagaa

SEQ ID NO: 1271246 - RNA, 19 nt, Artificial Sequence
  Description of Artificial Sequence: Synthetic oligonucleotide
aaaagauggggacaugaag

SEQ ID NO: 1271247 - RNA, 19 nt, Artificial Sequence
  Description of Artificial Sequence: Synthetic oligonucleotide
augguaucaucucuaaacc

SEQ ID NO: 1271248 - RNA, 19 nt, Artificial Sequence
  Description of Artificial Sequence: Synthetic oligonucleotide
uuuaggauuacucuuggaa

SEQ ID NO: 1271249 - RNA, 19 nt, Artificial Sequence
  Description of Artificial Sequence: Synthetic oligonucleotide
ugggauuuaaacccaaugc

SEQ ID NO: 1271250 - RNA, 19 nt, Artificial Sequence
  Description of Artificial Sequence: Synthetic oligonucleotide
uccaauaacaucugaagca

SEQ ID NO: 1271251 - RNA, 19 nt, Artificial Sequence
  Description of Artificial Sequence: Synthetic oligonucleotide
uucuaauaacccacuaugg

SEQ ID NO: 1271252 - RNA, 19 nt, Artificial Sequence
  Description of Artificial Sequence: Synthetic oligonucleotide
aagaauacaucccugcagu

SEQ ID NO: 1271253 - RNA, 19 nt, Artificial Sequence
  Description of Artificial Sequence: Synthetic oligonucleotide
aaaccuaaagaaacaaaac

SEQ ID NO: 1271254 - RNA, 19 nt, Artificial Sequence
  Description of Artificial Sequence: Synthetic oligonucleotide
agugcuaggccauaacccc

SEQ ID NO: 1271255 - RNA, 19 nt, Artificial Sequence
  Description of Artificial Sequence: Synthetic oligonucleotide
uuacaguaaauucacuggc

SEQ ID NO: 1271256 - RNA, 19 nt, Artificial Sequence
  Description of Artificial Sequence: Synthetic oligonucleotide
ugcacuuuaccacugagcu

SEQ ID NO: 1271257 - RNA, 19 nt, Artificial Sequence
  Description of Artificial Sequence: Synthetic oligonucleotide
uguuuuaggauuacucuug

SEQ ID NO: 1271258 - RNA, 19 nt, Artificial Sequence
  Description of Artificial Sequence: Synthetic oligonucleotide
aggaguguuuaucaaacac

SEQ ID NO: 1271259 - RNA, 19 nt, Artificial Sequence
  Description of Artificial Sequence: Synthetic oligonucleotide
uguaaaaccucucauuaaa

SEQ ID NO: 1271260 - RNA, 19 nt, Artificial Sequence
  Description of Artificial Sequence: Synthetic oligonucleotide
aaacaauuccaaauuacag

SEQ ID NO: 1271261 - RNA, 19 nt, Artificial Sequence
  Description of Artificial Sequence: Synthetic oligonucleotide
aguuuuguuagugcuaggc

SEQ ID NO: 1271262 - RNA, 19 nt, Artificial Sequence
  Description of Artificial Sequence: Synthetic oligonucleotide
ucuaauaacccacuauggu

SEQ ID NO: 1271263 - RNA, 19 nt, Artificial Sequence
  Description of Artificial Sequence: Synthetic oligonucleotide
aauuuuaccgacacauuuc

SEQ ID NO: 1271264 - RNA, 19 nt, Artificial Sequence
  Description of Artificial Sequence: Synthetic oligonucleotide
accuacuagacccagaugu

SEQ ID NO: 1271265 - RNA, 19 nt, Artificial Sequence
  Description of Artificial Sequence: Synthetic oligonucleotide
uuaagaggaguguuuauca

SEQ ID NO: 1271266 - RNA, 19 nt, Artificial Sequence
  Description of Artificial Sequence: Synthetic oligonucleotide
cuucuaauaacccacuaug

SEQ ID NO: 1271267 - RNA, 19 nt, Artificial Sequence
  Description of Artificial Sequence: Synthetic oligonucleotide
agagcuaagaacuuuucca

SEQ ID NO: 1271268 - RNA, 19 nt, Artificial Sequence
  Description of Artificial Sequence: Synthetic oligonucleotide
ucucauuaaagguagaguu

SEQ ID NO: 1271269 - RNA, 19 nt, Artificial Sequence
  Description of Artificial Sequence: Synthetic oligonucleotide
aauagugacuugcuguuga

SEQ ID NO: 1271270 - RNA, 19 nt, Artificial Sequence
  Description of Artificial Sequence: Synthetic oligonucleotide
augguuugcuuccauauuc

SEQ ID NO: 1271271 - RNA, 19 nt, Artificial Sequence
  Description of Artificial Sequence: Synthetic oligonucleotide
uuagugcuaggccauaacc

SEQ ID NO: 1271272 - RNA, 19 nt, Artificial Sequence
  Description of Artificial Sequence: Synthetic oligonucleotide
uccaaauuacaguaaauuc

SEQ ID NO: 1271273 - RNA, 19 nt, Artificial Sequence
  Description of Artificial Sequence: Synthetic oligonucleotide
uuaagcaaagguauccaga

SEQ ID NO: 1271274 - RNA, 19 nt, Artificial Sequence
  Description of Artificial Sequence: Synthetic oligonucleotide
auuucuagaggccacccag

SEQ ID NO: 1271275 - RNA, 19 nt, Artificial Sequence
  Description of Artificial Sequence: Synthetic oligonucleotide
uuuaagcaaagguauccag

SEQ ID NO: 1271276 - RNA, 19 nt, Artificial Sequence
  Description of Artificial Sequence: Synthetic oligonucleotide
ugugcuauaaccugguaau

SEQ ID NO: 1271277 - RNA, 19 nt, Artificial Sequence
  Description of Artificial Sequence: Synthetic oligonucleotide
uuuugcuuguagucgagag

SEQ ID NO: 1271278 - RNA, 19 nt, Artificial Sequence
  Description of Artificial Sequence: Synthetic oligonucleotide
ggauacaccuacuagaccc

SEQ ID NO: 1271279 - RNA, 19 nt, Artificial Sequence
  Description of Artificial Sequence: Synthetic oligonucleotide
uuaggauuacucuuggaaa

SEQ ID NO: 1271280 - RNA, 19 nt, Artificial Sequence
  Description of Artificial Sequence: Synthetic oligonucleotide
ucaaauacaggcucuugga

SEQ ID NO: 1271281 - RNA, 19 nt, Artificial Sequence
  Description of Artificial Sequence: Synthetic oligonucleotide
gaugggauacaccuacuag

SEQ ID NO: 1271282 - RNA, 19 nt, Artificial Sequence
  Description of Artificial Sequence: Synthetic oligonucleotide
aggacuauggguguuaaag

SEQ ID NO: 1271283 - RNA, 19 nt, Artificial Sequence
  Description of Artificial Sequence: Synthetic oligonucleotide
uuuaccacugagcuguaac

SEQ ID NO: 1271284 - RNA, 19 nt, Artificial Sequence
  Description of Artificial Sequence: Synthetic oligonucleotide
aagccucuuaucccagugc

SEQ ID NO: 1271285 - RNA, 19 nt, Artificial Sequence
  Description of Artificial Sequence: Synthetic oligonucleotide
aauaacaucugaagcaagu

SEQ ID NO: 1271286 - RNA, 19 nt, Artificial Sequence
  Description of Artificial Sequence: Synthetic oligonucleotide
ucaguuuuguuagugcuag

SEQ ID NO: 1271287 - RNA, 19 nt, Artificial Sequence
  Description of Artificial Sequence: Synthetic oligonucleotide
uguuuaucaaacacaacuu

SEQ ID NO: 1271288 - RNA, 19 nt, Artificial Sequence
  Description of Artificial Sequence: Synthetic oligonucleotide
aguucugaccguuugccuc

SEQ ID NO: 1271289 - RNA, 19 nt, Artificial Sequence
  Description of Artificial Sequence: Synthetic oligonucleotide
uagugcuaggccauaaccc

SEQ ID NO: 1271290 - RNA, 19 nt, Artificial Sequence
  Description of Artificial Sequence: Synthetic oligonucleotide
aauucacuggcccugcuau

SEQ ID NO: 1271291 - RNA, 19 nt, Artificial Sequence
  Description of Artificial Sequence: Synthetic oligonucleotide
uacucuuggaaaccaacug

SEQ ID NO: 1271292 - RNA, 19 nt, Artificial Sequence
  Description of Artificial Sequence: Synthetic oligonucleotide
aauacaucccugcaguguu

SEQ ID NO: 1271293 - RNA, 19 nt, Artificial Sequence
  Description of Artificial Sequence: Synthetic oligonucleotide
uauucguugucccaauccu

SEQ ID NO: 1271294 - RNA, 19 nt, Artificial Sequence
  Description of Artificial Sequence: Synthetic oligonucleotide
uaggauuacucuuggaaac

SEQ ID NO: 1271295 - RNA, 19 nt, Artificial Sequence
  Description of Artificial Sequence: Synthetic oligonucleotide
auuuuaccgacacauuucu

SEQ ID NO: 1271296 - RNA, 19 nt, Artificial Sequence
  Description of Artificial Sequence: Synthetic oligonucleotide
auaacaggaggguucucac

SEQ ID NO: 1271297 - RNA, 19 nt, Artificial Sequence
  Description of Artificial Sequence: Synthetic oligonucleotide
guugcugcagaauagugac

SEQ ID NO: 1271298 - RNA, 19 nt, Artificial Sequence
  Description of Artificial Sequence: Synthetic oligonucleotide
guacuaaagccuuacagga

SEQ ID NO: 1271299 - RNA, 19 nt, Artificial Sequence
  Description of Artificial Sequence: Synthetic oligonucleotide
acccaaugcacuuuaccac

SEQ ID NO: 1271300 - RNA, 19 nt, Artificial Sequence
  Description of Artificial Sequence: Synthetic oligonucleotide
uccuccuagggacagagcu

SEQ ID NO: 1271301 - RNA, 19 nt, Artificial Sequence
  Description of Artificial Sequence: Synthetic oligonucleotide
agaggaguguuuaucaaac

SEQ ID NO: 1271302 - RNA, 19 nt, Artificial Sequence
  Description of Artificial Sequence: Synthetic oligonucleotide
ucuucuaauaacccacuau

SEQ ID NO: 1271303 - RNA, 19 nt, Artificial Sequence
  Description of Artificial Sequence: Synthetic oligonucleotide
uuuccugugcuauaaccug

SEQ ID NO: 1271304 - RNA, 19 nt, Artificial Sequence
  Description of Artificial Sequence: Synthetic oligonucleotide
uuacucuuggaaaccaacu

SEQ ID NO: 1271305 - RNA, 19 nt, Artificial Sequence
  Description of Artificial Sequence: Synthetic oligonucleotide
gaccguuugccucauguag

SEQ ID NO: 1271306 - RNA, 19 nt, Artificial Sequence
  Description of Artificial Sequence: Synthetic oligonucleotide
acugauaacaggaggguuc

SEQ ID NO: 1271307 - RNA, 19 nt, Artificial Sequence
  Description of Artificial Sequence: Synthetic oligonucleotide
gaguuuggauuucuagagg

SEQ ID NO: 1271308 - RNA, 19 nt, Artificial Sequence
  Description of Artificial Sequence: Synthetic oligonucleotide
acaugaaggacuaugggug

SEQ ID NO: 1271309 - RNA, 19 nt, Artificial Sequence
  Description of Artificial Sequence: Synthetic oligonucleotide
ugggauacaccuacuagac

SEQ ID NO: 1271310 - RNA, 19 nt, Artificial Sequence
  Description of Artificial Sequence: Synthetic oligonucleotide
aggugagagugucacaggg

SEQ ID NO: 1271311 - RNA, 19 nt, Artificial Sequence
  Description of Artificial Sequence: Synthetic oligonucleotide
uuaccacacacucauugcu

SEQ ID NO: 1271312 - RNA, 19 nt, Artificial Sequence
  Description of Artificial Sequence: Synthetic oligonucleotide
gguguuaaaggucaggcac

SEQ ID NO: 1271313 - RNA, 19 nt, Artificial Sequence
  Description of Artificial Sequence: Synthetic oligonucleotide
cuuggaaaccaacuggaug

SEQ ID NO: 1271314 - RNA, 19 nt, Artificial Sequence
  Description of Artificial Sequence: Synthetic oligonucleotide
aauaacccacuaugguuug

SEQ ID NO: 1271315 - RNA, 19 nt, Artificial Sequence
  Description of Artificial Sequence: Synthetic oligonucleotide
caagaauacaucccugcag

SEQ ID NO: 1271316 - RNA, 19 nt, Artificial Sequence
  Description of Artificial Sequence: Synthetic oligonucleotide
ucuaaaccuaagaauuuau

SEQ ID NO: 1271317 - RNA, 19 nt, Artificial Sequence
  Description of Artificial Sequence: Synthetic oligonucleotide
uuccucuuuaauuugggau

SEQ ID NO: 1271318 - RNA, 19 nt, Artificial Sequence
  Description of Artificial Sequence: Synthetic oligonucleotide
guuuuguuagugcuaggcc

SEQ ID NO: 1271319 - RNA, 19 nt, Artificial Sequence
  Description of Artificial Sequence: Synthetic oligonucleotide
cuaagaauuuauagaagca

SEQ ID NO: 1271320 - RNA, 19 nt, Artificial Sequence
  Description of Artificial Sequence: Synthetic oligonucleotide
aggauuacucuuggaaacc

SEQ ID NO: 1271321 - RNA, 19 nt, Artificial Sequence
  Description of Artificial Sequence: Synthetic oligonucleotide
uguguagauuaauaauagu

SEQ ID NO: 1271322 - RNA, 19 nt, Artificial Sequence
  Description of Artificial Sequence: Synthetic oligonucleotide
guauucguugucccaaucc

SEQ ID NO: 1271323 - RNA, 19 nt, Artificial Sequence
  Description of Artificial Sequence: Synthetic oligonucleotide
uccgugaucauuucacaga

SEQ ID NO: 1271324 - RNA, 19 nt, Artificial Sequence
  Description of Artificial Sequence: Synthetic oligonucleotide
acccuaagccucuuauccc

SEQ ID NO: 1271325 - RNA, 19 nt, Artificial Sequence
  Description of Artificial Sequence: Synthetic oligonucleotide
uuugcuuguagucgagagu

SEQ ID NO: 1271326 - RNA, 19 nt, Artificial Sequence
  Description of Artificial Sequence: Synthetic oligonucleotide
acauccgugaucauuucac

SEQ ID NO: 1271327 - RNA, 19 nt, Artificial Sequence
  Description of Artificial Sequence: Synthetic oligonucleotide
cucauuaaagguagaguuc

SEQ ID NO: 1271328 - RNA, 19 nt, Artificial Sequence
  Description of Artificial Sequence: Synthetic oligonucleotide
uuuguuagugcuaggccau

SEQ ID NO: 1271329 - RNA, 19 nt, Artificial Sequence
  Description of Artificial Sequence: Synthetic oligonucleotide
ugaccucaaacucacuagu

SEQ ID NO: 1271330 - RNA, 19 nt, Artificial Sequence
  Description of Artificial Sequence: Synthetic oligonucleotide
ugguuugcuuccauauucc

SEQ ID NO: 1271331 - RNA, 19 nt, Artificial Sequence
  Description of Artificial Sequence: Synthetic oligonucleotide
cucaacauccaucugagaa

SEQ ID NO: 1271332 - RNA, 19 nt, Artificial Sequence
  Description of Artificial Sequence: Synthetic oligonucleotide
uuguagucgagagugaaaa

SEQ ID NO: 1271333 - RNA, 19 nt, Artificial Sequence
  Description of Artificial Sequence: Synthetic oligonucleotide
uuccaaauuacaguaaauu

SEQ ID NO: 1271334 - RNA, 19 nt, Artificial Sequence
  Description of Artificial Sequence: Synthetic oligonucleotide
uuaaacccaaugcacuuua

SEQ ID NO: 1271335 - RNA, 19 nt, Artificial Sequence
  Description of Artificial Sequence: Synthetic oligonucleotide
uuucuucuaauaacccacu

SEQ ID NO: 1271336 - RNA, 19 nt, Artificial Sequence
  Description of Artificial Sequence: Synthetic oligonucleotide
aucucuaaaccuaagaauu

SEQ ID NO: 1271337 - RNA, 19 nt, Artificial Sequence
  Description of Artificial Sequence: Synthetic oligonucleotide
cuagacugaccucaaacuc

SEQ ID NO: 1271338 - RNA, 19 nt, Artificial Sequence
  Description of Artificial Sequence: Synthetic oligonucleotide
auaaccugguaauuuugcu

SEQ ID NO: 1271339 - RNA, 19 nt, Artificial Sequence
  Description of Artificial Sequence: Synthetic oligonucleotide
cugaccucaaacucacuag

SEQ ID NO: 1271340 - RNA, 19 nt, Artificial Sequence
  Description of Artificial Sequence: Synthetic oligonucleotide
ugauaauuuuaccgacaca

SEQ ID NO: 1271341 - RNA, 19 nt, Artificial Sequence
  Description of Artificial Sequence: Synthetic oligonucleotide
auuuaaacccaaugcacuu

SEQ ID NO: 1271342 - RNA, 19 nt, Artificial Sequence
  Description of Artificial Sequence: Synthetic oligonucleotide
ugagcaguacuaaagccuu

SEQ ID NO: 1271343 - RNA, 19 nt, Artificial Sequence
  Description of Artificial Sequence: Synthetic oligonucleotide
gaauuuauagaagcacuuc

SEQ ID NO: 1271344 - RNA, 19 nt, Artificial Sequence
  Description of Artificial Sequence: Synthetic oligonucleotide
agcaguacuaaagccuuac

SEQ ID NO: 1271345 - RNA, 19 nt, Artificial Sequence
  Description of Artificial Sequence: Synthetic oligonucleotide
auccgugaucauuucacag

SEQ ID NO: 1271346 - RNA, 19 nt, Artificial Sequence
  Description of Artificial Sequence: Synthetic oligonucleotide
uuugccucauguagccuag

SEQ ID NO: 1271347 - RNA, 19 nt, Artificial Sequence
  Description of Artificial Sequence: Synthetic oligonucleotide
guguagauuaauaauagua

SEQ ID NO: 1271348 - RNA, 19 nt, Artificial Sequence
  Description of Artificial Sequence: Synthetic oligonucleotide
cuuaagaggaguguuuauc

SEQ ID NO: 1271349 - RNA, 19 nt, Artificial Sequence
  Description of Artificial Sequence: Synthetic oligonucleotide
ggaacuacauccgugauca

SEQ ID NO: 1271350 - RNA, 19 nt, Artificial Sequence
  Description of Artificial Sequence: Synthetic oligonucleotide
cagagcuaagaacuuuucc

SEQ ID NO: 1271351 - RNA, 19 nt, Artificial Sequence
  Description of Artificial Sequence: Synthetic oligonucleotide
guaaaaccucucauuaaag

SEQ ID NO: 1271352 - RNA, 19 nt, Artificial Sequence
  Description of Artificial Sequence: Synthetic oligonucleotide
caauuuagaggcugcucag

SEQ ID NO: 1271353 - RNA, 19 nt, Artificial Sequence
  Description of Artificial Sequence: Synthetic oligonucleotide
cuggaugggauacaccuac

SEQ ID NO: 1271354 - RNA, 19 nt, Artificial Sequence
  Description of Artificial Sequence: Synthetic oligonucleotide
uaauaauaguaaguucccu

SEQ ID NO: 1271355 - RNA, 19 nt, Artificial Sequence
  Description of Artificial Sequence: Synthetic oligonucleotide
aguauucguugucccaauc

SEQ ID NO: 1271356 - RNA, 19 nt, Artificial Sequence
  Description of Artificial Sequence: Synthetic oligonucleotide
gauaacaggaggguucuca

SEQ ID NO: 1271357 - RNA, 19 nt, Artificial Sequence
  Description of Artificial Sequence: Synthetic oligonucleotide
agagugucacaggggaucc

SEQ ID NO: 1271358 - RNA, 19 nt, Artificial Sequence
  Description of Artificial Sequence: Synthetic oligonucleotide
ucucuaaaccuaagaauuu

SEQ ID NO: 1271359 - RNA, 19 nt, Artificial Sequence
  Description of Artificial Sequence: Synthetic oligonucleotide
aaaccaacuggaugggaua

SEQ ID NO: 1271360 - RNA, 19 nt, Artificial Sequence
  Description of Artificial Sequence: Synthetic oligonucleotide
uggacaggacucuuggaac

SEQ ID NO: 1271361 - RNA, 19 nt, Artificial Sequence
  Description of Artificial Sequence: Synthetic oligonucleotide
acccagaugugguugcccg

SEQ ID NO: 1271362 - RNA, 19 nt, Artificial Sequence
  Description of Artificial Sequence: Synthetic oligonucleotide
cuacauagagauccagaac

SEQ ID NO: 1271363 - RNA, 19 nt, Artificial Sequence
  Description of Artificial Sequence: Synthetic oligonucleotide
uucacuggcccugcuauag

SEQ ID NO: 1271364 - RNA, 19 nt, Artificial Sequence
  Description of Artificial Sequence: Synthetic oligonucleotide
gguuuaagcaaagguaucc

SEQ ID NO: 1271365 - RNA, 19 nt, Artificial Sequence
  Description of Artificial Sequence: Synthetic oligonucleotide
uucguugucccaauccuua

SEQ ID NO: 1271366 - RNA, 19 nt, Artificial Sequence
  Description of Artificial Sequence: Synthetic oligonucleotide
accguuugccucauguagc

SEQ ID NO: 1271367 - RNA, 19 nt, Artificial Sequence
  Description of Artificial Sequence: Synthetic oligonucleotide
gagcuaagaacuuuuccaa

SEQ ID NO: 1271368 - RNA, 19 nt, Artificial Sequence
  Description of Artificial Sequence: Synthetic oligonucleotide
cuacuagacccagaugugg

SEQ ID NO: 1271369 - RNA, 19 nt, Artificial Sequence
  Description of Artificial Sequence: Synthetic oligonucleotide
ugugugagccucagggcug

SEQ ID NO: 1271370 - RNA, 19 nt, Artificial Sequence
  Description of Artificial Sequence: Synthetic oligonucleotide
acuaguggccaagacugac

SEQ ID NO: 1271371 - RNA, 19 nt, Artificial Sequence
  Description of Artificial Sequence: Synthetic oligonucleotide
cuaguggccaagacugacc

SEQ ID NO: 1271372 - RNA, 19 nt, Artificial Sequence
  Description of Artificial Sequence: Synthetic oligonucleotide
cuuguuuuaggauuacucu

SEQ ID NO: 1271373 - RNA, 19 nt, Artificial Sequence
  Description of Artificial Sequence: Synthetic oligonucleotide
cagaguuuggauuucuaga

SEQ ID NO: 1271374 - RNA, 19 nt, Artificial Sequence
  Description of Artificial Sequence: Synthetic oligonucleotide
cugagcuguaacccuaagc

SEQ ID NO: 1271375 - RNA, 19 nt, Artificial Sequence
  Description of Artificial Sequence: Synthetic oligonucleotide
gcuguuuccuccuagggac

SEQ ID NO: 1271376 - RNA, 19 nt, Artificial Sequence
  Description of Artificial Sequence: Synthetic oligonucleotide
uuuuaggauuacucuugga

SEQ ID NO: 1271377 - RNA, 19 nt, Artificial Sequence
  Description of Artificial Sequence: Synthetic oligonucleotide
uacauccgugaucauuuca

SEQ ID NO: 1271378 - RNA, 19 nt, Artificial Sequence
  Description of Artificial Sequence: Synthetic oligonucleotide
uuggauuucuagaggccac

SEQ ID NO: 1271379 - RNA, 19 nt, Artificial Sequence
  Description of Artificial Sequence: Synthetic oligonucleotide
caauaacaucugaagcaag

SEQ ID NO: 1271380 - RNA, 19 nt, Artificial Sequence
  Description of Artificial Sequence: Synthetic oligonucleotide
acucacuaguggccaagac

SEQ ID NO: 1271381 - RNA, 19 nt, Artificial Sequence
  Description of Artificial Sequence: Synthetic oligonucleotide
ucuagaggccacccaggcc

SEQ ID NO: 1271382 - RNA, 19 nt, Artificial Sequence
  Description of Artificial Sequence: Synthetic oligonucleotide
guacuguguagauuaauaa

SEQ ID NO: 1271383 - RNA, 19 nt, Artificial Sequence
  Description of Artificial Sequence: Synthetic oligonucleotide
aaacucacuaguggccaag

SEQ ID NO: 1271384 - RNA, 19 nt, Artificial Sequence
  Description of Artificial Sequence: Synthetic oligonucleotide
gugagagugucacagggga

SEQ ID NO: 1271385 - RNA, 19 nt, Artificial Sequence
  Description of Artificial Sequence: Synthetic oligonucleotide
aaauucacuggcccugcua

SEQ ID NO: 1271386 - RNA, 19 nt, Artificial Sequence
  Description of Artificial Sequence: Synthetic oligonucleotide
gagggaucagggcagucug

SEQ ID NO: 1271387 - RNA, 19 nt, Artificial Sequence
  Description of Artificial Sequence: Synthetic oligonucleotide
auagugacuugcuguugag

SEQ ID NO: 1271388 - RNA, 19 nt, Artificial Sequence
  Description of Artificial Sequence: Synthetic oligonucleotide
uauggguguuaaaggucag

SEQ ID NO: 1271389 - RNA, 19 nt, Artificial Sequence
  Description of Artificial Sequence: Synthetic oligonucleotide
gcaauuuagaggcugcuca

SEQ ID NO: 1271390 - RNA, 19 nt, Artificial Sequence
  Description of Artificial Sequence: Synthetic oligonucleotide
ggauuuaaacccaaugcac

SEQ ID NO: 1271391 - RNA, 19 nt, Artificial Sequence
  Description of Artificial Sequence: Synthetic oligonucleotide
accccaguccaacaaaccu

SEQ ID NO: 1271392 - RNA, 19 nt, Artificial Sequence
  Description of Artificial Sequence: Synthetic oligonucleotide
ggacaugaaggacuauggg

SEQ ID NO: 1271393 - RNA, 19 nt, Artificial Sequence
  Description of Artificial Sequence: Synthetic oligonucleotide
ugguugcccgguuuaagca

SEQ ID NO: 1271394 - RNA, 19 nt, Artificial Sequence
  Description of Artificial Sequence: Synthetic oligonucleotide
acagauugucucaggagag

SEQ ID NO: 1271395 - RNA, 19 nt, Artificial Sequence
  Description of Artificial Sequence: Synthetic oligonucleotide
gugguugcccgguuuaagc

SEQ ID NO: 1271396 - RNA, 19 nt, Artificial Sequence
  Description of Artificial Sequence: Synthetic oligonucleotide
ugaagcaaguccucugaua

SEQ ID NO: 1271397 - RNA, 19 nt, Artificial Sequence
  Description of Artificial Sequence: Synthetic oligonucleotide
uaugguuugcuuccauauu

SEQ ID NO: 1271398 - RNA, 19 nt, Artificial Sequence
  Description of Artificial Sequence: Synthetic oligonucleotide
acuacauccgugaucauuu

SEQ ID NO: 1271399 - RNA, 19 nt, Artificial Sequence
  Description of Artificial Sequence: Synthetic oligonucleotide
aacuacauccgugaucauu

SEQ ID NO: 1271400 - RNA, 19 nt, Artificial Sequence
  Description of Artificial Sequence: Synthetic oligonucleotide
ugcugcagaauagugacuu

SEQ ID NO: 1271401 - RNA, 19 nt, Artificial Sequence
  Description of Artificial Sequence: Synthetic oligonucleotide
aguacuguguagauuaaua

SEQ ID NO: 1271402 - RNA, 19 nt, Artificial Sequence
  Description of Artificial Sequence: Synthetic oligonucleotide
aggagguugcugcagaaua

SEQ ID NO: 1271403 - RNA, 19 nt, Artificial Sequence
  Description of Artificial Sequence: Synthetic oligonucleotide
ccuuacugauaacaggagg

SEQ ID NO: 1271404 - RNA, 19 nt, Artificial Sequence
  Description of Artificial Sequence: Synthetic oligonucleotide
ugcuauaaccugguaauuu

SEQ ID NO: 1271405 - RNA, 19 nt, Artificial Sequence
  Description of Artificial Sequence: Synthetic oligonucleotide
uucuucuaauaacccacua

SEQ ID NO: 1271406 - RNA, 19 nt, Artificial Sequence
  Description of Artificial Sequence: Synthetic oligonucleotide
aacagccugagaaaccuaa

SEQ ID NO: 1271407 - RNA, 19 nt, Artificial Sequence
  Description of Artificial Sequence: Synthetic oligonucleotide
cuuggaacuugugucuggc

SEQ ID NO: 1271408 - RNA, 19 nt, Artificial Sequence
  Description of Artificial Sequence: Synthetic oligonucleotide
cuuggcaugagcaguacua

SEQ ID NO: 1271409 - RNA, 19 nt, Artificial Sequence
  Description of Artificial Sequence: Synthetic oligonucleotide
aggccauaccuuaagagga

SEQ ID NO: 1271410 - RNA, 19 nt, Artificial Sequence
  Description of Artificial Sequence: Synthetic oligonucleotide
cacuuccuuacaaagcuga

SEQ ID NO: 1271411 - RNA, 19 nt, Artificial Sequence
  Description of Artificial Sequence: Synthetic oligonucleotide
ggcaugagcaguacuaaag

SEQ ID NO: 1271412 - RNA, 19 nt, Artificial Sequence
  Description of Artificial Sequence: Synthetic oligonucleotide
cauccaucugagaaggaga

SEQ ID NO: 1271413 - RNA, 19 nt, Artificial Sequence
  Description of Artificial Sequence: Synthetic oligonucleotide
gauuucuagaggccaccca

SEQ ID NO: 1271414 - RNA, 19 nt, Artificial Sequence
  Description of Artificial Sequence: Synthetic oligonucleotide
aggccauaaccccagucca

SEQ ID NO: 1271415 - RNA, 19 nt, Artificial Sequence
  Description of Artificial Sequence: Synthetic oligonucleotide
auaaccccaguccaacaaa

SEQ ID NO: 1271416 - RNA, 19 nt, Artificial Sequence
  Description of Artificial Sequence: Synthetic oligonucleotide
cuaaaccuaagaauuuaua

SEQ ID NO: 1271417 - RNA, 19 nt, Artificial Sequence
  Description of Artificial Sequence: Synthetic oligonucleotide
aucccagugcuguuuccuc

SEQ ID NO: 1271418 - RNA, 19 nt, Artificial Sequence
  Description of Artificial Sequence: Synthetic oligonucleotide
uaccuuaagaggaguguuu

SEQ ID NO: 1271419 - RNA, 19 nt, Artificial Sequence
  Description of Artificial Sequence: Synthetic oligonucleotide
auaacccacuaugguuugc

SEQ ID NO: 1271420 - RNA, 19 nt, Artificial Sequence
  Description of Artificial Sequence: Synthetic oligonucleotide
uccugugcuauaaccuggu

SEQ ID NO: 1271421 - RNA, 19 nt, Artificial Sequence
  Description of Artificial Sequence: Synthetic oligonucleotide
uuuaaacccaaugcacuuu

SEQ ID NO: 1271422 - RNA, 19 nt, Artificial Sequence
  Description of Artificial Sequence: Synthetic oligonucleotide
uguuuccuccuagggacag

SEQ ID NO: 1271423 - RNA, 19 nt, Artificial Sequence
  Description of Artificial Sequence: Synthetic oligonucleotide
cuaauaacccacuaugguu

SEQ ID NO: 1271424 - RNA, 19 nt, Artificial Sequence
  Description of Artificial Sequence: Synthetic oligonucleotide
uaacccuaagccucuuauc

SEQ ID NO: 1271425 - RNA, 19 nt, Artificial Sequence
  Description of Artificial Sequence: Synthetic oligonucleotide
gaauagugacuugcuguug

SEQ ID NO: 1271426 - RNA, 19 nt, Artificial Sequence
  Description of Artificial Sequence: Synthetic oligonucleotide
uaacccacuaugguuugcu

SEQ ID NO: 1271427 - RNA, 19 nt, Artificial Sequence
  Description of Artificial Sequence: Synthetic oligonucleotide
cuagacccagaugugguug

SEQ ID NO: 1271428 - RNA, 19 nt, Artificial Sequence
  Description of Artificial Sequence: Synthetic oligonucleotide
guauccagaugguaucauc

SEQ ID NO: 1271429 - RNA, 19 nt, Artificial Sequence
  Description of Artificial Sequence: Synthetic oligonucleotide
cacuuuaccacugagcugu

SEQ ID NO: 1271430 - RNA, 19 nt, Artificial Sequence
  Description of Artificial Sequence: Synthetic oligonucleotide
cacucaccaacucaacauc

SEQ ID NO: 1271431 - RNA, 19 nt, Artificial Sequence
  Description of Artificial Sequence: Synthetic oligonucleotide
ugugguugcccgguuuaag

SEQ ID NO: 1271432 - RNA, 19 nt, Artificial Sequence
  Description of Artificial Sequence: Synthetic oligonucleotide
ucauugcugcaguauucgu

SEQ ID NO: 1271433 - RNA, 19 nt, Artificial Sequence
  Description of Artificial Sequence: Synthetic oligonucleotide
agcaaguccucugauaauu

SEQ ID NO: 1271434 - RNA, 19 nt, Artificial Sequence
  Description of Artificial Sequence: Synthetic oligonucleotide
cuagggacagagcuaagaa

SEQ ID NO: 1271435 - RNA, 19 nt, Artificial Sequence
  Description of Artificial Sequence: Synthetic oligonucleotide
gaaaagauggggacaugaa

SEQ ID NO: 1271436 - RNA, 19 nt, Artificial Sequence
  Description of Artificial Sequence: Synthetic oligonucleotide
cagauugucucaggagagg

SEQ ID NO: 1271437 - RNA, 19 nt, Artificial Sequence
  Description of Artificial Sequence: Synthetic oligonucleotide
ggaguguuuaucaaacaca

SEQ ID NO: 1271438 - RNA, 19 nt, Artificial Sequence
  Description of Artificial Sequence: Synthetic oligonucleotide
uuacccuuuccugugcuau

SEQ ID NO: 1271439 - RNA, 19 nt, Artificial Sequence
  Description of Artificial Sequence: Synthetic oligonucleotide
aaguacuguguagauuaau

SEQ ID NO: 1271440 - RNA, 19 nt, Artificial Sequence
  Description of Artificial Sequence: Synthetic oligonucleotide
cugugcuauaaccugguaa

SEQ ID NO: 1271441 - RNA, 19 nt, Artificial Sequence
  Description of Artificial Sequence: Synthetic oligonucleotide
caucucuaaaccuaagaau

SEQ ID NO: 1271442 - RNA, 19 nt, Artificial Sequence
  Description of Artificial Sequence: Synthetic oligonucleotide
auuuucagaguggguggag

SEQ ID NO: 1271443 - RNA, 19 nt, Artificial Sequence
  Description of Artificial Sequence: Synthetic oligonucleotide
auauucccuuuacccuuuc

SEQ ID NO: 1271444 - RNA, 19 nt, Artificial Sequence
  Description of Artificial Sequence: Synthetic oligonucleotide
gauacaccuacuagaccca

SEQ ID NO: 1271445 - RNA, 19 nt, Artificial Sequence
  Description of Artificial Sequence: Synthetic oligonucleotide
ugcuuguagucgagaguga

SEQ ID NO: 1271446 - RNA, 19 nt, Artificial Sequence
  Description of Artificial Sequence: Synthetic oligonucleotide
aacucacuaguggccaaga

SEQ ID NO: 1271447 - RNA, 19 nt, Artificial Sequence
  Description of Artificial Sequence: Synthetic oligonucleotide
ugagagugucacaggggau

SEQ ID NO: 1271448 - RNA, 19 nt, Artificial Sequence
  Description of Artificial Sequence: Synthetic oligonucleotide
uacaggcucuuggacagga

SEQ ID NO: 1271449 - RNA, 19 nt, Artificial Sequence
  Description of Artificial Sequence: Synthetic oligonucleotide
gguuugcuuccauauuccc

SEQ ID NO: 1271450 - RNA, 19 nt, Artificial Sequence
  Description of Artificial Sequence: Synthetic oligonucleotide
acuugcuguugaguugggg

SEQ ID NO: 1271451 - RNA, 19 nt, Artificial Sequence
  Description of Artificial Sequence: Synthetic oligonucleotide
aggcacaaccuugcucugc

SEQ ID NO: 1271452 - RNA, 19 nt, Artificial Sequence
  Description of Artificial Sequence: Synthetic oligonucleotide
gaugugguugcccgguuua

SEQ ID NO: 1271453 - RNA, 19 nt, Artificial Sequence
  Description of Artificial Sequence: Synthetic oligonucleotide
uguaacccuaagccucuua

SEQ ID NO: 1271454 - RNA, 19 nt, Artificial Sequence
  Description of Artificial Sequence: Synthetic oligonucleotide
uuuuaccgacacauuucuu

SEQ ID NO: 1271455 - RNA, 19 nt, Artificial Sequence
  Description of Artificial Sequence: Synthetic oligonucleotide
uucucacaaccagaccuca

SEQ ID NO: 1271456 - RNA, 19 nt, Artificial Sequence
  Description of Artificial Sequence: Synthetic oligonucleotide
ugaaucuuccaggcuugga

SEQ ID NO: 1271457 - RNA, 19 nt, Artificial Sequence
  Description of Artificial Sequence: Synthetic oligonucleotide
gccuagacugaccucaaac

SEQ ID NO: 1271458 - RNA, 19 nt, Artificial Sequence
  Description of Artificial Sequence: Synthetic oligonucleotide
uguagccuagacugaccuc

SEQ ID NO: 1271459 - RNA, 19 nt, Artificial Sequence
  Description of Artificial Sequence: Synthetic oligonucleotide
uggcaugagcaguacuaaa

SEQ ID NO: 1271460 - RNA, 19 nt, Artificial Sequence
  Description of Artificial Sequence: Synthetic oligonucleotide
ccugcuauagucuggccuc

SEQ ID NO: 1271461 - RNA, 19 nt, Artificial Sequence
  Description of Artificial Sequence: Synthetic oligonucleotide
aaggacuauggguguuaaa

SEQ ID NO: 1271462 - RNA, 19 nt, Artificial Sequence
  Description of Artificial Sequence: Synthetic oligonucleotide
cuuuuccaauaacaucuga

SEQ ID NO: 1271463 - RNA, 19 nt, Artificial Sequence
  Description of Artificial Sequence: Synthetic oligonucleotide
uugcccgguuuaagcaaag

SEQ ID NO: 1271464 - RNA, 19 nt, Artificial Sequence
  Description of Artificial Sequence: Synthetic oligonucleotide
ucguugucccaauccuuac

SEQ ID NO: 1271465 - RNA, 19 nt, Artificial Sequence
  Description of Artificial Sequence: Synthetic oligonucleotide
uguuagugcuaggccauaa

SEQ ID NO: 1271466 - RNA, 19 nt, Artificial Sequence
  Description of Artificial Sequence: Synthetic oligonucleotide
caauuccaaauuacaguaa

SEQ ID NO: 1271467 - RNA, 19 nt, Artificial Sequence
  Description of Artificial Sequence: Synthetic oligonucleotide
gguaucaucucuaaaccua

SEQ ID NO: 1271468 - RNA, 19 nt, Artificial Sequence
  Description of Artificial Sequence: Synthetic oligonucleotide
augaaucuuccaggcuugg

SEQ ID NO: 1271469 - RNA, 19 nt, Artificial Sequence
  Description of Artificial Sequence: Synthetic oligonucleotide
ggugagagugucacagggg

SEQ ID NO: 1271470 - RNA, 19 nt, Artificial Sequence
  Description of Artificial Sequence: Synthetic oligonucleotide
cuaugguuugcuuccauau

SEQ ID NO: 1271471 - RNA, 19 nt, Artificial Sequence
  Description of Artificial Sequence: Synthetic oligonucleotide
ugcccgguuuaagcaaagg

SEQ ID NO: 1271472 - RNA, 19 nt, Artificial Sequence
  Description of Artificial Sequence: Synthetic oligonucleotide
caaccuugcucugcagagg

SEQ ID NO: 1271473 - RNA, 19 nt, Artificial Sequence
  Description of Artificial Sequence: Synthetic oligonucleotide
uacugauaacaggaggguu

SEQ ID NO: 1271474 - RNA, 19 nt, Artificial Sequence
  Description of Artificial Sequence: Synthetic oligonucleotide
acuagacccagaugugguu

SEQ ID NO: 1271475 - RNA, 19 nt, Artificial Sequence
  Description of Artificial Sequence: Synthetic oligonucleotide
ugaccguuugccucaugua

SEQ ID NO: 1271476 - RNA, 19 nt, Artificial Sequence
  Description of Artificial Sequence: Synthetic oligonucleotide
guugcuguuguaaauuuau

SEQ ID NO: 1271477 - RNA, 19 nt, Artificial Sequence
  Description of Artificial Sequence: Synthetic oligonucleotide
ugaaggacuauggguguua

SEQ ID NO: 1271478 - RNA, 19 nt, Artificial Sequence
  Description of Artificial Sequence: Synthetic oligonucleotide
cucacuaguggccaagacu

SEQ ID NO: 1271479 - RNA, 19 nt, Artificial Sequence
  Description of Artificial Sequence: Synthetic oligonucleotide
cuuguagucgagagugaaa

SEQ ID NO: 1271480 - RNA, 19 nt, Artificial Sequence
  Description of Artificial Sequence: Synthetic oligonucleotide
auacaccuacuagacccag

SEQ ID NO: 1271481 - RNA, 19 nt, Artificial Sequence
  Description of Artificial Sequence: Synthetic oligonucleotide
accuuaagaggaguguuua

SEQ ID NO: 1271482 - RNA, 19 nt, Artificial Sequence
  Description of Artificial Sequence: Synthetic oligonucleotide
gauuacucuuggaaaccaa

SEQ ID NO: 1271483 - RNA, 19 nt, Artificial Sequence
  Description of Artificial Sequence: Synthetic oligonucleotide
gagcuguaacccuaagccu

SEQ ID NO: 1271484 - RNA, 19 nt, Artificial Sequence
  Description of Artificial Sequence: Synthetic oligonucleotide
guaacccuaagccucuuau

SEQ ID NO: 1271485 - RNA, 19 nt, Artificial Sequence
  Description of Artificial Sequence: Synthetic oligonucleotide
cauccgugaucauuucaca

SEQ ID NO: 1271486 - RNA, 19 nt, Artificial Sequence
  Description of Artificial Sequence: Synthetic oligonucleotide
cacaggggauccacucacc

SEQ ID NO: 1271487 - RNA, 19 nt, Artificial Sequence
  Description of Artificial Sequence: Synthetic oligonucleotide
gcugaggugagagugucac

SEQ ID NO: 1271488 - RNA, 19 nt, Artificial Sequence
  Description of Artificial Sequence: Synthetic oligonucleotide
caggcacuaccagaagaag

SEQ ID NO: 1271489 - RNA, 19 nt, Artificial Sequence
  Description of Artificial Sequence: Synthetic oligonucleotide
gcuauagucuggccucugc

SEQ ID NO: 1271490 - RNA, 19 nt, Artificial Sequence
  Description of Artificial Sequence: Synthetic oligonucleotide
gggauacaccuacuagacc

SEQ ID NO: 1271491 - RNA, 19 nt, Artificial Sequence
  Description of Artificial Sequence: Synthetic oligonucleotide
uuccuccuagggacagagc

SEQ ID NO: 1271492 - RNA, 19 nt, Artificial Sequence
  Description of Artificial Sequence: Synthetic oligonucleotide
ccucucauuaaagguagag

SEQ ID NO: 1271493 - RNA, 19 nt, Artificial Sequence
  Description of Artificial Sequence: Synthetic oligonucleotide
ccauaccuuaagaggagug

SEQ ID NO: 1271494 - RNA, 19 nt, Artificial Sequence
  Description of Artificial Sequence: Synthetic oligonucleotide
agguugcugcagaauagug

SEQ ID NO: 1271495 - RNA, 19 nt, Artificial Sequence
  Description of Artificial Sequence: Synthetic oligonucleotide
acaggacucuuggaacuug

SEQ ID NO: 1271496 - RNA, 19 nt, Artificial Sequence
  Description of Artificial Sequence: Synthetic oligonucleotide
cuacauccgugaucauuuc

SEQ ID NO: 1271497 - RNA, 19 nt, Artificial Sequence
  Description of Artificial Sequence: Synthetic oligonucleotide
uccuagggacagagcuaag

SEQ ID NO: 1271498 - RNA, 19 nt, Artificial Sequence
  Description of Artificial Sequence: Synthetic oligonucleotide
gaggcacaaccuugcucug

SEQ ID NO: 1271499 - RNA, 19 nt, Artificial Sequence
  Description of Artificial Sequence: Synthetic oligonucleotide
guguuuuaccacacacuca

SEQ ID NO: 1271500 - RNA, 19 nt, Artificial Sequence
  Description of Artificial Sequence: Synthetic oligonucleotide
ccguuugccucauguagcc

SEQ ID NO: 1271501 - RNA, 19 nt, Artificial Sequence
  Description of Artificial Sequence: Synthetic oligonucleotide
ucgaggcugaggugagagu

SEQ ID NO: 1271502 - RNA, 19 nt, Artificial Sequence
  Description of Artificial Sequence: Synthetic oligonucleotide
ggauuucuagaggccaccc

SEQ ID NO: 1271503 - RNA, 19 nt, Artificial Sequence
  Description of Artificial Sequence: Synthetic oligonucleotide
cuuggacaggacucuugga

SEQ ID NO: 1271504 - RNA, 19 nt, Artificial Sequence
  Description of Artificial Sequence: Synthetic oligonucleotide
ggguguuaaaggucaggca

SEQ ID NO: 1271505 - RNA, 19 nt, Artificial Sequence
  Description of Artificial Sequence: Synthetic oligonucleotide
cauaccuuaagaggagugu

SEQ ID NO: 1271506 - RNA, 19 nt, Artificial Sequence
  Description of Artificial Sequence: Synthetic oligonucleotide
caugaaggacuaugggugu

SEQ ID NO: 1271507 - RNA, 19 nt, Artificial Sequence
  Description of Artificial Sequence: Synthetic oligonucleotide
gaaggacuauggguguuaa

SEQ ID NO: 1271508 - RNA, 19 nt, Artificial Sequence
  Description of Artificial Sequence: Synthetic oligonucleotide
ggauuacucuuggaaacca

SEQ ID NO: 1271509 - RNA, 19 nt, Artificial Sequence
  Description of Artificial Sequence: Synthetic oligonucleotide
cuccuagggacagagcuaa

SEQ ID NO: 1271510 - RNA, 19 nt, Artificial Sequence
  Description of Artificial Sequence: Synthetic oligonucleotide
caaugcacuuuaccacuga

SEQ ID NO: 1271511 - RNA, 19 nt, Artificial Sequence
  Description of Artificial Sequence: Synthetic oligonucleotide
gcacuuuaccacugagcug

SEQ ID NO: 1271512 - RNA, 19 nt, Artificial Sequence
  Description of Artificial Sequence: Synthetic oligonucleotide
ugcuauagucuggccucug

SEQ ID NO: 1271513 - RNA, 19 nt, Artificial Sequence
  Description of Artificial Sequence: Synthetic oligonucleotide
uacccuuuccugugcuaua

SEQ ID NO: 1271514 - RNA, 19 nt, Artificial Sequence
  Description of Artificial Sequence: Synthetic oligonucleotide
cccgguuuaagcaaaggua

SEQ ID NO: 1271515 - RNA, 19 nt, Artificial Sequence
  Description of Artificial Sequence: Synthetic oligonucleotide
acccuuuccugugcuauaa

SEQ ID NO: 1271516 - RNA, 19 nt, Artificial Sequence
  Description of Artificial Sequence: Synthetic oligonucleotide
auucguugucccaauccuu

SEQ ID NO: 1271517 - RNA, 19 nt, Artificial Sequence
  Description of Artificial Sequence: Synthetic oligonucleotide
cauugcugcaguauucguu

SEQ ID NO: 1271518 - RNA, 19 nt, Artificial Sequence
  Description of Artificial Sequence: Synthetic oligonucleotide
ucugaccguuugccucaug

SEQ ID NO: 1271519 - RNA, 19 nt, Artificial Sequence
  Description of Artificial Sequence: Synthetic oligonucleotide
ccaagaauacaucccugca

SEQ ID NO: 1271520 - RNA, 19 nt, Artificial Sequence
  Description of Artificial Sequence: Synthetic oligonucleotide
cuguugcaauggagguggc

SEQ ID NO: 1271521 - RNA, 19 nt, Artificial Sequence
  Description of Artificial Sequence: Synthetic oligonucleotide
ggaugggauacaccuacua

SEQ ID NO: 1271522 - RNA, 19 nt, Artificial Sequence
  Description of Artificial Sequence: Synthetic oligonucleotide
ccuaagccucuuaucccag

SEQ ID NO: 1271523 - RNA, 19 nt, Artificial Sequence
  Description of Artificial Sequence: Synthetic oligonucleotide
caaacucacuaguggccaa

SEQ ID NO: 1271524 - RNA, 19 nt, Artificial Sequence
  Description of Artificial Sequence: Synthetic oligonucleotide
gguugcccgguuuaagcaa

SEQ ID NO: 1271525 - RNA, 19 nt, Artificial Sequence
  Description of Artificial Sequence: Synthetic oligonucleotide
agguagaguucugaccguu

SEQ ID NO: 1271526 - RNA, 19 nt, Artificial Sequence
  Description of Artificial Sequence: Synthetic oligonucleotide
ccuuuacccuuuccugugc

SEQ ID NO: 1271527 - RNA, 19 nt, Artificial Sequence
  Description of Artificial Sequence: Synthetic oligonucleotide
gugugagccucagggcugc

SEQ ID NO: 1271528 - RNA, 19 nt, Artificial Sequence
  Description of Artificial Sequence: Synthetic oligonucleotide
cugauaacaggaggguucu

SEQ ID NO: 1271529 - RNA, 19 nt, Artificial Sequence
  Description of Artificial Sequence: Synthetic oligonucleotide
gcaguauucguugucccaa

SEQ ID NO: 1271530 - RNA, 19 nt, Artificial Sequence
  Description of Artificial Sequence: Synthetic oligonucleotide
guugcccgguuuaagcaaa

SEQ ID NO: 1271531 - RNA, 19 nt, Artificial Sequence
  Description of Artificial Sequence: Synthetic oligonucleotide
cccuaagccucuuauccca

SEQ ID NO: 1271532 - RNA, 19 nt, Artificial Sequence
  Description of Artificial Sequence: Synthetic oligonucleotide
cacagaguuuggauuucua

SEQ ID NO: 1271533 - RNA, 19 nt, Artificial Sequence
  Description of Artificial Sequence: Synthetic oligonucleotide
augaaggacuauggguguu

SEQ ID NO: 1271534 - RNA, 19 nt, Artificial Sequence
  Description of Artificial Sequence: Synthetic oligonucleotide
ccgguuuaagcaaagguau

SEQ ID NO: 1271535 - RNA, 19 nt, Artificial Sequence
  Description of Artificial Sequence: Synthetic oligonucleotide
uuguuagugcuaggccaua

SEQ ID NO: 1271536 - RNA, 19 nt, Artificial Sequence
  Description of Artificial Sequence: Synthetic oligonucleotide
gcacucagagcuguggcuc

SEQ ID NO: 1271537 - RNA, 19 nt, Artificial Sequence
  Description of Artificial Sequence: Synthetic oligonucleotide
gugcuaggccauaacccca

SEQ ID NO: 1271538 - RNA, 19 nt, Artificial Sequence
  Description of Artificial Sequence: Synthetic oligonucleotide
cacuaguggccaagacuga

SEQ ID NO: 1271539 - RNA, 19 nt, Artificial Sequence
  Description of Artificial Sequence: Synthetic oligonucleotide
acuggaugggauacaccua

SEQ ID NO: 1271540 - RNA, 19 nt, Artificial Sequence
  Description of Artificial Sequence: Synthetic oligonucleotide
cuguugcauggccugaagu

SEQ ID NO: 1271541 - RNA, 19 nt, Artificial Sequence
  Description of Artificial Sequence: Synthetic oligonucleotide
aguggccaagacugaccuu

SEQ ID NO: 1271542 - RNA, 19 nt, Artificial Sequence
  Description of Artificial Sequence: Synthetic oligonucleotide
cccagaugugguugcccgg

SEQ ID NO: 1271543 - RNA, 19 nt, Artificial Sequence
  Description of Artificial Sequence: Synthetic oligonucleotide
gggguauuuuaagucagua

SEQ ID NO: 1271544 - RNA, 19 nt, Artificial Sequence
  Description of Artificial Sequence: Synthetic oligonucleotide
ccagaugguaucaucucua

SEQ ID NO: 1271545 - RNA, 19 nt, Artificial Sequence
  Description of Artificial Sequence: Synthetic oligonucleotide
gcccgguuuaagcaaaggu

SEQ ID NO: 1271546 - RNA, 19 nt, Artificial Sequence
  Description of Artificial Sequence: Synthetic oligonucleotide
augugguugcccgguuuaa

SEQ ID NO: 1271547 - RNA, 19 nt, Artificial Sequence
  Description of Artificial Sequence: Synthetic oligonucleotide
gggauccacucaccaacuc

SEQ ID NO: 1271548 - RNA, 19 nt, Artificial Sequence
  Description of Artificial Sequence: Synthetic oligonucleotide
cuaagccucuuaucccagu

SEQ ID NO: 1271549 - RNA, 19 nt, Artificial Sequence
  Description of Artificial Sequence: Synthetic oligonucleotide
cgguuuaagcaaagguauc

SEQ ID NO: 1271550 - RNA, 19 nt, Artificial Sequence
  Description of Artificial Sequence: Synthetic oligonucleotide
ccuagggacagagcuaaga

SEQ ID NO: 1271551 - RNA, 19 nt, Artificial Sequence
  Description of Artificial Sequence: Synthetic oligonucleotide
gguugcuguuguaaauuua

SEQ ID NO: 1271552 - RNA, 19 nt, Artificial Sequence
  Description of Artificial Sequence: Synthetic oligonucleotide
gagugucacaggggaucca

SEQ ID NO: 1271553 - RNA, 19 nt, Artificial Sequence
  Description of Artificial Sequence: Synthetic oligonucleotide
auacaucccugcaguguuu

SEQ ID NO: 1271554 - RNA, 19 nt, Artificial Sequence
  Description of Artificial Sequence: Synthetic oligonucleotide
ccacucaccaacucaacau

SEQ ID NO: 1271555 - RNA, 19 nt, Artificial Sequence
  Description of Artificial Sequence: Synthetic oligonucleotide
ggagggaucagggcagucu

SEQ ID NO: 1271556 - RNA, 19 nt, Artificial Sequence
  Description of Artificial Sequence: Synthetic oligonucleotide
gccucuuaucccagugcug

SEQ ID NO: 1271557 - RNA, 19 nt, Artificial Sequence
  Description of Artificial Sequence: Synthetic oligonucleotide
cccaauccuuacugauaac

SEQ ID NO: 1271558 - RNA, 19 nt, Artificial Sequence
  Description of Artificial Sequence: Synthetic oligonucleotide
uucugaccguuugccucau

SEQ ID NO: 1271559 - RNA, 19 nt, Artificial Sequence
  Description of Artificial Sequence: Synthetic oligonucleotide
ccucuuaucccagugcugu

SEQ ID NO: 1271560 - RNA, 19 nt, Artificial Sequence
  Description of Artificial Sequence: Synthetic oligonucleotide
agcccagcuuguguuucaa

SEQ ID NO: 1271561 - RNA, 19 nt, Artificial Sequence
  Description of Artificial Sequence: Synthetic oligonucleotide
caguauucguugucccaau

SEQ ID NO: 1271562 - RNA, 19 nt, Artificial Sequence
  Description of Artificial Sequence: Synthetic oligonucleotide
cugcaauuuagaggcugcu

SEQ ID NO: 1271563 - RNA, 19 nt, Artificial Sequence
  Description of Artificial Sequence: Synthetic oligonucleotide
uggggacaugaaggacuau

SEQ ID NO: 1271564 - RNA, 19 nt, Artificial Sequence
  Description of Artificial Sequence: Synthetic oligonucleotide
ccgugaucauuucacagau

SEQ ID NO: 1271565 - RNA, 19 nt, Artificial Sequence
  Description of Artificial Sequence: Synthetic oligonucleotide
accagaccucacacaucga

SEQ ID NO: 1271566 - RNA, 19 nt, Artificial Sequence
  Description of Artificial Sequence: Synthetic oligonucleotide
gcuguaacccuaagccucu

SEQ ID NO: 1271567 - RNA, 19 nt, Artificial Sequence
  Description of Artificial Sequence: Synthetic oligonucleotide
ggccauaaccccaguccaa

SEQ ID NO: 1271568 - RNA, 19 nt, Artificial Sequence
  Description of Artificial Sequence: Synthetic oligonucleotide
cacuaugguuugcuuccau

SEQ ID NO: 1271569 - RNA, 19 nt, Artificial Sequence
  Description of Artificial Sequence: Synthetic oligonucleotide
gaacuacauccgugaucau

SEQ ID NO: 1271570 - RNA, 19 nt, Artificial Sequence
  Description of Artificial Sequence: Synthetic oligonucleotide
gugcuauaaccugguaauu

SEQ ID NO: 1271571 - RNA, 19 nt, Artificial Sequence
  Description of Artificial Sequence: Synthetic oligonucleotide
caucgaggcugaggugaga

SEQ ID NO: 1271572 - RNA, 19 nt, Artificial Sequence
  Description of Artificial Sequence: Synthetic oligonucleotide
gguauccagaugguaucau

SEQ ID NO: 1271573 - RNA, 19 nt, Artificial Sequence
  Description of Artificial Sequence: Synthetic oligonucleotide
ggacagagcuaagaacuuu

SEQ ID NO: 1271574 - RNA, 19 nt, Artificial Sequence
  Description of Artificial Sequence: Synthetic oligonucleotide
gccauaccuuaagaggagu

SEQ ID NO: 1271575 - RNA, 19 nt, Artificial Sequence
  Description of Artificial Sequence: Synthetic oligonucleotide
gguagaguucugaccguuu

SEQ ID NO: 1271576 - RNA, 19 nt, Artificial Sequence
  Description of Artificial Sequence: Synthetic oligonucleotide
ccccuuguuuuaggauuac

SEQ ID NO: 1271577 - RNA, 19 nt, Artificial Sequence
  Description of Artificial Sequence: Synthetic oligonucleotide
ccagaugugguugcccggu

SEQ ID NO: 1271578 - RNA, 19 nt, Artificial Sequence
  Description of Artificial Sequence: Synthetic oligonucleotide
ccugugcuauaaccuggua

SEQ ID NO: 1271579 - RNA, 19 nt, Artificial Sequence
  Description of Artificial Sequence: Synthetic oligonucleotide
gcuaggccauaaccccagu

SEQ ID NO: 1271580 - RNA, 19 nt, Artificial Sequence
  Description of Artificial Sequence: Synthetic oligonucleotide
cccuuguuuuaggauuacu

SEQ ID NO: 1271581 - RNA, 19 nt, Artificial Sequence
  Description of Artificial Sequence: Synthetic oligonucleotide
gcucugcaggccauaccuu

SEQ ID NO: 1271582 - RNA, 19 nt, Artificial Sequence
  Description of Artificial Sequence: Synthetic oligonucleotide
gggcugcaauuuagaggcu

SEQ ID NO: 1271583 - RNA, 19 nt, Artificial Sequence
  Description of Artificial Sequence: Synthetic oligonucleotide
cguuugccucauguagccu

SEQ ID NO: 1271584 - RNA, 19 nt, Artificial Sequence
  Description of Artificial Sequence: Synthetic oligonucleotide
uugaguaacugacugaagg

SEQ ID NO: 1271585 - RNA, 19 nt, Artificial Sequence
  Description of Artificial Sequence: Synthetic oligonucleotide
aguauaaguaacccagugc

SEQ ID NO: 1271586 - RNA, 19 nt, Artificial Sequence
  Description of Artificial Sequence: Synthetic oligonucleotide
aauguggcuauuuaccguc

SEQ ID NO: 1271587 - RNA, 19 nt, Artificial Sequence
  Description of Artificial Sequence: Synthetic oligonucleotide
uauguaguuacauucacac

SEQ ID NO: 1271588 - RNA, 19 nt, Artificial Sequence
  Description of Artificial Sequence: Synthetic oligonucleotide
uucaaauuugcacaaacgu

SEQ ID NO: 1271589 - RNA, 19 nt, Artificial Sequence
  Description of Artificial Sequence: Synthetic oligonucleotide
uuauuugaguaacugacug

SEQ ID NO: 1271590 - RNA, 19 nt, Artificial Sequence
  Description of Artificial Sequence: Synthetic oligonucleotide
uuuugaaccaaccuuuuga

SEQ ID NO: 1271591 - RNA, 19 nt, Artificial Sequence
  Description of Artificial Sequence: Synthetic oligonucleotide
agagucacaagcuaagcgg

SEQ ID NO: 1271592 - RNA, 19 nt, Artificial Sequence
  Description of Artificial Sequence: Synthetic oligonucleotide
auucacaguauguaguuac

SEQ ID NO: 1271593 - RNA, 19 nt, Artificial Sequence
  Description of Artificial Sequence: Synthetic oligonucleotide
aguuaucucauccaggcag

SEQ ID NO: 1271594 - RNA, 19 nt, Artificial Sequence
  Description of Artificial Sequence: Synthetic oligonucleotide
aggauucucauuuguaacc

SEQ ID NO: 1271595 - RNA, 19 nt, Artificial Sequence
  Description of Artificial Sequence: Synthetic oligonucleotide
gacaauagaggauggagag

SEQ ID NO: 1271596 - RNA, 19 nt, Artificial Sequence
  Description of Artificial Sequence: Synthetic oligonucleotide
aaaauuaggcacugauguc

SEQ ID NO: 1271597 - RNA, 19 nt, Artificial Sequence
  Description of Artificial Sequence: Synthetic oligonucleotide
uucacuaguauaaguaacc

SEQ ID NO: 1271598 - RNA, 19 nt, Artificial Sequence
  Description of Artificial Sequence: Synthetic oligonucleotide
uuuacugagccaauguggc

SEQ ID NO: 1271599 - RNA, 19 nt, Artificial Sequence
  Description of Artificial Sequence: Synthetic oligonucleotide
agcuacaaaaguugagucc

SEQ ID NO: 1271600 - RNA, 19 nt, Artificial Sequence
  Description of Artificial Sequence: Synthetic oligonucleotide
gaaaauuaggcacugaugu

SEQ ID NO: 1271601 - RNA, 19 nt, Artificial Sequence
  Description of Artificial Sequence: Synthetic oligonucleotide
acuaguauaaguaacccag

SEQ ID NO: 1271602 - RNA, 19 nt, Artificial Sequence
  Description of Artificial Sequence: Synthetic oligonucleotide
ugaguaaagauccaggauu

SEQ ID NO: 1271603 - RNA, 19 nt, Artificial Sequence
  Description of Artificial Sequence: Synthetic oligonucleotide
aagagauguaaacauacau

SEQ ID NO: 1271604 - RNA, 19 nt, Artificial Sequence
  Description of Artificial Sequence: Synthetic oligonucleotide
uacaagacuuugcaaagag

SEQ ID NO: 1271605 - RNA, 19 nt, Artificial Sequence
  Description of Artificial Sequence: Synthetic oligonucleotide
caaagagauguaaacauac

SEQ ID NO: 1271606 - RNA, 19 nt, Artificial Sequence
  Description of Artificial Sequence: Synthetic oligonucleotide
ucaaauuugcacaaacguc

SEQ ID NO: 1271607 - RNA, 19 nt, Artificial Sequence
  Description of Artificial Sequence: Synthetic oligonucleotide
guauaaguaacccagugca

SEQ ID NO: 1271608 - RNA, 19 nt, Artificial Sequence
  Description of Artificial Sequence: Synthetic oligonucleotide
uguacaagacuuugcaaag

SEQ ID NO: 1271609 - RNA, 19 nt, Artificial Sequence
  Description of Artificial Sequence: Synthetic oligonucleotide
caaacgucccgcaagauac

SEQ ID NO: 1271610 - RNA, 19 nt, Artificial Sequence
  Description of Artificial Sequence: Synthetic oligonucleotide
aaauuugcacaaacguccc

SEQ ID NO: 1271611 - RNA, 19 nt, Artificial Sequence
  Description of Artificial Sequence: Synthetic oligonucleotide
uuuauuugaguaacugacu

SEQ ID NO: 1271612 - RNA, 19 nt, Artificial Sequence
  Description of Artificial Sequence: Synthetic oligonucleotide
auaaguaacccagugcagg

SEQ ID NO: 1271613 - RNA, 19 nt, Artificial Sequence
  Description of Artificial Sequence: Synthetic oligonucleotide
ugaggcuauuuacugagcc

SEQ ID NO: 1271614 - RNA, 19 nt, Artificial Sequence
  Description of Artificial Sequence: Synthetic oligonucleotide
ugaaugggaagacaacagc

SEQ ID NO: 1271615 - RNA, 19 nt, Artificial Sequence
  Description of Artificial Sequence: Synthetic oligonucleotide
uguacauggguuuggaggu

SEQ ID NO: 1271616 - RNA, 19 nt, Artificial Sequence
  Description of Artificial Sequence: Synthetic oligonucleotide
auuugcacaaacgucccgc

SEQ ID NO: 1271617 - RNA, 19 nt, Artificial Sequence
  Description of Artificial Sequence: Synthetic oligonucleotide
caaguuugggaauuuuagg

SEQ ID NO: 1271618 - RNA, 19 nt, Artificial Sequence
  Description of Artificial Sequence: Synthetic oligonucleotide
cuacuaggaccauagagag

SEQ ID NO: 1271619 - RNA, 19 nt, Artificial Sequence
  Description of Artificial Sequence: Synthetic oligonucleotide
accuacuaggaccauagag

SEQ ID NO: 1271620 - RNA, 19 nt, Artificial Sequence
  Description of Artificial Sequence: Synthetic oligonucleotide
aaauacacaccuccuuucu

SEQ ID NO: 1271621 - RNA, 19 nt, Artificial Sequence
  Description of Artificial Sequence: Synthetic oligonucleotide
uauaaguaacccagugcag

SEQ ID NO: 1271622 - RNA, 19 nt, Artificial Sequence
  Description of Artificial Sequence: Synthetic oligonucleotide
agacuuugcaaagagaugu

SEQ ID NO: 1271623 - RNA, 19 nt, Artificial Sequence
  Description of Artificial Sequence: Synthetic oligonucleotide
aauuugcacaaacgucccg

SEQ ID NO: 1271624 - RNA, 19 nt, Artificial Sequence
  Description of Artificial Sequence: Synthetic oligonucleotide
ugucuagagggaaaguuac

SEQ ID NO: 1271625 - RNA, 19 nt, Artificial Sequence
  Description of Artificial Sequence: Synthetic oligonucleotide
aaguugaguccccagaaaa

SEQ ID NO: 1271626 - RNA, 19 nt, Artificial Sequence
  Description of Artificial Sequence: Synthetic oligonucleotide
ugcacaaacgucccgcaag

SEQ ID NO: 1271627 - RNA, 19 nt, Artificial Sequence
  Description of Artificial Sequence: Synthetic oligonucleotide
ugaguccccagaaaauuag

SEQ ID NO: 1271628 - RNA, 19 nt, Artificial Sequence
  Description of Artificial Sequence: Synthetic oligonucleotide
uguggggacgguuucuugg

SEQ ID NO: 1271629 - RNA, 19 nt, Artificial Sequence
  Description of Artificial Sequence: Synthetic oligonucleotide
uuugaaccaaccuuuugaa

SEQ ID NO: 1271630 - RNA, 19 nt, Artificial Sequence
  Description of Artificial Sequence: Synthetic oligonucleotide
uaguaaccgacuuuauuug

SEQ ID NO: 1271631 - RNA, 19 nt, Artificial Sequence
  Description of Artificial Sequence: Synthetic oligonucleotide
aauuuuagguggugguggu

SEQ ID NO: 1271632 - RNA, 19 nt, Artificial Sequence
  Description of Artificial Sequence: Synthetic oligonucleotide
cuucacuaguauaaguaac

SEQ ID NO: 1271633 - RNA, 19 nt, Artificial Sequence
  Description of Artificial Sequence: Synthetic oligonucleotide
cuucaagaacaucaacagg

SEQ ID NO: 1271634 - RNA, 19 nt, Artificial Sequence
  Description of Artificial Sequence: Synthetic oligonucleotide
uuuugaggcuauuuacuga

SEQ ID NO: 1271635 - RNA, 19 nt, Artificial Sequence
  Description of Artificial Sequence: Synthetic oligonucleotide
uuccuugggagaaaccacc

SEQ ID NO: 1271636 - RNA, 19 nt, Artificial Sequence
  Description of Artificial Sequence: Synthetic oligonucleotide
agccaauguggcuauuuac

SEQ ID NO: 1271637 - RNA, 19 nt, Artificial Sequence
  Description of Artificial Sequence: Synthetic oligonucleotide
ugaguggucucaaguuugg

SEQ ID NO: 1271638 - RNA, 19 nt, Artificial Sequence
  Description of Artificial Sequence: Synthetic oligonucleotide
uuuaccgucuucacuagua

SEQ ID NO: 1271639 - RNA, 19 nt, Artificial Sequence
  Description of Artificial Sequence: Synthetic oligonucleotide
aaacuguucccaccaucuc

SEQ ID NO: 1271640 - RNA, 19 nt, Artificial Sequence
  Description of Artificial Sequence: Synthetic oligonucleotide
acaaacuguucccaccauc

SEQ ID NO: 1271641 - RNA, 19 nt, Artificial Sequence
  Description of Artificial Sequence: Synthetic oligonucleotide
cuauuuaccgucuucacua

SEQ ID NO: 1271642 - RNA, 19 nt, Artificial Sequence
  Description of Artificial Sequence: Synthetic oligonucleotide
auuacugcuacagcuauga

SEQ ID NO: 1271643 - RNA, 19 nt, Artificial Sequence
  Description of Artificial Sequence: Synthetic oligonucleotide
cuugagauggcugcgacug

SEQ ID NO: 1271644 - RNA, 19 nt, Artificial Sequence
  Description of Artificial Sequence: Synthetic oligonucleotide
gaaucuggacuuuggggag

SEQ ID NO: 1271645 - RNA, 19 nt, Artificial Sequence
  Description of Artificial Sequence: Synthetic oligonucleotide
uuugaguaacugacugaag

SEQ ID NO: 1271646 - RNA, 19 nt, Artificial Sequence
  Description of Artificial Sequence: Synthetic oligonucleotide
uaaguaacccagugcagga

SEQ ID NO: 1271647 - RNA, 19 nt, Artificial Sequence
  Description of Artificial Sequence: Synthetic oligonucleotide
uguggugaggcaucuguug

SEQ ID NO: 1271648 - RNA, 19 nt, Artificial Sequence
  Description of Artificial Sequence: Synthetic oligonucleotide
aguccccagaaaauuaggc

SEQ ID NO: 1271649 - RNA, 19 nt, Artificial Sequence
  Description of Artificial Sequence: Synthetic oligonucleotide
ugugaauccuucugcugag

SEQ ID NO: 1271650 - RNA, 19 nt, Artificial Sequence
  Description of Artificial Sequence: Synthetic oligonucleotide
agcuaugaucuccggcucc

SEQ ID NO: 1271651 - RNA, 19 nt, Artificial Sequence
  Description of Artificial Sequence: Synthetic oligonucleotide
ugcagagacugucauuuac

SEQ ID NO: 1271652 - RNA, 19 nt, Artificial Sequence
  Description of Artificial Sequence: Synthetic oligonucleotide
uaggcacugaugucuagag

SEQ ID NO: 1271653 - RNA, 19 nt, Artificial Sequence
  Description of Artificial Sequence: Synthetic oligonucleotide
gaaugggaagacaacagca

SEQ ID NO: 1271654 - RNA, 19 nt, Artificial Sequence
  Description of Artificial Sequence: Synthetic oligonucleotide
uguuguuucccuugugagu

SEQ ID NO: 1271655 - RNA, 19 nt, Artificial Sequence
  Description of Artificial Sequence: Synthetic oligonucleotide
cagacaauagaggauggag

SEQ ID NO: 1271656 - RNA, 19 nt, Artificial Sequence
  Description of Artificial Sequence: Synthetic oligonucleotide
gcuacaaaaguugaguccc

SEQ ID NO: 1271657 - RNA, 19 nt, Artificial Sequence
  Description of Artificial Sequence: Synthetic oligonucleotide
uauuuaccgucuucacuag

SEQ ID NO: 1271658 - RNA, 19 nt, Artificial Sequence
  Description of Artificial Sequence: Synthetic oligonucleotide
uggaggguaaccuggagua

SEQ ID NO: 1271659 - RNA, 19 nt, Artificial Sequence
  Description of Artificial Sequence: Synthetic oligonucleotide
cuugugaguaaagauccag

SEQ ID NO: 1271660 - RNA, 19 nt, Artificial Sequence
  Description of Artificial Sequence: Synthetic oligonucleotide
uaggaccauagagagaagc

SEQ ID NO: 1271661 - RNA, 19 nt, Artificial Sequence
  Description of Artificial Sequence: Synthetic oligonucleotide
gaggguaaccuggaguagg

SEQ ID NO: 1271662 - RNA, 19 nt, Artificial Sequence
  Description of Artificial Sequence: Synthetic oligonucleotide
uucacaguauguaguuaca

SEQ ID NO: 1271663 - RNA, 19 nt, Artificial Sequence
  Description of Artificial Sequence: Synthetic oligonucleotide
guaaccaagauggaauuca

SEQ ID NO: 1271664 - RNA, 19 nt, Artificial Sequence
  Description of Artificial Sequence: Synthetic oligonucleotide
caaauacacaccuccuuuc

SEQ ID NO: 1271665 - RNA, 19 nt, Artificial Sequence
  Description of Artificial Sequence: Synthetic oligonucleotide
aguaaccgacuuuauuuga

SEQ ID NO: 1271666 - RNA, 19 nt, Artificial Sequence
  Description of Artificial Sequence: Synthetic oligonucleotide
aaccgacuuuauuugagua

SEQ ID NO: 1271667 - RNA, 19 nt, Artificial Sequence
  Description of Artificial Sequence: Synthetic oligonucleotide
uaaccgacuuuauuugagu

SEQ ID NO: 1271668 - RNA, 19 nt, Artificial Sequence
  Description of Artificial Sequence: Synthetic oligonucleotide
caagacuuugcaaagagau

SEQ ID NO: 1271669 - RNA, 19 nt, Artificial Sequence
  Description of Artificial Sequence: Synthetic oligonucleotide
ugcgcuuagccugucgggg

SEQ ID NO: 1271670 - RNA, 19 nt, Artificial Sequence
  Description of Artificial Sequence: Synthetic oligonucleotide
uucccuugugaguaaagau

SEQ ID NO: 1271671 - RNA, 19 nt, Artificial Sequence
  Description of Artificial Sequence: Synthetic oligonucleotide
gcgacuguggcacuugugg

SEQ ID NO: 1271672 - RNA, 19 nt, Artificial Sequence
  Description of Artificial Sequence: Synthetic oligonucleotide
uuugcacaaacgucccgca

SEQ ID NO: 1271673 - RNA, 19 nt, Artificial Sequence
  Description of Artificial Sequence: Synthetic oligonucleotide
ccaauguggcuauuuaccg

SEQ ID NO: 1271674 - RNA, 19 nt, Artificial Sequence
  Description of Artificial Sequence: Synthetic oligonucleotide
uguggucacaccacaguua

SEQ ID NO: 1271675 - RNA, 19 nt, Artificial Sequence
  Description of Artificial Sequence: Synthetic oligonucleotide
gagaaaccaccacggugcg

SEQ ID NO: 1271676 - RNA, 19 nt, Artificial Sequence
  Description of Artificial Sequence: Synthetic oligonucleotide
uuaggcacugaugucuaga

SEQ ID NO: 1271677 - RNA, 19 nt, Artificial Sequence
  Description of Artificial Sequence: Synthetic oligonucleotide
uagaggauggagagucaca

SEQ ID NO: 1271678 - RNA, 19 nt, Artificial Sequence
  Description of Artificial Sequence: Synthetic oligonucleotide
ucggggaggacuagguugu

SEQ ID NO: 1271679 - RNA, 19 nt, Artificial Sequence
  Description of Artificial Sequence: Synthetic oligonucleotide
auugggguuguagguaggg

SEQ ID NO: 1271680 - RNA, 19 nt, Artificial Sequence
  Description of Artificial Sequence: Synthetic oligonucleotide
cugaugucuagagggaaag

SEQ ID NO: 1271681 - RNA, 19 nt, Artificial Sequence
  Description of Artificial Sequence: Synthetic oligonucleotide
cuagagggaaaguuacuca

SEQ ID NO: 1271682 - RNA, 19 nt, Artificial Sequence
  Description of Artificial Sequence: Synthetic oligonucleotide
accgacuuuauuugaguaa

SEQ ID NO: 1271683 - RNA, 19 nt, Artificial Sequence
  Description of Artificial Sequence: Synthetic oligonucleotide
auguaguuacauucacacu

SEQ ID NO: 1271684 - RNA, 19 nt, Artificial Sequence
  Description of Artificial Sequence: Synthetic oligonucleotide
gaggcuauuuacugagcca

SEQ ID NO: 1271685 - RNA, 19 nt, Artificial Sequence
  Description of Artificial Sequence: Synthetic oligonucleotide
gacuagguuguggggacgg

SEQ ID NO: 1271686 - RNA, 19 nt, Artificial Sequence
  Description of Artificial Sequence: Synthetic oligonucleotide
uugaggcuauuuacugagc

SEQ ID NO: 1271687 - RNA, 19 nt, Artificial Sequence
  Description of Artificial Sequence: Synthetic oligonucleotide
ccuacuaggaccauagaga

SEQ ID NO: 1271688 - RNA, 19 nt, Artificial Sequence
  Description of Artificial Sequence: Synthetic oligonucleotide
aauugggguuguagguagg

SEQ ID NO: 1271689 - RNA, 19 nt, Artificial Sequence
  Description of Artificial Sequence: Synthetic oligonucleotide
guuguuucccuugugagua

SEQ ID NO: 1271690 - RNA, 19 nt, Artificial Sequence
  Description of Artificial Sequence: Synthetic oligonucleotide
aggcacugaugucuagagg

SEQ ID NO: 1271691 - RNA, 19 nt, Artificial Sequence
  Description of Artificial Sequence: Synthetic oligonucleotide
guuaucucauccaggcagc

SEQ ID NO: 1271692 - RNA, 19 nt, Artificial Sequence
  Description of Artificial Sequence: Synthetic oligonucleotide
acaaacgucccgcaagaua

SEQ ID NO: 1271693 - RNA, 19 nt, Artificial Sequence
  Description of Artificial Sequence: Synthetic oligonucleotide
cacuaguauaaguaaccca

SEQ ID NO: 1271694 - RNA, 19 nt, Artificial Sequence
  Description of Artificial Sequence: Synthetic oligonucleotide
gaguccccagaaaauuagg

SEQ ID NO: 1271695 - RNA, 19 nt, Artificial Sequence
  Description of Artificial Sequence: Synthetic oligonucleotide
gauggagagucacaagcua

SEQ ID NO: 1271696 - RNA, 19 nt, Artificial Sequence
  Description of Artificial Sequence: Synthetic oligonucleotide
uguaaccaagauggaauuc

SEQ ID NO: 1271697 - RNA, 19 nt, Artificial Sequence
  Description of Artificial Sequence: Synthetic oligonucleotide
ggugcgcuuagccugucgg

SEQ ID NO: 1271698 - RNA, 19 nt, Artificial Sequence
  Description of Artificial Sequence: Synthetic oligonucleotide
uugcugcugcugcugcugg

SEQ ID NO: 1271699 - RNA, 19 nt, Artificial Sequence
  Description of Artificial Sequence: Synthetic oligonucleotide
ggcagggcgccauaggagg

SEQ ID NO: 1271700 - RNA, 19 nt, Artificial Sequence
  Description of Artificial Sequence: Synthetic oligonucleotide
gggaagacaacagcagacg

SEQ ID NO: 1271701 - RNA, 19 nt, Artificial Sequence
  Description of Artificial Sequence: Synthetic oligonucleotide
aggcuauuuacugagccaa

SEQ ID NO: 1271702 - RNA, 19 nt, Artificial Sequence
  Description of Artificial Sequence: Synthetic oligonucleotide
gccaauguggcuauuuacc

SEQ ID NO: 1271703 - RNA, 19 nt, Artificial Sequence
  Description of Artificial Sequence: Synthetic oligonucleotide
gaaauugggguuguaggua

SEQ ID NO: 1271704 - RNA, 19 nt, Artificial Sequence
  Description of Artificial Sequence: Synthetic oligonucleotide
aaccaagauggaauucaca

SEQ ID NO: 1271705 - RNA, 19 nt, Artificial Sequence
  Description of Artificial Sequence: Synthetic oligonucleotide
accgucuucacuaguauaa

SEQ ID NO: 1271706 - RNA, 19 nt, Artificial Sequence
  Description of Artificial Sequence: Synthetic oligonucleotide
agccccuccagacaauaga

SEQ ID NO: 1271707 - RNA, 19 nt, Artificial Sequence
  Description of Artificial Sequence: Synthetic oligonucleotide
guagacaucccagucaugu

SEQ ID NO: 1271708 - RNA, 19 nt, Artificial Sequence
  Description of Artificial Sequence: Synthetic oligonucleotide
gccgaugcggcaauggugg

SEQ ID NO: 1271709 - RNA, 19 nt, Artificial Sequence
  Description of Artificial Sequence: Synthetic oligonucleotide
aggcagcccgcccuagccc

SEQ ID NO: 1271710 - RNA, 19 nt, Artificial Sequence
  Description of Artificial Sequence: Synthetic oligonucleotide
uuaucucauccaggcagcc

SEQ ID NO: 1271711 - RNA, 19 nt, Artificial Sequence
  Description of Artificial Sequence: Synthetic oligonucleotide
auagagagaagcacugaau

SEQ ID NO: 1271712 - RNA, 19 nt, Artificial Sequence
  Description of Artificial Sequence: Synthetic oligonucleotide
agguuguggggacgguuuc

SEQ ID NO: 1271713 - RNA, 19 nt, Artificial Sequence
  Description of Artificial Sequence: Synthetic oligonucleotide
cugaagacuggaugugguc

SEQ ID NO: 1271714 - RNA, 19 nt, Artificial Sequence
  Description of Artificial Sequence: Synthetic oligonucleotide
auuuaccgucuucacuagu

SEQ ID NO: 1271715 - RNA, 19 nt, Artificial Sequence
  Description of Artificial Sequence: Synthetic oligonucleotide
ggaauuuuaggugguggug

SEQ ID NO: 1271716 - RNA, 19 nt, Artificial Sequence
  Description of Artificial Sequence: Synthetic oligonucleotide
aucuccuguacauggguuu

SEQ ID NO: 1271717 - RNA, 19 nt, Artificial Sequence
  Description of Artificial Sequence: Synthetic oligonucleotide
acaagcuaagcggggccac

SEQ ID NO: 1271718 - RNA, 19 nt, Artificial Sequence
  Description of Artificial Sequence: Synthetic oligonucleotide
gucacaagcuaagcggggc

SEQ ID NO: 1271719 - RNA, 19 nt, Artificial Sequence
  Description of Artificial Sequence: Synthetic oligonucleotide
acaauagaggauggagagu

SEQ ID NO: 1271720 - RNA, 19 nt, Artificial Sequence
  Description of Artificial Sequence: Synthetic oligonucleotide
uaagcggggccaccucacc

SEQ ID NO: 1271721 - RNA, 19 nt, Artificial Sequence
  Description of Artificial Sequence: Synthetic oligonucleotide
cuuccggucuggagguggg

SEQ ID NO: 1271722 - RNA, 19 nt, Artificial Sequence
  Description of Artificial Sequence: Synthetic oligonucleotide
agucauguagcuggagggu

SEQ ID NO: 1271723 - RNA, 19 nt, Artificial Sequence
  Description of Artificial Sequence: Synthetic oligonucleotide
cuuccccugacauguagga

SEQ ID NO: 1271724 - RNA, 19 nt, Artificial Sequence
  Description of Artificial Sequence: Synthetic oligonucleotide
gugcgcuuagccugucggg

SEQ ID NO: 1271725 - RNA, 19 nt, Artificial Sequence
  Description of Artificial Sequence: Synthetic oligonucleotide
ggacaaacuguucccacca

SEQ ID NO: 1271726 - RNA, 19 nt, Artificial Sequence
  Description of Artificial Sequence: Synthetic oligonucleotide
gaugucuagagggaaaguu

SEQ ID NO: 1271727 - RNA, 19 nt, Artificial Sequence
  Description of Artificial Sequence: Synthetic oligonucleotide
ugcgacuguggcacuugug

SEQ ID NO: 1271728 - RNA, 19 nt, Artificial Sequence
  Description of Artificial Sequence: Synthetic oligonucleotide
acaagacuuugcaaagaga

SEQ ID NO: 1271729 - RNA, 19 nt, Artificial Sequence
  Description of Artificial Sequence: Synthetic oligonucleotide
cuaagcggggccaccucac

SEQ ID NO: 1271730 - RNA, 19 nt, Artificial Sequence
  Description of Artificial Sequence: Synthetic oligonucleotide
cagagccuugagauggcug

SEQ ID NO: 1271731 - RNA, 19 nt, Artificial Sequence
  Description of Artificial Sequence: Synthetic oligonucleotide
gaccauagagagaagcacu

SEQ ID NO: 1271732 - RNA, 19 nt, Artificial Sequence
  Description of Artificial Sequence: Synthetic oligonucleotide
ugaugucuagagggaaagu

SEQ ID NO: 1271733 - RNA, 19 nt, Artificial Sequence
  Description of Artificial Sequence: Synthetic oligonucleotide
augucuagagggaaaguua

SEQ ID NO: 1271734 - RNA, 19 nt, Artificial Sequence
  Description of Artificial Sequence: Synthetic oligonucleotide
ccgcaagauacauuacugc

SEQ ID NO: 1271735 - RNA, 19 nt, Artificial Sequence
  Description of Artificial Sequence: Synthetic oligonucleotide
caccacggugcgcuuagcc

SEQ ID NO: 1271736 - RNA, 19 nt, Artificial Sequence
  Description of Artificial Sequence: Synthetic oligonucleotide
guggcuauuuaccgucuuc

SEQ ID NO: 1271737 - RNA, 19 nt, Artificial Sequence
  Description of Artificial Sequence: Synthetic oligonucleotide
uccuguacauggguuugga

SEQ ID NO: 1271738 - RNA, 19 nt, Artificial Sequence
  Description of Artificial Sequence: Synthetic oligonucleotide
aguugaguccccagaaaau

SEQ ID NO: 1271739 - RNA, 19 nt, Artificial Sequence
  Description of Artificial Sequence: Synthetic oligonucleotide
uuguggggacgguuucuug

SEQ ID NO: 1271740 - RNA, 19 nt, Artificial Sequence
  Description of Artificial Sequence: Synthetic oligonucleotide
ggaccauagagagaagcac

SEQ ID NO: 1271741 - RNA, 19 nt, Artificial Sequence
  Description of Artificial Sequence: Synthetic oligonucleotide
ggcaauggugggugagugg

SEQ ID NO: 1271742 - RNA, 19 nt, Artificial Sequence
  Description of Artificial Sequence: Synthetic oligonucleotide
ggucacaccacaguuaucu

SEQ ID NO: 1271743 - RNA, 19 nt, Artificial Sequence
  Description of Artificial Sequence: Synthetic oligonucleotide
ugagccaauguggcuauuu

SEQ ID NO: 1271744 - RNA, 19 nt, Artificial Sequence
  Description of Artificial Sequence: Synthetic oligonucleotide
uguggcuauuuaccgucuu

SEQ ID NO: 1271745 - RNA, 19 nt, Artificial Sequence
  Description of Artificial Sequence: Synthetic oligonucleotide
aacgucccgcaagauacau

SEQ ID NO: 1271746 - RNA, 19 nt, Artificial Sequence
  Description of Artificial Sequence: Synthetic oligonucleotide
caggcagcccgcccuagcc

SEQ ID NO: 1271747 - RNA, 19 nt, Artificial Sequence
  Description of Artificial Sequence: Synthetic oligonucleotide
cauuuguaaccaagaugga

SEQ ID NO: 1271748 - RNA, 19 nt, Artificial Sequence
  Description of Artificial Sequence: Synthetic oligonucleotide
cuuggacaaacuguuccca

SEQ ID NO: 1271749 - RNA, 19 nt, Artificial Sequence
  Description of Artificial Sequence: Synthetic oligonucleotide
uugagauggcugcgacugu

SEQ ID NO: 1271750 - RNA, 19 nt, Artificial Sequence
  Description of Artificial Sequence: Synthetic oligonucleotide
guugcugcugcugcugcug

SEQ ID NO: 1271751 - RNA, 19 nt, Artificial Sequence
  Description of Artificial Sequence: Synthetic oligonucleotide
guacaagacuuugcaaaga

SEQ ID NO: 1271752 - RNA, 19 nt, Artificial Sequence
  Description of Artificial Sequence: Synthetic oligonucleotide
agggaaaguuacucauuuu

SEQ ID NO: 1271753 - RNA, 19 nt, Artificial Sequence
  Description of Artificial Sequence: Synthetic oligonucleotide
gaguaacugacugaaggau

SEQ ID NO: 1271754 - RNA, 19 nt, Artificial Sequence
  Description of Artificial Sequence: Synthetic oligonucleotide
uguuucccuugugaguaaa

SEQ ID NO: 1271755 - RNA, 19 nt, Artificial Sequence
  Description of Artificial Sequence: Synthetic oligonucleotide
accucaccuacuaggacca

SEQ ID NO: 1271756 - RNA, 19 nt, Artificial Sequence
  Description of Artificial Sequence: Synthetic oligonucleotide
cuaguauaaguaacccagu

SEQ ID NO: 1271757 - RNA, 19 nt, Artificial Sequence
  Description of Artificial Sequence: Synthetic oligonucleotide
gugaguaaagauccaggau

SEQ ID NO: 1271758 - RNA, 19 nt, Artificial Sequence
  Description of Artificial Sequence: Synthetic oligonucleotide
gaguaaagauccaggauuu

SEQ ID NO: 1271759 - RNA, 19 nt, Artificial Sequence
  Description of Artificial Sequence: Synthetic oligonucleotide
gagccaauguggcuauuua

SEQ ID NO: 1271760 - RNA, 19 nt, Artificial Sequence
  Description of Artificial Sequence: Synthetic oligonucleotide
cuaggaccauagagagaag

SEQ ID NO: 1271761 - RNA, 19 nt, Artificial Sequence
  Description of Artificial Sequence: Synthetic oligonucleotide
caccuaaggcaggagcgag

SEQ ID NO: 1271762 - RNA, 19 nt, Artificial Sequence
  Description of Artificial Sequence: Synthetic oligonucleotide
aggccgaugcggcaauggu

SEQ ID NO: 1271763 - RNA, 19 nt, Artificial Sequence
  Description of Artificial Sequence: Synthetic oligonucleotide
agacgcagacaggaggaca

SEQ ID NO: 1271764 - RNA, 19 nt, Artificial Sequence
  Description of Artificial Sequence: Synthetic oligonucleotide
cuccuguacauggguuugg

SEQ ID NO: 1271765 - RNA, 19 nt, Artificial Sequence
  Description of Artificial Sequence: Synthetic oligonucleotide
aaacgucccgcaagauaca

SEQ ID NO: 1271766 - RNA, 19 nt, Artificial Sequence
  Description of Artificial Sequence: Synthetic oligonucleotide
ccuaaggcaggagcgagag

SEQ ID NO: 1271767 - RNA, 19 nt, Artificial Sequence
  Description of Artificial Sequence: Synthetic oligonucleotide
agggguguggugaggcauc

SEQ ID NO: 1271768 - RNA, 19 nt, Artificial Sequence
  Description of Artificial Sequence: Synthetic oligonucleotide
ggacacagauggcagcuga

SEQ ID NO: 1271769 - RNA, 19 nt, Artificial Sequence
  Description of Artificial Sequence: Synthetic oligonucleotide
gauagccacccagcauggc

SEQ ID NO: 1271770 - RNA, 19 nt, Artificial Sequence
  Description of Artificial Sequence: Synthetic oligonucleotide
guggugaggcaucuguugu

SEQ ID NO: 1271771 - RNA, 19 nt, Artificial Sequence
  Description of Artificial Sequence: Synthetic oligonucleotide
caauguggcuauuuaccgu

SEQ ID NO: 1271772 - RNA, 19 nt, Artificial Sequence
  Description of Artificial Sequence: Synthetic oligonucleotide
aaccaaccuuuugaauuuu

SEQ ID NO: 1271773 - RNA, 19 nt, Artificial Sequence
  Description of Artificial Sequence: Synthetic oligonucleotide
caauggugggugagugguc

SEQ ID NO: 1271774 - RNA, 19 nt, Artificial Sequence
  Description of Artificial Sequence: Synthetic oligonucleotide
ugcugcugcugcugcuggc

SEQ ID NO: 1271775 - RNA, 19 nt, Artificial Sequence
  Description of Artificial Sequence: Synthetic oligonucleotide
caaccuuuugaauuuuguu

SEQ ID NO: 1271776 - RNA, 19 nt, Artificial Sequence
  Description of Artificial Sequence: Synthetic oligonucleotide
gggaauuuuaggugguggu

SEQ ID NO: 1271777 - RNA, 19 nt, Artificial Sequence
  Description of Artificial Sequence: Synthetic oligonucleotide
ggauguggucacaccacag

SEQ ID NO: 1271778 - RNA, 19 nt, Artificial Sequence
  Description of Artificial Sequence: Synthetic oligonucleotide
gcuaugaucuccggcuccc

SEQ ID NO: 1271779 - RNA, 19 nt, Artificial Sequence
  Description of Artificial Sequence: Synthetic oligonucleotide
ccacggugcgcuuagccug

SEQ ID NO: 1271780 - RNA, 19 nt, Artificial Sequence
  Description of Artificial Sequence: Synthetic oligonucleotide
agagggaaaguuacucauu

SEQ ID NO: 1271781 - RNA, 19 nt, Artificial Sequence
  Description of Artificial Sequence: Synthetic oligonucleotide
guugaguccccagaaaauu

SEQ ID NO: 1271782 - RNA, 19 nt, Artificial Sequence
  Description of Artificial Sequence: Synthetic oligonucleotide
gcacaaacgucccgcaaga

SEQ ID NO: 1271783 - RNA, 19 nt, Artificial Sequence
  Description of Artificial Sequence: Synthetic oligonucleotide
gccccuccagacaauagag

SEQ ID NO: 1271784 - RNA, 19 nt, Artificial Sequence
  Description of Artificial Sequence: Synthetic oligonucleotide
caguuaucucauccaggca

SEQ ID NO: 1271785 - RNA, 19 nt, Artificial Sequence
  Description of Artificial Sequence: Synthetic oligonucleotide
ccgacagguggcaugccag

SEQ ID NO: 1271786 - RNA, 19 nt, Artificial Sequence
  Description of Artificial Sequence: Synthetic oligonucleotide
ccccuccagacaauagagg

SEQ ID NO: 1271787 - RNA, 19 nt, Artificial Sequence
  Description of Artificial Sequence: Synthetic oligonucleotide
uggucacaccacaguuauc

SEQ ID NO: 1271788 - RNA, 19 nt, Artificial Sequence
  Description of Artificial Sequence: Synthetic oligonucleotide
gcaaagagauguaaacaua

SEQ ID NO: 1271789 - RNA, 19 nt, Artificial Sequence
  Description of Artificial Sequence: Synthetic oligonucleotide
uggaggccgaugcggcaau

SEQ ID NO: 1271790 - RNA, 19 nt, Artificial Sequence
  Description of Artificial Sequence: Synthetic oligonucleotide
ggaggguaaccuggaguag

SEQ ID NO: 1271791 - RNA, 19 nt, Artificial Sequence
  Description of Artificial Sequence: Synthetic oligonucleotide
agccucaccuaaggcagga

SEQ ID NO: 1271792 - RNA, 19 nt, Artificial Sequence
  Description of Artificial Sequence: Synthetic oligonucleotide
ggguaaccuggaguagggg

SEQ ID NO: 1271793 - RNA, 19 nt, Artificial Sequence
  Description of Artificial Sequence: Synthetic oligonucleotide
ggcgccauaggaggggccc

SEQ ID NO: 1271794 - RNA, 19 nt, Artificial Sequence
  Description of Artificial Sequence: Synthetic oligonucleotide
cagauggcagcugaagacu

SEQ ID NO: 1271795 - RNA, 19 nt, Artificial Sequence
  Description of Artificial Sequence: Synthetic oligonucleotide
auguggcuauuuaccgucu

SEQ ID NO: 1271796 - RNA, 19 nt, Artificial Sequence
  Description of Artificial Sequence: Synthetic oligonucleotide
accuaaggcaggagcgaga

SEQ ID NO: 1271797 - RNA, 19 nt, Artificial Sequence
  Description of Artificial Sequence: Synthetic oligonucleotide
ggccgaugcggcaauggug

SEQ ID NO: 1271798 - RNA, 19 nt, Artificial Sequence
  Description of Artificial Sequence: Synthetic oligonucleotide
acuagguuguggggacggu

SEQ ID NO: 1271799 - RNA, 19 nt, Artificial Sequence
  Description of Artificial Sequence: Synthetic oligonucleotide
cagacgcagacaggaggac

SEQ ID NO: 1271800 - RNA, 19 nt, Artificial Sequence
  Description of Artificial Sequence: Synthetic oligonucleotide
gcaauggugggugaguggu

SEQ ID NO: 1271801 - RNA, 19 nt, Artificial Sequence
  Description of Artificial Sequence: Synthetic oligonucleotide
cacugaugucuagagggaa

SEQ ID NO: 1271802 - RNA, 19 nt, Artificial Sequence
  Description of Artificial Sequence: Synthetic oligonucleotide
gacaaacuguucccaccau

SEQ ID NO: 1271803 - RNA, 19 nt, Artificial Sequence
  Description of Artificial Sequence: Synthetic oligonucleotide
gccuugagauggcugcgac

SEQ ID NO: 1271804 - RNA, 19 nt, Artificial Sequence
  Description of Artificial Sequence: Synthetic oligonucleotide
cgucccgcaagauacauua

SEQ ID NO: 1271805 - RNA, 19 nt, Artificial Sequence
  Description of Artificial Sequence: Synthetic oligonucleotide
acaggaggacacagcuaca

SEQ ID NO: 1271806 - RNA, 19 nt, Artificial Sequence
  Description of Artificial Sequence: Synthetic oligonucleotide
gauggaaauugggguugua

SEQ ID NO: 1271807 - RNA, 19 nt, Artificial Sequence
  Description of Artificial Sequence: Synthetic oligonucleotide
cagaugucuucaagaacau

SEQ ID NO: 1271808 - RNA, 19 nt, Artificial Sequence
  Description of Artificial Sequence: Synthetic oligonucleotide
acgguuucuugggcugcug

SEQ ID NO: 1271809 - RNA, 19 nt, Artificial Sequence
  Description of Artificial Sequence: Synthetic oligonucleotide
guggugcagagacugucau

SEQ ID NO: 1271810 - RNA, 19 nt, Artificial Sequence
  Description of Artificial Sequence: Synthetic oligonucleotide
gcuuagccugucggggagg

SEQ ID NO: 1271811 - RNA, 19 nt, Artificial Sequence
  Description of Artificial Sequence: Synthetic oligonucleotide
cugacauguaggagcuggu

SEQ ID NO: 1271812 - RNA, 19 nt, Artificial Sequence
  Description of Artificial Sequence: Synthetic oligonucleotide
cugucggggaggacuaggu

SEQ ID NO: 1271813 - RNA, 19 nt, Artificial Sequence
  Description of Artificial Sequence: Synthetic oligonucleotide
ggacgguuucuugggcugc

SEQ ID NO: 1271814 - RNA, 19 nt, Artificial Sequence
  Description of Artificial Sequence: Synthetic oligonucleotide
caucuccuguacauggguu

SEQ ID NO: 1271815 - RNA, 19 nt, Artificial Sequence
  Description of Artificial Sequence: Synthetic oligonucleotide
gucuagagggaaaguuacu

SEQ ID NO: 1271816 - RNA, 19 nt, Artificial Sequence
  Description of Artificial Sequence: Synthetic oligonucleotide
cucaccuacuaggaccaua

SEQ ID NO: 1271817 - RNA, 19 nt, Artificial Sequence
  Description of Artificial Sequence: Synthetic oligonucleotide
ccaccucaccuacuaggac

SEQ ID NO: 1271818 - RNA, 19 nt, Artificial Sequence
  Description of Artificial Sequence: Synthetic oligonucleotide
uuccggucuggaggugggu

SEQ ID NO: 1271819 - RNA, 19 nt, Artificial Sequence
  Description of Artificial Sequence: Synthetic oligonucleotide
caccuacuaggaccauaga

SEQ ID NO: 1271820 - RNA, 19 nt, Artificial Sequence
  Description of Artificial Sequence: Synthetic oligonucleotide
gccauaggaggggcccucg

SEQ ID NO: 1271821 - RNA, 19 nt, Artificial Sequence
  Description of Artificial Sequence: Synthetic oligonucleotide
ggggccaccucaccuacua

SEQ ID NO: 1271822 - RNA, 19 nt, Artificial Sequence
  Description of Artificial Sequence: Synthetic oligonucleotide
cuaugaucuccggcuccca

SEQ ID NO: 1271823 - RNA, 19 nt, Artificial Sequence
  Description of Artificial Sequence: Synthetic oligonucleotide
ggggcccucggucuucauc

SEQ ID NO: 1271824 - RNA, 19 nt, Artificial Sequence
  Description of Artificial Sequence: Synthetic oligonucleotide
gacgguuucuugggcugcu

SEQ ID NO: 1271825 - RNA, 19 nt, Artificial Sequence
  Description of Artificial Sequence: Synthetic oligonucleotide
gcgcuuagccugucgggga

SEQ ID NO: 1271826 - RNA, 19 nt, Artificial Sequence
  Description of Artificial Sequence: Synthetic oligonucleotide
ccccagaaaauuaggcacu

SEQ ID NO: 1271827 - RNA, 19 nt, Artificial Sequence
  Description of Artificial Sequence: Synthetic oligonucleotide
cacggugcgcuuagccugu

SEQ ID NO: 1271828 - RNA, 19 nt, Artificial Sequence
  Description of Artificial Sequence: Synthetic oligonucleotide
ggugaggcaucuguuguuu

SEQ ID NO: 1271829 - RNA, 19 nt, Artificial Sequence
  Description of Artificial Sequence: Synthetic oligonucleotide
ggucucaaguuugggaauu

SEQ ID NO: 1271830 - RNA, 19 nt, Artificial Sequence
  Description of Artificial Sequence: Synthetic oligonucleotide
acgucccgcaagauacauu

SEQ ID NO: 1271831 - RNA, 19 nt, Artificial Sequence
  Description of Artificial Sequence: Synthetic oligonucleotide
cuagguuguggggacgguu

SEQ ID NO: 1271832 - RNA, 19 nt, Artificial Sequence
  Description of Artificial Sequence: Synthetic oligonucleotide
gcggggccaccucaccuac

SEQ ID NO: 1271833 - RNA, 19 nt, Artificial Sequence
  Description of Artificial Sequence: Synthetic oligonucleotide
gggacaucuuggacaaacu

SEQ ID NO: 1271834 - RNA, 19 nt, Artificial Sequence
  Description of Artificial Sequence: Synthetic oligonucleotide
cccgacagguggcaugcca

SEQ ID NO: 1271835 - RNA, 19 nt, Artificial Sequence
  Description of Artificial Sequence: Synthetic oligonucleotide
ggugggugaguggucucaa

SEQ ID NO: 1271836 - RNA, 19 nt, Artificial Sequence
  Description of Artificial Sequence: Synthetic oligonucleotide
gcuggccgacugcugugaa

SEQ ID NO: 1271837 - RNA, 19 nt, Artificial Sequence
  Description of Artificial Sequence: Synthetic oligonucleotide
cacaaacgucccgcaagau

SEQ ID NO: 1271838 - RNA, 19 nt, Artificial Sequence
  Description of Artificial Sequence: Synthetic oligonucleotide
cggugcgcuuagccugucg

SEQ ID NO: 1271839 - RNA, 19 nt, Artificial Sequence
  Description of Artificial Sequence: Synthetic oligonucleotide
ggaggggcccucggucuuc

SEQ ID NO: 1271840 - RNA, 19 nt, Artificial Sequence
  Description of Artificial Sequence: Synthetic oligonucleotide
gccugucggggaggacuag

SEQ ID NO: 1271841 - RNA, 19 nt, Artificial Sequence
  Description of Artificial Sequence: Synthetic oligonucleotide
ggcuuccggucuggaggug

SEQ ID NO: 1271842 - RNA, 19 nt, Artificial Sequence
  Description of Artificial Sequence: Synthetic oligonucleotide
ccaccacggugcgcuuagc

SEQ ID NO: 1271843 - RNA, 19 nt, Artificial Sequence
  Description of Artificial Sequence: Synthetic oligonucleotide
ccccgacagguggcaugcc

SEQ ID NO: 1271844 - RNA, 19 nt, Artificial Sequence
  Description of Artificial Sequence: Synthetic oligonucleotide
gcgccauaggaggggcccu

SEQ ID NO: 1271845 - RNA, 19 nt, Artificial Sequence
  Description of Artificial Sequence: Synthetic oligonucleotide
ccucaccuacuaggaccau

SEQ ID NO: 1271846 - RNA, 19 nt, Artificial Sequence
  Description of Artificial Sequence: Synthetic oligonucleotide
aaagccacggcauugaugu

SEQ ID NO: 1271847 - RNA, 19 nt, Artificial Sequence
  Description of Artificial Sequence: Synthetic oligonucleotide
ucgacuuuuaucuucacag

SEQ ID NO: 1271848 - RNA, 19 nt, Artificial Sequence
  Description of Artificial Sequence: Synthetic oligonucleotide
auagcauggaccuuguugg

SEQ ID NO: 1271849 - RNA, 19 nt, Artificial Sequence
  Description of Artificial Sequence: Synthetic oligonucleotide
aaggcaaccgaggugaugc

SEQ ID NO: 1271850 - RNA, 19 nt, Artificial Sequence
  Description of Artificial Sequence: Synthetic oligonucleotide
ucaaacaggcgacaugugg

SEQ ID NO: 1271851 - RNA, 19 nt, Artificial Sequence
  Description of Artificial Sequence: Synthetic oligonucleotide
gauagcauggaccuuguug

SEQ ID NO: 1271852 - RNA, 19 nt, Artificial Sequence
  Description of Artificial Sequence: Synthetic oligonucleotide
acuguguccagcaaaaccc

SEQ ID NO: 1271853 - RNA, 19 nt, Artificial Sequence
  Description of Artificial Sequence: Synthetic oligonucleotide
aaagguacccaguguggcc

SEQ ID NO: 1271854 - RNA, 19 nt, Artificial Sequence
  Description of Artificial Sequence: Synthetic oligonucleotide
aaugucugucggcacaugg

SEQ ID NO: 1271855 - RNA, 19 nt, Artificial Sequence
  Description of Artificial Sequence: Synthetic oligonucleotide
aaagcggcagcaugaaagg

SEQ ID NO: 1271856 - RNA, 19 nt, Artificial Sequence
  Description of Artificial Sequence: Synthetic oligonucleotide
ucgaacaucccauagcuug

SEQ ID NO: 1271857 - RNA, 19 nt, Artificial Sequence
  Description of Artificial Sequence: Synthetic oligonucleotide
aaaggugcggccaucaggg

SEQ ID NO: 1271858 - RNA, 19 nt, Artificial Sequence
  Description of Artificial Sequence: Synthetic oligonucleotide
ucugcuaacccugacauug

SEQ ID NO: 1271859 - RNA, 19 nt, Artificial Sequence
  Description of Artificial Sequence: Synthetic oligonucleotide
uagccauuggggaagaaag

SEQ ID NO: 1271860 - RNA, 19 nt, Artificial Sequence
  Description of Artificial Sequence: Synthetic oligonucleotide
aaacaggcgacauguggcg

SEQ ID NO: 1271861 - RNA, 19 nt, Artificial Sequence
  Description of Artificial Sequence: Synthetic oligonucleotide
ucucgaacaucccauagcu

SEQ ID NO: 1271862 - RNA, 19 nt, Artificial Sequence
  Description of Artificial Sequence: Synthetic oligonucleotide
ugaaagguacccagugugg

SEQ ID NO: 1271863 - RNA, 19 nt, Artificial Sequence
  Description of Artificial Sequence: Synthetic oligonucleotide
ucaugggaauacaugagca

SEQ ID NO: 1271864 - RNA, 19 nt, Artificial Sequence
  Description of Artificial Sequence: Synthetic oligonucleotide
augaaagguacccagugug

SEQ ID NO: 1271865 - RNA, 19 nt, Artificial Sequence
  Description of Artificial Sequence: Synthetic oligonucleotide
aucucgaacaucccauagc

SEQ ID NO: 1271866 - RNA, 19 nt, Artificial Sequence
  Description of Artificial Sequence: Synthetic oligonucleotide
aaucucgaacaucccauag

SEQ ID NO: 1271867 - RNA, 19 nt, Artificial Sequence
  Description of Artificial Sequence: Synthetic oligonucleotide
agcaaaacccacugucugc

SEQ ID NO: 1271868 - RNA, 19 nt, Artificial Sequence
  Description of Artificial Sequence: Synthetic oligonucleotide
augggaauacaugagcagc

SEQ ID NO: 1271869 - RNA, 19 nt, Artificial Sequence
  Description of Artificial Sequence: Synthetic oligonucleotide
uuuaucuucacagggcacc

SEQ ID NO: 1271870 - RNA, 19 nt, Artificial Sequence
  Description of Artificial Sequence: Synthetic oligonucleotide
aaggcauagccauugggga

SEQ ID NO: 1271871 - RNA, 19 nt, Artificial Sequence
  Description of Artificial Sequence: Synthetic oligonucleotide
caaacaggcgacauguggc

SEQ ID NO: 1271872 - RNA, 19 nt, Artificial Sequence
  Description of Artificial Sequence: Synthetic oligonucleotide
ucccauagcuugauggagg

SEQ ID NO: 1271873 - RNA, 19 nt, Artificial Sequence
  Description of Artificial Sequence: Synthetic oligonucleotide
caaaccuggguguaggagc

SEQ ID NO: 1271874 - RNA, 19 nt, Artificial Sequence
  Description of Artificial Sequence: Synthetic oligonucleotide
ugucaugggaauacaugag

SEQ ID NO: 1271875 - RNA, 19 nt, Artificial Sequence
  Description of Artificial Sequence: Synthetic oligonucleotide
ugcacggucacccuucaug

SEQ ID NO: 1271876 - RNA, 19 nt, Artificial Sequence
  Description of Artificial Sequence: Synthetic oligonucleotide
accuaugaaugucugucgg

SEQ ID NO: 1271877 - RNA, 19 nt, Artificial Sequence
  Description of Artificial Sequence: Synthetic oligonucleotide
uguagugugggcacaggca

SEQ ID NO: 1271878 - RNA, 19 nt, Artificial Sequence
  Description of Artificial Sequence: Synthetic oligonucleotide
uguguacccagccccaaag

SEQ ID NO: 1271879 - RNA, 19 nt, Artificial Sequence
  Description of Artificial Sequence: Synthetic oligonucleotide
ucugaucccguggugaagg

SEQ ID NO: 1271880 - RNA, 19 nt, Artificial Sequence
  Description of Artificial Sequence: Synthetic oligonucleotide
ucugccaaggggucgcucg

SEQ ID NO: 1271881 - RNA, 19 nt, Artificial Sequence
  Description of Artificial Sequence: Synthetic oligonucleotide
ugaccagcagccuugaguc

SEQ ID NO: 1271882 - RNA, 19 nt, Artificial Sequence
  Description of Artificial Sequence: Synthetic oligonucleotide
ugauuugguugucauccag

SEQ ID NO: 1271883 - RNA, 19 nt, Artificial Sequence
  Description of Artificial Sequence: Synthetic oligonucleotide
caucccaucaucugugacc

SEQ ID NO: 1271884 - RNA, 19 nt, Artificial Sequence
  Description of Artificial Sequence: Synthetic oligonucleotide
uagaguuggaagugguucc

SEQ ID NO: 1271885 - RNA, 19 nt, Artificial Sequence
  Description of Artificial Sequence: Synthetic oligonucleotide
uuagaguuggaagugguuc

SEQ ID NO: 1271886 - RNA, 19 nt, Artificial Sequence
  Description of Artificial Sequence: Synthetic oligonucleotide
acaggcacccgacacaaag

SEQ ID NO: 1271887 - RNA, 19 nt, Artificial Sequence
  Description of Artificial Sequence: Synthetic oligonucleotide
guuaucauggccagcgagg

SEQ ID NO: 1271888 - RNA, 19 nt, Artificial Sequence
  Description of Artificial Sequence: Synthetic oligonucleotide
ucucugcuaacccugacau

SEQ ID NO: 1271889 - RNA, 19 nt, Artificial Sequence
  Description of Artificial Sequence: Synthetic oligonucleotide
gacucaugaccuaugaaug

SEQ ID NO: 1271890 - RNA, 19 nt, Artificial Sequence
  Description of Artificial Sequence: Synthetic oligonucleotide
uucucaucugaauucuccc

SEQ ID NO: 1271891 - RNA, 19 nt, Artificial Sequence
  Description of Artificial Sequence: Synthetic oligonucleotide
guagugugggcacaggcag

SEQ ID NO: 1271892 - RNA, 19 nt, Artificial Sequence
  Description of Artificial Sequence: Synthetic oligonucleotide
acgguuaucauggccagcg

SEQ ID NO: 1271893 - RNA, 19 nt, Artificial Sequence
  Description of Artificial Sequence: Synthetic oligonucleotide
auggaggcgucacaggcac

SEQ ID NO: 1271894 - RNA, 19 nt, Artificial Sequence
  Description of Artificial Sequence: Synthetic oligonucleotide
gauguugcaguugaaguca

SEQ ID NO: 1271895 - RNA, 19 nt, Artificial Sequence
  Description of Artificial Sequence: Synthetic oligonucleotide
aagucaaacaggcgacaug

SEQ ID NO: 1271896 - RNA, 19 nt, Artificial Sequence
  Description of Artificial Sequence: Synthetic oligonucleotide
aaagcuccgggccuguagu

SEQ ID NO: 1271897 - RNA, 19 nt, Artificial Sequence
  Description of Artificial Sequence: Synthetic oligonucleotide
ugggguuuccaucuccugc

SEQ ID NO: 1271898 - RNA, 19 nt, Artificial Sequence
  Description of Artificial Sequence: Synthetic oligonucleotide
uggguguaggagcaggacc

SEQ ID NO: 1271899 - RNA, 19 nt, Artificial Sequence
  Description of Artificial Sequence: Synthetic oligonucleotide
cuauagauggagcagaugu

SEQ ID NO: 1271900 - RNA, 19 nt, Artificial Sequence
  Description of Artificial Sequence: Synthetic oligonucleotide
auguggcgucaucugaucc

SEQ ID NO: 1271901 - RNA, 19 nt, Artificial Sequence
  Description of Artificial Sequence: Synthetic oligonucleotide
ugaccuaugaaugucuguc

SEQ ID NO: 1271902 - RNA, 19 nt, Artificial Sequence
  Description of Artificial Sequence: Synthetic oligonucleotide
ucugucggcacauggaauc

SEQ ID NO: 1271903 - RNA, 19 nt, Artificial Sequence
  Description of Artificial Sequence: Synthetic oligonucleotide
ucaugaccuaugaaugucu

SEQ ID NO: 1271904 - RNA, 19 nt, Artificial Sequence
  Description of Artificial Sequence: Synthetic oligonucleotide
cauuggggaagaaagccac

SEQ ID NO: 1271905 - RNA, 19 nt, Artificial Sequence
  Description of Artificial Sequence: Synthetic oligonucleotide
ugggacucugccaaggggu

SEQ ID NO: 1271906 - RNA, 19 nt, Artificial Sequence
  Description of Artificial Sequence: Synthetic oligonucleotide
aaccaaaccuggguguagg

SEQ ID NO: 1271907 - RNA, 19 nt, Artificial Sequence
  Description of Artificial Sequence: Synthetic oligonucleotide
uguggcgucaucugauccc

SEQ ID NO: 1271908 - RNA, 19 nt, Artificial Sequence
  Description of Artificial Sequence: Synthetic oligonucleotide
caaaggugcggccaucagg

SEQ ID NO: 1271909 - RNA, 19 nt, Artificial Sequence
  Description of Artificial Sequence: Synthetic oligonucleotide
uuuuaucuucacagggcac

SEQ ID NO: 1271910 - RNA, 19 nt, Artificial Sequence
  Description of Artificial Sequence: Synthetic oligonucleotide
ugaucagcccgcaagucaa

SEQ ID NO: 1271911 - RNA, 19 nt, Artificial Sequence
  Description of Artificial Sequence: Synthetic oligonucleotide
ucacucauggcgccgggcc

SEQ ID NO: 1271912 - RNA, 19 nt, Artificial Sequence
  Description of Artificial Sequence: Synthetic oligonucleotide
uuuucuggcgucccggauc

SEQ ID NO: 1271913 - RNA, 19 nt, Artificial Sequence
  Description of Artificial Sequence: Synthetic oligonucleotide
uuggcauguguacccagcc

SEQ ID NO: 1271914 - RNA, 19 nt, Artificial Sequence
  Description of Artificial Sequence: Synthetic oligonucleotide
uguaggagcaggacccaug

SEQ ID NO: 1271915 - RNA, 19 nt, Artificial Sequence
  Description of Artificial Sequence: Synthetic oligonucleotide
auuugguugucauccagaa

SEQ ID NO: 1271916 - RNA, 19 nt, Artificial Sequence
  Description of Artificial Sequence: Synthetic oligonucleotide
gaaagguacccaguguggc

SEQ ID NO: 1271917 - RNA, 19 nt, Artificial Sequence
  Description of Artificial Sequence: Synthetic oligonucleotide
uuucuggcgucccggaucu

SEQ ID NO: 1271918 - RNA, 19 nt, Artificial Sequence
  Description of Artificial Sequence: Synthetic oligonucleotide
ugucugucggcacauggaa

SEQ ID NO: 1271919 - RNA, 19 nt, Artificial Sequence
  Description of Artificial Sequence: Synthetic oligonucleotide
ucacacgguuaucauggcc

SEQ ID NO: 1271920 - RNA, 19 nt, Artificial Sequence
  Description of Artificial Sequence: Synthetic oligonucleotide
gacaccugcacggucaccc

SEQ ID NO: 1271921 - RNA, 19 nt, Artificial Sequence
  Description of Artificial Sequence: Synthetic oligonucleotide
ugguugucauccagaaagc

SEQ ID NO: 1271922 - RNA, 19 nt, Artificial Sequence
  Description of Artificial Sequence: Synthetic oligonucleotide
acucaugaccuaugaaugu

SEQ ID NO: 1271923 - RNA, 19 nt, Artificial Sequence
  Description of Artificial Sequence: Synthetic oligonucleotide
gcucacacgguuaucaugg

SEQ ID NO: 1271924 - RNA, 19 nt, Artificial Sequence
  Description of Artificial Sequence: Synthetic oligonucleotide
uuaucauggccagcgagga

SEQ ID NO: 1271925 - RNA, 19 nt, Artificial Sequence
  Description of Artificial Sequence: Synthetic oligonucleotide
uggaagugguuccuuuaug

SEQ ID NO: 1271926 - RNA, 19 nt, Artificial Sequence
  Description of Artificial Sequence: Synthetic oligonucleotide
uagccagcgagcagcagcc

SEQ ID NO: 1271927 - RNA, 19 nt, Artificial Sequence
  Description of Artificial Sequence: Synthetic oligonucleotide
cagcaugaaagguacccag

SEQ ID NO: 1271928 - RNA, 19 nt, Artificial Sequence
  Description of Artificial Sequence: Synthetic oligonucleotide
cuuggcauguguacccagc

SEQ ID NO: 1271929 - RNA, 19 nt, Artificial Sequence
  Description of Artificial Sequence: Synthetic oligonucleotide
uaugaaugucugucggcac

SEQ ID NO: 1271930 - RNA, 19 nt, Artificial Sequence
  Description of Artificial Sequence: Synthetic oligonucleotide
aagguacccaguguggcca

SEQ ID NO: 1271931 - RNA, 19 nt, Artificial Sequence
  Description of Artificial Sequence: Synthetic oligonucleotide
aucugugaccccaaggcag

SEQ ID NO: 1271932 - RNA, 19 nt, Artificial Sequence
  Description of Artificial Sequence: Synthetic oligonucleotide
agggauagcauggaccuug

SEQ ID NO: 1271933 - RNA, 19 nt, Artificial Sequence
  Description of Artificial Sequence: Synthetic oligonucleotide
aauccccgcaugcuuuucu

SEQ ID NO: 1271934 - RNA, 19 nt, Artificial Sequence
  Description of Artificial Sequence: Synthetic oligonucleotide
caucucgacuuuuaucuuc

SEQ ID NO: 1271935 - RNA, 19 nt, Artificial Sequence
  Description of Artificial Sequence: Synthetic oligonucleotide
ugcgcgagaaggcaaccga

SEQ ID NO: 1271936 - RNA, 19 nt, Artificial Sequence
  Description of Artificial Sequence: Synthetic oligonucleotide
aggaaccaaaccugggugu

SEQ ID NO: 1271937 - RNA, 19 nt, Artificial Sequence
  Description of Artificial Sequence: Synthetic oligonucleotide
caugaccuaugaaugucug

SEQ ID NO: 1271938 - RNA, 19 nt, Artificial Sequence
  Description of Artificial Sequence: Synthetic oligonucleotide
uacaugagcagcuccugau

SEQ ID NO: 1271939 - RNA, 19 nt, Artificial Sequence
  Description of Artificial Sequence: Synthetic oligonucleotide
uuaucuucacagggcaccc

SEQ ID NO: 1271940 - RNA, 19 nt, Artificial Sequence
  Description of Artificial Sequence: Synthetic oligonucleotide
ugcuaacccugacauugcc

SEQ ID NO: 1271941 - RNA, 19 nt, Artificial Sequence
  Description of Artificial Sequence: Synthetic oligonucleotide
uccugaucagcccgcaagu

SEQ ID NO: 1271942 - RNA, 19 nt, Artificial Sequence
  Description of Artificial Sequence: Synthetic oligonucleotide
acaggcgacauguggcguc

SEQ ID NO: 1271943 - RNA, 19 nt, Artificial Sequence
  Description of Artificial Sequence: Synthetic oligonucleotide
cuccugaucagcccgcaag

SEQ ID NO: 1271944 - RNA, 19 nt, Artificial Sequence
  Description of Artificial Sequence: Synthetic oligonucleotide
ugcuuuucuggcgucccgg

SEQ ID NO: 1271945 - RNA, 19 nt, Artificial Sequence
  Description of Artificial Sequence: Synthetic oligonucleotide
ucuggcgucccggaucugg

SEQ ID NO: 1271946 - RNA, 19 nt, Artificial Sequence
  Description of Artificial Sequence: Synthetic oligonucleotide
caaagagugagggcuuucc

SEQ ID NO: 1271947 - RNA, 19 nt, Artificial Sequence
  Description of Artificial Sequence: Synthetic oligonucleotide
gguuaucauggccagcgag

SEQ ID NO: 1271948 - RNA, 19 nt, Artificial Sequence
  Description of Artificial Sequence: Synthetic oligonucleotide
cugccuaggcccaucuggg

SEQ ID NO: 1271949 - RNA, 19 nt, Artificial Sequence
  Description of Artificial Sequence: Synthetic oligonucleotide
ggcauguguacccagcccc

SEQ ID NO: 1271950 - RNA, 19 nt, Artificial Sequence
  Description of Artificial Sequence: Synthetic oligonucleotide
gucaguguggaauccccgc

SEQ ID NO: 1271951 - RNA, 19 nt, Artificial Sequence
  Description of Artificial Sequence: Synthetic oligonucleotide
uuugguugucauccagaaa

SEQ ID NO: 1271952 - RNA, 19 nt, Artificial Sequence
  Description of Artificial Sequence: Synthetic oligonucleotide
aaaccuggguguaggagca

SEQ ID NO: 1271953 - RNA, 19 nt, Artificial Sequence
  Description of Artificial Sequence: Synthetic oligonucleotide
uggggaagaaagccacggc

SEQ ID NO: 1271954 - RNA, 19 nt, Artificial Sequence
  Description of Artificial Sequence: Synthetic oligonucleotide
acggucacccuucauggca

SEQ ID NO: 1271955 - RNA, 19 nt, Artificial Sequence
  Description of Artificial Sequence: Synthetic oligonucleotide
ucuuccuccgcggcggagg

SEQ ID NO: 1271956 - RNA, 19 nt, Artificial Sequence
  Description of Artificial Sequence: Synthetic oligonucleotide
cagcaaaacccacugucug

SEQ ID NO: 1271957 - RNA, 19 nt, Artificial Sequence
  Description of Artificial Sequence: Synthetic oligonucleotide
cacggcauugaugucagac

SEQ ID NO: 1271958 - RNA, 19 nt, Artificial Sequence
  Description of Artificial Sequence: Synthetic oligonucleotide
ugguuaguuccagaucuug

SEQ ID NO: 1271959 - RNA, 19 nt, Artificial Sequence
  Description of Artificial Sequence: Synthetic oligonucleotide
cuaugaaugucugucggca

SEQ ID NO: 1271960 - RNA, 19 nt, Artificial Sequence
  Description of Artificial Sequence: Synthetic oligonucleotide
acauggaaucucgaacauc

SEQ ID NO: 1271961 - RNA, 19 nt, Artificial Sequence
  Description of Artificial Sequence: Synthetic oligonucleotide
ggacccauggcccuguagc

SEQ ID NO: 1271962 - RNA, 19 nt, Artificial Sequence
  Description of Artificial Sequence: Synthetic oligonucleotide
agugguuccuuuauggaaa

SEQ ID NO: 1271963 - RNA, 19 nt, Artificial Sequence
  Description of Artificial Sequence: Synthetic oligonucleotide
auacaugagcagcuccuga

SEQ ID NO: 1271964 - RNA, 19 nt, Artificial Sequence
  Description of Artificial Sequence: Synthetic oligonucleotide
gacauguggcgucaucuga

SEQ ID NO: 1271965 - RNA, 19 nt, Artificial Sequence
  Description of Artificial Sequence: Synthetic oligonucleotide
aacccacugucugcuggcc

SEQ ID NO: 1271966 - RNA, 19 nt, Artificial Sequence
  Description of Artificial Sequence: Synthetic oligonucleotide
ggcacauggaaucucgaac

SEQ ID NO: 1271967 - RNA, 19 nt, Artificial Sequence
  Description of Artificial Sequence: Synthetic oligonucleotide
uggcauguguacccagccc

SEQ ID NO: 1271968 - RNA, 19 nt, Artificial Sequence
  Description of Artificial Sequence: Synthetic oligonucleotide
gaggcuuggcauguguacc

SEQ ID NO: 1271969 - RNA, 19 nt, Artificial Sequence
  Description of Artificial Sequence: Synthetic oligonucleotide
aguguggaauccccgcaug

SEQ ID NO: 1271970 - RNA, 19 nt, Artificial Sequence
  Description of Artificial Sequence: Synthetic oligonucleotide
acacgguuaucauggccag

SEQ ID NO: 1271971 - RNA, 19 nt, Artificial Sequence
  Description of Artificial Sequence: Synthetic oligonucleotide
gcacggucacccuucaugg

SEQ ID NO: 1271972 - RNA, 19 nt, Artificial Sequence
  Description of Artificial Sequence: Synthetic oligonucleotide
cucaucugaauucucccca

SEQ ID NO: 1271973 - RNA, 19 nt, Artificial Sequence
  Description of Artificial Sequence: Synthetic oligonucleotide
ucagcccgcaagucaaaca

SEQ ID NO: 1271974 - RNA, 19 nt, Artificial Sequence
  Description of Artificial Sequence: Synthetic oligonucleotide
aggcacccgacacaaaggu

SEQ ID NO: 1271975 - RNA, 19 nt, Artificial Sequence
  Description of Artificial Sequence: Synthetic oligonucleotide
aacccugacauugcccucu

SEQ ID NO: 1271976 - RNA, 19 nt, Artificial Sequence
  Description of Artificial Sequence: Synthetic oligonucleotide
caggcacccgacacaaagg

SEQ ID NO: 1271977 - RNA, 19 nt, Artificial Sequence
  Description of Artificial Sequence: Synthetic oligonucleotide
gugggacucugccaagggg

SEQ ID NO: 1271978 - RNA, 19 nt, Artificial Sequence
  Description of Artificial Sequence: Synthetic oligonucleotide
ccugacauugcccucucgg

SEQ ID NO: 1271979 - RNA, 19 nt, Artificial Sequence
  Description of Artificial Sequence: Synthetic oligonucleotide
augaccuaugaaugucugu

SEQ ID NO: 1271980 - RNA, 19 nt, Artificial Sequence
  Description of Artificial Sequence: Synthetic oligonucleotide
cucaugaccuaugaauguc

SEQ ID NO: 1271981 - RNA, 19 nt, Artificial Sequence
  Description of Artificial Sequence: Synthetic oligonucleotide
aucccauagcuugauggag

SEQ ID NO: 1271982 - RNA, 19 nt, Artificial Sequence
  Description of Artificial Sequence: Synthetic oligonucleotide
uccccgcaugcuuuucugg

SEQ ID NO: 1271983 - RNA, 19 nt, Artificial Sequence
  Description of Artificial Sequence: Synthetic oligonucleotide
uguggaauccccgcaugcu

SEQ ID NO: 1271984 - RNA, 19 nt, Artificial Sequence
  Description of Artificial Sequence: Synthetic oligonucleotide
agcuugauggaggcgucac

SEQ ID NO: 1271985 - RNA, 19 nt, Artificial Sequence
  Description of Artificial Sequence: Synthetic oligonucleotide
uuugccagguguccacgaa

SEQ ID NO: 1271986 - RNA, 19 nt, Artificial Sequence
  Description of Artificial Sequence: Synthetic oligonucleotide
gucggcacauggaaucucg

SEQ ID NO: 1271987 - RNA, 19 nt, Artificial Sequence
  Description of Artificial Sequence: Synthetic oligonucleotide
aaggugcggccaucagggg

SEQ ID NO: 1271988 - RNA, 19 nt, Artificial Sequence
  Description of Artificial Sequence: Synthetic oligonucleotide
caaagcuccgggccuguag

SEQ ID NO: 1271989 - RNA, 19 nt, Artificial Sequence
  Description of Artificial Sequence: Synthetic oligonucleotide
augauuugguugucaucca

SEQ ID NO: 1271990 - RNA, 19 nt, Artificial Sequence
  Description of Artificial Sequence: Synthetic oligonucleotide
gcagcuccugaucagcccg

SEQ ID NO: 1271991 - RNA, 19 nt, Artificial Sequence
  Description of Artificial Sequence: Synthetic oligonucleotide
ccugccuaggcccaucugg

SEQ ID NO: 1271992 - RNA, 19 nt, Artificial Sequence
  Description of Artificial Sequence: Synthetic oligonucleotide
auagccauuggggaagaaa

SEQ ID NO: 1271993 - RNA, 19 nt, Artificial Sequence
  Description of Artificial Sequence: Synthetic oligonucleotide
augcuuuucuggcgucccg

SEQ ID NO: 1271994 - RNA, 19 nt, Artificial Sequence
  Description of Artificial Sequence: Synthetic oligonucleotide
aggacaccugcacggucac

SEQ ID NO: 1271995 - RNA, 19 nt, Artificial Sequence
  Description of Artificial Sequence: Synthetic oligonucleotide
caucaggggccagugacag

SEQ ID NO: 1271996 - RNA, 19 nt, Artificial Sequence
  Description of Artificial Sequence: Synthetic oligonucleotide
guguggaauccccgcaugc

SEQ ID NO: 1271997 - RNA, 19 nt, Artificial Sequence
  Description of Artificial Sequence: Synthetic oligonucleotide
aucagcccgcaagucaaac

SEQ ID NO: 1271998 - RNA, 19 nt, Artificial Sequence
  Description of Artificial Sequence: Synthetic oligonucleotide
guggcgucaucugaucccg

SEQ ID NO: 1271999 - RNA, 19 nt, Artificial Sequence
  Description of Artificial Sequence: Synthetic oligonucleotide
cuggugaugauuugguugu

SEQ ID NO: 1272000 - RNA, 19 nt, Artificial Sequence
  Description of Artificial Sequence: Synthetic oligonucleotide
aaccgaggugaugccacag

SEQ ID NO: 1272001 - RNA, 19 nt, Artificial Sequence
  Description of Artificial Sequence: Synthetic oligonucleotide
aggcaaccgaggugaugcc

SEQ ID NO: 1272002 - RNA, 19 nt, Artificial Sequence
  Description of Artificial Sequence: Synthetic oligonucleotide
aagcuccgggccuguagug

SEQ ID NO: 1272003 - RNA, 19 nt, Artificial Sequence
  Description of Artificial Sequence: Synthetic oligonucleotide
cacccgacacaaaggugcg

SEQ ID NO: 1272004 - RNA, 19 nt, Artificial Sequence
  Description of Artificial Sequence: Synthetic oligonucleotide
ucggccuccugucucaguu

SEQ ID NO: 1272005 - RNA, 19 nt, Artificial Sequence
  Description of Artificial Sequence: Synthetic oligonucleotide
ggacaucacauccccacug

SEQ ID NO: 1272006 - RNA, 19 nt, Artificial Sequence
  Description of Artificial Sequence: Synthetic oligonucleotide
caugcuuuucuggcguccc

SEQ ID NO: 1272007 - RNA, 19 nt, Artificial Sequence
  Description of Artificial Sequence: Synthetic oligonucleotide
uccguguucucaucugaau

SEQ ID NO: 1272008 - RNA, 19 nt, Artificial Sequence
  Description of Artificial Sequence: Synthetic oligonucleotide
uggaccuuguuggugguau

SEQ ID NO: 1272009 - RNA, 19 nt, Artificial Sequence
  Description of Artificial Sequence: Synthetic oligonucleotide
cugcuaacccugacauugc

SEQ ID NO: 1272010 - RNA, 19 nt, Artificial Sequence
  Description of Artificial Sequence: Synthetic oligonucleotide
aucucgacuuuuaucuuca

SEQ ID NO: 1272011 - RNA, 19 nt, Artificial Sequence
  Description of Artificial Sequence: Synthetic oligonucleotide
cugaucagcccgcaaguca

SEQ ID NO: 1272012 - RNA, 19 nt, Artificial Sequence
  Description of Artificial Sequence: Synthetic oligonucleotide
agguccugucuuccuccgc

SEQ ID NO: 1272013 - RNA, 19 nt, Artificial Sequence
  Description of Artificial Sequence: Synthetic oligonucleotide
uuccccauuccaucucgac

SEQ ID NO: 1272014 - RNA, 19 nt, Artificial Sequence
  Description of Artificial Sequence: Synthetic oligonucleotide
agccacggcauugauguca

SEQ ID NO: 1272015 - RNA, 19 nt, Artificial Sequence
  Description of Artificial Sequence: Synthetic oligonucleotide
acugcgcgagaaggcaacc

SEQ ID NO: 1272016 - RNA, 19 nt, Artificial Sequence
  Description of Artificial Sequence: Synthetic oligonucleotide
ccuaugaaugucugucggc

SEQ ID NO: 1272017 - RNA, 19 nt, Artificial Sequence
  Description of Artificial Sequence: Synthetic oligonucleotide
aggcauagccauuggggaa

SEQ ID NO: 1272018 - RNA, 19 nt, Artificial Sequence
  Description of Artificial Sequence: Synthetic oligonucleotide
gacucugccaaggggucgc

SEQ ID NO: 1272019 - RNA, 19 nt, Artificial Sequence
  Description of Artificial Sequence: Synthetic oligonucleotide
cucgacuuuuaucuucaca

SEQ ID NO: 1272020 - RNA, 19 nt, Artificial Sequence
  Description of Artificial Sequence: Synthetic oligonucleotide
aggcagcucucugcuaacc

SEQ ID NO: 1272021 - RNA, 19 nt, Artificial Sequence
  Description of Artificial Sequence: Synthetic oligonucleotide
gaaucucgaacaucccaua

SEQ ID NO: 1272022 - RNA, 19 nt, Artificial Sequence
  Description of Artificial Sequence: Synthetic oligonucleotide
cauguggcgucaucugauc

SEQ ID NO: 1272023 - RNA, 19 nt, Artificial Sequence
  Description of Artificial Sequence: Synthetic oligonucleotide
gugaccccaaggcagcuca

SEQ ID NO: 1272024 - RNA, 19 nt, Artificial Sequence
  Description of Artificial Sequence: Synthetic oligonucleotide
guguacccagccccaaagc

SEQ ID NO: 1272025 - RNA, 19 nt, Artificial Sequence
  Description of Artificial Sequence: Synthetic oligonucleotide
ggcauagccauuggggaag

SEQ ID NO: 1272026 - RNA, 19 nt, Artificial Sequence
  Description of Artificial Sequence: Synthetic oligonucleotide
acucauggcgccgggcccg

SEQ ID NO: 1272027 - RNA, 19 nt, Artificial Sequence
  Description of Artificial Sequence: Synthetic oligonucleotide
cagcgaggacaccugcacg

SEQ ID NO: 1272028 - RNA, 19 nt, Artificial Sequence
  Description of Artificial Sequence: Synthetic oligonucleotide
ucggcacauggaaucucga

SEQ ID NO: 1272029 - RNA, 19 nt, Artificial Sequence
  Description of Artificial Sequence: Synthetic oligonucleotide
ggugggacucugccaaggg

SEQ ID NO: 1272030 - RNA, 19 nt, Artificial Sequence
  Description of Artificial Sequence: Synthetic oligonucleotide
guauccccagagcugguga

SEQ ID NO: 1272031 - RNA, 19 nt, Artificial Sequence
  Description of Artificial Sequence: Synthetic oligonucleotide
caggugguauccccagagc

SEQ ID NO: 1272032 - RNA, 19 nt, Artificial Sequence
  Description of Artificial Sequence: Synthetic oligonucleotide
acauugcccucucgggucu

SEQ ID NO: 1272033 - RNA, 19 nt, Artificial Sequence
  Description of Artificial Sequence: Synthetic oligonucleotide
gguggugggacucugccaa

SEQ ID NO: 1272034 - RNA, 19 nt, Artificial Sequence
  Description of Artificial Sequence: Synthetic oligonucleotide
gucaucugaucccguggug

SEQ ID NO: 1272035 - RNA, 19 nt, Artificial Sequence
  Description of Artificial Sequence: Synthetic oligonucleotide
ggggcguaggcacagguca

SEQ ID NO: 1272036 - RNA, 19 nt, Artificial Sequence
  Description of Artificial Sequence: Synthetic oligonucleotide
auccccgcaugcuuuucug

SEQ ID NO: 1272037 - RNA, 19 nt, Artificial Sequence
  Description of Artificial Sequence: Synthetic oligonucleotide
aacaggcgacauguggcgu

SEQ ID NO: 1272038 - RNA, 19 nt, Artificial Sequence
  Description of Artificial Sequence: Synthetic oligonucleotide
uggcaucccagauguugca

SEQ ID NO: 1272039 - RNA, 19 nt, Artificial Sequence
  Description of Artificial Sequence: Synthetic oligonucleotide
cucucugcuaacccugaca

SEQ ID NO: 1272040 - RNA, 19 nt, Artificial Sequence
  Description of Artificial Sequence: Synthetic oligonucleotide
cucacacgguuaucauggc

SEQ ID NO: 1272041 - RNA, 19 nt, Artificial Sequence
  Description of Artificial Sequence: Synthetic oligonucleotide
ucgggucuugaggcuauag

SEQ ID NO: 1272042 - RNA, 19 nt, Artificial Sequence
  Description of Artificial Sequence: Synthetic oligonucleotide
aggggucgcucggaggagc

SEQ ID NO: 1272043 - RNA, 19 nt, Artificial Sequence
  Description of Artificial Sequence: Synthetic oligonucleotide
ggagccuguggccacggcc

SEQ ID NO: 1272044 - RNA, 19 nt, Artificial Sequence
  Description of Artificial Sequence: Synthetic oligonucleotide
caucugugaccccaaggca

SEQ ID NO: 1272045 - RNA, 19 nt, Artificial Sequence
  Description of Artificial Sequence: Synthetic oligonucleotide
gucacaggcacccgacaca

SEQ ID NO: 1272046 - RNA, 19 nt, Artificial Sequence
  Description of Artificial Sequence: Synthetic oligonucleotide
uguccacgaaggguccucc

SEQ ID NO: 1272047 - RNA, 19 nt, Artificial Sequence
  Description of Artificial Sequence: Synthetic oligonucleotide
cacugcgcgagaaggcaac

SEQ ID NO: 1272048 - RNA, 19 nt, Artificial Sequence
  Description of Artificial Sequence: Synthetic oligonucleotide
gaaggcaaccgaggugaug

SEQ ID NO: 1272049 - RNA, 19 nt, Artificial Sequence
  Description of Artificial Sequence: Synthetic oligonucleotide
agaaagcggcagcaugaaa

SEQ ID NO: 1272050 - RNA, 19 nt, Artificial Sequence
  Description of Artificial Sequence: Synthetic oligonucleotide
ugaucccguggugaaggca

SEQ ID NO: 1272051 - RNA, 19 nt, Artificial Sequence
  Description of Artificial Sequence: Synthetic oligonucleotide
caaaacccacugucugcug

SEQ ID NO: 1272052 - RNA, 19 nt, Artificial Sequence
  Description of Artificial Sequence: Synthetic oligonucleotide
cccauagcuugauggaggc

SEQ ID NO: 1272053 - RNA, 19 nt, Artificial Sequence
  Description of Artificial Sequence: Synthetic oligonucleotide
ccguggugaaggcauagcc

SEQ ID NO: 1272054 - RNA, 19 nt, Artificial Sequence
  Description of Artificial Sequence: Synthetic oligonucleotide
aggcccaucuggguugggg

SEQ ID NO: 1272055 - RNA, 19 nt, Artificial Sequence
  Description of Artificial Sequence: Synthetic oligonucleotide
ucucgacuuuuaucuucac

SEQ ID NO: 1272056 - RNA, 19 nt, Artificial Sequence
  Description of Artificial Sequence: Synthetic oligonucleotide
cugccaaggggucgcucgg

SEQ ID NO: 1272057 - RNA, 19 nt, Artificial Sequence
  Description of Artificial Sequence: Synthetic oligonucleotide
ggaggcgucacaggcaccc

SEQ ID NO: 1272058 - RNA, 19 nt, Artificial Sequence
  Description of Artificial Sequence: Synthetic oligonucleotide
accugcacggucacccuuc

SEQ ID NO: 1272059 - RNA, 19 nt, Artificial Sequence
  Description of Artificial Sequence: Synthetic oligonucleotide
cacggucacccuucauggc

SEQ ID NO: 1272060 - RNA, 19 nt, Artificial Sequence
  Description of Artificial Sequence: Synthetic oligonucleotide
cugaucccguggugaaggc

SEQ ID NO: 1272061 - RNA, 19 nt, Artificial Sequence
  Description of Artificial Sequence: Synthetic oligonucleotide
augucugucggcacaugga

SEQ ID NO: 1272062 - RNA, 19 nt, Artificial Sequence
  Description of Artificial Sequence: Synthetic oligonucleotide
cacucauggcgccgggccc

SEQ ID NO: 1272063 - RNA, 19 nt, Artificial Sequence
  Description of Artificial Sequence: Synthetic oligonucleotide
acauguggcgucaucugau

SEQ ID NO: 1272064 - RNA, 19 nt, Artificial Sequence
  Description of Artificial Sequence: Synthetic oligonucleotide
ucccguggugaaggcauag

SEQ ID NO: 1272065 - RNA, 19 nt, Artificial Sequence
  Description of Artificial Sequence: Synthetic oligonucleotide
ucucgggucuugaggcuau

SEQ ID NO: 1272066 - RNA, 19 nt, Artificial Sequence
  Description of Artificial Sequence: Synthetic oligonucleotide
caucacauccccacugugu

SEQ ID NO: 1272067 - RNA, 19 nt, Artificial Sequence
  Description of Artificial Sequence: Synthetic oligonucleotide
uccgggccuguaguguggg

SEQ ID NO: 1272068 - RNA, 19 nt, Artificial Sequence
  Description of Artificial Sequence: Synthetic oligonucleotide
aaggggucgcucggaggag

SEQ ID NO: 1272069 - RNA, 19 nt, Artificial Sequence
  Description of Artificial Sequence: Synthetic oligonucleotide
cugcgcgagaaggcaaccg

SEQ ID NO: 1272070 - RNA, 19 nt, Artificial Sequence
  Description of Artificial Sequence: Synthetic oligonucleotide
cugggguuuccaucuccug

SEQ ID NO: 1272071 - RNA, 19 nt, Artificial Sequence
  Description of Artificial Sequence: Synthetic oligonucleotide
cuccgggccuguagugugg

SEQ ID NO: 1272072 - RNA, 19 nt, Artificial Sequence
  Description of Artificial Sequence: Synthetic oligonucleotide
uaacccugacauugcccuc

SEQ ID NO: 1272073 - RNA, 19 nt, Artificial Sequence
  Description of Artificial Sequence: Synthetic oligonucleotide
uggguuggggugguuaguu

SEQ ID NO: 1272074 - RNA, 19 nt, Artificial Sequence
  Description of Artificial Sequence: Synthetic oligonucleotide
aaggcagcucacacgguua

SEQ ID NO: 1272075 - RNA, 19 nt, Artificial Sequence
  Description of Artificial Sequence: Synthetic oligonucleotide
acacaaaggugcggccauc

SEQ ID NO: 1272076 - RNA, 19 nt, Artificial Sequence
  Description of Artificial Sequence: Synthetic oligonucleotide
agcccgcaagucaaacagg

SEQ ID NO: 1272077 - RNA, 19 nt, Artificial Sequence
  Description of Artificial Sequence: Synthetic oligonucleotide
agguacccaguguggccag

SEQ ID NO: 1272078 - RNA, 19 nt, Artificial Sequence
  Description of Artificial Sequence: Synthetic oligonucleotide
cacauccccacugugucca

SEQ ID NO: 1272079 - RNA, 19 nt, Artificial Sequence
  Description of Artificial Sequence: Synthetic oligonucleotide
aggcagcucacacgguuau

SEQ ID NO: 1272080 - RNA, 19 nt, Artificial Sequence
  Description of Artificial Sequence: Synthetic oligonucleotide
ggucgcucggaggagcgcg

SEQ ID NO: 1272081 - RNA, 19 nt, Artificial Sequence
  Description of Artificial Sequence: Synthetic oligonucleotide
agcgcgggagguccugucu

SEQ ID NO: 1272082 - RNA, 19 nt, Artificial Sequence
  Description of Artificial Sequence: Synthetic oligonucleotide
gcccucucgggucuugagg

SEQ ID NO: 1272083 - RNA, 19 nt, Artificial Sequence
  Description of Artificial Sequence: Synthetic oligonucleotide
gacacaaaggugcggccau

SEQ ID NO: 1272084 - RNA, 19 nt, Artificial Sequence
  Description of Artificial Sequence: Synthetic oligonucleotide
ugccuaggcccaucugggu

SEQ ID NO: 1272085 - RNA, 19 nt, Artificial Sequence
  Description of Artificial Sequence: Synthetic oligonucleotide
ccgcaagucaaacaggcga

SEQ ID NO: 1272086 - RNA, 19 nt, Artificial Sequence
  Description of Artificial Sequence: Synthetic oligonucleotide
cuaggcccaucuggguugg

SEQ ID NO: 1272087 - RNA, 19 nt, Artificial Sequence
  Description of Artificial Sequence: Synthetic oligonucleotide
agcggcagcaugaaaggua

SEQ ID NO: 1272088 - RNA, 19 nt, Artificial Sequence
  Description of Artificial Sequence: Synthetic oligonucleotide
gcccgcaagucaaacaggc

SEQ ID NO: 1272089 - RNA, 19 nt, Artificial Sequence
  Description of Artificial Sequence: Synthetic oligonucleotide
gugguuccuuuauggaaaa

SEQ ID NO: 1272090 - RNA, 19 nt, Artificial Sequence
  Description of Artificial Sequence: Synthetic oligonucleotide
ccgggaggaaccaaaccug

SEQ ID NO: 1272091 - RNA, 19 nt, Artificial Sequence
  Description of Artificial Sequence: Synthetic oligonucleotide
guacccaguguggccaggc

SEQ ID NO: 1272092 - RNA, 19 nt, Artificial Sequence
  Description of Artificial Sequence: Synthetic oligonucleotide
aggcgucacaggcacccga

SEQ ID NO: 1272093 - RNA, 19 nt, Artificial Sequence
  Description of Artificial Sequence: Synthetic oligonucleotide
gucaaacaggcgacaugug

SEQ ID NO: 1272094 - RNA, 19 nt, Artificial Sequence
  Description of Artificial Sequence: Synthetic oligonucleotide
cccgcaugcuuuucuggcg

SEQ ID NO: 1272095 - RNA, 19 nt, Artificial Sequence
  Description of Artificial Sequence: Synthetic oligonucleotide
cccgacacaaaggugcggc

SEQ ID NO: 1272096 - RNA, 19 nt, Artificial Sequence
  Description of Artificial Sequence: Synthetic oligonucleotide
ggaggagcgcgggaggucc

SEQ ID NO: 1272097 - RNA, 19 nt, Artificial Sequence
  Description of Artificial Sequence: Synthetic oligonucleotide
ugucggcacauggaaucuc

SEQ ID NO: 1272098 - RNA, 19 nt, Artificial Sequence
  Description of Artificial Sequence: Synthetic oligonucleotide
cgcaagucaaacaggcgac

SEQ ID NO: 1272099 - RNA, 19 nt, Artificial Sequence
  Description of Artificial Sequence: Synthetic oligonucleotide
agggccgcucccugccuag

SEQ ID NO: 1272100 - RNA, 19 nt, Artificial Sequence
  Description of Artificial Sequence: Synthetic oligonucleotide
uggaggcgucacaggcacc

SEQ ID NO: 1272101 - RNA, 19 nt, Artificial Sequence
  Description of Artificial Sequence: Synthetic oligonucleotide
gcuauagauggagcagaug

SEQ ID NO: 1272102 - RNA, 19 nt, Artificial Sequence
  Description of Artificial Sequence: Synthetic oligonucleotide
ugaccccaaggcagcucac

SEQ ID NO: 1272103 - RNA, 19 nt, Artificial Sequence
  Description of Artificial Sequence: Synthetic oligonucleotide
gcggcagcaugaaagguac

SEQ ID NO: 1272104 - RNA, 19 nt, Artificial Sequence
  Description of Artificial Sequence: Synthetic oligonucleotide
ccccgcaugcuuuucuggc

SEQ ID NO: 1272105 - RNA, 19 nt, Artificial Sequence
  Description of Artificial Sequence: Synthetic oligonucleotide
ccagcgaggacaccugcac

SEQ ID NO: 1272106 - RNA, 19 nt, Artificial Sequence
  Description of Artificial Sequence: Synthetic oligonucleotide
cccgcaagucaaacaggcg

SEQ ID NO: 1272107 - RNA, 19 nt, Artificial Sequence
  Description of Artificial Sequence: Synthetic oligonucleotide
ugugaccccaaggcagcuc

SEQ ID NO: 1272108 - RNA, 19 nt, Artificial Sequence
  Description of Artificial Sequence: Synthetic oligonucleotide
cgcgagaaggcaaccgagg

SEQ ID NO: 1272109 - RNA, 19 nt, Artificial Sequence
  Description of Artificial Sequence: Synthetic oligonucleotide
gcaaccgaggugaugccac

SEQ ID NO: 1272110 - RNA, 19 nt, Artificial Sequence
  Description of Artificial Sequence: Synthetic oligonucleotide
gggucaguguggaaucccc

SEQ ID NO: 1272111 - RNA, 19 nt, Artificial Sequence
  Description of Artificial Sequence: Synthetic oligonucleotide
cuccguguucucaucugaa

SEQ ID NO: 1272112 - RNA, 19 nt, Artificial Sequence
  Description of Artificial Sequence: Synthetic oligonucleotide
ucgcucggaggagcgcggg

SEQ ID NO: 1272113 - RNA, 19 nt, Artificial Sequence
  Description of Artificial Sequence: Synthetic oligonucleotide
ccccaaggcagcucacacg

SEQ ID NO: 1272114 - RNA, 19 nt, Artificial Sequence
  Description of Artificial Sequence: Synthetic oligonucleotide
gggugguuaguuccagauc

SEQ ID NO: 1272115 - RNA, 19 nt, Artificial Sequence
  Description of Artificial Sequence: Synthetic oligonucleotide
cacgguuaucauggccagc

SEQ ID NO: 1272116 - RNA, 19 nt, Artificial Sequence
  Description of Artificial Sequence: Synthetic oligonucleotide
ggccaucccaucaucugug

SEQ ID NO: 1272117 - RNA, 19 nt, Artificial Sequence
  Description of Artificial Sequence: Synthetic oligonucleotide
acccgacacaaaggugcgg

SEQ ID NO: 1272118 - RNA, 19 nt, Artificial Sequence
  Description of Artificial Sequence: Synthetic oligonucleotide
agcuccgggccuguagugu

SEQ ID NO: 1272119 - RNA, 19 nt, Artificial Sequence
  Description of Artificial Sequence: Synthetic oligonucleotide
cacccuucauggcauccca

SEQ ID NO: 1272120 - RNA, 19 nt, Artificial Sequence
  Description of Artificial Sequence: Synthetic oligonucleotide
ggacucugccaaggggucg

SEQ ID NO: 1272121 - RNA, 19 nt, Artificial Sequence
  Description of Artificial Sequence: Synthetic oligonucleotide
ggaaucucgaacaucccau

SEQ ID NO: 1272122 - RNA, 19 nt, Artificial Sequence
  Description of Artificial Sequence: Synthetic oligonucleotide
agcaaagagugagggcuuu

SEQ ID NO: 1272123 - RNA, 19 nt, Artificial Sequence
  Description of Artificial Sequence: Synthetic oligonucleotide
gguauccccagagcuggug

SEQ ID NO: 1272124 - RNA, 19 nt, Artificial Sequence
  Description of Artificial Sequence: Synthetic oligonucleotide
acgaaggguccuccguguu

SEQ ID NO: 1272125 - RNA, 19 nt, Artificial Sequence
  Description of Artificial Sequence: Synthetic oligonucleotide
gaccccaaggcagcucaca

SEQ ID NO: 1272126 - RNA, 19 nt, Artificial Sequence
  Description of Artificial Sequence: Synthetic oligonucleotide
ggcgucccggaucugguuc

SEQ ID NO: 1272127 - RNA, 19 nt, Artificial Sequence
  Description of Artificial Sequence: Synthetic oligonucleotide
gggaauacaugagcagcuc

SEQ ID NO: 1272128 - RNA, 19 nt, Artificial Sequence
  Description of Artificial Sequence: Synthetic oligonucleotide
ucccaucaucugugacccc

SEQ ID NO: 1272129 - RNA, 19 nt, Artificial Sequence
  Description of Artificial Sequence: Synthetic oligonucleotide
gcuccgggccuguagugug

SEQ ID NO: 1272130 - RNA, 19 nt, Artificial Sequence
  Description of Artificial Sequence: Synthetic oligonucleotide
gucgcucggaggagcgcgg

SEQ ID NO: 1272131 - RNA, 19 nt, Artificial Sequence
  Description of Artificial Sequence: Synthetic oligonucleotide
ugggcacaggcagggccgc

SEQ ID NO: 1272132 - RNA, 19 nt, Artificial Sequence
  Description of Artificial Sequence: Synthetic oligonucleotide
gcaugcuuuucuggcgucc

SEQ ID NO: 1272133 - RNA, 19 nt, Artificial Sequence
  Description of Artificial Sequence: Synthetic oligonucleotide
ugccaaggggucgcucgga

SEQ ID NO: 1272134 - RNA, 19 nt, Artificial Sequence
  Description of Artificial Sequence: Synthetic oligonucleotide
gcucggaggagcgcgggag

SEQ ID NO: 1272135 - RNA, 19 nt, Artificial Sequence
  Description of Artificial Sequence: Synthetic oligonucleotide
gaauccccgcaugcuuuuc

SEQ ID NO: 1272136 - RNA, 19 nt, Artificial Sequence
  Description of Artificial Sequence: Synthetic oligonucleotide
caaccgaggugaugccaca

SEQ ID NO: 1272137 - RNA, 19 nt, Artificial Sequence
  Description of Artificial Sequence: Synthetic oligonucleotide
gcgagcagcagccggccac

SEQ ID NO: 1272138 - RNA, 19 nt, Artificial Sequence
  Description of Artificial Sequence: Synthetic oligonucleotide
cauggcccuguagcccagg

SEQ ID NO: 1272139 - RNA, 19 nt, Artificial Sequence
  Description of Artificial Sequence: Synthetic oligonucleotide
gcgucccggaucugguucc

SEQ ID NO: 1272140 - RNA, 19 nt, Artificial Sequence
  Description of Artificial Sequence: Synthetic oligonucleotide
cgaggugaugccacagaug

SEQ ID NO: 1272141 - RNA, 19 nt, Artificial Sequence
  Description of Artificial Sequence: Synthetic oligonucleotide
guggaauccccgcaugcuu

SEQ ID NO: 1272142 - RNA, 19 nt, Artificial Sequence
  Description of Artificial Sequence: Synthetic oligonucleotide
caaggcagcucacacgguu

SEQ ID NO: 1272143 - RNA, 19 nt, Artificial Sequence
  Description of Artificial Sequence: Synthetic oligonucleotide
cgucacaggcacccgacac

SEQ ID NO: 1272144 - RNA, 19 nt, Artificial Sequence
  Description of Artificial Sequence: Synthetic oligonucleotide
gcgcgagaaggcaaccgag

SEQ ID NO: 1272145 - RNA, 19 nt, Artificial Sequence
  Description of Artificial Sequence: Synthetic oligonucleotide
caggagccuguggccacgg

SEQ ID NO: 1272146 - RNA, 19 nt, Artificial Sequence
  Description of Artificial Sequence: Synthetic oligonucleotide
cacauggaaucucgaacau

SEQ ID NO: 1272147 - RNA, 19 nt, Artificial Sequence
  Description of Artificial Sequence: Synthetic oligonucleotide
gcaagucaaacaggcgaca

SEQ ID NO: 1272148 - RNA, 19 nt, Artificial Sequence
  Description of Artificial Sequence: Synthetic oligonucleotide
ccaucccaucaucugugac

SEQ ID NO: 1272149 - RNA, 19 nt, Artificial Sequence
  Description of Artificial Sequence: Synthetic oligonucleotide
guguccacgaaggguccuc

SEQ ID NO: 1272150 - RNA, 19 nt, Artificial Sequence
  Description of Artificial Sequence: Synthetic oligonucleotide
gcgagaaggcaaccgaggu

SEQ ID NO: 1272151 - RNA, 19 nt, Artificial Sequence
  Description of Artificial Sequence: Synthetic oligonucleotide
caagucaaacaggcgacau

SEQ ID NO: 1272152 - RNA, 19 nt, Artificial Sequence
  Description of Artificial Sequence: Synthetic oligonucleotide
cacgaaggguccuccgugu

SEQ ID NO: 1272153 - RNA, 19 nt, Artificial Sequence
  Description of Artificial Sequence: Synthetic oligonucleotide
ccauagcuugauggaggcg

SEQ ID NO: 1272154 - RNA, 19 nt, Artificial Sequence
  Description of Artificial Sequence: Synthetic oligonucleotide
gucccggaucugguuccgg

SEQ ID NO: 1272155 - RNA, 19 nt, Artificial Sequence
  Description of Artificial Sequence: Synthetic oligonucleotide
ggccagcgaggacaccugc

SEQ ID NO: 1272156 - RNA, 19 nt, Artificial Sequence
  Description of Artificial Sequence: Synthetic oligonucleotide
cccgggaggaaccaaaccu

SEQ ID NO: 1272157 - RNA, 19 nt, Artificial Sequence
  Description of Artificial Sequence: Synthetic oligonucleotide
cacggccaucccaucaucu

SEQ ID NO: 1272158 - RNA, 19 nt, Artificial Sequence
  Description of Artificial Sequence: Synthetic oligonucleotide
ggggucgcucggaggagcg

SEQ ID NO: 1272159 - RNA, 19 nt, Artificial Sequence
  Description of Artificial Sequence: Synthetic oligonucleotide
ccagcaaaacccacugucu

SEQ ID NO: 1272160 - RNA, 19 nt, Artificial Sequence
  Description of Artificial Sequence: Synthetic oligonucleotide
gcucacucauggcgccggg

SEQ ID NO: 1272161 - RNA, 19 nt, Artificial Sequence
  Description of Artificial Sequence: Synthetic oligonucleotide
gccuguagugugggcacag

SEQ ID NO: 1272162 - RNA, 19 nt, Artificial Sequence
  Description of Artificial Sequence: Synthetic oligonucleotide
gggaagaaagccacggcau

SEQ ID NO: 1272163 - RNA, 19 nt, Artificial Sequence
  Description of Artificial Sequence: Synthetic oligonucleotide
gguacccaguguggccagg

SEQ ID NO: 1272164 - RNA, 19 nt, Artificial Sequence
  Description of Artificial Sequence: Synthetic oligonucleotide
gccacugcgcgagaaggca

SEQ ID NO: 1272165 - RNA, 19 nt, Artificial Sequence
  Description of Artificial Sequence: Synthetic oligonucleotide
cgaacaucccauagcuuga

SEQ ID NO: 1272166 - RNA, 19 nt, Artificial Sequence
  Description of Artificial Sequence: Synthetic oligonucleotide
uggcgucccggaucugguu

SEQ ID NO: 1272167 - RNA, 19 nt, Artificial Sequence
  Description of Artificial Sequence: Synthetic oligonucleotide
ggcgucacaggcacccgac

SEQ ID NO: 1272168 - RNA, 19 nt, Artificial Sequence
  Description of Artificial Sequence: Synthetic oligonucleotide
ggccacggccaucccauca

SEQ ID NO: 1272169 - RNA, 19 nt, Artificial Sequence
  Description of Artificial Sequence: Synthetic oligonucleotide
ccccgggaggaaccaaacc

SEQ ID NO: 1272170 - RNA, 19 nt, Artificial Sequence
  Description of Artificial Sequence: Synthetic oligonucleotide
agccuguggccacggccau

SEQ ID NO: 1272171 - RNA, 19 nt, Artificial Sequence
  Description of Artificial Sequence: Synthetic oligonucleotide
gcgacauguggcgucaucu

SEQ ID NO: 1272172 - RNA, 19 nt, Artificial Sequence
  Description of Artificial Sequence: Synthetic oligonucleotide
uaggcccaucuggguuggg

SEQ ID NO: 1272173 - RNA, 19 nt, Artificial Sequence
  Description of Artificial Sequence: Synthetic oligonucleotide
ggcgacauguggcgucauc

SEQ ID NO: 1272174 - RNA, 19 nt, Artificial Sequence
  Description of Artificial Sequence: Synthetic oligonucleotide
agaaggcaaccgaggugau

SEQ ID NO: 1272175 - RNA, 19 nt, Artificial Sequence
  Description of Artificial Sequence: Synthetic oligonucleotide
gguguaggagcaggaccca

SEQ ID NO: 1272176 - RNA, 19 nt, Artificial Sequence
  Description of Artificial Sequence: Synthetic oligonucleotide
gcugaccagcagccuugag

SEQ ID NO: 1272177 - RNA, 19 nt, Artificial Sequence
  Description of Artificial Sequence: Synthetic oligonucleotide
caguguggaauccccgcau

SEQ ID NO: 1272178 - RNA, 19 nt, Artificial Sequence
  Description of Artificial Sequence: Synthetic oligonucleotide
gcaaagagugagggcuuuc

SEQ ID NO: 1272179 - RNA, 19 nt, Artificial Sequence
  Description of Artificial Sequence: Synthetic oligonucleotide
cucgaacaucccauagcuu

SEQ ID NO: 1272180 - RNA, 19 nt, Artificial Sequence
  Description of Artificial Sequence: Synthetic oligonucleotide
cucugccaaggggucgcuc

SEQ ID NO: 1272181 - RNA, 19 nt, Artificial Sequence
  Description of Artificial Sequence: Synthetic oligonucleotide
cccguggugaaggcauagc

SEQ ID NO: 1272182 - RNA, 19 nt, Artificial Sequence
  Description of Artificial Sequence: Synthetic oligonucleotide
ggcuuggcauguguaccca

SEQ ID NO: 1272183 - RNA, 19 nt, Artificial Sequence
  Description of Artificial Sequence: Synthetic oligonucleotide
cugucggcacauggaaucu

SEQ ID NO: 1272184 - RNA, 19 nt, Artificial Sequence
  Description of Artificial Sequence: Synthetic oligonucleotide
ccgaggccugagguggugg

SEQ ID NO: 1272185 - RNA, 19 nt, Artificial Sequence
  Description of Artificial Sequence: Synthetic oligonucleotide
cuggcgucccggaucuggu

SEQ ID NO: 1272186 - RNA, 19 nt, Artificial Sequence
  Description of Artificial Sequence: Synthetic oligonucleotide
cccugacauugcccucucg

SEQ ID NO: 1272187 - RNA, 19 nt, Artificial Sequence
  Description of Artificial Sequence: Synthetic oligonucleotide
gguccagcccagcugugau

SEQ ID NO: 1272188 - RNA, 19 nt, Artificial Sequence
  Description of Artificial Sequence: Synthetic oligonucleotide
uucuggcgucccggaucug

SEQ ID NO: 1272189 - RNA, 19 nt, Artificial Sequence
  Description of Artificial Sequence: Synthetic oligonucleotide
ccggccacugcgcgagaag

SEQ ID NO: 1272190 - RNA, 19 nt, Artificial Sequence
  Description of Artificial Sequence: Synthetic oligonucleotide
gggccagugacagggacau

SEQ ID NO: 1272191 - RNA, 19 nt, Artificial Sequence
  Description of Artificial Sequence: Synthetic oligonucleotide
gcgucacaggcacccgaca

SEQ ID NO: 1272192 - RNA, 19 nt, Artificial Sequence
  Description of Artificial Sequence: Synthetic oligonucleotide
ccacuguguccagcaaaac

SEQ ID NO: 1272193 - RNA, 19 nt, Artificial Sequence
  Description of Artificial Sequence: Synthetic oligonucleotide
ggcuauagauggagcagau

SEQ ID NO: 1272194 - RNA, 19 nt, Artificial Sequence
  Description of Artificial Sequence: Synthetic oligonucleotide
gggaggcuuggcaugugua

SEQ ID NO: 1272195 - RNA, 19 nt, Artificial Sequence
  Description of Artificial Sequence: Synthetic oligonucleotide
ggguccuccguguucucau

SEQ ID NO: 1272196 - RNA, 19 nt, Artificial Sequence
  Description of Artificial Sequence: Synthetic oligonucleotide
ccguguucucaucugaauu

SEQ ID NO: 1272197 - RNA, 19 nt, Artificial Sequence
  Description of Artificial Sequence: Synthetic oligonucleotide
gccagcgaggacaccugca

SEQ ID NO: 1272198 - RNA, 19 nt, Artificial Sequence
  Description of Artificial Sequence: Synthetic oligonucleotide
cacaggcacccgacacaaa

SEQ ID NO: 1272199 - RNA, 19 nt, Artificial Sequence
  Description of Artificial Sequence: Synthetic oligonucleotide
ggaauccccgcaugcuuuu

SEQ ID NO: 1272200 - RNA, 19 nt, Artificial Sequence
  Description of Artificial Sequence: Synthetic oligonucleotide
uccuggccgcuggcccgag

SEQ ID NO: 1272201 - RNA, 19 nt, Artificial Sequence
  Description of Artificial Sequence: Synthetic oligonucleotide
gugguuaguuccagaucuu

SEQ ID NO: 1272202 - RNA, 19 nt, Artificial Sequence
  Description of Artificial Sequence: Synthetic oligonucleotide
gccuaggcccaucuggguu

SEQ ID NO: 1272203 - RNA, 19 nt, Artificial Sequence
  Description of Artificial Sequence: Synthetic oligonucleotide
ccacggccaucccaucauc

SEQ ID NO: 1272204 - RNA, 19 nt, Artificial Sequence
  Description of Artificial Sequence: Synthetic oligonucleotide
ggcagcucacacgguuauc

SEQ ID NO: 1272205 - RNA, 19 nt, Artificial Sequence
  Description of Artificial Sequence: Synthetic oligonucleotide
gcccguggggcgggguugg

SEQ ID NO: 1272206 - RNA, 19 nt, Artificial Sequence
  Description of Artificial Sequence: Synthetic oligonucleotide
ggcccguggggcgggguug

SEQ ID NO: 1272207 - RNA, 19 nt, Artificial Sequence
  Description of Artificial Sequence: Synthetic oligonucleotide
guguaggagcaggacccau

SEQ ID NO: 1272208 - RNA, 19 nt, Artificial Sequence
  Description of Artificial Sequence: Synthetic oligonucleotide
gccacggccaucccaucau

SEQ ID NO: 1272209 - RNA, 19 nt, Artificial Sequence
  Description of Artificial Sequence: Synthetic oligonucleotide
gagggauagcauggaccuu

SEQ ID NO: 1272210 - RNA, 19 nt, Artificial Sequence
  Description of Artificial Sequence: Synthetic oligonucleotide
cgcaugcuuuucuggcguc

SEQ ID NO: 1272211 - RNA, 19 nt, Artificial Sequence
  Description of Artificial Sequence: Synthetic oligonucleotide
ccgaggugaugccacagau

SEQ ID NO: 1272212 - RNA, 19 nt, Artificial Sequence
  Description of Artificial Sequence: Synthetic oligonucleotide
gcuccugaucagcccgcaa

SEQ ID NO: 1272213 - RNA, 19 nt, Artificial Sequence
  Description of Artificial Sequence: Synthetic oligonucleotide
gggucgcucggaggagcgc

SEQ ID NO: 1272214 - RNA, 19 nt, Artificial Sequence
  Description of Artificial Sequence: Synthetic oligonucleotide
ccguggggcgggguugggg

SEQ ID NO: 1272215 - RNA, 19 nt, Artificial Sequence
  Description of Artificial Sequence: Synthetic oligonucleotide
cggcacauggaaucucgaa

SEQ ID NO: 1272216 - RNA, 19 nt, Artificial Sequence
  Description of Artificial Sequence: Synthetic oligonucleotide
ggccuguagugugggcaca

SEQ ID NO: 1272217 - RNA, 19 nt, Artificial Sequence
  Description of Artificial Sequence: Synthetic oligonucleotide
gggauagcauggaccuugu

SEQ ID NO: 1272218 - RNA, 19 nt, Artificial Sequence
  Description of Artificial Sequence: Synthetic oligonucleotide
agccggccacugcgcgaga

SEQ ID NO: 1272219 - RNA, 19 nt, Artificial Sequence
  Description of Artificial Sequence: Synthetic oligonucleotide
ccugcacggucacccuuca

SEQ ID NO: 1272220 - RNA, 19 nt, Artificial Sequence
  Description of Artificial Sequence: Synthetic oligonucleotide
cgcgggagguccugucuuc

SEQ ID NO: 1272221 - RNA, 19 nt, Artificial Sequence
  Description of Artificial Sequence: Synthetic oligonucleotide
ggccugagguggugggacu

SEQ ID NO: 1272222 - RNA, 19 nt, Artificial Sequence
  Description of Artificial Sequence: Synthetic oligonucleotide
aggcgacauguggcgucau

SEQ ID NO: 1272223 - RNA, 19 nt, Artificial Sequence
  Description of Artificial Sequence: Synthetic oligonucleotide
gccgcuggcccgaggccug

SEQ ID NO: 1272224 - RNA, 19 nt, Artificial Sequence
  Description of Artificial Sequence: Synthetic oligonucleotide
gaggagcgcgggagguccu

SEQ ID NO: 1272225 - RNA, 19 nt, Artificial Sequence
  Description of Artificial Sequence: Synthetic oligonucleotide
ccaucucgacuuuuaucuu

SEQ ID NO: 1272226 - RNA, 19 nt, Artificial Sequence
  Description of Artificial Sequence: Synthetic oligonucleotide
ggccgcuggcccgaggccu

SEQ ID NO: 1272227 - RNA, 19 nt, Artificial Sequence
  Description of Artificial Sequence: Synthetic oligonucleotide
cgguuaucauggccagcga

SEQ ID NO: 1272228 - RNA, 19 nt, Artificial Sequence
  Description of Artificial Sequence: Synthetic oligonucleotide
ccacuggguccagcccagc

SEQ ID NO: 1272229 - RNA, 19 nt, Artificial Sequence
  Description of Artificial Sequence: Synthetic oligonucleotide
cucgggucuugaggcuaua

SEQ ID NO: 1272230 - RNA, 19 nt, Artificial Sequence
  Description of Artificial Sequence: Synthetic oligonucleotide
gccgggcccguggggcggg

SEQ ID NO: 1272231 - RNA, 19 nt, Artificial Sequence
  Description of Artificial Sequence: Synthetic oligonucleotide
gcgcgggagguccugucuu

SEQ ID NO: 1272232 - RNA, 19 nt, Artificial Sequence
  Description of Artificial Sequence: Synthetic oligonucleotide
gccggccacugcgcgagaa

SEQ ID NO: 1272233 - RNA, 19 nt, Artificial Sequence
  Description of Artificial Sequence: Synthetic oligonucleotide
gggcguaggcacaggucau

SEQ ID NO: 1272234 - RNA, 19 nt, Artificial Sequence
  Description of Artificial Sequence: Synthetic oligonucleotide
cugcacggucacccuucau

SEQ ID NO: 1272235 - RNA, 19 nt, Artificial Sequence
  Description of Artificial Sequence: Synthetic oligonucleotide
ccaaggcagcucacacggu

SEQ ID NO: 1272236 - RNA, 19 nt, Artificial Sequence
  Description of Artificial Sequence: Synthetic oligonucleotide
ccugagguggugggacucu

SEQ ID NO: 1272237 - RNA, 19 nt, Artificial Sequence
  Description of Artificial Sequence: Synthetic oligonucleotide
cccguggggcgggguuggg

SEQ ID NO: 1272238 - RNA, 19 nt, Artificial Sequence
  Description of Artificial Sequence: Synthetic oligonucleotide
cccauuccaucucgacuuu

SEQ ID NO: 1272239 - RNA, 19 nt, Artificial Sequence
  Description of Artificial Sequence: Synthetic oligonucleotide
cgcucggaggagcgcggga

SEQ ID NO: 1272240 - RNA, 19 nt, Artificial Sequence
  Description of Artificial Sequence: Synthetic oligonucleotide
cauugcccucucgggucuu

SEQ ID NO: 1272241 - RNA, 19 nt, Artificial Sequence
  Description of Artificial Sequence: Synthetic oligonucleotide
ccaucuggguugggguggu

SEQ ID NO: 1272242 - RNA, 19 nt, Artificial Sequence
  Description of Artificial Sequence: Synthetic oligonucleotide
ccauuccaucucgacuuuu

SEQ ID NO: 1272243 - RNA, 19 nt, Artificial Sequence
  Description of Artificial Sequence: Synthetic oligonucleotide
cgggagguccugucuuccu

SEQ ID NO: 1272244 - RNA, 19 nt, Artificial Sequence
  Description of Artificial Sequence: Synthetic oligonucleotide
ccgcuggcccgaggccuga

SEQ ID NO: 1272245 - RNA, 19 nt, Artificial Sequence
  Description of Artificial Sequence: Synthetic oligonucleotide
cuuuauaucaaacauaugg

SEQ ID NO: 1272246 - RNA, 19 nt, Artificial Sequence
  Description of Artificial Sequence: Synthetic oligonucleotide
uuuaauaacacauuggugu

SEQ ID NO: 1272247 - RNA, 19 nt, Artificial Sequence
  Description of Artificial Sequence: Synthetic oligonucleotide
gauacgaugauaccuagag

SEQ ID NO: 1272248 - RNA, 19 nt, Artificial Sequence
  Description of Artificial Sequence: Synthetic oligonucleotide
uuuauaucaaacauauggu

SEQ ID NO: 1272249 - RNA, 19 nt, Artificial Sequence
  Description of Artificial Sequence: Synthetic oligonucleotide
gacaauuucagccccauag

SEQ ID NO: 1272250 - RNA, 19 nt, Artificial Sequence
  Description of Artificial Sequence: Synthetic oligonucleotide
uuuaucuccgauaggaugc

SEQ ID NO: 1272251 - RNA, 19 nt, Artificial Sequence
  Description of Artificial Sequence: Synthetic oligonucleotide
aacacauuggugucuggcc

SEQ ID NO: 1272252 - RNA, 19 nt, Artificial Sequence
  Description of Artificial Sequence: Synthetic oligonucleotide
acacaagugguacacaggc

SEQ ID NO: 1272253 - RNA, 19 nt, Artificial Sequence
  Description of Artificial Sequence: Synthetic oligonucleotide
cucauaagaacccacaaag

SEQ ID NO: 1272254 - RNA, 19 nt, Artificial Sequence
  Description of Artificial Sequence: Synthetic oligonucleotide
acaugguugacacaagugg

SEQ ID NO: 1272255 - RNA, 19 nt, Artificial Sequence
  Description of Artificial Sequence: Synthetic oligonucleotide
guaauguagacuuuccggg

SEQ ID NO: 1272256 - RNA, 19 nt, Artificial Sequence
  Description of Artificial Sequence: Synthetic oligonucleotide
uacgaugauaccuagagaa

SEQ ID NO: 1272257 - RNA, 19 nt, Artificial Sequence
  Description of Artificial Sequence: Synthetic oligonucleotide
ugucacuaaaccaaacucc

SEQ ID NO: 1272258 - RNA, 19 nt, Artificial Sequence
  Description of Artificial Sequence: Synthetic oligonucleotide
aauuucagccccauagcgc

SEQ ID NO: 1272259 - RNA, 19 nt, Artificial Sequence
  Description of Artificial Sequence: Synthetic oligonucleotide
uaaguuacgauggaccagg

SEQ ID NO: 1272260 - RNA, 19 nt, Artificial Sequence
  Description of Artificial Sequence: Synthetic oligonucleotide
uuuuaucuccgauaggaug

SEQ ID NO: 1272261 - RNA, 19 nt, Artificial Sequence
  Description of Artificial Sequence: Synthetic oligonucleotide
auaagaacccacaaagucg

SEQ ID NO: 1272262 - RNA, 19 nt, Artificial Sequence
  Description of Artificial Sequence: Synthetic oligonucleotide
ucgaucaugagcaguagcc

SEQ ID NO: 1272263 - RNA, 19 nt, Artificial Sequence
  Description of Artificial Sequence: Synthetic oligonucleotide
uauuucuaaggcaccacag

SEQ ID NO: 1272264 - RNA, 19 nt, Artificial Sequence
  Description of Artificial Sequence: Synthetic oligonucleotide
uguugcgguaagcagacag

SEQ ID NO: 1272265 - RNA, 19 nt, Artificial Sequence
  Description of Artificial Sequence: Synthetic oligonucleotide
aauggagaccgccucggcg

SEQ ID NO: 1272266 - RNA, 19 nt, Artificial Sequence
  Description of Artificial Sequence: Synthetic oligonucleotide
uccagaauauauuuaggca

SEQ ID NO: 1272267 - RNA, 19 nt, Artificial Sequence
  Description of Artificial Sequence: Synthetic oligonucleotide
ucagucuuuauaucaaaca

SEQ ID NO: 1272268 - RNA, 19 nt, Artificial Sequence
  Description of Artificial Sequence: Synthetic oligonucleotide
aguggguaagcaaagaggg

SEQ ID NO: 1272269 - RNA, 19 nt, Artificial Sequence
  Description of Artificial Sequence: Synthetic oligonucleotide
uuucuaaggcaccacagcu

SEQ ID NO: 1272270 - RNA, 19 nt, Artificial Sequence
  Description of Artificial Sequence: Synthetic oligonucleotide
agugauagcagcuggccuc

SEQ ID NO: 1272271 - RNA, 19 nt, Artificial Sequence
  Description of Artificial Sequence: Synthetic oligonucleotide
auauuuaggcagcacaucu

SEQ ID NO: 1272272 - RNA, 19 nt, Artificial Sequence
  Description of Artificial Sequence: Synthetic oligonucleotide
uaagaacccacaaagucgu

SEQ ID NO: 1272273 - RNA, 19 nt, Artificial Sequence
  Description of Artificial Sequence: Synthetic oligonucleotide
gaucaugagcaguagcccg

SEQ ID NO: 1272274 - RNA, 19 nt, Artificial Sequence
  Description of Artificial Sequence: Synthetic oligonucleotide
cauaagaacccacaaaguc

SEQ ID NO: 1272275 - RNA, 19 nt, Artificial Sequence
  Description of Artificial Sequence: Synthetic oligonucleotide
aggcagcacaucuugaagc

SEQ ID NO: 1272276 - RNA, 19 nt, Artificial Sequence
  Description of Artificial Sequence: Synthetic oligonucleotide
gauaccuagagaaacuagc

SEQ ID NO: 1272277 - RNA, 19 nt, Artificial Sequence
  Description of Artificial Sequence: Synthetic oligonucleotide
agauaaggaugccacuggc

SEQ ID NO: 1272278 - RNA, 19 nt, Artificial Sequence
  Description of Artificial Sequence: Synthetic oligonucleotide
ucggauuuccccaaacuug

SEQ ID NO: 1272279 - RNA, 19 nt, Artificial Sequence
  Description of Artificial Sequence: Synthetic oligonucleotide
aauguagacuuuccgggcu

SEQ ID NO: 1272280 - RNA, 19 nt, Artificial Sequence
  Description of Artificial Sequence: Synthetic oligonucleotide
acugagauacgaugauacc

SEQ ID NO: 1272281 - RNA, 19 nt, Artificial Sequence
  Description of Artificial Sequence: Synthetic oligonucleotide
cagaauauauuuaggcagc

SEQ ID NO: 1272282 - RNA, 19 nt, Artificial Sequence
  Description of Artificial Sequence: Synthetic oligonucleotide
aacuuguugcgguaagcag

SEQ ID NO: 1272283 - RNA, 19 nt, Artificial Sequence
  Description of Artificial Sequence: Synthetic oligonucleotide
cacagguuaaguuacgaug

SEQ ID NO: 1272284 - RNA, 19 nt, Artificial Sequence
  Description of Artificial Sequence: Synthetic oligonucleotide
agcgaaucuccucaggccg

SEQ ID NO: 1272285 - RNA, 19 nt, Artificial Sequence
  Description of Artificial Sequence: Synthetic oligonucleotide
aaagcuggugucacuaaac

SEQ ID NO: 1272286 - RNA, 19 nt, Artificial Sequence
  Description of Artificial Sequence: Synthetic oligonucleotide
uuaauaacacauugguguc

SEQ ID NO: 1272287 - RNA, 19 nt, Artificial Sequence
  Description of Artificial Sequence: Synthetic oligonucleotide
caauuucagccccauagcg

SEQ ID NO: 1272288 - RNA, 19 nt, Artificial Sequence
  Description of Artificial Sequence: Synthetic oligonucleotide
ucucgcacaaacaggaacu

SEQ ID NO: 1272289 - RNA, 19 nt, Artificial Sequence
  Description of Artificial Sequence: Synthetic oligonucleotide
ugauaccuagagaaacuag

SEQ ID NO: 1272290 - RNA, 19 nt, Artificial Sequence
  Description of Artificial Sequence: Synthetic oligonucleotide
cacugagauacgaugauac

SEQ ID NO: 1272291 - RNA, 19 nt, Artificial Sequence
  Description of Artificial Sequence: Synthetic oligonucleotide
uaguccugagguuaauggg

SEQ ID NO: 1272292 - RNA, 19 nt, Artificial Sequence
  Description of Artificial Sequence: Synthetic oligonucleotide
ugagauacgaugauaccua

SEQ ID NO: 1272293 - RNA, 19 nt, Artificial Sequence
  Description of Artificial Sequence: Synthetic oligonucleotide
ccagaauauauuuaggcag

SEQ ID NO: 1272294 - RNA, 19 nt, Artificial Sequence
  Description of Artificial Sequence: Synthetic oligonucleotide
auuucagccccauagcgcu

SEQ ID NO: 1272295 - RNA, 19 nt, Artificial Sequence
  Description of Artificial Sequence: Synthetic oligonucleotide
ucauguguuuggcuggugc

SEQ ID NO: 1272296 - RNA, 19 nt, Artificial Sequence
  Description of Artificial Sequence: Synthetic oligonucleotide
aaacuagcaagccccagaa

SEQ ID NO: 1272297 - RNA, 19 nt, Artificial Sequence
  Description of Artificial Sequence: Synthetic oligonucleotide
agacuuuccgggcuggccg

SEQ ID NO: 1272298 - RNA, 19 nt, Artificial Sequence
  Description of Artificial Sequence: Synthetic oligonucleotide
ucucucauaagaacccaca

SEQ ID NO: 1272299 - RNA, 19 nt, Artificial Sequence
  Description of Artificial Sequence: Synthetic oligonucleotide
agaaccagggguuucugug

SEQ ID NO: 1272300 - RNA, 19 nt, Artificial Sequence
  Description of Artificial Sequence: Synthetic oligonucleotide
auaugguuuuaauaacaca

SEQ ID NO: 1272301 - RNA, 19 nt, Artificial Sequence
  Description of Artificial Sequence: Synthetic oligonucleotide
acuaaaccaaacuccagaa

SEQ ID NO: 1272302 - RNA, 19 nt, Artificial Sequence
  Description of Artificial Sequence: Synthetic oligonucleotide
ucaaacauaugguuuuaau

SEQ ID NO: 1272303 - RNA, 19 nt, Artificial Sequence
  Description of Artificial Sequence: Synthetic oligonucleotide
cauucaugugcucaggauc

SEQ ID NO: 1272304 - RNA, 19 nt, Artificial Sequence
  Description of Artificial Sequence: Synthetic oligonucleotide
ucaagguccgguuucggac

SEQ ID NO: 1272305 - RNA, 19 nt, Artificial Sequence
  Description of Artificial Sequence: Synthetic oligonucleotide
acuugcaagucggaguccc

SEQ ID NO: 1272306 - RNA, 19 nt, Artificial Sequence
  Description of Artificial Sequence: Synthetic oligonucleotide
guagcgaaucuccucaggc

SEQ ID NO: 1272307 - RNA, 19 nt, Artificial Sequence
  Description of Artificial Sequence: Synthetic oligonucleotide
aacuagcaagccccagaac

SEQ ID NO: 1272308 - RNA, 19 nt, Artificial Sequence
  Description of Artificial Sequence: Synthetic oligonucleotide
uccuaagagaguccaccag

SEQ ID NO: 1272309 - RNA, 19 nt, Artificial Sequence
  Description of Artificial Sequence: Synthetic oligonucleotide
uuaaguuacgauggaccag

SEQ ID NO: 1272310 - RNA, 19 nt, Artificial Sequence
  Description of Artificial Sequence: Synthetic oligonucleotide
cuuguugcgguaagcagac

SEQ ID NO: 1272311 - RNA, 19 nt, Artificial Sequence
  Description of Artificial Sequence: Synthetic oligonucleotide
agucguagugcacagcaca

SEQ ID NO: 1272312 - RNA, 19 nt, Artificial Sequence
  Description of Artificial Sequence: Synthetic oligonucleotide
acugcggugguccaucuug

SEQ ID NO: 1272313 - RNA, 19 nt, Artificial Sequence
  Description of Artificial Sequence: Synthetic oligonucleotide
cagacgguagcgaaucucc

SEQ ID NO: 1272314 - RNA, 19 nt, Artificial Sequence
  Description of Artificial Sequence: Synthetic oligonucleotide
ucacuaaaccaaacuccag

SEQ ID NO: 1272315 - RNA, 19 nt, Artificial Sequence
  Description of Artificial Sequence: Synthetic oligonucleotide
agccccauagcgcugcugg

SEQ ID NO: 1272316 - RNA, 19 nt, Artificial Sequence
  Description of Artificial Sequence: Synthetic oligonucleotide
uuucggggacgccaguggg

SEQ ID NO: 1272317 - RNA, 19 nt, Artificial Sequence
  Description of Artificial Sequence: Synthetic oligonucleotide
ucuccgauaggaugccccg

SEQ ID NO: 1272318 - RNA, 19 nt, Artificial Sequence
  Description of Artificial Sequence: Synthetic oligonucleotide
gggguuuuaucuccgauag

SEQ ID NO: 1272319 - RNA, 19 nt, Artificial Sequence
  Description of Artificial Sequence: Synthetic oligonucleotide
caucuugaggcggacaucc

SEQ ID NO: 1272320 - RNA, 19 nt, Artificial Sequence
  Description of Artificial Sequence: Synthetic oligonucleotide
gguuaaguuacgauggacc

SEQ ID NO: 1272321 - RNA, 19 nt, Artificial Sequence
  Description of Artificial Sequence: Synthetic oligonucleotide
cagucucucauaagaaccc

SEQ ID NO: 1272322 - RNA, 19 nt, Artificial Sequence
  Description of Artificial Sequence: Synthetic oligonucleotide
uugaaguaaugcugcagac

SEQ ID NO: 1272323 - RNA, 19 nt, Artificial Sequence
  Description of Artificial Sequence: Synthetic oligonucleotide
caaacauaugguuuuaaua

SEQ ID NO: 1272324 - RNA, 19 nt, Artificial Sequence
  Description of Artificial Sequence: Synthetic oligonucleotide
guuucggacauccucccgc

SEQ ID NO: 1272325 - RNA, 19 nt, Artificial Sequence
  Description of Artificial Sequence: Synthetic oligonucleotide
cauguguuuggcuggugcc

SEQ ID NO: 1272326 - RNA, 19 nt, Artificial Sequence
  Description of Artificial Sequence: Synthetic oligonucleotide
acgaucacugcaaacauca

SEQ ID NO: 1272327 - RNA, 19 nt, Artificial Sequence
  Description of Artificial Sequence: Synthetic oligonucleotide
gagauacgaugauaccuag

SEQ ID NO: 1272328 - RNA, 19 nt, Artificial Sequence
  Description of Artificial Sequence: Synthetic oligonucleotide
agcgccugacaauuucagc

SEQ ID NO: 1272329 - RNA, 19 nt, Artificial Sequence
  Description of Artificial Sequence: Synthetic oligonucleotide
ccuagagaaacuagcaagc

SEQ ID NO: 1272330 - RNA, 19 nt, Artificial Sequence
  Description of Artificial Sequence: Synthetic oligonucleotide
cuagagaaacuagcaagcc

SEQ ID NO: 1272331 - RNA, 19 nt, Artificial Sequence
  Description of Artificial Sequence: Synthetic oligonucleotide
ucucggauuuccccaaacu

SEQ ID NO: 1272332 - RNA, 19 nt, Artificial Sequence
  Description of Artificial Sequence: Synthetic oligonucleotide
uucaggauuuggccacagg

SEQ ID NO: 1272333 - RNA, 19 nt, Artificial Sequence
  Description of Artificial Sequence: Synthetic oligonucleotide
uagcgaaucuccucaggcc

SEQ ID NO: 1272334 - RNA, 19 nt, Artificial Sequence
  Description of Artificial Sequence: Synthetic oligonucleotide
uucuaaggcaccacagcuc

SEQ ID NO: 1272335 - RNA, 19 nt, Artificial Sequence
  Description of Artificial Sequence: Synthetic oligonucleotide
agguuaaguuacgauggac

SEQ ID NO: 1272336 - RNA, 19 nt, Artificial Sequence
  Description of Artificial Sequence: Synthetic oligonucleotide
cacaugguugacacaagug

SEQ ID NO: 1272337 - RNA, 19 nt, Artificial Sequence
  Description of Artificial Sequence: Synthetic oligonucleotide
uggccaacuaucacuggug

SEQ ID NO: 1272338 - RNA, 19 nt, Artificial Sequence
  Description of Artificial Sequence: Synthetic oligonucleotide
gacacaagugguacacagg

SEQ ID NO: 1272339 - RNA, 19 nt, Artificial Sequence
  Description of Artificial Sequence: Synthetic oligonucleotide
uccgguuucggacauccuc

SEQ ID NO: 1272340 - RNA, 19 nt, Artificial Sequence
  Description of Artificial Sequence: Synthetic oligonucleotide
auccagugcucauucaugu

SEQ ID NO: 1272341 - RNA, 19 nt, Artificial Sequence
  Description of Artificial Sequence: Synthetic oligonucleotide
ugaagucagucuuuauauc

SEQ ID NO: 1272342 - RNA, 19 nt, Artificial Sequence
  Description of Artificial Sequence: Synthetic oligonucleotide
aggauuuggccacagguua

SEQ ID NO: 1272343 - RNA, 19 nt, Artificial Sequence
  Description of Artificial Sequence: Synthetic oligonucleotide
aucuccgauaggaugcccc

SEQ ID NO: 1272344 - RNA, 19 nt, Artificial Sequence
  Description of Artificial Sequence: Synthetic oligonucleotide
cacuaaaccaaacuccaga

SEQ ID NO: 1272345 - RNA, 19 nt, Artificial Sequence
  Description of Artificial Sequence: Synthetic oligonucleotide
uaauaacacauuggugucu

SEQ ID NO: 1272346 - RNA, 19 nt, Artificial Sequence
  Description of Artificial Sequence: Synthetic oligonucleotide
acuuguugcgguaagcaga

SEQ ID NO: 1272347 - RNA, 19 nt, Artificial Sequence
  Description of Artificial Sequence: Synthetic oligonucleotide
auaccuagagaaacuagca

SEQ ID NO: 1272348 - RNA, 19 nt, Artificial Sequence
  Description of Artificial Sequence: Synthetic oligonucleotide
ugcgguaagcagacaggag

SEQ ID NO: 1272349 - RNA, 19 nt, Artificial Sequence
  Description of Artificial Sequence: Synthetic oligonucleotide
uagcgccugacaauuucag

SEQ ID NO: 1272350 - RNA, 19 nt, Artificial Sequence
  Description of Artificial Sequence: Synthetic oligonucleotide
gguacucucggauuucccc

SEQ ID NO: 1272351 - RNA, 19 nt, Artificial Sequence
  Description of Artificial Sequence: Synthetic oligonucleotide
gucacuaaaccaaacucca

SEQ ID NO: 1272352 - RNA, 19 nt, Artificial Sequence
  Description of Artificial Sequence: Synthetic oligonucleotide
cuuucggggacgccagugg

SEQ ID NO: 1272353 - RNA, 19 nt, Artificial Sequence
  Description of Artificial Sequence: Synthetic oligonucleotide
guugcgguaagcagacagg

SEQ ID NO: 1272354 - RNA, 19 nt, Artificial Sequence
  Description of Artificial Sequence: Synthetic oligonucleotide
auacgaugauaccuagaga

SEQ ID NO: 1272355 - RNA, 19 nt, Artificial Sequence
  Description of Artificial Sequence: Synthetic oligonucleotide
uucagcacgcgcuuccagu

SEQ ID NO: 1272356 - RNA, 19 nt, Artificial Sequence
  Description of Artificial Sequence: Synthetic oligonucleotide
auguguuuggcuggugccg

SEQ ID NO: 1272357 - RNA, 19 nt, Artificial Sequence
  Description of Artificial Sequence: Synthetic oligonucleotide
cauccagugcucauucaug

SEQ ID NO: 1272358 - RNA, 19 nt, Artificial Sequence
  Description of Artificial Sequence: Synthetic oligonucleotide
uccgauaggaugccccgcu

SEQ ID NO: 1272359 - RNA, 19 nt, Artificial Sequence
  Description of Artificial Sequence: Synthetic oligonucleotide
aagggguuuuaucuccgau

SEQ ID NO: 1272360 - RNA, 19 nt, Artificial Sequence
  Description of Artificial Sequence: Synthetic oligonucleotide
guuccaaggggucucgcac

SEQ ID NO: 1272361 - RNA, 19 nt, Artificial Sequence
  Description of Artificial Sequence: Synthetic oligonucleotide
gacaucguccccugcagga

SEQ ID NO: 1272362 - RNA, 19 nt, Artificial Sequence
  Description of Artificial Sequence: Synthetic oligonucleotide
ucggacauccucccgcacu

SEQ ID NO: 1272363 - RNA, 19 nt, Artificial Sequence
  Description of Artificial Sequence: Synthetic oligonucleotide
cucgaucaugagcaguagc

SEQ ID NO: 1272364 - RNA, 19 nt, Artificial Sequence
  Description of Artificial Sequence: Synthetic oligonucleotide
uggugauccggggagaccu

SEQ ID NO: 1272365 - RNA, 19 nt, Artificial Sequence
  Description of Artificial Sequence: Synthetic oligonucleotide
uugcgguaagcagacagga

SEQ ID NO: 1272366 - RNA, 19 nt, Artificial Sequence
  Description of Artificial Sequence: Synthetic oligonucleotide
aagucguagugcacagcac

SEQ ID NO: 1272367 - RNA, 19 nt, Artificial Sequence
  Description of Artificial Sequence: Synthetic oligonucleotide
uuucggacauccucccgca

SEQ ID NO: 1272368 - RNA, 19 nt, Artificial Sequence
  Description of Artificial Sequence: Synthetic oligonucleotide
gacuuuccgggcuggccgg

SEQ ID NO: 1272369 - RNA, 19 nt, Artificial Sequence
  Description of Artificial Sequence: Synthetic oligonucleotide
agcacgcgcuuccaguuag

SEQ ID NO: 1272370 - RNA, 19 nt, Artificial Sequence
  Description of Artificial Sequence: Synthetic oligonucleotide
cuacucaauggagaccgcc

SEQ ID NO: 1272371 - RNA, 19 nt, Artificial Sequence
  Description of Artificial Sequence: Synthetic oligonucleotide
uguguuuggcuggugccgc

SEQ ID NO: 1272372 - RNA, 19 nt, Artificial Sequence
  Description of Artificial Sequence: Synthetic oligonucleotide
caaacuuguugcgguaagc

SEQ ID NO: 1272373 - RNA, 19 nt, Artificial Sequence
  Description of Artificial Sequence: Synthetic oligonucleotide
agucggaguccccaccaag

SEQ ID NO: 1272374 - RNA, 19 nt, Artificial Sequence
  Description of Artificial Sequence: Synthetic oligonucleotide
cugagguuaaugggguggg

SEQ ID NO: 1272375 - RNA, 19 nt, Artificial Sequence
  Description of Artificial Sequence: Synthetic oligonucleotide
acaggugguaauguagacu

SEQ ID NO: 1272376 - RNA, 19 nt, Artificial Sequence
  Description of Artificial Sequence: Synthetic oligonucleotide
uuccaaggggucucgcaca

SEQ ID NO: 1272377 - RNA, 19 nt, Artificial Sequence
  Description of Artificial Sequence: Synthetic oligonucleotide
ccagugcucauucaugugc

SEQ ID NO: 1272378 - RNA, 19 nt, Artificial Sequence
  Description of Artificial Sequence: Synthetic oligonucleotide
uccagugcucauucaugug

SEQ ID NO: 1272379 - RNA, 19 nt, Artificial Sequence
  Description of Artificial Sequence: Synthetic oligonucleotide
cccuacucaauggagaccg

SEQ ID NO: 1272380 - RNA, 19 nt, Artificial Sequence
  Description of Artificial Sequence: Synthetic oligonucleotide
gagguuaauggggugggca

SEQ ID NO: 1272381 - RNA, 19 nt, Artificial Sequence
  Description of Artificial Sequence: Synthetic oligonucleotide
agggguuuuaucuccgaua

SEQ ID NO: 1272382 - RNA, 19 nt, Artificial Sequence
  Description of Artificial Sequence: Synthetic oligonucleotide
gaugauaccuagagaaacu

SEQ ID NO: 1272383 - RNA, 19 nt, Artificial Sequence
  Description of Artificial Sequence: Synthetic oligonucleotide
ugguacucucggauuuccc

SEQ ID NO: 1272384 - RNA, 19 nt, Artificial Sequence
  Description of Artificial Sequence: Synthetic oligonucleotide
cacaaagucguagugcaca

SEQ ID NO: 1272385 - RNA, 19 nt, Artificial Sequence
  Description of Artificial Sequence: Synthetic oligonucleotide
uggugucacuaaaccaaac

SEQ ID NO: 1272386 - RNA, 19 nt, Artificial Sequence
  Description of Artificial Sequence: Synthetic oligonucleotide
caggccgcgccuuuguggc

SEQ ID NO: 1272387 - RNA, 19 nt, Artificial Sequence
  Description of Artificial Sequence: Synthetic oligonucleotide
gucuggaguagaaaggcuc

SEQ ID NO: 1272388 - RNA, 19 nt, Artificial Sequence
  Description of Artificial Sequence: Synthetic oligonucleotide
cucacucuaguccugaggu

SEQ ID NO: 1272389 - RNA, 19 nt, Artificial Sequence
  Description of Artificial Sequence: Synthetic oligonucleotide
guaagcaaagagggagaag

SEQ ID NO: 1272390 - RNA, 19 nt, Artificial Sequence
  Description of Artificial Sequence: Synthetic oligonucleotide
aggauaggccuccaggcuu

SEQ ID NO: 1272391 - RNA, 19 nt, Artificial Sequence
  Description of Artificial Sequence: Synthetic oligonucleotide
uccggggagaccucgccga

SEQ ID NO: 1272392 - RNA, 19 nt, Artificial Sequence
  Description of Artificial Sequence: Synthetic oligonucleotide
accgccucggcgugcggcc

SEQ ID NO: 1272393 - RNA, 19 nt, Artificial Sequence
  Description of Artificial Sequence: Synthetic oligonucleotide
agagggcgagggaacaugg

SEQ ID NO: 1272394 - RNA, 19 nt, Artificial Sequence
  Description of Artificial Sequence: Synthetic oligonucleotide
aguuagagcaggccacuuu

SEQ ID NO: 1272395 - RNA, 19 nt, Artificial Sequence
  Description of Artificial Sequence: Synthetic oligonucleotide
gacgccaguggggucagag

SEQ ID NO: 1272396 - RNA, 19 nt, Artificial Sequence
  Description of Artificial Sequence: Synthetic oligonucleotide
gaaccggacaugggguggg

SEQ ID NO: 1272397 - RNA, 19 nt, Artificial Sequence
  Description of Artificial Sequence: Synthetic oligonucleotide
gcgguaguggcgcagcagg

SEQ ID NO: 1272398 - RNA, 19 nt, Artificial Sequence
  Description of Artificial Sequence: Synthetic oligonucleotide
gauccggggagaccucgcc

SEQ ID NO: 1272399 - RNA, 19 nt, Artificial Sequence
  Description of Artificial Sequence: Synthetic oligonucleotide
auaccaggccugccgagcu

SEQ ID NO: 1272400 - RNA, 19 nt, Artificial Sequence
  Description of Artificial Sequence: Synthetic oligonucleotide
aggaugccccgcucgauca

SEQ ID NO: 1272401 - RNA, 19 nt, Artificial Sequence
  Description of Artificial Sequence: Synthetic oligonucleotide
uccaaggggucucgcacaa

SEQ ID NO: 1272402 - RNA, 19 nt, Artificial Sequence
  Description of Artificial Sequence: Synthetic oligonucleotide
cuuuguggcugggagggug

SEQ ID NO: 1272403 - RNA, 19 nt, Artificial Sequence
  Description of Artificial Sequence: Synthetic oligonucleotide
uugcaagucggagucccca

SEQ ID NO: 1272404 - RNA, 19 nt, Artificial Sequence
  Description of Artificial Sequence: Synthetic oligonucleotide
gccgauaccaggccugccg

SEQ ID NO: 1272405 - RNA, 19 nt, Artificial Sequence
  Description of Artificial Sequence: Synthetic oligonucleotide
agaaacuagcaagccccag

SEQ ID NO: 1272406 - RNA, 19 nt, Artificial Sequence
  Description of Artificial Sequence: Synthetic oligonucleotide
acauugggcaguggguaag

SEQ ID NO: 1272407 - RNA, 19 nt, Artificial Sequence
  Description of Artificial Sequence: Synthetic oligonucleotide
gacaagcuucccuggugac

SEQ ID NO: 1272408 - RNA, 19 nt, Artificial Sequence
  Description of Artificial Sequence: Synthetic oligonucleotide
auggugauccggggagacc

SEQ ID NO: 1272409 - RNA, 19 nt, Artificial Sequence
  Description of Artificial Sequence: Synthetic oligonucleotide
uccucccgcacuugcaagu

SEQ ID NO: 1272410 - RNA, 19 nt, Artificial Sequence
  Description of Artificial Sequence: Synthetic oligonucleotide
cacgaucacugcaaacauc

SEQ ID NO: 1272411 - RNA, 19 nt, Artificial Sequence
  Description of Artificial Sequence: Synthetic oligonucleotide
ugcaagucggaguccccac

SEQ ID NO: 1272412 - RNA, 19 nt, Artificial Sequence
  Description of Artificial Sequence: Synthetic oligonucleotide
cugagauacgaugauaccu

SEQ ID NO: 1272413 - RNA, 19 nt, Artificial Sequence
  Description of Artificial Sequence: Synthetic oligonucleotide
uuaauggggugggcaacca

SEQ ID NO: 1272414 - RNA, 19 nt, Artificial Sequence
  Description of Artificial Sequence: Synthetic oligonucleotide
gaagcgguaguggcgcagc

SEQ ID NO: 1272415 - RNA, 19 nt, Artificial Sequence
  Description of Artificial Sequence: Synthetic oligonucleotide
augguuuuaauaacacauu

SEQ ID NO: 1272416 - RNA, 19 nt, Artificial Sequence
  Description of Artificial Sequence: Synthetic oligonucleotide
ugcucaggauccucaucca

SEQ ID NO: 1272417 - RNA, 19 nt, Artificial Sequence
  Description of Artificial Sequence: Synthetic oligonucleotide
uggcuccuaagagagucca

SEQ ID NO: 1272418 - RNA, 19 nt, Artificial Sequence
  Description of Artificial Sequence: Synthetic oligonucleotide
accggccaaguccccaggg

SEQ ID NO: 1272419 - RNA, 19 nt, Artificial Sequence
  Description of Artificial Sequence: Synthetic oligonucleotide
uacucucggauuuccccaa

SEQ ID NO: 1272420 - RNA, 19 nt, Artificial Sequence
  Description of Artificial Sequence: Synthetic oligonucleotide
cucguggggcauugcacag

SEQ ID NO: 1272421 - RNA, 19 nt, Artificial Sequence
  Description of Artificial Sequence: Synthetic oligonucleotide
ccgguuucggacauccucc

SEQ ID NO: 1272422 - RNA, 19 nt, Artificial Sequence
  Description of Artificial Sequence: Synthetic oligonucleotide
uggaguagaaaggcucaaa

SEQ ID NO: 1272423 - RNA, 19 nt, Artificial Sequence
  Description of Artificial Sequence: Synthetic oligonucleotide
cuccuuucggggacgccag

SEQ ID NO: 1272424 - RNA, 19 nt, Artificial Sequence
  Description of Artificial Sequence: Synthetic oligonucleotide
ugcggugguccaucuugag

SEQ ID NO: 1272425 - RNA, 19 nt, Artificial Sequence
  Description of Artificial Sequence: Synthetic oligonucleotide
aagguccgguuucggacau

SEQ ID NO: 1272426 - RNA, 19 nt, Artificial Sequence
  Description of Artificial Sequence: Synthetic oligonucleotide
agucucucauaagaaccca

SEQ ID NO: 1272427 - RNA, 19 nt, Artificial Sequence
  Description of Artificial Sequence: Synthetic oligonucleotide
ggugucacuaaaccaaacu

SEQ ID NO: 1272428 - RNA, 19 nt, Artificial Sequence
  Description of Artificial Sequence: Synthetic oligonucleotide
ucguggggcauugcacagg

SEQ ID NO: 1272429 - RNA, 19 nt, Artificial Sequence
  Description of Artificial Sequence: Synthetic oligonucleotide
aucaaacauaugguuuuaa

SEQ ID NO: 1272430 - RNA, 19 nt, Artificial Sequence
  Description of Artificial Sequence: Synthetic oligonucleotide
gauaaggaugccacuggcu

SEQ ID NO: 1272431 - RNA, 19 nt, Artificial Sequence
  Description of Artificial Sequence: Synthetic oligonucleotide
ugagguuaauggggugggc

SEQ ID NO: 1272432 - RNA, 19 nt, Artificial Sequence
  Description of Artificial Sequence: Synthetic oligonucleotide
aaguaaugcugcagacggu

SEQ ID NO: 1272433 - RNA, 19 nt, Artificial Sequence
  Description of Artificial Sequence: Synthetic oligonucleotide
ccugauuggcaucagccuc

SEQ ID NO: 1272434 - RNA, 19 nt, Artificial Sequence
  Description of Artificial Sequence: Synthetic oligonucleotide
cucaagguccgguuucgga

SEQ ID NO: 1272435 - RNA, 19 nt, Artificial Sequence
  Description of Artificial Sequence: Synthetic oligonucleotide
ugacaauuucagccccaua

SEQ ID NO: 1272436 - RNA, 19 nt, Artificial Sequence
  Description of Artificial Sequence: Synthetic oligonucleotide
cuucagcacgcgcuuccag

SEQ ID NO: 1272437 - RNA, 19 nt, Artificial Sequence
  Description of Artificial Sequence: Synthetic oligonucleotide
ggaagggguuuuaucuccg

SEQ ID NO: 1272438 - RNA, 19 nt, Artificial Sequence
  Description of Artificial Sequence: Synthetic oligonucleotide
ugcagacgguagcgaaucu

SEQ ID NO: 1272439 - RNA, 19 nt, Artificial Sequence
  Description of Artificial Sequence: Synthetic oligonucleotide
cauugggcaguggguaagc

SEQ ID NO: 1272440 - RNA, 19 nt, Artificial Sequence
  Description of Artificial Sequence: Synthetic oligonucleotide
ggcucggcuccuuucgggg

SEQ ID NO: 1272441 - RNA, 19 nt, Artificial Sequence
  Description of Artificial Sequence: Synthetic oligonucleotide
ugccgagcugggaaccgga

SEQ ID NO: 1272442 - RNA, 19 nt, Artificial Sequence
  Description of Artificial Sequence: Synthetic oligonucleotide
ccgcacacugcccucaagg

SEQ ID NO: 1272443 - RNA, 19 nt, Artificial Sequence
  Description of Artificial Sequence: Synthetic oligonucleotide
ccaacuaucacuggugaca

SEQ ID NO: 1272444 - RNA, 19 nt, Artificial Sequence
  Description of Artificial Sequence: Synthetic oligonucleotide
agauacgaugauaccuaga

SEQ ID NO: 1272445 - RNA, 19 nt, Artificial Sequence
  Description of Artificial Sequence: Synthetic oligonucleotide
ggcccuacucaauggagac

SEQ ID NO: 1272446 - RNA, 19 nt, Artificial Sequence
  Description of Artificial Sequence: Synthetic oligonucleotide
gagaaacuagcaagcccca

SEQ ID NO: 1272447 - RNA, 19 nt, Artificial Sequence
  Description of Artificial Sequence: Synthetic oligonucleotide
gguuucggacauccucccg

SEQ ID NO: 1272448 - RNA, 19 nt, Artificial Sequence
  Description of Artificial Sequence: Synthetic oligonucleotide
cauggugauccggggagac

SEQ ID NO: 1272449 - RNA, 19 nt, Artificial Sequence
  Description of Artificial Sequence: Synthetic oligonucleotide
cccacaaagucguagugca

SEQ ID NO: 1272450 - RNA, 19 nt, Artificial Sequence
  Description of Artificial Sequence: Synthetic oligonucleotide
gaggccacgaucacugcaa

SEQ ID NO: 1272451 - RNA, 19 nt, Artificial Sequence
  Description of Artificial Sequence: Synthetic oligonucleotide
cacaagugguacacaggca

SEQ ID NO: 1272452 - RNA, 19 nt, Artificial Sequence
  Description of Artificial Sequence: Synthetic oligonucleotide
cgaugauaccuagagaaac

SEQ ID NO: 1272453 - RNA, 19 nt, Artificial Sequence
  Description of Artificial Sequence: Synthetic oligonucleotide
cacagcucacucuaguccu

SEQ ID NO: 1272454 - RNA, 19 nt, Artificial Sequence
  Description of Artificial Sequence: Synthetic oligonucleotide
uaucuccgauaggaugccc

SEQ ID NO: 1272455 - RNA, 19 nt, Artificial Sequence
  Description of Artificial Sequence: Synthetic oligonucleotide
gguccgguuucggacaucc

SEQ ID NO: 1272456 - RNA, 19 nt, Artificial Sequence
  Description of Artificial Sequence: Synthetic oligonucleotide
gaugccccgcucgaucaug

SEQ ID NO: 1272457 - RNA, 19 nt, Artificial Sequence
  Description of Artificial Sequence: Synthetic oligonucleotide
aguccaccagugauagcag

SEQ ID NO: 1272458 - RNA, 19 nt, Artificial Sequence
  Description of Artificial Sequence: Synthetic oligonucleotide
aaccggacauggggugggg

SEQ ID NO: 1272459 - RNA, 19 nt, Artificial Sequence
  Description of Artificial Sequence: Synthetic oligonucleotide
acgaugauaccuagagaaa

SEQ ID NO: 1272460 - RNA, 19 nt, Artificial Sequence
  Description of Artificial Sequence: Synthetic oligonucleotide
ccgccuucaggauuuggcc

SEQ ID NO: 1272461 - RNA, 19 nt, Artificial Sequence
  Description of Artificial Sequence: Synthetic oligonucleotide
guuguccgcacacugcccu

SEQ ID NO: 1272462 - RNA, 19 nt, Artificial Sequence
  Description of Artificial Sequence: Synthetic oligonucleotide
ggaaccggacauggggugg

SEQ ID NO: 1272463 - RNA, 19 nt, Artificial Sequence
  Description of Artificial Sequence: Synthetic oligonucleotide
caacuaucacuggugacaa

SEQ ID NO: 1272464 - RNA, 19 nt, Artificial Sequence
  Description of Artificial Sequence: Synthetic oligonucleotide
acugcccgguuguccgcac

SEQ ID NO: 1272465 - RNA, 19 nt, Artificial Sequence
  Description of Artificial Sequence: Synthetic oligonucleotide
ccgacugcccgguuguccg

SEQ ID NO: 1272466 - RNA, 19 nt, Artificial Sequence
  Description of Artificial Sequence: Synthetic oligonucleotide
agugguacacaggcaucca

SEQ ID NO: 1272467 - RNA, 19 nt, Artificial Sequence
  Description of Artificial Sequence: Synthetic oligonucleotide
aggcguuccaaggggucuc

SEQ ID NO: 1272468 - RNA, 19 nt, Artificial Sequence
  Description of Artificial Sequence: Synthetic oligonucleotide
cuaaggcaccacagcucac

SEQ ID NO: 1272469 - RNA, 19 nt, Artificial Sequence
  Description of Artificial Sequence: Synthetic oligonucleotide
uucggacauccucccgcac

SEQ ID NO: 1272470 - RNA, 19 nt, Artificial Sequence
  Description of Artificial Sequence: Synthetic oligonucleotide
cacgcgcuuccaguuagag

SEQ ID NO: 1272471 - RNA, 19 nt, Artificial Sequence
  Description of Artificial Sequence: Synthetic oligonucleotide
cagagggcgagggaacaug

SEQ ID NO: 1272472 - RNA, 19 nt, Artificial Sequence
  Description of Artificial Sequence: Synthetic oligonucleotide
ugcacagcacaugguugac

SEQ ID NO: 1272473 - RNA, 19 nt, Artificial Sequence
  Description of Artificial Sequence: Synthetic oligonucleotide
aaguuacgauggaccaggu

SEQ ID NO: 1272474 - RNA, 19 nt, Artificial Sequence
  Description of Artificial Sequence: Synthetic oligonucleotide
gccugacaauuucagcccc

SEQ ID NO: 1272475 - RNA, 19 nt, Artificial Sequence
  Description of Artificial Sequence: Synthetic oligonucleotide
acgauggaccaggugggcu

SEQ ID NO: 1272476 - RNA, 19 nt, Artificial Sequence
  Description of Artificial Sequence: Synthetic oligonucleotide
gggaaccggacauggggug

SEQ ID NO: 1272477 - RNA, 19 nt, Artificial Sequence
  Description of Artificial Sequence: Synthetic oligonucleotide
ccgcaggucugccagaaac

SEQ ID NO: 1272478 - RNA, 19 nt, Artificial Sequence
  Description of Artificial Sequence: Synthetic oligonucleotide
gcgccuuuguggcugggag

SEQ ID NO: 1272479 - RNA, 19 nt, Artificial Sequence
  Description of Artificial Sequence: Synthetic oligonucleotide
gauuggcaucagccuccag

SEQ ID NO: 1272480 - RNA, 19 nt, Artificial Sequence
  Description of Artificial Sequence: Synthetic oligonucleotide
gcucguggggcauugcaca

SEQ ID NO: 1272481 - RNA, 19 nt, Artificial Sequence
  Description of Artificial Sequence: Synthetic oligonucleotide
cguagcaguagaggaagcg

SEQ ID NO: 1272482 - RNA, 19 nt, Artificial Sequence
  Description of Artificial Sequence: Synthetic oligonucleotide
ggccaacuaucacugguga

SEQ ID NO: 1272483 - RNA, 19 nt, Artificial Sequence
  Description of Artificial Sequence: Synthetic oligonucleotide
aguagcccgcuggaggcca

SEQ ID NO: 1272484 - RNA, 19 nt, Artificial Sequence
  Description of Artificial Sequence: Synthetic oligonucleotide
uggugccgccuucaggauu

SEQ ID NO: 1272485 - RNA, 19 nt, Artificial Sequence
  Description of Artificial Sequence: Synthetic oligonucleotide
ucacugcggugguccaucu

SEQ ID NO: 1272486 - RNA, 19 nt, Artificial Sequence
  Description of Artificial Sequence: Synthetic oligonucleotide
gugauagcagcuggccuca

SEQ ID NO: 1272487 - RNA, 19 nt, Artificial Sequence
  Description of Artificial Sequence: Synthetic oligonucleotide
gguaagcaaagagggagaa

SEQ ID NO: 1272488 - RNA, 19 nt, Artificial Sequence
  Description of Artificial Sequence: Synthetic oligonucleotide
ccccgcucgaucaugagca

SEQ ID NO: 1272489 - RNA, 19 nt, Artificial Sequence
  Description of Artificial Sequence: Synthetic oligonucleotide
ccaggccgcgccuuugugg

SEQ ID NO: 1272490 - RNA, 19 nt, Artificial Sequence
  Description of Artificial Sequence: Synthetic oligonucleotide
cucggauuuccccaaacuu

SEQ ID NO: 1272491 - RNA, 19 nt, Artificial Sequence
  Description of Artificial Sequence: Synthetic oligonucleotide
uccaccggccaagucccca

SEQ ID NO: 1272492 - RNA, 19 nt, Artificial Sequence
  Description of Artificial Sequence: Synthetic oligonucleotide
gguuaauggggugggcaac

SEQ ID NO: 1272493 - RNA, 19 nt, Artificial Sequence
  Description of Artificial Sequence: Synthetic oligonucleotide
guagacuuuccgggcuggc

SEQ ID NO: 1272494 - RNA, 19 nt, Artificial Sequence
  Description of Artificial Sequence: Synthetic oligonucleotide
ugccgccuucaggauuugg

SEQ ID NO: 1272495 - RNA, 19 nt, Artificial Sequence
  Description of Artificial Sequence: Synthetic oligonucleotide
uagcgcugcugguacucuc

SEQ ID NO: 1272496 - RNA, 19 nt, Artificial Sequence
  Description of Artificial Sequence: Synthetic oligonucleotide
cuccgauaggaugccccgc

SEQ ID NO: 1272497 - RNA, 19 nt, Artificial Sequence
  Description of Artificial Sequence: Synthetic oligonucleotide
uuguccgcacacugcccuc

SEQ ID NO: 1272498 - RNA, 19 nt, Artificial Sequence
  Description of Artificial Sequence: Synthetic oligonucleotide
gccaacuaucacuggugac

SEQ ID NO: 1272499 - RNA, 19 nt, Artificial Sequence
  Description of Artificial Sequence: Synthetic oligonucleotide
cagugcucauucaugugcu

SEQ ID NO: 1272500 - RNA, 19 nt, Artificial Sequence
  Description of Artificial Sequence: Synthetic oligonucleotide
ugccccgcucgaucaugag

SEQ ID NO: 1272501 - RNA, 19 nt, Artificial Sequence
  Description of Artificial Sequence: Synthetic oligonucleotide
ugaggcggacauccacguu

SEQ ID NO: 1272502 - RNA, 19 nt, Artificial Sequence
  Description of Artificial Sequence: Synthetic oligonucleotide
ccagguaucucaggaacuc

SEQ ID NO: 1272503 - RNA, 19 nt, Artificial Sequence
  Description of Artificial Sequence: Synthetic oligonucleotide
agacgguagcgaaucuccu

SEQ ID NO: 1272504 - RNA, 19 nt, Artificial Sequence
  Description of Artificial Sequence: Synthetic oligonucleotide
uccuuucggggacgccagu

SEQ ID NO: 1272505 - RNA, 19 nt, Artificial Sequence
  Description of Artificial Sequence: Synthetic oligonucleotide
cuccgaguccagcccgggc

SEQ ID NO: 1272506 - RNA, 19 nt, Artificial Sequence
  Description of Artificial Sequence: Synthetic oligonucleotide
cacuugcaagucggagucc

SEQ ID NO: 1272507 - RNA, 19 nt, Artificial Sequence
  Description of Artificial Sequence: Synthetic oligonucleotide
gcuggccaacuaucacugg

SEQ ID NO: 1272508 - RNA, 19 nt, Artificial Sequence
  Description of Artificial Sequence: Synthetic oligonucleotide
guuuuaucuccgauaggau

SEQ ID NO: 1272509 - RNA, 19 nt, Artificial Sequence
  Description of Artificial Sequence: Synthetic oligonucleotide
cugccgagcugggaaccgg

SEQ ID NO: 1272510 - RNA, 19 nt, Artificial Sequence
  Description of Artificial Sequence: Synthetic oligonucleotide
gaccgccucggcgugcggc

SEQ ID NO: 1272511 - RNA, 19 nt, Artificial Sequence
  Description of Artificial Sequence: Synthetic oligonucleotide
ugauagcagcuggccucag

SEQ ID NO: 1272512 - RNA, 19 nt, Artificial Sequence
  Description of Artificial Sequence: Synthetic oligonucleotide
aucguccccugcaggacug

SEQ ID NO: 1272513 - RNA, 19 nt, Artificial Sequence
  Description of Artificial Sequence: Synthetic oligonucleotide
aggaggcguuccaaggggu

SEQ ID NO: 1272514 - RNA, 19 nt, Artificial Sequence
  Description of Artificial Sequence: Synthetic oligonucleotide
caccggccaaguccccagg

SEQ ID NO: 1272515 - RNA, 19 nt, Artificial Sequence
  Description of Artificial Sequence: Synthetic oligonucleotide
aggcggacauccacguugu

SEQ ID NO: 1272516 - RNA, 19 nt, Artificial Sequence
  Description of Artificial Sequence: Synthetic oligonucleotide
uggggcccgcacccacucc

SEQ ID NO: 1272517 - RNA, 19 nt, Artificial Sequence
  Description of Artificial Sequence: Synthetic oligonucleotide
gccccgcucgaucaugagc

SEQ ID NO: 1272518 - RNA, 19 nt, Artificial Sequence
  Description of Artificial Sequence: Synthetic oligonucleotide
ggaagcgguaguggcgcag

SEQ ID NO: 1272519 - RNA, 19 nt, Artificial Sequence
  Description of Artificial Sequence: Synthetic oligonucleotide
ccuaagagaguccaccagu

SEQ ID NO: 1272520 - RNA, 19 nt, Artificial Sequence
  Description of Artificial Sequence: Synthetic oligonucleotide
accagggguuucugugaaa

SEQ ID NO: 1272521 - RNA, 19 nt, Artificial Sequence
  Description of Artificial Sequence: Synthetic oligonucleotide
agccccagaaccagggguu

SEQ ID NO: 1272522 - RNA, 19 nt, Artificial Sequence
  Description of Artificial Sequence: Synthetic oligonucleotide
ggacguagcaguagaggaa

SEQ ID NO: 1272523 - RNA, 19 nt, Artificial Sequence
  Description of Artificial Sequence: Synthetic oligonucleotide
agggcucguggggcauugc

SEQ ID NO: 1272524 - RNA, 19 nt, Artificial Sequence
  Description of Artificial Sequence: Synthetic oligonucleotide
cagugauagcagcuggccu

SEQ ID NO: 1272525 - RNA, 19 nt, Artificial Sequence
  Description of Artificial Sequence: Synthetic oligonucleotide
ggccacagguuaaguuacg

SEQ ID NO: 1272526 - RNA, 19 nt, Artificial Sequence
  Description of Artificial Sequence: Synthetic oligonucleotide
gaggcguuccaaggggucu

SEQ ID NO: 1272527 - RNA, 19 nt, Artificial Sequence
  Description of Artificial Sequence: Synthetic oligonucleotide
guccugagguuaauggggu

SEQ ID NO: 1272528 - RNA, 19 nt, Artificial Sequence
  Description of Artificial Sequence: Synthetic oligonucleotide
uuguugcgguaagcagaca

SEQ ID NO: 1272529 - RNA, 19 nt, Artificial Sequence
  Description of Artificial Sequence: Synthetic oligonucleotide
gcagacgguagcgaaucuc

SEQ ID NO: 1272530 - RNA, 19 nt, Artificial Sequence
  Description of Artificial Sequence: Synthetic oligonucleotide
ccggccaaguccccagggg

SEQ ID NO: 1272531 - RNA, 19 nt, Artificial Sequence
  Description of Artificial Sequence: Synthetic oligonucleotide
gcucgaucaugagcaguag

SEQ ID NO: 1272532 - RNA, 19 nt, Artificial Sequence
  Description of Artificial Sequence: Synthetic oligonucleotide
gguuguccgcacacugccc

SEQ ID NO: 1272533 - RNA, 19 nt, Artificial Sequence
  Description of Artificial Sequence: Synthetic oligonucleotide
ccuacucaauggagaccgc

SEQ ID NO: 1272534 - RNA, 19 nt, Artificial Sequence
  Description of Artificial Sequence: Synthetic oligonucleotide
gaaccugaagucagucuuu

SEQ ID NO: 1272535 - RNA, 19 nt, Artificial Sequence
  Description of Artificial Sequence: Synthetic oligonucleotide
cccgggcccuacucaaugg

SEQ ID NO: 1272536 - RNA, 19 nt, Artificial Sequence
  Description of Artificial Sequence: Synthetic oligonucleotide
ggcucguggggcauugcac

SEQ ID NO: 1272537 - RNA, 19 nt, Artificial Sequence
  Description of Artificial Sequence: Synthetic oligonucleotide
ggauuuggccacagguuaa

SEQ ID NO: 1272538 - RNA, 19 nt, Artificial Sequence
  Description of Artificial Sequence: Synthetic oligonucleotide
ggaccaggugggcugcaca

SEQ ID NO: 1272539 - RNA, 19 nt, Artificial Sequence
  Description of Artificial Sequence: Synthetic oligonucleotide
gccacagguuaaguuacga

SEQ ID NO: 1272540 - RNA, 19 nt, Artificial Sequence
  Description of Artificial Sequence: Synthetic oligonucleotide
ggcguuccaaggggucucg

SEQ ID NO: 1272541 - RNA, 19 nt, Artificial Sequence
  Description of Artificial Sequence: Synthetic oligonucleotide
cuggaguagaaaggcucaa

SEQ ID NO: 1272542 - RNA, 19 nt, Artificial Sequence
  Description of Artificial Sequence: Synthetic oligonucleotide
gcgaaucuccucaggccgc

SEQ ID NO: 1272543 - RNA, 19 nt, Artificial Sequence
  Description of Artificial Sequence: Synthetic oligonucleotide
gggcccuacucaauggaga

SEQ ID NO: 1272544 - RNA, 19 nt, Artificial Sequence
  Description of Artificial Sequence: Synthetic oligonucleotide
cagaaccagggguuucugu

SEQ ID NO: 1272545 - RNA, 19 nt, Artificial Sequence
  Description of Artificial Sequence: Synthetic oligonucleotide
guggggcccgcacccacuc

SEQ ID NO: 1272546 - RNA, 19 nt, Artificial Sequence
  Description of Artificial Sequence: Synthetic oligonucleotide
cgccuuuguggcugggagg

SEQ ID NO: 1272547 - RNA, 19 nt, Artificial Sequence
  Description of Artificial Sequence: Synthetic oligonucleotide
augccccgcucgaucauga

SEQ ID NO: 1272548 - RNA, 19 nt, Artificial Sequence
  Description of Artificial Sequence: Synthetic oligonucleotide
gggugcgccgcuguccacc

SEQ ID NO: 1272549 - RNA, 19 nt, Artificial Sequence
  Description of Artificial Sequence: Synthetic oligonucleotide
caucguccccugcaggacu

SEQ ID NO: 1272550 - RNA, 19 nt, Artificial Sequence
  Description of Artificial Sequence: Synthetic oligonucleotide
ccgcuggaggccacgauca

SEQ ID NO: 1272551 - RNA, 19 nt, Artificial Sequence
  Description of Artificial Sequence: Synthetic oligonucleotide
agaccgccucggcgugcgg

SEQ ID NO: 1272552 - RNA, 19 nt, Artificial Sequence
  Description of Artificial Sequence: Synthetic oligonucleotide
cagggcucguggggcauug

SEQ ID NO: 1272553 - RNA, 19 nt, Artificial Sequence
  Description of Artificial Sequence: Synthetic oligonucleotide
ccaccggccaaguccccag

SEQ ID NO: 1272554 - RNA, 19 nt, Artificial Sequence
  Description of Artificial Sequence: Synthetic oligonucleotide
gcccuacucaauggagacc

SEQ ID NO: 1272555 - RNA, 19 nt, Artificial Sequence
  Description of Artificial Sequence: Synthetic oligonucleotide
ggggcccgcacccacucca

SEQ ID NO: 1272556 - RNA, 19 nt, Artificial Sequence
  Description of Artificial Sequence: Synthetic oligonucleotide
agguccgguuucggacauc

SEQ ID NO: 1272557 - RNA, 19 nt, Artificial Sequence
  Description of Artificial Sequence: Synthetic oligonucleotide
ggccugccgagcugggaac

SEQ ID NO: 1272558 - RNA, 19 nt, Artificial Sequence
  Description of Artificial Sequence: Synthetic oligonucleotide
cagucccagccacugagau

SEQ ID NO: 1272559 - RNA, 19 nt, Artificial Sequence
  Description of Artificial Sequence: Synthetic oligonucleotide
ccgcacuugcaagucggag

SEQ ID NO: 1272560 - RNA, 19 nt, Artificial Sequence
  Description of Artificial Sequence: Synthetic oligonucleotide
gccagauaaggaugccacu

SEQ ID NO: 1272561 - RNA, 19 nt, Artificial Sequence
  Description of Artificial Sequence: Synthetic oligonucleotide
ccugccgagcugggaaccg

SEQ ID NO: 1272562 - RNA, 19 nt, Artificial Sequence
  Description of Artificial Sequence: Synthetic oligonucleotide
cagguaucucaggaacucu

SEQ ID NO: 1272563 - RNA, 19 nt, Artificial Sequence
  Description of Artificial Sequence: Synthetic oligonucleotide
ggcgagggaacauggugau

SEQ ID NO: 1272564 - RNA, 19 nt, Artificial Sequence
  Description of Artificial Sequence: Synthetic oligonucleotide
ggccgcgccuuuguggcug

SEQ ID NO: 1272565 - RNA, 19 nt, Artificial Sequence
  Description of Artificial Sequence: Synthetic oligonucleotide
aggccgcgccuuuguggcu

SEQ ID NO: 1272566 - RNA, 19 nt, Artificial Sequence
  Description of Artificial Sequence: Synthetic oligonucleotide
cgauaccaggccugccgag

SEQ ID NO: 1272567 - RNA, 19 nt, Artificial Sequence
  Description of Artificial Sequence: Synthetic oligonucleotide
ccgauaccaggccugccga

SEQ ID NO: 1272568 - RNA, 19 nt, Artificial Sequence
  Description of Artificial Sequence: Synthetic oligonucleotide
gagggcgagggaacauggu

SEQ ID NO: 1272569 - RNA, 19 nt, Artificial Sequence
  Description of Artificial Sequence: Synthetic oligonucleotide
cccgcucgaucaugagcag

SEQ ID NO: 1272570 - RNA, 19 nt, Artificial Sequence
  Description of Artificial Sequence: Synthetic oligonucleotide
cguuccaaggggucucgca

SEQ ID NO: 1272571 - RNA, 19 nt, Artificial Sequence
  Description of Artificial Sequence: Synthetic oligonucleotide
gccgcgccuuuguggcugg

SEQ ID NO: 1272572 - RNA, 19 nt, Artificial Sequence
  Description of Artificial Sequence: Synthetic oligonucleotide
gccgcuguccaccggccaa

SEQ ID NO: 1272573 - RNA, 19 nt, Artificial Sequence
  Description of Artificial Sequence: Synthetic oligonucleotide
ccgagcugggaaccggaca

SEQ ID NO: 1272574 - RNA, 19 nt, Artificial Sequence
  Description of Artificial Sequence: Synthetic oligonucleotide
cgcacuugcaagucggagu

SEQ ID NO: 1272575 - RNA, 19 nt, Artificial Sequence
  Description of Artificial Sequence: Synthetic oligonucleotide
acgccaggccgcgccuuug

SEQ ID NO: 1272576 - RNA, 19 nt, Artificial Sequence
  Description of Artificial Sequence: Synthetic oligonucleotide
ccgauaggaugccccgcuc

SEQ ID NO: 1272577 - RNA, 19 nt, Artificial Sequence
  Description of Artificial Sequence: Synthetic oligonucleotide
ggugccgccuucaggauuu

SEQ ID NO: 1272578 - RNA, 19 nt, Artificial Sequence
  Description of Artificial Sequence: Synthetic oligonucleotide
ggguggggcccgcacccac

SEQ ID NO: 1272579 - RNA, 19 nt, Artificial Sequence
  Description of Artificial Sequence: Synthetic oligonucleotide
cagcacgcgcuuccaguua

SEQ ID NO: 1272580 - RNA, 19 nt, Artificial Sequence
  Description of Artificial Sequence: Synthetic oligonucleotide
ccacagguuaaguuacgau

SEQ ID NO: 1272581 - RNA, 19 nt, Artificial Sequence
  Description of Artificial Sequence: Synthetic oligonucleotide
cugcccgguuguccgcaca

SEQ ID NO: 1272582 - RNA, 19 nt, Artificial Sequence
  Description of Artificial Sequence: Synthetic oligonucleotide
ggucauguguuuggcuggu

SEQ ID NO: 1272583 - RNA, 19 nt, Artificial Sequence
  Description of Artificial Sequence: Synthetic oligonucleotide
cucgcacaaacaggaacuu

SEQ ID NO: 1272584 - RNA, 19 nt, Artificial Sequence
  Description of Artificial Sequence: Synthetic oligonucleotide
guuuggcuggugccgccuu

SEQ ID NO: 1272585 - RNA, 19 nt, Artificial Sequence
  Description of Artificial Sequence: Synthetic oligonucleotide
ggugauccggggagaccuc

SEQ ID NO: 1272586 - RNA, 19 nt, Artificial Sequence
  Description of Artificial Sequence: Synthetic oligonucleotide
uccgggcuggccggccgau

SEQ ID NO: 1272587 - RNA, 19 nt, Artificial Sequence
  Description of Artificial Sequence: Synthetic oligonucleotide
cguuguccaggacgcccgc

SEQ ID NO: 1272588 - RNA, 19 nt, Artificial Sequence
  Description of Artificial Sequence: Synthetic oligonucleotide
ccacgaucacugcaaacau

SEQ ID NO: 1272589 - RNA, 19 nt, Artificial Sequence
  Description of Artificial Sequence: Synthetic oligonucleotide
guccaccggccaagucccc

SEQ ID NO: 1272590 - RNA, 19 nt, Artificial Sequence
  Description of Artificial Sequence: Synthetic oligonucleotide
ccacugagauacgaugaua

SEQ ID NO: 1272591 - RNA, 19 nt, Artificial Sequence
  Description of Artificial Sequence: Synthetic oligonucleotide
ggccgauaccaggccugcc

SEQ ID NO: 1272592 - RNA, 19 nt, Artificial Sequence
  Description of Artificial Sequence: Synthetic oligonucleotide
gcuggccggccgauaccag

SEQ ID NO: 1272593 - RNA, 19 nt, Artificial Sequence
  Description of Artificial Sequence: Synthetic oligonucleotide
cuguagcgccugacaauuu

SEQ ID NO: 1272594 - RNA, 19 nt, Artificial Sequence
  Description of Artificial Sequence: Synthetic oligonucleotide
gaguccagcccgggcccua

SEQ ID NO: 1272595 - RNA, 19 nt, Artificial Sequence
  Description of Artificial Sequence: Synthetic oligonucleotide
gugccgccuucaggauuug

SEQ ID NO: 1272596 - RNA, 19 nt, Artificial Sequence
  Description of Artificial Sequence: Synthetic oligonucleotide
cgacugcccgguuguccgc

SEQ ID NO: 1272597 - RNA, 19 nt, Artificial Sequence
  Description of Artificial Sequence: Synthetic oligonucleotide
cgugcggcccaggggcucg

SEQ ID NO: 1272598 - RNA, 19 nt, Artificial Sequence
  Description of Artificial Sequence: Synthetic oligonucleotide
cccgcacuugcaagucgga

SEQ ID NO: 1272599 - RNA, 19 nt, Artificial Sequence
  Description of Artificial Sequence: Synthetic oligonucleotide
gccggccgauaccaggccu

SEQ ID NO: 1272600 - RNA, 19 nt, Artificial Sequence
  Description of Artificial Sequence: Synthetic oligonucleotide
cggccgauaccaggccugc

SEQ ID NO: 1272601 - RNA, 19 nt, Artificial Sequence
  Description of Artificial Sequence: Synthetic oligonucleotide
ggaugccccgcucgaucau

SEQ ID NO: 1272602 - RNA, 19 nt, Artificial Sequence
  Description of Artificial Sequence: Synthetic oligonucleotide
guccgguuucggacauccu

SEQ ID NO: 1272603 - RNA, 19 nt, Artificial Sequence
  Description of Artificial Sequence: Synthetic oligonucleotide
gcacgcgcuuccaguuaga

SEQ ID NO: 1272604 - RNA, 19 nt, Artificial Sequence
  Description of Artificial Sequence: Synthetic oligonucleotide
gccccauagcgcugcuggu

SEQ ID NO: 1272605 - RNA, 19 nt, Artificial Sequence
  Description of Artificial Sequence: Synthetic oligonucleotide
gccgcaggucugccagaaa

SEQ ID NO: 1272606 - RNA, 19 nt, Artificial Sequence
  Description of Artificial Sequence: Synthetic oligonucleotide
gguggggcccgcacccacu

SEQ ID NO: 1272607 - RNA, 19 nt, Artificial Sequence
  Description of Artificial Sequence: Synthetic oligonucleotide
cacugcggugguccaucuu

SEQ ID NO: 1272608 - RNA, 19 nt, Artificial Sequence
  Description of Artificial Sequence: Synthetic oligonucleotide
cacgccaggccgcgccuuu

SEQ ID NO: 1272609 - RNA, 19 nt, Artificial Sequence
  Description of Artificial Sequence: Synthetic oligonucleotide
gggcaaccaggaggucaaa

SEQ ID NO: 1272610 - RNA, 19 nt, Artificial Sequence
  Description of Artificial Sequence: Synthetic oligonucleotide
cggggagaccucgccgauc

SEQ ID NO: 1272611 - RNA, 19 nt, Artificial Sequence
  Description of Artificial Sequence: Synthetic oligonucleotide
ccgcucgaucaugagcagu

SEQ ID NO: 1272612 - RNA, 19 nt, Artificial Sequence
  Description of Artificial Sequence: Synthetic oligonucleotide
ccaaggggucucgcacaaa

SEQ ID NO: 1272613 - RNA, 19 nt, Artificial Sequence
  Description of Artificial Sequence: Synthetic oligonucleotide
cgcgccuuuguggcuggga

SEQ ID NO: 1272614 - RNA, 19 nt, Artificial Sequence
  Description of Artificial Sequence: Synthetic oligonucleotide
gcccgguuguccgcacacu

SEQ ID NO: 1272615 - RNA, 19 nt, Artificial Sequence
  Description of Artificial Sequence: Synthetic oligonucleotide
gcccgcuggaggccacgau

SEQ ID NO: 1272616 - RNA, 19 nt, Artificial Sequence
  Description of Artificial Sequence: Synthetic oligonucleotide
ggacgccaguggggucaga

SEQ ID NO: 1272617 - RNA, 19 nt, Artificial Sequence
  Description of Artificial Sequence: Synthetic oligonucleotide
ccuuuguggcugggagggu

SEQ ID NO: 1272618 - RNA, 19 nt, Artificial Sequence
  Description of Artificial Sequence: Synthetic oligonucleotide
gcagggcucguggggcauu

SEQ ID NO: 1272619 - RNA, 19 nt, Artificial Sequence
  Description of Artificial Sequence: Synthetic oligonucleotide
ccggggagaccucgccgau

SEQ ID NO: 1272620 - RNA, 19 nt, Artificial Sequence
  Description of Artificial Sequence: Synthetic oligonucleotide
ccggggccgacugcccggu

SEQ ID NO: 1272621 - RNA, 19 nt, Artificial Sequence
  Description of Artificial Sequence: Synthetic oligonucleotide
ccgggcuggccggccgaua

SEQ ID NO: 1272622 - RNA, 19 nt, Artificial Sequence
  Description of Artificial Sequence: Synthetic oligonucleotide
cggggccgacugcccgguu

SEQ ID NO: 1272623 - RNA, 19 nt, Artificial Sequence
  Description of Artificial Sequence: Synthetic oligonucleotide
aauaucacaagccacuugc

SEQ ID NO: 1272624 - RNA, 19 nt, Artificial Sequence
  Description of Artificial Sequence: Synthetic oligonucleotide
uacuaaaugaugaccaagg

SEQ ID NO: 1272625 - RNA, 19 nt, Artificial Sequence
  Description of Artificial Sequence: Synthetic oligonucleotide
uccuuaaagacuuuaaaug

SEQ ID NO: 1272626 - RNA, 19 nt, Artificial Sequence
  Description of Artificial Sequence: Synthetic oligonucleotide
uauagauuuuguuucauug

SEQ ID NO: 1272627 - RNA, 19 nt, Artificial Sequence
  Description of Artificial Sequence: Synthetic oligonucleotide
ugauacgugaauuauauuc

SEQ ID NO: 1272628 - RNA, 19 nt, Artificial Sequence
  Description of Artificial Sequence: Synthetic oligonucleotide
aauguuguauuauugggga

SEQ ID NO: 1272629 - RNA, 19 nt, Artificial Sequence
  Description of Artificial Sequence: Synthetic oligonucleotide
aacacguaggcucggagcg

SEQ ID NO: 1272630 - RNA, 19 nt, Artificial Sequence
  Description of Artificial Sequence: Synthetic oligonucleotide
aaauguuguauuauugggg

SEQ ID NO: 1272631 - RNA, 19 nt, Artificial Sequence
  Description of Artificial Sequence: Synthetic oligonucleotide
ugugaauaaacuuaauauc

SEQ ID NO: 1272632 - RNA, 19 nt, Artificial Sequence
  Description of Artificial Sequence: Synthetic oligonucleotide
ucuucuagugcaucaaagg

SEQ ID NO: 1272633 - RNA, 19 nt, Artificial Sequence
  Description of Artificial Sequence: Synthetic oligonucleotide
auaaacuuaauaucacaag

SEQ ID NO: 1272634 - RNA, 19 nt, Artificial Sequence
  Description of Artificial Sequence: Synthetic oligonucleotide
aaacaaaugugaucugauc

SEQ ID NO: 1272635 - RNA, 19 nt, Artificial Sequence
  Description of Artificial Sequence: Synthetic oligonucleotide
ucaaauaacggcugcaugu

SEQ ID NO: 1272636 - RNA, 19 nt, Artificial Sequence
  Description of Artificial Sequence: Synthetic oligonucleotide
aguucaauggacuuaggug

SEQ ID NO: 1272637 - RNA, 19 nt, Artificial Sequence
  Description of Artificial Sequence: Synthetic oligonucleotide
uuaugcauacuaaaugaug

SEQ ID NO: 1272638 - RNA, 19 nt, Artificial Sequence
  Description of Artificial Sequence: Synthetic oligonucleotide
ucaggaucaaauaacggcu

SEQ ID NO: 1272639 - RNA, 19 nt, Artificial Sequence
  Description of Artificial Sequence: Synthetic oligonucleotide
ucuaccauugaucuacagc

SEQ ID NO: 1272640 - RNA, 19 nt, Artificial Sequence
  Description of Artificial Sequence: Synthetic oligonucleotide
ucuacgaggagucaacuga

SEQ ID NO: 1272641 - RNA, 19 nt, Artificial Sequence
  Description of Artificial Sequence: Synthetic oligonucleotide
cauagacccauuuaaagac

SEQ ID NO: 1272642 - RNA, 19 nt, Artificial Sequence
  Description of Artificial Sequence: Synthetic oligonucleotide
gaauacagaucaaauagag

SEQ ID NO: 1272643 - RNA, 19 nt, Artificial Sequence
  Description of Artificial Sequence: Synthetic oligonucleotide
auacauucuaaguauuguc

SEQ ID NO: 1272644 - RNA, 19 nt, Artificial Sequence
  Description of Artificial Sequence: Synthetic oligonucleotide
uuuuauaggaacaccugcu

SEQ ID NO: 1272645 - RNA, 19 nt, Artificial Sequence
  Description of Artificial Sequence: Synthetic oligonucleotide
aagacuuuaaauguggaau

SEQ ID NO: 1272646 - RNA, 19 nt, Artificial Sequence
  Description of Artificial Sequence: Synthetic oligonucleotide
aauaaacuuaauaucacaa

SEQ ID NO: 1272647 - RNA, 19 nt, Artificial Sequence
  Description of Artificial Sequence: Synthetic oligonucleotide
aacggcugcauguagaagu

SEQ ID NO: 1272648 - RNA, 19 nt, Artificial Sequence
  Description of Artificial Sequence: Synthetic oligonucleotide
aauaaaguucuacgaggag

SEQ ID NO: 1272649 - RNA, 19 nt, Artificial Sequence
  Description of Artificial Sequence: Synthetic oligonucleotide
ucauagacugcuuuccuag

SEQ ID NO: 1272650 - RNA, 19 nt, Artificial Sequence
  Description of Artificial Sequence: Synthetic oligonucleotide
ucguuaugcauacuaaaug

SEQ ID NO: 1272651 - RNA, 19 nt, Artificial Sequence
  Description of Artificial Sequence: Synthetic oligonucleotide
ugaggauacauucuaagua

SEQ ID NO: 1272652 - RNA, 19 nt, Artificial Sequence
  Description of Artificial Sequence: Synthetic oligonucleotide
aauacuugauauaaaucug

SEQ ID NO: 1272653 - RNA, 19 nt, Artificial Sequence
  Description of Artificial Sequence: Synthetic oligonucleotide
aaugauacgugaauuauau

SEQ ID NO: 1272654 - RNA, 19 nt, Artificial Sequence
  Description of Artificial Sequence: Synthetic oligonucleotide
uuuauaggaacaccugcug

SEQ ID NO: 1272655 - RNA, 19 nt, Artificial Sequence
  Description of Artificial Sequence: Synthetic oligonucleotide
acauucuaaguauugucuc

SEQ ID NO: 1272656 - RNA, 19 nt, Artificial Sequence
  Description of Artificial Sequence: Synthetic oligonucleotide
gauucaguucuauucgucc

SEQ ID NO: 1272657 - RNA, 19 nt, Artificial Sequence
  Description of Artificial Sequence: Synthetic oligonucleotide
ucuagugcaucaaagguau

SEQ ID NO: 1272658 - RNA, 19 nt, Artificial Sequence
  Description of Artificial Sequence: Synthetic oligonucleotide
uacgugaauuauauucugg

SEQ ID NO: 1272659 - RNA, 19 nt, Artificial Sequence
  Description of Artificial Sequence: Synthetic oligonucleotide
auuucaacgauuccccaag

SEQ ID NO: 1272660 - RNA, 19 nt, Artificial Sequence
  Description of Artificial Sequence: Synthetic oligonucleotide
uaucauaguucaauggacu

SEQ ID NO: 1272661 - RNA, 19 nt, Artificial Sequence
  Description of Artificial Sequence: Synthetic oligonucleotide
ucuaauuuaguugguagga

SEQ ID NO: 1272662 - RNA, 19 nt, Artificial Sequence
  Description of Artificial Sequence: Synthetic oligonucleotide
aaaccgacaacuuuuccau

SEQ ID NO: 1272663 - RNA, 19 nt, Artificial Sequence
  Description of Artificial Sequence: Synthetic oligonucleotide
guaaaaguugacgggaugg

SEQ ID NO: 1272664 - RNA, 19 nt, Artificial Sequence
  Description of Artificial Sequence: Synthetic oligonucleotide
uagacucgcaggaauacag

SEQ ID NO: 1272665 - RNA, 19 nt, Artificial Sequence
  Description of Artificial Sequence: Synthetic oligonucleotide
guucauggcucauagacug

SEQ ID NO: 1272666 - RNA, 19 nt, Artificial Sequence
  Description of Artificial Sequence: Synthetic oligonucleotide
aaagugcaacuacuguuuc

SEQ ID NO: 1272667 - RNA, 19 nt, Artificial Sequence
  Description of Artificial Sequence: Synthetic oligonucleotide
ugaucuacagcagagagua

SEQ ID NO: 1272668 - RNA, 19 nt, Artificial Sequence
  Description of Artificial Sequence: Synthetic oligonucleotide
auucaguucuauucguccg

SEQ ID NO: 1272669 - RNA, 19 nt, Artificial Sequence
  Description of Artificial Sequence: Synthetic oligonucleotide
uacuugauauaaaucuggc

SEQ ID NO: 1272670 - RNA, 19 nt, Artificial Sequence
  Description of Artificial Sequence: Synthetic oligonucleotide
aaaaugauacgugaauuau

SEQ ID NO: 1272671 - RNA, 19 nt, Artificial Sequence
  Description of Artificial Sequence: Synthetic oligonucleotide
ugcaguucauggcucauag

SEQ ID NO: 1272672 - RNA, 19 nt, Artificial Sequence
  Description of Artificial Sequence: Synthetic oligonucleotide
ucaguauuucaauaggcuc

SEQ ID NO: 1272673 - RNA, 19 nt, Artificial Sequence
  Description of Artificial Sequence: Synthetic oligonucleotide
uagguuauguguucuacca

SEQ ID NO: 1272674 - RNA, 19 nt, Artificial Sequence
  Description of Artificial Sequence: Synthetic oligonucleotide
uaaaagugcaacuacuguu

SEQ ID NO: 1272675 - RNA, 19 nt, Artificial Sequence
  Description of Artificial Sequence: Synthetic oligonucleotide
acuacuagguuauguguuc

SEQ ID NO: 1272676 - RNA, 19 nt, Artificial Sequence
  Description of Artificial Sequence: Synthetic oligonucleotide
aguucuauucguccguauc

SEQ ID NO: 1272677 - RNA, 19 nt, Artificial Sequence
  Description of Artificial Sequence: Synthetic oligonucleotide
uccuagagcacaauguccu

SEQ ID NO: 1272678 - RNA, 19 nt, Artificial Sequence
  Description of Artificial Sequence: Synthetic oligonucleotide
uguuugaccauguggaaaa

SEQ ID NO: 1272679 - RNA, 19 nt, Artificial Sequence
  Description of Artificial Sequence: Synthetic oligonucleotide
uauaggaacaccugcugac

SEQ ID NO: 1272680 - RNA, 19 nt, Artificial Sequence
  Description of Artificial Sequence: Synthetic oligonucleotide
uauuauuggggaacugcgc

SEQ ID NO: 1272681 - RNA, 19 nt, Artificial Sequence
  Description of Artificial Sequence: Synthetic oligonucleotide
aggaucaaauaacggcugc

SEQ ID NO: 1272682 - RNA, 19 nt, Artificial Sequence
  Description of Artificial Sequence: Synthetic oligonucleotide
uugguaggauuccaaauac

SEQ ID NO: 1272683 - RNA, 19 nt, Artificial Sequence
  Description of Artificial Sequence: Synthetic oligonucleotide
aaauaacggcugcauguag

SEQ ID NO: 1272684 - RNA, 19 nt, Artificial Sequence
  Description of Artificial Sequence: Synthetic oligonucleotide
gaucugaucaaaccgacaa

SEQ ID NO: 1272685 - RNA, 19 nt, Artificial Sequence
  Description of Artificial Sequence: Synthetic oligonucleotide
uggacuacuagguuaugug

SEQ ID NO: 1272686 - RNA, 19 nt, Artificial Sequence
  Description of Artificial Sequence: Synthetic oligonucleotide
uucguuaugcauacuaaau

SEQ ID NO: 1272687 - RNA, 19 nt, Artificial Sequence
  Description of Artificial Sequence: Synthetic oligonucleotide
ugcauacuaaaugaugacc

SEQ ID NO: 1272688 - RNA, 19 nt, Artificial Sequence
  Description of Artificial Sequence: Synthetic oligonucleotide
aagucagagaagccacgac

SEQ ID NO: 1272689 - RNA, 19 nt, Artificial Sequence
  Description of Artificial Sequence: Synthetic oligonucleotide
aaguugacgggauggguug

SEQ ID NO: 1272690 - RNA, 19 nt, Artificial Sequence
  Description of Artificial Sequence: Synthetic oligonucleotide
aaguauucgucuuucuaau

SEQ ID NO: 1272691 - RNA, 19 nt, Artificial Sequence
  Description of Artificial Sequence: Synthetic oligonucleotide
aaauagauaagcagcugca

SEQ ID NO: 1272692 - RNA, 19 nt, Artificial Sequence
  Description of Artificial Sequence: Synthetic oligonucleotide
uuaggagucgcgauuagua

SEQ ID NO: 1272693 - RNA, 19 nt, Artificial Sequence
  Description of Artificial Sequence: Synthetic oligonucleotide
guauuauuggggaacugcg

SEQ ID NO: 1272694 - RNA, 19 nt, Artificial Sequence
  Description of Artificial Sequence: Synthetic oligonucleotide
cagagaguaguuuaaaaca

SEQ ID NO: 1272695 - RNA, 19 nt, Artificial Sequence
  Description of Artificial Sequence: Synthetic oligonucleotide
cauaguucaauggacuuag

SEQ ID NO: 1272696 - RNA, 19 nt, Artificial Sequence
  Description of Artificial Sequence: Synthetic oligonucleotide
auaaaguucuacgaggagu

SEQ ID NO: 1272697 - RNA, 19 nt, Artificial Sequence
  Description of Artificial Sequence: Synthetic oligonucleotide
uaguucaauggacuuaggu

SEQ ID NO: 1272698 - RNA, 19 nt, Artificial Sequence
  Description of Artificial Sequence: Synthetic oligonucleotide
caacaguacucagagaacg

SEQ ID NO: 1272699 - RNA, 19 nt, Artificial Sequence
  Description of Artificial Sequence: Synthetic oligonucleotide
gaacgcaagagcgagcggg

SEQ ID NO: 1272700 - RNA, 19 nt, Artificial Sequence
  Description of Artificial Sequence: Synthetic oligonucleotide
ucuaagguucaccgcaacc

SEQ ID NO: 1272701 - RNA, 19 nt, Artificial Sequence
  Description of Artificial Sequence: Synthetic oligonucleotide
uguuguauuauuggggaac

SEQ ID NO: 1272702 - RNA, 19 nt, Artificial Sequence
  Description of Artificial Sequence: Synthetic oligonucleotide
auuuucguuaugcauacua

SEQ ID NO: 1272703 - RNA, 19 nt, Artificial Sequence
  Description of Artificial Sequence: Synthetic oligonucleotide
ucuucagaacgcucuauca

SEQ ID NO: 1272704 - RNA, 19 nt, Artificial Sequence
  Description of Artificial Sequence: Synthetic oligonucleotide
aaguauugucucuccaggu

SEQ ID NO: 1272705 - RNA, 19 nt, Artificial Sequence
  Description of Artificial Sequence: Synthetic oligonucleotide
acgugaauuauauucuggu

SEQ ID NO: 1272706 - RNA, 19 nt, Artificial Sequence
  Description of Artificial Sequence: Synthetic oligonucleotide
augaggauacauucuaagu

SEQ ID NO: 1272707 - RNA, 19 nt, Artificial Sequence
  Description of Artificial Sequence: Synthetic oligonucleotide
aaaagggcgacuccucuaa

SEQ ID NO: 1272708 - RNA, 19 nt, Artificial Sequence
  Description of Artificial Sequence: Synthetic oligonucleotide
cuagguuauguguucuacc

SEQ ID NO: 1272709 - RNA, 19 nt, Artificial Sequence
  Description of Artificial Sequence: Synthetic oligonucleotide
auugcacuccaguaaaagu

SEQ ID NO: 1272710 - RNA, 19 nt, Artificial Sequence
  Description of Artificial Sequence: Synthetic oligonucleotide
cucgcaggaauacagauca

SEQ ID NO: 1272711 - RNA, 19 nt, Artificial Sequence
  Description of Artificial Sequence: Synthetic oligonucleotide
caugccacguaacacguag

SEQ ID NO: 1272712 - RNA, 19 nt, Artificial Sequence
  Description of Artificial Sequence: Synthetic oligonucleotide
agaacguaaauguuguauu

SEQ ID NO: 1272713 - RNA, 19 nt, Artificial Sequence
  Description of Artificial Sequence: Synthetic oligonucleotide
aacaaacaaaugugaucug

SEQ ID NO: 1272714 - RNA, 19 nt, Artificial Sequence
  Description of Artificial Sequence: Synthetic oligonucleotide
uuucuugcaugccacguaa

SEQ ID NO: 1272715 - RNA, 19 nt, Artificial Sequence
  Description of Artificial Sequence: Synthetic oligonucleotide
ucuaacucaggaucaaaua

SEQ ID NO: 1272716 - RNA, 19 nt, Artificial Sequence
  Description of Artificial Sequence: Synthetic oligonucleotide
aaaagugcaacuacuguuu

SEQ ID NO: 1272717 - RNA, 19 nt, Artificial Sequence
  Description of Artificial Sequence: Synthetic oligonucleotide
cuaaguaaugccucaguca

SEQ ID NO: 1272718 - RNA, 19 nt, Artificial Sequence
  Description of Artificial Sequence: Synthetic oligonucleotide
uaacacguaggcucggagc

SEQ ID NO: 1272719 - RNA, 19 nt, Artificial Sequence
  Description of Artificial Sequence: Synthetic oligonucleotide
acuaaaugaugaccaaggu

SEQ ID NO: 1272720 - RNA, 19 nt, Artificial Sequence
  Description of Artificial Sequence: Synthetic oligonucleotide
auacuaaaugaugaccaag

SEQ ID NO: 1272721 - RNA, 19 nt, Artificial Sequence
  Description of Artificial Sequence: Synthetic oligonucleotide
agcaaaaccagagccuugg

SEQ ID NO: 1272722 - RNA, 19 nt, Artificial Sequence
  Description of Artificial Sequence: Synthetic oligonucleotide
auacgugaauuauauucug

SEQ ID NO: 1272723 - RNA, 19 nt, Artificial Sequence
  Description of Artificial Sequence: Synthetic oligonucleotide
aucaaauaacggcugcaug

SEQ ID NO: 1272724 - RNA, 19 nt, Artificial Sequence
  Description of Artificial Sequence: Synthetic oligonucleotide
uggauugcacuccaguaaa

SEQ ID NO: 1272725 - RNA, 19 nt, Artificial Sequence
  Description of Artificial Sequence: Synthetic oligonucleotide
aguaaugccucagucagga

SEQ ID NO: 1272726 - RNA, 19 nt, Artificial Sequence
  Description of Artificial Sequence: Synthetic oligonucleotide
agucaacugaauaaaauau

SEQ ID NO: 1272727 - RNA, 19 nt, Artificial Sequence
  Description of Artificial Sequence: Synthetic oligonucleotide
ugaucaaaccgacaacuuu

SEQ ID NO: 1272728 - RNA, 19 nt, Artificial Sequence
  Description of Artificial Sequence: Synthetic oligonucleotide
ugggaucaauuuuaaagaa

SEQ ID NO: 1272729 - RNA, 19 nt, Artificial Sequence
  Description of Artificial Sequence: Synthetic oligonucleotide
ugccacguaacacguaggc

SEQ ID NO: 1272730 - RNA, 19 nt, Artificial Sequence
  Description of Artificial Sequence: Synthetic oligonucleotide
uugaucuacagcagagagu

SEQ ID NO: 1272731 - RNA, 19 nt, Artificial Sequence
  Description of Artificial Sequence: Synthetic oligonucleotide
agaagcgccgcauggcacg

SEQ ID NO: 1272732 - RNA, 19 nt, Artificial Sequence
  Description of Artificial Sequence: Synthetic oligonucleotide
uaagguucaccgcaaccac

SEQ ID NO: 1272733 - RNA, 19 nt, Artificial Sequence
  Description of Artificial Sequence: Synthetic oligonucleotide
ucuggcaccggcucuaagu

SEQ ID NO: 1272734 - RNA, 19 nt, Artificial Sequence
  Description of Artificial Sequence: Synthetic oligonucleotide
caaaccgacaacuuuucca

SEQ ID NO: 1272735 - RNA, 19 nt, Artificial Sequence
  Description of Artificial Sequence: Synthetic oligonucleotide
caagcuuugaguucucuga

SEQ ID NO: 1272736 - RNA, 19 nt, Artificial Sequence
  Description of Artificial Sequence: Synthetic oligonucleotide
cacguaacacguaggcucg

SEQ ID NO: 1272737 - RNA, 19 nt, Artificial Sequence
  Description of Artificial Sequence: Synthetic oligonucleotide
agaacgcucuaucauuuca

SEQ ID NO: 1272738 - RNA, 19 nt, Artificial Sequence
  Description of Artificial Sequence: Synthetic oligonucleotide
uucaguucuauucguccgu

SEQ ID NO: 1272739 - RNA, 19 nt, Artificial Sequence
  Description of Artificial Sequence: Synthetic oligonucleotide
acaagaagcgccgcauggc

SEQ ID NO: 1272740 - RNA, 19 nt, Artificial Sequence
  Description of Artificial Sequence: Synthetic oligonucleotide
uucaacgauuccccaagcu

SEQ ID NO: 1272741 - RNA, 19 nt, Artificial Sequence
  Description of Artificial Sequence: Synthetic oligonucleotide
ucaaaccgacaacuuuucc

SEQ ID NO: 1272742 - RNA, 19 nt, Artificial Sequence
  Description of Artificial Sequence: Synthetic oligonucleotide
gcagagaguaguuuaaaac

SEQ ID NO: 1272743 - RNA, 19 nt, Artificial Sequence
  Description of Artificial Sequence: Synthetic oligonucleotide
aaagggcgacuccucuaac

SEQ ID NO: 1272744 - RNA, 19 nt, Artificial Sequence
  Description of Artificial Sequence: Synthetic oligonucleotide
gaguaguuuaaaacaaaca

SEQ ID NO: 1272745 - RNA, 19 nt, Artificial Sequence
  Description of Artificial Sequence: Synthetic oligonucleotide
aucacaagccacuugccaa

SEQ ID NO: 1272746 - RNA, 19 nt, Artificial Sequence
  Description of Artificial Sequence: Synthetic oligonucleotide
aggcaaucacucuggcacc

SEQ ID NO: 1272747 - RNA, 19 nt, Artificial Sequence
  Description of Artificial Sequence: Synthetic oligonucleotide
uucagaacgcucuaucauu

SEQ ID NO: 1272748 - RNA, 19 nt, Artificial Sequence
  Description of Artificial Sequence: Synthetic oligonucleotide
uuuaguugguaggauucca

SEQ ID NO: 1272749 - RNA, 19 nt, Artificial Sequence
  Description of Artificial Sequence: Synthetic oligonucleotide
aagggcgacuccucuaacu

SEQ ID NO: 1272750 - RNA, 19 nt, Artificial Sequence
  Description of Artificial Sequence: Synthetic oligonucleotide
aguucuacgaggagucaac

SEQ ID NO: 1272751 - RNA, 19 nt, Artificial Sequence
  Description of Artificial Sequence: Synthetic oligonucleotide
gauacgugaauuauauucu

SEQ ID NO: 1272752 - RNA, 19 nt, Artificial Sequence
  Description of Artificial Sequence: Synthetic oligonucleotide
uucuacgaggagucaacug

SEQ ID NO: 1272753 - RNA, 19 nt, Artificial Sequence
  Description of Artificial Sequence: Synthetic oligonucleotide
aacgcucuaucauuucaaa

SEQ ID NO: 1272754 - RNA, 19 nt, Artificial Sequence
  Description of Artificial Sequence: Synthetic oligonucleotide
cuggauuuauucccaaauc

SEQ ID NO: 1272755 - RNA, 19 nt, Artificial Sequence
  Description of Artificial Sequence: Synthetic oligonucleotide
uucgucuuucuaauuuagu

SEQ ID NO: 1272756 - RNA, 19 nt, Artificial Sequence
  Description of Artificial Sequence: Synthetic oligonucleotide
uauucguccguaucuguau

SEQ ID NO: 1272757 - RNA, 19 nt, Artificial Sequence
  Description of Artificial Sequence: Synthetic oligonucleotide
gaggauacauucuaaguau

SEQ ID NO: 1272758 - RNA, 19 nt, Artificial Sequence
  Description of Artificial Sequence: Synthetic oligonucleotide
ugaucugaucaaaccgaca

SEQ ID NO: 1272759 - RNA, 19 nt, Artificial Sequence
  Description of Artificial Sequence: Synthetic oligonucleotide
uuucaacgauuccccaagc

SEQ ID NO: 1272760 - RNA, 19 nt, Artificial Sequence
  Description of Artificial Sequence: Synthetic oligonucleotide
gauuucaacgauuccccaa

SEQ ID NO: 1272761 - RNA, 19 nt, Artificial Sequence
  Description of Artificial Sequence: Synthetic oligonucleotide
acuuuuauaggaacaccug

SEQ ID NO: 1272762 - RNA, 19 nt, Artificial Sequence
  Description of Artificial Sequence: Synthetic oligonucleotide
ucuuucuaauuuaguuggu

SEQ ID NO: 1272763 - RNA, 19 nt, Artificial Sequence
  Description of Artificial Sequence: Synthetic oligonucleotide
agguaucaacugcagaaga

SEQ ID NO: 1272764 - RNA, 19 nt, Artificial Sequence
  Description of Artificial Sequence: Synthetic oligonucleotide
auaucacaagccacuugcc

SEQ ID NO: 1272765 - RNA, 19 nt, Artificial Sequence
  Description of Artificial Sequence: Synthetic oligonucleotide
guuauguguucuaccauug

SEQ ID NO: 1272766 - RNA, 19 nt, Artificial Sequence
  Description of Artificial Sequence: Synthetic oligonucleotide
gaacguaaauguuguauua

SEQ ID NO: 1272767 - RNA, 19 nt, Artificial Sequence
  Description of Artificial Sequence: Synthetic oligonucleotide
agagaguaguuuaaaacaa

SEQ ID NO: 1272768 - RNA, 19 nt, Artificial Sequence
  Description of Artificial Sequence: Synthetic oligonucleotide
uucuauucguccguaucug

SEQ ID NO: 1272769 - RNA, 19 nt, Artificial Sequence
  Description of Artificial Sequence: Synthetic oligonucleotide
cauugauuucaacgauucc

SEQ ID NO: 1272770 - RNA, 19 nt, Artificial Sequence
  Description of Artificial Sequence: Synthetic oligonucleotide
uccuggauugcacuccagu

SEQ ID NO: 1272771 - RNA, 19 nt, Artificial Sequence
  Description of Artificial Sequence: Synthetic oligonucleotide
ugcaugccacguaacacgu

SEQ ID NO: 1272772 - RNA, 19 nt, Artificial Sequence
  Description of Artificial Sequence: Synthetic oligonucleotide
auaggcucaacaguacuca

SEQ ID NO: 1272773 - RNA, 19 nt, Artificial Sequence
  Description of Artificial Sequence: Synthetic oligonucleotide
auaacggcugcauguagaa

SEQ ID NO: 1272774 - RNA, 19 nt, Artificial Sequence
  Description of Artificial Sequence: Synthetic oligonucleotide
ugguaggauuccaaauacu

SEQ ID NO: 1272775 - RNA, 19 nt, Artificial Sequence
  Description of Artificial Sequence: Synthetic oligonucleotide
acuuagguguucuguaaau

SEQ ID NO: 1272776 - RNA, 19 nt, Artificial Sequence
  Description of Artificial Sequence: Synthetic oligonucleotide
agauucaguucuauucguc

SEQ ID NO: 1272777 - RNA, 19 nt, Artificial Sequence
  Description of Artificial Sequence: Synthetic oligonucleotide
cuaagguucaccgcaacca

SEQ ID NO: 1272778 - RNA, 19 nt, Artificial Sequence
  Description of Artificial Sequence: Synthetic oligonucleotide
aucaaaccgacaacuuuuc

SEQ ID NO: 1272779 - RNA, 19 nt, Artificial Sequence
  Description of Artificial Sequence: Synthetic oligonucleotide
aaguaaugccucagucagg

SEQ ID NO: 1272780 - RNA, 19 nt, Artificial Sequence
  Description of Artificial Sequence: Synthetic oligonucleotide
guaacacguaggcucggag

SEQ ID NO: 1272781 - RNA, 19 nt, Artificial Sequence
  Description of Artificial Sequence: Synthetic oligonucleotide
uggacuuagguguucugua

SEQ ID NO: 1272782 - RNA, 19 nt, Artificial Sequence
  Description of Artificial Sequence: Synthetic oligonucleotide
uuggacuacuagguuaugu

SEQ ID NO: 1272783 - RNA, 19 nt, Artificial Sequence
  Description of Artificial Sequence: Synthetic oligonucleotide
ucucaucauagacccauuu

SEQ ID NO: 1272784 - RNA, 19 nt, Artificial Sequence
  Description of Artificial Sequence: Synthetic oligonucleotide
ggaacugcgcuucccaaag

SEQ ID NO: 1272785 - RNA, 19 nt, Artificial Sequence
  Description of Artificial Sequence: Synthetic oligonucleotide
aaugaugaccaagguucca

SEQ ID NO: 1272786 - RNA, 19 nt, Artificial Sequence
  Description of Artificial Sequence: Synthetic oligonucleotide
uucauggcucauagacugc

SEQ ID NO: 1272787 - RNA, 19 nt, Artificial Sequence
  Description of Artificial Sequence: Synthetic oligonucleotide
uucuaccauugaucuacag

SEQ ID NO: 1272788 - RNA, 19 nt, Artificial Sequence
  Description of Artificial Sequence: Synthetic oligonucleotide
uugccaguccuuccgcgcc

SEQ ID NO: 1272789 - RNA, 19 nt, Artificial Sequence
  Description of Artificial Sequence: Synthetic oligonucleotide
ucauaguucaauggacuua

SEQ ID NO: 1272790 - RNA, 19 nt, Artificial Sequence
  Description of Artificial Sequence: Synthetic oligonucleotide
cuugccaguccuuccgcgc

SEQ ID NO: 1272791 - RNA, 19 nt, Artificial Sequence
  Description of Artificial Sequence: Synthetic oligonucleotide
acggcucuuggcuugccag

SEQ ID NO: 1272792 - RNA, 19 nt, Artificial Sequence
  Description of Artificial Sequence: Synthetic oligonucleotide
aaguucuacgaggagucaa

SEQ ID NO: 1272793 - RNA, 19 nt, Artificial Sequence
  Description of Artificial Sequence: Synthetic oligonucleotide
agccacgacggcucuuggc

SEQ ID NO: 1272794 - RNA, 19 nt, Artificial Sequence
  Description of Artificial Sequence: Synthetic oligonucleotide
ccacguaacacguaggcuc

SEQ ID NO: 1272795 - RNA, 19 nt, Artificial Sequence
  Description of Artificial Sequence: Synthetic oligonucleotide
gucaugaggauacauucua

SEQ ID NO: 1272796 - RNA, 19 nt, Artificial Sequence
  Description of Artificial Sequence: Synthetic oligonucleotide
uggggaacugcgcuuccca

SEQ ID NO: 1272797 - RNA, 19 nt, Artificial Sequence
  Description of Artificial Sequence: Synthetic oligonucleotide
cucaguauuucaauaggcu

SEQ ID NO: 1272798 - RNA, 19 nt, Artificial Sequence
  Description of Artificial Sequence: Synthetic oligonucleotide
uauucucaccuuccucagu

SEQ ID NO: 1272799 - RNA, 19 nt, Artificial Sequence
  Description of Artificial Sequence: Synthetic oligonucleotide
uaggagucgcgauuaguau

SEQ ID NO: 1272800 - RNA, 19 nt, Artificial Sequence
  Description of Artificial Sequence: Synthetic oligonucleotide
acgggauggguugugguag

SEQ ID NO: 1272801 - RNA, 19 nt, Artificial Sequence
  Description of Artificial Sequence: Synthetic oligonucleotide
uuaccacuuccugaugucu

SEQ ID NO: 1272802 - RNA, 19 nt, Artificial Sequence
  Description of Artificial Sequence: Synthetic oligonucleotide
gacuuagguguucuguaaa

SEQ ID NO: 1272803 - RNA, 19 nt, Artificial Sequence
  Description of Artificial Sequence: Synthetic oligonucleotide
caggaauacagaucaaaua

SEQ ID NO: 1272804 - RNA, 19 nt, Artificial Sequence
  Description of Artificial Sequence: Synthetic oligonucleotide
ucgcgauuaguauucuuuu

SEQ ID NO: 1272805 - RNA, 19 nt, Artificial Sequence
  Description of Artificial Sequence: Synthetic oligonucleotide
auggacuuagguguucugu

SEQ ID NO: 1272806 - RNA, 19 nt, Artificial Sequence
  Description of Artificial Sequence: Synthetic oligonucleotide
gagaacguaaauguuguau

SEQ ID NO: 1272807 - RNA, 19 nt, Artificial Sequence
  Description of Artificial Sequence: Synthetic oligonucleotide
acgaggagucaacugaaua

SEQ ID NO: 1272808 - RNA, 19 nt, Artificial Sequence
  Description of Artificial Sequence: Synthetic oligonucleotide
uugacgggauggguugugg

SEQ ID NO: 1272809 - RNA, 19 nt, Artificial Sequence
  Description of Artificial Sequence: Synthetic oligonucleotide
uuauuggggaacugcgcuu

SEQ ID NO: 1272810 - RNA, 19 nt, Artificial Sequence
  Description of Artificial Sequence: Synthetic oligonucleotide
aguucauggcucauagacu

SEQ ID NO: 1272811 - RNA, 19 nt, Artificial Sequence
  Description of Artificial Sequence: Synthetic oligonucleotide
aggagucgcgauuaguauu

SEQ ID NO: 1272812 - RNA, 19 nt, Artificial Sequence
  Description of Artificial Sequence: Synthetic oligonucleotide
aguauucgucuuucuaauu

SEQ ID NO: 1272813 - RNA, 19 nt, Artificial Sequence
  Description of Artificial Sequence: Synthetic oligonucleotide
uucgcgaccccagaacgca

SEQ ID NO: 1272814 - RNA, 19 nt, Artificial Sequence
  Description of Artificial Sequence: Synthetic oligonucleotide
agaacgcaagagcgagcgg

SEQ ID NO: 1272815 - RNA, 19 nt, Artificial Sequence
  Description of Artificial Sequence: Synthetic oligonucleotide
acacucaauacuugauaua

SEQ ID NO: 1272816 - RNA, 19 nt, Artificial Sequence
  Description of Artificial Sequence: Synthetic oligonucleotide
gaucaaaccgacaacuuuu

SEQ ID NO: 1272817 - RNA, 19 nt, Artificial Sequence
  Description of Artificial Sequence: Synthetic oligonucleotide
guauucgucuuucuaauuu

SEQ ID NO: 1272818 - RNA, 19 nt, Artificial Sequence
  Description of Artificial Sequence: Synthetic oligonucleotide
ccauuuucguuaugcauac

SEQ ID NO: 1272819 - RNA, 19 nt, Artificial Sequence
  Description of Artificial Sequence: Synthetic oligonucleotide
agcaguguuugaccaugug

SEQ ID NO: 1272820 - RNA, 19 nt, Artificial Sequence
  Description of Artificial Sequence: Synthetic oligonucleotide
caaagguaucaacugcaga

SEQ ID NO: 1272821 - RNA, 19 nt, Artificial Sequence
  Description of Artificial Sequence: Synthetic oligonucleotide
auggcucauagacugcuuu

SEQ ID NO: 1272822 - RNA, 19 nt, Artificial Sequence
  Description of Artificial Sequence: Synthetic oligonucleotide
agcgggaccagcaaacacu

SEQ ID NO: 1272823 - RNA, 19 nt, Artificial Sequence
  Description of Artificial Sequence: Synthetic oligonucleotide
ggaauacagaucaaauaga

SEQ ID NO: 1272824 - RNA, 19 nt, Artificial Sequence
  Description of Artificial Sequence: Synthetic oligonucleotide
auguuguauuauuggggaa

SEQ ID NO: 1272825 - RNA, 19 nt, Artificial Sequence
  Description of Artificial Sequence: Synthetic oligonucleotide
acgcucuaucauuucaaaa

SEQ ID NO: 1272826 - RNA, 19 nt, Artificial Sequence
  Description of Artificial Sequence: Synthetic oligonucleotide
cagagaacguaaauguugu

SEQ ID NO: 1272827 - RNA, 19 nt, Artificial Sequence
  Description of Artificial Sequence: Synthetic oligonucleotide
agguuauguguucuaccau

SEQ ID NO: 1272828 - RNA, 19 nt, Artificial Sequence
  Description of Artificial Sequence: Synthetic oligonucleotide
accgcaaccaccggccggg

SEQ ID NO: 1272829 - RNA, 19 nt, Artificial Sequence
  Description of Artificial Sequence: Synthetic oligonucleotide
ccaagcucucaucauagac

SEQ ID NO: 1272830 - RNA, 19 nt, Artificial Sequence
  Description of Artificial Sequence: Synthetic oligonucleotide
uucguccguaucuguauau

SEQ ID NO: 1272831 - RNA, 19 nt, Artificial Sequence
  Description of Artificial Sequence: Synthetic oligonucleotide
agcaauccauccaaaugca

SEQ ID NO: 1272832 - RNA, 19 nt, Artificial Sequence
  Description of Artificial Sequence: Synthetic oligonucleotide
aguacucagagaacguaaa

SEQ ID NO: 1272833 - RNA, 19 nt, Artificial Sequence
  Description of Artificial Sequence: Synthetic oligonucleotide
ucggagcgacccuugggug

SEQ ID NO: 1272834 - RNA, 19 nt, Artificial Sequence
  Description of Artificial Sequence: Synthetic oligonucleotide
cacacucaauacuugauau

SEQ ID NO: 1272835 - RNA, 19 nt, Artificial Sequence
  Description of Artificial Sequence: Synthetic oligonucleotide
caguacucagagaacguaa

SEQ ID NO: 1272836 - RNA, 19 nt, Artificial Sequence
  Description of Artificial Sequence: Synthetic oligonucleotide
uacgaggagucaacugaau

SEQ ID NO: 1272837 - RNA, 19 nt, Artificial Sequence
  Description of Artificial Sequence: Synthetic oligonucleotide
gaacugcgcuucccaaagc

SEQ ID NO: 1272838 - RNA, 19 nt, Artificial Sequence
  Description of Artificial Sequence: Synthetic oligonucleotide
uaacggcugcauguagaag

SEQ ID NO: 1272839 - RNA, 19 nt, Artificial Sequence
  Description of Artificial Sequence: Synthetic oligonucleotide
aacgcaagagcgagcggga

SEQ ID NO: 1272840 - RNA, 19 nt, Artificial Sequence
  Description of Artificial Sequence: Synthetic oligonucleotide
gagcgggaccagcaaacac

SEQ ID NO: 1272841 - RNA, 19 nt, Artificial Sequence
  Description of Artificial Sequence: Synthetic oligonucleotide
caguucgcgaccccagaac

SEQ ID NO: 1272842 - RNA, 19 nt, Artificial Sequence
  Description of Artificial Sequence: Synthetic oligonucleotide
acggcugcauguagaaguc

SEQ ID NO: 1272843 - RNA, 19 nt, Artificial Sequence
  Description of Artificial Sequence: Synthetic oligonucleotide
guccguaucuguauauaga

SEQ ID NO: 1272844 - RNA, 19 nt, Artificial Sequence
  Description of Artificial Sequence: Synthetic oligonucleotide
auucguccguaucuguaua

SEQ ID NO: 1272845 - RNA, 19 nt, Artificial Sequence
  Description of Artificial Sequence: Synthetic oligonucleotide
augauacgugaauuauauu

SEQ ID NO: 1272846 - RNA, 19 nt, Artificial Sequence
  Description of Artificial Sequence: Synthetic oligonucleotide
ucaauggacuuagguguuc

SEQ ID NO: 1272847 - RNA, 19 nt, Artificial Sequence
  Description of Artificial Sequence: Synthetic oligonucleotide
auaguucaauggacuuagg

SEQ ID NO: 1272848 - RNA, 19 nt, Artificial Sequence
  Description of Artificial Sequence: Synthetic oligonucleotide
aaccgacaacuuuuccauu

SEQ ID NO: 1272849 - RNA, 19 nt, Artificial Sequence
  Description of Artificial Sequence: Synthetic oligonucleotide
cucuaagguucaccgcaac

SEQ ID NO: 1272850 - RNA, 19 nt, Artificial Sequence
  Description of Artificial Sequence: Synthetic oligonucleotide
cuacgaggagucaacugaa

SEQ ID NO: 1272851 - RNA, 19 nt, Artificial Sequence
  Description of Artificial Sequence: Synthetic oligonucleotide
gacucgcaggaauacagau

SEQ ID NO: 1272852 - RNA, 19 nt, Artificial Sequence
  Description of Artificial Sequence: Synthetic oligonucleotide
ggagucgcgauuaguauuc

SEQ ID NO: 1272853 - RNA, 19 nt, Artificial Sequence
  Description of Artificial Sequence: Synthetic oligonucleotide
cauugaucuacagcagaga

SEQ ID NO: 1272854 - RNA, 19 nt, Artificial Sequence
  Description of Artificial Sequence: Synthetic oligonucleotide
guuucuugcaugccacgua

SEQ ID NO: 1272855 - RNA, 19 nt, Artificial Sequence
  Description of Artificial Sequence: Synthetic oligonucleotide
ucaguucuauucguccgua

SEQ ID NO: 1272856 - RNA, 19 nt, Artificial Sequence
  Description of Artificial Sequence: Synthetic oligonucleotide
ggauuuauucccaaauccu

SEQ ID NO: 1272857 - RNA, 19 nt, Artificial Sequence
  Description of Artificial Sequence: Synthetic oligonucleotide
accaagguuccaugugaau

SEQ ID NO: 1272858 - RNA, 19 nt, Artificial Sequence
  Description of Artificial Sequence: Synthetic oligonucleotide
agagaacguaaauguugua

SEQ ID NO: 1272859 - RNA, 19 nt, Artificial Sequence
  Description of Artificial Sequence: Synthetic oligonucleotide
guguuugaccauguggaaa

SEQ ID NO: 1272860 - RNA, 19 nt, Artificial Sequence
  Description of Artificial Sequence: Synthetic oligonucleotide
uuggggaacugcgcuuccc

SEQ ID NO: 1272861 - RNA, 19 nt, Artificial Sequence
  Description of Artificial Sequence: Synthetic oligonucleotide
gacuacuagguuauguguu

SEQ ID NO: 1272862 - RNA, 19 nt, Artificial Sequence
  Description of Artificial Sequence: Synthetic oligonucleotide
gacuccucuaacucaggau

SEQ ID NO: 1272863 - RNA, 19 nt, Artificial Sequence
  Description of Artificial Sequence: Synthetic oligonucleotide
gguuauguguucuaccauu

SEQ ID NO: 1272864 - RNA, 19 nt, Artificial Sequence
  Description of Artificial Sequence: Synthetic oligonucleotide
cguccguaucuguauauag

SEQ ID NO: 1272865 - RNA, 19 nt, Artificial Sequence
  Description of Artificial Sequence: Synthetic oligonucleotide
augccacguaacacguagg

SEQ ID NO: 1272866 - RNA, 19 nt, Artificial Sequence
  Description of Artificial Sequence: Synthetic oligonucleotide
guucgcgaccccagaacgc

SEQ ID NO: 1272867 - RNA, 19 nt, Artificial Sequence
  Description of Artificial Sequence: Synthetic oligonucleotide
acgacggcucuuggcuugc

SEQ ID NO: 1272868 - RNA, 19 nt, Artificial Sequence
  Description of Artificial Sequence: Synthetic oligonucleotide
aggcucaacaguacucaga

SEQ ID NO: 1272869 - RNA, 19 nt, Artificial Sequence
  Description of Artificial Sequence: Synthetic oligonucleotide
guuccguaccagguucuug

SEQ ID NO: 1272870 - RNA, 19 nt, Artificial Sequence
  Description of Artificial Sequence: Synthetic oligonucleotide
caccgcaaccaccggccgg

SEQ ID NO: 1272871 - RNA, 19 nt, Artificial Sequence
  Description of Artificial Sequence: Synthetic oligonucleotide
ucguccguaucuguauaua

SEQ ID NO: 1272872 - RNA, 19 nt, Artificial Sequence
  Description of Artificial Sequence: Synthetic oligonucleotide
acgcaagagcgagcgggac

SEQ ID NO: 1272873 - RNA, 19 nt, Artificial Sequence
  Description of Artificial Sequence: Synthetic oligonucleotide
ggaucaaauaacggcugca

SEQ ID NO: 1272874 - RNA, 19 nt, Artificial Sequence
  Description of Artificial Sequence: Synthetic oligonucleotide
agacucgcaggaauacaga

SEQ ID NO: 1272875 - RNA, 19 nt, Artificial Sequence
  Description of Artificial Sequence: Synthetic oligonucleotide
cuagugcaucaaagguauc

SEQ ID NO: 1272876 - RNA, 19 nt, Artificial Sequence
  Description of Artificial Sequence: Synthetic oligonucleotide
cacguaggcucggagcgac

SEQ ID NO: 1272877 - RNA, 19 nt, Artificial Sequence
  Description of Artificial Sequence: Synthetic oligonucleotide
gguaggauuccaaauacuu

SEQ ID NO: 1272878 - RNA, 19 nt, Artificial Sequence
  Description of Artificial Sequence: Synthetic oligonucleotide
agucgcgauuaguauucuu

SEQ ID NO: 1272879 - RNA, 19 nt, Artificial Sequence
  Description of Artificial Sequence: Synthetic oligonucleotide
cagauucaguucuauucgu

SEQ ID NO: 1272880 - RNA, 19 nt, Artificial Sequence
  Description of Artificial Sequence: Synthetic oligonucleotide
guugacgggauggguugug

SEQ ID NO: 1272881 - RNA, 19 nt, Artificial Sequence
  Description of Artificial Sequence: Synthetic oligonucleotide
gacggcucuuggcuugcca

SEQ ID NO: 1272882 - RNA, 19 nt, Artificial Sequence
  Description of Artificial Sequence: Synthetic oligonucleotide
ccacuugcagcaauccauc

SEQ ID NO: 1272883 - RNA, 19 nt, Artificial Sequence
  Description of Artificial Sequence: Synthetic oligonucleotide
gucgcgauuaguauucuuu

SEQ ID NO: 1272884 - RNA, 19 nt, Artificial Sequence
  Description of Artificial Sequence: Synthetic oligonucleotide
ucgcaggaauacagaucaa

SEQ ID NO: 1272885 - RNA, 19 nt, Artificial Sequence
  Description of Artificial Sequence: Synthetic oligonucleotide
acguaacacguaggcucgg

SEQ ID NO: 1272886 - RNA, 19 nt, Artificial Sequence
  Description of Artificial Sequence: Synthetic oligonucleotide
aguugacgggauggguugu

SEQ ID NO: 1272887 - RNA, 19 nt, Artificial Sequence
  Description of Artificial Sequence: Synthetic oligonucleotide
gccuuggacuacuagguua

SEQ ID NO: 1272888 - RNA, 19 nt, Artificial Sequence
  Description of Artificial Sequence: Synthetic oligonucleotide
caaccaccggccgggguag

SEQ ID NO: 1272889 - RNA, 19 nt, Artificial Sequence
  Description of Artificial Sequence: Synthetic oligonucleotide
aggacccauuuucguuaug

SEQ ID NO: 1272890 - RNA, 19 nt, Artificial Sequence
  Description of Artificial Sequence: Synthetic oligonucleotide
aaccaccggccgggguagc

SEQ ID NO: 1272891 - RNA, 19 nt, Artificial Sequence
  Description of Artificial Sequence: Synthetic oligonucleotide
cucagagaacguaaauguu

SEQ ID NO: 1272892 - RNA, 19 nt, Artificial Sequence
  Description of Artificial Sequence: Synthetic oligonucleotide
uaggcucggagcgacccuu

SEQ ID NO: 1272893 - RNA, 19 nt, Artificial Sequence
  Description of Artificial Sequence: Synthetic oligonucleotide
gcgggaccagcaaacacug

SEQ ID NO: 1272894 - RNA, 19 nt, Artificial Sequence
  Description of Artificial Sequence: Synthetic oligonucleotide
ucgcgaccccagaacgcaa

SEQ ID NO: 1272895 - RNA, 19 nt, Artificial Sequence
  Description of Artificial Sequence: Synthetic oligonucleotide
acguaggcucggagcgacc

SEQ ID NO: 1272896 - RNA, 19 nt, Artificial Sequence
  Description of Artificial Sequence: Synthetic oligonucleotide
ccguaccagguucuuggcc

SEQ ID NO: 1272897 - RNA, 19 nt, Artificial Sequence
  Description of Artificial Sequence: Synthetic oligonucleotide
ugcuuuccuagagcacaau

SEQ ID NO: 1272898 - RNA, 19 nt, Artificial Sequence
  Description of Artificial Sequence: Synthetic oligonucleotide
guguucuaccauugaucua

SEQ ID NO: 1272899 - RNA, 19 nt, Artificial Sequence
  Description of Artificial Sequence: Synthetic oligonucleotide
gccacgacggcucuuggcu

SEQ ID NO: 1272900 - RNA, 19 nt, Artificial Sequence
  Description of Artificial Sequence: Synthetic oligonucleotide
auccugcucuaagguucac

SEQ ID NO: 1272901 - RNA, 19 nt, Artificial Sequence
  Description of Artificial Sequence: Synthetic oligonucleotide
cuuaggagucgcgauuagu

SEQ ID NO: 1272902 - RNA, 19 nt, Artificial Sequence
  Description of Artificial Sequence: Synthetic oligonucleotide
gggaacugcgcuucccaaa

SEQ ID NO: 1272903 - RNA, 19 nt, Artificial Sequence
  Description of Artificial Sequence: Synthetic oligonucleotide
cuacuagguuauguguucu

SEQ ID NO: 1272904 - RNA, 19 nt, Artificial Sequence
  Description of Artificial Sequence: Synthetic oligonucleotide
guucuacgaggagucaacu

SEQ ID NO: 1272905 - RNA, 19 nt, Artificial Sequence
  Description of Artificial Sequence: Synthetic oligonucleotide
gaggacccauuuucguuau

SEQ ID NO: 1272906 - RNA, 19 nt, Artificial Sequence
  Description of Artificial Sequence: Synthetic oligonucleotide
ccuccuuugugccaagcaa

SEQ ID NO: 1272907 - RNA, 19 nt, Artificial Sequence
  Description of Artificial Sequence: Synthetic oligonucleotide
cagguuuuauucucaccuu

SEQ ID NO: 1272908 - RNA, 19 nt, Artificial Sequence
  Description of Artificial Sequence: Synthetic oligonucleotide
cgauuccccaagcuuugag

SEQ ID NO: 1272909 - RNA, 19 nt, Artificial Sequence
  Description of Artificial Sequence: Synthetic oligonucleotide
gcgagcgggaccagcaaac

SEQ ID NO: 1272910 - RNA, 19 nt, Artificial Sequence
  Description of Artificial Sequence: Synthetic oligonucleotide
cggagcgacccuugggugc

SEQ ID NO: 1272911 - RNA, 19 nt, Artificial Sequence
  Description of Artificial Sequence: Synthetic oligonucleotide
gcaguucgcgaccccagaa

SEQ ID NO: 1272912 - RNA, 19 nt, Artificial Sequence
  Description of Artificial Sequence: Synthetic oligonucleotide
guccuggauugcacuccag

SEQ ID NO: 1272913 - RNA, 19 nt, Artificial Sequence
  Description of Artificial Sequence: Synthetic oligonucleotide
ccggcucuaaguaaugccu

SEQ ID NO: 1272914 - RNA, 19 nt, Artificial Sequence
  Description of Artificial Sequence: Synthetic oligonucleotide
gcacuccaguaaaaguuga

SEQ ID NO: 1272915 - RNA, 19 nt, Artificial Sequence
  Description of Artificial Sequence: Synthetic oligonucleotide
ggagcgacccuugggugca

SEQ ID NO: 1272916 - RNA, 19 nt, Artificial Sequence
  Description of Artificial Sequence: Synthetic oligonucleotide
ccuuggacuacuagguuau

SEQ ID NO: 1272917 - RNA, 19 nt, Artificial Sequence
  Description of Artificial Sequence: Synthetic oligonucleotide
ccuccaagcucucaucaua

SEQ ID NO: 1272918 - RNA, 19 nt, Artificial Sequence
  Description of Artificial Sequence: Synthetic oligonucleotide
ggggaacugcgcuucccaa

SEQ ID NO: 1272919 - RNA, 19 nt, Artificial Sequence
  Description of Artificial Sequence: Synthetic oligonucleotide
ggccgggguagcuccugcc

SEQ ID NO: 1272920 - RNA, 19 nt, Artificial Sequence
  Description of Artificial Sequence: Synthetic oligonucleotide
ggauugcacuccaguaaaa

SEQ ID NO: 1272921 - RNA, 19 nt, Artificial Sequence
  Description of Artificial Sequence: Synthetic oligonucleotide
accaccggccgggguagcu

SEQ ID NO: 1272922 - RNA, 19 nt, Artificial Sequence
  Description of Artificial Sequence: Synthetic oligonucleotide
ccgcaguucgcgaccccag

SEQ ID NO: 1272923 - RNA, 19 nt, Artificial Sequence
  Description of Artificial Sequence: Synthetic oligonucleotide
gcaccggcucuaaguaaug

SEQ ID NO: 1272924 - RNA, 19 nt, Artificial Sequence
  Description of Artificial Sequence: Synthetic oligonucleotide
gggguagcuccugccaaga

SEQ ID NO: 1272925 - RNA, 19 nt, Artificial Sequence
  Description of Artificial Sequence: Synthetic oligonucleotide
cgcgaccccagaacgcaag

SEQ ID NO: 1272926 - RNA, 19 nt, Artificial Sequence
  Description of Artificial Sequence: Synthetic oligonucleotide
cugcaguucauggcucaua

SEQ ID NO: 1272927 - RNA, 19 nt, Artificial Sequence
  Description of Artificial Sequence: Synthetic oligonucleotide
aggcucggagcgacccuug

SEQ ID NO: 1272928 - RNA, 19 nt, Artificial Sequence
  Description of Artificial Sequence: Synthetic oligonucleotide
gcgaccccagaacgcaaga

SEQ ID NO: 1272929 - RNA, 19 nt, Artificial Sequence
  Description of Artificial Sequence: Synthetic oligonucleotide
gagucgcgauuaguauucu

SEQ ID NO: 1272930 - RNA, 19 nt, Artificial Sequence
  Description of Artificial Sequence: Synthetic oligonucleotide
caguucuauucguccguau

SEQ ID NO: 1272931 - RNA, 19 nt, Artificial Sequence
  Description of Artificial Sequence: Synthetic oligonucleotide
ggcaccggcucuaaguaau

SEQ ID NO: 1272932 - RNA, 19 nt, Artificial Sequence
  Description of Artificial Sequence: Synthetic oligonucleotide
gaagcgccgcauggcacgu

SEQ ID NO: 1272933 - RNA, 19 nt, Artificial Sequence
  Description of Artificial Sequence: Synthetic oligonucleotide
cauggcucauagacugcuu

SEQ ID NO: 1272934 - RNA, 19 nt, Artificial Sequence
  Description of Artificial Sequence: Synthetic oligonucleotide
cgcaggaauacagaucaaa

SEQ ID NO: 1272935 - RNA, 19 nt, Artificial Sequence
  Description of Artificial Sequence: Synthetic oligonucleotide
ggguagcuccugccaagaa

SEQ ID NO: 1272936 - RNA, 19 nt, Artificial Sequence
  Description of Artificial Sequence: Synthetic oligonucleotide
agcgacccuugggugcaaa

SEQ ID NO: 1272937 - RNA, 19 nt, Artificial Sequence
  Description of Artificial Sequence: Synthetic oligonucleotide
gccacguaacacguaggcu

SEQ ID NO: 1272938 - RNA, 19 nt, Artificial Sequence
  Description of Artificial Sequence: Synthetic oligonucleotide
gccgcaguucgcgacccca

SEQ ID NO: 1272939 - RNA, 19 nt, Artificial Sequence
  Description of Artificial Sequence: Synthetic oligonucleotide
cauuuucguuaugcauacu

SEQ ID NO: 1272940 - RNA, 19 nt, Artificial Sequence
  Description of Artificial Sequence: Synthetic oligonucleotide
gcgacccuugggugcaaaa

SEQ ID NO: 1272941 - RNA, 19 nt, Artificial Sequence
  Description of Artificial Sequence: Synthetic oligonucleotide
cgcgccgcaguucgcgacc

SEQ ID NO: 1272942 - RNA, 19 nt, Artificial Sequence
  Description of Artificial Sequence: Synthetic oligonucleotide
ccucuuaggagucgcgauu

SEQ ID NO: 1272943 - RNA, 19 nt, Artificial Sequence
  Description of Artificial Sequence: Synthetic oligonucleotide
cguaacacguaggcucgga

SEQ ID NO: 1272944 - RNA, 19 nt, Artificial Sequence
  Description of Artificial Sequence: Synthetic oligonucleotide
accggccgggguagcuccu

SEQ ID NO: 1272945 - RNA, 19 nt, Artificial Sequence
  Description of Artificial Sequence: Synthetic oligonucleotide
guccuuccgcgccgcaguu

SEQ ID NO: 1272946 - RNA, 19 nt, Artificial Sequence
  Description of Artificial Sequence: Synthetic oligonucleotide
cgcaguucgcgaccccaga

SEQ ID NO: 1272947 - RNA, 19 nt, Artificial Sequence
  Description of Artificial Sequence: Synthetic oligonucleotide
cccaucgccgggccccaca

SEQ ID NO: 1272948 - RNA, 19 nt, Artificial Sequence
  Description of Artificial Sequence: Synthetic oligonucleotide
cgagcgggaccagcaaaca

SEQ ID NO: 1272949 - RNA, 19 nt, Artificial Sequence
  Description of Artificial Sequence: Synthetic oligonucleotide
gcgcuucccaaagcagugu

SEQ ID NO: 1272950 - RNA, 19 nt, Artificial Sequence
  Description of Artificial Sequence: Synthetic oligonucleotide
ccgcaaccaccggccgggg

SEQ ID NO: 1272951 - RNA, 19 nt, Artificial Sequence
  Description of Artificial Sequence: Synthetic oligonucleotide
cgccgcaguucgcgacccc

SEQ ID NO: 1272952 - RNA, 19 nt, Artificial Sequence
  Description of Artificial Sequence: Synthetic oligonucleotide
ccaucgccgggccccacau

SEQ ID NO: 1272953 - RNA, 19 nt, Artificial Sequence
  Description of Artificial Sequence: Synthetic oligonucleotide
aaaacauucaaacagggcu

SEQ ID NO: 1272954 - RNA, 19 nt, Artificial Sequence
  Description of Artificial Sequence: Synthetic oligonucleotide
acuuauagggcucacauac

SEQ ID NO: 1272955 - RNA, 19 nt, Artificial Sequence
  Description of Artificial Sequence: Synthetic oligonucleotide
agagauuuaagguacauag

SEQ ID NO: 1272956 - RNA, 19 nt, Artificial Sequence
  Description of Artificial Sequence: Synthetic oligonucleotide
uaaaagggcgccaugaugg

SEQ ID NO: 1272957 - RNA, 19 nt, Artificial Sequence
  Description of Artificial Sequence: Synthetic oligonucleotide
uugaagaauacaaauuugc

SEQ ID NO: 1272958 - RNA, 19 nt, Artificial Sequence
  Description of Artificial Sequence: Synthetic oligonucleotide
acacuugguacuuauaggg

SEQ ID NO: 1272959 - RNA, 19 nt, Artificial Sequence
  Description of Artificial Sequence: Synthetic oligonucleotide
cuuacucccauaaaguugc

SEQ ID NO: 1272960 - RNA, 19 nt, Artificial Sequence
  Description of Artificial Sequence: Synthetic oligonucleotide
agaguucagagauuuaagg

SEQ ID NO: 1272961 - RNA, 19 nt, Artificial Sequence
  Description of Artificial Sequence: Synthetic oligonucleotide
uuucucacccgccagaacc

SEQ ID NO: 1272962 - RNA, 19 nt, Artificial Sequence
  Description of Artificial Sequence: Synthetic oligonucleotide
uacuuauuuccccugaaga

SEQ ID NO: 1272963 - RNA, 19 nt, Artificial Sequence
  Description of Artificial Sequence: Synthetic oligonucleotide
uuauagggcucacauaccc

SEQ ID NO: 1272964 - RNA, 19 nt, Artificial Sequence
  Description of Artificial Sequence: Synthetic oligonucleotide
guauccauccaucacuugg

SEQ ID NO: 1272965 - RNA, 19 nt, Artificial Sequence
  Description of Artificial Sequence: Synthetic oligonucleotide
uuuaagguacauagucagg

SEQ ID NO: 1272966 - RNA, 19 nt, Artificial Sequence
  Description of Artificial Sequence: Synthetic oligonucleotide
agauguuaggcccauaggu

SEQ ID NO: 1272967 - RNA, 19 nt, Artificial Sequence
  Description of Artificial Sequence: Synthetic oligonucleotide
ucgucacuacccaugaacg

SEQ ID NO: 1272968 - RNA, 19 nt, Artificial Sequence
  Description of Artificial Sequence: Synthetic oligonucleotide
uuaucugggacagagggcc

SEQ ID NO: 1272969 - RNA, 19 nt, Artificial Sequence
  Description of Artificial Sequence: Synthetic oligonucleotide
uugguuauuucucacccgc

SEQ ID NO: 1272970 - RNA, 19 nt, Artificial Sequence
  Description of Artificial Sequence: Synthetic oligonucleotide
ugugagguucccucgaggg

SEQ ID NO: 1272971 - RNA, 19 nt, Artificial Sequence
  Description of Artificial Sequence: Synthetic oligonucleotide
cugacuuacucccauaaag

SEQ ID NO: 1272972 - RNA, 19 nt, Artificial Sequence
  Description of Artificial Sequence: Synthetic oligonucleotide
aguaugugaagacuucguc

SEQ ID NO: 1272973 - RNA, 19 nt, Artificial Sequence
  Description of Artificial Sequence: Synthetic oligonucleotide
guacacuugguacuuauag

SEQ ID NO: 1272974 - RNA, 19 nt, Artificial Sequence
  Description of Artificial Sequence: Synthetic oligonucleotide
uacacuugguacuuauagg

SEQ ID NO: 1272975 - RNA, 19 nt, Artificial Sequence
  Description of Artificial Sequence: Synthetic oligonucleotide
uagagcauggcccaacuca

SEQ ID NO: 1272976 - RNA, 19 nt, Artificial Sequence
  Description of Artificial Sequence: Synthetic oligonucleotide
auguuaggcccauaggugg

SEQ ID NO: 1272977 - RNA, 19 nt, Artificial Sequence
  Description of Artificial Sequence: Synthetic oligonucleotide
auaaugaucaccucuguuu

SEQ ID NO: 1272978 - RNA, 19 nt, Artificial Sequence
  Description of Artificial Sequence: Synthetic oligonucleotide
cauccauugguaaaagggc

SEQ ID NO: 1272979 - RNA, 19 nt, Artificial Sequence
  Description of Artificial Sequence: Synthetic oligonucleotide
aaaagggcgccaugauggc

SEQ ID NO: 1272980 - RNA, 19 nt, Artificial Sequence
  Description of Artificial Sequence: Synthetic oligonucleotide
uucgucacuacccaugaac

SEQ ID NO: 1272981 - RNA, 19 nt, Artificial Sequence
  Description of Artificial Sequence: Synthetic oligonucleotide
caguaaagcagucucuugg

SEQ ID NO: 1272982 - RNA, 19 nt, Artificial Sequence
  Description of Artificial Sequence: Synthetic oligonucleotide
acagauguuaggcccauag

SEQ ID NO: 1272983 - RNA, 19 nt, Artificial Sequence
  Description of Artificial Sequence: Synthetic oligonucleotide
ugacuuacucccauaaagu

SEQ ID NO: 1272984 - RNA, 19 nt, Artificial Sequence
  Description of Artificial Sequence: Synthetic oligonucleotide
ucacccgccagaaccaucg

SEQ ID NO: 1272985 - RNA, 19 nt, Artificial Sequence
  Description of Artificial Sequence: Synthetic oligonucleotide
gaaguaugugaagacuucg

SEQ ID NO: 1272986 - RNA, 19 nt, Artificial Sequence
  Description of Artificial Sequence: Synthetic oligonucleotide
uccuuaaugugcuuggggu

SEQ ID NO: 1272987 - RNA, 19 nt, Artificial Sequence
  Description of Artificial Sequence: Synthetic oligonucleotide
uaaugaucaccucuguuuc

SEQ ID NO: 1272988 - RNA, 19 nt, Artificial Sequence
  Description of Artificial Sequence: Synthetic oligonucleotide
gaagacuucgucacuaccc

SEQ ID NO: 1272989 - RNA, 19 nt, Artificial Sequence
  Description of Artificial Sequence: Synthetic oligonucleotide
aacgcuggcaguaaagcag

SEQ ID NO: 1272990 - RNA, 19 nt, Artificial Sequence
  Description of Artificial Sequence: Synthetic oligonucleotide
uucuaguuagagugguggg

SEQ ID NO: 1272991 - RNA, 19 nt, Artificial Sequence
  Description of Artificial Sequence: Synthetic oligonucleotide
aagacuucgucacuaccca

SEQ ID NO: 1272992 - RNA, 19 nt, Artificial Sequence
  Description of Artificial Sequence: Synthetic oligonucleotide
caaucuugucaguagguag

SEQ ID NO: 1272993 - RNA, 19 nt, Artificial Sequence
  Description of Artificial Sequence: Synthetic oligonucleotide
caugauggcagagggaucg

SEQ ID NO: 1272994 - RNA, 19 nt, Artificial Sequence
  Description of Artificial Sequence: Synthetic oligonucleotide
agaauacaaauuugccauc

SEQ ID NO: 1272995 - RNA, 19 nt, Artificial Sequence
  Description of Artificial Sequence: Synthetic oligonucleotide
uagaaguaugugaagacuu

SEQ ID NO: 1272996 - RNA, 19 nt, Artificial Sequence
  Description of Artificial Sequence: Synthetic oligonucleotide
caucaaucuugucaguagg

SEQ ID NO: 1272997 - RNA, 19 nt, Artificial Sequence
  Description of Artificial Sequence: Synthetic oligonucleotide
acuugguacuuauagggcu

SEQ ID NO: 1272998 - RNA, 19 nt, Artificial Sequence
  Description of Artificial Sequence: Synthetic oligonucleotide
gaagccucgucaaacaccc

SEQ ID NO: 1272999 - RNA, 19 nt, Artificial Sequence
  Description of Artificial Sequence: Synthetic oligonucleotide
ugguuguugaauuuccagu

SEQ ID NO: 1273000 - RNA, 19 nt, Artificial Sequence
  Description of Artificial Sequence: Synthetic oligonucleotide
augaacgacccucugggag

SEQ ID NO: 1273001 - RNA, 19 nt, Artificial Sequence
  Description of Artificial Sequence: Synthetic oligonucleotide
aaccaucgcuccuugaaga

SEQ ID NO: 1273002 - RNA, 19 nt, Artificial Sequence
  Description of Artificial Sequence: Synthetic oligonucleotide
cauaggugggguuucuggg

SEQ ID NO: 1273003 - RNA, 19 nt, Artificial Sequence
  Description of Artificial Sequence: Synthetic oligonucleotide
gauguuaggcccauaggug

SEQ ID NO: 1273004 - RNA, 19 nt, Artificial Sequence
  Description of Artificial Sequence: Synthetic oligonucleotide
uggaaaagaagcagaugac

SEQ ID NO: 1273005 - RNA, 19 nt, Artificial Sequence
  Description of Artificial Sequence: Synthetic oligonucleotide
uuauuucucacccgccaga

SEQ ID NO: 1273006 - RNA, 19 nt, Artificial Sequence
  Description of Artificial Sequence: Synthetic oligonucleotide
ugaagacuucgucacuacc

SEQ ID NO: 1273007 - RNA, 19 nt, Artificial Sequence
  Description of Artificial Sequence: Synthetic oligonucleotide
uauccauccaucacuuggu

SEQ ID NO: 1273008 - RNA, 19 nt, Artificial Sequence
  Description of Artificial Sequence: Synthetic oligonucleotide
aucgucgucagguagcaca

SEQ ID NO: 1273009 - RNA, 19 nt, Artificial Sequence
  Description of Artificial Sequence: Synthetic oligonucleotide
guuggauccaggccuagag

SEQ ID NO: 1273010 - RNA, 19 nt, Artificial Sequence
  Description of Artificial Sequence: Synthetic oligonucleotide
gaugccucggcgaucgucg

SEQ ID NO: 1273011 - RNA, 19 nt, Artificial Sequence
  Description of Artificial Sequence: Synthetic oligonucleotide
agcaaugcuggggugaagg

SEQ ID NO: 1273012 - RNA, 19 nt, Artificial Sequence
  Description of Artificial Sequence: Synthetic oligonucleotide
ugucaguagguaguccucg

SEQ ID NO: 1273013 - RNA, 19 nt, Artificial Sequence
  Description of Artificial Sequence: Synthetic oligonucleotide
cuugguuauuucucacccg

SEQ ID NO: 1273014 - RNA, 19 nt, Artificial Sequence
  Description of Artificial Sequence: Synthetic oligonucleotide
gaaccaucgcuccuugaag

SEQ ID NO: 1273015 - RNA, 19 nt, Artificial Sequence
  Description of Artificial Sequence: Synthetic oligonucleotide
aagcugugagguucccucg

SEQ ID NO: 1273016 - RNA, 19 nt, Artificial Sequence
  Description of Artificial Sequence: Synthetic oligonucleotide
cuaguuagaguggugggag

SEQ ID NO: 1273017 - RNA, 19 nt, Artificial Sequence
  Description of Artificial Sequence: Synthetic oligonucleotide
cugguuguugaauuuccag

SEQ ID NO: 1273018 - RNA, 19 nt, Artificial Sequence
  Description of Artificial Sequence: Synthetic oligonucleotide
acaaacaucucuccucgga

SEQ ID NO: 1273019 - RNA, 19 nt, Artificial Sequence
  Description of Artificial Sequence: Synthetic oligonucleotide
guaaaagggcgccaugaug

SEQ ID NO: 1273020 - RNA, 19 nt, Artificial Sequence
  Description of Artificial Sequence: Synthetic oligonucleotide
ugaacgcuggcaguaaagc

SEQ ID NO: 1273021 - RNA, 19 nt, Artificial Sequence
  Description of Artificial Sequence: Synthetic oligonucleotide
uuaggguacucgcugucca

SEQ ID NO: 1273022 - RNA, 19 nt, Artificial Sequence
  Description of Artificial Sequence: Synthetic oligonucleotide
guacuuauuuccccugaag

SEQ ID NO: 1273023 - RNA, 19 nt, Artificial Sequence
  Description of Artificial Sequence: Synthetic oligonucleotide
guucagagauuuaagguac

SEQ ID NO: 1273024 - RNA, 19 nt, Artificial Sequence
  Description of Artificial Sequence: Synthetic oligonucleotide
uggccaauaggcaucgggu

SEQ ID NO: 1273025 - RNA, 19 nt, Artificial Sequence
  Description of Artificial Sequence: Synthetic oligonucleotide
ucuaguuagagugguggga

SEQ ID NO: 1273026 - RNA, 19 nt, Artificial Sequence
  Description of Artificial Sequence: Synthetic oligonucleotide
auagucaggggauggaaaa

SEQ ID NO: 1273027 - RNA, 19 nt, Artificial Sequence
  Description of Artificial Sequence: Synthetic oligonucleotide
uuccccuuguagaaguaug

SEQ ID NO: 1273028 - RNA, 19 nt, Artificial Sequence
  Description of Artificial Sequence: Synthetic oligonucleotide
aaaguucccaucacagaug

SEQ ID NO: 1273029 - RNA, 19 nt, Artificial Sequence
  Description of Artificial Sequence: Synthetic oligonucleotide
gaugaagcaaugcuggggu

SEQ ID NO: 1273030 - RNA, 19 nt, Artificial Sequence
  Description of Artificial Sequence: Synthetic oligonucleotide
aggcaucggguauccaucc

SEQ ID NO: 1273031 - RNA, 19 nt, Artificial Sequence
  Description of Artificial Sequence: Synthetic oligonucleotide
uauagggcucacauaccca

SEQ ID NO: 1273032 - RNA, 19 nt, Artificial Sequence
  Description of Artificial Sequence: Synthetic oligonucleotide
ucggccuagcuccuuaaug

SEQ ID NO: 1273033 - RNA, 19 nt, Artificial Sequence
  Description of Artificial Sequence: Synthetic oligonucleotide
cacuugguacuuauagggc

SEQ ID NO: 1273034 - RNA, 19 nt, Artificial Sequence
  Description of Artificial Sequence: Synthetic oligonucleotide
cuuauagggcucacauacc

SEQ ID NO: 1273035 - RNA, 19 nt, Artificial Sequence
  Description of Artificial Sequence: Synthetic oligonucleotide
uuucuguguccauccauug

SEQ ID NO: 1273036 - RNA, 19 nt, Artificial Sequence
  Description of Artificial Sequence: Synthetic oligonucleotide
gaagagagcugcaucaauc

SEQ ID NO: 1273037 - RNA, 19 nt, Artificial Sequence
  Description of Artificial Sequence: Synthetic oligonucleotide
agaaccaucgcuccuugaa

SEQ ID NO: 1273038 - RNA, 19 nt, Artificial Sequence
  Description of Artificial Sequence: Synthetic oligonucleotide
ucaguagguaguccucggc

SEQ ID NO: 1273039 - RNA, 19 nt, Artificial Sequence
  Description of Artificial Sequence: Synthetic oligonucleotide
acgguaguacuuauuuccc

SEQ ID NO: 1273040 - RNA, 19 nt, Artificial Sequence
  Description of Artificial Sequence: Synthetic oligonucleotide
aguagguaguccucggccu

SEQ ID NO: 1273041 - RNA, 19 nt, Artificial Sequence
  Description of Artificial Sequence: Synthetic oligonucleotide
accaucgcuccuugaagac

SEQ ID NO: 1273042 - RNA, 19 nt, Artificial Sequence
  Description of Artificial Sequence: Synthetic oligonucleotide
gaguucagagauuuaaggu

SEQ ID NO: 1273043 - RNA, 19 nt, Artificial Sequence
  Description of Artificial Sequence: Synthetic oligonucleotide
auaggcaucggguauccau

SEQ ID NO: 1273044 - RNA, 19 nt, Artificial Sequence
  Description of Artificial Sequence: Synthetic oligonucleotide
agcggcggcauucacagcu

SEQ ID NO: 1273045 - RNA, 19 nt, Artificial Sequence
  Description of Artificial Sequence: Synthetic oligonucleotide
caagcugugagguucccuc

SEQ ID NO: 1273046 - RNA, 19 nt, Artificial Sequence
  Description of Artificial Sequence: Synthetic oligonucleotide
uaguacuuauuuccccuga

SEQ ID NO: 1273047 - RNA, 19 nt, Artificial Sequence
  Description of Artificial Sequence: Synthetic oligonucleotide
ggagaggccauucagggac

SEQ ID NO: 1273048 - RNA, 19 nt, Artificial Sequence
  Description of Artificial Sequence: Synthetic oligonucleotide
cuggccaauaggcaucggg

SEQ ID NO: 1273049 - RNA, 19 nt, Artificial Sequence
  Description of Artificial Sequence: Synthetic oligonucleotide
ugggcauccagaagagagc

SEQ ID NO: 1273050 - RNA, 19 nt, Artificial Sequence
  Description of Artificial Sequence: Synthetic oligonucleotide
gaaacgguaguacuuauuu

SEQ ID NO: 1273051 - RNA, 19 nt, Artificial Sequence
  Description of Artificial Sequence: Synthetic oligonucleotide
accucgauaaugaucaccu

SEQ ID NO: 1273052 - RNA, 19 nt, Artificial Sequence
  Description of Artificial Sequence: Synthetic oligonucleotide
ggcucacauacccagagcc

SEQ ID NO: 1273053 - RNA, 19 nt, Artificial Sequence
  Description of Artificial Sequence: Synthetic oligonucleotide
uaguuagaguggugggagg

SEQ ID NO: 1273054 - RNA, 19 nt, Artificial Sequence
  Description of Artificial Sequence: Synthetic oligonucleotide
ugguaaaagggcgccauga

SEQ ID NO: 1273055 - RNA, 19 nt, Artificial Sequence
  Description of Artificial Sequence: Synthetic oligonucleotide
cuugggguacccagguucc

SEQ ID NO: 1273056 - RNA, 19 nt, Artificial Sequence
  Description of Artificial Sequence: Synthetic oligonucleotide
uuuaggguacucgcugucc

SEQ ID NO: 1273057 - RNA, 19 nt, Artificial Sequence
  Description of Artificial Sequence: Synthetic oligonucleotide
guagcugagcaaucuuucc

SEQ ID NO: 1273058 - RNA, 19 nt, Artificial Sequence
  Description of Artificial Sequence: Synthetic oligonucleotide
ugcagagcccugaaaacau

SEQ ID NO: 1273059 - RNA, 19 nt, Artificial Sequence
  Description of Artificial Sequence: Synthetic oligonucleotide
uucagagauuuaagguaca

SEQ ID NO: 1273060 - RNA, 19 nt, Artificial Sequence
  Description of Artificial Sequence: Synthetic oligonucleotide
agggcucacauacccagag

SEQ ID NO: 1273061 - RNA, 19 nt, Artificial Sequence
  Description of Artificial Sequence: Synthetic oligonucleotide
aaguaugugaagacuucgu

SEQ ID NO: 1273062 - RNA, 19 nt, Artificial Sequence
  Description of Artificial Sequence: Synthetic oligonucleotide
uccccuuguagaaguaugu

SEQ ID NO: 1273063 - RNA, 19 nt, Artificial Sequence
  Description of Artificial Sequence: Synthetic oligonucleotide
ugguuauuucucacccgcc

SEQ ID NO: 1273064 - RNA, 19 nt, Artificial Sequence
  Description of Artificial Sequence: Synthetic oligonucleotide
ucgucagguagcacaaagu

SEQ ID NO: 1273065 - RNA, 19 nt, Artificial Sequence
  Description of Artificial Sequence: Synthetic oligonucleotide
uuagaguagcugagcaauc

SEQ ID NO: 1273066 - RNA, 19 nt, Artificial Sequence
  Description of Artificial Sequence: Synthetic oligonucleotide
cagauguuaggcccauagg

SEQ ID NO: 1273067 - RNA, 19 nt, Artificial Sequence
  Description of Artificial Sequence: Synthetic oligonucleotide
uuuuaggguacucgcuguc

SEQ ID NO: 1273068 - RNA, 19 nt, Artificial Sequence
  Description of Artificial Sequence: Synthetic oligonucleotide
ucugggcuuaucugggaca

SEQ ID NO: 1273069 - RNA, 19 nt, Artificial Sequence
  Description of Artificial Sequence: Synthetic oligonucleotide
ucggcgaucgucgucaggu

SEQ ID NO: 1273070 - RNA, 19 nt, Artificial Sequence
  Description of Artificial Sequence: Synthetic oligonucleotide
ccaugaacgacccucuggg

SEQ ID NO: 1273071 - RNA, 19 nt, Artificial Sequence
  Description of Artificial Sequence: Synthetic oligonucleotide
uaggcaucggguauccauc

SEQ ID NO: 1273072 - RNA, 19 nt, Artificial Sequence
  Description of Artificial Sequence: Synthetic oligonucleotide
uagaguagcugagcaaucu

SEQ ID NO: 1273073 - RNA, 19 nt, Artificial Sequence
  Description of Artificial Sequence: Synthetic oligonucleotide
cacacaccaagcugugagg

SEQ ID NO: 1273074 - RNA, 19 nt, Artificial Sequence
  Description of Artificial Sequence: Synthetic oligonucleotide
ucccaccuauggaugaagc

SEQ ID NO: 1273075 - RNA, 19 nt, Artificial Sequence
  Description of Artificial Sequence: Synthetic oligonucleotide
auugaaacgguaguacuua

SEQ ID NO: 1273076 - RNA, 19 nt, Artificial Sequence
  Description of Artificial Sequence: Synthetic oligonucleotide
acuugggguacccgggcuc

SEQ ID NO: 1273077 - RNA, 19 nt, Artificial Sequence
  Description of Artificial Sequence: Synthetic oligonucleotide
ucggguauccauccaucac

SEQ ID NO: 1273078 - RNA, 19 nt, Artificial Sequence
  Description of Artificial Sequence: Synthetic oligonucleotide
gaacgcuggcaguaaagca

SEQ ID NO: 1273079 - RNA, 19 nt, Artificial Sequence
  Description of Artificial Sequence: Synthetic oligonucleotide
cuacccaugaacgacccuc

SEQ ID NO: 1273080 - RNA, 19 nt, Artificial Sequence
  Description of Artificial Sequence: Synthetic oligonucleotide
gacuucgucacuacccaug

SEQ ID NO: 1273081 - RNA, 19 nt, Artificial Sequence
  Description of Artificial Sequence: Synthetic oligonucleotide
uugguaaaagggcgccaug

SEQ ID NO: 1273082 - RNA, 19 nt, Artificial Sequence
  Description of Artificial Sequence: Synthetic oligonucleotide
gucacuacccaugaacgac

SEQ ID NO: 1273083 - RNA, 19 nt, Artificial Sequence
  Description of Artificial Sequence: Synthetic oligonucleotide
acucaugcacagcuaccag

SEQ ID NO: 1273084 - RNA, 19 nt, Artificial Sequence
  Description of Artificial Sequence: Synthetic oligonucleotide
ugaaacgguaguacuuauu

SEQ ID NO: 1273085 - RNA, 19 nt, Artificial Sequence
  Description of Artificial Sequence: Synthetic oligonucleotide
aagaagcagaugaccccac

SEQ ID NO: 1273086 - RNA, 19 nt, Artificial Sequence
  Description of Artificial Sequence: Synthetic oligonucleotide
aguacuuauuuccccugaa

SEQ ID NO: 1273087 - RNA, 19 nt, Artificial Sequence
  Description of Artificial Sequence: Synthetic oligonucleotide
cuggaugccucggcgaucg

SEQ ID NO: 1273088 - RNA, 19 nt, Artificial Sequence
  Description of Artificial Sequence: Synthetic oligonucleotide
uuagaguggugggagggcu

SEQ ID NO: 1273089 - RNA, 19 nt, Artificial Sequence
  Description of Artificial Sequence: Synthetic oligonucleotide
aucggguauccauccauca

SEQ ID NO: 1273090 - RNA, 19 nt, Artificial Sequence
  Description of Artificial Sequence: Synthetic oligonucleotide
uugucaguagguaguccuc

SEQ ID NO: 1273091 - RNA, 19 nt, Artificial Sequence
  Description of Artificial Sequence: Synthetic oligonucleotide
agaagggaccgccuuccug

SEQ ID NO: 1273092 - RNA, 19 nt, Artificial Sequence
  Description of Artificial Sequence: Synthetic oligonucleotide
uauuucucacccgccagaa

SEQ ID NO: 1273093 - RNA, 19 nt, Artificial Sequence
  Description of Artificial Sequence: Synthetic oligonucleotide
uccuucuaguuagaguggu

SEQ ID NO: 1273094 - RNA, 19 nt, Artificial Sequence
  Description of Artificial Sequence: Synthetic oligonucleotide
cucacauacccagagccuc

SEQ ID NO: 1273095 - RNA, 19 nt, Artificial Sequence
  Description of Artificial Sequence: Synthetic oligonucleotide
cucgauaaugaucaccucu

SEQ ID NO: 1273096 - RNA, 19 nt, Artificial Sequence
  Description of Artificial Sequence: Synthetic oligonucleotide
ucagagauuuaagguacau

SEQ ID NO: 1273097 - RNA, 19 nt, Artificial Sequence
  Description of Artificial Sequence: Synthetic oligonucleotide
guacuuauagggcucacau

SEQ ID NO: 1273098 - RNA, 19 nt, Artificial Sequence
  Description of Artificial Sequence: Synthetic oligonucleotide
agugcuugucuccuuugaa

SEQ ID NO: 1273099 - RNA, 19 nt, Artificial Sequence
  Description of Artificial Sequence: Synthetic oligonucleotide
auugguaaaagggcgccau

SEQ ID NO: 1273100 - RNA, 19 nt, Artificial Sequence
  Description of Artificial Sequence: Synthetic oligonucleotide
cacuacccaugaacgaccc

SEQ ID NO: 1273101 - RNA, 19 nt, Artificial Sequence
  Description of Artificial Sequence: Synthetic oligonucleotide
uacuuauagggcucacaua

SEQ ID NO: 1273102 - RNA, 19 nt, Artificial Sequence
  Description of Artificial Sequence: Synthetic oligonucleotide
uugaaacgguaguacuuau

SEQ ID NO: 1273103 - RNA, 19 nt, Artificial Sequence
  Description of Artificial Sequence: Synthetic oligonucleotide
guauugauggaugcuggca

SEQ ID NO: 1273104 - RNA, 19 nt, Artificial Sequence
  Description of Artificial Sequence: Synthetic oligonucleotide
ggaucguuggauccaggcc

SEQ ID NO: 1273105 - RNA, 19 nt, Artificial Sequence
  Description of Artificial Sequence: Synthetic oligonucleotide
ucgucgucagguagcacaa

SEQ ID NO: 1273106 - RNA, 19 nt, Artificial Sequence
  Description of Artificial Sequence: Synthetic oligonucleotide
aggguacucgcuguccacg

SEQ ID NO: 1273107 - RNA, 19 nt, Artificial Sequence
  Description of Artificial Sequence: Synthetic oligonucleotide
uugguacuuauagggcuca

SEQ ID NO: 1273108 - RNA, 19 nt, Artificial Sequence
  Description of Artificial Sequence: Synthetic oligonucleotide
gaguagcccaccugccacc

SEQ ID NO: 1273109 - RNA, 19 nt, Artificial Sequence
  Description of Artificial Sequence: Synthetic oligonucleotide
acacaccaagcugugaggu

SEQ ID NO: 1273110 - RNA, 19 nt, Artificial Sequence
  Description of Artificial Sequence: Synthetic oligonucleotide
ugccaacuggguacacuug

SEQ ID NO: 1273111 - RNA, 19 nt, Artificial Sequence
  Description of Artificial Sequence: Synthetic oligonucleotide
uccagggaagccucgucaa

SEQ ID NO: 1273112 - RNA, 19 nt, Artificial Sequence
  Description of Artificial Sequence: Synthetic oligonucleotide
augaagcaaugcuggggug

SEQ ID NO: 1273113 - RNA, 19 nt, Artificial Sequence
  Description of Artificial Sequence: Synthetic oligonucleotide
caccucgauaaugaucacc

SEQ ID NO: 1273114 - RNA, 19 nt, Artificial Sequence
  Description of Artificial Sequence: Synthetic oligonucleotide
gaagcagaugaccccaccu

SEQ ID NO: 1273115 - RNA, 19 nt, Artificial Sequence
  Description of Artificial Sequence: Synthetic oligonucleotide
ccauaggugggguuucugg

SEQ ID NO: 1273116 - RNA, 19 nt, Artificial Sequence
  Description of Artificial Sequence: Synthetic oligonucleotide
gauaaugaucaccucuguu

SEQ ID NO: 1273117 - RNA, 19 nt, Artificial Sequence
  Description of Artificial Sequence: Synthetic oligonucleotide
uccauccaucacuugguua

SEQ ID NO: 1273118 - RNA, 19 nt, Artificial Sequence
  Description of Artificial Sequence: Synthetic oligonucleotide
ucggagcauggccacggug

SEQ ID NO: 1273119 - RNA, 19 nt, Artificial Sequence
  Description of Artificial Sequence: Synthetic oligonucleotide
caauaggcaucggguaucc

SEQ ID NO: 1273120 - RNA, 19 nt, Artificial Sequence
  Description of Artificial Sequence: Synthetic oligonucleotide
caucgcuccuugaagacaa

SEQ ID NO: 1273121 - RNA, 19 nt, Artificial Sequence
  Description of Artificial Sequence: Synthetic oligonucleotide
caucggguauccauccauc

SEQ ID NO: 1273122 - RNA, 19 nt, Artificial Sequence
  Description of Artificial Sequence: Synthetic oligonucleotide
agaguagcugagcaaucuu

SEQ ID NO: 1273123 - RNA, 19 nt, Artificial Sequence
  Description of Artificial Sequence: Synthetic oligonucleotide
gggaucguuggauccaggc

SEQ ID NO: 1273124 - RNA, 19 nt, Artificial Sequence
  Description of Artificial Sequence: Synthetic oligonucleotide
cuuguccagcagugaacgc

SEQ ID NO: 1273125 - RNA, 19 nt, Artificial Sequence
  Description of Artificial Sequence: Synthetic oligonucleotide
aggccuagagcauggccca

SEQ ID NO: 1273126 - RNA, 19 nt, Artificial Sequence
  Description of Artificial Sequence: Synthetic oligonucleotide
gugaacgcuggcaguaaag

SEQ ID NO: 1273127 - RNA, 19 nt, Artificial Sequence
  Description of Artificial Sequence: Synthetic oligonucleotide
guacccagguuccagggaa

SEQ ID NO: 1273128 - RNA, 19 nt, Artificial Sequence
  Description of Artificial Sequence: Synthetic oligonucleotide
gugaagacuucgucacuac

SEQ ID NO: 1273129 - RNA, 19 nt, Artificial Sequence
  Description of Artificial Sequence: Synthetic oligonucleotide
cuguccacggcccugaacu

SEQ ID NO: 1273130 - RNA, 19 nt, Artificial Sequence
  Description of Artificial Sequence: Synthetic oligonucleotide
aaagggcgccaugauggca

SEQ ID NO: 1273131 - RNA, 19 nt, Artificial Sequence
  Description of Artificial Sequence: Synthetic oligonucleotide
ggggucuugccuucaagug

SEQ ID NO: 1273132 - RNA, 19 nt, Artificial Sequence
  Description of Artificial Sequence: Synthetic oligonucleotide
guagaaguaugugaagacu

SEQ ID NO: 1273133 - RNA, 19 nt, Artificial Sequence
  Description of Artificial Sequence: Synthetic oligonucleotide
ugacccugacuuacuccca

SEQ ID NO: 1273134 - RNA, 19 nt, Artificial Sequence
  Description of Artificial Sequence: Synthetic oligonucleotide
guagaagcgggugggccag

SEQ ID NO: 1273135 - RNA, 19 nt, Artificial Sequence
  Description of Artificial Sequence: Synthetic oligonucleotide
gguaguacuuauuuccccu

SEQ ID NO: 1273136 - RNA, 19 nt, Artificial Sequence
  Description of Artificial Sequence: Synthetic oligonucleotide
agagccgacuugggguacc

SEQ ID NO: 1273137 - RNA, 19 nt, Artificial Sequence
  Description of Artificial Sequence: Synthetic oligonucleotide
gagggaucguuggauccag

SEQ ID NO: 1273138 - RNA, 19 nt, Artificial Sequence
  Description of Artificial Sequence: Synthetic oligonucleotide
gaagcgggugggccagcgg

SEQ ID NO: 1273139 - RNA, 19 nt, Artificial Sequence
  Description of Artificial Sequence: Synthetic oligonucleotide
guucccucgagggccagag

SEQ ID NO: 1273140 - RNA, 19 nt, Artificial Sequence
  Description of Artificial Sequence: Synthetic oligonucleotide
ggaagccucgucaaacacc

SEQ ID NO: 1273141 - RNA, 19 nt, Artificial Sequence
  Description of Artificial Sequence: Synthetic oligonucleotide
aagggaccgccuuccugcu

SEQ ID NO: 1273142 - RNA, 19 nt, Artificial Sequence
  Description of Artificial Sequence: Synthetic oligonucleotide
ccagaagagagcugcauca

SEQ ID NO: 1273143 - RNA, 19 nt, Artificial Sequence
  Description of Artificial Sequence: Synthetic oligonucleotide
agcugugagguucccucga

SEQ ID NO: 1273144 - RNA, 19 nt, Artificial Sequence
  Description of Artificial Sequence: Synthetic oligonucleotide
agagguaguucugggcuga

SEQ ID NO: 1273145 - RNA, 19 nt, Artificial Sequence
  Description of Artificial Sequence: Synthetic oligonucleotide
ucccguggcgucugaagaa

SEQ ID NO: 1273146 - RNA, 19 nt, Artificial Sequence
  Description of Artificial Sequence: Synthetic oligonucleotide
cacggugucaaaguuccca

SEQ ID NO: 1273147 - RNA, 19 nt, Artificial Sequence
  Description of Artificial Sequence: Synthetic oligonucleotide
ggcgaucgucgucagguag

SEQ ID NO: 1273148 - RNA, 19 nt, Artificial Sequence
  Description of Artificial Sequence: Synthetic oligonucleotide
uacccgggcucuacuuuca

SEQ ID NO: 1273149 - RNA, 19 nt, Artificial Sequence
  Description of Artificial Sequence: Synthetic oligonucleotide
guacccgggcucuacuuuc

SEQ ID NO: 1273150 - RNA, 19 nt, Artificial Sequence
  Description of Artificial Sequence: Synthetic oligonucleotide
ucgcuccuugaagacaaac

SEQ ID NO: 1273151 - RNA, 19 nt, Artificial Sequence
  Description of Artificial Sequence: Synthetic oligonucleotide
cauugaaacgguaguacuu

SEQ ID NO: 1273152 - RNA, 19 nt, Artificial Sequence
  Description of Artificial Sequence: Synthetic oligonucleotide
ggugugaguagcccaccug

SEQ ID NO: 1273153 - RNA, 19 nt, Artificial Sequence
  Description of Artificial Sequence: Synthetic oligonucleotide
gcaucuuggugggugaccc

SEQ ID NO: 1273154 - RNA, 19 nt, Artificial Sequence
  Description of Artificial Sequence: Synthetic oligonucleotide
uuacucccauaaaguugcu

SEQ ID NO: 1273155 - RNA, 19 nt, Artificial Sequence
  Description of Artificial Sequence: Synthetic oligonucleotide
gucccguggcgucugaaga

SEQ ID NO: 1273156 - RNA, 19 nt, Artificial Sequence
  Description of Artificial Sequence: Synthetic oligonucleotide
accuauggaugaagcaaug

SEQ ID NO: 1273157 - RNA, 19 nt, Artificial Sequence
  Description of Artificial Sequence: Synthetic oligonucleotide
ccuauggaugaagcaaugc

SEQ ID NO: 1273158 - RNA, 19 nt, Artificial Sequence
  Description of Artificial Sequence: Synthetic oligonucleotide
aauaggcaucggguaucca

SEQ ID NO: 1273159 - RNA, 19 nt, Artificial Sequence
  Description of Artificial Sequence: Synthetic oligonucleotide
cugggagacucagggauuc

SEQ ID NO: 1273160 - RNA, 19 nt, Artificial Sequence
  Description of Artificial Sequence: Synthetic oligonucleotide
cagguagcacaaaguuuuc

SEQ ID NO: 1273161 - RNA, 19 nt, Artificial Sequence
  Description of Artificial Sequence: Synthetic oligonucleotide
cauucacagcuccgccgcc

SEQ ID NO: 1273162 - RNA, 19 nt, Artificial Sequence
  Description of Artificial Sequence: Synthetic oligonucleotide
ggucagaccuuguccagca

SEQ ID NO: 1273163 - RNA, 19 nt, Artificial Sequence
  Description of Artificial Sequence: Synthetic oligonucleotide
acccgccagaaccaucgcu

SEQ ID NO: 1273164 - RNA, 19 nt, Artificial Sequence
  Description of Artificial Sequence: Synthetic oligonucleotide
agucccgcagagccgacuu

SEQ ID NO: 1273165 - RNA, 19 nt, Artificial Sequence
  Description of Artificial Sequence: Synthetic oligonucleotide
agacuucgucacuacccau

SEQ ID NO: 1273166 - RNA, 19 nt, Artificial Sequence
  Description of Artificial Sequence: Synthetic oligonucleotide
acuacccaugaacgacccu

SEQ ID NO: 1273167 - RNA, 19 nt, Artificial Sequence
  Description of Artificial Sequence: Synthetic oligonucleotide
gaccccaccuggccuuugc

SEQ ID NO: 1273168 - RNA, 19 nt, Artificial Sequence
  Description of Artificial Sequence: Synthetic oligonucleotide
uggccacggugucaaaguu

SEQ ID NO: 1273169 - RNA, 19 nt, Artificial Sequence
  Description of Artificial Sequence: Synthetic oligonucleotide
ccccucaucaggucggccc

SEQ ID NO: 1273170 - RNA, 19 nt, Artificial Sequence
  Description of Artificial Sequence: Synthetic oligonucleotide
gggcucuacuuucagcuuc

SEQ ID NO: 1273171 - RNA, 19 nt, Artificial Sequence
  Description of Artificial Sequence: Synthetic oligonucleotide
cacgggcaguaggacagcg

SEQ ID NO: 1273172 - RNA, 19 nt, Artificial Sequence
  Description of Artificial Sequence: Synthetic oligonucleotide
gguauccauccaucacuug

SEQ ID NO: 1273173 - RNA, 19 nt, Artificial Sequence
  Description of Artificial Sequence: Synthetic oligonucleotide
uccucggagcauggccacg

SEQ ID NO: 1273174 - RNA, 19 nt, Artificial Sequence
  Description of Artificial Sequence: Synthetic oligonucleotide
caugaacgacccucuggga

SEQ ID NO: 1273175 - RNA, 19 nt, Artificial Sequence
  Description of Artificial Sequence: Synthetic oligonucleotide
gucccaccuauggaugaag

SEQ ID NO: 1273176 - RNA, 19 nt, Artificial Sequence
  Description of Artificial Sequence: Synthetic oligonucleotide
ggggcaaaguccuuguggu

SEQ ID NO: 1273177 - RNA, 19 nt, Artificial Sequence
  Description of Artificial Sequence: Synthetic oligonucleotide
cccgccagaaccaucgcuc

SEQ ID NO: 1273178 - RNA, 19 nt, Artificial Sequence
  Description of Artificial Sequence: Synthetic oligonucleotide
cuccucggagcauggccac

SEQ ID NO: 1273179 - RNA, 19 nt, Artificial Sequence
  Description of Artificial Sequence: Synthetic oligonucleotide
ggugaagguaggagaggcc

SEQ ID NO: 1273180 - RNA, 19 nt, Artificial Sequence
  Description of Artificial Sequence: Synthetic oligonucleotide
acgggcaguaggacagcgg

SEQ ID NO: 1273181 - RNA, 19 nt, Artificial Sequence
  Description of Artificial Sequence: Synthetic oligonucleotide
ggcgucugaagaagaaaac

SEQ ID NO: 1273182 - RNA, 19 nt, Artificial Sequence
  Description of Artificial Sequence: Synthetic oligonucleotide
cuacuuucagcuucugguu

SEQ ID NO: 1273183 - RNA, 19 nt, Artificial Sequence
  Description of Artificial Sequence: Synthetic oligonucleotide
cauaggcaguauugaugga

SEQ ID NO: 1273184 - RNA, 19 nt, Artificial Sequence
  Description of Artificial Sequence: Synthetic oligonucleotide
caccuauggaugaagcaau

SEQ ID NO: 1273185 - RNA, 19 nt, Artificial Sequence
  Description of Artificial Sequence: Synthetic oligonucleotide
cagagauuuaagguacaua

SEQ ID NO: 1273186 - RNA, 19 nt, Artificial Sequence
  Description of Artificial Sequence: Synthetic oligonucleotide
ugggagacucagggauucc

SEQ ID NO: 1273187 - RNA, 19 nt, Artificial Sequence
  Description of Artificial Sequence: Synthetic oligonucleotide
caacuggguacacuuggua

SEQ ID NO: 1273188 - RNA, 19 nt, Artificial Sequence
  Description of Artificial Sequence: Synthetic oligonucleotide
acccgggcucuacuuucag

SEQ ID NO: 1273189 - RNA, 19 nt, Artificial Sequence
  Description of Artificial Sequence: Synthetic oligonucleotide
acggcccugaacuccucau

SEQ ID NO: 1273190 - RNA, 19 nt, Artificial Sequence
  Description of Artificial Sequence: Synthetic oligonucleotide
gaugaccccaccuggccuu

SEQ ID NO: 1273191 - RNA, 19 nt, Artificial Sequence
  Description of Artificial Sequence: Synthetic oligonucleotide
cucaggggucccaccuaug

SEQ ID NO: 1273192 - RNA, 19 nt, Artificial Sequence
  Description of Artificial Sequence: Synthetic oligonucleotide
cauugguaaaagggcgcca

SEQ ID NO: 1273193 - RNA, 19 nt, Artificial Sequence
  Description of Artificial Sequence: Synthetic oligonucleotide
agaggccauucagggacug

SEQ ID NO: 1273194 - RNA, 19 nt, Artificial Sequence
  Description of Artificial Sequence: Synthetic oligonucleotide
ugguacuuauagggcucac

SEQ ID NO: 1273195 - RNA, 19 nt, Artificial Sequence
  Description of Artificial Sequence: Synthetic oligonucleotide
ucgagggccagaggccaga

SEQ ID NO: 1273196 - RNA, 19 nt, Artificial Sequence
  Description of Artificial Sequence: Synthetic oligonucleotide
ucguuggauccaggccuag

SEQ ID NO: 1273197 - RNA, 19 nt, Artificial Sequence
  Description of Artificial Sequence: Synthetic oligonucleotide
cucacccgccagaaccauc

SEQ ID NO: 1273198 - RNA, 19 nt, Artificial Sequence
  Description of Artificial Sequence: Synthetic oligonucleotide
ccuucuaguuagaguggug

SEQ ID NO: 1273199 - RNA, 19 nt, Artificial Sequence
  Description of Artificial Sequence: Synthetic oligonucleotide
cucggcgaucgucgucagg

SEQ ID NO: 1273200 - RNA, 19 nt, Artificial Sequence
  Description of Artificial Sequence: Synthetic oligonucleotide
gcagaugaccccaccuggc

SEQ ID NO: 1273201 - RNA, 19 nt, Artificial Sequence
  Description of Artificial Sequence: Synthetic oligonucleotide
gcgaucgucgucagguagc

SEQ ID NO: 1273202 - RNA, 19 nt, Artificial Sequence
  Description of Artificial Sequence: Synthetic oligonucleotide
uugggguacccagguucca

SEQ ID NO: 1273203 - RNA, 19 nt, Artificial Sequence
  Description of Artificial Sequence: Synthetic oligonucleotide
agggaucguuggauccagg

SEQ ID NO: 1273204 - RNA, 19 nt, Artificial Sequence
  Description of Artificial Sequence: Synthetic oligonucleotide
gagccgacuugggguaccc

SEQ ID NO: 1273205 - RNA, 19 nt, Artificial Sequence
  Description of Artificial Sequence: Synthetic oligonucleotide
ugggguacccgggcucuac

SEQ ID NO: 1273206 - RNA, 19 nt, Artificial Sequence
  Description of Artificial Sequence: Synthetic oligonucleotide
caggccccuccagaacugg

SEQ ID NO: 1273207 - RNA, 19 nt, Artificial Sequence
  Description of Artificial Sequence: Synthetic oligonucleotide
ggccuucaggggcaaaguc

SEQ ID NO: 1273208 - RNA, 19 nt, Artificial Sequence
  Description of Artificial Sequence: Synthetic oligonucleotide
ccaauaggcaucggguauc

SEQ ID NO: 1273209 - RNA, 19 nt, Artificial Sequence
  Description of Artificial Sequence: Synthetic oligonucleotide
ccaccuauggaugaagcaa

SEQ ID NO: 1273210 - RNA, 19 nt, Artificial Sequence
  Description of Artificial Sequence: Synthetic oligonucleotide
gcgucugaagaagaaaacu

SEQ ID NO: 1273211 - RNA, 19 nt, Artificial Sequence
  Description of Artificial Sequence: Synthetic oligonucleotide
gggucagaccuuguccagc

SEQ ID NO: 1273212 - RNA, 19 nt, Artificial Sequence
  Description of Artificial Sequence: Synthetic oligonucleotide
gucagguagcacaaaguuu

SEQ ID NO: 1273213 - RNA, 19 nt, Artificial Sequence
  Description of Artificial Sequence: Synthetic oligonucleotide
gguaaaagggcgccaugau

SEQ ID NO: 1273214 - RNA, 19 nt, Artificial Sequence
  Description of Artificial Sequence: Synthetic oligonucleotide
ccuuaaugugcuuggggua

SEQ ID NO: 1273215 - RNA, 19 nt, Artificial Sequence
  Description of Artificial Sequence: Synthetic oligonucleotide
acccugacuuacucccaua

SEQ ID NO: 1273216 - RNA, 19 nt, Artificial Sequence
  Description of Artificial Sequence: Synthetic oligonucleotide
ccugaacuccucauugaaa

SEQ ID NO: 1273217 - RNA, 19 nt, Artificial Sequence
  Description of Artificial Sequence: Synthetic oligonucleotide
augccucggcgaucgucgu

SEQ ID NO: 1273218 - RNA, 19 nt, Artificial Sequence
  Description of Artificial Sequence: Synthetic oligonucleotide
uccccucaucaggucggcc

SEQ ID NO: 1273219 - RNA, 19 nt, Artificial Sequence
  Description of Artificial Sequence: Synthetic oligonucleotide
gaucgucgucagguagcac

SEQ ID NO: 1273220 - RNA, 19 nt, Artificial Sequence
  Description of Artificial Sequence: Synthetic oligonucleotide
acaucucuccucggagcau

SEQ ID NO: 1273221 - RNA, 19 nt, Artificial Sequence
  Description of Artificial Sequence: Synthetic oligonucleotide
gaggccauucagggacuga

SEQ ID NO: 1273222 - RNA, 19 nt, Artificial Sequence
  Description of Artificial Sequence: Synthetic oligonucleotide
aucguuggauccaggccua

SEQ ID NO: 1273223 - RNA, 19 nt, Artificial Sequence
  Description of Artificial Sequence: Synthetic oligonucleotide
ccgggcucuacuuucagcu

SEQ ID NO: 1273224 - RNA, 19 nt, Artificial Sequence
  Description of Artificial Sequence: Synthetic oligonucleotide
gccaauaggcaucggguau

SEQ ID NO: 1273225 - RNA, 19 nt, Artificial Sequence
  Description of Artificial Sequence: Synthetic oligonucleotide
cacccgccagaaccaucgc

SEQ ID NO: 1273226 - RNA, 19 nt, Artificial Sequence
  Description of Artificial Sequence: Synthetic oligonucleotide
cccgggcucuacuuucagc

SEQ ID NO: 1273227 - RNA, 19 nt, Artificial Sequence
  Description of Artificial Sequence: Synthetic oligonucleotide
aggugggguuucugggcuu

SEQ ID NO: 1273228 - RNA, 19 nt, Artificial Sequence
  Description of Artificial Sequence: Synthetic oligonucleotide
ccucgauaaugaucaccuc

SEQ ID NO: 1273229 - RNA, 19 nt, Artificial Sequence
  Description of Artificial Sequence: Synthetic oligonucleotide
gccucggcgaucgucguca

SEQ ID NO: 1273230 - RNA, 19 nt, Artificial Sequence
  Description of Artificial Sequence: Synthetic oligonucleotide
cuucgucacuacccaugaa

SEQ ID NO: 1273231 - RNA, 19 nt, Artificial Sequence
  Description of Artificial Sequence: Synthetic oligonucleotide
guagcccaccugccaccac

SEQ ID NO: 1273232 - RNA, 19 nt, Artificial Sequence
  Description of Artificial Sequence: Synthetic oligonucleotide
cccguggcgucugaagaag

SEQ ID NO: 1273233 - RNA, 19 nt, Artificial Sequence
  Description of Artificial Sequence: Synthetic oligonucleotide
cacggcccugaacuccuca

SEQ ID NO: 1273234 - RNA, 19 nt, Artificial Sequence
  Description of Artificial Sequence: Synthetic oligonucleotide
gccccuccagaacuggcca

SEQ ID NO: 1273235 - RNA, 19 nt, Artificial Sequence
  Description of Artificial Sequence: Synthetic oligonucleotide
ggaugccucggcgaucguc

SEQ ID NO: 1273236 - RNA, 19 nt, Artificial Sequence
  Description of Artificial Sequence: Synthetic oligonucleotide
gaagggcagcccauccagu

SEQ ID NO: 1273237 - RNA, 19 nt, Artificial Sequence
  Description of Artificial Sequence: Synthetic oligonucleotide
gggccaagagguaguucug

SEQ ID NO: 1273238 - RNA, 19 nt, Artificial Sequence
  Description of Artificial Sequence: Synthetic oligonucleotide
ggaccgccuuccugcuccg

SEQ ID NO: 1273239 - RNA, 19 nt, Artificial Sequence
  Description of Artificial Sequence: Synthetic oligonucleotide
cccugacuuacucccauaa

SEQ ID NO: 1273240 - RNA, 19 nt, Artificial Sequence
  Description of Artificial Sequence: Synthetic oligonucleotide
cugggacagagggccaaga

SEQ ID NO: 1273241 - RNA, 19 nt, Artificial Sequence
  Description of Artificial Sequence: Synthetic oligonucleotide
cccagagccuccugagguc

SEQ ID NO: 1273242 - RNA, 19 nt, Artificial Sequence
  Description of Artificial Sequence: Synthetic oligonucleotide
ggugggagggcugccaacu

SEQ ID NO: 1273243 - RNA, 19 nt, Artificial Sequence
  Description of Artificial Sequence: Synthetic oligonucleotide
uggaugccucggcgaucgu

SEQ ID NO: 1273244 - RNA, 19 nt, Artificial Sequence
  Description of Artificial Sequence: Synthetic oligonucleotide
gcaucggguauccauccau

SEQ ID NO: 1273245 - RNA, 19 nt, Artificial Sequence
  Description of Artificial Sequence: Synthetic oligonucleotide
aggccagaagggaccgccu

SEQ ID NO: 1273246 - RNA, 19 nt, Artificial Sequence
  Description of Artificial Sequence: Synthetic oligonucleotide
cagcggcggcauucacagc

SEQ ID NO: 1273247 - RNA, 19 nt, Artificial Sequence
  Description of Artificial Sequence: Synthetic oligonucleotide
ccugacuuacucccauaaa

SEQ ID NO: 1273248 - RNA, 19 nt, Artificial Sequence
  Description of Artificial Sequence: Synthetic oligonucleotide
cgacuugggguacccgggc

SEQ ID NO: 1273249 - RNA, 19 nt, Artificial Sequence
  Description of Artificial Sequence: Synthetic oligonucleotide
cggcauucacagcuccgcc

SEQ ID NO: 1273250 - RNA, 19 nt, Artificial Sequence
  Description of Artificial Sequence: Synthetic oligonucleotide
cggguauccauccaucacu

SEQ ID NO: 1273251 - RNA, 19 nt, Artificial Sequence
  Description of Artificial Sequence: Synthetic oligonucleotide
gggagacucagggauuccu

SEQ ID NO: 1273252 - RNA, 19 nt, Artificial Sequence
  Description of Artificial Sequence: Synthetic oligonucleotide
caucuuggugggugacccu

SEQ ID NO: 1273253 - RNA, 19 nt, Artificial Sequence
  Description of Artificial Sequence: Synthetic oligonucleotide
gguacccgggcucuacuuu

SEQ ID NO: 1273254 - RNA, 19 nt, Artificial Sequence
  Description of Artificial Sequence: Synthetic oligonucleotide
cacaccaagcugugagguu

SEQ ID NO: 1273255 - RNA, 19 nt, Artificial Sequence
  Description of Artificial Sequence: Synthetic oligonucleotide
ccucugggagacucaggga

SEQ ID NO: 1273256 - RNA, 19 nt, Artificial Sequence
  Description of Artificial Sequence: Synthetic oligonucleotide
gcucacauacccagagccu

SEQ ID NO: 1273257 - RNA, 19 nt, Artificial Sequence
  Description of Artificial Sequence: Synthetic oligonucleotide
ccaucgcuccuugaagaca

SEQ ID NO: 1273258 - RNA, 19 nt, Artificial Sequence
  Description of Artificial Sequence: Synthetic oligonucleotide
cggagcauggccacggugu

SEQ ID NO: 1273259 - RNA, 19 nt, Artificial Sequence
  Description of Artificial Sequence: Synthetic oligonucleotide
ggacagcggcggcauucac

SEQ ID NO: 1273260 - RNA, 19 nt, Artificial Sequence
  Description of Artificial Sequence: Synthetic oligonucleotide
cgucagguagcacaaaguu

SEQ ID NO: 1273261 - RNA, 19 nt, Artificial Sequence
  Description of Artificial Sequence: Synthetic oligonucleotide
ccaccucgauaaugaucac

SEQ ID NO: 1273262 - RNA, 19 nt, Artificial Sequence
  Description of Artificial Sequence: Synthetic oligonucleotide
cccauaggugggguuucug

SEQ ID NO: 1273263 - RNA, 19 nt, Artificial Sequence
  Description of Artificial Sequence: Synthetic oligonucleotide
ggguauccauccaucacuu

SEQ ID NO: 1273264 - RNA, 19 nt, Artificial Sequence
  Description of Artificial Sequence: Synthetic oligonucleotide
ggucccaccuauggaugaa

SEQ ID NO: 1273265 - RNA, 19 nt, Artificial Sequence
  Description of Artificial Sequence: Synthetic oligonucleotide
ggagacucagggauuccuu

SEQ ID NO: 1273266 - RNA, 19 nt, Artificial Sequence
  Description of Artificial Sequence: Synthetic oligonucleotide
ccguggcgucugaagaaga

SEQ ID NO: 1273267 - RNA, 19 nt, Artificial Sequence
  Description of Artificial Sequence: Synthetic oligonucleotide
gcuccgcccucaggggucc

SEQ ID NO: 1273268 - RNA, 19 nt, Artificial Sequence
  Description of Artificial Sequence: Synthetic oligonucleotide
gggcgccaugauggcagag

SEQ ID NO: 1273269 - RNA, 19 nt, Artificial Sequence
  Description of Artificial Sequence: Synthetic oligonucleotide
gccucgucaaacacccagu

SEQ ID NO: 1273270 - RNA, 19 nt, Artificial Sequence
  Description of Artificial Sequence: Synthetic oligonucleotide
cucggccuagcuccuuaau

SEQ ID NO: 1273271 - RNA, 19 nt, Artificial Sequence
  Description of Artificial Sequence: Synthetic oligonucleotide
gcacgggcaguaggacagc

SEQ ID NO: 1273272 - RNA, 19 nt, Artificial Sequence
  Description of Artificial Sequence: Synthetic oligonucleotide
ccucggcgaucgucgucag

SEQ ID NO: 1273273 - RNA, 19 nt, Artificial Sequence
  Description of Artificial Sequence: Synthetic oligonucleotide
ggauccaggccuagagcau

SEQ ID NO: 1273274 - RNA, 19 nt, Artificial Sequence
  Description of Artificial Sequence: Synthetic oligonucleotide
cgaucgucgucagguagca

SEQ ID NO: 1273275 - RNA, 19 nt, Artificial Sequence
  Description of Artificial Sequence: Synthetic oligonucleotide
gggguacccgggcucuacu

SEQ ID NO: 1273276 - RNA, 19 nt, Artificial Sequence
  Description of Artificial Sequence: Synthetic oligonucleotide
ggccagaagggaccgccuu

SEQ ID NO: 1273277 - RNA, 19 nt, Artificial Sequence
  Description of Artificial Sequence: Synthetic oligonucleotide
ggguacccgggcucuacuu

SEQ ID NO: 1273278 - RNA, 19 nt, Artificial Sequence
  Description of Artificial Sequence: Synthetic oligonucleotide
gcggcggcauucacagcuc

SEQ ID NO: 1273279 - RNA, 19 nt, Artificial Sequence
  Description of Artificial Sequence: Synthetic oligonucleotide
cuccgcccucagggguccc

SEQ ID NO: 1273280 - RNA, 19 nt, Artificial Sequence
  Description of Artificial Sequence: Synthetic oligonucleotide
ccucggccuagcuccuuaa

SEQ ID NO: 1273281 - RNA, 19 nt, Artificial Sequence
  Description of Artificial Sequence: Synthetic oligonucleotide
ccccuccagaacuggccaa

SEQ ID NO: 1273282 - RNA, 19 nt, Artificial Sequence
  Description of Artificial Sequence: Synthetic oligonucleotide
cguuggauccaggccuaga

SEQ ID NO: 1273283 - RNA, 19 nt, Artificial Sequence
  Description of Artificial Sequence: Synthetic oligonucleotide
gcauggccacggugucaaa

SEQ ID NO: 1273284 - RNA, 19 nt, Artificial Sequence
  Description of Artificial Sequence: Synthetic oligonucleotide
ggauuccuucccagacuuu

SEQ ID NO: 1273285 - RNA, 19 nt, Artificial Sequence
  Description of Artificial Sequence: Synthetic oligonucleotide
cccucaggggucccaccua

SEQ ID NO: 1273286 - RNA, 19 nt, Artificial Sequence
  Description of Artificial Sequence: Synthetic oligonucleotide
cggcgaucgucgucaggua

SEQ ID NO: 1273287 - RNA, 19 nt, Artificial Sequence
  Description of Artificial Sequence: Synthetic oligonucleotide
aaaugcagguccuagcucc

SEQ ID NO: 1273288 - RNA, 19 nt, Artificial Sequence
  Description of Artificial Sequence: Synthetic oligonucleotide
ucuaaucucugucaaaagg

SEQ ID NO: 1273289 - RNA, 19 nt, Artificial Sequence
  Description of Artificial Sequence: Synthetic oligonucleotide
aagguuagcacauagcacu

SEQ ID NO: 1273290 - RNA, 19 nt, Artificial Sequence
  Description of Artificial Sequence: Synthetic oligonucleotide
ucuaagagauuccaaaagc

SEQ ID NO: 1273291 - RNA, 19 nt, Artificial Sequence
  Description of Artificial Sequence: Synthetic oligonucleotide
cuuaauggaaagucgacgg

SEQ ID NO: 1273292 - RNA, 19 nt, Artificial Sequence
  Description of Artificial Sequence: Synthetic oligonucleotide
ugggauguaaauuagugca

SEQ ID NO: 1273293 - RNA, 19 nt, Artificial Sequence
  Description of Artificial Sequence: Synthetic oligonucleotide
aagaaguacuucuaaucuc

SEQ ID NO: 1273294 - RNA, 19 nt, Artificial Sequence
  Description of Artificial Sequence: Synthetic oligonucleotide
uuggcagcacccuagaacg

SEQ ID NO: 1273295 - RNA, 19 nt, Artificial Sequence
  Description of Artificial Sequence: Synthetic oligonucleotide
aaucuacaaaagaugaggg

SEQ ID NO: 1273296 - RNA, 19 nt, Artificial Sequence
  Description of Artificial Sequence: Synthetic oligonucleotide
acaguguugauucucacug

SEQ ID NO: 1273297 - RNA, 19 nt, Artificial Sequence
  Description of Artificial Sequence: Synthetic oligonucleotide
uuugauuucaggugggugu

SEQ ID NO: 1273298 - RNA, 19 nt, Artificial Sequence
  Description of Artificial Sequence: Synthetic oligonucleotide
ucuacaaaagaugaggggu

SEQ ID NO: 1273299 - RNA, 19 nt, Artificial Sequence
  Description of Artificial Sequence: Synthetic oligonucleotide
agaaccuccaagaauaagg

SEQ ID NO: 1273300 - RNA, 19 nt, Artificial Sequence
  Description of Artificial Sequence: Synthetic oligonucleotide
agaaucaggaccuggaccu

SEQ ID NO: 1273301 - RNA, 19 nt, Artificial Sequence
  Description of Artificial Sequence: Synthetic oligonucleotide
aauuagugcaaucuacaaa

SEQ ID NO: 1273302 - RNA, 19 nt, Artificial Sequence
  Description of Artificial Sequence: Synthetic oligonucleotide
acuguacuaaccccagugc

SEQ ID NO: 1273303 - RNA, 19 nt, Artificial Sequence
  Description of Artificial Sequence: Synthetic oligonucleotide
aucuaagagauuccaaaag

SEQ ID NO: 1273304 - RNA, 19 nt, Artificial Sequence
  Description of Artificial Sequence: Synthetic oligonucleotide
aaagcuuggcucucuugac

SEQ ID NO: 1273305 - RNA, 19 nt, Artificial Sequence
  Description of Artificial Sequence: Synthetic oligonucleotide
aaagguuagcacauagcac

SEQ ID NO: 1273306 - RNA, 19 nt, Artificial Sequence
  Description of Artificial Sequence: Synthetic oligonucleotide
gaaaccaggaucgacacac

SEQ ID NO: 1273307 - RNA, 19 nt, Artificial Sequence
  Description of Artificial Sequence: Synthetic oligonucleotide
uguaaauuagugcaaucua

SEQ ID NO: 1273308 - RNA, 19 nt, Artificial Sequence
  Description of Artificial Sequence: Synthetic oligonucleotide
uacgacaagcuccauguug

SEQ ID NO: 1273309 - RNA, 19 nt, Artificial Sequence
  Description of Artificial Sequence: Synthetic oligonucleotide
uguacuaaccccagugcca

SEQ ID NO: 1273310 - RNA, 19 nt, Artificial Sequence
  Description of Artificial Sequence: Synthetic oligonucleotide
gacuguacuaaccccagug

SEQ ID NO: 1273311 - RNA, 19 nt, Artificial Sequence
  Description of Artificial Sequence: Synthetic oligonucleotide
cagggguaaaggaagaaag

SEQ ID NO: 1273312 - RNA, 19 nt, Artificial Sequence
  Description of Artificial Sequence: Synthetic oligonucleotide
agcauuuaacaucugggca

SEQ ID NO: 1273313 - RNA, 19 nt, Artificial Sequence
  Description of Artificial Sequence: Synthetic oligonucleotide
ucuaucuucuaagaaucag

SEQ ID NO: 1273314 - RNA, 19 nt, Artificial Sequence
  Description of Artificial Sequence: Synthetic oligonucleotide
uggauuauacuuccauuga

SEQ ID NO: 1273315 - RNA, 19 nt, Artificial Sequence
  Description of Artificial Sequence: Synthetic oligonucleotide
ucaggagcaaucaaucuau

SEQ ID NO: 1273316 - RNA, 19 nt, Artificial Sequence
  Description of Artificial Sequence: Synthetic oligonucleotide
caaagguuagcacauagca

SEQ ID NO: 1273317 - RNA, 19 nt, Artificial Sequence
  Description of Artificial Sequence: Synthetic oligonucleotide
ucaacuugugccagcacca

SEQ ID NO: 1273318 - RNA, 19 nt, Artificial Sequence
  Description of Artificial Sequence: Synthetic oligonucleotide
ucuaagaaucaggaccugg

SEQ ID NO: 1273319 - RNA, 19 nt, Artificial Sequence
  Description of Artificial Sequence: Synthetic oligonucleotide
agaauaaggcaagaggcag

SEQ ID NO: 1273320 - RNA, 19 nt, Artificial Sequence
  Description of Artificial Sequence: Synthetic oligonucleotide
agcuccuagagugaguggc

SEQ ID NO: 1273321 - RNA, 19 nt, Artificial Sequence
  Description of Artificial Sequence: Synthetic oligonucleotide
gauacgacaagcuccaugu

SEQ ID NO: 1273322 - RNA, 19 nt, Artificial Sequence
  Description of Artificial Sequence: Synthetic oligonucleotide
gagcaaucaaucuaucuuc

SEQ ID NO: 1273323 - RNA, 19 nt, Artificial Sequence
  Description of Artificial Sequence: Synthetic oligonucleotide
ugucuuucggcugggaagg

SEQ ID NO: 1273324 - RNA, 19 nt, Artificial Sequence
  Description of Artificial Sequence: Synthetic oligonucleotide
acuuccauugaaauucuac

SEQ ID NO: 1273325 - RNA, 19 nt, Artificial Sequence
  Description of Artificial Sequence: Synthetic oligonucleotide
ugaaaaugcagguccuagc

SEQ ID NO: 1273326 - RNA, 19 nt, Artificial Sequence
  Description of Artificial Sequence: Synthetic oligonucleotide
uagugcaaucuacaaaaga

SEQ ID NO: 1273327 - RNA, 19 nt, Artificial Sequence
  Description of Artificial Sequence: Synthetic oligonucleotide
auguaaauuagugcaaucu

SEQ ID NO: 1273328 - RNA, 19 nt, Artificial Sequence
  Description of Artificial Sequence: Synthetic oligonucleotide
uuagugcaaucuacaaaag

SEQ ID NO: 1273329 - RNA, 19 nt, Artificial Sequence
  Description of Artificial Sequence: Synthetic oligonucleotide
caaaaucuuucccuuuggg

SEQ ID NO: 1273330 - RNA, 19 nt, Artificial Sequence
  Description of Artificial Sequence: Synthetic oligonucleotide
guaaauuagugcaaucuac

SEQ ID NO: 1273331 - RNA, 19 nt, Artificial Sequence
  Description of Artificial Sequence: Synthetic oligonucleotide
ucaaaagggagguuaggaa

SEQ ID NO: 1273332 - RNA, 19 nt, Artificial Sequence
  Description of Artificial Sequence: Synthetic oligonucleotide
gguccuagcuccuagagug

SEQ ID NO: 1273333 - RNA, 19 nt, Artificial Sequence
  Description of Artificial Sequence: Synthetic oligonucleotide
ugccagacuguacuaaccc

SEQ ID NO: 1273334 - RNA, 19 nt, Artificial Sequence
  Description of Artificial Sequence: Synthetic oligonucleotide
cauggcggaagucauagac

SEQ ID NO: 1273335 - RNA, 19 nt, Artificial Sequence
  Description of Artificial Sequence: Synthetic oligonucleotide
gaggaugcggccauggcgg

SEQ ID NO: 1273336 - RNA, 19 nt, Artificial Sequence
  Description of Artificial Sequence: Synthetic oligonucleotide
ucuuacuugucccuugcuc

SEQ ID NO: 1273337 - RNA, 19 nt, Artificial Sequence
  Description of Artificial Sequence: Synthetic oligonucleotide
uguccuccggcacugugcg

SEQ ID NO: 1273338 - RNA, 19 nt, Artificial Sequence
  Description of Artificial Sequence: Synthetic oligonucleotide
acugaaauacagaucuggg

SEQ ID NO: 1273339 - RNA, 19 nt, Artificial Sequence
  Description of Artificial Sequence: Synthetic oligonucleotide
ugcaguacucggcaaaggu

SEQ ID NO: 1273340 - RNA, 19 nt, Artificial Sequence
  Description of Artificial Sequence: Synthetic oligonucleotide
agguaaagcuggcuccugc

SEQ ID NO: 1273341 - RNA, 19 nt, Artificial Sequence
  Description of Artificial Sequence: Synthetic oligonucleotide
aucucugucaaaagggagg

SEQ ID NO: 1273342 - RNA, 19 nt, Artificial Sequence
  Description of Artificial Sequence: Synthetic oligonucleotide
gaaccuccaagaauaaggc

SEQ ID NO: 1273343 - RNA, 19 nt, Artificial Sequence
  Description of Artificial Sequence: Synthetic oligonucleotide
uucuaaucucugucaaaag

SEQ ID NO: 1273344 - RNA, 19 nt, Artificial Sequence
  Description of Artificial Sequence: Synthetic oligonucleotide
ucugucaaaagggagguua

SEQ ID NO: 1273345 - RNA, 19 nt, Artificial Sequence
  Description of Artificial Sequence: Synthetic oligonucleotide
uggaaagucgacgggaggc

SEQ ID NO: 1273346 - RNA, 19 nt, Artificial Sequence
  Description of Artificial Sequence: Synthetic oligonucleotide
aaaagccuugaguccagga

SEQ ID NO: 1273347 - RNA, 19 nt, Artificial Sequence
  Description of Artificial Sequence: Synthetic oligonucleotide
gauguaaauuagugcaauc

SEQ ID NO: 1273348 - RNA, 19 nt, Artificial Sequence
  Description of Artificial Sequence: Synthetic oligonucleotide
cuguacuaaccccagugcc

SEQ ID NO: 1273349 - RNA, 19 nt, Artificial Sequence
  Description of Artificial Sequence: Synthetic oligonucleotide
ucugccagccucuuacuug

SEQ ID NO: 1273350 - RNA, 19 nt, Artificial Sequence
  Description of Artificial Sequence: Synthetic oligonucleotide
uccacaucuaagagauucc

SEQ ID NO: 1273351 - RNA, 19 nt, Artificial Sequence
  Description of Artificial Sequence: Synthetic oligonucleotide
ucacugggauguaaauuag

SEQ ID NO: 1273352 - RNA, 19 nt, Artificial Sequence
  Description of Artificial Sequence: Synthetic oligonucleotide
acugggauguaaauuagug

SEQ ID NO: 1273353 - RNA, 19 nt, Artificial Sequence
  Description of Artificial Sequence: Synthetic oligonucleotide
ugcuagaucugcagaaccu

SEQ ID NO: 1273354 - RNA, 19 nt, Artificial Sequence
  Description of Artificial Sequence: Synthetic oligonucleotide
gagguuaggaaagguaccc

SEQ ID NO: 1273355 - RNA, 19 nt, Artificial Sequence
  Description of Artificial Sequence: Synthetic oligonucleotide
uacuucuaaucucugucaa

SEQ ID NO: 1273356 - RNA, 19 nt, Artificial Sequence
  Description of Artificial Sequence: Synthetic oligonucleotide
aaccacaggccagcaaccc

SEQ ID NO: 1273357 - RNA, 19 nt, Artificial Sequence
  Description of Artificial Sequence: Synthetic oligonucleotide
cuuucggcugggaaggccc

SEQ ID NO: 1273358 - RNA, 19 nt, Artificial Sequence
  Description of Artificial Sequence: Synthetic oligonucleotide
gaguagucugaagaugggg

SEQ ID NO: 1273359 - RNA, 19 nt, Artificial Sequence
  Description of Artificial Sequence: Synthetic oligonucleotide
acauggauuauacuuccau

SEQ ID NO: 1273360 - RNA, 19 nt, Artificial Sequence
  Description of Artificial Sequence: Synthetic oligonucleotide
aggcagauacgacaagcuc

SEQ ID NO: 1273361 - RNA, 19 nt, Artificial Sequence
  Description of Artificial Sequence: Synthetic oligonucleotide
agcugcauuuucauguucg

SEQ ID NO: 1273362 - RNA, 19 nt, Artificial Sequence
  Description of Artificial Sequence: Synthetic oligonucleotide
ugaccaguacucugggaag

SEQ ID NO: 1273363 - RNA, 19 nt, Artificial Sequence
  Description of Artificial Sequence: Synthetic oligonucleotide
uucccuuuggggcugggac

SEQ ID NO: 1273364 - RNA, 19 nt, Artificial Sequence
  Description of Artificial Sequence: Synthetic oligonucleotide
aagucgacgggaggcagac

SEQ ID NO: 1273365 - RNA, 19 nt, Artificial Sequence
  Description of Artificial Sequence: Synthetic oligonucleotide
aucaggagcaaucaaucua

SEQ ID NO: 1273366 - RNA, 19 nt, Artificial Sequence
  Description of Artificial Sequence: Synthetic oligonucleotide
ccgaguaugagcaugaaga

SEQ ID NO: 1273367 - RNA, 19 nt, Artificial Sequence
  Description of Artificial Sequence: Synthetic oligonucleotide
aggagcaaucaaucuaucu

SEQ ID NO: 1273368 - RNA, 19 nt, Artificial Sequence
  Description of Artificial Sequence: Synthetic oligonucleotide
ugcaagagguuucccagaa

SEQ ID NO: 1273369 - RNA, 19 nt, Artificial Sequence
  Description of Artificial Sequence: Synthetic oligonucleotide
ugucaaaagggagguuagg

SEQ ID NO: 1273370 - RNA, 19 nt, Artificial Sequence
  Description of Artificial Sequence: Synthetic oligonucleotide
aaagccagggaaaagccuu

SEQ ID NO: 1273371 - RNA, 19 nt, Artificial Sequence
  Description of Artificial Sequence: Synthetic oligonucleotide
cacccuagaacgagcaggc

SEQ ID NO: 1273372 - RNA, 19 nt, Artificial Sequence
  Description of Artificial Sequence: Synthetic oligonucleotide
cuugacucauggagcaagc

SEQ ID NO: 1273373 - RNA, 19 nt, Artificial Sequence
  Description of Artificial Sequence: Synthetic oligonucleotide
ccuagaacgagcaggcucc

SEQ ID NO: 1273374 - RNA, 19 nt, Artificial Sequence
  Description of Artificial Sequence: Synthetic oligonucleotide
auggcacagaaucugcagu

SEQ ID NO: 1273375 - RNA, 19 nt, Artificial Sequence
  Description of Artificial Sequence: Synthetic oligonucleotide
uggccccuuaaccaagugc

SEQ ID NO: 1273376 - RNA, 19 nt, Artificial Sequence
  Description of Artificial Sequence: Synthetic oligonucleotide
agguuaggaaagguacccc

SEQ ID NO: 1273377 - RNA, 19 nt, Artificial Sequence
  Description of Artificial Sequence: Synthetic oligonucleotide
guacuucuaaucucuguca

SEQ ID NO: 1273378 - RNA, 19 nt, Artificial Sequence
  Description of Artificial Sequence: Synthetic oligonucleotide
cucggcaaagguuagcaca

SEQ ID NO: 1273379 - RNA, 19 nt, Artificial Sequence
  Description of Artificial Sequence: Synthetic oligonucleotide
ggcagauacgacaagcucc

SEQ ID NO: 1273380 - RNA, 19 nt, Artificial Sequence
  Description of Artificial Sequence: Synthetic oligonucleotide
gucgacgggaggcagacac

SEQ ID NO: 1273381 - RNA, 19 nt, Artificial Sequence
  Description of Artificial Sequence: Synthetic oligonucleotide
cuucuaagaaucaggaccu

SEQ ID NO: 1273382 - RNA, 19 nt, Artificial Sequence
  Description of Artificial Sequence: Synthetic oligonucleotide
agagugaguggcugcagcu

SEQ ID NO: 1273383 - RNA, 19 nt, Artificial Sequence
  Description of Artificial Sequence: Synthetic oligonucleotide
caaucuaucuucuaagaau

SEQ ID NO: 1273384 - RNA, 19 nt, Artificial Sequence
  Description of Artificial Sequence: Synthetic oligonucleotide
ugauacaguguugauucuc

SEQ ID NO: 1273385 - RNA, 19 nt, Artificial Sequence
  Description of Artificial Sequence: Synthetic oligonucleotide
gguaagggguggcagggcg

SEQ ID NO: 1273386 - RNA, 19 nt, Artificial Sequence
  Description of Artificial Sequence: Synthetic oligonucleotide
agauuccaaaagcauuuaa

SEQ ID NO: 1273387 - RNA, 19 nt, Artificial Sequence
  Description of Artificial Sequence: Synthetic oligonucleotide
cuucuaaucucugucaaaa

SEQ ID NO: 1273388 - RNA, 19 nt, Artificial Sequence
  Description of Artificial Sequence: Synthetic oligonucleotide
uuaaccucugaagccuuca

SEQ ID NO: 1273389 - RNA, 19 nt, Artificial Sequence
  Description of Artificial Sequence: Synthetic oligonucleotide
cagacuguacuaaccccag

SEQ ID NO: 1273390 - RNA, 19 nt, Artificial Sequence
  Description of Artificial Sequence: Synthetic oligonucleotide
acgacaagcuccauguuga

SEQ ID NO: 1273391 - RNA, 19 nt, Artificial Sequence
  Description of Artificial Sequence: Synthetic oligonucleotide
uccuagagugaguggcugc

SEQ ID NO: 1273392 - RNA, 19 nt, Artificial Sequence
  Description of Artificial Sequence: Synthetic oligonucleotide
ccuuaauggaaagucgacg

SEQ ID NO: 1273393 - RNA, 19 nt, Artificial Sequence
  Description of Artificial Sequence: Synthetic oligonucleotide
uacaaaagaugagggguaa

SEQ ID NO: 1273394 - RNA, 19 nt, Artificial Sequence
  Description of Artificial Sequence: Synthetic oligonucleotide
acaaaacuuuaaccucuga

SEQ ID NO: 1273395 - RNA, 19 nt, Artificial Sequence
  Description of Artificial Sequence: Synthetic oligonucleotide
aggauccguguccuccggc

SEQ ID NO: 1273396 - RNA, 19 nt, Artificial Sequence
  Description of Artificial Sequence: Synthetic oligonucleotide
gcaagaggcagauacgaca

SEQ ID NO: 1273397 - RNA, 19 nt, Artificial Sequence
  Description of Artificial Sequence: Synthetic oligonucleotide
gaaagucgacgggaggcag

SEQ ID NO: 1273398 - RNA, 19 nt, Artificial Sequence
  Description of Artificial Sequence: Synthetic oligonucleotide
uugacucauggagcaagcc

SEQ ID NO: 1273399 - RNA, 19 nt, Artificial Sequence
  Description of Artificial Sequence: Synthetic oligonucleotide
uggcggcaaaggaacacca

SEQ ID NO: 1273400 - RNA, 19 nt, Artificial Sequence
  Description of Artificial Sequence: Synthetic oligonucleotide
ugauuucaggugggugugg

SEQ ID NO: 1273401 - RNA, 19 nt, Artificial Sequence
  Description of Artificial Sequence: Synthetic oligonucleotide
caguacucggcaaagguua

SEQ ID NO: 1273402 - RNA, 19 nt, Artificial Sequence
  Description of Artificial Sequence: Synthetic oligonucleotide
uccuagcuccuagagugag

SEQ ID NO: 1273403 - RNA, 19 nt, Artificial Sequence
  Description of Artificial Sequence: Synthetic oligonucleotide
acaaaagaugagggguaag

SEQ ID NO: 1273404 - RNA, 19 nt, Artificial Sequence
  Description of Artificial Sequence: Synthetic oligonucleotide
uucucacugggauguaaau

SEQ ID NO: 1273405 - RNA, 19 nt, Artificial Sequence
  Description of Artificial Sequence: Synthetic oligonucleotide
gggagguuaggaaagguac

SEQ ID NO: 1273406 - RNA, 19 nt, Artificial Sequence
  Description of Artificial Sequence: Synthetic oligonucleotide
acuaaccccagugccaacu

SEQ ID NO: 1273407 - RNA, 19 nt, Artificial Sequence
  Description of Artificial Sequence: Synthetic oligonucleotide
cccaucacccaucaggagc

SEQ ID NO: 1273408 - RNA, 19 nt, Artificial Sequence
  Description of Artificial Sequence: Synthetic oligonucleotide
caacccauggccccuuaac

SEQ ID NO: 1273409 - RNA, 19 nt, Artificial Sequence
  Description of Artificial Sequence: Synthetic oligonucleotide
ucucacugggauguaaauu

SEQ ID NO: 1273410 - RNA, 19 nt, Artificial Sequence
  Description of Artificial Sequence: Synthetic oligonucleotide
cagguccuagcuccuagag

SEQ ID NO: 1273411 - RNA, 19 nt, Artificial Sequence
  Description of Artificial Sequence: Synthetic oligonucleotide
cucucccgaaggcagcccg

SEQ ID NO: 1273412 - RNA, 19 nt, Artificial Sequence
  Description of Artificial Sequence: Synthetic oligonucleotide
cagggcuuccaaaacaaaa

SEQ ID NO: 1273413 - RNA, 19 nt, Artificial Sequence
  Description of Artificial Sequence: Synthetic oligonucleotide
uagcuccuagagugagugg

SEQ ID NO: 1273414 - RNA, 19 nt, Artificial Sequence
  Description of Artificial Sequence: Synthetic oligonucleotide
uuacuugucccuugcucuu

SEQ ID NO: 1273415 - RNA, 19 nt, Artificial Sequence
  Description of Artificial Sequence: Synthetic oligonucleotide
ucuuucggcugggaaggcc

SEQ ID NO: 1273416 - RNA, 19 nt, Artificial Sequence
  Description of Artificial Sequence: Synthetic oligonucleotide
agguccuagcuccuagagu

SEQ ID NO: 1273417 - RNA, 19 nt, Artificial Sequence
  Description of Artificial Sequence: Synthetic oligonucleotide
caugugugaaguucugcaa

SEQ ID NO: 1273418 - RNA, 19 nt, Artificial Sequence
  Description of Artificial Sequence: Synthetic oligonucleotide
ggauuauacuuccauugaa

SEQ ID NO: 1273419 - RNA, 19 nt, Artificial Sequence
  Description of Artificial Sequence: Synthetic oligonucleotide
ugcuucaagcagugucccc

SEQ ID NO: 1273420 - RNA, 19 nt, Artificial Sequence
  Description of Artificial Sequence: Synthetic oligonucleotide
ccaucaggagcaaucaauc

SEQ ID NO: 1273421 - RNA, 19 nt, Artificial Sequence
  Description of Artificial Sequence: Synthetic oligonucleotide
ccuuugguuugauuucagg

SEQ ID NO: 1273422 - RNA, 19 nt, Artificial Sequence
  Description of Artificial Sequence: Synthetic oligonucleotide
gcggcaaaggaacaccagc

SEQ ID NO: 1273423 - RNA, 19 nt, Artificial Sequence
  Description of Artificial Sequence: Synthetic oligonucleotide
ccuccaagaauaaggcaag

SEQ ID NO: 1273424 - RNA, 19 nt, Artificial Sequence
  Description of Artificial Sequence: Synthetic oligonucleotide
augagggguaagggguggc

SEQ ID NO: 1273425 - RNA, 19 nt, Artificial Sequence
  Description of Artificial Sequence: Synthetic oligonucleotide
gagcaugaagaggcuacug

SEQ ID NO: 1273426 - RNA, 19 nt, Artificial Sequence
  Description of Artificial Sequence: Synthetic oligonucleotide
cugugcuagaucugcagaa

SEQ ID NO: 1273427 - RNA, 19 nt, Artificial Sequence
  Description of Artificial Sequence: Synthetic oligonucleotide
aaagucgacgggaggcaga

SEQ ID NO: 1273428 - RNA, 19 nt, Artificial Sequence
  Description of Artificial Sequence: Synthetic oligonucleotide
agcuacugcagggguaaag

SEQ ID NO: 1273429 - RNA, 19 nt, Artificial Sequence
  Description of Artificial Sequence: Synthetic oligonucleotide
ucgacgggaggcagacacc

SEQ ID NO: 1273430 - RNA, 19 nt, Artificial Sequence
  Description of Artificial Sequence: Synthetic oligonucleotide
uucuaagaaucaggaccug

SEQ ID NO: 1273431 - RNA, 19 nt, Artificial Sequence
  Description of Artificial Sequence: Synthetic oligonucleotide
aguacucggcaaagguuag

SEQ ID NO: 1273432 - RNA, 19 nt, Artificial Sequence
  Description of Artificial Sequence: Synthetic oligonucleotide
ggagcaaucaaucuaucuu

SEQ ID NO: 1273433 - RNA, 19 nt, Artificial Sequence
  Description of Artificial Sequence: Synthetic oligonucleotide
aucuaucuucuaagaauca

SEQ ID NO: 1273434 - RNA, 19 nt, Artificial Sequence
  Description of Artificial Sequence: Synthetic oligonucleotide
aaugcagguccuagcuccu

SEQ ID NO: 1273435 - RNA, 19 nt, Artificial Sequence
  Description of Artificial Sequence: Synthetic oligonucleotide
cauggcggcaaaggaacac

SEQ ID NO: 1273436 - RNA, 19 nt, Artificial Sequence
  Description of Artificial Sequence: Synthetic oligonucleotide
guagcuacugcagggguaa

SEQ ID NO: 1273437 - RNA, 19 nt, Artificial Sequence
  Description of Artificial Sequence: Synthetic oligonucleotide
auggcggaagucauagaca

SEQ ID NO: 1273438 - RNA, 19 nt, Artificial Sequence
  Description of Artificial Sequence: Synthetic oligonucleotide
uuucggcugggaaggcccu

SEQ ID NO: 1273439 - RNA, 19 nt, Artificial Sequence
  Description of Artificial Sequence: Synthetic oligonucleotide
ggcgaggggagccacagca

SEQ ID NO: 1273440 - RNA, 19 nt, Artificial Sequence
  Description of Artificial Sequence: Synthetic oligonucleotide
cacaucuaagagauuccaa

SEQ ID NO: 1273441 - RNA, 19 nt, Artificial Sequence
  Description of Artificial Sequence: Synthetic oligonucleotide
agucauagacauggcggca

SEQ ID NO: 1273442 - RNA, 19 nt, Artificial Sequence
  Description of Artificial Sequence: Synthetic oligonucleotide
gcuagaucugcagaaccug

SEQ ID NO: 1273443 - RNA, 19 nt, Artificial Sequence
  Description of Artificial Sequence: Synthetic oligonucleotide
gggaaaagccuugagucca

SEQ ID NO: 1273444 - RNA, 19 nt, Artificial Sequence
  Description of Artificial Sequence: Synthetic oligonucleotide
gugccagacuguacuaacc

SEQ ID NO: 1273445 - RNA, 19 nt, Artificial Sequence
  Description of Artificial Sequence: Synthetic oligonucleotide
agacuguacuaaccccagu

SEQ ID NO: 1273446 - RNA, 19 nt, Artificial Sequence
  Description of Artificial Sequence: Synthetic oligonucleotide
gagucaugugugaaguucu

SEQ ID NO: 1273447 - RNA, 19 nt, Artificial Sequence
  Description of Artificial Sequence: Synthetic oligonucleotide
guggccccuuaauggaaag

SEQ ID NO: 1273448 - RNA, 19 nt, Artificial Sequence
  Description of Artificial Sequence: Synthetic oligonucleotide
ggacagggcuuccaaaaca

SEQ ID NO: 1273449 - RNA, 19 nt, Artificial Sequence
  Description of Artificial Sequence: Synthetic oligonucleotide
ucucccgaaggcagcccga

SEQ ID NO: 1273450 - RNA, 19 nt, Artificial Sequence
  Description of Artificial Sequence: Synthetic oligonucleotide
cucccuuguaaacacugaa

SEQ ID NO: 1273451 - RNA, 19 nt, Artificial Sequence
  Description of Artificial Sequence: Synthetic oligonucleotide
gccagacuguacuaacccc

SEQ ID NO: 1273452 - RNA, 19 nt, Artificial Sequence
  Description of Artificial Sequence: Synthetic oligonucleotide
uacuuccauugaaauucua

SEQ ID NO: 1273453 - RNA, 19 nt, Artificial Sequence
  Description of Artificial Sequence: Synthetic oligonucleotide
agucaugugugaaguucug

SEQ ID NO: 1273454 - RNA, 19 nt, Artificial Sequence
  Description of Artificial Sequence: Synthetic oligonucleotide
guacuaaccccagugccaa

SEQ ID NO: 1273455 - RNA, 19 nt, Artificial Sequence
  Description of Artificial Sequence: Synthetic oligonucleotide
gaaucaggaccuggaccug

SEQ ID NO: 1273456 - RNA, 19 nt, Artificial Sequence
  Description of Artificial Sequence: Synthetic oligonucleotide
gccccuuaauggaaagucg

SEQ ID NO: 1273457 - RNA, 19 nt, Artificial Sequence
  Description of Artificial Sequence: Synthetic oligonucleotide
gugcuucaagcaguguccc

SEQ ID NO: 1273458 - RNA, 19 nt, Artificial Sequence
  Description of Artificial Sequence: Synthetic oligonucleotide
aaggguccacugccacucu

SEQ ID NO: 1273459 - RNA, 19 nt, Artificial Sequence
  Description of Artificial Sequence: Synthetic oligonucleotide
ccagacuguacuaacccca

SEQ ID NO: 1273460 - RNA, 19 nt, Artificial Sequence
  Description of Artificial Sequence: Synthetic oligonucleotide
gcaccagugcugucuuucg

SEQ ID NO: 1273461 - RNA, 19 nt, Artificial Sequence
  Description of Artificial Sequence: Synthetic oligonucleotide
gagugaguggcugcagcuc

SEQ ID NO: 1273462 - RNA, 19 nt, Artificial Sequence
  Description of Artificial Sequence: Synthetic oligonucleotide
gggguaagggguggcaggg

SEQ ID NO: 1273463 - RNA, 19 nt, Artificial Sequence
  Description of Artificial Sequence: Synthetic oligonucleotide
cauggauuauacuuccauu

SEQ ID NO: 1273464 - RNA, 19 nt, Artificial Sequence
  Description of Artificial Sequence: Synthetic oligonucleotide
cuccuagagugaguggcug

SEQ ID NO: 1273465 - RNA, 19 nt, Artificial Sequence
  Description of Artificial Sequence: Synthetic oligonucleotide
aguacucugggaagccaga

SEQ ID NO: 1273466 - RNA, 19 nt, Artificial Sequence
  Description of Artificial Sequence: Synthetic oligonucleotide
gacugaugccuuccucuaa

SEQ ID NO: 1273467 - RNA, 19 nt, Artificial Sequence
  Description of Artificial Sequence: Synthetic oligonucleotide
auggccccuuaaccaagug

SEQ ID NO: 1273468 - RNA, 19 nt, Artificial Sequence
  Description of Artificial Sequence: Synthetic oligonucleotide
gacugauacaguguugauu

SEQ ID NO: 1273469 - RNA, 19 nt, Artificial Sequence
  Description of Artificial Sequence: Synthetic oligonucleotide
cccuagaacgagcaggcuc

SEQ ID NO: 1273470 - RNA, 19 nt, Artificial Sequence
  Description of Artificial Sequence: Synthetic oligonucleotide
cacucucccgaaggcagcc

SEQ ID NO: 1273471 - RNA, 19 nt, Artificial Sequence
  Description of Artificial Sequence: Synthetic oligonucleotide
uagccugugccagacugua

SEQ ID NO: 1273472 - RNA, 19 nt, Artificial Sequence
  Description of Artificial Sequence: Synthetic oligonucleotide
acugaaaaugcagguccua

SEQ ID NO: 1273473 - RNA, 19 nt, Artificial Sequence
  Description of Artificial Sequence: Synthetic oligonucleotide
caucaggagcaaucaaucu

SEQ ID NO: 1273474 - RNA, 19 nt, Artificial Sequence
  Description of Artificial Sequence: Synthetic oligonucleotide
ggcagcacccuagaacgag

SEQ ID NO: 1273475 - RNA, 19 nt, Artificial Sequence
  Description of Artificial Sequence: Synthetic oligonucleotide
caggauccguguccuccgg

SEQ ID NO: 1273476 - RNA, 19 nt, Artificial Sequence
  Description of Artificial Sequence: Synthetic oligonucleotide
ugcgguguggugggguaga

SEQ ID NO: 1273477 - RNA, 19 nt, Artificial Sequence
  Description of Artificial Sequence: Synthetic oligonucleotide
cugccacucugccagccuc

SEQ ID NO: 1273478 - RNA, 19 nt, Artificial Sequence
  Description of Artificial Sequence: Synthetic oligonucleotide
cuagaacgagcaggcuccc

SEQ ID NO: 1273479 - RNA, 19 nt, Artificial Sequence
  Description of Artificial Sequence: Synthetic oligonucleotide
guacucggcaaagguuagc

SEQ ID NO: 1273480 - RNA, 19 nt, Artificial Sequence
  Description of Artificial Sequence: Synthetic oligonucleotide
cagcacccuagaacgagca

SEQ ID NO: 1273481 - RNA, 19 nt, Artificial Sequence
  Description of Artificial Sequence: Synthetic oligonucleotide
aucuuucccuuuggggcug

SEQ ID NO: 1273482 - RNA, 19 nt, Artificial Sequence
  Description of Artificial Sequence: Synthetic oligonucleotide
aguagcuacugcaggggua

SEQ ID NO: 1273483 - RNA, 19 nt, Artificial Sequence
  Description of Artificial Sequence: Synthetic oligonucleotide
ucggcugggaaggcccuca

SEQ ID NO: 1273484 - RNA, 19 nt, Artificial Sequence
  Description of Artificial Sequence: Synthetic oligonucleotide
auacgacaagcuccauguu

SEQ ID NO: 1273485 - RNA, 19 nt, Artificial Sequence
  Description of Artificial Sequence: Synthetic oligonucleotide
ccuuaaccaagugcugugc

SEQ ID NO: 1273486 - RNA, 19 nt, Artificial Sequence
  Description of Artificial Sequence: Synthetic oligonucleotide
uacuaaccccagugccaac

SEQ ID NO: 1273487 - RNA, 19 nt, Artificial Sequence
  Description of Artificial Sequence: Synthetic oligonucleotide
cccgaguaugagcaugaag

SEQ ID NO: 1273488 - RNA, 19 nt, Artificial Sequence
  Description of Artificial Sequence: Synthetic oligonucleotide
cagcccgaguaugagcaug

SEQ ID NO: 1273489 - RNA, 19 nt, Artificial Sequence
  Description of Artificial Sequence: Synthetic oligonucleotide
uggccccuuaauggaaagu

SEQ ID NO: 1273490 - RNA, 19 nt, Artificial Sequence
  Description of Artificial Sequence: Synthetic oligonucleotide
agcccgaguaugagcauga

SEQ ID NO: 1273491 - RNA, 19 nt, Artificial Sequence
  Description of Artificial Sequence: Synthetic oligonucleotide
ggccccuuaaccaagugcu

SEQ ID NO: 1273492 - RNA, 19 nt, Artificial Sequence
  Description of Artificial Sequence: Synthetic oligonucleotide
cacccaucaggagcaauca

SEQ ID NO: 1273493 - RNA, 19 nt, Artificial Sequence
  Description of Artificial Sequence: Synthetic oligonucleotide
augggugggcccggucaac

SEQ ID NO: 1273494 - RNA, 19 nt, Artificial Sequence
  Description of Artificial Sequence: Synthetic oligonucleotide
cuguggacugauacagugu

SEQ ID NO: 1273495 - RNA, 19 nt, Artificial Sequence
  Description of Artificial Sequence: Synthetic oligonucleotide
ggaaagucgacgggaggca

SEQ ID NO: 1273496 - RNA, 19 nt, Artificial Sequence
  Description of Artificial Sequence: Synthetic oligonucleotide
ggaggugccagggcuuugc

SEQ ID NO: 1273497 - RNA, 19 nt, Artificial Sequence
  Description of Artificial Sequence: Synthetic oligonucleotide
gggauguaaauuagugcaa

SEQ ID NO: 1273498 - RNA, 19 nt, Artificial Sequence
  Description of Artificial Sequence: Synthetic oligonucleotide
guaagggguggcagggcga

SEQ ID NO: 1273499 - RNA, 19 nt, Artificial Sequence
  Description of Artificial Sequence: Synthetic oligonucleotide
gagucucaucuccuuuccu

SEQ ID NO: 1273500 - RNA, 19 nt, Artificial Sequence
  Description of Artificial Sequence: Synthetic oligonucleotide
ugggcccggucaacuugug

SEQ ID NO: 1273501 - RNA, 19 nt, Artificial Sequence
  Description of Artificial Sequence: Synthetic oligonucleotide
aggaugcggccauggcgga

SEQ ID NO: 1273502 - RNA, 19 nt, Artificial Sequence
  Description of Artificial Sequence: Synthetic oligonucleotide
ggauguaaauuagugcaau

SEQ ID NO: 1273503 - RNA, 19 nt, Artificial Sequence
  Description of Artificial Sequence: Synthetic oligonucleotide
gcaagagguuucccagaac

SEQ ID NO: 1273504 - RNA, 19 nt, Artificial Sequence
  Description of Artificial Sequence: Synthetic oligonucleotide
gcugucuuucggcugggaa

SEQ ID NO: 1273505 - RNA, 19 nt, Artificial Sequence
  Description of Artificial Sequence: Synthetic oligonucleotide
ccauggccccuuaaccaag

SEQ ID NO: 1273506 - RNA, 19 nt, Artificial Sequence
  Description of Artificial Sequence: Synthetic oligonucleotide
cacuguagccugugccaga

SEQ ID NO: 1273507 - RNA, 19 nt, Artificial Sequence
  Description of Artificial Sequence: Synthetic oligonucleotide
ggcgcuuggccauggcaca

SEQ ID NO: 1273508 - RNA, 19 nt, Artificial Sequence
  Description of Artificial Sequence: Synthetic oligonucleotide
gugcgguguggugggguag

SEQ ID NO: 1273509 - RNA, 19 nt, Artificial Sequence
  Description of Artificial Sequence: Synthetic oligonucleotide
agggaagcagugggucaca

SEQ ID NO: 1273510 - RNA, 19 nt, Artificial Sequence
  Description of Artificial Sequence: Synthetic oligonucleotide
gucuuucggcugggaaggc

SEQ ID NO: 1273511 - RNA, 19 nt, Artificial Sequence
  Description of Artificial Sequence: Synthetic oligonucleotide
gagcaggcucccaaagggu

SEQ ID NO: 1273512 - RNA, 19 nt, Artificial Sequence
  Description of Artificial Sequence: Synthetic oligonucleotide
caguagcuacugcaggggu

SEQ ID NO: 1273513 - RNA, 19 nt, Artificial Sequence
  Description of Artificial Sequence: Synthetic oligonucleotide
cggcgcuuggccauggcac

SEQ ID NO: 1273514 - RNA, 19 nt, Artificial Sequence
  Description of Artificial Sequence: Synthetic oligonucleotide
auaaggcaagaggcagaua

SEQ ID NO: 1273515 - RNA, 19 nt, Artificial Sequence
  Description of Artificial Sequence: Synthetic oligonucleotide
guccuagcuccuagaguga

SEQ ID NO: 1273516 - RNA, 19 nt, Artificial Sequence
  Description of Artificial Sequence: Synthetic oligonucleotide
gccuugaguccaggaagag

SEQ ID NO: 1273517 - RNA, 19 nt, Artificial Sequence
  Description of Artificial Sequence: Synthetic oligonucleotide
ugccuccuaggagucucau

SEQ ID NO: 1273518 - RNA, 19 nt, Artificial Sequence
  Description of Artificial Sequence: Synthetic oligonucleotide
gcccggucaacuugugcca

SEQ ID NO: 1273519 - RNA, 19 nt, Artificial Sequence
  Description of Artificial Sequence: Synthetic oligonucleotide
cauggccccuuaaccaagu

SEQ ID NO: 1273520 - RNA, 19 nt, Artificial Sequence
  Description of Artificial Sequence: Synthetic oligonucleotide
gggcccggucaacuugugc

SEQ ID NO: 1273521 - RNA, 19 nt, Artificial Sequence
  Description of Artificial Sequence: Synthetic oligonucleotide
cccaucaggagcaaucaau

SEQ ID NO: 1273522 - RNA, 19 nt, Artificial Sequence
  Description of Artificial Sequence: Synthetic oligonucleotide
caggcucccaaagggucca

SEQ ID NO: 1273523 - RNA, 19 nt, Artificial Sequence
  Description of Artificial Sequence: Synthetic oligonucleotide
aggcucccaaaggguccac

SEQ ID NO: 1273524 - RNA, 19 nt, Artificial Sequence
  Description of Artificial Sequence: Synthetic oligonucleotide
uucggcugggaaggcccuc

SEQ ID NO: 1273525 - RNA, 19 nt, Artificial Sequence
  Description of Artificial Sequence: Synthetic oligonucleotide
accccagugccaacugaaa

SEQ ID NO: 1273526 - RNA, 19 nt, Artificial Sequence
  Description of Artificial Sequence: Synthetic oligonucleotide
guggugggguagaguaguc

SEQ ID NO: 1273527 - RNA, 19 nt, Artificial Sequence
  Description of Artificial Sequence: Synthetic oligonucleotide
ccugccuccuaggagucuc

SEQ ID NO: 1273528 - RNA, 19 nt, Artificial Sequence
  Description of Artificial Sequence: Synthetic oligonucleotide
ggcggaagucauagacaug

SEQ ID NO: 1273529 - RNA, 19 nt, Artificial Sequence
  Description of Artificial Sequence: Synthetic oligonucleotide
ccucccuuguaaacacuga

SEQ ID NO: 1273530 - RNA, 19 nt, Artificial Sequence
  Description of Artificial Sequence: Synthetic oligonucleotide
agcaacccauggccccuua

SEQ ID NO: 1273531 - RNA, 19 nt, Artificial Sequence
  Description of Artificial Sequence: Synthetic oligonucleotide
gguggccccuuaauggaaa

SEQ ID NO: 1273532 - RNA, 19 nt, Artificial Sequence
  Description of Artificial Sequence: Synthetic oligonucleotide
uagcuacugcagggguaaa

SEQ ID NO: 1273533 - RNA, 19 nt, Artificial Sequence
  Description of Artificial Sequence: Synthetic oligonucleotide
gccuccuaggagucucauc

SEQ ID NO: 1273534 - RNA, 19 nt, Artificial Sequence
  Description of Artificial Sequence: Synthetic oligonucleotide
cucuugacucauggagcaa

SEQ ID NO: 1273535 - RNA, 19 nt, Artificial Sequence
  Description of Artificial Sequence: Synthetic oligonucleotide
gccccuuaaccaagugcug

SEQ ID NO: 1273536 - RNA, 19 nt, Artificial Sequence
  Description of Artificial Sequence: Synthetic oligonucleotide
accucggcgcuuggccaug

SEQ ID NO: 1273537 - RNA, 19 nt, Artificial Sequence
  Description of Artificial Sequence: Synthetic oligonucleotide
agucgacgggaggcagaca

SEQ ID NO: 1273538 - RNA, 19 nt, Artificial Sequence
  Description of Artificial Sequence: Synthetic oligonucleotide
ccuaggagucucaucuccu

SEQ ID NO: 1273539 - RNA, 19 nt, Artificial Sequence
  Description of Artificial Sequence: Synthetic oligonucleotide
cccggucaacuugugccag

SEQ ID NO: 1273540 - RNA, 19 nt, Artificial Sequence
  Description of Artificial Sequence: Synthetic oligonucleotide
gugggcccggucaacuugu

SEQ ID NO: 1273541 - RNA, 19 nt, Artificial Sequence
  Description of Artificial Sequence: Synthetic oligonucleotide
cgacaagcuccauguugac

SEQ ID NO: 1273542 - RNA, 19 nt, Artificial Sequence
  Description of Artificial Sequence: Synthetic oligonucleotide
ggacugauacaguguugau

SEQ ID NO: 1273543 - RNA, 19 nt, Artificial Sequence
  Description of Artificial Sequence: Synthetic oligonucleotide
augcagguccuagcuccua

SEQ ID NO: 1273544 - RNA, 19 nt, Artificial Sequence
  Description of Artificial Sequence: Synthetic oligonucleotide
cucugccagccucuuacuu

SEQ ID NO: 1273545 - RNA, 19 nt, Artificial Sequence
  Description of Artificial Sequence: Synthetic oligonucleotide
gcgaggggagccacagcac

SEQ ID NO: 1273546 - RNA, 19 nt, Artificial Sequence
  Description of Artificial Sequence: Synthetic oligonucleotide
cguguccuccggcacugug

SEQ ID NO: 1273547 - RNA, 19 nt, Artificial Sequence
  Description of Artificial Sequence: Synthetic oligonucleotide
ccucaccucggcgcuuggc

SEQ ID NO: 1273548 - RNA, 19 nt, Artificial Sequence
  Description of Artificial Sequence: Synthetic oligonucleotide
ggguggccccuuaauggaa

SEQ ID NO: 1273549 - RNA, 19 nt, Artificial Sequence
  Description of Artificial Sequence: Synthetic oligonucleotide
ccuccggcacugugcggug

SEQ ID NO: 1273550 - RNA, 19 nt, Artificial Sequence
  Description of Artificial Sequence: Synthetic oligonucleotide
ccauguugaccaguacucu

SEQ ID NO: 1273551 - RNA, 19 nt, Artificial Sequence
  Description of Artificial Sequence: Synthetic oligonucleotide
ccccuuaaccaagugcugu

SEQ ID NO: 1273552 - RNA, 19 nt, Artificial Sequence
  Description of Artificial Sequence: Synthetic oligonucleotide
caccucggcgcuuggccau

SEQ ID NO: 1273553 - RNA, 19 nt, Artificial Sequence
  Description of Artificial Sequence: Synthetic oligonucleotide
ccauggcggaagucauaga

SEQ ID NO: 1273554 - RNA, 19 nt, Artificial Sequence
  Description of Artificial Sequence: Synthetic oligonucleotide
ccuagcuccuagagugagu

SEQ ID NO: 1273555 - RNA, 19 nt, Artificial Sequence
  Description of Artificial Sequence: Synthetic oligonucleotide
ggaugcggccauggcggaa

SEQ ID NO: 1273556 - RNA, 19 nt, Artificial Sequence
  Description of Artificial Sequence: Synthetic oligonucleotide
cccucaccucggcgcuugg

SEQ ID NO: 1273557 - RNA, 19 nt, Artificial Sequence
  Description of Artificial Sequence: Synthetic oligonucleotide
gcccgaguaugagcaugaa

SEQ ID NO: 1273558 - RNA, 19 nt, Artificial Sequence
  Description of Artificial Sequence: Synthetic oligonucleotide
cagauacgacaagcuccau

SEQ ID NO: 1273559 - RNA, 19 nt, Artificial Sequence
  Description of Artificial Sequence: Synthetic oligonucleotide
cuccggcacugugcggugu

SEQ ID NO: 1273560 - RNA, 19 nt, Artificial Sequence
  Description of Artificial Sequence: Synthetic oligonucleotide
cagcaacccauggccccuu

SEQ ID NO: 1273561 - RNA, 19 nt, Artificial Sequence
  Description of Artificial Sequence: Synthetic oligonucleotide
cggcaaagguuagcacaua

SEQ ID NO: 1273562 - RNA, 19 nt, Artificial Sequence
  Description of Artificial Sequence: Synthetic oligonucleotide
ccguguccuccggcacugu

SEQ ID NO: 1273563 - RNA, 19 nt, Artificial Sequence
  Description of Artificial Sequence: Synthetic oligonucleotide
aauuggauagcccacaccg

SEQ ID NO: 1273564 - RNA, 19 nt, Artificial Sequence
  Description of Artificial Sequence: Synthetic oligonucleotide
ucaaauauccuauagucgg

SEQ ID NO: 1273565 - RNA, 19 nt, Artificial Sequence
  Description of Artificial Sequence: Synthetic oligonucleotide
aaggcauucaaccaagccc

SEQ ID NO: 1273566 - RNA, 19 nt, Artificial Sequence
  Description of Artificial Sequence: Synthetic oligonucleotide
aauuuuacccucuauuaac

SEQ ID NO: 1273567 - RNA, 19 nt, Artificial Sequence
  Description of Artificial Sequence: Synthetic oligonucleotide
aacuuuaagccccuaaggg

SEQ ID NO: 1273568 - RNA, 19 nt, Artificial Sequence
  Description of Artificial Sequence: Synthetic oligonucleotide
aaacaugaacuccagguac

SEQ ID NO: 1273569 - RNA, 19 nt, Artificial Sequence
  Description of Artificial Sequence: Synthetic oligonucleotide
ucgaguaucacacagaguc

SEQ ID NO: 1273570 - RNA, 19 nt, Artificial Sequence
  Description of Artificial Sequence: Synthetic oligonucleotide
aaaucuuggcaccugcccc

SEQ ID NO: 1273571 - RNA, 19 nt, Artificial Sequence
  Description of Artificial Sequence: Synthetic oligonucleotide
aaaggcauucaaccaagcc

SEQ ID NO: 1273572 - RNA, 19 nt, Artificial Sequence
  Description of Artificial Sequence: Synthetic oligonucleotide
acuuuaagccccuaagggc

SEQ ID NO: 1273573 - RNA, 19 nt, Artificial Sequence
  Description of Artificial Sequence: Synthetic oligonucleotide
ucuauuaacagccgccuag

SEQ ID NO: 1273574 - RNA, 19 nt, Artificial Sequence
  Description of Artificial Sequence: Synthetic oligonucleotide
agagggacaaaucaggaag

SEQ ID NO: 1273575 - RNA, 19 nt, Artificial Sequence
  Description of Artificial Sequence: Synthetic oligonucleotide
ugguguaucucuuuggucc

SEQ ID NO: 1273576 - RNA, 19 nt, Artificial Sequence
  Description of Artificial Sequence: Synthetic oligonucleotide
uuugguuaccauauggugu

SEQ ID NO: 1273577 - RNA, 19 nt, Artificial Sequence
  Description of Artificial Sequence: Synthetic oligonucleotide
aguacagcuccguagcacc

SEQ ID NO: 1273578 - RNA, 19 nt, Artificial Sequence
  Description of Artificial Sequence: Synthetic oligonucleotide
ugcuuaaguacauaguaca

SEQ ID NO: 1273579 - RNA, 19 nt, Artificial Sequence
  Description of Artificial Sequence: Synthetic oligonucleotide
uuaacagccgccuagggaa

SEQ ID NO: 1273580 - RNA, 19 nt, Artificial Sequence
  Description of Artificial Sequence: Synthetic oligonucleotide
guuguuaaagcuguccucg

SEQ ID NO: 1273581 - RNA, 19 nt, Artificial Sequence
  Description of Artificial Sequence: Synthetic oligonucleotide
uuggauagcccacaccggg

SEQ ID NO: 1273582 - RNA, 19 nt, Artificial Sequence
  Description of Artificial Sequence: Synthetic oligonucleotide
aaaucaggaagcugggaca

SEQ ID NO: 1273583 - RNA, 19 nt, Artificial Sequence
  Description of Artificial Sequence: Synthetic oligonucleotide
ucgagggauacaaaguugc

SEQ ID NO: 1273584 - RNA, 19 nt, Artificial Sequence
  Description of Artificial Sequence: Synthetic oligonucleotide
aagcucaaauauccuauag

SEQ ID NO: 1273585 - RNA, 19 nt, Artificial Sequence
  Description of Artificial Sequence: Synthetic oligonucleotide
agggauacaaaguugcugu

SEQ ID NO: 1273586 - RNA, 19 nt, Artificial Sequence
  Description of Artificial Sequence: Synthetic oligonucleotide
aggcauucaaccaagcccc

SEQ ID NO: 1273587 - RNA, 19 nt, Artificial Sequence
  Description of Artificial Sequence: Synthetic oligonucleotide
aaacuggguguucuccagc

SEQ ID NO: 1273588 - RNA, 19 nt, Artificial Sequence
  Description of Artificial Sequence: Synthetic oligonucleotide
uuuacccucuauuaacagc

SEQ ID NO: 1273589 - RNA, 19 nt, Artificial Sequence
  Description of Artificial Sequence: Synthetic oligonucleotide
agaauuuuacccucuauua

SEQ ID NO: 1273590 - RNA, 19 nt, Artificial Sequence
  Description of Artificial Sequence: Synthetic oligonucleotide
cuuguuaagcucaaauauc

SEQ ID NO: 1273591 - RNA, 19 nt, Artificial Sequence
  Description of Artificial Sequence: Synthetic oligonucleotide
cuuuauccgcaucaugucg

SEQ ID NO: 1273592 - RNA, 19 nt, Artificial Sequence
  Description of Artificial Sequence: Synthetic oligonucleotide
caugucgucaaacaugaac

SEQ ID NO: 1273593 - RNA, 19 nt, Artificial Sequence
  Description of Artificial Sequence: Synthetic oligonucleotide
auaaaccccaggcucagag

SEQ ID NO: 1273594 - RNA, 19 nt, Artificial Sequence
  Description of Artificial Sequence: Synthetic oligonucleotide
ucuaccuggcuggagagcg

SEQ ID NO: 1273595 - RNA, 19 nt, Artificial Sequence
  Description of Artificial Sequence: Synthetic oligonucleotide
uaccauaugguguaugccu

SEQ ID NO: 1273596 - RNA, 19 nt, Artificial Sequence
  Description of Artificial Sequence: Synthetic oligonucleotide
gaguaucacacagagucgg

SEQ ID NO: 1273597 - RNA, 19 nt, Artificial Sequence
  Description of Artificial Sequence: Synthetic oligonucleotide
ugugacgugggguucuccg

SEQ ID NO: 1273598 - RNA, 19 nt, Artificial Sequence
  Description of Artificial Sequence: Synthetic oligonucleotide
uauccuauagucgguuugg

SEQ ID NO: 1273599 - RNA, 19 nt, Artificial Sequence
  Description of Artificial Sequence: Synthetic oligonucleotide
ucucucauuugucuucugc

SEQ ID NO: 1273600 - RNA, 19 nt, Artificial Sequence
  Description of Artificial Sequence: Synthetic oligonucleotide
aguggcaaaagggaggauc

SEQ ID NO: 1273601 - RNA, 19 nt, Artificial Sequence
  Description of Artificial Sequence: Synthetic oligonucleotide
agaguggaauuggauagcc

SEQ ID NO: 1273602 - RNA, 19 nt, Artificial Sequence
  Description of Artificial Sequence: Synthetic oligonucleotide
uguggguauaaaccccagg

SEQ ID NO: 1273603 - RNA, 19 nt, Artificial Sequence
  Description of Artificial Sequence: Synthetic oligonucleotide
gauuugcucucuuggcugg

SEQ ID NO: 1273604 - RNA, 19 nt, Artificial Sequence
  Description of Artificial Sequence: Synthetic oligonucleotide
uugagaguggaauuggaua

SEQ ID NO: 1273605 - RNA, 19 nt, Artificial Sequence
  Description of Artificial Sequence: Synthetic oligonucleotide
cuggagagcgcgaaggugc

SEQ ID NO: 1273606 - RNA, 19 nt, Artificial Sequence
  Description of Artificial Sequence: Synthetic oligonucleotide
ugggacacccagaaccugg

SEQ ID NO: 1273607 - RNA, 19 nt, Artificial Sequence
  Description of Artificial Sequence: Synthetic oligonucleotide
aggaucccagaauuuuacc

SEQ ID NO: 1273608 - RNA, 19 nt, Artificial Sequence
  Description of Artificial Sequence: Synthetic oligonucleotide
auauccuauagucgguuug

SEQ ID NO: 1273609 - RNA, 19 nt, Artificial Sequence
  Description of Artificial Sequence: Synthetic oligonucleotide
aaagaacucagucgugaaa

SEQ ID NO: 1273610 - RNA, 19 nt, Artificial Sequence
  Description of Artificial Sequence: Synthetic oligonucleotide
auuaacagccgccuaggga

SEQ ID NO: 1273611 - RNA, 19 nt, Artificial Sequence
  Description of Artificial Sequence: Synthetic oligonucleotide
agcucaaauauccuauagu

SEQ ID NO: 1273612 - RNA, 19 nt, Artificial Sequence
  Description of Artificial Sequence: Synthetic oligonucleotide
caugaguccaguuccuccc

SEQ ID NO: 1273613 - RNA, 19 nt, Artificial Sequence
  Description of Artificial Sequence: Synthetic oligonucleotide
uaugaguucucggugcugc

SEQ ID NO: 1273614 - RNA, 19 nt, Artificial Sequence
  Description of Artificial Sequence: Synthetic oligonucleotide
ucgucgucaaugccguugg

SEQ ID NO: 1273615 - RNA, 19 nt, Artificial Sequence
  Description of Artificial Sequence: Synthetic oligonucleotide
ucuguagccgcuuguuaag

SEQ ID NO: 1273616 - RNA, 19 nt, Artificial Sequence
  Description of Artificial Sequence: Synthetic oligonucleotide
cuauagucgguuugguuac

SEQ ID NO: 1273617 - RNA, 19 nt, Artificial Sequence
  Description of Artificial Sequence: Synthetic oligonucleotide
uugguuaccauauggugua

SEQ ID NO: 1273618 - RNA, 19 nt, Artificial Sequence
  Description of Artificial Sequence: Synthetic oligonucleotide
caaugguguaucucuuugg

SEQ ID NO: 1273619 - RNA, 19 nt, Artificial Sequence
  Description of Artificial Sequence: Synthetic oligonucleotide
uuggccgcgucaaacuggg

SEQ ID NO: 1273620 - RNA, 19 nt, Artificial Sequence
  Description of Artificial Sequence: Synthetic oligonucleotide
uucuguagccgcuuguuaa

SEQ ID NO: 1273621 - RNA, 19 nt, Artificial Sequence
  Description of Artificial Sequence: Synthetic oligonucleotide
uaaguggcaaaagggagga

SEQ ID NO: 1273622 - RNA, 19 nt, Artificial Sequence
  Description of Artificial Sequence: Synthetic oligonucleotide
acccucuauuaacagccgc

SEQ ID NO: 1273623 - RNA, 19 nt, Artificial Sequence
  Description of Artificial Sequence: Synthetic oligonucleotide
uaguugagaguggaauugg

SEQ ID NO: 1273624 - RNA, 19 nt, Artificial Sequence
  Description of Artificial Sequence: Synthetic oligonucleotide
acaucuaccuggcuggaga

SEQ ID NO: 1273625 - RNA, 19 nt, Artificial Sequence
  Description of Artificial Sequence: Synthetic oligonucleotide
guaguugagaguggaauug

SEQ ID NO: 1273626 - RNA, 19 nt, Artificial Sequence
  Description of Artificial Sequence: Synthetic oligonucleotide
aauauccuauagucgguuu

SEQ ID NO: 1273627 - RNA, 19 nt, Artificial Sequence
  Description of Artificial Sequence: Synthetic oligonucleotide
ucgugaaagcaucccacca

SEQ ID NO: 1273628 - RNA, 19 nt, Artificial Sequence
  Description of Artificial Sequence: Synthetic oligonucleotide
gaauuggauagcccacacc

SEQ ID NO: 1273629 - RNA, 19 nt, Artificial Sequence
  Description of Artificial Sequence: Synthetic oligonucleotide
cauggguuugccgugcugg

SEQ ID NO: 1273630 - RNA, 19 nt, Artificial Sequence
  Description of Artificial Sequence: Synthetic oligonucleotide
cuccgauuugcucucuugg

SEQ ID NO: 1273631 - RNA, 19 nt, Artificial Sequence
  Description of Artificial Sequence: Synthetic oligonucleotide
gacaaaucaggaagcuggg

SEQ ID NO: 1273632 - RNA, 19 nt, Artificial Sequence
  Description of Artificial Sequence: Synthetic oligonucleotide
aucaugucgucaaacauga

SEQ ID NO: 1273633 - RNA, 19 nt, Artificial Sequence
  Description of Artificial Sequence: Synthetic oligonucleotide
ucuuuauccgcaucauguc

SEQ ID NO: 1273634 - RNA, 19 nt, Artificial Sequence
  Description of Artificial Sequence: Synthetic oligonucleotide
uccgauuugcucucuuggc

SEQ ID NO: 1273635 - RNA, 19 nt, Artificial Sequence
  Description of Artificial Sequence: Synthetic oligonucleotide
cuauuaacagccgccuagg

SEQ ID NO: 1273636 - RNA, 19 nt, Artificial Sequence
  Description of Artificial Sequence: Synthetic oligonucleotide
uuaaagcuguccucgucgu

SEQ ID NO: 1273637 - RNA, 19 nt, Artificial Sequence
  Description of Artificial Sequence: Synthetic oligonucleotide
agucgagggauacaaaguu

SEQ ID NO: 1273638 - RNA, 19 nt, Artificial Sequence
  Description of Artificial Sequence: Synthetic oligonucleotide
uuucuuuacugggaggccu

SEQ ID NO: 1273639 - RNA, 19 nt, Artificial Sequence
  Description of Artificial Sequence: Synthetic oligonucleotide
uguggcgugacaugaguuc

SEQ ID NO: 1273640 - RNA, 19 nt, Artificial Sequence
  Description of Artificial Sequence: Synthetic oligonucleotide
uuaccauaugguguaugcc

SEQ ID NO: 1273641 - RNA, 19 nt, Artificial Sequence
  Description of Artificial Sequence: Synthetic oligonucleotide
uucuuuacugggaggccug

SEQ ID NO: 1273642 - RNA, 19 nt, Artificial Sequence
  Description of Artificial Sequence: Synthetic oligonucleotide
uuuaagccccuaagggcug

SEQ ID NO: 1273643 - RNA, 19 nt, Artificial Sequence
  Description of Artificial Sequence: Synthetic oligonucleotide
uccagccgagugaugagcc

SEQ ID NO: 1273644 - RNA, 19 nt, Artificial Sequence
  Description of Artificial Sequence: Synthetic oligonucleotide
aggguuaggacaucucaga

SEQ ID NO: 1273645 - RNA, 19 nt, Artificial Sequence
  Description of Artificial Sequence: Synthetic oligonucleotide
auuuuacccucuauuaaca

SEQ ID NO: 1273646 - RNA, 19 nt, Artificial Sequence
  Description of Artificial Sequence: Synthetic oligonucleotide
uuacugggaggccugugac

SEQ ID NO: 1273647 - RNA, 19 nt, Artificial Sequence
  Description of Artificial Sequence: Synthetic oligonucleotide
guagcgugggaucaggguc

SEQ ID NO: 1273648 - RNA, 19 nt, Artificial Sequence
  Description of Artificial Sequence: Synthetic oligonucleotide
uaaguacauaguacagcuc

SEQ ID NO: 1273649 - RNA, 19 nt, Artificial Sequence
  Description of Artificial Sequence: Synthetic oligonucleotide
uccugcaugggcucgagua

SEQ ID NO: 1273650 - RNA, 19 nt, Artificial Sequence
  Description of Artificial Sequence: Synthetic oligonucleotide
ucuuguggcgugacaugag

SEQ ID NO: 1273651 - RNA, 19 nt, Artificial Sequence
  Description of Artificial Sequence: Synthetic oligonucleotide
ugcugccggauacugaagu

SEQ ID NO: 1273652 - RNA, 19 nt, Artificial Sequence
  Description of Artificial Sequence: Synthetic oligonucleotide
aguacauaguacagcuccg

SEQ ID NO: 1273653 - RNA, 19 nt, Artificial Sequence
  Description of Artificial Sequence: Synthetic oligonucleotide
cuguggaaugccuccuugg

SEQ ID NO: 1273654 - RNA, 19 nt, Artificial Sequence
  Description of Artificial Sequence: Synthetic oligonucleotide
cuuggggugcuuaaguaca

SEQ ID NO: 1273655 - RNA, 19 nt, Artificial Sequence
  Description of Artificial Sequence: Synthetic oligonucleotide
caaaguugcuguggaaugc

SEQ ID NO: 1273656 - RNA, 19 nt, Artificial Sequence
  Description of Artificial Sequence: Synthetic oligonucleotide
cuguuggcgcccaaugcgg

SEQ ID NO: 1273657 - RNA, 19 nt, Artificial Sequence
  Description of Artificial Sequence: Synthetic oligonucleotide
aaauauccuauagucgguu

SEQ ID NO: 1273658 - RNA, 19 nt, Artificial Sequence
  Description of Artificial Sequence: Synthetic oligonucleotide
uacccucuauuaacagccg

SEQ ID NO: 1273659 - RNA, 19 nt, Artificial Sequence
  Description of Artificial Sequence: Synthetic oligonucleotide
cuuuaagccccuaagggcu

SEQ ID NO: 1273660 - RNA, 19 nt, Artificial Sequence
  Description of Artificial Sequence: Synthetic oligonucleotide
gcgugcauggccaagaugc

SEQ ID NO: 1273661 - RNA, 19 nt, Artificial Sequence
  Description of Artificial Sequence: Synthetic oligonucleotide
guaucucuuugguccaucc

SEQ ID NO: 1273662 - RNA, 19 nt, Artificial Sequence
  Description of Artificial Sequence: Synthetic oligonucleotide
gcuguuggcgcccaaugcg

SEQ ID NO: 1273663 - RNA, 19 nt, Artificial Sequence
  Description of Artificial Sequence: Synthetic oligonucleotide
ugaguucucggugcugccg

SEQ ID NO: 1273664 - RNA, 19 nt, Artificial Sequence
  Description of Artificial Sequence: Synthetic oligonucleotide
gcucgaguaucacacagag

SEQ ID NO: 1273665 - RNA, 19 nt, Artificial Sequence
  Description of Artificial Sequence: Synthetic oligonucleotide
ggugcuuaaguacauagua

SEQ ID NO: 1273666 - RNA, 19 nt, Artificial Sequence
  Description of Artificial Sequence: Synthetic oligonucleotide
ucuccgauuugcucucuug

SEQ ID NO: 1273667 - RNA, 19 nt, Artificial Sequence
  Description of Artificial Sequence: Synthetic oligonucleotide
ucagucgugaaagcauccc

SEQ ID NO: 1273668 - RNA, 19 nt, Artificial Sequence
  Description of Artificial Sequence: Synthetic oligonucleotide
guguaugccucccuauccc

SEQ ID NO: 1273669 - RNA, 19 nt, Artificial Sequence
  Description of Artificial Sequence: Synthetic oligonucleotide
gugaacauggguuugccgu

SEQ ID NO: 1273670 - RNA, 19 nt, Artificial Sequence
  Description of Artificial Sequence: Synthetic oligonucleotide
accauaugguguaugccuc

SEQ ID NO: 1273671 - RNA, 19 nt, Artificial Sequence
  Description of Artificial Sequence: Synthetic oligonucleotide
gucgugaaagcaucccacc

SEQ ID NO: 1273672 - RNA, 19 nt, Artificial Sequence
  Description of Artificial Sequence: Synthetic oligonucleotide
gaguuguuaaagcuguccu

SEQ ID NO: 1273673 - RNA, 19 nt, Artificial Sequence
  Description of Artificial Sequence: Synthetic oligonucleotide
ggguauaaaccccaggcuc

SEQ ID NO: 1273674 - RNA, 19 nt, Artificial Sequence
  Description of Artificial Sequence: Synthetic oligonucleotide
gaggaucccagaauuuuac

SEQ ID NO: 1273675 - RNA, 19 nt, Artificial Sequence
  Description of Artificial Sequence: Synthetic oligonucleotide
cucagucgugaaagcaucc

SEQ ID NO: 1273676 - RNA, 19 nt, Artificial Sequence
  Description of Artificial Sequence: Synthetic oligonucleotide
ugggaggccugugacgugg

SEQ ID NO: 1273677 - RNA, 19 nt, Artificial Sequence
  Description of Artificial Sequence: Synthetic oligonucleotide
gaacuccccgcccaucgag

SEQ ID NO: 1273678 - RNA, 19 nt, Artificial Sequence
  Description of Artificial Sequence: Synthetic oligonucleotide
gguguaugccucccuaucc

SEQ ID NO: 1273679 - RNA, 19 nt, Artificial Sequence
  Description of Artificial Sequence: Synthetic oligonucleotide
ccccauaacuuuaagcccc

SEQ ID NO: 1273680 - RNA, 19 nt, Artificial Sequence
  Description of Artificial Sequence: Synthetic oligonucleotide
auggguuugccgugcuggg

SEQ ID NO: 1273681 - RNA, 19 nt, Artificial Sequence
  Description of Artificial Sequence: Synthetic oligonucleotide
agaaagugauggucaacau

SEQ ID NO: 1273682 - RNA, 19 nt, Artificial Sequence
  Description of Artificial Sequence: Synthetic oligonucleotide
agauugucacacuccucug

SEQ ID NO: 1273683 - RNA, 19 nt, Artificial Sequence
  Description of Artificial Sequence: Synthetic oligonucleotide
uccuggguaugaguucucg

SEQ ID NO: 1273684 - RNA, 19 nt, Artificial Sequence
  Description of Artificial Sequence: Synthetic oligonucleotide
ugguguaugccucccuauc

SEQ ID NO: 1273685 - RNA, 19 nt, Artificial Sequence
  Description of Artificial Sequence: Synthetic oligonucleotide
agcaucccaccagagauug

SEQ ID NO: 1273686 - RNA, 19 nt, Artificial Sequence
  Description of Artificial Sequence: Synthetic oligonucleotide
uggguguucuccagccgag

SEQ ID NO: 1273687 - RNA, 19 nt, Artificial Sequence
  Description of Artificial Sequence: Synthetic oligonucleotide
gugaaagcaucccaccaga

SEQ ID NO: 1273688 - RNA, 19 nt, Artificial Sequence
  Description of Artificial Sequence: Synthetic oligonucleotide
gugcuuaaguacauaguac

SEQ ID NO: 1273689 - RNA, 19 nt, Artificial Sequence
  Description of Artificial Sequence: Synthetic oligonucleotide
gaacucagucgugaaagca

SEQ ID NO: 1273690 - RNA, 19 nt, Artificial Sequence
  Description of Artificial Sequence: Synthetic oligonucleotide
auuggauagcccacaccgg

SEQ ID NO: 1273691 - RNA, 19 nt, Artificial Sequence
  Description of Artificial Sequence: Synthetic oligonucleotide
gucuuuauccgcaucaugu

SEQ ID NO: 1273692 - RNA, 19 nt, Artificial Sequence
  Description of Artificial Sequence: Synthetic oligonucleotide
guuugcugggcugcugucg

SEQ ID NO: 1273693 - RNA, 19 nt, Artificial Sequence
  Description of Artificial Sequence: Synthetic oligonucleotide
aguugcuguggaaugccuc

SEQ ID NO: 1273694 - RNA, 19 nt, Artificial Sequence
  Description of Artificial Sequence: Synthetic oligonucleotide
uuguuaaagcuguccucgu

SEQ ID NO: 1273695 - RNA, 19 nt, Artificial Sequence
  Description of Artificial Sequence: Synthetic oligonucleotide
gagaguggaauuggauagc

SEQ ID NO: 1273696 - RNA, 19 nt, Artificial Sequence
  Description of Artificial Sequence: Synthetic oligonucleotide
ggugaacauggguuugccg

SEQ ID NO: 1273697 - RNA, 19 nt, Artificial Sequence
  Description of Artificial Sequence: Synthetic oligonucleotide
uggauagcccacaccgggu

SEQ ID NO: 1273698 - RNA, 19 nt, Artificial Sequence
  Description of Artificial Sequence: Synthetic oligonucleotide
cugccggauacugaagugc

SEQ ID NO: 1273699 - RNA, 19 nt, Artificial Sequence
  Description of Artificial Sequence: Synthetic oligonucleotide
ggguuaggacaucucagag

SEQ ID NO: 1273700 - RNA, 19 nt, Artificial Sequence
  Description of Artificial Sequence: Synthetic oligonucleotide
ucgguuugguuaccauaug

SEQ ID NO: 1273701 - RNA, 19 nt, Artificial Sequence
  Description of Artificial Sequence: Synthetic oligonucleotide
cauaugguguaugccuccc

SEQ ID NO: 1273702 - RNA, 19 nt, Artificial Sequence
  Description of Artificial Sequence: Synthetic oligonucleotide
agucgguuugguuaccaua

SEQ ID NO: 1273703 - RNA, 19 nt, Artificial Sequence
  Description of Artificial Sequence: Synthetic oligonucleotide
acacacaccugggugaaca

SEQ ID NO: 1273704 - RNA, 19 nt, Artificial Sequence
  Description of Artificial Sequence: Synthetic oligonucleotide
ugcggaaguagcgugggau

SEQ ID NO: 1273705 - RNA, 19 nt, Artificial Sequence
  Description of Artificial Sequence: Synthetic oligonucleotide
aacauggguuugccgugcu

SEQ ID NO: 1273706 - RNA, 19 nt, Artificial Sequence
  Description of Artificial Sequence: Synthetic oligonucleotide
caaccggcccuccacacac

SEQ ID NO: 1273707 - RNA, 19 nt, Artificial Sequence
  Description of Artificial Sequence: Synthetic oligonucleotide
cauaacuuuaagccccuaa

SEQ ID NO: 1273708 - RNA, 19 nt, Artificial Sequence
  Description of Artificial Sequence: Synthetic oligonucleotide
uaguacagcuccguagcac

SEQ ID NO: 1273709 - RNA, 19 nt, Artificial Sequence
  Description of Artificial Sequence: Synthetic oligonucleotide
guuggccgcgucaaacugg

SEQ ID NO: 1273710 - RNA, 19 nt, Artificial Sequence
  Description of Artificial Sequence: Synthetic oligonucleotide
gaaguggauggauggaggu

SEQ ID NO: 1273711 - RNA, 19 nt, Artificial Sequence
  Description of Artificial Sequence: Synthetic oligonucleotide
acagagucggagguaguug

SEQ ID NO: 1273712 - RNA, 19 nt, Artificial Sequence
  Description of Artificial Sequence: Synthetic oligonucleotide
ucccagaauuuuacccucu

SEQ ID NO: 1273713 - RNA, 19 nt, Artificial Sequence
  Description of Artificial Sequence: Synthetic oligonucleotide
guauaaaccccaggcucag

SEQ ID NO: 1273714 - RNA, 19 nt, Artificial Sequence
  Description of Artificial Sequence: Synthetic oligonucleotide
aucuaccuggcuggagagc

SEQ ID NO: 1273715 - RNA, 19 nt, Artificial Sequence
  Description of Artificial Sequence: Synthetic oligonucleotide
agguugcccauuucagaug

SEQ ID NO: 1273716 - RNA, 19 nt, Artificial Sequence
  Description of Artificial Sequence: Synthetic oligonucleotide
cuguccaguucuguagccg

SEQ ID NO: 1273717 - RNA, 19 nt, Artificial Sequence
  Description of Artificial Sequence: Synthetic oligonucleotide
ugacgugggguucuccgau

SEQ ID NO: 1273718 - RNA, 19 nt, Artificial Sequence
  Description of Artificial Sequence: Synthetic oligonucleotide
aacuccccgcccaucgagg

SEQ ID NO: 1273719 - RNA, 19 nt, Artificial Sequence
  Description of Artificial Sequence: Synthetic oligonucleotide
gucgagggauacaaaguug

SEQ ID NO: 1273720 - RNA, 19 nt, Artificial Sequence
  Description of Artificial Sequence: Synthetic oligonucleotide
gaacauggguuugccgugc

SEQ ID NO: 1273721 - RNA, 19 nt, Artificial Sequence
  Description of Artificial Sequence: Synthetic oligonucleotide
ccuauagucgguuugguua

SEQ ID NO: 1273722 - RNA, 19 nt, Artificial Sequence
  Description of Artificial Sequence: Synthetic oligonucleotide
uccuuggggugcuuaagua

SEQ ID NO: 1273723 - RNA, 19 nt, Artificial Sequence
  Description of Artificial Sequence: Synthetic oligonucleotide
cagagucggagguaguuga

SEQ ID NO: 1273724 - RNA, 19 nt, Artificial Sequence
  Description of Artificial Sequence: Synthetic oligonucleotide
ugggugaacauggguuugc

SEQ ID NO: 1273725 - RNA, 19 nt, Artificial Sequence
  Description of Artificial Sequence: Synthetic oligonucleotide
uuauccgcaucaugucguc

SEQ ID NO: 1273726 - RNA, 19 nt, Artificial Sequence
  Description of Artificial Sequence: Synthetic oligonucleotide
cccucuauuaacagccgcc

SEQ ID NO: 1273727 - RNA, 19 nt, Artificial Sequence
  Description of Artificial Sequence: Synthetic oligonucleotide
caggguccggccaauggug

SEQ ID NO: 1273728 - RNA, 19 nt, Artificial Sequence
  Description of Artificial Sequence: Synthetic oligonucleotide
gucaacauggcaucauccu

SEQ ID NO: 1273729 - RNA, 19 nt, Artificial Sequence
  Description of Artificial Sequence: Synthetic oligonucleotide
uccuauagucgguuugguu

SEQ ID NO: 1273730 - RNA, 19 nt, Artificial Sequence
  Description of Artificial Sequence: Synthetic oligonucleotide
guggcgugacaugaguucc

SEQ ID NO: 1273731 - RNA, 19 nt, Artificial Sequence
  Description of Artificial Sequence: Synthetic oligonucleotide
uuguggcgugacaugaguu

SEQ ID NO: 1273732 - RNA, 19 nt, Artificial Sequence
  Description of Artificial Sequence: Synthetic oligonucleotide
gggcaaaugcccuggggag

SEQ ID NO: 1273733 - RNA, 19 nt, Artificial Sequence
  Description of Artificial Sequence: Synthetic oligonucleotide
ggccuuucuuuacugggag

SEQ ID NO: 1273734 - RNA, 19 nt, Artificial Sequence
  Description of Artificial Sequence: Synthetic oligonucleotide
ggcaaaucuuggcaccugc

SEQ ID NO: 1273735 - RNA, 19 nt, Artificial Sequence
  Description of Artificial Sequence: Synthetic oligonucleotide
gguacaaccggcccuccac

SEQ ID NO: 1273736 - RNA, 19 nt, Artificial Sequence
  Description of Artificial Sequence: Synthetic oligonucleotide
uacaaccggcccuccacac

SEQ ID NO: 1273737 - RNA, 19 nt, Artificial Sequence
  Description of Artificial Sequence: Synthetic oligonucleotide
aacagccgccuagggaaag

SEQ ID NO: 1273738 - RNA, 19 nt, Artificial Sequence
  Description of Artificial Sequence: Synthetic oligonucleotide
uggagagcgcgaaggugcu

SEQ ID NO: 1273739 - RNA, 19 nt, Artificial Sequence
  Description of Artificial Sequence: Synthetic oligonucleotide
ucgugcaggcuccgcagga

SEQ ID NO: 1273740 - RNA, 19 nt, Artificial Sequence
  Description of Artificial Sequence: Synthetic oligonucleotide
gggaaaggcauucaaccaa

SEQ ID NO: 1273741 - RNA, 19 nt, Artificial Sequence
  Description of Artificial Sequence: Synthetic oligonucleotide
uauagucgguuugguuacc

SEQ ID NO: 1273742 - RNA, 19 nt, Artificial Sequence
  Description of Artificial Sequence: Synthetic oligonucleotide
ggucuugaggcagucucgg

SEQ ID NO: 1273743 - RNA, 19 nt, Artificial Sequence
  Description of Artificial Sequence: Synthetic oligonucleotide
gucacacuccucuguccag

SEQ ID NO: 1273744 - RNA, 19 nt, Artificial Sequence
  Description of Artificial Sequence: Synthetic oligonucleotide
ggaauuggauagcccacac

SEQ ID NO: 1273745 - RNA, 19 nt, Artificial Sequence
  Description of Artificial Sequence: Synthetic oligonucleotide
gauagcccacaccggguga

SEQ ID NO: 1273746 - RNA, 19 nt, Artificial Sequence
  Description of Artificial Sequence: Synthetic oligonucleotide
cagaauuuuacccucuauu

SEQ ID NO: 1273747 - RNA, 19 nt, Artificial Sequence
  Description of Artificial Sequence: Synthetic oligonucleotide
ggccgcgucaaacugggug

SEQ ID NO: 1273748 - RNA, 19 nt, Artificial Sequence
  Description of Artificial Sequence: Synthetic oligonucleotide
cuguggguauaaaccccag

SEQ ID NO: 1273749 - RNA, 19 nt, Artificial Sequence
  Description of Artificial Sequence: Synthetic oligonucleotide
uguaucucuuugguccauc

SEQ ID NO: 1273750 - RNA, 19 nt, Artificial Sequence
  Description of Artificial Sequence: Synthetic oligonucleotide
uguaggucuuguggcguga

SEQ ID NO: 1273751 - RNA, 19 nt, Artificial Sequence
  Description of Artificial Sequence: Synthetic oligonucleotide
guggaauuggauagcccac

SEQ ID NO: 1273752 - RNA, 19 nt, Artificial Sequence
  Description of Artificial Sequence: Synthetic oligonucleotide
ggauggauggagguugccc

SEQ ID NO: 1273753 - RNA, 19 nt, Artificial Sequence
  Description of Artificial Sequence: Synthetic oligonucleotide
cucguccccgaacuccccg

SEQ ID NO: 1273754 - RNA, 19 nt, Artificial Sequence
  Description of Artificial Sequence: Synthetic oligonucleotide
uggcgugacaugaguuccu

SEQ ID NO: 1273755 - RNA, 19 nt, Artificial Sequence
  Description of Artificial Sequence: Synthetic oligonucleotide
gcucagagggacaaaucag

SEQ ID NO: 1273756 - RNA, 19 nt, Artificial Sequence
  Description of Artificial Sequence: Synthetic oligonucleotide
auagucgguuugguuacca

SEQ ID NO: 1273757 - RNA, 19 nt, Artificial Sequence
  Description of Artificial Sequence: Synthetic oligonucleotide
ggauagcccacaccgggug

SEQ ID NO: 1273758 - RNA, 19 nt, Artificial Sequence
  Description of Artificial Sequence: Synthetic oligonucleotide
ggugcugccggauacugaa

SEQ ID NO: 1273759 - RNA, 19 nt, Artificial Sequence
  Description of Artificial Sequence: Synthetic oligonucleotide
gucuuguggcgugacauga

SEQ ID NO: 1273760 - RNA, 19 nt, Artificial Sequence
  Description of Artificial Sequence: Synthetic oligonucleotide
gauggagguugcccauuuc

SEQ ID NO: 1273761 - RNA, 19 nt, Artificial Sequence
  Description of Artificial Sequence: Synthetic oligonucleotide
acaaccggcccuccacaca

SEQ ID NO: 1273762 - RNA, 19 nt, Artificial Sequence
  Description of Artificial Sequence: Synthetic oligonucleotide
uccccgcccaucgagggug

SEQ ID NO: 1273763 - RNA, 19 nt, Artificial Sequence
  Description of Artificial Sequence: Synthetic oligonucleotide
uaacagccgccuagggaaa

SEQ ID NO: 1273764 - RNA, 19 nt, Artificial Sequence
  Description of Artificial Sequence: Synthetic oligonucleotide
uccgcaucaugucgucaaa

SEQ ID NO: 1273765 - RNA, 19 nt, Artificial Sequence
  Description of Artificial Sequence: Synthetic oligonucleotide
aggccugugacgugggguu

SEQ ID NO: 1273766 - RNA, 19 nt, Artificial Sequence
  Description of Artificial Sequence: Synthetic oligonucleotide
gcaaaugcccuggggagag

SEQ ID NO: 1273767 - RNA, 19 nt, Artificial Sequence
  Description of Artificial Sequence: Synthetic oligonucleotide
guacaaccggcccuccaca

SEQ ID NO: 1273768 - RNA, 19 nt, Artificial Sequence
  Description of Artificial Sequence: Synthetic oligonucleotide
uauaaaccccaggcucaga

SEQ ID NO: 1273769 - RNA, 19 nt, Artificial Sequence
  Description of Artificial Sequence: Synthetic oligonucleotide
uauccgcaucaugucguca

SEQ ID NO: 1273770 - RNA, 19 nt, Artificial Sequence
  Description of Artificial Sequence: Synthetic oligonucleotide
ugggcucgaguaucacaca

SEQ ID NO: 1273771 - RNA, 19 nt, Artificial Sequence
  Description of Artificial Sequence: Synthetic oligonucleotide
uagucgguuugguuaccau

SEQ ID NO: 1273772 - RNA, 19 nt, Artificial Sequence
  Description of Artificial Sequence: Synthetic oligonucleotide
ccauaugguguaugccucc

SEQ ID NO: 1273773 - RNA, 19 nt, Artificial Sequence
  Description of Artificial Sequence: Synthetic oligonucleotide
cgaguaucacacagagucg

SEQ ID NO: 1273774 - RNA, 19 nt, Artificial Sequence
  Description of Artificial Sequence: Synthetic oligonucleotide
uugguccauccuccaggca

SEQ ID NO: 1273775 - RNA, 19 nt, Artificial Sequence
  Description of Artificial Sequence: Synthetic oligonucleotide
cgugaaagcaucccaccag

SEQ ID NO: 1273776 - RNA, 19 nt, Artificial Sequence
  Description of Artificial Sequence: Synthetic oligonucleotide
cuccgcaggaggugcuacc

SEQ ID NO: 1273777 - RNA, 19 nt, Artificial Sequence
  Description of Artificial Sequence: Synthetic oligonucleotide
uuugccgugcugggucacc

SEQ ID NO: 1273778 - RNA, 19 nt, Artificial Sequence
  Description of Artificial Sequence: Synthetic oligonucleotide
cuaccuggcuggagagcgc

SEQ ID NO: 1273779 - RNA, 19 nt, Artificial Sequence
  Description of Artificial Sequence: Synthetic oligonucleotide
cgauuugcucucuuggcug

SEQ ID NO: 1273780 - RNA, 19 nt, Artificial Sequence
  Description of Artificial Sequence: Synthetic oligonucleotide
uuaagccccuaagggcugu

SEQ ID NO: 1273781 - RNA, 19 nt, Artificial Sequence
  Description of Artificial Sequence: Synthetic oligonucleotide
gucgguuugguuaccauau

SEQ ID NO: 1273782 - RNA, 19 nt, Artificial Sequence
  Description of Artificial Sequence: Synthetic oligonucleotide
guaugaguucucggugcug

SEQ ID NO: 1273783 - RNA, 19 nt, Artificial Sequence
  Description of Artificial Sequence: Synthetic oligonucleotide
uggauggauggagguugcc

SEQ ID NO: 1273784 - RNA, 19 nt, Artificial Sequence
  Description of Artificial Sequence: Synthetic oligonucleotide
gguuaccauaugguguaug

SEQ ID NO: 1273785 - RNA, 19 nt, Artificial Sequence
  Description of Artificial Sequence: Synthetic oligonucleotide
ggguuugccgugcuggguc

SEQ ID NO: 1273786 - RNA, 19 nt, Artificial Sequence
  Description of Artificial Sequence: Synthetic oligonucleotide
ggguucuccgauuugcucu

SEQ ID NO: 1273787 - RNA, 19 nt, Artificial Sequence
  Description of Artificial Sequence: Synthetic oligonucleotide
uaccaugcgcugccacuuc

SEQ ID NO: 1273788 - RNA, 19 nt, Artificial Sequence
  Description of Artificial Sequence: Synthetic oligonucleotide
cugggugaacauggguuug

SEQ ID NO: 1273789 - RNA, 19 nt, Artificial Sequence
  Description of Artificial Sequence: Synthetic oligonucleotide
gcaggaggugcuaccaugc

SEQ ID NO: 1273790 - RNA, 19 nt, Artificial Sequence
  Description of Artificial Sequence: Synthetic oligonucleotide
ucacaucuaccuggcugga

SEQ ID NO: 1273791 - RNA, 19 nt, Artificial Sequence
  Description of Artificial Sequence: Synthetic oligonucleotide
uucuccgauuugcucucuu

SEQ ID NO: 1273792 - RNA, 19 nt, Artificial Sequence
  Description of Artificial Sequence: Synthetic oligonucleotide
gcugccggauacugaagug

SEQ ID NO: 1273793 - RNA, 19 nt, Artificial Sequence
  Description of Artificial Sequence: Synthetic oligonucleotide
auccuauagucgguuuggu

SEQ ID NO: 1273794 - RNA, 19 nt, Artificial Sequence
  Description of Artificial Sequence: Synthetic oligonucleotide
gugacgugggguucuccga

SEQ ID NO: 1273795 - RNA, 19 nt, Artificial Sequence
  Description of Artificial Sequence: Synthetic oligonucleotide
aagcaucccaccagagauu

SEQ ID NO: 1273796 - RNA, 19 nt, Artificial Sequence
  Description of Artificial Sequence: Synthetic oligonucleotide
cagucgagggauacaaagu

SEQ ID NO: 1273797 - RNA, 19 nt, Artificial Sequence
  Description of Artificial Sequence: Synthetic oligonucleotide
ccgaacuccccgcccaucg

SEQ ID NO: 1273798 - RNA, 19 nt, Artificial Sequence
  Description of Artificial Sequence: Synthetic oligonucleotide
ggaaguagcgugggaucag

SEQ ID NO: 1273799 - RNA, 19 nt, Artificial Sequence
  Description of Artificial Sequence: Synthetic oligonucleotide
cacaucuaccuggcuggag

SEQ ID NO: 1273800 - RNA, 19 nt, Artificial Sequence
  Description of Artificial Sequence: Synthetic oligonucleotide
acgugggguucuccgauuu

SEQ ID NO: 1273801 - RNA, 19 nt, Artificial Sequence
  Description of Artificial Sequence: Synthetic oligonucleotide
guugagaguggaauuggau

SEQ ID NO: 1273802 - RNA, 19 nt, Artificial Sequence
  Description of Artificial Sequence: Synthetic oligonucleotide
cuuguggcgugacaugagu

SEQ ID NO: 1273803 - RNA, 19 nt, Artificial Sequence
  Description of Artificial Sequence: Synthetic oligonucleotide
acuuuggagcuggguaagu

SEQ ID NO: 1273804 - RNA, 19 nt, Artificial Sequence
  Description of Artificial Sequence: Synthetic oligonucleotide
uggguuugccgugcugggu

SEQ ID NO: 1273805 - RNA, 19 nt, Artificial Sequence
  Description of Artificial Sequence: Synthetic oligonucleotide
cagcagggccuuucuuuac

SEQ ID NO: 1273806 - RNA, 19 nt, Artificial Sequence
  Description of Artificial Sequence: Synthetic oligonucleotide
cagccgagugaugagccuc

SEQ ID NO: 1273807 - RNA, 19 nt, Artificial Sequence
  Description of Artificial Sequence: Synthetic oligonucleotide
cugucgugcaggcuccgca

SEQ ID NO: 1273808 - RNA, 19 nt, Artificial Sequence
  Description of Artificial Sequence: Synthetic oligonucleotide
gcugcggaaguagcguggg

SEQ ID NO: 1273809 - RNA, 19 nt, Artificial Sequence
  Description of Artificial Sequence: Synthetic oligonucleotide
agcgugggaucaggguccg

SEQ ID NO: 1273810 - RNA, 19 nt, Artificial Sequence
  Description of Artificial Sequence: Synthetic oligonucleotide
auagcccacaccgggugau

SEQ ID NO: 1273811 - RNA, 19 nt, Artificial Sequence
  Description of Artificial Sequence: Synthetic oligonucleotide
guacauaguacagcuccgu

SEQ ID NO: 1273812 - RNA, 19 nt, Artificial Sequence
  Description of Artificial Sequence: Synthetic oligonucleotide
gagguaguugagaguggaa

SEQ ID NO: 1273813 - RNA, 19 nt, Artificial Sequence
  Description of Artificial Sequence: Synthetic oligonucleotide
guaggucuuguggcgugac

SEQ ID NO: 1273814 - RNA, 19 nt, Artificial Sequence
  Description of Artificial Sequence: Synthetic oligonucleotide
gcggaaguagcgugggauc

SEQ ID NO: 1273815 - RNA, 19 nt, Artificial Sequence
  Description of Artificial Sequence: Synthetic oligonucleotide
gggguucuccgauuugcuc

SEQ ID NO: 1273816 - RNA, 19 nt, Artificial Sequence
  Description of Artificial Sequence: Synthetic oligonucleotide
cucuauuaacagccgccua

SEQ ID NO: 1273817 - RNA, 19 nt, Artificial Sequence
  Description of Artificial Sequence: Synthetic oligonucleotide
gguaugaguucucggugcu

SEQ ID NO: 1273818 - RNA, 19 nt, Artificial Sequence
  Description of Artificial Sequence: Synthetic oligonucleotide
gcuggagagcgcgaaggug

SEQ ID NO: 1273819 - RNA, 19 nt, Artificial Sequence
  Description of Artificial Sequence: Synthetic oligonucleotide
ggucacagucgagggauac

SEQ ID NO: 1273820 - RNA, 19 nt, Artificial Sequence
  Description of Artificial Sequence: Synthetic oligonucleotide
cuggucacagucgagggau

SEQ ID NO: 1273821 - RNA, 19 nt, Artificial Sequence
  Description of Artificial Sequence: Synthetic oligonucleotide
ggcgugcauggccaagaug

SEQ ID NO: 1273822 - RNA, 19 nt, Artificial Sequence
  Description of Artificial Sequence: Synthetic oligonucleotide
aaguggcaaaagggaggau

SEQ ID NO: 1273823 - RNA, 19 nt, Artificial Sequence
  Description of Artificial Sequence: Synthetic oligonucleotide
caaaugcccuggggagagg

SEQ ID NO: 1273824 - RNA, 19 nt, Artificial Sequence
  Description of Artificial Sequence: Synthetic oligonucleotide
ccgagugaugagccucucg

SEQ ID NO: 1273825 - RNA, 19 nt, Artificial Sequence
  Description of Artificial Sequence: Synthetic oligonucleotide
agccgagugaugagccucu

SEQ ID NO: 1273826 - RNA, 19 nt, Artificial Sequence
  Description of Artificial Sequence: Synthetic oligonucleotide
gcuggcggggcucuucuuc

SEQ ID NO: 1273827 - RNA, 19 nt, Artificial Sequence
  Description of Artificial Sequence: Synthetic oligonucleotide
uggauggagguugcccauu

SEQ ID NO: 1273828 - RNA, 19 nt, Artificial Sequence
  Description of Artificial Sequence: Synthetic oligonucleotide
ugguuaccauaugguguau

SEQ ID NO: 1273829 - RNA, 19 nt, Artificial Sequence
  Description of Artificial Sequence: Synthetic oligonucleotide
ggcgugacaugaguuccug

SEQ ID NO: 1273830 - RNA, 19 nt, Artificial Sequence
  Description of Artificial Sequence: Synthetic oligonucleotide
gccgugcugggucaccaug

SEQ ID NO: 1273831 - RNA, 19 nt, Artificial Sequence
  Description of Artificial Sequence: Synthetic oligonucleotide
uagcccacaccgggugaug

SEQ ID NO: 1273832 - RNA, 19 nt, Artificial Sequence
  Description of Artificial Sequence: Synthetic oligonucleotide
gcgugacaugaguuccugc

SEQ ID NO: 1273833 - RNA, 19 nt, Artificial Sequence
  Description of Artificial Sequence: Synthetic oligonucleotide
ucaaugccguuggccgcgu

SEQ ID NO: 1273834 - RNA, 19 nt, Artificial Sequence
  Description of Artificial Sequence: Synthetic oligonucleotide
cucgaguaucacacagagu

SEQ ID NO: 1273835 - RNA, 19 nt, Artificial Sequence
  Description of Artificial Sequence: Synthetic oligonucleotide
gccgcgucaaacugggugu

SEQ ID NO: 1273836 - RNA, 19 nt, Artificial Sequence
  Description of Artificial Sequence: Synthetic oligonucleotide
cucucguccucguccccga

SEQ ID NO: 1273837 - RNA, 19 nt, Artificial Sequence
  Description of Artificial Sequence: Synthetic oligonucleotide
ccuccguuugcugggcugc

SEQ ID NO: 1273838 - RNA, 19 nt, Artificial Sequence
  Description of Artificial Sequence: Synthetic oligonucleotide
cgucaaugccguuggccgc

SEQ ID NO: 1273839 - RNA, 19 nt, Artificial Sequence
  Description of Artificial Sequence: Synthetic oligonucleotide
ugccguuggccgcgucaaa

SEQ ID NO: 1273840 - RNA, 19 nt, Artificial Sequence
  Description of Artificial Sequence: Synthetic oligonucleotide
gcuaccaugcgcugccacu

SEQ ID NO: 1273841 - RNA, 19 nt, Artificial Sequence
  Description of Artificial Sequence: Synthetic oligonucleotide
gggaucaggguccggccaa

SEQ ID NO: 1273842 - RNA, 19 nt, Artificial Sequence
  Description of Artificial Sequence: Synthetic oligonucleotide
ggcucgaguaucacacaga

SEQ ID NO: 1273843 - RNA, 19 nt, Artificial Sequence
  Description of Artificial Sequence: Synthetic oligonucleotide
agccgccuagggaaaggca

SEQ ID NO: 1273844 - RNA, 19 nt, Artificial Sequence
  Description of Artificial Sequence: Synthetic oligonucleotide
ugccgugcugggucaccau

SEQ ID NO: 1273845 - RNA, 19 nt, Artificial Sequence
  Description of Artificial Sequence: Synthetic oligonucleotide
uccauccuccaggcagaaa

SEQ ID NO: 1273846 - RNA, 19 nt, Artificial Sequence
  Description of Artificial Sequence: Synthetic oligonucleotide
gccguuggccgcgucaaac

SEQ ID NO: 1273847 - RNA, 19 nt, Artificial Sequence
  Description of Artificial Sequence: Synthetic oligonucleotide
cguuggccgcgucaaacug

SEQ ID NO: 1273848 - RNA, 19 nt, Artificial Sequence
  Description of Artificial Sequence: Synthetic oligonucleotide
caucgagggugggcucccc

SEQ ID NO: 1273849 - RNA, 19 nt, Artificial Sequence
  Description of Artificial Sequence: Synthetic oligonucleotide
agggcaacucuggggcaaa

SEQ ID NO: 1273850 - RNA, 19 nt, Artificial Sequence
  Description of Artificial Sequence: Synthetic oligonucleotide
ccgauuugcucucuuggcu

SEQ ID NO: 1273851 - RNA, 19 nt, Artificial Sequence
  Description of Artificial Sequence: Synthetic oligonucleotide
cggauacugaagugccaug

SEQ ID NO: 1273852 - RNA, 19 nt, Artificial Sequence
  Description of Artificial Sequence: Synthetic oligonucleotide
cagggcaacucuggggcaa

SEQ ID NO: 1273853 - RNA, 19 nt, Artificial Sequence
  Description of Artificial Sequence: Synthetic oligonucleotide
ccgcaucaugucgucaaac

SEQ ID NO: 1273854 - RNA, 19 nt, Artificial Sequence
  Description of Artificial Sequence: Synthetic oligonucleotide
uggccgcgucaaacugggu

SEQ ID NO: 1273855 - RNA, 19 nt, Artificial Sequence
  Description of Artificial Sequence: Synthetic oligonucleotide
gcgaaggugcuggcggggc

SEQ ID NO: 1273856 - RNA, 19 nt, Artificial Sequence
  Description of Artificial Sequence: Synthetic oligonucleotide
cugcggaaguagcguggga

SEQ ID NO: 1273857 - RNA, 19 nt, Artificial Sequence
  Description of Artificial Sequence: Synthetic oligonucleotide
gacgugggguucuccgauu

SEQ ID NO: 1273858 - RNA, 19 nt, Artificial Sequence
  Description of Artificial Sequence: Synthetic oligonucleotide
cuaccaugcgcugccacuu

SEQ ID NO: 1273859 - RNA, 19 nt, Artificial Sequence
  Description of Artificial Sequence: Synthetic oligonucleotide
cacagagucggagguaguu

SEQ ID NO: 1273860 - RNA, 19 nt, Artificial Sequence
  Description of Artificial Sequence: Synthetic oligonucleotide
caaugccguuggccgcguc

SEQ ID NO: 1273861 - RNA, 19 nt, Artificial Sequence
  Description of Artificial Sequence: Synthetic oligonucleotide
gcgucaaacuggguguucu

SEQ ID NO: 1273862 - RNA, 19 nt, Artificial Sequence
  Description of Artificial Sequence: Synthetic oligonucleotide
agccgcuuguuaagcucaa

SEQ ID NO: 1273863 - RNA, 19 nt, Artificial Sequence
  Description of Artificial Sequence: Synthetic oligonucleotide
ccggccaaugguguaucuc

SEQ ID NO: 1273864 - RNA, 19 nt, Artificial Sequence
  Description of Artificial Sequence: Synthetic oligonucleotide
ggcuggagagcgcgaaggu

SEQ ID NO: 1273865 - RNA, 19 nt, Artificial Sequence
  Description of Artificial Sequence: Synthetic oligonucleotide
ccucuauuaacagccgccu

SEQ ID NO: 1273866 - RNA, 19 nt, Artificial Sequence
  Description of Artificial Sequence: Synthetic oligonucleotide
ggauggagguugcccauuu

SEQ ID NO: 1273867 - RNA, 19 nt, Artificial Sequence
  Description of Artificial Sequence: Synthetic oligonucleotide
ccgcuuguuaagcucaaau

SEQ ID NO: 1273868 - RNA, 19 nt, Artificial Sequence
  Description of Artificial Sequence: Synthetic oligonucleotide
ccucguccccgaacucccc

SEQ ID NO: 1273869 - RNA, 19 nt, Artificial Sequence
  Description of Artificial Sequence: Synthetic oligonucleotide
ccugggugaacauggguuu

SEQ ID NO: 1273870 - RNA, 19 nt, Artificial Sequence
  Description of Artificial Sequence: Synthetic oligonucleotide
gccuagggaaaggcauuca

SEQ ID NO: 1273871 - RNA, 19 nt, Artificial Sequence
  Description of Artificial Sequence: Synthetic oligonucleotide
gccgccuagggaaaggcau

SEQ ID NO: 1273872 - RNA, 19 nt, Artificial Sequence
  Description of Artificial Sequence: Synthetic oligonucleotide
ccccuaagggcugugggua

SEQ ID NO: 1273873 - RNA, 19 nt, Artificial Sequence
  Description of Artificial Sequence: Synthetic oligonucleotide
ccagggcaacucuggggca

SEQ ID NO: 1273874 - RNA, 19 nt, Artificial Sequence
  Description of Artificial Sequence: Synthetic oligonucleotide
guguaucucuuugguccau

SEQ ID NO: 1273875 - RNA, 19 nt, Artificial Sequence
  Description of Artificial Sequence: Synthetic oligonucleotide
cgccuagggaaaggcauuc

SEQ ID NO: 1273876 - RNA, 19 nt, Artificial Sequence
  Description of Artificial Sequence: Synthetic oligonucleotide
ggguccggccaauggugua

SEQ ID NO: 1273877 - RNA, 19 nt, Artificial Sequence
  Description of Artificial Sequence: Synthetic oligonucleotide
cgcgaaggugcuggcgggg

SEQ ID NO: 1273878 - RNA, 19 nt, Artificial Sequence
  Description of Artificial Sequence: Synthetic oligonucleotide
gguccggccaaugguguau

SEQ ID NO: 1273879 - RNA, 19 nt, Artificial Sequence
  Description of Artificial Sequence: Synthetic oligonucleotide
guucucggugcugccggau

SEQ ID NO: 1273880 - RNA, 19 nt, Artificial Sequence
  Description of Artificial Sequence: Synthetic oligonucleotide
cucggugcugccggauacu

SEQ ID NO: 1273881 - RNA, 19 nt, Artificial Sequence
  Description of Artificial Sequence: Synthetic oligonucleotide
ggccugugacgugggguuc

SEQ ID NO: 1273882 - RNA, 19 nt, Artificial Sequence
  Description of Artificial Sequence: Synthetic oligonucleotide
ccggauacugaagugccau

SEQ ID NO: 1273883 - RNA, 19 nt, Artificial Sequence
  Description of Artificial Sequence: Synthetic oligonucleotide
gcccaucgagggugggcuc

SEQ ID NO: 1273884 - RNA, 19 nt, Artificial Sequence
  Description of Artificial Sequence: Synthetic oligonucleotide
ccguuggccgcgucaaacu

SEQ ID NO: 1273885 - RNA, 19 nt, Artificial Sequence
  Description of Artificial Sequence: Synthetic oligonucleotide
cuccccgcccaucgagggu

SEQ ID NO: 1273886 - RNA, 19 nt, Artificial Sequence
  Description of Artificial Sequence: Synthetic oligonucleotide
gccugugacgugggguucu

SEQ ID NO: 1273887 - RNA, 19 nt, Artificial Sequence
  Description of Artificial Sequence: Synthetic oligonucleotide
gccgagugaugagccucuc

SEQ ID NO: 1273888 - RNA, 19 nt, Artificial Sequence
  Description of Artificial Sequence: Synthetic oligonucleotide
cuccguuugcugggcugcu

SEQ ID NO: 1273889 - RNA, 19 nt, Artificial Sequence
  Description of Artificial Sequence: Synthetic oligonucleotide
gccgcuuguuaagcucaaa

SEQ ID NO: 1273890 - RNA, 19 nt, Artificial Sequence
  Description of Artificial Sequence: Synthetic oligonucleotide
gcgugggaucaggguccgg

SEQ ID NO: 1273891 - RNA, 19 nt, Artificial Sequence
  Description of Artificial Sequence: Synthetic oligonucleotide
cgaacuccccgcccaucga

SEQ ID NO: 1273892 - RNA, 19 nt, Artificial Sequence
  Description of Artificial Sequence: Synthetic oligonucleotide
cccgaacuccccgcccauc

SEQ ID NO: 1273893 - RNA, 19 nt, Artificial Sequence
  Description of Artificial Sequence: Synthetic oligonucleotide
cgcgucaaacuggguguuc

SEQ ID NO: 1273894 - RNA, 19 nt, Artificial Sequence
  Description of Artificial Sequence: Synthetic oligonucleotide
ggcuccgcaggaggugcua

SEQ ID NO: 1273895 - RNA, 19 nt, Artificial Sequence
  Description of Artificial Sequence: Synthetic oligonucleotide
ggaucaggguccggccaau

SEQ ID NO: 1273896 - RNA, 19 nt, Artificial Sequence
  Description of Artificial Sequence: Synthetic oligonucleotide
ccgccuagggaaaggcauu

SEQ ID NO: 1273897 - RNA, 19 nt, Artificial Sequence
  Description of Artificial Sequence: Synthetic oligonucleotide
cccacaccgggugauguuu

SEQ ID NO: 1273898 - RNA, 19 nt, Artificial Sequence
  Description of Artificial Sequence: Synthetic oligonucleotide
ccacaccgggugauguuuu

SEQ ID NO: 1273899 - RNA, 19 nt, Artificial Sequence
  Description of Artificial Sequence: Synthetic oligonucleotide
cgcccaucgagggugggcu

SEQ ID NO: 1273900 - RNA, 19 nt, Artificial Sequence
  Description of Artificial Sequence: Synthetic oligonucleotide
gggcaacucuggggcaaau

SEQ ID NO: 1273901 - RNA, 19 nt, Artificial Sequence
  Description of Artificial Sequence: Synthetic oligonucleotide
ccgcaggaggugcuaccau

SEQ ID NO: 1273902 - RNA, 19 nt, Artificial Sequence
  Description of Artificial Sequence: Synthetic oligonucleotide
ccgcgucaaacuggguguu

SEQ ID NO: 1273903 - RNA, 19 nt, Artificial Sequence
  Description of Artificial Sequence: Synthetic oligonucleotide
ccucgucgucaaugccguu

SEQ ID NO: 1273904 - RNA, 19 nt, Artificial Sequence
  Description of Artificial Sequence: Synthetic oligonucleotide
auaaaugccauguaaaugc

SEQ ID NO: 1273905 - RNA, 19 nt, Artificial Sequence
  Description of Artificial Sequence: Synthetic oligonucleotide
gaucguaugauagagagcc

SEQ ID NO: 1273906 - RNA, 19 nt, Artificial Sequence
  Description of Artificial Sequence: Synthetic oligonucleotide
uacguguccaggaagaugg

SEQ ID NO: 1273907 - RNA, 19 nt, Artificial Sequence
  Description of Artificial Sequence: Synthetic oligonucleotide
uuagcuaugggaagcauag

SEQ ID NO: 1273908 - RNA, 19 nt, Artificial Sequence
  Description of Artificial Sequence: Synthetic oligonucleotide
ucaaaugacgucauuagcu

SEQ ID NO: 1273909 - RNA, 19 nt, Artificial Sequence
  Description of Artificial Sequence: Synthetic oligonucleotide
gauuuuacaaucccaguag

SEQ ID NO: 1273910 - RNA, 19 nt, Artificial Sequence
  Description of Artificial Sequence: Synthetic oligonucleotide
gaaaagacuaauaaaugcc

SEQ ID NO: 1273911 - RNA, 19 nt, Artificial Sequence
  Description of Artificial Sequence: Synthetic oligonucleotide
aaaaccuuuaggaaaauca

SEQ ID NO: 1273912 - RNA, 19 nt, Artificial Sequence
  Description of Artificial Sequence: Synthetic oligonucleotide
aauguaugaaaauacuuua

SEQ ID NO: 1273913 - RNA, 19 nt, Artificial Sequence
  Description of Artificial Sequence: Synthetic oligonucleotide
ugcuaugaucguaugauag

SEQ ID NO: 1273914 - RNA, 19 nt, Artificial Sequence
  Description of Artificial Sequence: Synthetic oligonucleotide
ucauuuaagagcucuggcc

SEQ ID NO: 1273915 - RNA, 19 nt, Artificial Sequence
  Description of Artificial Sequence: Synthetic oligonucleotide
uucggaaauuuccaguggg

SEQ ID NO: 1273916 - RNA, 19 nt, Artificial Sequence
  Description of Artificial Sequence: Synthetic oligonucleotide
aucaaaugacgucauuagc

SEQ ID NO: 1273917 - RNA, 19 nt, Artificial Sequence
  Description of Artificial Sequence: Synthetic oligonucleotide
aaacugaagauaacagggc

SEQ ID NO: 1273918 - RNA, 19 nt, Artificial Sequence
  Description of Artificial Sequence: Synthetic oligonucleotide
cauuuaagagcucuggccc

SEQ ID NO: 1273919 - RNA, 19 nt, Artificial Sequence
  Description of Artificial Sequence: Synthetic oligonucleotide
aagauaacagggccucagc

SEQ ID NO: 1273920 - RNA, 19 nt, Artificial Sequence
  Description of Artificial Sequence: Synthetic oligonucleotide
uguaggggagcccugagcc

SEQ ID NO: 1273921 - RNA, 19 nt, Artificial Sequence
  Description of Artificial Sequence: Synthetic oligonucleotide
ggaaaagacuaauaaaugc

SEQ ID NO: 1273922 - RNA, 19 nt, Artificial Sequence
  Description of Artificial Sequence: Synthetic oligonucleotide
gaaauguagaaguguagug

SEQ ID NO: 1273923 - RNA, 19 nt, Artificial Sequence
  Description of Artificial Sequence: Synthetic oligonucleotide
ugauuuuacaaucccagua

SEQ ID NO: 1273924 - RNA, 19 nt, Artificial Sequence
  Description of Artificial Sequence: Synthetic oligonucleotide
aaauguaugaaaauacuuu

SEQ ID NO: 1273925 - RNA, 19 nt, Artificial Sequence
  Description of Artificial Sequence: Synthetic oligonucleotide
gaagguaucauggucccgg

SEQ ID NO: 1273926 - RNA, 19 nt, Artificial Sequence
  Description of Artificial Sequence: Synthetic oligonucleotide
uucauuuaagagcucuggc

SEQ ID NO: 1273927 - RNA, 19 nt, Artificial Sequence
  Description of Artificial Sequence: Synthetic oligonucleotide
ugugauaucgauacaguuu

SEQ ID NO: 1273928 - RNA, 19 nt, Artificial Sequence
  Description of Artificial Sequence: Synthetic oligonucleotide
aggguggugaccuuagcac

SEQ ID NO: 1273929 - RNA, 19 nt, Artificial Sequence
  Description of Artificial Sequence: Synthetic oligonucleotide
gauagagagccauuguuca

SEQ ID NO: 1273930 - RNA, 19 nt, Artificial Sequence
  Description of Artificial Sequence: Synthetic oligonucleotide
ucaucauugggguacgugu

SEQ ID NO: 1273931 - RNA, 19 nt, Artificial Sequence
  Description of Artificial Sequence: Synthetic oligonucleotide
gacgucauuagcuauggga

SEQ ID NO: 1273932 - RNA, 19 nt, Artificial Sequence
  Description of Artificial Sequence: Synthetic oligonucleotide
gauaacagggccucagcug

SEQ ID NO: 1273933 - RNA, 19 nt, Artificial Sequence
  Description of Artificial Sequence: Synthetic oligonucleotide
uguuucaucauugggguac

SEQ ID NO: 1273934 - RNA, 19 nt, Artificial Sequence
  Description of Artificial Sequence: Synthetic oligonucleotide
uccugugauaucgauacag

SEQ ID NO: 1273935 - RNA, 19 nt, Artificial Sequence
  Description of Artificial Sequence: Synthetic oligonucleotide
aggaagguaucaugguccc

SEQ ID NO: 1273936 - RNA, 19 nt, Artificial Sequence
  Description of Artificial Sequence: Synthetic oligonucleotide
uguagaaguguaguggggc

SEQ ID NO: 1273937 - RNA, 19 nt, Artificial Sequence
  Description of Artificial Sequence: Synthetic oligonucleotide
ucggaaauuuccagugggg

SEQ ID NO: 1273938 - RNA, 19 nt, Artificial Sequence
  Description of Artificial Sequence: Synthetic oligonucleotide
uuaaggugcucgcuguugc

SEQ ID NO: 1273939 - RNA, 19 nt, Artificial Sequence
  Description of Artificial Sequence: Synthetic oligonucleotide
gauguacgggaacacacgc

SEQ ID NO: 1273940 - RNA, 19 nt, Artificial Sequence
  Description of Artificial Sequence: Synthetic oligonucleotide
auacuuuccuccucaggcg

SEQ ID NO: 1273941 - RNA, 19 nt, Artificial Sequence
  Description of Artificial Sequence: Synthetic oligonucleotide
uggcucgucagcauggugc

SEQ ID NO: 1273942 - RNA, 19 nt, Artificial Sequence
  Description of Artificial Sequence: Synthetic oligonucleotide
guuuguuccgcuccuggcg

SEQ ID NO: 1273943 - RNA, 19 nt, Artificial Sequence
  Description of Artificial Sequence: Synthetic oligonucleotide
uugccgucgguuauguccg

SEQ ID NO: 1273944 - RNA, 19 nt, Artificial Sequence
  Description of Artificial Sequence: Synthetic oligonucleotide
ugguugauuuuacaauccc

SEQ ID NO: 1273945 - RNA, 19 nt, Artificial Sequence
  Description of Artificial Sequence: Synthetic oligonucleotide
cuaugaucguaugauagag

SEQ ID NO: 1273946 - RNA, 19 nt, Artificial Sequence
  Description of Artificial Sequence: Synthetic oligonucleotide
ucgaucuugguccagucaa

SEQ ID NO: 1273947 - RNA, 19 nt, Artificial Sequence
  Description of Artificial Sequence: Synthetic oligonucleotide
gaagcguuuguuccgcucc

SEQ ID NO: 1273948 - RNA, 19 nt, Artificial Sequence
  Description of Artificial Sequence: Synthetic oligonucleotide
gaaauuuccagugggguca

SEQ ID NO: 1273949 - RNA, 19 nt, Artificial Sequence
  Description of Artificial Sequence: Synthetic oligonucleotide
gacugcacaucaaaugacg

SEQ ID NO: 1273950 - RNA, 19 nt, Artificial Sequence
  Description of Artificial Sequence: Synthetic oligonucleotide
aguaauagccggugggcag

SEQ ID NO: 1273951 - RNA, 19 nt, Artificial Sequence
  Description of Artificial Sequence: Synthetic oligonucleotide
cuuuggaaaagacuaauaa

SEQ ID NO: 1273952 - RNA, 19 nt, Artificial Sequence
  Description of Artificial Sequence: Synthetic oligonucleotide
aaugacgucauuagcuaug

SEQ ID NO: 1273953 - RNA, 19 nt, Artificial Sequence
  Description of Artificial Sequence: Synthetic oligonucleotide
aucuugguccagucaauac

SEQ ID NO: 1273954 - RNA, 19 nt, Artificial Sequence
  Description of Artificial Sequence: Synthetic oligonucleotide
uaugaucguaugauagaga

SEQ ID NO: 1273955 - RNA, 19 nt, Artificial Sequence
  Description of Artificial Sequence: Synthetic oligonucleotide
auggcuaaaccauggaagu

SEQ ID NO: 1273956 - RNA, 19 nt, Artificial Sequence
  Description of Artificial Sequence: Synthetic oligonucleotide
uggaccuugaaguggacgu

SEQ ID NO: 1273957 - RNA, 19 nt, Artificial Sequence
  Description of Artificial Sequence: Synthetic oligonucleotide
auuuuacaaucccaguaga

SEQ ID NO: 1273958 - RNA, 19 nt, Artificial Sequence
  Description of Artificial Sequence: Synthetic oligonucleotide
aggaacacucuccaccccg

SEQ ID NO: 1273959 - RNA, 19 nt, Artificial Sequence
  Description of Artificial Sequence: Synthetic oligonucleotide
ucccggguguaccacaagg

SEQ ID NO: 1273960 - RNA, 19 nt, Artificial Sequence
  Description of Artificial Sequence: Synthetic oligonucleotide
auagccggugggcaggcgc

SEQ ID NO: 1273961 - RNA, 19 nt, Artificial Sequence
  Description of Artificial Sequence: Synthetic oligonucleotide
cuggccacucaguagaagc

SEQ ID NO: 1273962 - RNA, 19 nt, Artificial Sequence
  Description of Artificial Sequence: Synthetic oligonucleotide
ugugcagccugccaacuca

SEQ ID NO: 1273963 - RNA, 19 nt, Artificial Sequence
  Description of Artificial Sequence: Synthetic oligonucleotide
uccguuguuucaucauugg

SEQ ID NO: 1273964 - RNA, 19 nt, Artificial Sequence
  Description of Artificial Sequence: Synthetic oligonucleotide
aaaugacgucauuagcuau

SEQ ID NO: 1273965 - RNA, 19 nt, Artificial Sequence
  Description of Artificial Sequence: Synthetic oligonucleotide
aaguggacgugcaucuccc

SEQ ID NO: 1273966 - RNA, 19 nt, Artificial Sequence
  Description of Artificial Sequence: Synthetic oligonucleotide
aaaccuuuaggaaaaucau

SEQ ID NO: 1273967 - RNA, 19 nt, Artificial Sequence
  Description of Artificial Sequence: Synthetic oligonucleotide
aguccgucaucacaguaag

SEQ ID NO: 1273968 - RNA, 19 nt, Artificial Sequence
  Description of Artificial Sequence: Synthetic oligonucleotide
ugccuuggaagucccagag

SEQ ID NO: 1273969 - RNA, 19 nt, Artificial Sequence
  Description of Artificial Sequence: Synthetic oligonucleotide
guuauguccgcagccaccg

SEQ ID NO: 1273970 - RNA, 19 nt, Artificial Sequence
  Description of Artificial Sequence: Synthetic oligonucleotide
aucaccgagauguacggga

SEQ ID NO: 1273971 - RNA, 19 nt, Artificial Sequence
  Description of Artificial Sequence: Synthetic oligonucleotide
uugauuuuacaaucccagu

SEQ ID NO: 1273972 - RNA, 19 nt, Artificial Sequence
  Description of Artificial Sequence: Synthetic oligonucleotide
ugguugguugauuuuacaa

SEQ ID NO: 1273973 - RNA, 19 nt, Artificial Sequence
  Description of Artificial Sequence: Synthetic oligonucleotide
gaagauaacagggccucag

SEQ ID NO: 1273974 - RNA, 19 nt, Artificial Sequence
  Description of Artificial Sequence: Synthetic oligonucleotide
agauaacagggccucagcu

SEQ ID NO: 1273975 - RNA, 19 nt, Artificial Sequence
  Description of Artificial Sequence: Synthetic oligonucleotide
cuugguagggcuugaugag

SEQ ID NO: 1273976 - RNA, 19 nt, Artificial Sequence
  Description of Artificial Sequence: Synthetic oligonucleotide
gaaggaaccucugcaaagc

SEQ ID NO: 1273977 - RNA, 19 nt, Artificial Sequence
  Description of Artificial Sequence: Synthetic oligonucleotide
gaccuuagcacugcgcacg

SEQ ID NO: 1273978 - RNA, 19 nt, Artificial Sequence
  Description of Artificial Sequence: Synthetic oligonucleotide
ucccgguugcgaaaguccg

SEQ ID NO: 1273979 - RNA, 19 nt, Artificial Sequence
  Description of Artificial Sequence: Synthetic oligonucleotide
gguaucauggucccgguug

SEQ ID NO: 1273980 - RNA, 19 nt, Artificial Sequence
  Description of Artificial Sequence: Synthetic oligonucleotide
ugaucguaugauagagagc

SEQ ID NO: 1273981 - RNA, 19 nt, Artificial Sequence
  Description of Artificial Sequence: Synthetic oligonucleotide
cguuguuucaucauugggg

SEQ ID NO: 1273982 - RNA, 19 nt, Artificial Sequence
  Description of Artificial Sequence: Synthetic oligonucleotide
cucgagauggggcaagagc

SEQ ID NO: 1273983 - RNA, 19 nt, Artificial Sequence
  Description of Artificial Sequence: Synthetic oligonucleotide
uaagagcucuggcccaagg

SEQ ID NO: 1273984 - RNA, 19 nt, Artificial Sequence
  Description of Artificial Sequence: Synthetic oligonucleotide
aagauggcuaaaccaugga

SEQ ID NO: 1273985 - RNA, 19 nt, Artificial Sequence
  Description of Artificial Sequence: Synthetic oligonucleotide
guaugauagagagccauug

SEQ ID NO: 1273986 - RNA, 19 nt, Artificial Sequence
  Description of Artificial Sequence: Synthetic oligonucleotide
gggaauagcggacagccag

SEQ ID NO: 1273987 - RNA, 19 nt, Artificial Sequence
  Description of Artificial Sequence: Synthetic oligonucleotide
uuggaagucccagagcggc

SEQ ID NO: 1273988 - RNA, 19 nt, Artificial Sequence
  Description of Artificial Sequence: Synthetic oligonucleotide
aaggaaauguagaagugua

SEQ ID NO: 1273989 - RNA, 19 nt, Artificial Sequence
  Description of Artificial Sequence: Synthetic oligonucleotide
aagagcucuggcccaaggu

SEQ ID NO: 1273990 - RNA, 19 nt, Artificial Sequence
  Description of Artificial Sequence: Synthetic oligonucleotide
gagauguacgggaacacac

SEQ ID NO: 1273991 - RNA, 19 nt, Artificial Sequence
  Description of Artificial Sequence: Synthetic oligonucleotide
accaucaccgagauguacg

SEQ ID NO: 1273992 - RNA, 19 nt, Artificial Sequence
  Description of Artificial Sequence: Synthetic oligonucleotide
uagcucgugggaaggaacc

SEQ ID NO: 1273993 - RNA, 19 nt, Artificial Sequence
  Description of Artificial Sequence: Synthetic oligonucleotide
guagaaguguaguggggcc

SEQ ID NO: 1273994 - RNA, 19 nt, Artificial Sequence
  Description of Artificial Sequence: Synthetic oligonucleotide
ggaaaaucaucuuuggaaa

SEQ ID NO: 1273995 - RNA, 19 nt, Artificial Sequence
  Description of Artificial Sequence: Synthetic oligonucleotide
auuuaagagcucuggccca

SEQ ID NO: 1273996 - RNA, 19 nt, Artificial Sequence
  Description of Artificial Sequence: Synthetic oligonucleotide
gucauuagcuaugggaagc

SEQ ID NO: 1273997 - RNA, 19 nt, Artificial Sequence
  Description of Artificial Sequence: Synthetic oligonucleotide
cuucggaaauuuccagugg

SEQ ID NO: 1273998 - RNA, 19 nt, Artificial Sequence
  Description of Artificial Sequence: Synthetic oligonucleotide
uugaccccagguucgaucu

SEQ ID NO: 1273999 - RNA, 19 nt, Artificial Sequence
  Description of Artificial Sequence: Synthetic oligonucleotide
ucauccacguugucuuuag

SEQ ID NO: 1274000 - RNA, 19 nt, Artificial Sequence
  Description of Artificial Sequence: Synthetic oligonucleotide
aaguaauagccggugggca

SEQ ID NO: 1274001 - RNA, 19 nt, Artificial Sequence
  Description of Artificial Sequence: Synthetic oligonucleotide
agacgcacguacuggcucg

SEQ ID NO: 1274002 - RNA, 19 nt, Artificial Sequence
  Description of Artificial Sequence: Synthetic oligonucleotide
aaguccgcugugcagccug

SEQ ID NO: 1274003 - RNA, 19 nt, Artificial Sequence
  Description of Artificial Sequence: Synthetic oligonucleotide
aucucccaauccuugagga

SEQ ID NO: 1274004 - RNA, 19 nt, Artificial Sequence
  Description of Artificial Sequence: Synthetic oligonucleotide
agauggcuaaaccauggaa

SEQ ID NO: 1274005 - RNA, 19 nt, Artificial Sequence
  Description of Artificial Sequence: Synthetic oligonucleotide
agaaauaagguugguuggu

SEQ ID NO: 1274006 - RNA, 19 nt, Artificial Sequence
  Description of Artificial Sequence: Synthetic oligonucleotide
augacgucauuagcuaugg

SEQ ID NO: 1274007 - RNA, 19 nt, Artificial Sequence
  Description of Artificial Sequence: Synthetic oligonucleotide
cugccaacucacuccagcg

SEQ ID NO: 1274008 - RNA, 19 nt, Artificial Sequence
  Description of Artificial Sequence: Synthetic oligonucleotide
ugcgaaaguccgcugugca

SEQ ID NO: 1274009 - RNA, 19 nt, Artificial Sequence
  Description of Artificial Sequence: Synthetic oligonucleotide
caaauggagcccuccuugc

SEQ ID NO: 1274010 - RNA, 19 nt, Artificial Sequence
  Description of Artificial Sequence: Synthetic oligonucleotide
gugaccuuagcacugcgca

SEQ ID NO: 1274011 - RNA, 19 nt, Artificial Sequence
  Description of Artificial Sequence: Synthetic oligonucleotide
cuuggaagucccagagcgg

SEQ ID NO: 1274012 - RNA, 19 nt, Artificial Sequence
  Description of Artificial Sequence: Synthetic oligonucleotide
ucaggcgugcguucuacca

SEQ ID NO: 1274013 - RNA, 19 nt, Artificial Sequence
  Description of Artificial Sequence: Synthetic oligonucleotide
caaguacagacuccccugc

SEQ ID NO: 1274014 - RNA, 19 nt, Artificial Sequence
  Description of Artificial Sequence: Synthetic oligonucleotide
uuagcacugcgcacgcccc

SEQ ID NO: 1274015 - RNA, 19 nt, Artificial Sequence
  Description of Artificial Sequence: Synthetic oligonucleotide
auguaaaugcagacugcac

SEQ ID NO: 1274016 - RNA, 19 nt, Artificial Sequence
  Description of Artificial Sequence: Synthetic oligonucleotide
uucaucauugggguacgug

SEQ ID NO: 1274017 - RNA, 19 nt, Artificial Sequence
  Description of Artificial Sequence: Synthetic oligonucleotide
uccagcguccaucuuugcu

SEQ ID NO: 1274018 - RNA, 19 nt, Artificial Sequence
  Description of Artificial Sequence: Synthetic oligonucleotide
cuccguuguuucaucauug

SEQ ID NO: 1274019 - RNA, 19 nt, Artificial Sequence
  Description of Artificial Sequence: Synthetic oligonucleotide
guaauagccggugggcagg

SEQ ID NO: 1274020 - RNA, 19 nt, Artificial Sequence
  Description of Artificial Sequence: Synthetic oligonucleotide
gaccgcuucggaaauuucc

SEQ ID NO: 1274021 - RNA, 19 nt, Artificial Sequence
  Description of Artificial Sequence: Synthetic oligonucleotide
cacguugucuuuaggggac

SEQ ID NO: 1274022 - RNA, 19 nt, Artificial Sequence
  Description of Artificial Sequence: Synthetic oligonucleotide
gcuucggaaauuuccagug

SEQ ID NO: 1274023 - RNA, 19 nt, Artificial Sequence
  Description of Artificial Sequence: Synthetic oligonucleotide
uuaggggaccugaggaagu

SEQ ID NO: 1274024 - RNA, 19 nt, Artificial Sequence
  Description of Artificial Sequence: Synthetic oligonucleotide
gacccgaccccuugguagg

SEQ ID NO: 1274025 - RNA, 19 nt, Artificial Sequence
  Description of Artificial Sequence: Synthetic oligonucleotide
ugaugagggagugcucccg

SEQ ID NO: 1274026 - RNA, 19 nt, Artificial Sequence
  Description of Artificial Sequence: Synthetic oligonucleotide
ucuuugcuaugaucguaug

SEQ ID NO: 1274027 - RNA, 19 nt, Artificial Sequence
  Description of Artificial Sequence: Synthetic oligonucleotide
gaugagggagugcucccgc

SEQ ID NO: 1274028 - RNA, 19 nt, Artificial Sequence
  Description of Artificial Sequence: Synthetic oligonucleotide
ucguaugauagagagccau

SEQ ID NO: 1274029 - RNA, 19 nt, Artificial Sequence
  Description of Artificial Sequence: Synthetic oligonucleotide
caucauugggguacguguc

SEQ ID NO: 1274030 - RNA, 19 nt, Artificial Sequence
  Description of Artificial Sequence: Synthetic oligonucleotide
ucccaauccuugaggaaac

SEQ ID NO: 1274031 - RNA, 19 nt, Artificial Sequence
  Description of Artificial Sequence: Synthetic oligonucleotide
acagacaaugaugcccagg

SEQ ID NO: 1274032 - RNA, 19 nt, Artificial Sequence
  Description of Artificial Sequence: Synthetic oligonucleotide
aggaaauguagaaguguag

SEQ ID NO: 1274033 - RNA, 19 nt, Artificial Sequence
  Description of Artificial Sequence: Synthetic oligonucleotide
aggaaguugaccccagguu

SEQ ID NO: 1274034 - RNA, 19 nt, Artificial Sequence
  Description of Artificial Sequence: Synthetic oligonucleotide
gucagacgcacguacuggc

SEQ ID NO: 1274035 - RNA, 19 nt, Artificial Sequence
  Description of Artificial Sequence: Synthetic oligonucleotide
acgucauuagcuaugggaa

SEQ ID NO: 1274036 - RNA, 19 nt, Artificial Sequence
  Description of Artificial Sequence: Synthetic oligonucleotide
cauguaaaugcagacugca

SEQ ID NO: 1274037 - RNA, 19 nt, Artificial Sequence
  Description of Artificial Sequence: Synthetic oligonucleotide
gugauaucgauacaguuuu

SEQ ID NO: 1274038 - RNA, 19 nt, Artificial Sequence
  Description of Artificial Sequence: Synthetic oligonucleotide
aaguccgucaucacaguaa

SEQ ID NO: 1274039 - RNA, 19 nt, Artificial Sequence
  Description of Artificial Sequence: Synthetic oligonucleotide
ggcuaaaccauggaaguug

SEQ ID NO: 1274040 - RNA, 19 nt, Artificial Sequence
  Description of Artificial Sequence: Synthetic oligonucleotide
ugacgucauuagcuauggg

SEQ ID NO: 1274041 - RNA, 19 nt, Artificial Sequence
  Description of Artificial Sequence: Synthetic oligonucleotide
ggaaccucugcaaagcagc

SEQ ID NO: 1274042 - RNA, 19 nt, Artificial Sequence
  Description of Artificial Sequence: Synthetic oligonucleotide
gcgccaaaguaauagccgg

SEQ ID NO: 1274043 - RNA, 19 nt, Artificial Sequence
  Description of Artificial Sequence: Synthetic oligonucleotide
caaaugacgucauuagcua

SEQ ID NO: 1274044 - RNA, 19 nt, Artificial Sequence
  Description of Artificial Sequence: Synthetic oligonucleotide
aagguaucauggucccggu

SEQ ID NO: 1274045 - RNA, 19 nt, Artificial Sequence
  Description of Artificial Sequence: Synthetic oligonucleotide
ucagacgcacguacuggcu

SEQ ID NO: 1274046 - RNA, 19 nt, Artificial Sequence
  Description of Artificial Sequence: Synthetic oligonucleotide
cuuugcuaugaucguauga

SEQ ID NO: 1274047 - RNA, 19 nt, Artificial Sequence
  Description of Artificial Sequence: Synthetic oligonucleotide
ggaaauuuccagugggguc

SEQ ID NO: 1274048 - RNA, 19 nt, Artificial Sequence
  Description of Artificial Sequence: Synthetic oligonucleotide
aggagcaugccucgagaug

SEQ ID NO: 1274049 - RNA, 19 nt, Artificial Sequence
  Description of Artificial Sequence: Synthetic oligonucleotide
ugccaacucacuccagcgu

SEQ ID NO: 1274050 - RNA, 19 nt, Artificial Sequence
  Description of Artificial Sequence: Synthetic oligonucleotide
auccuugaggaaacacggc

SEQ ID NO: 1274051 - RNA, 19 nt, Artificial Sequence
  Description of Artificial Sequence: Synthetic oligonucleotide
auguagaaguguagugggg

SEQ ID NO: 1274052 - RNA, 19 nt, Artificial Sequence
  Description of Artificial Sequence: Synthetic oligonucleotide
caugccucgagauggggca

SEQ ID NO: 1274053 - RNA, 19 nt, Artificial Sequence
  Description of Artificial Sequence: Synthetic oligonucleotide
gaagcauagcucgugggaa

SEQ ID NO: 1274054 - RNA, 19 nt, Artificial Sequence
  Description of Artificial Sequence: Synthetic oligonucleotide
agacaggucgccggugccc

SEQ ID NO: 1274055 - RNA, 19 nt, Artificial Sequence
  Description of Artificial Sequence: Synthetic oligonucleotide
uuauguccgcagccaccgg

SEQ ID NO: 1274056 - RNA, 19 nt, Artificial Sequence
  Description of Artificial Sequence: Synthetic oligonucleotide
cuuaaggugcucgcuguug

SEQ ID NO: 1274057 - RNA, 19 nt, Artificial Sequence
  Description of Artificial Sequence: Synthetic oligonucleotide
gcaggaacacucuccaccc

SEQ ID NO: 1274058 - RNA, 19 nt, Artificial Sequence
  Description of Artificial Sequence: Synthetic oligonucleotide
ggcgccaaaguaauagccg

SEQ ID NO: 1274059 - RNA, 19 nt, Artificial Sequence
  Description of Artificial Sequence: Synthetic oligonucleotide
ugaccuuagcacugcgcac

SEQ ID NO: 1274060 - RNA, 19 nt, Artificial Sequence
  Description of Artificial Sequence: Synthetic oligonucleotide
aauagcggacagccaggaa

SEQ ID NO: 1274061 - RNA, 19 nt, Artificial Sequence
  Description of Artificial Sequence: Synthetic oligonucleotide
uugcuaugaucguaugaua

SEQ ID NO: 1274062 - RNA, 19 nt, Artificial Sequence
  Description of Artificial Sequence: Synthetic oligonucleotide
ggacccgaccccuugguag

SEQ ID NO: 1274063 - RNA, 19 nt, Artificial Sequence
  Description of Artificial Sequence: Synthetic oligonucleotide
gacuaauaaaugccaugua

SEQ ID NO: 1274064 - RNA, 19 nt, Artificial Sequence
  Description of Artificial Sequence: Synthetic oligonucleotide
ucauggucccgguugcgaa

SEQ ID NO: 1274065 - RNA, 19 nt, Artificial Sequence
  Description of Artificial Sequence: Synthetic oligonucleotide
uuuaagagcucuggcccaa

SEQ ID NO: 1274066 - RNA, 19 nt, Artificial Sequence
  Description of Artificial Sequence: Synthetic oligonucleotide
gacaggucgccggugcccg

SEQ ID NO: 1274067 - RNA, 19 nt, Artificial Sequence
  Description of Artificial Sequence: Synthetic oligonucleotide
guacuggcucgucagcaug

SEQ ID NO: 1274068 - RNA, 19 nt, Artificial Sequence
  Description of Artificial Sequence: Synthetic oligonucleotide
caucacaguaaggcggccc

SEQ ID NO: 1274069 - RNA, 19 nt, Artificial Sequence
  Description of Artificial Sequence: Synthetic oligonucleotide
cuccuuuucucucggccac

SEQ ID NO: 1274070 - RNA, 19 nt, Artificial Sequence
  Description of Artificial Sequence: Synthetic oligonucleotide
ccaaaguaauagccggugg

SEQ ID NO: 1274071 - RNA, 19 nt, Artificial Sequence
  Description of Artificial Sequence: Synthetic oligonucleotide
uggacgugcaucucccaau

SEQ ID NO: 1274072 - RNA, 19 nt, Artificial Sequence
  Description of Artificial Sequence: Synthetic oligonucleotide
agaaguguaguggggccug

SEQ ID NO: 1274073 - RNA, 19 nt, Artificial Sequence
  Description of Artificial Sequence: Synthetic oligonucleotide
uaucauggucccgguugcg

SEQ ID NO: 1274074 - RNA, 19 nt, Artificial Sequence
  Description of Artificial Sequence: Synthetic oligonucleotide
ucaggggaccgcuucggaa

SEQ ID NO: 1274075 - RNA, 19 nt, Artificial Sequence
  Description of Artificial Sequence: Synthetic oligonucleotide
aucuuugcuaugaucguau

SEQ ID NO: 1274076 - RNA, 19 nt, Artificial Sequence
  Description of Artificial Sequence: Synthetic oligonucleotide
ugggguacguguccaggaa

SEQ ID NO: 1274077 - RNA, 19 nt, Artificial Sequence
  Description of Artificial Sequence: Synthetic oligonucleotide
aggcgugcguucuaccaug

SEQ ID NO: 1274078 - RNA, 19 nt, Artificial Sequence
  Description of Artificial Sequence: Synthetic oligonucleotide
ugcguucuaccaugagcug

SEQ ID NO: 1274079 - RNA, 19 nt, Artificial Sequence
  Description of Artificial Sequence: Synthetic oligonucleotide
gcuaugaucguaugauaga

SEQ ID NO: 1274080 - RNA, 19 nt, Artificial Sequence
  Description of Artificial Sequence: Synthetic oligonucleotide
ggaagcauagcucguggga

SEQ ID NO: 1274081 - RNA, 19 nt, Artificial Sequence
  Description of Artificial Sequence: Synthetic oligonucleotide
auuagcuaugggaagcaua

SEQ ID NO: 1274082 - RNA, 19 nt, Artificial Sequence
  Description of Artificial Sequence: Synthetic oligonucleotide
cuguaggggagcccugagc

SEQ ID NO: 1274083 - RNA, 19 nt, Artificial Sequence
  Description of Artificial Sequence: Synthetic oligonucleotide
gggaagcauagcucguggg

SEQ ID NO: 1274084 - RNA, 19 nt, Artificial Sequence
  Description of Artificial Sequence: Synthetic oligonucleotide
gugcguucuaccaugagcu

SEQ ID NO: 1274085 - RNA, 19 nt, Artificial Sequence
  Description of Artificial Sequence: Synthetic oligonucleotide
gcggcauggagcuggaccc

SEQ ID NO: 1274086 - RNA, 19 nt, Artificial Sequence
  Description of Artificial Sequence: Synthetic oligonucleotide
ccaaguacagacuccccug

SEQ ID NO: 1274087 - RNA, 19 nt, Artificial Sequence
  Description of Artificial Sequence: Synthetic oligonucleotide
agccugccaacucacucca

SEQ ID NO: 1274088 - RNA, 19 nt, Artificial Sequence
  Description of Artificial Sequence: Synthetic oligonucleotide
ccaucaccgagauguacgg

SEQ ID NO: 1274089 - RNA, 19 nt, Artificial Sequence
  Description of Artificial Sequence: Synthetic oligonucleotide
guacguguccaggaagaug

SEQ ID NO: 1274090 - RNA, 19 nt, Artificial Sequence
  Description of Artificial Sequence: Synthetic oligonucleotide
ggaauagcggacagccagg

SEQ ID NO: 1274091 - RNA, 19 nt, Artificial Sequence
  Description of Artificial Sequence: Synthetic oligonucleotide
uccgcugugcagccugcca

SEQ ID NO: 1274092 - RNA, 19 nt, Artificial Sequence
  Description of Artificial Sequence: Synthetic oligonucleotide
gacccagcaauagaaggaa

SEQ ID NO: 1274093 - RNA, 19 nt, Artificial Sequence
  Description of Artificial Sequence: Synthetic oligonucleotide
cacaguaaggcggccccgg

SEQ ID NO: 1274094 - RNA, 19 nt, Artificial Sequence
  Description of Artificial Sequence: Synthetic oligonucleotide
gaauagcggacagccagga

SEQ ID NO: 1274095 - RNA, 19 nt, Artificial Sequence
  Description of Artificial Sequence: Synthetic oligonucleotide
gguugauuuuacaauccca

SEQ ID NO: 1274096 - RNA, 19 nt, Artificial Sequence
  Description of Artificial Sequence: Synthetic oligonucleotide
accgcuucggaaauuucca

SEQ ID NO: 1274097 - RNA, 19 nt, Artificial Sequence
  Description of Artificial Sequence: Synthetic oligonucleotide
ccauguaaaugcagacugc

SEQ ID NO: 1274098 - RNA, 19 nt, Artificial Sequence
  Description of Artificial Sequence: Synthetic oligonucleotide
ccgucaucacaguaaggcg

SEQ ID NO: 1274099 - RNA, 19 nt, Artificial Sequence
  Description of Artificial Sequence: Synthetic oligonucleotide
ggaaauguagaaguguagu

SEQ ID NO: 1274100 - RNA, 19 nt, Artificial Sequence
  Description of Artificial Sequence: Synthetic oligonucleotide
uuaagagcucuggcccaag

SEQ ID NO: 1274101 - RNA, 19 nt, Artificial Sequence
  Description of Artificial Sequence: Synthetic oligonucleotide
cauccacguugucuuuagg

SEQ ID NO: 1274102 - RNA, 19 nt, Artificial Sequence
  Description of Artificial Sequence: Synthetic oligonucleotide
ggucagacgcacguacugg

SEQ ID NO: 1274103 - RNA, 19 nt, Artificial Sequence
  Description of Artificial Sequence: Synthetic oligonucleotide
ucccgcuuaaggugcucgc

SEQ ID NO: 1274104 - RNA, 19 nt, Artificial Sequence
  Description of Artificial Sequence: Synthetic oligonucleotide
ucgugggaaggaaccucug

SEQ ID NO: 1274105 - RNA, 19 nt, Artificial Sequence
  Description of Artificial Sequence: Synthetic oligonucleotide
auguccgcagccaccggac

SEQ ID NO: 1274106 - RNA, 19 nt, Artificial Sequence
  Description of Artificial Sequence: Synthetic oligonucleotide
gcguucuaccaugagcugg

SEQ ID NO: 1274107 - RNA, 19 nt, Artificial Sequence
  Description of Artificial Sequence: Synthetic oligonucleotide
aauagccggugggcaggcg

SEQ ID NO: 1274108 - RNA, 19 nt, Artificial Sequence
  Description of Artificial Sequence: Synthetic oligonucleotide
guaggggagcccugagccc

SEQ ID NO: 1274109 - RNA, 19 nt, Artificial Sequence
  Description of Artificial Sequence: Synthetic oligonucleotide
gucccgguugcgaaagucc

SEQ ID NO: 1274110 - RNA, 19 nt, Artificial Sequence
  Description of Artificial Sequence: Synthetic oligonucleotide
uagccggugggcaggcgca

SEQ ID NO: 1274111 - RNA, 19 nt, Artificial Sequence
  Description of Artificial Sequence: Synthetic oligonucleotide
ccgggaauagcggacagcc

SEQ ID NO: 1274112 - RNA, 19 nt, Artificial Sequence
  Description of Artificial Sequence: Synthetic oligonucleotide
gaaacacggcuggugguuc

SEQ ID NO: 1274113 - RNA, 19 nt, Artificial Sequence
  Description of Artificial Sequence: Synthetic oligonucleotide
gguugguugauuuuacaau

SEQ ID NO: 1274114 - RNA, 19 nt, Artificial Sequence
  Description of Artificial Sequence: Synthetic oligonucleotide
cagacgcacguacuggcuc

SEQ ID NO: 1274115 - RNA, 19 nt, Artificial Sequence
  Description of Artificial Sequence: Synthetic oligonucleotide
acggcuggugguuccaaau

SEQ ID NO: 1274116 - RNA, 19 nt, Artificial Sequence
  Description of Artificial Sequence: Synthetic oligonucleotide
ugagggagugcucccgcuu

SEQ ID NO: 1274117 - RNA, 19 nt, Artificial Sequence
  Description of Artificial Sequence: Synthetic oligonucleotide
auggucccgguugcgaaag

SEQ ID NO: 1274118 - RNA, 19 nt, Artificial Sequence
  Description of Artificial Sequence: Synthetic oligonucleotide
ccggguguaccacaaggcg

SEQ ID NO: 1274119 - RNA, 19 nt, Artificial Sequence
  Description of Artificial Sequence: Synthetic oligonucleotide
gcgcacuccugugauaucg

SEQ ID NO: 1274120 - RNA, 19 nt, Artificial Sequence
  Description of Artificial Sequence: Synthetic oligonucleotide
uaauagccggugggcaggc

SEQ ID NO: 1274121 - RNA, 19 nt, Artificial Sequence
  Description of Artificial Sequence: Synthetic oligonucleotide
accggacccagcaauagaa

SEQ ID NO: 1274122 - RNA, 19 nt, Artificial Sequence
  Description of Artificial Sequence: Synthetic oligonucleotide
ccguuguuucaucauuggg

SEQ ID NO: 1274123 - RNA, 19 nt, Artificial Sequence
  Description of Artificial Sequence: Synthetic oligonucleotide
aaguugaccccagguucga

SEQ ID NO: 1274124 - RNA, 19 nt, Artificial Sequence
  Description of Artificial Sequence: Synthetic oligonucleotide
aggcgaugccaucuccaug

SEQ ID NO: 1274125 - RNA, 19 nt, Artificial Sequence
  Description of Artificial Sequence: Synthetic oligonucleotide
aggugcucgcuguugccgu

SEQ ID NO: 1274126 - RNA, 19 nt, Artificial Sequence
  Description of Artificial Sequence: Synthetic oligonucleotide
cgugcguucuaccaugagc

SEQ ID NO: 1274127 - RNA, 19 nt, Artificial Sequence
  Description of Artificial Sequence: Synthetic oligonucleotide
caucaccgagauguacggg

SEQ ID NO: 1274128 - RNA, 19 nt, Artificial Sequence
  Description of Artificial Sequence: Synthetic oligonucleotide
uugguccagucaauacuuu

SEQ ID NO: 1274129 - RNA, 19 nt, Artificial Sequence
  Description of Artificial Sequence: Synthetic oligonucleotide
acguacuggcucgucagca

SEQ ID NO: 1274130 - RNA, 19 nt, Artificial Sequence
  Description of Artificial Sequence: Synthetic oligonucleotide
gccaaaguaauagccggug

SEQ ID NO: 1274131 - RNA, 19 nt, Artificial Sequence
  Description of Artificial Sequence: Synthetic oligonucleotide
cggacccagcaauagaagg

SEQ ID NO: 1274132 - RNA, 19 nt, Artificial Sequence
  Description of Artificial Sequence: Synthetic oligonucleotide
aggagugcacacagcaaca

SEQ ID NO: 1274133 - RNA, 19 nt, Artificial Sequence
  Description of Artificial Sequence: Synthetic oligonucleotide
gggguacguguccaggaag

SEQ ID NO: 1274134 - RNA, 19 nt, Artificial Sequence
  Description of Artificial Sequence: Synthetic oligonucleotide
cucaggcgugcguucuacc

SEQ ID NO: 1274135 - RNA, 19 nt, Artificial Sequence
  Description of Artificial Sequence: Synthetic oligonucleotide
gaucuugguccagucaaua

SEQ ID NO: 1274136 - RNA, 19 nt, Artificial Sequence
  Description of Artificial Sequence: Synthetic oligonucleotide
uagaagcguuuguuccgcu

SEQ ID NO: 1274137 - RNA, 19 nt, Artificial Sequence
  Description of Artificial Sequence: Synthetic oligonucleotide
agccaccggacccagcaau

SEQ ID NO: 1274138 - RNA, 19 nt, Artificial Sequence
  Description of Artificial Sequence: Synthetic oligonucleotide
cacaaggcgaugccaucuc

SEQ ID NO: 1274139 - RNA, 19 nt, Artificial Sequence
  Description of Artificial Sequence: Synthetic oligonucleotide
gggucagacgcacguacug

SEQ ID NO: 1274140 - RNA, 19 nt, Artificial Sequence
  Description of Artificial Sequence: Synthetic oligonucleotide
ggagugcacacagcaacag

SEQ ID NO: 1274141 - RNA, 19 nt, Artificial Sequence
  Description of Artificial Sequence: Synthetic oligonucleotide
ucaucacaguaaggcggcc

SEQ ID NO: 1274142 - RNA, 19 nt, Artificial Sequence
  Description of Artificial Sequence: Synthetic oligonucleotide
gcgaaaguccgcugugcag

SEQ ID NO: 1274143 - RNA, 19 nt, Artificial Sequence
  Description of Artificial Sequence: Synthetic oligonucleotide
agcuggacccgaccccuug

SEQ ID NO: 1274144 - RNA, 19 nt, Artificial Sequence
  Description of Artificial Sequence: Synthetic oligonucleotide
gcuaugggaagcauagcuc

SEQ ID NO: 1274145 - RNA, 19 nt, Artificial Sequence
  Description of Artificial Sequence: Synthetic oligonucleotide
guacgggaacacacgcucc

SEQ ID NO: 1274146 - RNA, 19 nt, Artificial Sequence
  Description of Artificial Sequence: Synthetic oligonucleotide
aacacggcuggugguucca

SEQ ID NO: 1274147 - RNA, 19 nt, Artificial Sequence
  Description of Artificial Sequence: Synthetic oligonucleotide
caggaacacucuccacccc

SEQ ID NO: 1274148 - RNA, 19 nt, Artificial Sequence
  Description of Artificial Sequence: Synthetic oligonucleotide
agacuccccugcucccagg

SEQ ID NO: 1274149 - RNA, 19 nt, Artificial Sequence
  Description of Artificial Sequence: Synthetic oligonucleotide
gguuauguccgcagccacc

SEQ ID NO: 1274150 - RNA, 19 nt, Artificial Sequence
  Description of Artificial Sequence: Synthetic oligonucleotide
caggggaccgcuucggaaa

SEQ ID NO: 1274151 - RNA, 19 nt, Artificial Sequence
  Description of Artificial Sequence: Synthetic oligonucleotide
agcauggugcugccuugga

SEQ ID NO: 1274152 - RNA, 19 nt, Artificial Sequence
  Description of Artificial Sequence: Synthetic oligonucleotide
auguacgggaacacacgcu

SEQ ID NO: 1274153 - RNA, 19 nt, Artificial Sequence
  Description of Artificial Sequence: Synthetic oligonucleotide
cagacaggucgccggugcc

SEQ ID NO: 1274154 - RNA, 19 nt, Artificial Sequence
  Description of Artificial Sequence: Synthetic oligonucleotide
ccaacucacuccagcgucc

SEQ ID NO: 1274155 - RNA, 19 nt, Artificial Sequence
  Description of Artificial Sequence: Synthetic oligonucleotide
ggacccagcaauagaagga

SEQ ID NO: 1274156 - RNA, 19 nt, Artificial Sequence
  Description of Artificial Sequence: Synthetic oligonucleotide
acuccccugcucccaggag

SEQ ID NO: 1274157 - RNA, 19 nt, Artificial Sequence
  Description of Artificial Sequence: Synthetic oligonucleotide
gacuccccugcucccagga

SEQ ID NO: 1274158 - RNA, 19 nt, Artificial Sequence
  Description of Artificial Sequence: Synthetic oligonucleotide
acaggucgccggugcccgc

SEQ ID NO: 1274159 - RNA, 19 nt, Artificial Sequence
  Description of Artificial Sequence: Synthetic oligonucleotide
cgucauuagcuaugggaag

SEQ ID NO: 1274160 - RNA, 19 nt, Artificial Sequence
  Description of Artificial Sequence: Synthetic oligonucleotide
guggacgugcaucucccaa

SEQ ID NO: 1274161 - RNA, 19 nt, Artificial Sequence
  Description of Artificial Sequence: Synthetic oligonucleotide
caccaucaccgagauguac

SEQ ID NO: 1274162 - RNA, 19 nt, Artificial Sequence
  Description of Artificial Sequence: Synthetic oligonucleotide
ggacgugcaucucccaauc

SEQ ID NO: 1274163 - RNA, 19 nt, Artificial Sequence
  Description of Artificial Sequence: Synthetic oligonucleotide
ggugaccuuagcacugcgc

SEQ ID NO: 1274164 - RNA, 19 nt, Artificial Sequence
  Description of Artificial Sequence: Synthetic oligonucleotide
aguccgcugugcagccugc

SEQ ID NO: 1274165 - RNA, 19 nt, Artificial Sequence
  Description of Artificial Sequence: Synthetic oligonucleotide
uggacccgaccccuuggua

SEQ ID NO: 1274166 - RNA, 19 nt, Artificial Sequence
  Description of Artificial Sequence: Synthetic oligonucleotide
cacuccugugauaucgaua

SEQ ID NO: 1274167 - RNA, 19 nt, Artificial Sequence
  Description of Artificial Sequence: Synthetic oligonucleotide
ggaagguaucauggucccg

SEQ ID NO: 1274168 - RNA, 19 nt, Artificial Sequence
  Description of Artificial Sequence: Synthetic oligonucleotide
cacgcuccguuguuucauc

SEQ ID NO: 1274169 - RNA, 19 nt, Artificial Sequence
  Description of Artificial Sequence: Synthetic oligonucleotide
gcuggacccgaccccuugg

SEQ ID NO: 1274170 - RNA, 19 nt, Artificial Sequence
  Description of Artificial Sequence: Synthetic oligonucleotide
gccccaaguacagacuccc

SEQ ID NO: 1274171 - RNA, 19 nt, Artificial Sequence
  Description of Artificial Sequence: Synthetic oligonucleotide
aggggaccgcuucggaaau

SEQ ID NO: 1274172 - RNA, 19 nt, Artificial Sequence
  Description of Artificial Sequence: Synthetic oligonucleotide
ccauggaccuugaagugga

SEQ ID NO: 1274173 - RNA, 19 nt, Artificial Sequence
  Description of Artificial Sequence: Synthetic oligonucleotide
gguugcgaaaguccgcugu

SEQ ID NO: 1274174 - RNA, 19 nt, Artificial Sequence
  Description of Artificial Sequence: Synthetic oligonucleotide
acacgcuccguuguuucau

SEQ ID NO: 1274175 - RNA, 19 nt, Artificial Sequence
  Description of Artificial Sequence: Synthetic oligonucleotide
ccacguugucuuuagggga

SEQ ID NO: 1274176 - RNA, 19 nt, Artificial Sequence
  Description of Artificial Sequence: Synthetic oligonucleotide
accuugaaguggacgugca

SEQ ID NO: 1274177 - RNA, 19 nt, Artificial Sequence
  Description of Artificial Sequence: Synthetic oligonucleotide
caaguccgucaucacagua

SEQ ID NO: 1274178 - RNA, 19 nt, Artificial Sequence
  Description of Artificial Sequence: Synthetic oligonucleotide
cauagcucgugggaaggaa

SEQ ID NO: 1274179 - RNA, 19 nt, Artificial Sequence
  Description of Artificial Sequence: Synthetic oligonucleotide
aucguaugauagagagcca

SEQ ID NO: 1274180 - RNA, 19 nt, Artificial Sequence
  Description of Artificial Sequence: Synthetic oligonucleotide
aggggaccugaggaaguug

SEQ ID NO: 1274181 - RNA, 19 nt, Artificial Sequence
  Description of Artificial Sequence: Synthetic oligonucleotide
agggagugcucccgcuuaa

SEQ ID NO: 1274182 - RNA, 19 nt, Artificial Sequence
  Description of Artificial Sequence: Synthetic oligonucleotide
ggcggccccgggaauagcg

SEQ ID NO: 1274183 - RNA, 19 nt, Artificial Sequence
  Description of Artificial Sequence: Synthetic oligonucleotide
ggaacacacgcuccguugu

SEQ ID NO: 1274184 - RNA, 19 nt, Artificial Sequence
  Description of Artificial Sequence: Synthetic oligonucleotide
cguuuguuccgcuccuggc

SEQ ID NO: 1274185 - RNA, 19 nt, Artificial Sequence
  Description of Artificial Sequence: Synthetic oligonucleotide
cagguucgaucuuggucca

SEQ ID NO: 1274186 - RNA, 19 nt, Artificial Sequence
  Description of Artificial Sequence: Synthetic oligonucleotide
acuggcucgucagcauggu

SEQ ID NO: 1274187 - RNA, 19 nt, Artificial Sequence
  Description of Artificial Sequence: Synthetic oligonucleotide
ccucccugggcaccgcugg

SEQ ID NO: 1274188 - RNA, 19 nt, Artificial Sequence
  Description of Artificial Sequence: Synthetic oligonucleotide
ccgccauucuccuuuucuc

SEQ ID NO: 1274189 - RNA, 19 nt, Artificial Sequence
  Description of Artificial Sequence: Synthetic oligonucleotide
ccggacccagcaauagaag

SEQ ID NO: 1274190 - RNA, 19 nt, Artificial Sequence
  Description of Artificial Sequence: Synthetic oligonucleotide
ccgcuucggaaauuuccag

SEQ ID NO: 1274191 - RNA, 19 nt, Artificial Sequence
  Description of Artificial Sequence: Synthetic oligonucleotide
ccgcuuaaggugcucgcug

SEQ ID NO: 1274192 - RNA, 19 nt, Artificial Sequence
  Description of Artificial Sequence: Synthetic oligonucleotide
uggucccgguugcgaaagu

SEQ ID NO: 1274193 - RNA, 19 nt, Artificial Sequence
  Description of Artificial Sequence: Synthetic oligonucleotide
gucccggguguaccacaag

SEQ ID NO: 1274194 - RNA, 19 nt, Artificial Sequence
  Description of Artificial Sequence: Synthetic oligonucleotide
ccgucgguuauguccgcag

SEQ ID NO: 1274195 - RNA, 19 nt, Artificial Sequence
  Description of Artificial Sequence: Synthetic oligonucleotide
ugccgucgguuauguccgc

SEQ ID NO: 1274196 - RNA, 19 nt, Artificial Sequence
  Description of Artificial Sequence: Synthetic oligonucleotide
acgggaacacacgcuccgu

SEQ ID NO: 1274197 - RNA, 19 nt, Artificial Sequence
  Description of Artificial Sequence: Synthetic oligonucleotide
ggguggugaccuuagcacu

SEQ ID NO: 1274198 - RNA, 19 nt, Artificial Sequence
  Description of Artificial Sequence: Synthetic oligonucleotide
agguucgaucuugguccag

SEQ ID NO: 1274199 - RNA, 19 nt, Artificial Sequence
  Description of Artificial Sequence: Synthetic oligonucleotide
gugcagccugccaacucac

SEQ ID NO: 1274200 - RNA, 19 nt, Artificial Sequence
  Description of Artificial Sequence: Synthetic oligonucleotide
cccgguugcgaaaguccgc

SEQ ID NO: 1274201 - RNA, 19 nt, Artificial Sequence
  Description of Artificial Sequence: Synthetic oligonucleotide
agccggugggcaggcgcac

SEQ ID NO: 1274202 - RNA, 19 nt, Artificial Sequence
  Description of Artificial Sequence: Synthetic oligonucleotide
gcuaaaccauggaaguugu

SEQ ID NO: 1274203 - RNA, 19 nt, Artificial Sequence
  Description of Artificial Sequence: Synthetic oligonucleotide
ggcgcuucugaaacaccac

SEQ ID NO: 1274204 - RNA, 19 nt, Artificial Sequence
  Description of Artificial Sequence: Synthetic oligonucleotide
acccagcaauagaaggaaa

SEQ ID NO: 1274205 - RNA, 19 nt, Artificial Sequence
  Description of Artificial Sequence: Synthetic oligonucleotide
acgcacguacuggcucguc

SEQ ID NO: 1274206 - RNA, 19 nt, Artificial Sequence
  Description of Artificial Sequence: Synthetic oligonucleotide
accccgucaggggaccgcu

SEQ ID NO: 1274207 - RNA, 19 nt, Artificial Sequence
  Description of Artificial Sequence: Synthetic oligonucleotide
ggucccgguugcgaaaguc

SEQ ID NO: 1274208 - RNA, 19 nt, Artificial Sequence
  Description of Artificial Sequence: Synthetic oligonucleotide
caggagcaugccucgagau

SEQ ID NO: 1274209 - RNA, 19 nt, Artificial Sequence
  Description of Artificial Sequence: Synthetic oligonucleotide
cgucgguuauguccgcagc

SEQ ID NO: 1274210 - RNA, 19 nt, Artificial Sequence
  Description of Artificial Sequence: Synthetic oligonucleotide
ccccaaguacagacucccc

SEQ ID NO: 1274211 - RNA, 19 nt, Artificial Sequence
  Description of Artificial Sequence: Synthetic oligonucleotide
cccagcaauagaaggaaau

SEQ ID NO: 1274212 - RNA, 19 nt, Artificial Sequence
  Description of Artificial Sequence: Synthetic oligonucleotide
caccccgucaggggaccgc

SEQ ID NO: 1274213 - RNA, 19 nt, Artificial Sequence
  Description of Artificial Sequence: Synthetic oligonucleotide
cagcgccaaagccaggccu

SEQ ID NO: 1274214 - RNA, 19 nt, Artificial Sequence
  Description of Artificial Sequence: Synthetic oligonucleotide
gcucgugggaaggaaccuc

SEQ ID NO: 1274215 - RNA, 19 nt, Artificial Sequence
  Description of Artificial Sequence: Synthetic oligonucleotide
ccgagauguacgggaacac

SEQ ID NO: 1274216 - RNA, 19 nt, Artificial Sequence
  Description of Artificial Sequence: Synthetic oligonucleotide
gcgugcguucuaccaugag

SEQ ID NO: 1274217 - RNA, 19 nt, Artificial Sequence
  Description of Artificial Sequence: Synthetic oligonucleotide
ccaccggacccagcaauag

SEQ ID NO: 1274218 - RNA, 19 nt, Artificial Sequence
  Description of Artificial Sequence: Synthetic oligonucleotide
cccagagcggcauggagcu

SEQ ID NO: 1274219 - RNA, 19 nt, Artificial Sequence
  Description of Artificial Sequence: Synthetic oligonucleotide
ggugcucgcuguugccguc

SEQ ID NO: 1274220 - RNA, 19 nt, Artificial Sequence
  Description of Artificial Sequence: Synthetic oligonucleotide
augccucgagauggggcaa

SEQ ID NO: 1274221 - RNA, 19 nt, Artificial Sequence
  Description of Artificial Sequence: Synthetic oligonucleotide
cucgcuguugccgucgguu

SEQ ID NO: 1274222 - RNA, 19 nt, Artificial Sequence
  Description of Artificial Sequence: Synthetic oligonucleotide
ccucgagauggggcaagag

SEQ ID NO: 1274223 - RNA, 19 nt, Artificial Sequence
  Description of Artificial Sequence: Synthetic oligonucleotide
caggcgugcguucuaccau

SEQ ID NO: 1274224 - RNA, 19 nt, Artificial Sequence
  Description of Artificial Sequence: Synthetic oligonucleotide
ggaaacacggcuggugguu

SEQ ID NO: 1274225 - RNA, 19 nt, Artificial Sequence
  Description of Artificial Sequence: Synthetic oligonucleotide
cagaggcgccaaaguaaua

SEQ ID NO: 1274226 - RNA, 19 nt, Artificial Sequence
  Description of Artificial Sequence: Synthetic oligonucleotide
cauuagcuaugggaagcau

SEQ ID NO: 1274227 - RNA, 19 nt, Artificial Sequence
  Description of Artificial Sequence: Synthetic oligonucleotide
guccugguaccaggcgguc

SEQ ID NO: 1274228 - RNA, 19 nt, Artificial Sequence
  Description of Artificial Sequence: Synthetic oligonucleotide
cccgggaauagcggacagc

SEQ ID NO: 1274229 - RNA, 19 nt, Artificial Sequence
  Description of Artificial Sequence: Synthetic oligonucleotide
accccuugguagggcuuga

SEQ ID NO: 1274230 - RNA, 19 nt, Artificial Sequence
  Description of Artificial Sequence: Synthetic oligonucleotide
gcucuggcccaaggucagg

SEQ ID NO: 1274231 - RNA, 19 nt, Artificial Sequence
  Description of Artificial Sequence: Synthetic oligonucleotide
cuggacccgaccccuuggu

SEQ ID NO: 1274232 - RNA, 19 nt, Artificial Sequence
  Description of Artificial Sequence: Synthetic oligonucleotide
ggccacucaguagaagcgu

SEQ ID NO: 1274233 - RNA, 19 nt, Artificial Sequence
  Description of Artificial Sequence: Synthetic oligonucleotide
cgagauguacgggaacaca

SEQ ID NO: 1274234 - RNA, 19 nt, Artificial Sequence
  Description of Artificial Sequence: Synthetic oligonucleotide
ggaagucccagagcggcau

SEQ ID NO: 1274235 - RNA, 19 nt, Artificial Sequence
  Description of Artificial Sequence: Synthetic oligonucleotide
ccccgggaauagcggacag

SEQ ID NO: 1274236 - RNA, 19 nt, Artificial Sequence
  Description of Artificial Sequence: Synthetic oligonucleotide
ggccccgggaauagcggac

SEQ ID NO: 1274237 - RNA, 19 nt, Artificial Sequence
  Description of Artificial Sequence: Synthetic oligonucleotide
cuguugccgucgguuaugu

SEQ ID NO: 1274238 - RNA, 19 nt, Artificial Sequence
  Description of Artificial Sequence: Synthetic oligonucleotide
ccagcuguaggggagcccu

SEQ ID NO: 1274239 - RNA, 19 nt, Artificial Sequence
  Description of Artificial Sequence: Synthetic oligonucleotide
gacgcacguacuggcucgu

SEQ ID NO: 1274240 - RNA, 19 nt, Artificial Sequence
  Description of Artificial Sequence: Synthetic oligonucleotide
caggucgccggugcccgca

SEQ ID NO: 1274241 - RNA, 19 nt, Artificial Sequence
  Description of Artificial Sequence: Synthetic oligonucleotide
ccuuagcacugcgcacgcc

SEQ ID NO: 1274242 - RNA, 19 nt, Artificial Sequence
  Description of Artificial Sequence: Synthetic oligonucleotide
ggcgugcguucuaccauga

SEQ ID NO: 1274243 - RNA, 19 nt, Artificial Sequence
  Description of Artificial Sequence: Synthetic oligonucleotide
ccgcagaggcgccaaagua

SEQ ID NO: 1274244 - RNA, 19 nt, Artificial Sequence
  Description of Artificial Sequence: Synthetic oligonucleotide
cgcacguacuggcucguca

SEQ ID NO: 1274245 - RNA, 19 nt, Artificial Sequence
  Description of Artificial Sequence: Synthetic oligonucleotide
caggcgcacuccugugaua

SEQ ID NO: 1274246 - RNA, 19 nt, Artificial Sequence
  Description of Artificial Sequence: Synthetic oligonucleotide
gcaagagccuccagcugua

SEQ ID NO: 1274247 - RNA, 19 nt, Artificial Sequence
  Description of Artificial Sequence: Synthetic oligonucleotide
ccgcugugcagccugccaa

SEQ ID NO: 1274248 - RNA, 19 nt, Artificial Sequence
  Description of Artificial Sequence: Synthetic oligonucleotide
gcacuccugugauaucgau

SEQ ID NO: 1274249 - RNA, 19 nt, Artificial Sequence
  Description of Artificial Sequence: Synthetic oligonucleotide
cgcuucggaaauuuccagu

SEQ ID NO: 1274250 - RNA, 19 nt, Artificial Sequence
  Description of Artificial Sequence: Synthetic oligonucleotide
gccccgggaauagcggaca

SEQ ID NO: 1274251 - RNA, 19 nt, Artificial Sequence
  Description of Artificial Sequence: Synthetic oligonucleotide
gggaccgcuucggaaauuu

SEQ ID NO: 1274252 - RNA, 19 nt, Artificial Sequence
  Description of Artificial Sequence: Synthetic oligonucleotide
gcucgucagcauggugcug

SEQ ID NO: 1274253 - RNA, 19 nt, Artificial Sequence
  Description of Artificial Sequence: Synthetic oligonucleotide
gcacaucaaaugacgucau

SEQ ID NO: 1274254 - RNA, 19 nt, Artificial Sequence
  Description of Artificial Sequence: Synthetic oligonucleotide
ggggucagacgcacguacu

SEQ ID NO: 1274255 - RNA, 19 nt, Artificial Sequence
  Description of Artificial Sequence: Synthetic oligonucleotide
cgcacuccugugauaucga

SEQ ID NO: 1274256 - RNA, 19 nt, Artificial Sequence
  Description of Artificial Sequence: Synthetic oligonucleotide
gccgucgguuauguccgca

SEQ ID NO: 1274257 - RNA, 19 nt, Artificial Sequence
  Description of Artificial Sequence: Synthetic oligonucleotide
gccugccaacucacuccag

SEQ ID NO: 1274258 - RNA, 19 nt, Artificial Sequence
  Description of Artificial Sequence: Synthetic oligonucleotide
cgguugcgaaaguccgcug

SEQ ID NO: 1274259 - RNA, 19 nt, Artificial Sequence
  Description of Artificial Sequence: Synthetic oligonucleotide
ccgguugcgaaaguccgcu

SEQ ID NO: 1274260 - RNA, 19 nt, Artificial Sequence
  Description of Artificial Sequence: Synthetic oligonucleotide
gccucgagauggggcaaga

SEQ ID NO: 1274261 - RNA, 19 nt, Artificial Sequence
  Description of Artificial Sequence: Synthetic oligonucleotide
cguaugauagagagccauu

SEQ ID NO: 1274262 - RNA, 19 nt, Artificial Sequence
  Description of Artificial Sequence: Synthetic oligonucleotide
cgcuuaaggugcucgcugu

SEQ ID NO: 1274263 - RNA, 19 nt, Artificial Sequence
  Description of Artificial Sequence: Synthetic oligonucleotide
cgggaauagcggacagcca

SEQ ID NO: 1274264 - RNA, 19 nt, Artificial Sequence
  Description of Artificial Sequence: Synthetic oligonucleotide
ggccgccauucuccuuuuc

SEQ ID NO: 1274265 - RNA, 19 nt, Artificial Sequence
  Description of Artificial Sequence: Synthetic oligonucleotide
cccgcagaggcgccaaagu

SEQ ID NO: 1274266 - RNA, 19 nt, Artificial Sequence
  Description of Artificial Sequence: Synthetic oligonucleotide
cgccaaaguaauagccggu

SEQ ID NO: 1274267 - RNA, 19 nt, Artificial Sequence
  Description of Artificial Sequence: Synthetic oligonucleotide
ccaccccgucaggggaccg

SEQ ID NO: 1274268 - RNA, 19 nt, Artificial Sequence
  Description of Artificial Sequence: Synthetic oligonucleotide
ccgaccccuugguagggcu

SEQ ID NO: 1274269 - RNA, 19 nt, Artificial Sequence
  Description of Artificial Sequence: Synthetic oligonucleotide
ccagagcggcauggagcug

SEQ ID NO: 1274270 - RNA, 19 nt, Artificial Sequence
  Description of Artificial Sequence: Synthetic oligonucleotide
cguacuggcucgucagcau

SEQ ID NO: 1274271 - RNA, 19 nt, Artificial Sequence
  Description of Artificial Sequence: Synthetic oligonucleotide
cggccccgggaauagcgga

SEQ ID NO: 1274272 - RNA, 19 nt, Artificial Sequence
  Description of Artificial Sequence: Synthetic oligonucleotide
cccgcuuaaggugcucgcu

SEQ ID NO: 1274273 - RNA, 19 nt, Artificial Sequence
  Description of Artificial Sequence: Synthetic oligonucleotide
gcucgcuguugccgucggu

SEQ ID NO: 1274274 - RNA, 19 nt, Artificial Sequence
  Description of Artificial Sequence: Synthetic oligonucleotide
cgcuccguuguuucaucau

SEQ ID NO: 1274275 - RNA, 19 nt, Artificial Sequence
  Description of Artificial Sequence: Synthetic oligonucleotide
cgcuguugccgucgguuau

SEQ ID NO: 1274276 - RNA, 19 nt, Artificial Sequence
  Description of Artificial Sequence: Synthetic oligonucleotide
cgaccccuugguagggcuu

SEQ ID NO: 1274277 - RNA, 19 nt, Artificial Sequence
  Description of Artificial Sequence: Synthetic oligonucleotide
ccccgucaggggaccgcuu

SEQ ID NO: 1274278 - RNA, 19 nt, Artificial Sequence
  Description of Artificial Sequence: Synthetic oligonucleotide
aagcauuucauacugaauc

SEQ ID NO: 1274279 - RNA, 19 nt, Artificial Sequence
  Description of Artificial Sequence: Synthetic oligonucleotide
gaugauaagauauuuguag

SEQ ID NO: 1274280 - RNA, 19 nt, Artificial Sequence
  Description of Artificial Sequence: Synthetic oligonucleotide
augacauuagccuugggcc

SEQ ID NO: 1274281 - RNA, 19 nt, Artificial Sequence
  Description of Artificial Sequence: Synthetic oligonucleotide
uuuacuauuuacuuuucgg

SEQ ID NO: 1274282 - RNA, 19 nt, Artificial Sequence
  Description of Artificial Sequence: Synthetic oligonucleotide
uguaguugaacucagcaag

SEQ ID NO: 1274283 - RNA, 19 nt, Artificial Sequence
  Description of Artificial Sequence: Synthetic oligonucleotide
ucaugaaauacauagauaa

SEQ ID NO: 1274284 - RNA, 19 nt, Artificial Sequence
  Description of Artificial Sequence: Synthetic oligonucleotide
uuugggauaagcaaaaccu

SEQ ID NO: 1274285 - RNA, 19 nt, Artificial Sequence
  Description of Artificial Sequence: Synthetic oligonucleotide
aauacauagauaaucguuc

SEQ ID NO: 1274286 - RNA, 19 nt, Artificial Sequence
  Description of Artificial Sequence: Synthetic oligonucleotide
auaguugacagugaggucc

SEQ ID NO: 1274287 - RNA, 19 nt, Artificial Sequence
  Description of Artificial Sequence: Synthetic oligonucleotide
uuacuauuuacuuuucggg

SEQ ID NO: 1274288 - RNA, 19 nt, Artificial Sequence
  Description of Artificial Sequence: Synthetic oligonucleotide
acuauuuacuuuucggggc

SEQ ID NO: 1274289 - RNA, 19 nt, Artificial Sequence
  Description of Artificial Sequence: Synthetic oligonucleotide
uuaacucaugcccagauga

SEQ ID NO: 1274290 - RNA, 19 nt, Artificial Sequence
  Description of Artificial Sequence: Synthetic oligonucleotide
uauaggaaaggcaucaugu

SEQ ID NO: 1274291 - RNA, 19 nt, Artificial Sequence
  Description of Artificial Sequence: Synthetic oligonucleotide
gauggaaucacacuugcug

SEQ ID NO: 1274292 - RNA, 19 nt, Artificial Sequence
  Description of Artificial Sequence: Synthetic oligonucleotide
uacuauuuacuuuucgggg

SEQ ID NO: 1274293 - RNA, 19 nt, Artificial Sequence
  Description of Artificial Sequence: Synthetic oligonucleotide
uacucagaggucuagaaag

SEQ ID NO: 1274294 - RNA, 19 nt, Artificial Sequence
  Description of Artificial Sequence: Synthetic oligonucleotide
aauuggacccuauuuuggg

SEQ ID NO: 1274295 - RNA, 19 nt, Artificial Sequence
  Description of Artificial Sequence: Synthetic oligonucleotide
agauaaucguucuuuacuc

SEQ ID NO: 1274296 - RNA, 19 nt, Artificial Sequence
  Description of Artificial Sequence: Synthetic oligonucleotide
uacugaaucacuuuuauuu

SEQ ID NO: 1274297 - RNA, 19 nt, Artificial Sequence
  Description of Artificial Sequence: Synthetic oligonucleotide
uccaauauaggaaaggcau

SEQ ID NO: 1274298 - RNA, 19 nt, Artificial Sequence
  Description of Artificial Sequence: Synthetic oligonucleotide
gaugacauuagccuugggc

SEQ ID NO: 1274299 - RNA, 19 nt, Artificial Sequence
  Description of Artificial Sequence: Synthetic oligonucleotide
uuuugggauaagcaaaacc

SEQ ID NO: 1274300 - RNA, 19 nt, Artificial Sequence
  Description of Artificial Sequence: Synthetic oligonucleotide
gagaaauuguucuaucaag

SEQ ID NO: 1274301 - RNA, 19 nt, Artificial Sequence
  Description of Artificial Sequence: Synthetic oligonucleotide
guaacugcaauuuugguuc

SEQ ID NO: 1274302 - RNA, 19 nt, Artificial Sequence
  Description of Artificial Sequence: Synthetic oligonucleotide
agaaucacacgguuguagc

SEQ ID NO: 1274303 - RNA, 19 nt, Artificial Sequence
  Description of Artificial Sequence: Synthetic oligonucleotide
uccacuccacaccagaugg

SEQ ID NO: 1274304 - RNA, 19 nt, Artificial Sequence
  Description of Artificial Sequence: Synthetic oligonucleotide
uagauaaucguucuuuacu

SEQ ID NO: 1274305 - RNA, 19 nt, Artificial Sequence
  Description of Artificial Sequence: Synthetic oligonucleotide
uaucaaggauuccugauug

SEQ ID NO: 1274306 - RNA, 19 nt, Artificial Sequence
  Description of Artificial Sequence: Synthetic oligonucleotide
uucacugaauaauuggacc

SEQ ID NO: 1274307 - RNA, 19 nt, Artificial Sequence
  Description of Artificial Sequence: Synthetic oligonucleotide
auagauaaucguucuuuac

SEQ ID NO: 1274308 - RNA, 19 nt, Artificial Sequence
  Description of Artificial Sequence: Synthetic oligonucleotide
aacuguuuggcaccagcac

SEQ ID NO: 1274309 - RNA, 19 nt, Artificial Sequence
  Description of Artificial Sequence: Synthetic oligonucleotide
ucacugaauaauuggaccc

SEQ ID NO: 1274310 - RNA, 19 nt, Artificial Sequence
  Description of Artificial Sequence: Synthetic oligonucleotide
ucuuuauccacguccaccc

SEQ ID NO: 1274311 - RNA, 19 nt, Artificial Sequence
  Description of Artificial Sequence: Synthetic oligonucleotide
acugaaucacuuuuauuuc

SEQ ID NO: 1274312 - RNA, 19 nt, Artificial Sequence
  Description of Artificial Sequence: Synthetic oligonucleotide
uguccauaugggcugauag

SEQ ID NO: 1274313 - RNA, 19 nt, Artificial Sequence
  Description of Artificial Sequence: Synthetic oligonucleotide
ucgguaacugcaauuuugg

SEQ ID NO: 1274314 - RNA, 19 nt, Artificial Sequence
  Description of Artificial Sequence: Synthetic oligonucleotide
ugauaagauauuuguagga

SEQ ID NO: 1274315 - RNA, 19 nt, Artificial Sequence
  Description of Artificial Sequence: Synthetic oligonucleotide
aggacaacuguuuggcacc

SEQ ID NO: 1274316 - RNA, 19 nt, Artificial Sequence
  Description of Artificial Sequence: Synthetic oligonucleotide
ucggaccucaauaagguug

SEQ ID NO: 1274317 - RNA, 19 nt, Artificial Sequence
  Description of Artificial Sequence: Synthetic oligonucleotide
uccaucauagucaaucggu

SEQ ID NO: 1274318 - RNA, 19 nt, Artificial Sequence
  Description of Artificial Sequence: Synthetic oligonucleotide
uugugcuuauaguugacag

SEQ ID NO: 1274319 - RNA, 19 nt, Artificial Sequence
  Description of Artificial Sequence: Synthetic oligonucleotide
auguccaucauagucaauc

SEQ ID NO: 1274320 - RNA, 19 nt, Artificial Sequence
  Description of Artificial Sequence: Synthetic oligonucleotide
uguuccaauauaggaaagg

SEQ ID NO: 1274321 - RNA, 19 nt, Artificial Sequence
  Description of Artificial Sequence: Synthetic oligonucleotide
acuggauacagcaguaacc

SEQ ID NO: 1274322 - RNA, 19 nt, Artificial Sequence
  Description of Artificial Sequence: Synthetic oligonucleotide
ucuuuacucugaucaaagg

SEQ ID NO: 1274323 - RNA, 19 nt, Artificial Sequence
  Description of Artificial Sequence: Synthetic oligonucleotide
auaggaaaggcaucauguc

SEQ ID NO: 1274324 - RNA, 19 nt, Artificial Sequence
  Description of Artificial Sequence: Synthetic oligonucleotide
ugacauuagccuugggccg

SEQ ID NO: 1274325 - RNA, 19 nt, Artificial Sequence
  Description of Artificial Sequence: Synthetic oligonucleotide
uauuuugggauaagcaaaa

SEQ ID NO: 1274326 - RNA, 19 nt, Artificial Sequence
  Description of Artificial Sequence: Synthetic oligonucleotide
caugaagcauuucauacug

SEQ ID NO: 1274327 - RNA, 19 nt, Artificial Sequence
  Description of Artificial Sequence: Synthetic oligonucleotide
uucgcagaaaggcuggacc

SEQ ID NO: 1274328 - RNA, 19 nt, Artificial Sequence
  Description of Artificial Sequence: Synthetic oligonucleotide
accucaauaagguugugcu

SEQ ID NO: 1274329 - RNA, 19 nt, Artificial Sequence
  Description of Artificial Sequence: Synthetic oligonucleotide
ucggguauuucuuaugcug

SEQ ID NO: 1274330 - RNA, 19 nt, Artificial Sequence
  Description of Artificial Sequence: Synthetic oligonucleotide
auaaucguucuuuacucug

SEQ ID NO: 1274331 - RNA, 19 nt, Artificial Sequence
  Description of Artificial Sequence: Synthetic oligonucleotide
uaagguugugcuuauaguu

SEQ ID NO: 1274332 - RNA, 19 nt, Artificial Sequence
  Description of Artificial Sequence: Synthetic oligonucleotide
cauacgagcagccauggug

SEQ ID NO: 1274333 - RNA, 19 nt, Artificial Sequence
  Description of Artificial Sequence: Synthetic oligonucleotide
cuaauguccauaugggcug

SEQ ID NO: 1274334 - RNA, 19 nt, Artificial Sequence
  Description of Artificial Sequence: Synthetic oligonucleotide
ugggcugauagaaaugucu

SEQ ID NO: 1274335 - RNA, 19 nt, Artificial Sequence
  Description of Artificial Sequence: Synthetic oligonucleotide
aagccauccaaggagagca

SEQ ID NO: 1274336 - RNA, 19 nt, Artificial Sequence
  Description of Artificial Sequence: Synthetic oligonucleotide
aaauuguuccaagagccgu

SEQ ID NO: 1274337 - RNA, 19 nt, Artificial Sequence
  Description of Artificial Sequence: Synthetic oligonucleotide
uguuugucggcucggaccu

SEQ ID NO: 1274338 - RNA, 19 nt, Artificial Sequence
  Description of Artificial Sequence: Synthetic oligonucleotide
aagagcgaugauaagauau

SEQ ID NO: 1274339 - RNA, 19 nt, Artificial Sequence
  Description of Artificial Sequence: Synthetic oligonucleotide
uuuguaggagaucucuuuc

SEQ ID NO: 1274340 - RNA, 19 nt, Artificial Sequence
  Description of Artificial Sequence: Synthetic oligonucleotide
ucaggauagaucaggcugu

SEQ ID NO: 1274341 - RNA, 19 nt, Artificial Sequence
  Description of Artificial Sequence: Synthetic oligonucleotide
cagagugucuuuauccacg

SEQ ID NO: 1274342 - RNA, 19 nt, Artificial Sequence
  Description of Artificial Sequence: Synthetic oligonucleotide
guaggcuucugauagguac

SEQ ID NO: 1274343 - RNA, 19 nt, Artificial Sequence
  Description of Artificial Sequence: Synthetic oligonucleotide
cuucacugaauaauuggac

SEQ ID NO: 1274344 - RNA, 19 nt, Artificial Sequence
  Description of Artificial Sequence: Synthetic oligonucleotide
agcauuucauacugaauca

SEQ ID NO: 1274345 - RNA, 19 nt, Artificial Sequence
  Description of Artificial Sequence: Synthetic oligonucleotide
acaucuggugagcucauag

SEQ ID NO: 1274346 - RNA, 19 nt, Artificial Sequence
  Description of Artificial Sequence: Synthetic oligonucleotide
auacauagauaaucguucu

SEQ ID NO: 1274347 - RNA, 19 nt, Artificial Sequence
  Description of Artificial Sequence: Synthetic oligonucleotide
ugggauaagcaaaaccuuc

SEQ ID NO: 1274348 - RNA, 19 nt, Artificial Sequence
  Description of Artificial Sequence: Synthetic oligonucleotide
uucagguaguccuuuaauc

SEQ ID NO: 1274349 - RNA, 19 nt, Artificial Sequence
  Description of Artificial Sequence: Synthetic oligonucleotide
cccacuaauguccauaugg

SEQ ID NO: 1274350 - RNA, 19 nt, Artificial Sequence
  Description of Artificial Sequence: Synthetic oligonucleotide
aaaggcaucaugucagcuu

SEQ ID NO: 1274351 - RNA, 19 nt, Artificial Sequence
  Description of Artificial Sequence: Synthetic oligonucleotide
uaaucguucuuuacucuga

SEQ ID NO: 1274352 - RNA, 19 nt, Artificial Sequence
  Description of Artificial Sequence: Synthetic oligonucleotide
auuguucuaucaaggauuc

SEQ ID NO: 1274353 - RNA, 19 nt, Artificial Sequence
  Description of Artificial Sequence: Synthetic oligonucleotide
cugcauacuucuuaacccc

SEQ ID NO: 1274354 - RNA, 19 nt, Artificial Sequence
  Description of Artificial Sequence: Synthetic oligonucleotide
auaagguugugcuuauagu

SEQ ID NO: 1274355 - RNA, 19 nt, Artificial Sequence
  Description of Artificial Sequence: Synthetic oligonucleotide
ucugugcggauacaguucu

SEQ ID NO: 1274356 - RNA, 19 nt, Artificial Sequence
  Description of Artificial Sequence: Synthetic oligonucleotide
uuacucugaucaaagggaa

SEQ ID NO: 1274357 - RNA, 19 nt, Artificial Sequence
  Description of Artificial Sequence: Synthetic oligonucleotide
guucggguauuucuuaugc

SEQ ID NO: 1274358 - RNA, 19 nt, Artificial Sequence
  Description of Artificial Sequence: Synthetic oligonucleotide
auggaaucacacuugcugu

SEQ ID NO: 1274359 - RNA, 19 nt, Artificial Sequence
  Description of Artificial Sequence: Synthetic oligonucleotide
auauuuguaggagaucucu

SEQ ID NO: 1274360 - RNA, 19 nt, Artificial Sequence
  Description of Artificial Sequence: Synthetic oligonucleotide
aaggcaucaugucagcuuu

SEQ ID NO: 1274361 - RNA, 19 nt, Artificial Sequence
  Description of Artificial Sequence: Synthetic oligonucleotide
cuguuugucggcucggacc

SEQ ID NO: 1274362 - RNA, 19 nt, Artificial Sequence
  Description of Artificial Sequence: Synthetic oligonucleotide
aauuuugguucagaagcca

SEQ ID NO: 1274363 - RNA, 19 nt, Artificial Sequence
  Description of Artificial Sequence: Synthetic oligonucleotide
auucuuaacucaugcccag

SEQ ID NO: 1274364 - RNA, 19 nt, Artificial Sequence
  Description of Artificial Sequence: Synthetic oligonucleotide
ugugcuuauaguugacagu

SEQ ID NO: 1274365 - RNA, 19 nt, Artificial Sequence
  Description of Artificial Sequence: Synthetic oligonucleotide
ucuaucaaggauuccugau

SEQ ID NO: 1274366 - RNA, 19 nt, Artificial Sequence
  Description of Artificial Sequence: Synthetic oligonucleotide
ccauucuuaacucaugccc

SEQ ID NO: 1274367 - RNA, 19 nt, Artificial Sequence
  Description of Artificial Sequence: Synthetic oligonucleotide
uccauaugggcugauagaa

SEQ ID NO: 1274368 - RNA, 19 nt, Artificial Sequence
  Description of Artificial Sequence: Synthetic oligonucleotide
ugagccauucuuaacucau

SEQ ID NO: 1274369 - RNA, 19 nt, Artificial Sequence
  Description of Artificial Sequence: Synthetic oligonucleotide
cacuaauguccauaugggc

SEQ ID NO: 1274370 - RNA, 19 nt, Artificial Sequence
  Description of Artificial Sequence: Synthetic oligonucleotide
cuucauacgagcagccaug

SEQ ID NO: 1274371 - RNA, 19 nt, Artificial Sequence
  Description of Artificial Sequence: Synthetic oligonucleotide
gcugcauacuucuuaaccc

SEQ ID NO: 1274372 - RNA, 19 nt, Artificial Sequence
  Description of Artificial Sequence: Synthetic oligonucleotide
auagguacaugaucuucug

SEQ ID NO: 1274373 - RNA, 19 nt, Artificial Sequence
  Description of Artificial Sequence: Synthetic oligonucleotide
caucuggugagcucauagg

SEQ ID NO: 1274374 - RNA, 19 nt, Artificial Sequence
  Description of Artificial Sequence: Synthetic oligonucleotide
uuucccguugucugugcgg

SEQ ID NO: 1274375 - RNA, 19 nt, Artificial Sequence
  Description of Artificial Sequence: Synthetic oligonucleotide
aaguuggaagguugguaca

SEQ ID NO: 1274376 - RNA, 19 nt, Artificial Sequence
  Description of Artificial Sequence: Synthetic oligonucleotide
cauucuuaacucaugccca

SEQ ID NO: 1274377 - RNA, 19 nt, Artificial Sequence
  Description of Artificial Sequence: Synthetic oligonucleotide
ugauaaucuccugcaaggc

SEQ ID NO: 1274378 - RNA, 19 nt, Artificial Sequence
  Description of Artificial Sequence: Synthetic oligonucleotide
ugguucagaagccauccaa

SEQ ID NO: 1274379 - RNA, 19 nt, Artificial Sequence
  Description of Artificial Sequence: Synthetic oligonucleotide
ugguacaguccccaaugcc

SEQ ID NO: 1274380 - RNA, 19 nt, Artificial Sequence
  Description of Artificial Sequence: Synthetic oligonucleotide
uggaaucacacuugcugug

SEQ ID NO: 1274381 - RNA, 19 nt, Artificial Sequence
  Description of Artificial Sequence: Synthetic oligonucleotide
acguggacuggauacagca

SEQ ID NO: 1274382 - RNA, 19 nt, Artificial Sequence
  Description of Artificial Sequence: Synthetic oligonucleotide
ucauacugaaucacuuuua

SEQ ID NO: 1274383 - RNA, 19 nt, Artificial Sequence
  Description of Artificial Sequence: Synthetic oligonucleotide
gcggacacgaaguauagcc

SEQ ID NO: 1274384 - RNA, 19 nt, Artificial Sequence
  Description of Artificial Sequence: Synthetic oligonucleotide
aaaugucucucgcuggguu

SEQ ID NO: 1274385 - RNA, 19 nt, Artificial Sequence
  Description of Artificial Sequence: Synthetic oligonucleotide
aaucguucuuuacucugau

SEQ ID NO: 1274386 - RNA, 19 nt, Artificial Sequence
  Description of Artificial Sequence: Synthetic oligonucleotide
auuccaagagcgaugauaa

SEQ ID NO: 1274387 - RNA, 19 nt, Artificial Sequence
  Description of Artificial Sequence: Synthetic oligonucleotide
uucauacgagcagccaugg

SEQ ID NO: 1274388 - RNA, 19 nt, Artificial Sequence
  Description of Artificial Sequence: Synthetic oligonucleotide
agugaggucccucucucug

SEQ ID NO: 1274389 - RNA, 19 nt, Artificial Sequence
  Description of Artificial Sequence: Synthetic oligonucleotide
guccaucauagucaaucgg

SEQ ID NO: 1274390 - RNA, 19 nt, Artificial Sequence
  Description of Artificial Sequence: Synthetic oligonucleotide
gaaauacauagauaaucgu

SEQ ID NO: 1274391 - RNA, 19 nt, Artificial Sequence
  Description of Artificial Sequence: Synthetic oligonucleotide
acauagauaaucguucuuu

SEQ ID NO: 1274392 - RNA, 19 nt, Artificial Sequence
  Description of Artificial Sequence: Synthetic oligonucleotide
uggugugacaugaagcauu

SEQ ID NO: 1274393 - RNA, 19 nt, Artificial Sequence
  Description of Artificial Sequence: Synthetic oligonucleotide
caauauaggaaaggcauca

SEQ ID NO: 1274394 - RNA, 19 nt, Artificial Sequence
  Description of Artificial Sequence: Synthetic oligonucleotide
uugguacaguccccaaugc

SEQ ID NO: 1274395 - RNA, 19 nt, Artificial Sequence
  Description of Artificial Sequence: Synthetic oligonucleotide
uaguugacagugagguccc

SEQ ID NO: 1274396 - RNA, 19 nt, Artificial Sequence
  Description of Artificial Sequence: Synthetic oligonucleotide
ugugcggauacaguucuug

SEQ ID NO: 1274397 - RNA, 19 nt, Artificial Sequence
  Description of Artificial Sequence: Synthetic oligonucleotide
uugggauaagcaaaaccuu

SEQ ID NO: 1274398 - RNA, 19 nt, Artificial Sequence
  Description of Artificial Sequence: Synthetic oligonucleotide
gggaaagguuuccagaggc

SEQ ID NO: 1274399 - RNA, 19 nt, Artificial Sequence
  Description of Artificial Sequence: Synthetic oligonucleotide
auuuugggauaagcaaaac

SEQ ID NO: 1274400 - RNA, 19 nt, Artificial Sequence
  Description of Artificial Sequence: Synthetic oligonucleotide
ucagcaucauguuccaaua

SEQ ID NO: 1274401 - RNA, 19 nt, Artificial Sequence
  Description of Artificial Sequence: Synthetic oligonucleotide
ucgcagaaaggcuggaccu

SEQ ID NO: 1274402 - RNA, 19 nt, Artificial Sequence
  Description of Artificial Sequence: Synthetic oligonucleotide
aucgguaacugcaauuuug

SEQ ID NO: 1274403 - RNA, 19 nt, Artificial Sequence
  Description of Artificial Sequence: Synthetic oligonucleotide
aggucuagaaaggucacca

SEQ ID NO: 1274404 - RNA, 19 nt, Artificial Sequence
  Description of Artificial Sequence: Synthetic oligonucleotide
gauuccaagagcgaugaua

SEQ ID NO: 1274405 - RNA, 19 nt, Artificial Sequence
  Description of Artificial Sequence: Synthetic oligonucleotide
uuacuuuucggggcugucc

SEQ ID NO: 1274406 - RNA, 19 nt, Artificial Sequence
  Description of Artificial Sequence: Synthetic oligonucleotide
agcaucauguuccaauaua

SEQ ID NO: 1274407 - RNA, 19 nt, Artificial Sequence
  Description of Artificial Sequence: Synthetic oligonucleotide
ucaaucgguaacugcaauu

SEQ ID NO: 1274408 - RNA, 19 nt, Artificial Sequence
  Description of Artificial Sequence: Synthetic oligonucleotide
agaggcucggcacuguagu

SEQ ID NO: 1274409 - RNA, 19 nt, Artificial Sequence
  Description of Artificial Sequence: Synthetic oligonucleotide
gaauccacuccacaccaga

SEQ ID NO: 1274410 - RNA, 19 nt, Artificial Sequence
  Description of Artificial Sequence: Synthetic oligonucleotide
ucuaccgucuucacugaau

SEQ ID NO: 1274411 - RNA, 19 nt, Artificial Sequence
  Description of Artificial Sequence: Synthetic oligonucleotide
uuggacccuauuuugggau

SEQ ID NO: 1274412 - RNA, 19 nt, Artificial Sequence
  Description of Artificial Sequence: Synthetic oligonucleotide
agcucauagguggugugac

SEQ ID NO: 1274413 - RNA, 19 nt, Artificial Sequence
  Description of Artificial Sequence: Synthetic oligonucleotide
ucucucgcuggguucaaca

SEQ ID NO: 1274414 - RNA, 19 nt, Artificial Sequence
  Description of Artificial Sequence: Synthetic oligonucleotide
agguaguccuuuaaucuuc

SEQ ID NO: 1274415 - RNA, 19 nt, Artificial Sequence
  Description of Artificial Sequence: Synthetic oligonucleotide
ggugaaaacugcauugccc

SEQ ID NO: 1274416 - RNA, 19 nt, Artificial Sequence
  Description of Artificial Sequence: Synthetic oligonucleotide
aguugaacucagcaagaau

SEQ ID NO: 1274417 - RNA, 19 nt, Artificial Sequence
  Description of Artificial Sequence: Synthetic oligonucleotide
gcuggguucaacaauggcc

SEQ ID NO: 1274418 - RNA, 19 nt, Artificial Sequence
  Description of Artificial Sequence: Synthetic oligonucleotide
uggaacggccggauaagga

SEQ ID NO: 1274419 - RNA, 19 nt, Artificial Sequence
  Description of Artificial Sequence: Synthetic oligonucleotide
ccacuaauguccauauggg

SEQ ID NO: 1274420 - RNA, 19 nt, Artificial Sequence
  Description of Artificial Sequence: Synthetic oligonucleotide
uagccagucaccagcggac

SEQ ID NO: 1274421 - RNA, 19 nt, Artificial Sequence
  Description of Artificial Sequence: Synthetic oligonucleotide
gaccucaauaagguugugc

SEQ ID NO: 1274422 - RNA, 19 nt, Artificial Sequence
  Description of Artificial Sequence: Synthetic oligonucleotide
aaucgguaacugcaauuuu

SEQ ID NO: 1274423 - RNA, 19 nt, Artificial Sequence
  Description of Artificial Sequence: Synthetic oligonucleotide
aagguugguacagucccca

SEQ ID NO: 1274424 - RNA, 19 nt, Artificial Sequence
  Description of Artificial Sequence: Synthetic oligonucleotide
agagugucuuuauccacgu

SEQ ID NO: 1274425 - RNA, 19 nt, Artificial Sequence
  Description of Artificial Sequence: Synthetic oligonucleotide
gcaucauguuccaauauag

SEQ ID NO: 1274426 - RNA, 19 nt, Artificial Sequence
  Description of Artificial Sequence: Synthetic oligonucleotide
ugaaguuggaagguuggua

SEQ ID NO: 1274427 - RNA, 19 nt, Artificial Sequence
  Description of Artificial Sequence: Synthetic oligonucleotide
cacucugucuugaauccac

SEQ ID NO: 1274428 - RNA, 19 nt, Artificial Sequence
  Description of Artificial Sequence: Synthetic oligonucleotide
accagcacacuucacugga

SEQ ID NO: 1274429 - RNA, 19 nt, Artificial Sequence
  Description of Artificial Sequence: Synthetic oligonucleotide
aucagagaaauuguucuau

SEQ ID NO: 1274430 - RNA, 19 nt, Artificial Sequence
  Description of Artificial Sequence: Synthetic oligonucleotide
ugcggauacaguucuuguc

SEQ ID NO: 1274431 - RNA, 19 nt, Artificial Sequence
  Description of Artificial Sequence: Synthetic oligonucleotide
gauaaucguucuuuacucu

SEQ ID NO: 1274432 - RNA, 19 nt, Artificial Sequence
  Description of Artificial Sequence: Synthetic oligonucleotide
uacauagauaaucguucuu

SEQ ID NO: 1274433 - RNA, 19 nt, Artificial Sequence
  Description of Artificial Sequence: Synthetic oligonucleotide
acgaaguauagccaucaua

SEQ ID NO: 1274434 - RNA, 19 nt, Artificial Sequence
  Description of Artificial Sequence: Synthetic oligonucleotide
uuagccuugggccgcuuuc

SEQ ID NO: 1274435 - RNA, 19 nt, Artificial Sequence
  Description of Artificial Sequence: Synthetic oligonucleotide
ucauagguggugugacaug

SEQ ID NO: 1274436 - RNA, 19 nt, Artificial Sequence
  Description of Artificial Sequence: Synthetic oligonucleotide
gauagguacaugaucuucu

SEQ ID NO: 1274437 - RNA, 19 nt, Artificial Sequence
  Description of Artificial Sequence: Synthetic oligonucleotide
ggauaaggacaacuguuug

SEQ ID NO: 1274438 - RNA, 19 nt, Artificial Sequence
  Description of Artificial Sequence: Synthetic oligonucleotide
ucgcuggguucaacaaugg

SEQ ID NO: 1274439 - RNA, 19 nt, Artificial Sequence
  Description of Artificial Sequence: Synthetic oligonucleotide
uucggguauuucuuaugcu

SEQ ID NO: 1274440 - RNA, 19 nt, Artificial Sequence
  Description of Artificial Sequence: Synthetic oligonucleotide
auacgagcagccaugguga

SEQ ID NO: 1274441 - RNA, 19 nt, Artificial Sequence
  Description of Artificial Sequence: Synthetic oligonucleotide
agcgaugauaagauauuug

SEQ ID NO: 1274442 - RNA, 19 nt, Artificial Sequence
  Description of Artificial Sequence: Synthetic oligonucleotide
aggucccucucucugauaa

SEQ ID NO: 1274443 - RNA, 19 nt, Artificial Sequence
  Description of Artificial Sequence: Synthetic oligonucleotide
cugagugcccagccuaagg

SEQ ID NO: 1274444 - RNA, 19 nt, Artificial Sequence
  Description of Artificial Sequence: Synthetic oligonucleotide
cucaauaagguugugcuua

SEQ ID NO: 1274445 - RNA, 19 nt, Artificial Sequence
  Description of Artificial Sequence: Synthetic oligonucleotide
acucagcaagaaucacacg

SEQ ID NO: 1274446 - RNA, 19 nt, Artificial Sequence
  Description of Artificial Sequence: Synthetic oligonucleotide
acaggcaaagagccgggca

SEQ ID NO: 1274447 - RNA, 19 nt, Artificial Sequence
  Description of Artificial Sequence: Synthetic oligonucleotide
ucccucucucugauaaucu

SEQ ID NO: 1274448 - RNA, 19 nt, Artificial Sequence
  Description of Artificial Sequence: Synthetic oligonucleotide
gacauuagccuugggccgc

SEQ ID NO: 1274449 - RNA, 19 nt, Artificial Sequence
  Description of Artificial Sequence: Synthetic oligonucleotide
ucggcucggaccucaauaa

SEQ ID NO: 1274450 - RNA, 19 nt, Artificial Sequence
  Description of Artificial Sequence: Synthetic oligonucleotide
gauauuuguaggagaucuc

SEQ ID NO: 1274451 - RNA, 19 nt, Artificial Sequence
  Description of Artificial Sequence: Synthetic oligonucleotide
agcuacugcagcagcaguc

SEQ ID NO: 1274452 - RNA, 19 nt, Artificial Sequence
  Description of Artificial Sequence: Synthetic oligonucleotide
cuagaaaggucaccauauc

SEQ ID NO: 1274453 - RNA, 19 nt, Artificial Sequence
  Description of Artificial Sequence: Synthetic oligonucleotide
uccugauugggcagcuacu

SEQ ID NO: 1274454 - RNA, 19 nt, Artificial Sequence
  Description of Artificial Sequence: Synthetic oligonucleotide
acacgaaguauagccauca

SEQ ID NO: 1274455 - RNA, 19 nt, Artificial Sequence
  Description of Artificial Sequence: Synthetic oligonucleotide
cacuggaguguuugggaag

SEQ ID NO: 1274456 - RNA, 19 nt, Artificial Sequence
  Description of Artificial Sequence: Synthetic oligonucleotide
cuuucccguugucugugcg

SEQ ID NO: 1274457 - RNA, 19 nt, Artificial Sequence
  Description of Artificial Sequence: Synthetic oligonucleotide
ggaacggccggauaaggac

SEQ ID NO: 1274458 - RNA, 19 nt, Artificial Sequence
  Description of Artificial Sequence: Synthetic oligonucleotide
augaaacagcuuucgcaga

SEQ ID NO: 1274459 - RNA, 19 nt, Artificial Sequence
  Description of Artificial Sequence: Synthetic oligonucleotide
guuccaagagccguguuga

SEQ ID NO: 1274460 - RNA, 19 nt, Artificial Sequence
  Description of Artificial Sequence: Synthetic oligonucleotide
ccaaugccaaacacguucg

SEQ ID NO: 1274461 - RNA, 19 nt, Artificial Sequence
  Description of Artificial Sequence: Synthetic oligonucleotide
auacugaaucacuuuuauu

SEQ ID NO: 1274462 - RNA, 19 nt, Artificial Sequence
  Description of Artificial Sequence: Synthetic oligonucleotide
uaacugcaauuuugguuca

SEQ ID NO: 1274463 - RNA, 19 nt, Artificial Sequence
  Description of Artificial Sequence: Synthetic oligonucleotide
cauagauaaucguucuuua

SEQ ID NO: 1274464 - RNA, 19 nt, Artificial Sequence
  Description of Artificial Sequence: Synthetic oligonucleotide
uugguucagaagccaucca

SEQ ID NO: 1274465 - RNA, 19 nt, Artificial Sequence
  Description of Artificial Sequence: Synthetic oligonucleotide
gguucagaagccauccaag

SEQ ID NO: 1274466 - RNA, 19 nt, Artificial Sequence
  Description of Artificial Sequence: Synthetic oligonucleotide
gaaucacacuugcugugga

SEQ ID NO: 1274467 - RNA, 19 nt, Artificial Sequence
  Description of Artificial Sequence: Synthetic oligonucleotide
ccuauuuugggauaagcaa

SEQ ID NO: 1274468 - RNA, 19 nt, Artificial Sequence
  Description of Artificial Sequence: Synthetic oligonucleotide
uuugugggucuuugauucu

SEQ ID NO: 1274469 - RNA, 19 nt, Artificial Sequence
  Description of Artificial Sequence: Synthetic oligonucleotide
cauaugggcugauagaaau

SEQ ID NO: 1274470 - RNA, 19 nt, Artificial Sequence
  Description of Artificial Sequence: Synthetic oligonucleotide
cauagguggugugacauga

SEQ ID NO: 1274471 - RNA, 19 nt, Artificial Sequence
  Description of Artificial Sequence: Synthetic oligonucleotide
uggaguguuugggaaggug

SEQ ID NO: 1274472 - RNA, 19 nt, Artificial Sequence
  Description of Artificial Sequence: Synthetic oligonucleotide
uauuuacuuuucggggcug

SEQ ID NO: 1274473 - RNA, 19 nt, Artificial Sequence
  Description of Artificial Sequence: Synthetic oligonucleotide
uaguugaacucagcaagaa

SEQ ID NO: 1274474 - RNA, 19 nt, Artificial Sequence
  Description of Artificial Sequence: Synthetic oligonucleotide
aaacagccuccuguuuguc

SEQ ID NO: 1274475 - RNA, 19 nt, Artificial Sequence
  Description of Artificial Sequence: Synthetic oligonucleotide
uauccacguccacccagcc

SEQ ID NO: 1274476 - RNA, 19 nt, Artificial Sequence
  Description of Artificial Sequence: Synthetic oligonucleotide
aacugcaauuuugguucag

SEQ ID NO: 1274477 - RNA, 19 nt, Artificial Sequence
  Description of Artificial Sequence: Synthetic oligonucleotide
gcgaugauaagauauuugu

SEQ ID NO: 1274478 - RNA, 19 nt, Artificial Sequence
  Description of Artificial Sequence: Synthetic oligonucleotide
uugaggacaucuggugagc

SEQ ID NO: 1274479 - RNA, 19 nt, Artificial Sequence
  Description of Artificial Sequence: Synthetic oligonucleotide
uuugucggcucggaccuca

SEQ ID NO: 1274480 - RNA, 19 nt, Artificial Sequence
  Description of Artificial Sequence: Synthetic oligonucleotide
ugccaaacacguucgggua

SEQ ID NO: 1274481 - RNA, 19 nt, Artificial Sequence
  Description of Artificial Sequence: Synthetic oligonucleotide
ggcucggaccucaauaagg

SEQ ID NO: 1274482 - RNA, 19 nt, Artificial Sequence
  Description of Artificial Sequence: Synthetic oligonucleotide
ucuuugaaguuggaagguu

SEQ ID NO: 1274483 - RNA, 19 nt, Artificial Sequence
  Description of Artificial Sequence: Synthetic oligonucleotide
cuuugaaguccugcagggc

SEQ ID NO: 1274484 - RNA, 19 nt, Artificial Sequence
  Description of Artificial Sequence: Synthetic oligonucleotide
caacuguuuggcaccagca

SEQ ID NO: 1274485 - RNA, 19 nt, Artificial Sequence
  Description of Artificial Sequence: Synthetic oligonucleotide
agcggacacgaaguauagc

SEQ ID NO: 1274486 - RNA, 19 nt, Artificial Sequence
  Description of Artificial Sequence: Synthetic oligonucleotide
aagagccguguugaagaug

SEQ ID NO: 1274487 - RNA, 19 nt, Artificial Sequence
  Description of Artificial Sequence: Synthetic oligonucleotide
gaagguugguacagucccc

SEQ ID NO: 1274488 - RNA, 19 nt, Artificial Sequence
  Description of Artificial Sequence: Synthetic oligonucleotide
auaugggcugauagaaaug

SEQ ID NO: 1274489 - RNA, 19 nt, Artificial Sequence
  Description of Artificial Sequence: Synthetic oligonucleotide
guccauaugggcugauaga

SEQ ID NO: 1274490 - RNA, 19 nt, Artificial Sequence
  Description of Artificial Sequence: Synthetic oligonucleotide
agagcaugcucugagccau

SEQ ID NO: 1274491 - RNA, 19 nt, Artificial Sequence
  Description of Artificial Sequence: Synthetic oligonucleotide
guaguugaacucagcaaga

SEQ ID NO: 1274492 - RNA, 19 nt, Artificial Sequence
  Description of Artificial Sequence: Synthetic oligonucleotide
aauccacuccacaccagau

SEQ ID NO: 1274493 - RNA, 19 nt, Artificial Sequence
  Description of Artificial Sequence: Synthetic oligonucleotide
cagaagccauccaaggaga

SEQ ID NO: 1274494 - RNA, 19 nt, Artificial Sequence
  Description of Artificial Sequence: Synthetic oligonucleotide
gccauucuuaacucaugcc

SEQ ID NO: 1274495 - RNA, 19 nt, Artificial Sequence
  Description of Artificial Sequence: Synthetic oligonucleotide
cagcggacacgaaguauag

SEQ ID NO: 1274496 - RNA, 19 nt, Artificial Sequence
  Description of Artificial Sequence: Synthetic oligonucleotide
auguuccaauauaggaaag

SEQ ID NO: 1274497 - RNA, 19 nt, Artificial Sequence
  Description of Artificial Sequence: Synthetic oligonucleotide
ucauacgagcagccauggu

SEQ ID NO: 1274498 - RNA, 19 nt, Artificial Sequence
  Description of Artificial Sequence: Synthetic oligonucleotide
ccuaaggaaacaggcaaag

SEQ ID NO: 1274499 - RNA, 19 nt, Artificial Sequence
  Description of Artificial Sequence: Synthetic oligonucleotide
agaugacauuagccuuggg

SEQ ID NO: 1274500 - RNA, 19 nt, Artificial Sequence
  Description of Artificial Sequence: Synthetic oligonucleotide
agcaugcucugagccauuc

SEQ ID NO: 1274501 - RNA, 19 nt, Artificial Sequence
  Description of Artificial Sequence: Synthetic oligonucleotide
gaacggccggauaaggaca

SEQ ID NO: 1274502 - RNA, 19 nt, Artificial Sequence
  Description of Artificial Sequence: Synthetic oligonucleotide
ccaauauaggaaaggcauc

SEQ ID NO: 1274503 - RNA, 19 nt, Artificial Sequence
  Description of Artificial Sequence: Synthetic oligonucleotide
cuauuuacuuuucggggcu

SEQ ID NO: 1274504 - RNA, 19 nt, Artificial Sequence
  Description of Artificial Sequence: Synthetic oligonucleotide
cuacucagaggucuagaaa

SEQ ID NO: 1274505 - RNA, 19 nt, Artificial Sequence
  Description of Artificial Sequence: Synthetic oligonucleotide
guggaacggccggauaagg

SEQ ID NO: 1274506 - RNA, 19 nt, Artificial Sequence
  Description of Artificial Sequence: Synthetic oligonucleotide
agagcgaugauaagauauu

SEQ ID NO: 1274507 - RNA, 19 nt, Artificial Sequence
  Description of Artificial Sequence: Synthetic oligonucleotide
ccggucuuccugaaguagg

SEQ ID NO: 1274508 - RNA, 19 nt, Artificial Sequence
  Description of Artificial Sequence: Synthetic oligonucleotide
agccguguugaagaugaca

SEQ ID NO: 1274509 - RNA, 19 nt, Artificial Sequence
  Description of Artificial Sequence: Synthetic oligonucleotide
gacacgaaguauagccauc

SEQ ID NO: 1274510 - RNA, 19 nt, Artificial Sequence
  Description of Artificial Sequence: Synthetic oligonucleotide
gggcacguggacuggauac

SEQ ID NO: 1274511 - RNA, 19 nt, Artificial Sequence
  Description of Artificial Sequence: Synthetic oligonucleotide
aaaccuucagguaguccuu

SEQ ID NO: 1274512 - RNA, 19 nt, Artificial Sequence
  Description of Artificial Sequence: Synthetic oligonucleotide
acguucggguauuucuuau

SEQ ID NO: 1274513 - RNA, 19 nt, Artificial Sequence
  Description of Artificial Sequence: Synthetic oligonucleotide
augggcugauagaaauguc

SEQ ID NO: 1274514 - RNA, 19 nt, Artificial Sequence
  Description of Artificial Sequence: Synthetic oligonucleotide
cuaccgucuucacugaaua

SEQ ID NO: 1274515 - RNA, 19 nt, Artificial Sequence
  Description of Artificial Sequence: Synthetic oligonucleotide
cucggcacuguaguugaac

SEQ ID NO: 1274516 - RNA, 19 nt, Artificial Sequence
  Description of Artificial Sequence: Synthetic oligonucleotide
cccuauuuugggauaagca

SEQ ID NO: 1274517 - RNA, 19 nt, Artificial Sequence
  Description of Artificial Sequence: Synthetic oligonucleotide
cugagccauucuuaacuca

SEQ ID NO: 1274518 - RNA, 19 nt, Artificial Sequence
  Description of Artificial Sequence: Synthetic oligonucleotide
acugaauaauuggacccua

SEQ ID NO: 1274519 - RNA, 19 nt, Artificial Sequence
  Description of Artificial Sequence: Synthetic oligonucleotide
uggguucaacaauggccac

SEQ ID NO: 1274520 - RNA, 19 nt, Artificial Sequence
  Description of Artificial Sequence: Synthetic oligonucleotide
acacgguuguagccaguca

SEQ ID NO: 1274521 - RNA, 19 nt, Artificial Sequence
  Description of Artificial Sequence: Synthetic oligonucleotide
gucggcucggaccucaaua

SEQ ID NO: 1274522 - RNA, 19 nt, Artificial Sequence
  Description of Artificial Sequence: Synthetic oligonucleotide
cccagccuaaggaaacagg

SEQ ID NO: 1274523 - RNA, 19 nt, Artificial Sequence
  Description of Artificial Sequence: Synthetic oligonucleotide
aacggccggauaaggacaa

SEQ ID NO: 1274524 - RNA, 19 nt, Artificial Sequence
  Description of Artificial Sequence: Synthetic oligonucleotide
auccacguccacccagcca

SEQ ID NO: 1274525 - RNA, 19 nt, Artificial Sequence
  Description of Artificial Sequence: Synthetic oligonucleotide
cauugcccucuuugaaguc

SEQ ID NO: 1274526 - RNA, 19 nt, Artificial Sequence
  Description of Artificial Sequence: Synthetic oligonucleotide
aguguuugggaaggugaaa

SEQ ID NO: 1274527 - RNA, 19 nt, Artificial Sequence
  Description of Artificial Sequence: Synthetic oligonucleotide
agucaaucgguaacugcaa

SEQ ID NO: 1274528 - RNA, 19 nt, Artificial Sequence
  Description of Artificial Sequence: Synthetic oligonucleotide
cacacgguuguagccaguc

SEQ ID NO: 1274529 - RNA, 19 nt, Artificial Sequence
  Description of Artificial Sequence: Synthetic oligonucleotide
gucugugcggauacaguuc

SEQ ID NO: 1274530 - RNA, 19 nt, Artificial Sequence
  Description of Artificial Sequence: Synthetic oligonucleotide
gcuacucagaggucuagaa

SEQ ID NO: 1274531 - RNA, 19 nt, Artificial Sequence
  Description of Artificial Sequence: Synthetic oligonucleotide
cuaucaaggauuccugauu

SEQ ID NO: 1274532 - RNA, 19 nt, Artificial Sequence
  Description of Artificial Sequence: Synthetic oligonucleotide
uuccggucuuccugaagua

SEQ ID NO: 1274533 - RNA, 19 nt, Artificial Sequence
  Description of Artificial Sequence: Synthetic oligonucleotide
agcuacucagaggucuaga

SEQ ID NO: 1274534 - RNA, 19 nt, Artificial Sequence
  Description of Artificial Sequence: Synthetic oligonucleotide
auuagccuugggccgcuuu

SEQ ID NO: 1274535 - RNA, 19 nt, Artificial Sequence
  Description of Artificial Sequence: Synthetic oligonucleotide
gcaguaaccaguggggcca

SEQ ID NO: 1274536 - RNA, 19 nt, Artificial Sequence
  Description of Artificial Sequence: Synthetic oligonucleotide
cuuuucggggcuguccaca

SEQ ID NO: 1274537 - RNA, 19 nt, Artificial Sequence
  Description of Artificial Sequence: Synthetic oligonucleotide
gggcugauagaaaugucuc

SEQ ID NO: 1274538 - RNA, 19 nt, Artificial Sequence
  Description of Artificial Sequence: Synthetic oligonucleotide
acuccucacagggcaaggu

SEQ ID NO: 1274539 - RNA, 19 nt, Artificial Sequence
  Description of Artificial Sequence: Synthetic oligonucleotide
gcugcagagugucuuuauc

SEQ ID NO: 1274540 - RNA, 19 nt, Artificial Sequence
  Description of Artificial Sequence: Synthetic oligonucleotide
cuuuauccacguccaccca

SEQ ID NO: 1274541 - RNA, 19 nt, Artificial Sequence
  Description of Artificial Sequence: Synthetic oligonucleotide
ggauuccugauugggcagc

SEQ ID NO: 1274542 - RNA, 19 nt, Artificial Sequence
  Description of Artificial Sequence: Synthetic oligonucleotide
guccuuuaaucuucucaua

SEQ ID NO: 1274543 - RNA, 19 nt, Artificial Sequence
  Description of Artificial Sequence: Synthetic oligonucleotide
ucacacgguuguagccagu

SEQ ID NO: 1274544 - RNA, 19 nt, Artificial Sequence
  Description of Artificial Sequence: Synthetic oligonucleotide
gcuggaccuccccaguagc

SEQ ID NO: 1274545 - RNA, 19 nt, Artificial Sequence
  Description of Artificial Sequence: Synthetic oligonucleotide
accaagcaccagccaccuc

SEQ ID NO: 1274546 - RNA, 19 nt, Artificial Sequence
  Description of Artificial Sequence: Synthetic oligonucleotide
caaucgguaacugcaauuu

SEQ ID NO: 1274547 - RNA, 19 nt, Artificial Sequence
  Description of Artificial Sequence: Synthetic oligonucleotide
caucaggauagaucaggcu

SEQ ID NO: 1274548 - RNA, 19 nt, Artificial Sequence
  Description of Artificial Sequence: Synthetic oligonucleotide
cucucgcuggguucaacaa

SEQ ID NO: 1274549 - RNA, 19 nt, Artificial Sequence
  Description of Artificial Sequence: Synthetic oligonucleotide
cuucagguaguccuuuaau

SEQ ID NO: 1274550 - RNA, 19 nt, Artificial Sequence
  Description of Artificial Sequence: Synthetic oligonucleotide
cacccagccagcagaaucu

SEQ ID NO: 1274551 - RNA, 19 nt, Artificial Sequence
  Description of Artificial Sequence: Synthetic oligonucleotide
auaguccagcuggauucca

SEQ ID NO: 1274552 - RNA, 19 nt, Artificial Sequence
  Description of Artificial Sequence: Synthetic oligonucleotide
agaaucugccacagggcuu

SEQ ID NO: 1274553 - RNA, 19 nt, Artificial Sequence
  Description of Artificial Sequence: Synthetic oligonucleotide
accagcggacacgaaguau

SEQ ID NO: 1274554 - RNA, 19 nt, Artificial Sequence
  Description of Artificial Sequence: Synthetic oligonucleotide
ccagucaccagcggacacg

SEQ ID NO: 1274555 - RNA, 19 nt, Artificial Sequence
  Description of Artificial Sequence: Synthetic oligonucleotide
cucauagguggugugacau

SEQ ID NO: 1274556 - RNA, 19 nt, Artificial Sequence
  Description of Artificial Sequence: Synthetic oligonucleotide
cacuccacaccagauggaa

SEQ ID NO: 1274557 - RNA, 19 nt, Artificial Sequence
  Description of Artificial Sequence: Synthetic oligonucleotide
uuauuuccccaggcuuguc

SEQ ID NO: 1274558 - RNA, 19 nt, Artificial Sequence
  Description of Artificial Sequence: Synthetic oligonucleotide
ugucggcucggaccucaau

SEQ ID NO: 1274559 - RNA, 19 nt, Artificial Sequence
  Description of Artificial Sequence: Synthetic oligonucleotide
gaaaugucucucgcugggu

SEQ ID NO: 1274560 - RNA, 19 nt, Artificial Sequence
  Description of Artificial Sequence: Synthetic oligonucleotide
gccuugggccgcuuuccgg

SEQ ID NO: 1274561 - RNA, 19 nt, Artificial Sequence
  Description of Artificial Sequence: Synthetic oligonucleotide
cacugaauaauuggacccu

SEQ ID NO: 1274562 - RNA, 19 nt, Artificial Sequence
  Description of Artificial Sequence: Synthetic oligonucleotide
gcacguggacuggauacag

SEQ ID NO: 1274563 - RNA, 19 nt, Artificial Sequence
  Description of Artificial Sequence: Synthetic oligonucleotide
aggcaucaugucagcuuuc

SEQ ID NO: 1274564 - RNA, 19 nt, Artificial Sequence
  Description of Artificial Sequence: Synthetic oligonucleotide
ccaagagcgaugauaagau

SEQ ID NO: 1274565 - RNA, 19 nt, Artificial Sequence
  Description of Artificial Sequence: Synthetic oligonucleotide
gucaaucgguaacugcaau

SEQ ID NO: 1274566 - RNA, 19 nt, Artificial Sequence
  Description of Artificial Sequence: Synthetic oligonucleotide
gugcggauacaguucuugu

SEQ ID NO: 1274567 - RNA, 19 nt, Artificial Sequence
  Description of Artificial Sequence: Synthetic oligonucleotide
aguaaccaguggggccauc

SEQ ID NO: 1274568 - RNA, 19 nt, Artificial Sequence
  Description of Artificial Sequence: Synthetic oligonucleotide
cugaauaauuggacccuau

SEQ ID NO: 1274569 - RNA, 19 nt, Artificial Sequence
  Description of Artificial Sequence: Synthetic oligonucleotide
gagcgaugauaagauauuu

SEQ ID NO: 1274570 - RNA, 19 nt, Artificial Sequence
  Description of Artificial Sequence: Synthetic oligonucleotide
augcucugagccauucuua

SEQ ID NO: 1274571 - RNA, 19 nt, Artificial Sequence
  Description of Artificial Sequence: Synthetic oligonucleotide
cagcuuucgcagaaaggcu

SEQ ID NO: 1274572 - RNA, 19 nt, Artificial Sequence
  Description of Artificial Sequence: Synthetic oligonucleotide
agccagucaccagcggaca

SEQ ID NO: 1274573 - RNA, 19 nt, Artificial Sequence
  Description of Artificial Sequence: Synthetic oligonucleotide
agcuuucaugaaauacaua

SEQ ID NO: 1274574 - RNA, 19 nt, Artificial Sequence
  Description of Artificial Sequence: Synthetic oligonucleotide
ccaucauagucaaucggua

SEQ ID NO: 1274575 - RNA, 19 nt, Artificial Sequence
  Description of Artificial Sequence: Synthetic oligonucleotide
gauuccugauugggcagcu

SEQ ID NO: 1274576 - RNA, 19 nt, Artificial Sequence
  Description of Artificial Sequence: Synthetic oligonucleotide
gguugugcuuauaguugac

SEQ ID NO: 1274577 - RNA, 19 nt, Artificial Sequence
  Description of Artificial Sequence: Synthetic oligonucleotide
cucagaggucuagaaaggu

SEQ ID NO: 1274578 - RNA, 19 nt, Artificial Sequence
  Description of Artificial Sequence: Synthetic oligonucleotide
acauuagccuugggccgcu

SEQ ID NO: 1274579 - RNA, 19 nt, Artificial Sequence
  Description of Artificial Sequence: Synthetic oligonucleotide
ccuguuugucggcucggac

SEQ ID NO: 1274580 - RNA, 19 nt, Artificial Sequence
  Description of Artificial Sequence: Synthetic oligonucleotide
ggguucaacaauggccaca

SEQ ID NO: 1274581 - RNA, 19 nt, Artificial Sequence
  Description of Artificial Sequence: Synthetic oligonucleotide
cguucggguauuucuuaug

SEQ ID NO: 1274582 - RNA, 19 nt, Artificial Sequence
  Description of Artificial Sequence: Synthetic oligonucleotide
gcucauagguggugugaca

SEQ ID NO: 1274583 - RNA, 19 nt, Artificial Sequence
  Description of Artificial Sequence: Synthetic oligonucleotide
uugucggcucggaccucaa

SEQ ID NO: 1274584 - RNA, 19 nt, Artificial Sequence
  Description of Artificial Sequence: Synthetic oligonucleotide
ccguugucugugcggauac

SEQ ID NO: 1274585 - RNA, 19 nt, Artificial Sequence
  Description of Artificial Sequence: Synthetic oligonucleotide
aguaggcuucugauaggua

SEQ ID NO: 1274586 - RNA, 19 nt, Artificial Sequence
  Description of Artificial Sequence: Synthetic oligonucleotide
acggccggauaaggacaac

SEQ ID NO: 1274587 - RNA, 19 nt, Artificial Sequence
  Description of Artificial Sequence: Synthetic oligonucleotide
cgaugauaagauauuugua

SEQ ID NO: 1274588 - RNA, 19 nt, Artificial Sequence
  Description of Artificial Sequence: Synthetic oligonucleotide
gccggauaaggacaacugu

SEQ ID NO: 1274589 - RNA, 19 nt, Artificial Sequence
  Description of Artificial Sequence: Synthetic oligonucleotide
cuuucgcagaaaggcugga

SEQ ID NO: 1274590 - RNA, 19 nt, Artificial Sequence
  Description of Artificial Sequence: Synthetic oligonucleotide
caagaaucacacgguugua

SEQ ID NO: 1274591 - RNA, 19 nt, Artificial Sequence
  Description of Artificial Sequence: Synthetic oligonucleotide
ucccguugucugugcggau

SEQ ID NO: 1274592 - RNA, 19 nt, Artificial Sequence
  Description of Artificial Sequence: Synthetic oligonucleotide
ccauaugggcugauagaaa

SEQ ID NO: 1274593 - RNA, 19 nt, Artificial Sequence
  Description of Artificial Sequence: Synthetic oligonucleotide
gccagucaccagcggacac

SEQ ID NO: 1274594 - RNA, 19 nt, Artificial Sequence
  Description of Artificial Sequence: Synthetic oligonucleotide
cucuaccgucuucacugaa

SEQ ID NO: 1274595 - RNA, 19 nt, Artificial Sequence
  Description of Artificial Sequence: Synthetic oligonucleotide
gguaguccuuuaaucuucu

SEQ ID NO: 1274596 - RNA, 19 nt, Artificial Sequence
  Description of Artificial Sequence: Synthetic oligonucleotide
cagcaagaaucacacgguu

SEQ ID NO: 1274597 - RNA, 19 nt, Artificial Sequence
  Description of Artificial Sequence: Synthetic oligonucleotide
ugucucucgcuggguucaa

SEQ ID NO: 1274598 - RNA, 19 nt, Artificial Sequence
  Description of Artificial Sequence: Synthetic oligonucleotide
cgcuggguucaacaauggc

SEQ ID NO: 1274599 - RNA, 19 nt, Artificial Sequence
  Description of Artificial Sequence: Synthetic oligonucleotide
gacaucuggugagcucaua

SEQ ID NO: 1274600 - RNA, 19 nt, Artificial Sequence
  Description of Artificial Sequence: Synthetic oligonucleotide
ccggauaaggacaacuguu

SEQ ID NO: 1274601 - RNA, 19 nt, Artificial Sequence
  Description of Artificial Sequence: Synthetic oligonucleotide
cagcaucauguuccaauau

SEQ ID NO: 1274602 - RNA, 19 nt, Artificial Sequence
  Description of Artificial Sequence: Synthetic oligonucleotide
cguccacccagccagcaga

SEQ ID NO: 1274603 - RNA, 19 nt, Artificial Sequence
  Description of Artificial Sequence: Synthetic oligonucleotide
cagugaggucccucucucu

SEQ ID NO: 1274604 - RNA, 19 nt, Artificial Sequence
  Description of Artificial Sequence: Synthetic oligonucleotide
cacguccacccagccagca

SEQ ID NO: 1274605 - RNA, 19 nt, Artificial Sequence
  Description of Artificial Sequence: Synthetic oligonucleotide
cucggaccucaauaagguu

SEQ ID NO: 1274606 - RNA, 19 nt, Artificial Sequence
  Description of Artificial Sequence: Synthetic oligonucleotide
ggaccucaauaagguugug

SEQ ID NO: 1274607 - RNA, 19 nt, Artificial Sequence
  Description of Artificial Sequence: Synthetic oligonucleotide
ccgucuucacugaauaauu

SEQ ID NO: 1274608 - RNA, 19 nt, Artificial Sequence
  Description of Artificial Sequence: Synthetic oligonucleotide
ccuugggccgcuuuccggu

SEQ ID NO: 1274609 - RNA, 19 nt, Artificial Sequence
  Description of Artificial Sequence: Synthetic oligonucleotide
caccaagcaccagccaccu

SEQ ID NO: 1274610 - RNA, 19 nt, Artificial Sequence
  Description of Artificial Sequence: Synthetic oligonucleotide
cggaccucaauaagguugu

SEQ ID NO: 1274611 - RNA, 19 nt, Artificial Sequence
  Description of Artificial Sequence: Synthetic oligonucleotide
ccacuccacaccagaugga

SEQ ID NO: 1274612 - RNA, 19 nt, Artificial Sequence
  Description of Artificial Sequence: Synthetic oligonucleotide
gccgcuuuccggucuuccu

SEQ ID NO: 1274613 - RNA, 19 nt, Artificial Sequence
  Description of Artificial Sequence: Synthetic oligonucleotide
agucaccagcggacacgaa

SEQ ID NO: 1274614 - RNA, 19 nt, Artificial Sequence
  Description of Artificial Sequence: Synthetic oligonucleotide
ggucccucucucugauaau

SEQ ID NO: 1274615 - RNA, 19 nt, Artificial Sequence
  Description of Artificial Sequence: Synthetic oligonucleotide
ggcuugucuugaggacauc

SEQ ID NO: 1274616 - RNA, 19 nt, Artificial Sequence
  Description of Artificial Sequence: Synthetic oligonucleotide
cccguugucugugcggaua

SEQ ID NO: 1274617 - RNA, 19 nt, Artificial Sequence
  Description of Artificial Sequence: Synthetic oligonucleotide
cugugcggauacaguucuu

SEQ ID NO: 1274618 - RNA, 19 nt, Artificial Sequence
  Description of Artificial Sequence: Synthetic oligonucleotide
gagcaugcucugagccauu

SEQ ID NO: 1274619 - RNA, 19 nt, Artificial Sequence
  Description of Artificial Sequence: Synthetic oligonucleotide
ccaaacacguucggguauu

SEQ ID NO: 1274620 - RNA, 19 nt, Artificial Sequence
  Description of Artificial Sequence: Synthetic oligonucleotide
ggacaucuggugagcucau

SEQ ID NO: 1274621 - RNA, 19 nt, Artificial Sequence
  Description of Artificial Sequence: Synthetic oligonucleotide
caguaaccaguggggccau

SEQ ID NO: 1274622 - RNA, 19 nt, Artificial Sequence
  Description of Artificial Sequence: Synthetic oligonucleotide
gcucggcacuguaguugaa

SEQ ID NO: 1274623 - RNA, 19 nt, Artificial Sequence
  Description of Artificial Sequence: Synthetic oligonucleotide
ccccaaugccaaacacguu

SEQ ID NO: 1274624 - RNA, 19 nt, Artificial Sequence
  Description of Artificial Sequence: Synthetic oligonucleotide
cauuagccuugggccgcuu

SEQ ID NO: 1274625 - RNA, 19 nt, Artificial Sequence
  Description of Artificial Sequence: Synthetic oligonucleotide
ccgggcacguggacuggau

SEQ ID NO: 1274626 - RNA, 19 nt, Artificial Sequence
  Description of Artificial Sequence: Synthetic oligonucleotide
ucaauuaccaauaauaugg

SEQ ID NO: 1274627 - RNA, 19 nt, Artificial Sequence
  Description of Artificial Sequence: Synthetic oligonucleotide
ucaauaaucccaaauauug

SEQ ID NO: 1274628 - RNA, 19 nt, Artificial Sequence
  Description of Artificial Sequence: Synthetic oligonucleotide
aauaaucccaaauauuguc

SEQ ID NO: 1274629 - RNA, 19 nt, Artificial Sequence
  Description of Artificial Sequence: Synthetic oligonucleotide
uguagaaugacauuguuca

SEQ ID NO: 1274630 - RNA, 19 nt, Artificial Sequence
  Description of Artificial Sequence: Synthetic oligonucleotide
aauauggucacauaagacu

SEQ ID NO: 1274631 - RNA, 19 nt, Artificial Sequence
  Description of Artificial Sequence: Synthetic oligonucleotide
uaugaaacauccaagauuc

SEQ ID NO: 1274632 - RNA, 19 nt, Artificial Sequence
  Description of Artificial Sequence: Synthetic oligonucleotide
aagaucacucuccagacac

SEQ ID NO: 1274633 - RNA, 19 nt, Artificial Sequence
  Description of Artificial Sequence: Synthetic oligonucleotide
guauuuaaguccuaguucg

SEQ ID NO: 1274634 - RNA, 19 nt, Artificial Sequence
  Description of Artificial Sequence: Synthetic oligonucleotide
aaagauagcuguuguagac

SEQ ID NO: 1274635 - RNA, 19 nt, Artificial Sequence
  Description of Artificial Sequence: Synthetic oligonucleotide
uguaauaaaggcucuaacc

SEQ ID NO: 1274636 - RNA, 19 nt, Artificial Sequence
  Description of Artificial Sequence: Synthetic oligonucleotide
uaauuaucaguguagaaug

SEQ ID NO: 1274637 - RNA, 19 nt, Artificial Sequence
  Description of Artificial Sequence: Synthetic oligonucleotide
ugagaaguaugaaacaucc

SEQ ID NO: 1274638 - RNA, 19 nt, Artificial Sequence
  Description of Artificial Sequence: Synthetic oligonucleotide
aaggcucuaaccuuagaac

SEQ ID NO: 1274639 - RNA, 19 nt, Artificial Sequence
  Description of Artificial Sequence: Synthetic oligonucleotide
ugaauaauuucaaacgcug

SEQ ID NO: 1274640 - RNA, 19 nt, Artificial Sequence
  Description of Artificial Sequence: Synthetic oligonucleotide
uaaaccuaaagauagcugu

SEQ ID NO: 1274641 - RNA, 19 nt, Artificial Sequence
  Description of Artificial Sequence: Synthetic oligonucleotide
aaugaaaggauuguuuauc

SEQ ID NO: 1274642 - RNA, 19 nt, Artificial Sequence
  Description of Artificial Sequence: Synthetic oligonucleotide
cuaggauuaucaauaaucc

SEQ ID NO: 1274643 - RNA, 19 nt, Artificial Sequence
  Description of Artificial Sequence: Synthetic oligonucleotide
aauaauauggucacauaag

SEQ ID NO: 1274644 - RNA, 19 nt, Artificial Sequence
  Description of Artificial Sequence: Synthetic oligonucleotide
uucuaauucggccugacga

SEQ ID NO: 1274645 - RNA, 19 nt, Artificial Sequence
  Description of Artificial Sequence: Synthetic oligonucleotide
auaagacuauuacacgugc

SEQ ID NO: 1274646 - RNA, 19 nt, Artificial Sequence
  Description of Artificial Sequence: Synthetic oligonucleotide
aacgcugggccucuuaggc

SEQ ID NO: 1274647 - RNA, 19 nt, Artificial Sequence
  Description of Artificial Sequence: Synthetic oligonucleotide
ugucaguaauacauuaggg

SEQ ID NO: 1274648 - RNA, 19 nt, Artificial Sequence
  Description of Artificial Sequence: Synthetic oligonucleotide
caugaauaauuucaaacgc

SEQ ID NO: 1274649 - RNA, 19 nt, Artificial Sequence
  Description of Artificial Sequence: Synthetic oligonucleotide
ucuacuguaagccccacca

SEQ ID NO: 1274650 - RNA, 19 nt, Artificial Sequence
  Description of Artificial Sequence: Synthetic oligonucleotide
aaugccugugccaacaugg

SEQ ID NO: 1274651 - RNA, 19 nt, Artificial Sequence
  Description of Artificial Sequence: Synthetic oligonucleotide
ucuucgaacugucuugugg

SEQ ID NO: 1274652 - RNA, 19 nt, Artificial Sequence
  Description of Artificial Sequence: Synthetic oligonucleotide
aacugauauauauacccug

SEQ ID NO: 1274653 - RNA, 19 nt, Artificial Sequence
  Description of Artificial Sequence: Synthetic oligonucleotide
aacgaccuggucuaggcgg

SEQ ID NO: 1274654 - RNA, 19 nt, Artificial Sequence
  Description of Artificial Sequence: Synthetic oligonucleotide
auacccuucuaauucggcc

SEQ ID NO: 1274655 - RNA, 19 nt, Artificial Sequence
  Description of Artificial Sequence: Synthetic oligonucleotide
uuuaaguccuaguucgucc

SEQ ID NO: 1274656 - RNA, 19 nt, Artificial Sequence
  Description of Artificial Sequence: Synthetic oligonucleotide
aaaggcucuaaccuuagaa

SEQ ID NO: 1274657 - RNA, 19 nt, Artificial Sequence
  Description of Artificial Sequence: Synthetic oligonucleotide
auacauuagggagacauuc

SEQ ID NO: 1274658 - RNA, 19 nt, Artificial Sequence
  Description of Artificial Sequence: Synthetic oligonucleotide
uuaccaauaauauggucac

SEQ ID NO: 1274659 - RNA, 19 nt, Artificial Sequence
  Description of Artificial Sequence: Synthetic oligonucleotide
caaaggguaagcuacuuug

SEQ ID NO: 1274660 - RNA, 19 nt, Artificial Sequence
  Description of Artificial Sequence: Synthetic oligonucleotide
uguaaugaaaggauuguuu

SEQ ID NO: 1274661 - RNA, 19 nt, Artificial Sequence
  Description of Artificial Sequence: Synthetic oligonucleotide
ugauauauauacccugacu

SEQ ID NO: 1274662 - RNA, 19 nt, Artificial Sequence
  Description of Artificial Sequence: Synthetic oligonucleotide
aagaacucuggucaauuca

SEQ ID NO: 1274663 - RNA, 19 nt, Artificial Sequence
  Description of Artificial Sequence: Synthetic oligonucleotide
uaauauggucacauaagac

SEQ ID NO: 1274664 - RNA, 19 nt, Artificial Sequence
  Description of Artificial Sequence: Synthetic oligonucleotide
uauuacacgugcaagugaa

SEQ ID NO: 1274665 - RNA, 19 nt, Artificial Sequence
  Description of Artificial Sequence: Synthetic oligonucleotide
caggguaggcuuaagagcc

SEQ ID NO: 1274666 - RNA, 19 nt, Artificial Sequence
  Description of Artificial Sequence: Synthetic oligonucleotide
uuaucaguguagaaugaca

SEQ ID NO: 1274667 - RNA, 19 nt, Artificial Sequence
  Description of Artificial Sequence: Synthetic oligonucleotide
aauauugucucaagggucu

SEQ ID NO: 1274668 - RNA, 19 nt, Artificial Sequence
  Description of Artificial Sequence: Synthetic oligonucleotide
ugcaggguaggcuuaagag

SEQ ID NO: 1274669 - RNA, 19 nt, Artificial Sequence
  Description of Artificial Sequence: Synthetic oligonucleotide
auuucgauucccaagaacu

SEQ ID NO: 1274670 - RNA, 19 nt, Artificial Sequence
  Description of Artificial Sequence: Synthetic oligonucleotide
cuuaggcucucuaucaacc

SEQ ID NO: 1274671 - RNA, 19 nt, Artificial Sequence
  Description of Artificial Sequence: Synthetic oligonucleotide
uaggacacugcacuaguag

SEQ ID NO: 1274672 - RNA, 19 nt, Artificial Sequence
  Description of Artificial Sequence: Synthetic oligonucleotide
cauuaucagcaucaggagg

SEQ ID NO: 1274673 - RNA, 19 nt, Artificial Sequence
  Description of Artificial Sequence: Synthetic oligonucleotide
uuuugaucgcacagaauca

SEQ ID NO: 1274674 - RNA, 19 nt, Artificial Sequence
  Description of Artificial Sequence: Synthetic oligonucleotide
auuaucaguguagaaugac

SEQ ID NO: 1274675 - RNA, 19 nt, Artificial Sequence
  Description of Artificial Sequence: Synthetic oligonucleotide
ucaagugaaauacccuucu

SEQ ID NO: 1274676 - RNA, 19 nt, Artificial Sequence
  Description of Artificial Sequence: Synthetic oligonucleotide
accaauagugccuuccgag

SEQ ID NO: 1274677 - RNA, 19 nt, Artificial Sequence
  Description of Artificial Sequence: Synthetic oligonucleotide
uuugacaacacaucagaua

SEQ ID NO: 1274678 - RNA, 19 nt, Artificial Sequence
  Description of Artificial Sequence: Synthetic oligonucleotide
guaauaaaggcucuaaccu

SEQ ID NO: 1274679 - RNA, 19 nt, Artificial Sequence
  Description of Artificial Sequence: Synthetic oligonucleotide
uaacugauauauauacccu

SEQ ID NO: 1274680 - RNA, 19 nt, Artificial Sequence
  Description of Artificial Sequence: Synthetic oligonucleotide
cauaagacuauuacacgug

SEQ ID NO: 1274681 - RNA, 19 nt, Artificial Sequence
  Description of Artificial Sequence: Synthetic oligonucleotide
auuuguuugccuccuagga

SEQ ID NO: 1274682 - RNA, 19 nt, Artificial Sequence
  Description of Artificial Sequence: Synthetic oligonucleotide
uacccugacuaucuuagcc

SEQ ID NO: 1274683 - RNA, 19 nt, Artificial Sequence
  Description of Artificial Sequence: Synthetic oligonucleotide
aauacccuucuaauucggc

SEQ ID NO: 1274684 - RNA, 19 nt, Artificial Sequence
  Description of Artificial Sequence: Synthetic oligonucleotide
uuaaguccuaguucguccc

SEQ ID NO: 1274685 - RNA, 19 nt, Artificial Sequence
  Description of Artificial Sequence: Synthetic oligonucleotide
uuaggcucucuaucaaccg

SEQ ID NO: 1274686 - RNA, 19 nt, Artificial Sequence
  Description of Artificial Sequence: Synthetic oligonucleotide
uaauucggccugacgaagg

SEQ ID NO: 1274687 - RNA, 19 nt, Artificial Sequence
  Description of Artificial Sequence: Synthetic oligonucleotide
uuaccugagaaguaugaaa

SEQ ID NO: 1274688 - RNA, 19 nt, Artificial Sequence
  Description of Artificial Sequence: Synthetic oligonucleotide
aaaggguaagcuacuuugg

SEQ ID NO: 1274689 - RNA, 19 nt, Artificial Sequence
  Description of Artificial Sequence: Synthetic oligonucleotide
uaacugaaguaaacuuggg

SEQ ID NO: 1274690 - RNA, 19 nt, Artificial Sequence
  Description of Artificial Sequence: Synthetic oligonucleotide
ugcccuaggauuaucaaua

SEQ ID NO: 1274691 - RNA, 19 nt, Artificial Sequence
  Description of Artificial Sequence: Synthetic oligonucleotide
ccuaggauuaucaauaauc

SEQ ID NO: 1274692 - RNA, 19 nt, Artificial Sequence
  Description of Artificial Sequence: Synthetic oligonucleotide
auauauauacccugacuau

SEQ ID NO: 1274693 - RNA, 19 nt, Artificial Sequence
  Description of Artificial Sequence: Synthetic oligonucleotide
uugauuuaauuaucagugu

SEQ ID NO: 1274694 - RNA, 19 nt, Artificial Sequence
  Description of Artificial Sequence: Synthetic oligonucleotide
agauacaucauaaaccuaa

SEQ ID NO: 1274695 - RNA, 19 nt, Artificial Sequence
  Description of Artificial Sequence: Synthetic oligonucleotide
aaucccaaauauugucuca

SEQ ID NO: 1274696 - RNA, 19 nt, Artificial Sequence
  Description of Artificial Sequence: Synthetic oligonucleotide
ugcaagugaauuuguuugc

SEQ ID NO: 1274697 - RNA, 19 nt, Artificial Sequence
  Description of Artificial Sequence: Synthetic oligonucleotide
cuuccgaggguucaugucc

SEQ ID NO: 1274698 - RNA, 19 nt, Artificial Sequence
  Description of Artificial Sequence: Synthetic oligonucleotide
aacauacgcagacagcuuu

SEQ ID NO: 1274699 - RNA, 19 nt, Artificial Sequence
  Description of Artificial Sequence: Synthetic oligonucleotide
caauagugccuuccgaggg

SEQ ID NO: 1274700 - RNA, 19 nt, Artificial Sequence
  Description of Artificial Sequence: Synthetic oligonucleotide
aguaugaaacauccaagau

SEQ ID NO: 1274701 - RNA, 19 nt, Artificial Sequence
  Description of Artificial Sequence: Synthetic oligonucleotide
uacauuagggagacauuca

SEQ ID NO: 1274702 - RNA, 19 nt, Artificial Sequence
  Description of Artificial Sequence: Synthetic oligonucleotide
agucucuacuguaagcccc

SEQ ID NO: 1274703 - RNA, 19 nt, Artificial Sequence
  Description of Artificial Sequence: Synthetic oligonucleotide
aggcucuaaccuuagaaca

SEQ ID NO: 1274704 - RNA, 19 nt, Artificial Sequence
  Description of Artificial Sequence: Synthetic oligonucleotide
aauagugccuuccgagggu

SEQ ID NO: 1274705 - RNA, 19 nt, Artificial Sequence
  Description of Artificial Sequence: Synthetic oligonucleotide
ugauaugaauucuuccauc

SEQ ID NO: 1274706 - RNA, 19 nt, Artificial Sequence
  Description of Artificial Sequence: Synthetic oligonucleotide
caauaauauggucacauaa

SEQ ID NO: 1274707 - RNA, 19 nt, Artificial Sequence
  Description of Artificial Sequence: Synthetic oligonucleotide
ugacuugcaaugcccuagg

SEQ ID NO: 1274708 - RNA, 19 nt, Artificial Sequence
  Description of Artificial Sequence: Synthetic oligonucleotide
uaagacuauuacacgugca

SEQ ID NO: 1274709 - RNA, 19 nt, Artificial Sequence
  Description of Artificial Sequence: Synthetic oligonucleotide
aaauacccuucuaauucgg

SEQ ID NO: 1274710 - RNA, 19 nt, Artificial Sequence
  Description of Artificial Sequence: Synthetic oligonucleotide
uaaucccaaauauugucuc

SEQ ID NO: 1274711 - RNA, 19 nt, Artificial Sequence
  Description of Artificial Sequence: Synthetic oligonucleotide
cauucugcaacuguaauga

SEQ ID NO: 1274712 - RNA, 19 nt, Artificial Sequence
  Description of Artificial Sequence: Synthetic oligonucleotide
cucgaugucugccacuccg

SEQ ID NO: 1274713 - RNA, 19 nt, Artificial Sequence
  Description of Artificial Sequence: Synthetic oligonucleotide
auuucaaacgcugggccuc

SEQ ID NO: 1274714 - RNA, 19 nt, Artificial Sequence
  Description of Artificial Sequence: Synthetic oligonucleotide
ucuaauucggccugacgaa

SEQ ID NO: 1274715 - RNA, 19 nt, Artificial Sequence
  Description of Artificial Sequence: Synthetic oligonucleotide
uacgcagacagcuuuucac

SEQ ID NO: 1274716 - RNA, 19 nt, Artificial Sequence
  Description of Artificial Sequence: Synthetic oligonucleotide
guauuugacuugcaaugcc

SEQ ID NO: 1274717 - RNA, 19 nt, Artificial Sequence
  Description of Artificial Sequence: Synthetic oligonucleotide
ucauuaccugagaaguaug

SEQ ID NO: 1274718 - RNA, 19 nt, Artificial Sequence
  Description of Artificial Sequence: Synthetic oligonucleotide
acuauuacacgugcaagug

SEQ ID NO: 1274719 - RNA, 19 nt, Artificial Sequence
  Description of Artificial Sequence: Synthetic oligonucleotide
cugacuaucuuagccagcc

SEQ ID NO: 1274720 - RNA, 19 nt, Artificial Sequence
  Description of Artificial Sequence: Synthetic oligonucleotide
acuaucaauuaccaauaau

SEQ ID NO: 1274721 - RNA, 19 nt, Artificial Sequence
  Description of Artificial Sequence: Synthetic oligonucleotide
uagaacauacgcagacagc

SEQ ID NO: 1274722 - RNA, 19 nt, Artificial Sequence
  Description of Artificial Sequence: Synthetic oligonucleotide
gaacacaacaaaggguaag

SEQ ID NO: 1274723 - RNA, 19 nt, Artificial Sequence
  Description of Artificial Sequence: Synthetic oligonucleotide
aaguccuaguucgucccgc

SEQ ID NO: 1274724 - RNA, 19 nt, Artificial Sequence
  Description of Artificial Sequence: Synthetic oligonucleotide
ugcaccagucuuccaagag

SEQ ID NO: 1274725 - RNA, 19 nt, Artificial Sequence
  Description of Artificial Sequence: Synthetic oligonucleotide
ggguaagcuacuuuggcag

SEQ ID NO: 1274726 - RNA, 19 nt, Artificial Sequence
  Description of Artificial Sequence: Synthetic oligonucleotide
uucauuaccugagaaguau

SEQ ID NO: 1274727 - RNA, 19 nt, Artificial Sequence
  Description of Artificial Sequence: Synthetic oligonucleotide
ugaaguaaacuuggggcug

SEQ ID NO: 1274728 - RNA, 19 nt, Artificial Sequence
  Description of Artificial Sequence: Synthetic oligonucleotide
aggauuguuuaucuugaga

SEQ ID NO: 1274729 - RNA, 19 nt, Artificial Sequence
  Description of Artificial Sequence: Synthetic oligonucleotide
uacccuucuaauucggccu

SEQ ID NO: 1274730 - RNA, 19 nt, Artificial Sequence
  Description of Artificial Sequence: Synthetic oligonucleotide
uaaguccuaguucgucccg

SEQ ID NO: 1274731 - RNA, 19 nt, Artificial Sequence
  Description of Artificial Sequence: Synthetic oligonucleotide
gaaguaaacuuggggcugg

SEQ ID NO: 1274732 - RNA, 19 nt, Artificial Sequence
  Description of Artificial Sequence: Synthetic oligonucleotide
uuucgauucccaagaacuc

SEQ ID NO: 1274733 - RNA, 19 nt, Artificial Sequence
  Description of Artificial Sequence: Synthetic oligonucleotide
ucuaucaaccgccuucuuu

SEQ ID NO: 1274734 - RNA, 19 nt, Artificial Sequence
  Description of Artificial Sequence: Synthetic oligonucleotide
augaauaauuucaaacgcu

SEQ ID NO: 1274735 - RNA, 19 nt, Artificial Sequence
  Description of Artificial Sequence: Synthetic oligonucleotide
aagauagcuguuguagacu

SEQ ID NO: 1274736 - RNA, 19 nt, Artificial Sequence
  Description of Artificial Sequence: Synthetic oligonucleotide
cuggucaauucacccaucg

SEQ ID NO: 1274737 - RNA, 19 nt, Artificial Sequence
  Description of Artificial Sequence: Synthetic oligonucleotide
aaugcccuaggauuaucaa

SEQ ID NO: 1274738 - RNA, 19 nt, Artificial Sequence
  Description of Artificial Sequence: Synthetic oligonucleotide
cacuuugacaacacaucag

SEQ ID NO: 1274739 - RNA, 19 nt, Artificial Sequence
  Description of Artificial Sequence: Synthetic oligonucleotide
cugagaaguaugaaacauc

SEQ ID NO: 1274740 - RNA, 19 nt, Artificial Sequence
  Description of Artificial Sequence: Synthetic oligonucleotide
aauucggccugacgaagga

SEQ ID NO: 1274741 - RNA, 19 nt, Artificial Sequence
  Description of Artificial Sequence: Synthetic oligonucleotide
auaaucccaaauauugucu

SEQ ID NO: 1274742 - RNA, 19 nt, Artificial Sequence
  Description of Artificial Sequence: Synthetic oligonucleotide
ugaucgcacagaaucaaua

SEQ ID NO: 1274743 - RNA, 19 nt, Artificial Sequence
  Description of Artificial Sequence: Synthetic oligonucleotide
uaguaagguauuugacuug

SEQ ID NO: 1274744 - RNA, 19 nt, Artificial Sequence
  Description of Artificial Sequence: Synthetic oligonucleotide
auauauacccugacuaucu

SEQ ID NO: 1274745 - RNA, 19 nt, Artificial Sequence
  Description of Artificial Sequence: Synthetic oligonucleotide
acuaguagaaugacucauc

SEQ ID NO: 1274746 - RNA, 19 nt, Artificial Sequence
  Description of Artificial Sequence: Synthetic oligonucleotide
uaggcucucuaucaaccgc

SEQ ID NO: 1274747 - RNA, 19 nt, Artificial Sequence
  Description of Artificial Sequence: Synthetic oligonucleotide
uaaccucagcauucaauug

SEQ ID NO: 1274748 - RNA, 19 nt, Artificial Sequence
  Description of Artificial Sequence: Synthetic oligonucleotide
caauaaggugaacacaaca

SEQ ID NO: 1274749 - RNA, 19 nt, Artificial Sequence
  Description of Artificial Sequence: Synthetic oligonucleotide
uccuaguucgucccgcgug

SEQ ID NO: 1274750 - RNA, 19 nt, Artificial Sequence
  Description of Artificial Sequence: Synthetic oligonucleotide
cucagauacugcaggguag

SEQ ID NO: 1274751 - RNA, 19 nt, Artificial Sequence
  Description of Artificial Sequence: Synthetic oligonucleotide
ucaggcauucugcaacugu

SEQ ID NO: 1274752 - RNA, 19 nt, Artificial Sequence
  Description of Artificial Sequence: Synthetic oligonucleotide
acugcacuaguagaaugac

SEQ ID NO: 1274753 - RNA, 19 nt, Artificial Sequence
  Description of Artificial Sequence: Synthetic oligonucleotide
uauuuagaaccagacacuu

SEQ ID NO: 1274754 - RNA, 19 nt, Artificial Sequence
  Description of Artificial Sequence: Synthetic oligonucleotide
augacucaucuuuugauuu

SEQ ID NO: 1274755 - RNA, 19 nt, Artificial Sequence
  Description of Artificial Sequence: Synthetic oligonucleotide
ucuuaggcucucuaucaac

SEQ ID NO: 1274756 - RNA, 19 nt, Artificial Sequence
  Description of Artificial Sequence: Synthetic oligonucleotide
uagucucuacuguaagccc

SEQ ID NO: 1274757 - RNA, 19 nt, Artificial Sequence
  Description of Artificial Sequence: Synthetic oligonucleotide
agguaucuccuugggaacc

SEQ ID NO: 1274758 - RNA, 19 nt, Artificial Sequence
  Description of Artificial Sequence: Synthetic oligonucleotide
acuguaaugaaaggauugu

SEQ ID NO: 1274759 - RNA, 19 nt, Artificial Sequence
  Description of Artificial Sequence: Synthetic oligonucleotide
uacaucagacaccugccau

SEQ ID NO: 1274760 - RNA, 19 nt, Artificial Sequence
  Description of Artificial Sequence: Synthetic oligonucleotide
agacuauuacacgugcaag

SEQ ID NO: 1274761 - RNA, 19 nt, Artificial Sequence
  Description of Artificial Sequence: Synthetic oligonucleotide
caaccaauagugccuuccg

SEQ ID NO: 1274762 - RNA, 19 nt, Artificial Sequence
  Description of Artificial Sequence: Synthetic oligonucleotide
accuaaagauagcuguugu

SEQ ID NO: 1274763 - RNA, 19 nt, Artificial Sequence
  Description of Artificial Sequence: Synthetic oligonucleotide
caucaugacauccuugcca

SEQ ID NO: 1274764 - RNA, 19 nt, Artificial Sequence
  Description of Artificial Sequence: Synthetic oligonucleotide
uucgauucccaagaacucu

SEQ ID NO: 1274765 - RNA, 19 nt, Artificial Sequence
  Description of Artificial Sequence: Synthetic oligonucleotide
caauucacccaucguaaug

SEQ ID NO: 1274766 - RNA, 19 nt, Artificial Sequence
  Description of Artificial Sequence: Synthetic oligonucleotide
caguaauacauuagggaga

SEQ ID NO: 1274767 - RNA, 19 nt, Artificial Sequence
  Description of Artificial Sequence: Synthetic oligonucleotide
cuugagaacaugaauaauu

SEQ ID NO: 1274768 - RNA, 19 nt, Artificial Sequence
  Description of Artificial Sequence: Synthetic oligonucleotide
uuugaucgcacagaaucaa

SEQ ID NO: 1274769 - RNA, 19 nt, Artificial Sequence
  Description of Artificial Sequence: Synthetic oligonucleotide
ugccagcguauuuaagucc

SEQ ID NO: 1274770 - RNA, 19 nt, Artificial Sequence
  Description of Artificial Sequence: Synthetic oligonucleotide
cauuucgauucccaagaac

SEQ ID NO: 1274771 - RNA, 19 nt, Artificial Sequence
  Description of Artificial Sequence: Synthetic oligonucleotide
gacuauuacacgugcaagu

SEQ ID NO: 1274772 - RNA, 19 nt, Artificial Sequence
  Description of Artificial Sequence: Synthetic oligonucleotide
uaaugccugugccaacaug

SEQ ID NO: 1274773 - RNA, 19 nt, Artificial Sequence
  Description of Artificial Sequence: Synthetic oligonucleotide
cuucgaacugucuugugga

SEQ ID NO: 1274774 - RNA, 19 nt, Artificial Sequence
  Description of Artificial Sequence: Synthetic oligonucleotide
uaucuuagccagccuuggc

SEQ ID NO: 1274775 - RNA, 19 nt, Artificial Sequence
  Description of Artificial Sequence: Synthetic oligonucleotide
acuugcaaugcccuaggau

SEQ ID NO: 1274776 - RNA, 19 nt, Artificial Sequence
  Description of Artificial Sequence: Synthetic oligonucleotide
cgaauuucagggaucaugc

SEQ ID NO: 1274777 - RNA, 19 nt, Artificial Sequence
  Description of Artificial Sequence: Synthetic oligonucleotide
ucagugcaaguaacugaag

SEQ ID NO: 1274778 - RNA, 19 nt, Artificial Sequence
  Description of Artificial Sequence: Synthetic oligonucleotide
aguucgucccgcgugccgc

SEQ ID NO: 1274779 - RNA, 19 nt, Artificial Sequence
  Description of Artificial Sequence: Synthetic oligonucleotide
cuucuaauucggccugacg

SEQ ID NO: 1274780 - RNA, 19 nt, Artificial Sequence
  Description of Artificial Sequence: Synthetic oligonucleotide
guaguaagguauuugacuu

SEQ ID NO: 1274781 - RNA, 19 nt, Artificial Sequence
  Description of Artificial Sequence: Synthetic oligonucleotide
augggcugaucacugauau

SEQ ID NO: 1274782 - RNA, 19 nt, Artificial Sequence
  Description of Artificial Sequence: Synthetic oligonucleotide
guaugaaacauccaagauu

SEQ ID NO: 1274783 - RNA, 19 nt, Artificial Sequence
  Description of Artificial Sequence: Synthetic oligonucleotide
auauggucacauaagacua

SEQ ID NO: 1274784 - RNA, 19 nt, Artificial Sequence
  Description of Artificial Sequence: Synthetic oligonucleotide
agcguauuuaaguccuagu

SEQ ID NO: 1274785 - RNA, 19 nt, Artificial Sequence
  Description of Artificial Sequence: Synthetic oligonucleotide
gaucccugccugaaaauac

SEQ ID NO: 1274786 - RNA, 19 nt, Artificial Sequence
  Description of Artificial Sequence: Synthetic oligonucleotide
aguaaacuuggggcugggc

SEQ ID NO: 1274787 - RNA, 19 nt, Artificial Sequence
  Description of Artificial Sequence: Synthetic oligonucleotide
aguccuaguucgucccgcg

SEQ ID NO: 1274788 - RNA, 19 nt, Artificial Sequence
  Description of Artificial Sequence: Synthetic oligonucleotide
cuaucuuagccagccuugg

SEQ ID NO: 1274789 - RNA, 19 nt, Artificial Sequence
  Description of Artificial Sequence: Synthetic oligonucleotide
gguauuugacuugcaaugc

SEQ ID NO: 1274790 - RNA, 19 nt, Artificial Sequence
  Description of Artificial Sequence: Synthetic oligonucleotide
ucaauucacccaucguaau

SEQ ID NO: 1274791 - RNA, 19 nt, Artificial Sequence
  Description of Artificial Sequence: Synthetic oligonucleotide
aucuaaugccugugccaac

SEQ ID NO: 1274792 - RNA, 19 nt, Artificial Sequence
  Description of Artificial Sequence: Synthetic oligonucleotide
gcaggguaggcuuaagagc

SEQ ID NO: 1274793 - RNA, 19 nt, Artificial Sequence
  Description of Artificial Sequence: Synthetic oligonucleotide
uguuugccuccuaggacac

SEQ ID NO: 1274794 - RNA, 19 nt, Artificial Sequence
  Description of Artificial Sequence: Synthetic oligonucleotide
cuaauucggccugacgaag

SEQ ID NO: 1274795 - RNA, 19 nt, Artificial Sequence
  Description of Artificial Sequence: Synthetic oligonucleotide
caagaacucuggucaauuc

SEQ ID NO: 1274796 - RNA, 19 nt, Artificial Sequence
  Description of Artificial Sequence: Synthetic oligonucleotide
uauauacccugacuaucuu

SEQ ID NO: 1274797 - RNA, 19 nt, Artificial Sequence
  Description of Artificial Sequence: Synthetic oligonucleotide
ccuuagaacauacgcagac

SEQ ID NO: 1274798 - RNA, 19 nt, Artificial Sequence
  Description of Artificial Sequence: Synthetic oligonucleotide
uggucaauucacccaucgu

SEQ ID NO: 1274799 - RNA, 19 nt, Artificial Sequence
  Description of Artificial Sequence: Synthetic oligonucleotide
uaguucgucccgcgugccg

SEQ ID NO: 1274800 - RNA, 19 nt, Artificial Sequence
  Description of Artificial Sequence: Synthetic oligonucleotide
aaaccuaaagauagcuguu

SEQ ID NO: 1274801 - RNA, 19 nt, Artificial Sequence
  Description of Artificial Sequence: Synthetic oligonucleotide
uugaucgcacagaaucaau

SEQ ID NO: 1274802 - RNA, 19 nt, Artificial Sequence
  Description of Artificial Sequence: Synthetic oligonucleotide
ucucuucgaacugucuugu

SEQ ID NO: 1274803 - RNA, 19 nt, Artificial Sequence
  Description of Artificial Sequence: Synthetic oligonucleotide
gggcugaucacugauauga

SEQ ID NO: 1274804 - RNA, 19 nt, Artificial Sequence
  Description of Artificial Sequence: Synthetic oligonucleotide
acaaaggguaagcuacuuu

SEQ ID NO: 1274805 - RNA, 19 nt, Artificial Sequence
  Description of Artificial Sequence: Synthetic oligonucleotide
uucgaacugucuuguggac

SEQ ID NO: 1274806 - RNA, 19 nt, Artificial Sequence
  Description of Artificial Sequence: Synthetic oligonucleotide
agaucacucuccagacacc

SEQ ID NO: 1274807 - RNA, 19 nt, Artificial Sequence
  Description of Artificial Sequence: Synthetic oligonucleotide
ucgggaggaugccagcaac

SEQ ID NO: 1274808 - RNA, 19 nt, Artificial Sequence
  Description of Artificial Sequence: Synthetic oligonucleotide
gucaauucacccaucguaa

SEQ ID NO: 1274809 - RNA, 19 nt, Artificial Sequence
  Description of Artificial Sequence: Synthetic oligonucleotide
cuaguagaaugacucaucu

SEQ ID NO: 1274810 - RNA, 19 nt, Artificial Sequence
  Description of Artificial Sequence: Synthetic oligonucleotide
ugccagcaaccaauagugc

SEQ ID NO: 1274811 - RNA, 19 nt, Artificial Sequence
  Description of Artificial Sequence: Synthetic oligonucleotide
aucccuccugaacauccuc

SEQ ID NO: 1274812 - RNA, 19 nt, Artificial Sequence
  Description of Artificial Sequence: Synthetic oligonucleotide
cuauuacacgugcaaguga

SEQ ID NO: 1274813 - RNA, 19 nt, Artificial Sequence
  Description of Artificial Sequence: Synthetic oligonucleotide
gcuagucucuacuguaagc

SEQ ID NO: 1274814 - RNA, 19 nt, Artificial Sequence
  Description of Artificial Sequence: Synthetic oligonucleotide
gauacaucauaaaccuaaa

SEQ ID NO: 1274815 - RNA, 19 nt, Artificial Sequence
  Description of Artificial Sequence: Synthetic oligonucleotide
ucgaacugucuuguggacu

SEQ ID NO: 1274816 - RNA, 19 nt, Artificial Sequence
  Description of Artificial Sequence: Synthetic oligonucleotide
cagguaucuccuugggaac

SEQ ID NO: 1274817 - RNA, 19 nt, Artificial Sequence
  Description of Artificial Sequence: Synthetic oligonucleotide
auacgcagacagcuuuuca

SEQ ID NO: 1274818 - RNA, 19 nt, Artificial Sequence
  Description of Artificial Sequence: Synthetic oligonucleotide
cguauuuaaguccuaguuc

SEQ ID NO: 1274819 - RNA, 19 nt, Artificial Sequence
  Description of Artificial Sequence: Synthetic oligonucleotide
ggaggcuuaaagaucacuc

SEQ ID NO: 1274820 - RNA, 19 nt, Artificial Sequence
  Description of Artificial Sequence: Synthetic oligonucleotide
caaugcccuaggauuauca

SEQ ID NO: 1274821 - RNA, 19 nt, Artificial Sequence
  Description of Artificial Sequence: Synthetic oligonucleotide
caggucgggaggaugccag

SEQ ID NO: 1274822 - RNA, 19 nt, Artificial Sequence
  Description of Artificial Sequence: Synthetic oligonucleotide
caacgaccuggucuaggcg

SEQ ID NO: 1274823 - RNA, 19 nt, Artificial Sequence
  Description of Artificial Sequence: Synthetic oligonucleotide
uaguagaaugacucaucuu

SEQ ID NO: 1274824 - RNA, 19 nt, Artificial Sequence
  Description of Artificial Sequence: Synthetic oligonucleotide
gucaagugaaauacccuuc

SEQ ID NO: 1274825 - RNA, 19 nt, Artificial Sequence
  Description of Artificial Sequence: Synthetic oligonucleotide
gcaucaggaggcuuaaaga

SEQ ID NO: 1274826 - RNA, 19 nt, Artificial Sequence
  Description of Artificial Sequence: Synthetic oligonucleotide
gguaagcuacuuuggcagc

SEQ ID NO: 1274827 - RNA, 19 nt, Artificial Sequence
  Description of Artificial Sequence: Synthetic oligonucleotide
ugacuaucuuagccagccu

SEQ ID NO: 1274828 - RNA, 19 nt, Artificial Sequence
  Description of Artificial Sequence: Synthetic oligonucleotide
gcaacgaccuggucuaggc

SEQ ID NO: 1274829 - RNA, 19 nt, Artificial Sequence
  Description of Artificial Sequence: Synthetic oligonucleotide
uaagcuacuuuggcagcac

SEQ ID NO: 1274830 - RNA, 19 nt, Artificial Sequence
  Description of Artificial Sequence: Synthetic oligonucleotide
auucggccugacgaaggac

SEQ ID NO: 1274831 - RNA, 19 nt, Artificial Sequence
  Description of Artificial Sequence: Synthetic oligonucleotide
gacuaucuuagccagccuu

SEQ ID NO: 1274832 - RNA, 19 nt, Artificial Sequence
  Description of Artificial Sequence: Synthetic oligonucleotide
agcgucauggugccagcgu

SEQ ID NO: 1274833 - RNA, 19 nt, Artificial Sequence
  Description of Artificial Sequence: Synthetic oligonucleotide
agcaacgaccuggucuagg

SEQ ID NO: 1274834 - RNA, 19 nt, Artificial Sequence
  Description of Artificial Sequence: Synthetic oligonucleotide
guaagcuacuuuggcagca

SEQ ID NO: 1274835 - RNA, 19 nt, Artificial Sequence
  Description of Artificial Sequence: Synthetic oligonucleotide
ugggcugaucacugauaug

SEQ ID NO: 1274836 - RNA, 19 nt, Artificial Sequence
  Description of Artificial Sequence: Synthetic oligonucleotide
ccagguaucuccuugggaa

SEQ ID NO: 1274837 - RNA, 19 nt, Artificial Sequence
  Description of Artificial Sequence: Synthetic oligonucleotide
ggauuaucaauaaucccaa

SEQ ID NO: 1274838 - RNA, 19 nt, Artificial Sequence
  Description of Artificial Sequence: Synthetic oligonucleotide
cuuaagagccucaucuaau

SEQ ID NO: 1274839 - RNA, 19 nt, Artificial Sequence
  Description of Artificial Sequence: Synthetic oligonucleotide
acccaucguaaugcccucc

SEQ ID NO: 1274840 - RNA, 19 nt, Artificial Sequence
  Description of Artificial Sequence: Synthetic oligonucleotide
uuucaaacgcugggccucu

SEQ ID NO: 1274841 - RNA, 19 nt, Artificial Sequence
  Description of Artificial Sequence: Synthetic oligonucleotide
cugauaugaauucuuccau

SEQ ID NO: 1274842 - RNA, 19 nt, Artificial Sequence
  Description of Artificial Sequence: Synthetic oligonucleotide
uaggcgggccugauucaca

SEQ ID NO: 1274843 - RNA, 19 nt, Artificial Sequence
  Description of Artificial Sequence: Synthetic oligonucleotide
gaggaugccagcaaccaau

SEQ ID NO: 1274844 - RNA, 19 nt, Artificial Sequence
  Description of Artificial Sequence: Synthetic oligonucleotide
gccugaaaauacacuaagc

SEQ ID NO: 1274845 - RNA, 19 nt, Artificial Sequence
  Description of Artificial Sequence: Synthetic oligonucleotide
ccugccugaaaauacacua

SEQ ID NO: 1274846 - RNA, 19 nt, Artificial Sequence
  Description of Artificial Sequence: Synthetic oligonucleotide
cccugacuaucuuagccag

SEQ ID NO: 1274847 - RNA, 19 nt, Artificial Sequence
  Description of Artificial Sequence: Synthetic oligonucleotide
acgaccuggucuaggcggg

SEQ ID NO: 1274848 - RNA, 19 nt, Artificial Sequence
  Description of Artificial Sequence: Synthetic oligonucleotide
gacuugcaaugcccuagga

SEQ ID NO: 1274849 - RNA, 19 nt, Artificial Sequence
  Description of Artificial Sequence: Synthetic oligonucleotide
cucuucgaacugucuugug

SEQ ID NO: 1274850 - RNA, 19 nt, Artificial Sequence
  Description of Artificial Sequence: Synthetic oligonucleotide
gccucuuaggcucucuauc

SEQ ID NO: 1274851 - RNA, 19 nt, Artificial Sequence
  Description of Artificial Sequence: Synthetic oligonucleotide
auuuagaaccagacacuuu

SEQ ID NO: 1274852 - RNA, 19 nt, Artificial Sequence
  Description of Artificial Sequence: Synthetic oligonucleotide
ugccacuccgcaggucggg

SEQ ID NO: 1274853 - RNA, 19 nt, Artificial Sequence
  Description of Artificial Sequence: Synthetic oligonucleotide
aguucucuucgaacugucu

SEQ ID NO: 1274854 - RNA, 19 nt, Artificial Sequence
  Description of Artificial Sequence: Synthetic oligonucleotide
ucucuacaucagacaccug

SEQ ID NO: 1274855 - RNA, 19 nt, Artificial Sequence
  Description of Artificial Sequence: Synthetic oligonucleotide
ggccuagucugagagggcc

SEQ ID NO: 1274856 - RNA, 19 nt, Artificial Sequence
  Description of Artificial Sequence: Synthetic oligonucleotide
cuaggcgggccugauucac

SEQ ID NO: 1274857 - RNA, 19 nt, Artificial Sequence
  Description of Artificial Sequence: Synthetic oligonucleotide
ugcaaugcccuaggauuau

SEQ ID NO: 1274858 - RNA, 19 nt, Artificial Sequence
  Description of Artificial Sequence: Synthetic oligonucleotide
uccgcaggucgggaggaug

SEQ ID NO: 1274859 - RNA, 19 nt, Artificial Sequence
  Description of Artificial Sequence: Synthetic oligonucleotide
ccucuuaggcucucuauca

SEQ ID NO: 1274860 - RNA, 19 nt, Artificial Sequence
  Description of Artificial Sequence: Synthetic oligonucleotide
cugccacuccgcaggucgg

SEQ ID NO: 1274861 - RNA, 19 nt, Artificial Sequence
  Description of Artificial Sequence: Synthetic oligonucleotide
gcaacacuugaaaacuauc

SEQ ID NO: 1274862 - RNA, 19 nt, Artificial Sequence
  Description of Artificial Sequence: Synthetic oligonucleotide
ccauaaaugugggcaacac

SEQ ID NO: 1274863 - RNA, 19 nt, Artificial Sequence
  Description of Artificial Sequence: Synthetic oligonucleotide
gcucgaauuucagggauca

SEQ ID NO: 1274864 - RNA, 19 nt, Artificial Sequence
  Description of Artificial Sequence: Synthetic oligonucleotide
gaccuggucuaggcgggcc

SEQ ID NO: 1274865 - RNA, 19 nt, Artificial Sequence
  Description of Artificial Sequence: Synthetic oligonucleotide
ggcuacauucuuguucuca

SEQ ID NO: 1274866 - RNA, 19 nt, Artificial Sequence
  Description of Artificial Sequence: Synthetic oligonucleotide
gcguauuuaaguccuaguu

SEQ ID NO: 1274867 - RNA, 19 nt, Artificial Sequence
  Description of Artificial Sequence: Synthetic oligonucleotide
caagugaaauacccuucua

SEQ ID NO: 1274868 - RNA, 19 nt, Artificial Sequence
  Description of Artificial Sequence: Synthetic oligonucleotide
auagugccuuccgaggguu

SEQ ID NO: 1274869 - RNA, 19 nt, Artificial Sequence
  Description of Artificial Sequence: Synthetic oligonucleotide
guaagguauuugacuugca

SEQ ID NO: 1274870 - RNA, 19 nt, Artificial Sequence
  Description of Artificial Sequence: Synthetic oligonucleotide
guagaaugacauuguucau

SEQ ID NO: 1274871 - RNA, 19 nt, Artificial Sequence
  Description of Artificial Sequence: Synthetic oligonucleotide
augaaacauccaagauuca

SEQ ID NO: 1274872 - RNA, 19 nt, Artificial Sequence
  Description of Artificial Sequence: Synthetic oligonucleotide
cccaucguaaugcccuccc

SEQ ID NO: 1274873 - RNA, 19 nt, Artificial Sequence
  Description of Artificial Sequence: Synthetic oligonucleotide
auuacacgugcaagugaau

SEQ ID NO: 1274874 - RNA, 19 nt, Artificial Sequence
  Description of Artificial Sequence: Synthetic oligonucleotide
uagugccuuccgaggguuc

SEQ ID NO: 1274875 - RNA, 19 nt, Artificial Sequence
  Description of Artificial Sequence: Synthetic oligonucleotide
ccugacuaucuuagccagc

SEQ ID NO: 1274876 - RNA, 19 nt, Artificial Sequence
  Description of Artificial Sequence: Synthetic oligonucleotide
gauagcuguuguagacuua

SEQ ID NO: 1274877 - RNA, 19 nt, Artificial Sequence
  Description of Artificial Sequence: Synthetic oligonucleotide
gaaccagagcacugcuagu

SEQ ID NO: 1274878 - RNA, 19 nt, Artificial Sequence
  Description of Artificial Sequence: Synthetic oligonucleotide
gggccugauucacaacuuc

SEQ ID NO: 1274879 - RNA, 19 nt, Artificial Sequence
  Description of Artificial Sequence: Synthetic oligonucleotide
acauacgcagacagcuuuu

SEQ ID NO: 1274880 - RNA, 19 nt, Artificial Sequence
  Description of Artificial Sequence: Synthetic oligonucleotide
auauugucucaagggucuu

SEQ ID NO: 1274881 - RNA, 19 nt, Artificial Sequence
  Description of Artificial Sequence: Synthetic oligonucleotide
acuccgcaggucgggagga

SEQ ID NO: 1274882 - RNA, 19 nt, Artificial Sequence
  Description of Artificial Sequence: Synthetic oligonucleotide
ccuaaagauagcuguugua

SEQ ID NO: 1274883 - RNA, 19 nt, Artificial Sequence
  Description of Artificial Sequence: Synthetic oligonucleotide
cacugcuagucucuacugu

SEQ ID NO: 1274884 - RNA, 19 nt, Artificial Sequence
  Description of Artificial Sequence: Synthetic oligonucleotide
ccaucguaaugcccucccc

SEQ ID NO: 1274885 - RNA, 19 nt, Artificial Sequence
  Description of Artificial Sequence: Synthetic oligonucleotide
ccuuccgaggguucauguc

SEQ ID NO: 1274886 - RNA, 19 nt, Artificial Sequence
  Description of Artificial Sequence: Synthetic oligonucleotide
cccaagcagucugugcucc

SEQ ID NO: 1274887 - RNA, 19 nt, Artificial Sequence
  Description of Artificial Sequence: Synthetic oligonucleotide
aggguaggcuuaagagccu

SEQ ID NO: 1274888 - RNA, 19 nt, Artificial Sequence
  Description of Artificial Sequence: Synthetic oligonucleotide
cuguaaugaaaggauuguu

SEQ ID NO: 1274889 - RNA, 19 nt, Artificial Sequence
  Description of Artificial Sequence: Synthetic oligonucleotide
gaacauacgcagacagcuu

SEQ ID NO: 1274890 - RNA, 19 nt, Artificial Sequence
  Description of Artificial Sequence: Synthetic oligonucleotide
guaggcuuaagagccucau

SEQ ID NO: 1274891 - RNA, 19 nt, Artificial Sequence
  Description of Artificial Sequence: Synthetic oligonucleotide
gccagcguauuuaaguccu

SEQ ID NO: 1274892 - RNA, 19 nt, Artificial Sequence
  Description of Artificial Sequence: Synthetic oligonucleotide
ggcucgaauuucagggauc

SEQ ID NO: 1274893 - RNA, 19 nt, Artificial Sequence
  Description of Artificial Sequence: Synthetic oligonucleotide
gcccuaggauuaucaauaa

SEQ ID NO: 1274894 - RNA, 19 nt, Artificial Sequence
  Description of Artificial Sequence: Synthetic oligonucleotide
gguaggcuuaagagccuca

SEQ ID NO: 1274895 - RNA, 19 nt, Artificial Sequence
  Description of Artificial Sequence: Synthetic oligonucleotide
ggcaacacuugaaaacuau

SEQ ID NO: 1274896 - RNA, 19 nt, Artificial Sequence
  Description of Artificial Sequence: Synthetic oligonucleotide
ggguaggcuuaagagccuc

SEQ ID NO: 1274897 - RNA, 19 nt, Artificial Sequence
  Description of Artificial Sequence: Synthetic oligonucleotide
auacugcaggguaggcuua

SEQ ID NO: 1274898 - RNA, 19 nt, Artificial Sequence
  Description of Artificial Sequence: Synthetic oligonucleotide
gcgucauggugccagcgua

SEQ ID NO: 1274899 - RNA, 19 nt, Artificial Sequence
  Description of Artificial Sequence: Synthetic oligonucleotide
ggaggaucccugccugaaa

SEQ ID NO: 1274900 - RNA, 19 nt, Artificial Sequence
  Description of Artificial Sequence: Synthetic oligonucleotide
gggucaagugaaauacccu

SEQ ID NO: 1274901 - RNA, 19 nt, Artificial Sequence
  Description of Artificial Sequence: Synthetic oligonucleotide
gccuccuaggacacugcac

SEQ ID NO: 1274902 - RNA, 19 nt, Artificial Sequence
  Description of Artificial Sequence: Synthetic oligonucleotide
gggcucgaauuucagggau

SEQ ID NO: 1274903 - RNA, 19 nt, Artificial Sequence
  Description of Artificial Sequence: Synthetic oligonucleotide
cagcaacgaccuggucuag

SEQ ID NO: 1274904 - RNA, 19 nt, Artificial Sequence
  Description of Artificial Sequence: Synthetic oligonucleotide
guccuaguucgucccgcgu

SEQ ID NO: 1274905 - RNA, 19 nt, Artificial Sequence
  Description of Artificial Sequence: Synthetic oligonucleotide
uucaaacgcugggccucuu

SEQ ID NO: 1274906 - RNA, 19 nt, Artificial Sequence
  Description of Artificial Sequence: Synthetic oligonucleotide
ggcgggccugauucacaac

SEQ ID NO: 1274907 - RNA, 19 nt, Artificial Sequence
  Description of Artificial Sequence: Synthetic oligonucleotide
gccuagucugagagggcca

SEQ ID NO: 1274908 - RNA, 19 nt, Artificial Sequence
  Description of Artificial Sequence: Synthetic oligonucleotide
gccuuccgaggguucaugu

SEQ ID NO: 1274909 - RNA, 19 nt, Artificial Sequence
  Description of Artificial Sequence: Synthetic oligonucleotide
cgaugucugccacuccgca

SEQ ID NO: 1274910 - RNA, 19 nt, Artificial Sequence
  Description of Artificial Sequence: Synthetic oligonucleotide
ccgaggguucauguccauc

SEQ ID NO: 1274911 - RNA, 19 nt, Artificial Sequence
  Description of Artificial Sequence: Synthetic oligonucleotide
guuugccuccuaggacacu

SEQ ID NO: 1274912 - RNA, 19 nt, Artificial Sequence
  Description of Artificial Sequence: Synthetic oligonucleotide
ggcucucuaucaaccgccu

SEQ ID NO: 1274913 - RNA, 19 nt, Artificial Sequence
  Description of Artificial Sequence: Synthetic oligonucleotide
gccacuccgcaggucggga

SEQ ID NO: 1274914 - RNA, 19 nt, Artificial Sequence
  Description of Artificial Sequence: Synthetic oligonucleotide
cccuaggauuaucaauaau

SEQ ID NO: 1274915 - RNA, 19 nt, Artificial Sequence
  Description of Artificial Sequence: Synthetic oligonucleotide
ccagcguauuuaaguccua

SEQ ID NO: 1274916 - RNA, 19 nt, Artificial Sequence
  Description of Artificial Sequence: Synthetic oligonucleotide
gcucucuaucaaccgccuu

SEQ ID NO: 1274917 - RNA, 19 nt, Artificial Sequence
  Description of Artificial Sequence: Synthetic oligonucleotide
ggucuaggcgggccugauu

SEQ ID NO: 1274918 - RNA, 19 nt, Artificial Sequence
  Description of Artificial Sequence: Synthetic oligonucleotide
ccuagucugagagggccau

SEQ ID NO: 1274919 - RNA, 19 nt, Artificial Sequence
  Description of Artificial Sequence: Synthetic oligonucleotide
gugccuuccgaggguucau

SEQ ID NO: 1274920 - RNA, 19 nt, Artificial Sequence
  Description of Artificial Sequence: Synthetic oligonucleotide
cuccgcaggucgggaggau

SEQ ID NO: 1274921 - RNA, 19 nt, Artificial Sequence
  Description of Artificial Sequence: Synthetic oligonucleotide
gccugacgaaggaccucuu

SEQ ID NO: 1274922 - RNA, 19 nt, Artificial Sequence
  Description of Artificial Sequence: Synthetic oligonucleotide
aacaacacuuuucagagcc

SEQ ID NO: 1274923 - RNA, 19 nt, Artificial Sequence
  Description of Artificial Sequence: Synthetic oligonucleotide
acuacugcaaccaagaugc

SEQ ID NO: 1274924 - RNA, 19 nt, Artificial Sequence
  Description of Artificial Sequence: Synthetic oligonucleotide
aauuauuuggauccuuggg

SEQ ID NO: 1274925 - RNA, 19 nt, Artificial Sequence
  Description of Artificial Sequence: Synthetic oligonucleotide
aaauggacagauaggaccc

SEQ ID NO: 1274926 - RNA, 19 nt, Artificial Sequence
  Description of Artificial Sequence: Synthetic oligonucleotide
uguagauuguguaucaucu

SEQ ID NO: 1274927 - RNA, 19 nt, Artificial Sequence
  Description of Artificial Sequence: Synthetic oligonucleotide
aguacagcacugcugaacc

SEQ ID NO: 1274928 - RNA, 19 nt, Artificial Sequence
  Description of Artificial Sequence: Synthetic oligonucleotide
ucuguaaccauccguaaag

SEQ ID NO: 1274929 - RNA, 19 nt, Artificial Sequence
  Description of Artificial Sequence: Synthetic oligonucleotide
uuaacgacuagauuggaga

SEQ ID NO: 1274930 - RNA, 19 nt, Artificial Sequence
  Description of Artificial Sequence: Synthetic oligonucleotide
ucuuuuauaguugccaagg

SEQ ID NO: 1274931 - RNA, 19 nt, Artificial Sequence
  Description of Artificial Sequence: Synthetic oligonucleotide
cuugucacuacuuauccgg

SEQ ID NO: 1274932 - RNA, 19 nt, Artificial Sequence
  Description of Artificial Sequence: Synthetic oligonucleotide
uuaauaaauuauuuggauc

SEQ ID NO: 1274933 - RNA, 19 nt, Artificial Sequence
  Description of Artificial Sequence: Synthetic oligonucleotide
uuguuaacgacuagauugg

SEQ ID NO: 1274934 - RNA, 19 nt, Artificial Sequence
  Description of Artificial Sequence: Synthetic oligonucleotide
agaggaaagccucugacuc

SEQ ID NO: 1274935 - RNA, 19 nt, Artificial Sequence
  Description of Artificial Sequence: Synthetic oligonucleotide
ugaaucauuaaguuguagu

SEQ ID NO: 1274936 - RNA, 19 nt, Artificial Sequence
  Description of Artificial Sequence: Synthetic oligonucleotide
uaaauuauuuggauccuug

SEQ ID NO: 1274937 - RNA, 19 nt, Artificial Sequence
  Description of Artificial Sequence: Synthetic oligonucleotide
uagauuguguaucaucucc

SEQ ID NO: 1274938 - RNA, 19 nt, Artificial Sequence
  Description of Artificial Sequence: Synthetic oligonucleotide
auuauuuggauccuugggu

SEQ ID NO: 1274939 - RNA, 19 nt, Artificial Sequence
  Description of Artificial Sequence: Synthetic oligonucleotide
ucugcuuuuccagagagag

SEQ ID NO: 1274940 - RNA, 19 nt, Artificial Sequence
  Description of Artificial Sequence: Synthetic oligonucleotide
uguagcacugaaaacguca

SEQ ID NO: 1274941 - RNA, 19 nt, Artificial Sequence
  Description of Artificial Sequence: Synthetic oligonucleotide
uuguuaaccagagacauca

SEQ ID NO: 1274942 - RNA, 19 nt, Artificial Sequence
  Description of Artificial Sequence: Synthetic oligonucleotide
gaaaacgucaguugccggg

SEQ ID NO: 1274943 - RNA, 19 nt, Artificial Sequence
  Description of Artificial Sequence: Synthetic oligonucleotide
auaacauagagaacaacac

SEQ ID NO: 1274944 - RNA, 19 nt, Artificial Sequence
  Description of Artificial Sequence: Synthetic oligonucleotide
aagaacuuaguguuaauuu

SEQ ID NO: 1274945 - RNA, 19 nt, Artificial Sequence
  Description of Artificial Sequence: Synthetic oligonucleotide
uuugugucuuuccuaaaag

SEQ ID NO: 1274946 - RNA, 19 nt, Artificial Sequence
  Description of Artificial Sequence: Synthetic oligonucleotide
acuacuuauccggugaacc

SEQ ID NO: 1274947 - RNA, 19 nt, Artificial Sequence
  Description of Artificial Sequence: Synthetic oligonucleotide
ucugagaccagucauuuaa

SEQ ID NO: 1274948 - RNA, 19 nt, Artificial Sequence
  Description of Artificial Sequence: Synthetic oligonucleotide
uguaauccuucacagcuag

SEQ ID NO: 1274949 - RNA, 19 nt, Artificial Sequence
  Description of Artificial Sequence: Synthetic oligonucleotide
aucaaucgcagcuugacug

SEQ ID NO: 1274950 - RNA, 19 nt, Artificial Sequence
  Description of Artificial Sequence: Synthetic oligonucleotide
agccucauaacacauuuuc

SEQ ID NO: 1274951 - RNA, 19 nt, Artificial Sequence
  Description of Artificial Sequence: Synthetic oligonucleotide
uugaagucgaccuuccuug

SEQ ID NO: 1274952 - RNA, 19 nt, Artificial Sequence
  Description of Artificial Sequence: Synthetic oligonucleotide
uaguacuuggccauaauuc

SEQ ID NO: 1274953 - RNA, 19 nt, Artificial Sequence
  Description of Artificial Sequence: Synthetic oligonucleotide
gagaacaacacuuuucaga

SEQ ID NO: 1274954 - RNA, 19 nt, Artificial Sequence
  Description of Artificial Sequence: Synthetic oligonucleotide
uucuuuagccucauaacac

SEQ ID NO: 1274955 - RNA, 19 nt, Artificial Sequence
  Description of Artificial Sequence: Synthetic oligonucleotide
ucuuagucagccgagcacg

SEQ ID NO: 1274956 - RNA, 19 nt, Artificial Sequence
  Description of Artificial Sequence: Synthetic oligonucleotide
uucuugucacuacuuaucc

SEQ ID NO: 1274957 - RNA, 19 nt, Artificial Sequence
  Description of Artificial Sequence: Synthetic oligonucleotide
uuuuauaguugccaagguc

SEQ ID NO: 1274958 - RNA, 19 nt, Artificial Sequence
  Description of Artificial Sequence: Synthetic oligonucleotide
uaguacuucaacuuuaauu

SEQ ID NO: 1274959 - RNA, 19 nt, Artificial Sequence
  Description of Artificial Sequence: Synthetic oligonucleotide
uuucauuguuauccgagug

SEQ ID NO: 1274960 - RNA, 19 nt, Artificial Sequence
  Description of Artificial Sequence: Synthetic oligonucleotide
cauuaaguaagucccauuc

SEQ ID NO: 1274961 - RNA, 19 nt, Artificial Sequence
  Description of Artificial Sequence: Synthetic oligonucleotide
gaugacuccagccaaccug

SEQ ID NO: 1274962 - RNA, 19 nt, Artificial Sequence
  Description of Artificial Sequence: Synthetic oligonucleotide
aacaaguguggaccagcgc

SEQ ID NO: 1274963 - RNA, 19 nt, Artificial Sequence
  Description of Artificial Sequence: Synthetic oligonucleotide
uuaaguaagucccauucuu

SEQ ID NO: 1274964 - RNA, 19 nt, Artificial Sequence
  Description of Artificial Sequence: Synthetic oligonucleotide
uguuuuagcugacuccgcc

SEQ ID NO: 1274965 - RNA, 19 nt, Artificial Sequence
  Description of Artificial Sequence: Synthetic oligonucleotide
aacaacauauacaccauga

SEQ ID NO: 1274966 - RNA, 19 nt, Artificial Sequence
  Description of Artificial Sequence: Synthetic oligonucleotide
uaauccuucacagcuaggc

SEQ ID NO: 1274967 - RNA, 19 nt, Artificial Sequence
  Description of Artificial Sequence: Synthetic oligonucleotide
ugucguuuuguuaaccaga

SEQ ID NO: 1274968 - RNA, 19 nt, Artificial Sequence
  Description of Artificial Sequence: Synthetic oligonucleotide
uuuuguuaaccagagacau

SEQ ID NO: 1274969 - RNA, 19 nt, Artificial Sequence
  Description of Artificial Sequence: Synthetic oligonucleotide
uucauuguuauccgagugu

SEQ ID NO: 1274970 - RNA, 19 nt, Artificial Sequence
  Description of Artificial Sequence: Synthetic oligonucleotide
uccucaacaaguguggacc

SEQ ID NO: 1274971 - RNA, 19 nt, Artificial Sequence
  Description of Artificial Sequence: Synthetic oligonucleotide
cauaucagaagcaguucgg

SEQ ID NO: 1274972 - RNA, 19 nt, Artificial Sequence
  Description of Artificial Sequence: Synthetic oligonucleotide
uuauuuggauccuuggguc

SEQ ID NO: 1274973 - RNA, 19 nt, Artificial Sequence
  Description of Artificial Sequence: Synthetic oligonucleotide
aaaacgucaguugccgggg

SEQ ID NO: 1274974 - RNA, 19 nt, Artificial Sequence
  Description of Artificial Sequence: Synthetic oligonucleotide
uaacgacuagauuggagag

SEQ ID NO: 1274975 - RNA, 19 nt, Artificial Sequence
  Description of Artificial Sequence: Synthetic oligonucleotide
ucuguagcacugaaaacgu

SEQ ID NO: 1274976 - RNA, 19 nt, Artificial Sequence
  Description of Artificial Sequence: Synthetic oligonucleotide
cauccguaaaguaucaauc

SEQ ID NO: 1274977 - RNA, 19 nt, Artificial Sequence
  Description of Artificial Sequence: Synthetic oligonucleotide
ucuugucacuacuuauccg

SEQ ID NO: 1274978 - RNA, 19 nt, Artificial Sequence
  Description of Artificial Sequence: Synthetic oligonucleotide
uccacguaaguacagcacu

SEQ ID NO: 1274979 - RNA, 19 nt, Artificial Sequence
  Description of Artificial Sequence: Synthetic oligonucleotide
auuaaguaagucccauucu

SEQ ID NO: 1274980 - RNA, 19 nt, Artificial Sequence
  Description of Artificial Sequence: Synthetic oligonucleotide
agaccagucauuuaauaaa

SEQ ID NO: 1274981 - RNA, 19 nt, Artificial Sequence
  Description of Artificial Sequence: Synthetic oligonucleotide
cacugaaaacgucaguugc

SEQ ID NO: 1274982 - RNA, 19 nt, Artificial Sequence
  Description of Artificial Sequence: Synthetic oligonucleotide
agaacuuaguguuaauuuu

SEQ ID NO: 1274983 - RNA, 19 nt, Artificial Sequence
  Description of Artificial Sequence: Synthetic oligonucleotide
uagugcuuacaaauggaca

SEQ ID NO: 1274984 - RNA, 19 nt, Artificial Sequence
  Description of Artificial Sequence: Synthetic oligonucleotide
cugugugcgaauguaaucc

SEQ ID NO: 1274985 - RNA, 19 nt, Artificial Sequence
  Description of Artificial Sequence: Synthetic oligonucleotide
aaucaaucgcagcuugacu

SEQ ID NO: 1274986 - RNA, 19 nt, Artificial Sequence
  Description of Artificial Sequence: Synthetic oligonucleotide
aguuguaguacuucaacuu

SEQ ID NO: 1274987 - RNA, 19 nt, Artificial Sequence
  Description of Artificial Sequence: Synthetic oligonucleotide
aaguggacaccauaucaga

SEQ ID NO: 1274988 - RNA, 19 nt, Artificial Sequence
  Description of Artificial Sequence: Synthetic oligonucleotide
agaugcgggaaguggacac

SEQ ID NO: 1274989 - RNA, 19 nt, Artificial Sequence
  Description of Artificial Sequence: Synthetic oligonucleotide
aacgacuagauuggagagg

SEQ ID NO: 1274990 - RNA, 19 nt, Artificial Sequence
  Description of Artificial Sequence: Synthetic oligonucleotide
ugugucguuuuguuaacca

SEQ ID NO: 1274991 - RNA, 19 nt, Artificial Sequence
  Description of Artificial Sequence: Synthetic oligonucleotide
agagauccagaaguugugc

SEQ ID NO: 1274992 - RNA, 19 nt, Artificial Sequence
  Description of Artificial Sequence: Synthetic oligonucleotide
acagauaggaccccucgug

SEQ ID NO: 1274993 - RNA, 19 nt, Artificial Sequence
  Description of Artificial Sequence: Synthetic oligonucleotide
aaguaagucccauucuuua

SEQ ID NO: 1274994 - RNA, 19 nt, Artificial Sequence
  Description of Artificial Sequence: Synthetic oligonucleotide
aaagcauccaggccucacu

SEQ ID NO: 1274995 - RNA, 19 nt, Artificial Sequence
  Description of Artificial Sequence: Synthetic oligonucleotide
uccuaaaagcauccaggcc

SEQ ID NO: 1274996 - RNA, 19 nt, Artificial Sequence
  Description of Artificial Sequence: Synthetic oligonucleotide
acuagauuggagaggaaag

SEQ ID NO: 1274997 - RNA, 19 nt, Artificial Sequence
  Description of Artificial Sequence: Synthetic oligonucleotide
ugugcgaauguaauccuuc

SEQ ID NO: 1274998 - RNA, 19 nt, Artificial Sequence
  Description of Artificial Sequence: Synthetic oligonucleotide
guuuuagcugacuccgccg

SEQ ID NO: 1274999 - RNA, 19 nt, Artificial Sequence
  Description of Artificial Sequence: Synthetic oligonucleotide
ugauccagcugaaucauua

SEQ ID NO: 1275000 - RNA, 19 nt, Artificial Sequence
  Description of Artificial Sequence: Synthetic oligonucleotide
aauggacagauaggacccc

SEQ ID NO: 1275001 - RNA, 19 nt, Artificial Sequence
  Description of Artificial Sequence: Synthetic oligonucleotide
auuguuauccgaguguagu

SEQ ID NO: 1275002 - RNA, 19 nt, Artificial Sequence
  Description of Artificial Sequence: Synthetic oligonucleotide
gccaggauaacauagagaa

SEQ ID NO: 1275003 - RNA, 19 nt, Artificial Sequence
  Description of Artificial Sequence: Synthetic oligonucleotide
aucaaucaaucgcagcuug

SEQ ID NO: 1275004 - RNA, 19 nt, Artificial Sequence
  Description of Artificial Sequence: Synthetic oligonucleotide
cuucuugucacuacuuauc

SEQ ID NO: 1275005 - RNA, 19 nt, Artificial Sequence
  Description of Artificial Sequence: Synthetic oligonucleotide
uccguaaaguaucaaucaa

SEQ ID NO: 1275006 - RNA, 19 nt, Artificial Sequence
  Description of Artificial Sequence: Synthetic oligonucleotide
cugaaaacgucaguugccg

SEQ ID NO: 1275007 - RNA, 19 nt, Artificial Sequence
  Description of Artificial Sequence: Synthetic oligonucleotide
ugaaaacgucaguugccgg

SEQ ID NO: 1275008 - RNA, 19 nt, Artificial Sequence
  Description of Artificial Sequence: Synthetic oligonucleotide
auaguugccaaggucuuag

SEQ ID NO: 1275009 - RNA, 19 nt, Artificial Sequence
  Description of Artificial Sequence: Synthetic oligonucleotide
cacaaugcgcccaucggcc

SEQ ID NO: 1275010 - RNA, 19 nt, Artificial Sequence
  Description of Artificial Sequence: Synthetic oligonucleotide
aggugugucguuuuguuaa

SEQ ID NO: 1275011 - RNA, 19 nt, Artificial Sequence
  Description of Artificial Sequence: Synthetic oligonucleotide
uaaccagagacaucagcga

SEQ ID NO: 1275012 - RNA, 19 nt, Artificial Sequence
  Description of Artificial Sequence: Synthetic oligonucleotide
cuagauuggagaggaaagc

SEQ ID NO: 1275013 - RNA, 19 nt, Artificial Sequence
  Description of Artificial Sequence: Synthetic oligonucleotide
uguuauccgaguguaguac

SEQ ID NO: 1275014 - RNA, 19 nt, Artificial Sequence
  Description of Artificial Sequence: Synthetic oligonucleotide
ugaccuccaauuuuguguc

SEQ ID NO: 1275015 - RNA, 19 nt, Artificial Sequence
  Description of Artificial Sequence: Synthetic oligonucleotide
uacuuauccggugaaccag

SEQ ID NO: 1275016 - RNA, 19 nt, Artificial Sequence
  Description of Artificial Sequence: Synthetic oligonucleotide
gagaccagucauuuaauaa

SEQ ID NO: 1275017 - RNA, 19 nt, Artificial Sequence
  Description of Artificial Sequence: Synthetic oligonucleotide
agagaacaacacuuuucag

SEQ ID NO: 1275018 - RNA, 19 nt, Artificial Sequence
  Description of Artificial Sequence: Synthetic oligonucleotide
caaccugucuacuuuagca

SEQ ID NO: 1275019 - RNA, 19 nt, Artificial Sequence
  Description of Artificial Sequence: Synthetic oligonucleotide
uaaguaagucccauucuuu

SEQ ID NO: 1275020 - RNA, 19 nt, Artificial Sequence
  Description of Artificial Sequence: Synthetic oligonucleotide
uguuauguuccacgacucu

SEQ ID NO: 1275021 - RNA, 19 nt, Artificial Sequence
  Description of Artificial Sequence: Synthetic oligonucleotide
uucgggucugcuuuuccag

SEQ ID NO: 1275022 - RNA, 19 nt, Artificial Sequence
  Description of Artificial Sequence: Synthetic oligonucleotide
aacgucaguugccgggguc

SEQ ID NO: 1275023 - RNA, 19 nt, Artificial Sequence
  Description of Artificial Sequence: Synthetic oligonucleotide
uucuguaaccauccguaaa

SEQ ID NO: 1275024 - RNA, 19 nt, Artificial Sequence
  Description of Artificial Sequence: Synthetic oligonucleotide
gacuccgccguuuugacaa

SEQ ID NO: 1275025 - RNA, 19 nt, Artificial Sequence
  Description of Artificial Sequence: Synthetic oligonucleotide
aaguaucaaucaaucgcag

SEQ ID NO: 1275026 - RNA, 19 nt, Artificial Sequence
  Description of Artificial Sequence: Synthetic oligonucleotide
acaaugcgcccaucggccc

SEQ ID NO: 1275027 - RNA, 19 nt, Artificial Sequence
  Description of Artificial Sequence: Synthetic oligonucleotide
uuguucuuuuauaguugcc

SEQ ID NO: 1275028 - RNA, 19 nt, Artificial Sequence
  Description of Artificial Sequence: Synthetic oligonucleotide
agcuccaccccauaguccu

SEQ ID NO: 1275029 - RNA, 19 nt, Artificial Sequence
  Description of Artificial Sequence: Synthetic oligonucleotide
uuuguuaaccagagacauc

SEQ ID NO: 1275030 - RNA, 19 nt, Artificial Sequence
  Description of Artificial Sequence: Synthetic oligonucleotide
cuguagauuguguaucauc

SEQ ID NO: 1275031 - RNA, 19 nt, Artificial Sequence
  Description of Artificial Sequence: Synthetic oligonucleotide
gauaggaccccucgugcug

SEQ ID NO: 1275032 - RNA, 19 nt, Artificial Sequence
  Description of Artificial Sequence: Synthetic oligonucleotide
agaucugacugcucguugu

SEQ ID NO: 1275033 - RNA, 19 nt, Artificial Sequence
  Description of Artificial Sequence: Synthetic oligonucleotide
accuguaauucuugaagga

SEQ ID NO: 1275034 - RNA, 19 nt, Artificial Sequence
  Description of Artificial Sequence: Synthetic oligonucleotide
gauuggagaggaaagccuc

SEQ ID NO: 1275035 - RNA, 19 nt, Artificial Sequence
  Description of Artificial Sequence: Synthetic oligonucleotide
acugggaggucugugaucu

SEQ ID NO: 1275036 - RNA, 19 nt, Artificial Sequence
  Description of Artificial Sequence: Synthetic oligonucleotide
gucguuuuguuaaccagag

SEQ ID NO: 1275037 - RNA, 19 nt, Artificial Sequence
  Description of Artificial Sequence: Synthetic oligonucleotide
ucuuguuaacgacuagauu

SEQ ID NO: 1275038 - RNA, 19 nt, Artificial Sequence
  Description of Artificial Sequence: Synthetic oligonucleotide
gugucguuuuguuaaccag

SEQ ID NO: 1275039 - RNA, 19 nt, Artificial Sequence
  Description of Artificial Sequence: Synthetic oligonucleotide
aaacuccacucgcuccuuc

SEQ ID NO: 1275040 - RNA, 19 nt, Artificial Sequence
  Description of Artificial Sequence: Synthetic oligonucleotide
acgacuagauuggagagga

SEQ ID NO: 1275041 - RNA, 19 nt, Artificial Sequence
  Description of Artificial Sequence: Synthetic oligonucleotide
gcauaauauuuucauuaag

SEQ ID NO: 1275042 - RNA, 19 nt, Artificial Sequence
  Description of Artificial Sequence: Synthetic oligonucleotide
uguaaccauccguaaagua

SEQ ID NO: 1275043 - RNA, 19 nt, Artificial Sequence
  Description of Artificial Sequence: Synthetic oligonucleotide
ugcgaauguaauccuucac

SEQ ID NO: 1275044 - RNA, 19 nt, Artificial Sequence
  Description of Artificial Sequence: Synthetic oligonucleotide
auacaccaugaaaacaguc

SEQ ID NO: 1275045 - RNA, 19 nt, Artificial Sequence
  Description of Artificial Sequence: Synthetic oligonucleotide
ucauuguuauccgagugua

SEQ ID NO: 1275046 - RNA, 19 nt, Artificial Sequence
  Description of Artificial Sequence: Synthetic oligonucleotide
ucuccggggaacccuuccg

SEQ ID NO: 1275047 - RNA, 19 nt, Artificial Sequence
  Description of Artificial Sequence: Synthetic oligonucleotide
ugacucauccacagagaga

SEQ ID NO: 1275048 - RNA, 19 nt, Artificial Sequence
  Description of Artificial Sequence: Synthetic oligonucleotide
ggaaguggacaccauauca

SEQ ID NO: 1275049 - RNA, 19 nt, Artificial Sequence
  Description of Artificial Sequence: Synthetic oligonucleotide
ucacuguagauuguguauc

SEQ ID NO: 1275050 - RNA, 19 nt, Artificial Sequence
  Description of Artificial Sequence: Synthetic oligonucleotide
ucauuaaguuguaguacuu

SEQ ID NO: 1275051 - RNA, 19 nt, Artificial Sequence
  Description of Artificial Sequence: Synthetic oligonucleotide
uuauaguugccaaggucuu

SEQ ID NO: 1275052 - RNA, 19 nt, Artificial Sequence
  Description of Artificial Sequence: Synthetic oligonucleotide
ugugugcgaauguaauccu

SEQ ID NO: 1275053 - RNA, 19 nt, Artificial Sequence
  Description of Artificial Sequence: Synthetic oligonucleotide
gacucauccacagagagau

SEQ ID NO: 1275054 - RNA, 19 nt, Artificial Sequence
  Description of Artificial Sequence: Synthetic oligonucleotide
uucauuaaguaagucccau

SEQ ID NO: 1275055 - RNA, 19 nt, Artificial Sequence
  Description of Artificial Sequence: Synthetic oligonucleotide
guuuuguuaaccagagaca

SEQ ID NO: 1275056 - RNA, 19 nt, Artificial Sequence
  Description of Artificial Sequence: Synthetic oligonucleotide
cauaauucugauguuaugu

SEQ ID NO: 1275057 - RNA, 19 nt, Artificial Sequence
  Description of Artificial Sequence: Synthetic oligonucleotide
ucaguugccggggucuccg

SEQ ID NO: 1275058 - RNA, 19 nt, Artificial Sequence
  Description of Artificial Sequence: Synthetic oligonucleotide
ucugacugcucguugucaa

SEQ ID NO: 1275059 - RNA, 19 nt, Artificial Sequence
  Description of Artificial Sequence: Synthetic oligonucleotide
guagcacugaaaacgucag

SEQ ID NO: 1275060 - RNA, 19 nt, Artificial Sequence
  Description of Artificial Sequence: Synthetic oligonucleotide
ugagaccagucauuuaaua

SEQ ID NO: 1275061 - RNA, 19 nt, Artificial Sequence
  Description of Artificial Sequence: Synthetic oligonucleotide
auguuauguuccacgacuc

SEQ ID NO: 1275062 - RNA, 19 nt, Artificial Sequence
  Description of Artificial Sequence: Synthetic oligonucleotide
gacugcucguugucaaaag

SEQ ID NO: 1275063 - RNA, 19 nt, Artificial Sequence
  Description of Artificial Sequence: Synthetic oligonucleotide
aaugcgcccaucggcccgc

SEQ ID NO: 1275064 - RNA, 19 nt, Artificial Sequence
  Description of Artificial Sequence: Synthetic oligonucleotide
guagugcuuacaaauggac

SEQ ID NO: 1275065 - RNA, 19 nt, Artificial Sequence
  Description of Artificial Sequence: Synthetic oligonucleotide
uuguuuuagcugacuccgc

SEQ ID NO: 1275066 - RNA, 19 nt, Artificial Sequence
  Description of Artificial Sequence: Synthetic oligonucleotide
uccacgacucuguucuuca

SEQ ID NO: 1275067 - RNA, 19 nt, Artificial Sequence
  Description of Artificial Sequence: Synthetic oligonucleotide
agaauaaacuccacucgcu

SEQ ID NO: 1275068 - RNA, 19 nt, Artificial Sequence
  Description of Artificial Sequence: Synthetic oligonucleotide
cauuguuauccgaguguag

SEQ ID NO: 1275069 - RNA, 19 nt, Artificial Sequence
  Description of Artificial Sequence: Synthetic oligonucleotide
aggagccaggauaacauag

SEQ ID NO: 1275070 - RNA, 19 nt, Artificial Sequence
  Description of Artificial Sequence: Synthetic oligonucleotide
guagcuccaccccauaguc

SEQ ID NO: 1275071 - RNA, 19 nt, Artificial Sequence
  Description of Artificial Sequence: Synthetic oligonucleotide
caaucaaucgcagcuugac

SEQ ID NO: 1275072 - RNA, 19 nt, Artificial Sequence
  Description of Artificial Sequence: Synthetic oligonucleotide
agauaggaccccucgugcu

SEQ ID NO: 1275073 - RNA, 19 nt, Artificial Sequence
  Description of Artificial Sequence: Synthetic oligonucleotide
aacccuuccguagcuccac

SEQ ID NO: 1275074 - RNA, 19 nt, Artificial Sequence
  Description of Artificial Sequence: Synthetic oligonucleotide
aaggucuuagucagccgag

SEQ ID NO: 1275075 - RNA, 19 nt, Artificial Sequence
  Description of Artificial Sequence: Synthetic oligonucleotide
uuguuauccgaguguagua

SEQ ID NO: 1275076 - RNA, 19 nt, Artificial Sequence
  Description of Artificial Sequence: Synthetic oligonucleotide
auggucccugccuaaacgu

SEQ ID NO: 1275077 - RNA, 19 nt, Artificial Sequence
  Description of Artificial Sequence: Synthetic oligonucleotide
uccgccguuuugacaaaag

SEQ ID NO: 1275078 - RNA, 19 nt, Artificial Sequence
  Description of Artificial Sequence: Synthetic oligonucleotide
cugauguuauguuccacga

SEQ ID NO: 1275079 - RNA, 19 nt, Artificial Sequence
  Description of Artificial Sequence: Synthetic oligonucleotide
auguuccacgacucuguuc

SEQ ID NO: 1275080 - RNA, 19 nt, Artificial Sequence
  Description of Artificial Sequence: Synthetic oligonucleotide
cuuagucagccgagcacgc

SEQ ID NO: 1275081 - RNA, 19 nt, Artificial Sequence
  Description of Artificial Sequence: Synthetic oligonucleotide
caaggucuuagucagccga

SEQ ID NO: 1275082 - RNA, 19 nt, Artificial Sequence
  Description of Artificial Sequence: Synthetic oligonucleotide
uccauggacccguagguuu

SEQ ID NO: 1275083 - RNA, 19 nt, Artificial Sequence
  Description of Artificial Sequence: Synthetic oligonucleotide
acguaaguacagcacugcu

SEQ ID NO: 1275084 - RNA, 19 nt, Artificial Sequence
  Description of Artificial Sequence: Synthetic oligonucleotide
uagucagccgagcacgcuc

SEQ ID NO: 1275085 - RNA, 19 nt, Artificial Sequence
  Description of Artificial Sequence: Synthetic oligonucleotide
cuccacguaaguacagcac

SEQ ID NO: 1275086 - RNA, 19 nt, Artificial Sequence
  Description of Artificial Sequence: Synthetic oligonucleotide
cuacuuauccggugaacca

SEQ ID NO: 1275087 - RNA, 19 nt, Artificial Sequence
  Description of Artificial Sequence: Synthetic oligonucleotide
cacgacucuguucuucaag

SEQ ID NO: 1275088 - RNA, 19 nt, Artificial Sequence
  Description of Artificial Sequence: Synthetic oligonucleotide
aggucuuagucagccgagc

SEQ ID NO: 1275089 - RNA, 19 nt, Artificial Sequence
  Description of Artificial Sequence: Synthetic oligonucleotide
gcgaauguaauccuucaca

SEQ ID NO: 1275090 - RNA, 19 nt, Artificial Sequence
  Description of Artificial Sequence: Synthetic oligonucleotide
uuauccgaguguaguacuu

SEQ ID NO: 1275091 - RNA, 19 nt, Artificial Sequence
  Description of Artificial Sequence: Synthetic oligonucleotide
guugccggggucuccgggg

SEQ ID NO: 1275092 - RNA, 19 nt, Artificial Sequence
  Description of Artificial Sequence: Synthetic oligonucleotide
uggucuuguuaacgacuag

SEQ ID NO: 1275093 - RNA, 19 nt, Artificial Sequence
  Description of Artificial Sequence: Synthetic oligonucleotide
guagauuguguaucaucuc

SEQ ID NO: 1275094 - RNA, 19 nt, Artificial Sequence
  Description of Artificial Sequence: Synthetic oligonucleotide
uuuucagagccugcugcca

SEQ ID NO: 1275095 - RNA, 19 nt, Artificial Sequence
  Description of Artificial Sequence: Synthetic oligonucleotide
ucacuacuuauccggugaa

SEQ ID NO: 1275096 - RNA, 19 nt, Artificial Sequence
  Description of Artificial Sequence: Synthetic oligonucleotide
ugaggugugucguuuuguu

SEQ ID NO: 1275097 - RNA, 19 nt, Artificial Sequence
  Description of Artificial Sequence: Synthetic oligonucleotide
cugcucguugucaaaagga

SEQ ID NO: 1275098 - RNA, 19 nt, Artificial Sequence
  Description of Artificial Sequence: Synthetic oligonucleotide
gucuuagucagccgagcac

SEQ ID NO: 1275099 - RNA, 19 nt, Artificial Sequence
  Description of Artificial Sequence: Synthetic oligonucleotide
cuaaugaucugugugcgaa

SEQ ID NO: 1275100 - RNA, 19 nt, Artificial Sequence
  Description of Artificial Sequence: Synthetic oligonucleotide
agauuguguaucaucuccu

SEQ ID NO: 1275101 - RNA, 19 nt, Artificial Sequence
  Description of Artificial Sequence: Synthetic oligonucleotide
gugaaccagaucugacugc

SEQ ID NO: 1275102 - RNA, 19 nt, Artificial Sequence
  Description of Artificial Sequence: Synthetic oligonucleotide
ucguuuuguuaaccagaga

SEQ ID NO: 1275103 - RNA, 19 nt, Artificial Sequence
  Description of Artificial Sequence: Synthetic oligonucleotide
aagaugcgggaaguggaca

SEQ ID NO: 1275104 - RNA, 19 nt, Artificial Sequence
  Description of Artificial Sequence: Synthetic oligonucleotide
auaaauuauuuggauccuu

SEQ ID NO: 1275105 - RNA, 19 nt, Artificial Sequence
  Description of Artificial Sequence: Synthetic oligonucleotide
aaguguggaccagcgcauc

SEQ ID NO: 1275106 - RNA, 19 nt, Artificial Sequence
  Description of Artificial Sequence: Synthetic oligonucleotide
cacguaaguacagcacugc

SEQ ID NO: 1275107 - RNA, 19 nt, Artificial Sequence
  Description of Artificial Sequence: Synthetic oligonucleotide
guacuuggccauaauucug

SEQ ID NO: 1275108 - RNA, 19 nt, Artificial Sequence
  Description of Artificial Sequence: Synthetic oligonucleotide
guaaccauccguaaaguau

SEQ ID NO: 1275109 - RNA, 19 nt, Artificial Sequence
  Description of Artificial Sequence: Synthetic oligonucleotide
ggaccagcgcaucagcucc

SEQ ID NO: 1275110 - RNA, 19 nt, Artificial Sequence
  Description of Artificial Sequence: Synthetic oligonucleotide
uguuaacgacuagauugga

SEQ ID NO: 1275111 - RNA, 19 nt, Artificial Sequence
  Description of Artificial Sequence: Synthetic oligonucleotide
uuuggcuaugagguguguc

SEQ ID NO: 1275112 - RNA, 19 nt, Artificial Sequence
  Description of Artificial Sequence: Synthetic oligonucleotide
ggaacccuuccguagcucc

SEQ ID NO: 1275113 - RNA, 19 nt, Artificial Sequence
  Description of Artificial Sequence: Synthetic oligonucleotide
agcuaggcagagucucauc

SEQ ID NO: 1275114 - RNA, 19 nt, Artificial Sequence
  Description of Artificial Sequence: Synthetic oligonucleotide
uuauccggugaaccagauc

SEQ ID NO: 1275115 - RNA, 19 nt, Artificial Sequence
  Description of Artificial Sequence: Synthetic oligonucleotide
aaacgucaguugccggggu

SEQ ID NO: 1275116 - RNA, 19 nt, Artificial Sequence
  Description of Artificial Sequence: Synthetic oligonucleotide
gaucugacugcucguuguc

SEQ ID NO: 1275117 - RNA, 19 nt, Artificial Sequence
  Description of Artificial Sequence: Synthetic oligonucleotide
uccggugaaccagaucuga

SEQ ID NO: 1275118 - RNA, 19 nt, Artificial Sequence
  Description of Artificial Sequence: Synthetic oligonucleotide
agucgaccuuccuuggcca

SEQ ID NO: 1275119 - RNA, 19 nt, Artificial Sequence
  Description of Artificial Sequence: Synthetic oligonucleotide
ugacugcucguugucaaaa

SEQ ID NO: 1275120 - RNA, 19 nt, Artificial Sequence
  Description of Artificial Sequence: Synthetic oligonucleotide
agaagcaguucgggucugc

SEQ ID NO: 1275121 - RNA, 19 nt, Artificial Sequence
  Description of Artificial Sequence: Synthetic oligonucleotide
cacuguagauuguguauca

SEQ ID NO: 1275122 - RNA, 19 nt, Artificial Sequence
  Description of Artificial Sequence: Synthetic oligonucleotide
guccucaacaaguguggac

SEQ ID NO: 1275123 - RNA, 19 nt, Artificial Sequence
  Description of Artificial Sequence: Synthetic oligonucleotide
ggacccguagguuuccacc

SEQ ID NO: 1275124 - RNA, 19 nt, Artificial Sequence
  Description of Artificial Sequence: Synthetic oligonucleotide
caucggcccgcuccgagcc

SEQ ID NO: 1275125 - RNA, 19 nt, Artificial Sequence
  Description of Artificial Sequence: Synthetic oligonucleotide
guguaucaucuccucuuug

SEQ ID NO: 1275126 - RNA, 19 nt, Artificial Sequence
  Description of Artificial Sequence: Synthetic oligonucleotide
caaugcgcccaucggcccg

SEQ ID NO: 1275127 - RNA, 19 nt, Artificial Sequence
  Description of Artificial Sequence: Synthetic oligonucleotide
uggacagauaggaccccuc

SEQ ID NO: 1275128 - RNA, 19 nt, Artificial Sequence
  Description of Artificial Sequence: Synthetic oligonucleotide
cagaucugacugcucguug

SEQ ID NO: 1275129 - RNA, 19 nt, Artificial Sequence
  Description of Artificial Sequence: Synthetic oligonucleotide
acccuuccguagcuccacc

SEQ ID NO: 1275130 - RNA, 19 nt, Artificial Sequence
  Description of Artificial Sequence: Synthetic oligonucleotide
ucguugucaaaaggagcca

SEQ ID NO: 1275131 - RNA, 19 nt, Artificial Sequence
  Description of Artificial Sequence: Synthetic oligonucleotide
uggucccugccuaaacguc

SEQ ID NO: 1275132 - RNA, 19 nt, Artificial Sequence
  Description of Artificial Sequence: Synthetic oligonucleotide
ugcagggagugucguagau

SEQ ID NO: 1275133 - RNA, 19 nt, Artificial Sequence
  Description of Artificial Sequence: Synthetic oligonucleotide
cagcagauccuuguauuug

SEQ ID NO: 1275134 - RNA, 19 nt, Artificial Sequence
  Description of Artificial Sequence: Synthetic oligonucleotide
agcuucucgcacucaggca

SEQ ID NO: 1275135 - RNA, 19 nt, Artificial Sequence
  Description of Artificial Sequence: Synthetic oligonucleotide
gugcgaauguaauccuuca

SEQ ID NO: 1275136 - RNA, 19 nt, Artificial Sequence
  Description of Artificial Sequence: Synthetic oligonucleotide
accguggcgcuguagucca

SEQ ID NO: 1275137 - RNA, 19 nt, Artificial Sequence
  Description of Artificial Sequence: Synthetic oligonucleotide
guuauccgaguguaguacu

SEQ ID NO: 1275138 - RNA, 19 nt, Artificial Sequence
  Description of Artificial Sequence: Synthetic oligonucleotide
guaauccuucacagcuagg

SEQ ID NO: 1275139 - RNA, 19 nt, Artificial Sequence
  Description of Artificial Sequence: Synthetic oligonucleotide
ggucuuguuaacgacuaga

SEQ ID NO: 1275140 - RNA, 19 nt, Artificial Sequence
  Description of Artificial Sequence: Synthetic oligonucleotide
cugacuccgccguuuugac

SEQ ID NO: 1275141 - RNA, 19 nt, Artificial Sequence
  Description of Artificial Sequence: Synthetic oligonucleotide
cuacugcaaccaagaugcg

SEQ ID NO: 1275142 - RNA, 19 nt, Artificial Sequence
  Description of Artificial Sequence: Synthetic oligonucleotide
aucugugugcgaauguaau

SEQ ID NO: 1275143 - RNA, 19 nt, Artificial Sequence
  Description of Artificial Sequence: Synthetic oligonucleotide
cguaaguacagcacugcug

SEQ ID NO: 1275144 - RNA, 19 nt, Artificial Sequence
  Description of Artificial Sequence: Synthetic oligonucleotide
cucaacaaguguggaccag

SEQ ID NO: 1275145 - RNA, 19 nt, Artificial Sequence
  Description of Artificial Sequence: Synthetic oligonucleotide
caccguggcgcuguagucc

SEQ ID NO: 1275146 - RNA, 19 nt, Artificial Sequence
  Description of Artificial Sequence: Synthetic oligonucleotide
guaguacuuggccauaauu

SEQ ID NO: 1275147 - RNA, 19 nt, Artificial Sequence
  Description of Artificial Sequence: Synthetic oligonucleotide
agccaggauaacauagaga

SEQ ID NO: 1275148 - RNA, 19 nt, Artificial Sequence
  Description of Artificial Sequence: Synthetic oligonucleotide
aggauaacauagagaacaa

SEQ ID NO: 1275149 - RNA, 19 nt, Artificial Sequence
  Description of Artificial Sequence: Synthetic oligonucleotide
ggcucuguagugcuuacaa

SEQ ID NO: 1275150 - RNA, 19 nt, Artificial Sequence
  Description of Artificial Sequence: Synthetic oligonucleotide
uuccguagcuccaccccau

SEQ ID NO: 1275151 - RNA, 19 nt, Artificial Sequence
  Description of Artificial Sequence: Synthetic oligonucleotide
cuuuuauaguugccaaggu

SEQ ID NO: 1275152 - RNA, 19 nt, Artificial Sequence
  Description of Artificial Sequence: Synthetic oligonucleotide
auggucuuguuaacgacua

SEQ ID NO: 1275153 - RNA, 19 nt, Artificial Sequence
  Description of Artificial Sequence: Synthetic oligonucleotide
gaccagucauuuaauaaau

SEQ ID NO: 1275154 - RNA, 19 nt, Artificial Sequence
  Description of Artificial Sequence: Synthetic oligonucleotide
uuagucagccgagcacgcu

SEQ ID NO: 1275155 - RNA, 19 nt, Artificial Sequence
  Description of Artificial Sequence: Synthetic oligonucleotide
aaucgcagcuugacuggga

SEQ ID NO: 1275156 - RNA, 19 nt, Artificial Sequence
  Description of Artificial Sequence: Synthetic oligonucleotide
gugugucguuuuguuaacc

SEQ ID NO: 1275157 - RNA, 19 nt, Artificial Sequence
  Description of Artificial Sequence: Synthetic oligonucleotide
ggauaacauagagaacaac

SEQ ID NO: 1275158 - RNA, 19 nt, Artificial Sequence
  Description of Artificial Sequence: Synthetic oligonucleotide
cuguauuuucuuccuggaa

SEQ ID NO: 1275159 - RNA, 19 nt, Artificial Sequence
  Description of Artificial Sequence: Synthetic oligonucleotide
gacccguagguuuccaccu

SEQ ID NO: 1275160 - RNA, 19 nt, Artificial Sequence
  Description of Artificial Sequence: Synthetic oligonucleotide
uucugagaccagucauuua

SEQ ID NO: 1275161 - RNA, 19 nt, Artificial Sequence
  Description of Artificial Sequence: Synthetic oligonucleotide
cuucuguaaccauccguaa

SEQ ID NO: 1275162 - RNA, 19 nt, Artificial Sequence
  Description of Artificial Sequence: Synthetic oligonucleotide
uggacccguagguuuccac

SEQ ID NO: 1275163 - RNA, 19 nt, Artificial Sequence
  Description of Artificial Sequence: Synthetic oligonucleotide
ccuucuguaaccauccgua

SEQ ID NO: 1275164 - RNA, 19 nt, Artificial Sequence
  Description of Artificial Sequence: Synthetic oligonucleotide
ugcaaccaagaugcgggaa

SEQ ID NO: 1275165 - RNA, 19 nt, Artificial Sequence
  Description of Artificial Sequence: Synthetic oligonucleotide
gacagauaggaccccucgu

SEQ ID NO: 1275166 - RNA, 19 nt, Artificial Sequence
  Description of Artificial Sequence: Synthetic oligonucleotide
ggucuuagucagccgagca

SEQ ID NO: 1275167 - RNA, 19 nt, Artificial Sequence
  Description of Artificial Sequence: Synthetic oligonucleotide
cgaguucaguuucugagac

SEQ ID NO: 1275168 - RNA, 19 nt, Artificial Sequence
  Description of Artificial Sequence: Synthetic oligonucleotide
acuguagauuguguaucau

SEQ ID NO: 1275169 - RNA, 19 nt, Artificial Sequence
  Description of Artificial Sequence: Synthetic oligonucleotide
cacuacuuauccggugaac

SEQ ID NO: 1275170 - RNA, 19 nt, Artificial Sequence
  Description of Artificial Sequence: Synthetic oligonucleotide
acgucaguugccggggucu

SEQ ID NO: 1275171 - RNA, 19 nt, Artificial Sequence
  Description of Artificial Sequence: Synthetic oligonucleotide
aguccucaacaagugugga

SEQ ID NO: 1275172 - RNA, 19 nt, Artificial Sequence
  Description of Artificial Sequence: Synthetic oligonucleotide
ccacguaaguacagcacug

SEQ ID NO: 1275173 - RNA, 19 nt, Artificial Sequence
  Description of Artificial Sequence: Synthetic oligonucleotide
acccguagguuuccaccug

SEQ ID NO: 1275174 - RNA, 19 nt, Artificial Sequence
  Description of Artificial Sequence: Synthetic oligonucleotide
gugcuuacaaauggacaga

SEQ ID NO: 1275175 - RNA, 19 nt, Artificial Sequence
  Description of Artificial Sequence: Synthetic oligonucleotide
ggucccugccuaaacgucc

SEQ ID NO: 1275176 - RNA, 19 nt, Artificial Sequence
  Description of Artificial Sequence: Synthetic oligonucleotide
ggugugucguuuuguuaac

SEQ ID NO: 1275177 - RNA, 19 nt, Artificial Sequence
  Description of Artificial Sequence: Synthetic oligonucleotide
gauccagaaguugugccau

SEQ ID NO: 1275178 - RNA, 19 nt, Artificial Sequence
  Description of Artificial Sequence: Synthetic oligonucleotide
gcgaguucaguuucugaga

SEQ ID NO: 1275179 - RNA, 19 nt, Artificial Sequence
  Description of Artificial Sequence: Synthetic oligonucleotide
augcgggaaguggacacca

SEQ ID NO: 1275180 - RNA, 19 nt, Artificial Sequence
  Description of Artificial Sequence: Synthetic oligonucleotide
guaauucuugaaggaugga

SEQ ID NO: 1275181 - RNA, 19 nt, Artificial Sequence
  Description of Artificial Sequence: Synthetic oligonucleotide
augcagggagugucguaga

SEQ ID NO: 1275182 - RNA, 19 nt, Artificial Sequence
  Description of Artificial Sequence: Synthetic oligonucleotide
agggagugucguagauggc

SEQ ID NO: 1275183 - RNA, 19 nt, Artificial Sequence
  Description of Artificial Sequence: Synthetic oligonucleotide
gucuuguuaacgacuagau

SEQ ID NO: 1275184 - RNA, 19 nt, Artificial Sequence
  Description of Artificial Sequence: Synthetic oligonucleotide
cauggacccguagguuucc

SEQ ID NO: 1275185 - RNA, 19 nt, Artificial Sequence
  Description of Artificial Sequence: Synthetic oligonucleotide
gggaaguggacaccauauc

SEQ ID NO: 1275186 - RNA, 19 nt, Artificial Sequence
  Description of Artificial Sequence: Synthetic oligonucleotide
ccuuccguagcuccacccc

SEQ ID NO: 1275187 - RNA, 19 nt, Artificial Sequence
  Description of Artificial Sequence: Synthetic oligonucleotide
gucccugccuaaacguccc

SEQ ID NO: 1275188 - RNA, 19 nt, Artificial Sequence
  Description of Artificial Sequence: Synthetic oligonucleotide
ccgccguuuugacaaaagc

SEQ ID NO: 1275189 - RNA, 19 nt, Artificial Sequence
  Description of Artificial Sequence: Synthetic oligonucleotide
cucuuuggcuaugaggugu

SEQ ID NO: 1275190 - RNA, 19 nt, Artificial Sequence
  Description of Artificial Sequence: Synthetic oligonucleotide
agucagccgagcacgcuca

SEQ ID NO: 1275191 - RNA, 19 nt, Artificial Sequence
  Description of Artificial Sequence: Synthetic oligonucleotide
agccgagcacgcucaauuu

SEQ ID NO: 1275192 - RNA, 19 nt, Artificial Sequence
  Description of Artificial Sequence: Synthetic oligonucleotide
ccaaggucuuagucagccg

SEQ ID NO: 1275193 - RNA, 19 nt, Artificial Sequence
  Description of Artificial Sequence: Synthetic oligonucleotide
ucccugccuaaacgucccc

SEQ ID NO: 1275194 - RNA, 19 nt, Artificial Sequence
  Description of Artificial Sequence: Synthetic oligonucleotide
agcugacuccgccguuuug

SEQ ID NO: 1275195 - RNA, 19 nt, Artificial Sequence
  Description of Artificial Sequence: Synthetic oligonucleotide
ucgugcugauccagcugaa

SEQ ID NO: 1275196 - RNA, 19 nt, Artificial Sequence
  Description of Artificial Sequence: Synthetic oligonucleotide
cuccgagccgccguccgcc

SEQ ID NO: 1275197 - RNA, 19 nt, Artificial Sequence
  Description of Artificial Sequence: Synthetic oligonucleotide
gagugucguagauggcucu

SEQ ID NO: 1275198 - RNA, 19 nt, Artificial Sequence
  Description of Artificial Sequence: Synthetic oligonucleotide
cgccguuuugacaaaagca

SEQ ID NO: 1275199 - RNA, 19 nt, Artificial Sequence
  Description of Artificial Sequence: Synthetic oligonucleotide
ggagccaggauaacauaga

SEQ ID NO: 1275200 - RNA, 19 nt, Artificial Sequence
  Description of Artificial Sequence: Synthetic oligonucleotide
gccguuuugacaaaagcau

SEQ ID NO: 1275201 - RNA, 19 nt, Artificial Sequence
  Description of Artificial Sequence: Synthetic oligonucleotide
gcuaaugaucugugugcga

SEQ ID NO: 1275202 - RNA, 19 nt, Artificial Sequence
  Description of Artificial Sequence: Synthetic oligonucleotide
ggagugucguagauggcuc

SEQ ID NO: 1275203 - RNA, 19 nt, Artificial Sequence
  Description of Artificial Sequence: Synthetic oligonucleotide
ugcgggaaguggacaccau

SEQ ID NO: 1275204 - RNA, 19 nt, Artificial Sequence
  Description of Artificial Sequence: Synthetic oligonucleotide
uccguagcuccaccccaua

SEQ ID NO: 1275205 - RNA, 19 nt, Artificial Sequence
  Description of Artificial Sequence: Synthetic oligonucleotide
gcugacuccgccguuuuga

SEQ ID NO: 1275206 - RNA, 19 nt, Artificial Sequence
  Description of Artificial Sequence: Synthetic oligonucleotide
agcuugacugggaggucug

SEQ ID NO: 1275207 - RNA, 19 nt, Artificial Sequence
  Description of Artificial Sequence: Synthetic oligonucleotide
auccggugaaccagaucug

SEQ ID NO: 1275208 - RNA, 19 nt, Artificial Sequence
  Description of Artificial Sequence: Synthetic oligonucleotide
ccgagcacgcucaauuuca

SEQ ID NO: 1275209 - RNA, 19 nt, Artificial Sequence
  Description of Artificial Sequence: Synthetic oligonucleotide
guaguacuucaacuuuaau

SEQ ID NO: 1275210 - RNA, 19 nt, Artificial Sequence
  Description of Artificial Sequence: Synthetic oligonucleotide
ggccauaauucugauguua

SEQ ID NO: 1275211 - RNA, 19 nt, Artificial Sequence
  Description of Artificial Sequence: Synthetic oligonucleotide
ccuccacguaaguacagca

SEQ ID NO: 1275212 - RNA, 19 nt, Artificial Sequence
  Description of Artificial Sequence: Synthetic oligonucleotide
gcgcccaucggcccgcucc

SEQ ID NO: 1275213 - RNA, 19 nt, Artificial Sequence
  Description of Artificial Sequence: Synthetic oligonucleotide
cguugucaaaaggagccag

SEQ ID NO: 1275214 - RNA, 19 nt, Artificial Sequence
  Description of Artificial Sequence: Synthetic oligonucleotide
gcagggagugucguagaug

SEQ ID NO: 1275215 - RNA, 19 nt, Artificial Sequence
  Description of Artificial Sequence: Synthetic oligonucleotide
caguugccggggucuccgg

SEQ ID NO: 1275216 - RNA, 19 nt, Artificial Sequence
  Description of Artificial Sequence: Synthetic oligonucleotide
accccucgugcugauccag

SEQ ID NO: 1275217 - RNA, 19 nt, Artificial Sequence
  Description of Artificial Sequence: Synthetic oligonucleotide
ccggggaacccuuccguag

SEQ ID NO: 1275218 - RNA, 19 nt, Artificial Sequence
  Description of Artificial Sequence: Synthetic oligonucleotide
ccauggacccguagguuuc

SEQ ID NO: 1275219 - RNA, 19 nt, Artificial Sequence
  Description of Artificial Sequence: Synthetic oligonucleotide
gggagugucguagauggcu

SEQ ID NO: 1275220 - RNA, 19 nt, Artificial Sequence
  Description of Artificial Sequence: Synthetic oligonucleotide
cacgcucaauuucaacaua

SEQ ID NO: 1275221 - RNA, 19 nt, Artificial Sequence
  Description of Artificial Sequence: Synthetic oligonucleotide
gaagcaguucgggucugcu

SEQ ID NO: 1275222 - RNA, 19 nt, Artificial Sequence
  Description of Artificial Sequence: Synthetic oligonucleotide
gccgagcacgcucaauuuc

SEQ ID NO: 1275223 - RNA, 19 nt, Artificial Sequence
  Description of Artificial Sequence: Synthetic oligonucleotide
accauccguaaaguaucaa

SEQ ID NO: 1275224 - RNA, 19 nt, Artificial Sequence
  Description of Artificial Sequence: Synthetic oligonucleotide
ccggugaaccagaucugac

SEQ ID NO: 1275225 - RNA, 19 nt, Artificial Sequence
  Description of Artificial Sequence: Synthetic oligonucleotide
cccuuccguagcuccaccc

SEQ ID NO: 1275226 - RNA, 19 nt, Artificial Sequence
  Description of Artificial Sequence: Synthetic oligonucleotide
ccucacuguagauugugua

SEQ ID NO: 1275227 - RNA, 19 nt, Artificial Sequence
  Description of Artificial Sequence: Synthetic oligonucleotide
cuguaaccauccguaaagu

SEQ ID NO: 1275228 - RNA, 19 nt, Artificial Sequence
  Description of Artificial Sequence: Synthetic oligonucleotide
gguuuccaccuguaauucu

SEQ ID NO: 1275229 - RNA, 19 nt, Artificial Sequence
  Description of Artificial Sequence: Synthetic oligonucleotide
ccguagcuccaccccauag

SEQ ID NO: 1275230 - RNA, 19 nt, Artificial Sequence
  Description of Artificial Sequence: Synthetic oligonucleotide
ccguuuugacaaaagcaua

SEQ ID NO: 1275231 - RNA, 19 nt, Artificial Sequence
  Description of Artificial Sequence: Synthetic oligonucleotide
gaccuccaauuuugugucu

SEQ ID NO: 1275232 - RNA, 19 nt, Artificial Sequence
  Description of Artificial Sequence: Synthetic oligonucleotide
gccauaauucugauguuau

SEQ ID NO: 1275233 - RNA, 19 nt, Artificial Sequence
  Description of Artificial Sequence: Synthetic oligonucleotide
ccauccguaaaguaucaau

SEQ ID NO: 1275234 - RNA, 19 nt, Artificial Sequence
  Description of Artificial Sequence: Synthetic oligonucleotide
ccaucggcccgcuccgagc

SEQ ID NO: 1275235 - RNA, 19 nt, Artificial Sequence
  Description of Artificial Sequence: Synthetic oligonucleotide
cuaugaggugugucguuuu

SEQ ID NO: 1275236 - RNA, 19 nt, Artificial Sequence
  Description of Artificial Sequence: Synthetic oligonucleotide
ccucgugcugauccagcug

SEQ ID NO: 1275237 - RNA, 19 nt, Artificial Sequence
  Description of Artificial Sequence: Synthetic oligonucleotide
cagccgagcacgcucaauu

SEQ ID NO: 1275238 - RNA, 19 nt, Artificial Sequence
  Description of Artificial Sequence: Synthetic oligonucleotide
uaggaccccucgugcugau

SEQ ID NO: 1275239 - RNA, 19 nt, Artificial Sequence
  Description of Artificial Sequence: Synthetic oligonucleotide
auggacccguagguuucca

SEQ ID NO: 1275240 - RNA, 19 nt, Artificial Sequence
  Description of Artificial Sequence: Synthetic oligonucleotide
cggggaacccuuccguagc

SEQ ID NO: 1275241 - RNA, 19 nt, Artificial Sequence
  Description of Artificial Sequence: Synthetic oligonucleotide
gcugaaucauuaaguugua

SEQ ID NO: 1275242 - RNA, 19 nt, Artificial Sequence
  Description of Artificial Sequence: Synthetic oligonucleotide
gcgggaaguggacaccaua

SEQ ID NO: 1275243 - RNA, 19 nt, Artificial Sequence
  Description of Artificial Sequence: Synthetic oligonucleotide
cuccggggaacccuuccgu

SEQ ID NO: 1275244 - RNA, 19 nt, Artificial Sequence
  Description of Artificial Sequence: Synthetic oligonucleotide
cccaucggcccgcuccgag

SEQ ID NO: 1275245 - RNA, 19 nt, Artificial Sequence
  Description of Artificial Sequence: Synthetic oligonucleotide
gcuaugaggugugucguuu

SEQ ID NO: 1275246 - RNA, 19 nt, Artificial Sequence
  Description of Artificial Sequence: Synthetic oligonucleotide
gugugcgaauguaauccuu

SEQ ID NO: 1275247 - RNA, 19 nt, Artificial Sequence
  Description of Artificial Sequence: Synthetic oligonucleotide
gucagccgagcacgcucaa

SEQ ID NO: 1275248 - RNA, 19 nt, Artificial Sequence
  Description of Artificial Sequence: Synthetic oligonucleotide
cguggcgcuguaguccacc

SEQ ID NO: 1275249 - RNA, 19 nt, Artificial Sequence
  Description of Artificial Sequence: Synthetic oligonucleotide
ugcgcccaucggcccgcuc

SEQ ID NO: 1275250 - RNA, 19 nt, Artificial Sequence
  Description of Artificial Sequence: Synthetic oligonucleotide
cugccacuucucacuuucu

SEQ ID NO: 1275251 - RNA, 19 nt, Artificial Sequence
  Description of Artificial Sequence: Synthetic oligonucleotide
cggugaaccagaucugacu

SEQ ID NO: 1275252 - RNA, 19 nt, Artificial Sequence
  Description of Artificial Sequence: Synthetic oligonucleotide
cagcuuguuuuagcugacu

SEQ ID NO: 1275253 - RNA, 19 nt, Artificial Sequence
  Description of Artificial Sequence: Synthetic oligonucleotide
cuuuggcuaugaggugugu

SEQ ID NO: 1275254 - RNA, 19 nt, Artificial Sequence
  Description of Artificial Sequence: Synthetic oligonucleotide
cgcccaucggcccgcuccg

SEQ ID NO: 1275255 - RNA, 19 nt, Artificial Sequence
  Description of Artificial Sequence: Synthetic oligonucleotide
gcagcuugacugggagguc

SEQ ID NO: 1275256 - RNA, 19 nt, Artificial Sequence
  Description of Artificial Sequence: Synthetic oligonucleotide
ggcuaugaggugugucguu

SEQ ID NO: 1275257 - RNA, 19 nt, Artificial Sequence
  Description of Artificial Sequence: Synthetic oligonucleotide
cgcuccgagccgccguccg

SEQ ID NO: 1275258 - RNA, 19 nt, Artificial Sequence
  Description of Artificial Sequence: Synthetic oligonucleotide
cgagcacgcucaauuucaa

SEQ ID NO: 1275259 - RNA, 19 nt, Artificial Sequence
  Description of Artificial Sequence: Synthetic oligonucleotide
ggucuccggggaacccuuc

SEQ ID NO: 1275260 - RNA, 19 nt, Artificial Sequence
  Description of Artificial Sequence: Synthetic oligonucleotide
cccguagguuuccaccugu

SEQ ID NO: 1275261 - RNA, 19 nt, Artificial Sequence
  Description of Artificial Sequence: Synthetic oligonucleotide
ccacgacucuguucuucaa

SEQ ID NO: 1275262 - RNA, 19 nt, Artificial Sequence
  Description of Artificial Sequence: Synthetic oligonucleotide
gcaguucgggucugcuuuu

SEQ ID NO: 1275263 - RNA, 19 nt, Artificial Sequence
  Description of Artificial Sequence: Synthetic oligonucleotide
augcgcccaucggcccgcu

SEQ ID NO: 1275264 - RNA, 19 nt, Artificial Sequence
  Description of Artificial Sequence: Synthetic oligonucleotide
ccagaucugacugcucguu

SEQ ID NO: 1275265 - RNA, 19 nt, Artificial Sequence
  Description of Artificial Sequence: Synthetic oligonucleotide
cgacuagauuggagaggaa

SEQ ID NO: 1275266 - RNA, 19 nt, Artificial Sequence
  Description of Artificial Sequence: Synthetic oligonucleotide
gguccaccguggcgcugua

SEQ ID NO: 1275267 - RNA, 19 nt, Artificial Sequence
  Description of Artificial Sequence: Synthetic oligonucleotide
cgaccuuccuuggccagcu

SEQ ID NO: 1275268 - RNA, 19 nt, Artificial Sequence
  Description of Artificial Sequence: Synthetic oligonucleotide
gcccaucggcccgcuccga

SEQ ID NO: 1275269 - RNA, 19 nt, Artificial Sequence
  Description of Artificial Sequence: Synthetic oligonucleotide
gccguccgccauggucccu

SEQ ID NO: 1275270 - RNA, 19 nt, Artificial Sequence
  Description of Artificial Sequence: Synthetic oligonucleotide
auaguaacagcuuaaaauc

SEQ ID NO: 1275271 - RNA, 19 nt, Artificial Sequence
  Description of Artificial Sequence: Synthetic oligonucleotide
aaguguaugucauaguaac

SEQ ID NO: 1275272 - RNA, 19 nt, Artificial Sequence
  Description of Artificial Sequence: Synthetic oligonucleotide
aauaauacugagucuauca

SEQ ID NO: 1275273 - RNA, 19 nt, Artificial Sequence
  Description of Artificial Sequence: Synthetic oligonucleotide
aacccaagcacauggaaac

SEQ ID NO: 1275274 - RNA, 19 nt, Artificial Sequence
  Description of Artificial Sequence: Synthetic oligonucleotide
uggaagaauugccagaagg

SEQ ID NO: 1275275 - RNA, 19 nt, Artificial Sequence
  Description of Artificial Sequence: Synthetic oligonucleotide
aaugccuuuaguaugcagg

SEQ ID NO: 1275276 - RNA, 19 nt, Artificial Sequence
  Description of Artificial Sequence: Synthetic oligonucleotide
ucuaaaguguaugucauag

SEQ ID NO: 1275277 - RNA, 19 nt, Artificial Sequence
  Description of Artificial Sequence: Synthetic oligonucleotide
ucggucacggcaaagaaag

SEQ ID NO: 1275278 - RNA, 19 nt, Artificial Sequence
  Description of Artificial Sequence: Synthetic oligonucleotide
aggggauuaaaacccaagc

SEQ ID NO: 1275279 - RNA, 19 nt, Artificial Sequence
  Description of Artificial Sequence: Synthetic oligonucleotide
ucuaucagcaaucccaaac

SEQ ID NO: 1275280 - RNA, 19 nt, Artificial Sequence
  Description of Artificial Sequence: Synthetic oligonucleotide
aauacugagucuaucagca

SEQ ID NO: 1275281 - RNA, 19 nt, Artificial Sequence
  Description of Artificial Sequence: Synthetic oligonucleotide
uaaaguguaugucauagua

SEQ ID NO: 1275282 - RNA, 19 nt, Artificial Sequence
  Description of Artificial Sequence: Synthetic oligonucleotide
uaugcaaagugacaaguga

SEQ ID NO: 1275283 - RNA, 19 nt, Artificial Sequence
  Description of Artificial Sequence: Synthetic oligonucleotide
ugugcuacagacuggaaga

SEQ ID NO: 1275284 - RNA, 19 nt, Artificial Sequence
  Description of Artificial Sequence: Synthetic oligonucleotide
aagacaaccccuuuggaaa

SEQ ID NO: 1275285 - RNA, 19 nt, Artificial Sequence
  Description of Artificial Sequence: Synthetic oligonucleotide
aaagauuaugugcuucucu

SEQ ID NO: 1275286 - RNA, 19 nt, Artificial Sequence
  Description of Artificial Sequence: Synthetic oligonucleotide
gaagaggggauuaaaaccc

SEQ ID NO: 1275287 - RNA, 19 nt, Artificial Sequence
  Description of Artificial Sequence: Synthetic oligonucleotide
auaauacugagucuaucag

SEQ ID NO: 1275288 - RNA, 19 nt, Artificial Sequence
  Description of Artificial Sequence: Synthetic oligonucleotide
ugcagugggaguuugaagu

SEQ ID NO: 1275289 - RNA, 19 nt, Artificial Sequence
  Description of Artificial Sequence: Synthetic oligonucleotide
aaagugacaagugauugcu

SEQ ID NO: 1275290 - RNA, 19 nt, Artificial Sequence
  Description of Artificial Sequence: Synthetic oligonucleotide
agauguucaugcugcaggc

SEQ ID NO: 1275291 - RNA, 19 nt, Artificial Sequence
  Description of Artificial Sequence: Synthetic oligonucleotide
uaauacugagucuaucagc

SEQ ID NO: 1275292 - RNA, 19 nt, Artificial Sequence
  Description of Artificial Sequence: Synthetic oligonucleotide
uuucucaaagaccaaguaa

SEQ ID NO: 1275293 - RNA, 19 nt, Artificial Sequence
  Description of Artificial Sequence: Synthetic oligonucleotide
uggagauucacacaguaua

SEQ ID NO: 1275294 - RNA, 19 nt, Artificial Sequence
  Description of Artificial Sequence: Synthetic oligonucleotide
aagaaauaauacugagucu

SEQ ID NO: 1275295 - RNA, 19 nt, Artificial Sequence
  Description of Artificial Sequence: Synthetic oligonucleotide
agauuuucacuggagacac

SEQ ID NO: 1275296 - RNA, 19 nt, Artificial Sequence
  Description of Artificial Sequence: Synthetic oligonucleotide
auacauuucggucacggca

SEQ ID NO: 1275297 - RNA, 19 nt, Artificial Sequence
  Description of Artificial Sequence: Synthetic oligonucleotide
aaauaauacugagucuauc

SEQ ID NO: 1275298 - RNA, 19 nt, Artificial Sequence
  Description of Artificial Sequence: Synthetic oligonucleotide
ugcgaagagugucaggucc

SEQ ID NO: 1275299 - RNA, 19 nt, Artificial Sequence
  Description of Artificial Sequence: Synthetic oligonucleotide
auugaagugcuuccgcuuc

SEQ ID NO: 1275300 - RNA, 19 nt, Artificial Sequence
  Description of Artificial Sequence: Synthetic oligonucleotide
cauauauucugcagagccg

SEQ ID NO: 1275301 - RNA, 19 nt, Artificial Sequence
  Description of Artificial Sequence: Synthetic oligonucleotide
guuaagggcaauugccucg

SEQ ID NO: 1275302 - RNA, 19 nt, Artificial Sequence
  Description of Artificial Sequence: Synthetic oligonucleotide
ugagcaaugccuuuaguau

SEQ ID NO: 1275303 - RNA, 19 nt, Artificial Sequence
  Description of Artificial Sequence: Synthetic oligonucleotide
agaaauaauacugagucua

SEQ ID NO: 1275304 - RNA, 19 nt, Artificial Sequence
  Description of Artificial Sequence: Synthetic oligonucleotide
aguggcaacgucccgcacc

SEQ ID NO: 1275305 - RNA, 19 nt, Artificial Sequence
  Description of Artificial Sequence: Synthetic oligonucleotide
cucguuggagauaugagac

SEQ ID NO: 1275306 - RNA, 19 nt, Artificial Sequence
  Description of Artificial Sequence: Synthetic oligonucleotide
gaugggugggaacccaugg

SEQ ID NO: 1275307 - RNA, 19 nt, Artificial Sequence
  Description of Artificial Sequence: Synthetic oligonucleotide
aaaaggcccgccuggagcu

SEQ ID NO: 1275308 - RNA, 19 nt, Artificial Sequence
  Description of Artificial Sequence: Synthetic oligonucleotide
aagaauugccagaagguga

SEQ ID NO: 1275309 - RNA, 19 nt, Artificial Sequence
  Description of Artificial Sequence: Synthetic oligonucleotide
gaaaaggcccgccuggagc

SEQ ID NO: 1275310 - RNA, 19 nt, Artificial Sequence
  Description of Artificial Sequence: Synthetic oligonucleotide
aggaugauaaaugaggaau

SEQ ID NO: 1275311 - RNA, 19 nt, Artificial Sequence
  Description of Artificial Sequence: Synthetic oligonucleotide
cauggaaacccuuguuugg

SEQ ID NO: 1275312 - RNA, 19 nt, Artificial Sequence
  Description of Artificial Sequence: Synthetic oligonucleotide
agaauugccagaaggugac

SEQ ID NO: 1275313 - RNA, 19 nt, Artificial Sequence
  Description of Artificial Sequence: Synthetic oligonucleotide
gucuguaggacagaggaag

SEQ ID NO: 1275314 - RNA, 19 nt, Artificial Sequence
  Description of Artificial Sequence: Synthetic oligonucleotide
gaugauaaaugaggaauac

SEQ ID NO: 1275315 - RNA, 19 nt, Artificial Sequence
  Description of Artificial Sequence: Synthetic oligonucleotide
ccauauauucugcagagcc

SEQ ID NO: 1275316 - RNA, 19 nt, Artificial Sequence
  Description of Artificial Sequence: Synthetic oligonucleotide
uuuggggagguccauggac

SEQ ID NO: 1275317 - RNA, 19 nt, Artificial Sequence
  Description of Artificial Sequence: Synthetic oligonucleotide
aaaucaguugggacugugg

SEQ ID NO: 1275318 - RNA, 19 nt, Artificial Sequence
  Description of Artificial Sequence: Synthetic oligonucleotide
caggcgauuaugcaaagug

SEQ ID NO: 1275319 - RNA, 19 nt, Artificial Sequence
  Description of Artificial Sequence: Synthetic oligonucleotide
aacccauggagccuuugug

SEQ ID NO: 1275320 - RNA, 19 nt, Artificial Sequence
  Description of Artificial Sequence: Synthetic oligonucleotide
cagcgcuugucauagaaag

SEQ ID NO: 1275321 - RNA, 19 nt, Artificial Sequence
  Description of Artificial Sequence: Synthetic oligonucleotide
uacauuucggucacggcaa

SEQ ID NO: 1275322 - RNA, 19 nt, Artificial Sequence
  Description of Artificial Sequence: Synthetic oligonucleotide
uccugaauugaggggaugg

SEQ ID NO: 1275323 - RNA, 19 nt, Artificial Sequence
  Description of Artificial Sequence: Synthetic oligonucleotide
uuugcaucucgaaccagga

SEQ ID NO: 1275324 - RNA, 19 nt, Artificial Sequence
  Description of Artificial Sequence: Synthetic oligonucleotide
ucgggaaacucguauuugc

SEQ ID NO: 1275325 - RNA, 19 nt, Artificial Sequence
  Description of Artificial Sequence: Synthetic oligonucleotide
gagcaaugccuuuaguaug

SEQ ID NO: 1275326 - RNA, 19 nt, Artificial Sequence
  Description of Artificial Sequence: Synthetic oligonucleotide
aacagcuuguucuggcaca

SEQ ID NO: 1275327 - RNA, 19 nt, Artificial Sequence
  Description of Artificial Sequence: Synthetic oligonucleotide
aagugauugcuuuuccuuu

SEQ ID NO: 1275328 - RNA, 19 nt, Artificial Sequence
  Description of Artificial Sequence: Synthetic oligonucleotide
ucacggcaaagaaagauua

SEQ ID NO: 1275329 - RNA, 19 nt, Artificial Sequence
  Description of Artificial Sequence: Synthetic oligonucleotide
ugucauaguaacagcuuaa

SEQ ID NO: 1275330 - RNA, 19 nt, Artificial Sequence
  Description of Artificial Sequence: Synthetic oligonucleotide
uacugagucuaucagcaau

SEQ ID NO: 1275331 - RNA, 19 nt, Artificial Sequence
  Description of Artificial Sequence: Synthetic oligonucleotide
aaacccuuguuuggggagg

SEQ ID NO: 1275332 - RNA, 19 nt, Artificial Sequence
  Description of Artificial Sequence: Synthetic oligonucleotide
ucgaaccaggagcuuagag

SEQ ID NO: 1275333 - RNA, 19 nt, Artificial Sequence
  Description of Artificial Sequence: Synthetic oligonucleotide
aauugccucggcugcgaag

SEQ ID NO: 1275334 - RNA, 19 nt, Artificial Sequence
  Description of Artificial Sequence: Synthetic oligonucleotide
agugacaagugauugcuuu

SEQ ID NO: 1275335 - RNA, 19 nt, Artificial Sequence
  Description of Artificial Sequence: Synthetic oligonucleotide
ugagucuaucagcaauccc

SEQ ID NO: 1275336 - RNA, 19 nt, Artificial Sequence
  Description of Artificial Sequence: Synthetic oligonucleotide
agcaaucccaaacauggaa

SEQ ID NO: 1275337 - RNA, 19 nt, Artificial Sequence
  Description of Artificial Sequence: Synthetic oligonucleotide
uggaaacccuuguuugggg

SEQ ID NO: 1275338 - RNA, 19 nt, Artificial Sequence
  Description of Artificial Sequence: Synthetic oligonucleotide
ugucauagaaaguggccuc

SEQ ID NO: 1275339 - RNA, 19 nt, Artificial Sequence
  Description of Artificial Sequence: Synthetic oligonucleotide
augauguagaggaccacac

SEQ ID NO: 1275340 - RNA, 19 nt, Artificial Sequence
  Description of Artificial Sequence: Synthetic oligonucleotide
acugagucuaucagcaauc

SEQ ID NO: 1275341 - RNA, 19 nt, Artificial Sequence
  Description of Artificial Sequence: Synthetic oligonucleotide
aaguaaaaccgugugucau

SEQ ID NO: 1275342 - RNA, 19 nt, Artificial Sequence
  Description of Artificial Sequence: Synthetic oligonucleotide
uaguaugcaggaagucaag

SEQ ID NO: 1275343 - RNA, 19 nt, Artificial Sequence
  Description of Artificial Sequence: Synthetic oligonucleotide
gaggacuugccccuuguac

SEQ ID NO: 1275344 - RNA, 19 nt, Artificial Sequence
  Description of Artificial Sequence: Synthetic oligonucleotide
caugcugagacagcuggcg

SEQ ID NO: 1275345 - RNA, 19 nt, Artificial Sequence
  Description of Artificial Sequence: Synthetic oligonucleotide
acaagugauugcuuuuccu

SEQ ID NO: 1275346 - RNA, 19 nt, Artificial Sequence
  Description of Artificial Sequence: Synthetic oligonucleotide
caguucguucuccucaugc

SEQ ID NO: 1275347 - RNA, 19 nt, Artificial Sequence
  Description of Artificial Sequence: Synthetic oligonucleotide
aaguucuaugcuugcugga

SEQ ID NO: 1275348 - RNA, 19 nt, Artificial Sequence
  Description of Artificial Sequence: Synthetic oligonucleotide
agauuuggaaggaggggac

SEQ ID NO: 1275349 - RNA, 19 nt, Artificial Sequence
  Description of Artificial Sequence: Synthetic oligonucleotide
auuaaaacccaagcacaug

SEQ ID NO: 1275350 - RNA, 19 nt, Artificial Sequence
  Description of Artificial Sequence: Synthetic oligonucleotide
gccuuuaguaugcaggaag

SEQ ID NO: 1275351 - RNA, 19 nt, Artificial Sequence
  Description of Artificial Sequence: Synthetic oligonucleotide
uguaccacgggugcugcag

SEQ ID NO: 1275352 - RNA, 19 nt, Artificial Sequence
  Description of Artificial Sequence: Synthetic oligonucleotide
auugaggggauggcuuugc

SEQ ID NO: 1275353 - RNA, 19 nt, Artificial Sequence
  Description of Artificial Sequence: Synthetic oligonucleotide
ucguuggagauaugagacc

SEQ ID NO: 1275354 - RNA, 19 nt, Artificial Sequence
  Description of Artificial Sequence: Synthetic oligonucleotide
agacaccaucucuaaagug

SEQ ID NO: 1275355 - RNA, 19 nt, Artificial Sequence
  Description of Artificial Sequence: Synthetic oligonucleotide
aaagaccaaguaaaaccgu

SEQ ID NO: 1275356 - RNA, 19 nt, Artificial Sequence
  Description of Artificial Sequence: Synthetic oligonucleotide
ccuaaagaccucuaccacc

SEQ ID NO: 1275357 - RNA, 19 nt, Artificial Sequence
  Description of Artificial Sequence: Synthetic oligonucleotide
aagaggcaugugugucagc

SEQ ID NO: 1275358 - RNA, 19 nt, Artificial Sequence
  Description of Artificial Sequence: Synthetic oligonucleotide
ggugccauauauucugcag

SEQ ID NO: 1275359 - RNA, 19 nt, Artificial Sequence
  Description of Artificial Sequence: Synthetic oligonucleotide
gaaacucguauuugccuuc

SEQ ID NO: 1275360 - RNA, 19 nt, Artificial Sequence
  Description of Artificial Sequence: Synthetic oligonucleotide
uugcagugggaguuugaag

SEQ ID NO: 1275361 - RNA, 19 nt, Artificial Sequence
  Description of Artificial Sequence: Synthetic oligonucleotide
uuaugggugugcaggaguu

SEQ ID NO: 1275362 - RNA, 19 nt, Artificial Sequence
  Description of Artificial Sequence: Synthetic oligonucleotide
aguggccucgucccuaaag

SEQ ID NO: 1275363 - RNA, 19 nt, Artificial Sequence
  Description of Artificial Sequence: Synthetic oligonucleotide
gcuuugcucagccagggag

SEQ ID NO: 1275364 - RNA, 19 nt, Artificial Sequence
  Description of Artificial Sequence: Synthetic oligonucleotide
uguucaguuucaccccacu

SEQ ID NO: 1275365 - RNA, 19 nt, Artificial Sequence
  Description of Artificial Sequence: Synthetic oligonucleotide
accaucucuaaaguguaug

SEQ ID NO: 1275366 - RNA, 19 nt, Artificial Sequence
  Description of Artificial Sequence: Synthetic oligonucleotide
ugucgggaaacucguauuu

SEQ ID NO: 1275367 - RNA, 19 nt, Artificial Sequence
  Description of Artificial Sequence: Synthetic oligonucleotide
gaucccgggaucugcacac

SEQ ID NO: 1275368 - RNA, 19 nt, Artificial Sequence
  Description of Artificial Sequence: Synthetic oligonucleotide
cugcccaagucaaagucac

SEQ ID NO: 1275369 - RNA, 19 nt, Artificial Sequence
  Description of Artificial Sequence: Synthetic oligonucleotide
gcuuaaaaucaguugggac

SEQ ID NO: 1275370 - RNA, 19 nt, Artificial Sequence
  Description of Artificial Sequence: Synthetic oligonucleotide
gugagcaaugccuuuagua

SEQ ID NO: 1275371 - RNA, 19 nt, Artificial Sequence
  Description of Artificial Sequence: Synthetic oligonucleotide
uucggucacggcaaagaaa

SEQ ID NO: 1275372 - RNA, 19 nt, Artificial Sequence
  Description of Artificial Sequence: Synthetic oligonucleotide
cuuuucaaagacaaccccu

SEQ ID NO: 1275373 - RNA, 19 nt, Artificial Sequence
  Description of Artificial Sequence: Synthetic oligonucleotide
auuucggucacggcaaaga

SEQ ID NO: 1275374 - RNA, 19 nt, Artificial Sequence
  Description of Artificial Sequence: Synthetic oligonucleotide
gucaagggcaguggcaacg

SEQ ID NO: 1275375 - RNA, 19 nt, Artificial Sequence
  Description of Artificial Sequence: Synthetic oligonucleotide
auugccucggcugcgaaga

SEQ ID NO: 1275376 - RNA, 19 nt, Artificial Sequence
  Description of Artificial Sequence: Synthetic oligonucleotide
ccaggcgagauuuggaagg

SEQ ID NO: 1275377 - RNA, 19 nt, Artificial Sequence
  Description of Artificial Sequence: Synthetic oligonucleotide
aauugaggggauggcuuug

SEQ ID NO: 1275378 - RNA, 19 nt, Artificial Sequence
  Description of Artificial Sequence: Synthetic oligonucleotide
ggauuaaaacccaagcaca

SEQ ID NO: 1275379 - RNA, 19 nt, Artificial Sequence
  Description of Artificial Sequence: Synthetic oligonucleotide
guucaguuucaccccacug

SEQ ID NO: 1275380 - RNA, 19 nt, Artificial Sequence
  Description of Artificial Sequence: Synthetic oligonucleotide
ucggcugcgaagaguguca

SEQ ID NO: 1275381 - RNA, 19 nt, Artificial Sequence
  Description of Artificial Sequence: Synthetic oligonucleotide
cagcaugauguagaggacc

SEQ ID NO: 1275382 - RNA, 19 nt, Artificial Sequence
  Description of Artificial Sequence: Synthetic oligonucleotide
cuaaagaccucuaccaccu

SEQ ID NO: 1275383 - RNA, 19 nt, Artificial Sequence
  Description of Artificial Sequence: Synthetic oligonucleotide
gaggaugauaaaugaggaa

SEQ ID NO: 1275384 - RNA, 19 nt, Artificial Sequence
  Description of Artificial Sequence: Synthetic oligonucleotide
agcgcugagucuuugcuuu

SEQ ID NO: 1275385 - RNA, 19 nt, Artificial Sequence
  Description of Artificial Sequence: Synthetic oligonucleotide
agcuuaaaaucaguuggga

SEQ ID NO: 1275386 - RNA, 19 nt, Artificial Sequence
  Description of Artificial Sequence: Synthetic oligonucleotide
agacugaucuggcuuccug

SEQ ID NO: 1275387 - RNA, 19 nt, Artificial Sequence
  Description of Artificial Sequence: Synthetic oligonucleotide
acuugccccuuguaccacg

SEQ ID NO: 1275388 - RNA, 19 nt, Artificial Sequence
  Description of Artificial Sequence: Synthetic oligonucleotide
ugccccuuguaccacgggu

SEQ ID NO: 1275389 - RNA, 19 nt, Artificial Sequence
  Description of Artificial Sequence: Synthetic oligonucleotide
gcuacagacuggaagacug

SEQ ID NO: 1275390 - RNA, 19 nt, Artificial Sequence
  Description of Artificial Sequence: Synthetic oligonucleotide
caugcugcaggcgauuaug

SEQ ID NO: 1275391 - RNA, 19 nt, Artificial Sequence
  Description of Artificial Sequence: Synthetic oligonucleotide
gcaaagugacaagugauug

SEQ ID NO: 1275392 - RNA, 19 nt, Artificial Sequence
  Description of Artificial Sequence: Synthetic oligonucleotide
cugagucuaucagcaaucc

SEQ ID NO: 1275393 - RNA, 19 nt, Artificial Sequence
  Description of Artificial Sequence: Synthetic oligonucleotide
agcgaggacgucuguagga

SEQ ID NO: 1275394 - RNA, 19 nt, Artificial Sequence
  Description of Artificial Sequence: Synthetic oligonucleotide
cacccugcauacuucuccc

SEQ ID NO: 1275395 - RNA, 19 nt, Artificial Sequence
  Description of Artificial Sequence: Synthetic oligonucleotide
aaaguggccucgucccuaa

SEQ ID NO: 1275396 - RNA, 19 nt, Artificial Sequence
  Description of Artificial Sequence: Synthetic oligonucleotide
gaucccggugagcaaugcc

SEQ ID NO: 1275397 - RNA, 19 nt, Artificial Sequence
  Description of Artificial Sequence: Synthetic oligonucleotide
ggacccaagggaaaugggg

SEQ ID NO: 1275398 - RNA, 19 nt, Artificial Sequence
  Description of Artificial Sequence: Synthetic oligonucleotide
acccugcauacuucucccc

SEQ ID NO: 1275399 - RNA, 19 nt, Artificial Sequence
  Description of Artificial Sequence: Synthetic oligonucleotide
aacgucccgcaccacucug

SEQ ID NO: 1275400 - RNA, 19 nt, Artificial Sequence
  Description of Artificial Sequence: Synthetic oligonucleotide
ugccaggcgagauuuggaa

SEQ ID NO: 1275401 - RNA, 19 nt, Artificial Sequence
  Description of Artificial Sequence: Synthetic oligonucleotide
uguucaugcugcaggcgau

SEQ ID NO: 1275402 - RNA, 19 nt, Artificial Sequence
  Description of Artificial Sequence: Synthetic oligonucleotide
cagaacuugggcagcgcug

SEQ ID NO: 1275403 - RNA, 19 nt, Artificial Sequence
  Description of Artificial Sequence: Synthetic oligonucleotide
uuggccucguuggagauau

SEQ ID NO: 1275404 - RNA, 19 nt, Artificial Sequence
  Description of Artificial Sequence: Synthetic oligonucleotide
gcaaucccaaacauggaag

SEQ ID NO: 1275405 - RNA, 19 nt, Artificial Sequence
  Description of Artificial Sequence: Synthetic oligonucleotide
ggcgagauuuggaaggagg

SEQ ID NO: 1275406 - RNA, 19 nt, Artificial Sequence
  Description of Artificial Sequence: Synthetic oligonucleotide
gagacaccuuuucuggaga

SEQ ID NO: 1275407 - RNA, 19 nt, Artificial Sequence
  Description of Artificial Sequence: Synthetic oligonucleotide
cuugccccuuguaccacgg

SEQ ID NO: 1275408 - RNA, 19 nt, Artificial Sequence
  Description of Artificial Sequence: Synthetic oligonucleotide
cagauuuucacuggagaca

SEQ ID NO: 1275409 - RNA, 19 nt, Artificial Sequence
  Description of Artificial Sequence: Synthetic oligonucleotide
cuuuaguaugcaggaaguc

SEQ ID NO: 1275410 - RNA, 19 nt, Artificial Sequence
  Description of Artificial Sequence: Synthetic oligonucleotide
ucagaucccggugagcaau

SEQ ID NO: 1275411 - RNA, 19 nt, Artificial Sequence
  Description of Artificial Sequence: Synthetic oligonucleotide
ggcgauuaugcaaagugac

SEQ ID NO: 1275412 - RNA, 19 nt, Artificial Sequence
  Description of Artificial Sequence: Synthetic oligonucleotide
acagucagcgaggacgucu

SEQ ID NO: 1275413 - RNA, 19 nt, Artificial Sequence
  Description of Artificial Sequence: Synthetic oligonucleotide
aaggcccgccuggagcugc

SEQ ID NO: 1275414 - RNA, 19 nt, Artificial Sequence
  Description of Artificial Sequence: Synthetic oligonucleotide
gaagacugaucuggcuucc

SEQ ID NO: 1275415 - RNA, 19 nt, Artificial Sequence
  Description of Artificial Sequence: Synthetic oligonucleotide
uaaggacccaagggaaaug

SEQ ID NO: 1275416 - RNA, 19 nt, Artificial Sequence
  Description of Artificial Sequence: Synthetic oligonucleotide
ugugcuucucugugcuaca

SEQ ID NO: 1275417 - RNA, 19 nt, Artificial Sequence
  Description of Artificial Sequence: Synthetic oligonucleotide
cucgccuucgugccaggcg

SEQ ID NO: 1275418 - RNA, 19 nt, Artificial Sequence
  Description of Artificial Sequence: Synthetic oligonucleotide
gcccuuccugaauugaggg

SEQ ID NO: 1275419 - RNA, 19 nt, Artificial Sequence
  Description of Artificial Sequence: Synthetic oligonucleotide
gauuaaaacccaagcacau

SEQ ID NO: 1275420 - RNA, 19 nt, Artificial Sequence
  Description of Artificial Sequence: Synthetic oligonucleotide
ugagacagcuggcgguuaa

SEQ ID NO: 1275421 - RNA, 19 nt, Artificial Sequence
  Description of Artificial Sequence: Synthetic oligonucleotide
ucccgggaucugcacacag

SEQ ID NO: 1275422 - RNA, 19 nt, Artificial Sequence
  Description of Artificial Sequence: Synthetic oligonucleotide
gcgagauuuggaaggaggg

SEQ ID NO: 1275423 - RNA, 19 nt, Artificial Sequence
  Description of Artificial Sequence: Synthetic oligonucleotide
uggcacacccugcauacuu

SEQ ID NO: 1275424 - RNA, 19 nt, Artificial Sequence
  Description of Artificial Sequence: Synthetic oligonucleotide
uguggagaagaggggauua

SEQ ID NO: 1275425 - RNA, 19 nt, Artificial Sequence
  Description of Artificial Sequence: Synthetic oligonucleotide
uugucgggaaacucguauu

SEQ ID NO: 1275426 - RNA, 19 nt, Artificial Sequence
  Description of Artificial Sequence: Synthetic oligonucleotide
uuguucaguuucaccccac

SEQ ID NO: 1275427 - RNA, 19 nt, Artificial Sequence
  Description of Artificial Sequence: Synthetic oligonucleotide
agccuuuguggauggaaaa

SEQ ID NO: 1275428 - RNA, 19 nt, Artificial Sequence
  Description of Artificial Sequence: Synthetic oligonucleotide
ccgggaucugcacacagcg

SEQ ID NO: 1275429 - RNA, 19 nt, Artificial Sequence
  Description of Artificial Sequence: Synthetic oligonucleotide
ugcaggcgauuaugcaaag

SEQ ID NO: 1275430 - RNA, 19 nt, Artificial Sequence
  Description of Artificial Sequence: Synthetic oligonucleotide
agccgcauggaguggucag

SEQ ID NO: 1275431 - RNA, 19 nt, Artificial Sequence
  Description of Artificial Sequence: Synthetic oligonucleotide
ugugugucagcagccucug

SEQ ID NO: 1275432 - RNA, 19 nt, Artificial Sequence
  Description of Artificial Sequence: Synthetic oligonucleotide
ggcgguuaagggcaauugc

SEQ ID NO: 1275433 - RNA, 19 nt, Artificial Sequence
  Description of Artificial Sequence: Synthetic oligonucleotide
acugcccaagucaaaguca

SEQ ID NO: 1275434 - RNA, 19 nt, Artificial Sequence
  Description of Artificial Sequence: Synthetic oligonucleotide
agggagagaagaggcaugu

SEQ ID NO: 1275435 - RNA, 19 nt, Artificial Sequence
  Description of Artificial Sequence: Synthetic oligonucleotide
uggccucgucccuaaagac

SEQ ID NO: 1275436 - RNA, 19 nt, Artificial Sequence
  Description of Artificial Sequence: Synthetic oligonucleotide
acucagcaugauguagagg

SEQ ID NO: 1275437 - RNA, 19 nt, Artificial Sequence
  Description of Artificial Sequence: Synthetic oligonucleotide
uggcgguuaagggcaauug

SEQ ID NO: 1275438 - RNA, 19 nt, Artificial Sequence
  Description of Artificial Sequence: Synthetic oligonucleotide
gguuaagggcaauugccuc

SEQ ID NO: 1275439 - RNA, 19 nt, Artificial Sequence
  Description of Artificial Sequence: Synthetic oligonucleotide
ugcuacagacuggaagacu

SEQ ID NO: 1275440 - RNA, 19 nt, Artificial Sequence
  Description of Artificial Sequence: Synthetic oligonucleotide
agaucccggugagcaaugc

SEQ ID NO: 1275441 - RNA, 19 nt, Artificial Sequence
  Description of Artificial Sequence: Synthetic oligonucleotide
aggugccauauauucugca

SEQ ID NO: 1275442 - RNA, 19 nt, Artificial Sequence
  Description of Artificial Sequence: Synthetic oligonucleotide
ucauagaaaguggccucgu

SEQ ID NO: 1275443 - RNA, 19 nt, Artificial Sequence
  Description of Artificial Sequence: Synthetic oligonucleotide
guggaagaauugccagaag

SEQ ID NO: 1275444 - RNA, 19 nt, Artificial Sequence
  Description of Artificial Sequence: Synthetic oligonucleotide
gcgguuaagggcaauugcc

SEQ ID NO: 1275445 - RNA, 19 nt, Artificial Sequence
  Description of Artificial Sequence: Synthetic oligonucleotide
uucgugccaggcgagauuu

SEQ ID NO: 1275446 - RNA, 19 nt, Artificial Sequence
  Description of Artificial Sequence: Synthetic oligonucleotide
cagucagcgaggacgucug

SEQ ID NO: 1275447 - RNA, 19 nt, Artificial Sequence
  Description of Artificial Sequence: Synthetic oligonucleotide
gauuuggaaggaggggaca

SEQ ID NO: 1275448 - RNA, 19 nt, Artificial Sequence
  Description of Artificial Sequence: Synthetic oligonucleotide
accccuuuggaaaagcuuu

SEQ ID NO: 1275449 - RNA, 19 nt, Artificial Sequence
  Description of Artificial Sequence: Synthetic oligonucleotide
aggcgauuaugcaaaguga

SEQ ID NO: 1275450 - RNA, 19 nt, Artificial Sequence
  Description of Artificial Sequence: Synthetic oligonucleotide
uggauggaaaaggcccgcc

SEQ ID NO: 1275451 - RNA, 19 nt, Artificial Sequence
  Description of Artificial Sequence: Synthetic oligonucleotide
aaccccuuuggaaaagcuu

SEQ ID NO: 1275452 - RNA, 19 nt, Artificial Sequence
  Description of Artificial Sequence: Synthetic oligonucleotide
guuaugggugugcaggagu

SEQ ID NO: 1275453 - RNA, 19 nt, Artificial Sequence
  Description of Artificial Sequence: Synthetic oligonucleotide
cagcgaggacgucuguagg

SEQ ID NO: 1275454 - RNA, 19 nt, Artificial Sequence
  Description of Artificial Sequence: Synthetic oligonucleotide
uugccccuuguaccacggg

SEQ ID NO: 1275455 - RNA, 19 nt, Artificial Sequence
  Description of Artificial Sequence: Synthetic oligonucleotide
guggcaacgucccgcacca

SEQ ID NO: 1275456 - RNA, 19 nt, Artificial Sequence
  Description of Artificial Sequence: Synthetic oligonucleotide
cuuguaccacgggugcugc

SEQ ID NO: 1275457 - RNA, 19 nt, Artificial Sequence
  Description of Artificial Sequence: Synthetic oligonucleotide
uucagaucccggugagcaa

SEQ ID NO: 1275458 - RNA, 19 nt, Artificial Sequence
  Description of Artificial Sequence: Synthetic oligonucleotide
guaaaaccgugugucaucu

SEQ ID NO: 1275459 - RNA, 19 nt, Artificial Sequence
  Description of Artificial Sequence: Synthetic oligonucleotide
cucuaccaccucaggugcc

SEQ ID NO: 1275460 - RNA, 19 nt, Artificial Sequence
  Description of Artificial Sequence: Synthetic oligonucleotide
aacccuuguuuggggaggu

SEQ ID NO: 1275461 - RNA, 19 nt, Artificial Sequence
  Description of Artificial Sequence: Synthetic oligonucleotide
aggacccaagggaaauggg

SEQ ID NO: 1275462 - RNA, 19 nt, Artificial Sequence
  Description of Artificial Sequence: Synthetic oligonucleotide
ugcaggaguuguucaguuu

SEQ ID NO: 1275463 - RNA, 19 nt, Artificial Sequence
  Description of Artificial Sequence: Synthetic oligonucleotide
uccugcccuuccugaauug

SEQ ID NO: 1275464 - RNA, 19 nt, Artificial Sequence
  Description of Artificial Sequence: Synthetic oligonucleotide
gaccucuaccaccucaggu

SEQ ID NO: 1275465 - RNA, 19 nt, Artificial Sequence
  Description of Artificial Sequence: Synthetic oligonucleotide
ccucuaaggacccaaggga

SEQ ID NO: 1275466 - RNA, 19 nt, Artificial Sequence
  Description of Artificial Sequence: Synthetic oligonucleotide
gguggaagaauugccagaa

SEQ ID NO: 1275467 - RNA, 19 nt, Artificial Sequence
  Description of Artificial Sequence: Synthetic oligonucleotide
auauucugcagagccgcau

SEQ ID NO: 1275468 - RNA, 19 nt, Artificial Sequence
  Description of Artificial Sequence: Synthetic oligonucleotide
gagacagcuggcgguuaag

SEQ ID NO: 1275469 - RNA, 19 nt, Artificial Sequence
  Description of Artificial Sequence: Synthetic oligonucleotide
cuacagacuggaagacuga

SEQ ID NO: 1275470 - RNA, 19 nt, Artificial Sequence
  Description of Artificial Sequence: Synthetic oligonucleotide
gcugcaggcgauuaugcaa

SEQ ID NO: 1275471 - RNA, 19 nt, Artificial Sequence
  Description of Artificial Sequence: Synthetic oligonucleotide
uaagggcaauugccucggc

SEQ ID NO: 1275472 - RNA, 19 nt, Artificial Sequence
  Description of Artificial Sequence: Synthetic oligonucleotide
cacagcgcuugucauagaa

SEQ ID NO: 1275473 - RNA, 19 nt, Artificial Sequence
  Description of Artificial Sequence: Synthetic oligonucleotide
uuccugaauugaggggaug

SEQ ID NO: 1275474 - RNA, 19 nt, Artificial Sequence
  Description of Artificial Sequence: Synthetic oligonucleotide
cuaugcuugcuggaagaca

SEQ ID NO: 1275475 - RNA, 19 nt, Artificial Sequence
  Description of Artificial Sequence: Synthetic oligonucleotide
gccaggcgagauuuggaag

SEQ ID NO: 1275476 - RNA, 19 nt, Artificial Sequence
  Description of Artificial Sequence: Synthetic oligonucleotide
ggaugauaaaugaggaaua

SEQ ID NO: 1275477 - RNA, 19 nt, Artificial Sequence
  Description of Artificial Sequence: Synthetic oligonucleotide
cccugcauacuucuccccg

SEQ ID NO: 1275478 - RNA, 19 nt, Artificial Sequence
  Description of Artificial Sequence: Synthetic oligonucleotide
acgucccgcaccacucugc

SEQ ID NO: 1275479 - RNA, 19 nt, Artificial Sequence
  Description of Artificial Sequence: Synthetic oligonucleotide
ugcagaacuugggcagcgc

SEQ ID NO: 1275480 - RNA, 19 nt, Artificial Sequence
  Description of Artificial Sequence: Synthetic oligonucleotide
ccucguuggagauaugaga

SEQ ID NO: 1275481 - RNA, 19 nt, Artificial Sequence
  Description of Artificial Sequence: Synthetic oligonucleotide
cucggcugcgaagaguguc

SEQ ID NO: 1275482 - RNA, 19 nt, Artificial Sequence
  Description of Artificial Sequence: Synthetic oligonucleotide
cauuucggucacggcaaag

SEQ ID NO: 1275483 - RNA, 19 nt, Artificial Sequence
  Description of Artificial Sequence: Synthetic oligonucleotide
uggaucccgggaucugcac

SEQ ID NO: 1275484 - RNA, 19 nt, Artificial Sequence
  Description of Artificial Sequence: Synthetic oligonucleotide
cuugucgggaaacucguau

SEQ ID NO: 1275485 - RNA, 19 nt, Artificial Sequence
  Description of Artificial Sequence: Synthetic oligonucleotide
aacucguauuugccuucuu

SEQ ID NO: 1275486 - RNA, 19 nt, Artificial Sequence
  Description of Artificial Sequence: Synthetic oligonucleotide
aggaggggacagcuucaug

SEQ ID NO: 1275487 - RNA, 19 nt, Artificial Sequence
  Description of Artificial Sequence: Synthetic oligonucleotide
cugcgaagagugucagguc

SEQ ID NO: 1275488 - RNA, 19 nt, Artificial Sequence
  Description of Artificial Sequence: Synthetic oligonucleotide
cagaucccggugagcaaug

SEQ ID NO: 1275489 - RNA, 19 nt, Artificial Sequence
  Description of Artificial Sequence: Synthetic oligonucleotide
cagugggaguuugaaguuc

SEQ ID NO: 1275490 - RNA, 19 nt, Artificial Sequence
  Description of Artificial Sequence: Synthetic oligonucleotide
ucaccccacugcccaaguc

SEQ ID NO: 1275491 - RNA, 19 nt, Artificial Sequence
  Description of Artificial Sequence: Synthetic oligonucleotide
ugccuuuaguaugcaggaa

SEQ ID NO: 1275492 - RNA, 19 nt, Artificial Sequence
  Description of Artificial Sequence: Synthetic oligonucleotide
ggcaguggcaacgucccgc

SEQ ID NO: 1275493 - RNA, 19 nt, Artificial Sequence
  Description of Artificial Sequence: Synthetic oligonucleotide
cccuuccugaauugagggg

SEQ ID NO: 1275494 - RNA, 19 nt, Artificial Sequence
  Description of Artificial Sequence: Synthetic oligonucleotide
gguuaugggugugcaggag

SEQ ID NO: 1275495 - RNA, 19 nt, Artificial Sequence
  Description of Artificial Sequence: Synthetic oligonucleotide
uuguaccacgggugcugca

SEQ ID NO: 1275496 - RNA, 19 nt, Artificial Sequence
  Description of Artificial Sequence: Synthetic oligonucleotide
ggcaugugugucagcagcc

SEQ ID NO: 1275497 - RNA, 19 nt, Artificial Sequence
  Description of Artificial Sequence: Synthetic oligonucleotide
acauuucggucacggcaaa

SEQ ID NO: 1275498 - RNA, 19 nt, Artificial Sequence
  Description of Artificial Sequence: Synthetic oligonucleotide
cccuaaagaccucuaccac

SEQ ID NO: 1275499 - RNA, 19 nt, Artificial Sequence
  Description of Artificial Sequence: Synthetic oligonucleotide
ggaaacucguauuugccuu

SEQ ID NO: 1275500 - RNA, 19 nt, Artificial Sequence
  Description of Artificial Sequence: Synthetic oligonucleotide
gggaaacucguauuugccu

SEQ ID NO: 1275501 - RNA, 19 nt, Artificial Sequence
  Description of Artificial Sequence: Synthetic oligonucleotide
cucuaaaguguaugucaua

SEQ ID NO: 1275502 - RNA, 19 nt, Artificial Sequence
  Description of Artificial Sequence: Synthetic oligonucleotide
ucgucccuaaagaccucua

SEQ ID NO: 1275503 - RNA, 19 nt, Artificial Sequence
  Description of Artificial Sequence: Synthetic oligonucleotide
cgggaaacucguauuugcc

SEQ ID NO: 1275504 - RNA, 19 nt, Artificial Sequence
  Description of Artificial Sequence: Synthetic oligonucleotide
cacacccugcauacuucuc

SEQ ID NO: 1275505 - RNA, 19 nt, Artificial Sequence
  Description of Artificial Sequence: Synthetic oligonucleotide
gccucggcugcgaagagug

SEQ ID NO: 1275506 - RNA, 19 nt, Artificial Sequence
  Description of Artificial Sequence: Synthetic oligonucleotide
aggcgagauuuggaaggag

SEQ ID NO: 1275507 - RNA, 19 nt, Artificial Sequence
  Description of Artificial Sequence: Synthetic oligonucleotide
cuggaucccgggaucugca

SEQ ID NO: 1275508 - RNA, 19 nt, Artificial Sequence
  Description of Artificial Sequence: Synthetic oligonucleotide
ucgugccaggcgagauuug

SEQ ID NO: 1275509 - RNA, 19 nt, Artificial Sequence
  Description of Artificial Sequence: Synthetic oligonucleotide
guggucagcucugggugug

SEQ ID NO: 1275510 - RNA, 19 nt, Artificial Sequence
  Description of Artificial Sequence: Synthetic oligonucleotide
gccucguuggagauaugag

SEQ ID NO: 1275511 - RNA, 19 nt, Artificial Sequence
  Description of Artificial Sequence: Synthetic oligonucleotide
aucccggcucgccuucgug

SEQ ID NO: 1275512 - RNA, 19 nt, Artificial Sequence
  Description of Artificial Sequence: Synthetic oligonucleotide
cugaauugaggggauggcu

SEQ ID NO: 1275513 - RNA, 19 nt, Artificial Sequence
  Description of Artificial Sequence: Synthetic oligonucleotide
gaauugccagaaggugaca

SEQ ID NO: 1275514 - RNA, 19 nt, Artificial Sequence
  Description of Artificial Sequence: Synthetic oligonucleotide
gcgauuaugcaaagugaca

SEQ ID NO: 1275515 - RNA, 19 nt, Artificial Sequence
  Description of Artificial Sequence: Synthetic oligonucleotide
ggaauacauuucggucacg

SEQ ID NO: 1275516 - RNA, 19 nt, Artificial Sequence
  Description of Artificial Sequence: Synthetic oligonucleotide
cgauuaugcaaagugacaa

SEQ ID NO: 1275517 - RNA, 19 nt, Artificial Sequence
  Description of Artificial Sequence: Synthetic oligonucleotide
guaccacgggugcugcaga

SEQ ID NO: 1275518 - RNA, 19 nt, Artificial Sequence
  Description of Artificial Sequence: Synthetic oligonucleotide
agagccgcauggagugguc

SEQ ID NO: 1275519 - RNA, 19 nt, Artificial Sequence
  Description of Artificial Sequence: Synthetic oligonucleotide
gugacaagugauugcuuuu

SEQ ID NO: 1275520 - RNA, 19 nt, Artificial Sequence
  Description of Artificial Sequence: Synthetic oligonucleotide
ggaucccgggaucugcaca

SEQ ID NO: 1275521 - RNA, 19 nt, Artificial Sequence
  Description of Artificial Sequence: Synthetic oligonucleotide
uggagccuccuugcaauuu

SEQ ID NO: 1275522 - RNA, 19 nt, Artificial Sequence
  Description of Artificial Sequence: Synthetic oligonucleotide
ggccucguuggagauauga

SEQ ID NO: 1275523 - RNA, 19 nt, Artificial Sequence
  Description of Artificial Sequence: Synthetic oligonucleotide
ugccucggcugcgaagagu

SEQ ID NO: 1275524 - RNA, 19 nt, Artificial Sequence
  Description of Artificial Sequence: Synthetic oligonucleotide
ucacagcgcuugucauaga

SEQ ID NO: 1275525 - RNA, 19 nt, Artificial Sequence
  Description of Artificial Sequence: Synthetic oligonucleotide
gacuugccccuuguaccac

SEQ ID NO: 1275526 - RNA, 19 nt, Artificial Sequence
  Description of Artificial Sequence: Synthetic oligonucleotide
cguuggagauaugagacca

SEQ ID NO: 1275527 - RNA, 19 nt, Artificial Sequence
  Description of Artificial Sequence: Synthetic oligonucleotide
ccuuuaguaugcaggaagu

SEQ ID NO: 1275528 - RNA, 19 nt, Artificial Sequence
  Description of Artificial Sequence: Synthetic oligonucleotide
ggagauucacacaguauau

SEQ ID NO: 1275529 - RNA, 19 nt, Artificial Sequence
  Description of Artificial Sequence: Synthetic oligonucleotide
gcaguggcaacgucccgca

SEQ ID NO: 1275530 - RNA, 19 nt, Artificial Sequence
  Description of Artificial Sequence: Synthetic oligonucleotide
cacuggagacaccuuuucu

SEQ ID NO: 1275531 - RNA, 19 nt, Artificial Sequence
  Description of Artificial Sequence: Synthetic oligonucleotide
auuugccuucuuggaugcu

SEQ ID NO: 1275532 - RNA, 19 nt, Artificial Sequence
  Description of Artificial Sequence: Synthetic oligonucleotide
ggaugggugggaacccaug

SEQ ID NO: 1275533 - RNA, 19 nt, Artificial Sequence
  Description of Artificial Sequence: Synthetic oligonucleotide
gcgaggacgucuguaggac

SEQ ID NO: 1275534 - RNA, 19 nt, Artificial Sequence
  Description of Artificial Sequence: Synthetic oligonucleotide
caggcgagauuuggaagga

SEQ ID NO: 1275535 - RNA, 19 nt, Artificial Sequence
  Description of Artificial Sequence: Synthetic oligonucleotide
ggauggaaaaggcccgccu

SEQ ID NO: 1275536 - RNA, 19 nt, Artificial Sequence
  Description of Artificial Sequence: Synthetic oligonucleotide
gcaacgucccgcaccacuc

SEQ ID NO: 1275537 - RNA, 19 nt, Artificial Sequence
  Description of Artificial Sequence: Synthetic oligonucleotide
gucagcgaggacgucugua

SEQ ID NO: 1275538 - RNA, 19 nt, Artificial Sequence
  Description of Artificial Sequence: Synthetic oligonucleotide
gccucgucccuaaagaccu

SEQ ID NO: 1275539 - RNA, 19 nt, Artificial Sequence
  Description of Artificial Sequence: Synthetic oligonucleotide
ggcaacgucccgcaccacu

SEQ ID NO: 1275540 - RNA, 19 nt, Artificial Sequence
  Description of Artificial Sequence: Synthetic oligonucleotide
uggccucguuggagauaug

SEQ ID NO: 1275541 - RNA, 19 nt, Artificial Sequence
  Description of Artificial Sequence: Synthetic oligonucleotide
cuuuggccucguuggagau

SEQ ID NO: 1275542 - RNA, 19 nt, Artificial Sequence
  Description of Artificial Sequence: Synthetic oligonucleotide
gccgcauggaguggucagc

SEQ ID NO: 1275543 - RNA, 19 nt, Artificial Sequence
  Description of Artificial Sequence: Synthetic oligonucleotide
gcgcugagucuuugcuuug

SEQ ID NO: 1275544 - RNA, 19 nt, Artificial Sequence
  Description of Artificial Sequence: Synthetic oligonucleotide
ggacagucagcgaggacgu

SEQ ID NO: 1275545 - RNA, 19 nt, Artificial Sequence
  Description of Artificial Sequence: Synthetic oligonucleotide
aucccgggaucugcacaca

SEQ ID NO: 1275546 - RNA, 19 nt, Artificial Sequence
  Description of Artificial Sequence: Synthetic oligonucleotide
gcacacccugcauacuucu

SEQ ID NO: 1275547 - RNA, 19 nt, Artificial Sequence
  Description of Artificial Sequence: Synthetic oligonucleotide
cucgaaccaggagcuuaga

SEQ ID NO: 1275548 - RNA, 19 nt, Artificial Sequence
  Description of Artificial Sequence: Synthetic oligonucleotide
ccaguucguucuccucaug

SEQ ID NO: 1275549 - RNA, 19 nt, Artificial Sequence
  Description of Artificial Sequence: Synthetic oligonucleotide
caacgucccgcaccacucu

SEQ ID NO: 1275550 - RNA, 19 nt, Artificial Sequence
  Description of Artificial Sequence: Synthetic oligonucleotide
cuucgugccaggcgagauu

SEQ ID NO: 1275551 - RNA, 19 nt, Artificial Sequence
  Description of Artificial Sequence: Synthetic oligonucleotide
cuuccgcuucuggaugugu

SEQ ID NO: 1275552 - RNA, 19 nt, Artificial Sequence
  Description of Artificial Sequence: Synthetic oligonucleotide
ccgggaagcugcucccuga

SEQ ID NO: 1275553 - RNA, 19 nt, Artificial Sequence
  Description of Artificial Sequence: Synthetic oligonucleotide
uggcaacgucccgcaccac

SEQ ID NO: 1275554 - RNA, 19 nt, Artificial Sequence
  Description of Artificial Sequence: Synthetic oligonucleotide
cgaggacgucuguaggaca

SEQ ID NO: 1275555 - RNA, 19 nt, Artificial Sequence
  Description of Artificial Sequence: Synthetic oligonucleotide
cuggcgguuaagggcaauu

SEQ ID NO: 1275556 - RNA, 19 nt, Artificial Sequence
  Description of Artificial Sequence: Synthetic oligonucleotide
gccccacagugaccuacaa

SEQ ID NO: 1275557 - RNA, 19 nt, Artificial Sequence
  Description of Artificial Sequence: Synthetic oligonucleotide
gccuucgugccaggcgaga

SEQ ID NO: 1275558 - RNA, 19 nt, Artificial Sequence
  Description of Artificial Sequence: Synthetic oligonucleotide
ccaccgccagcuggauccc

SEQ ID NO: 1275559 - RNA, 19 nt, Artificial Sequence
  Description of Artificial Sequence: Synthetic oligonucleotide
cuccgggaagcugcucccu

SEQ ID NO: 1275560 - RNA, 19 nt, Artificial Sequence
  Description of Artificial Sequence: Synthetic oligonucleotide
ccggcucgccuucgugcca

SEQ ID NO: 1275561 - RNA, 19 nt, Artificial Sequence
  Description of Artificial Sequence: Synthetic oligonucleotide
cgucccgcaccacucugcu

SEQ ID NO: 1275562 - RNA, 19 nt, Artificial Sequence
  Description of Artificial Sequence: Synthetic oligonucleotide
gcuggcgguuaagggcaau

SEQ ID NO: 1275563 - RNA, 19 nt, Artificial Sequence
  Description of Artificial Sequence: Synthetic oligonucleotide
gggaacccauggagccuuu

SEQ ID NO: 1275564 - RNA, 19 nt, Artificial Sequence
  Description of Artificial Sequence: Synthetic oligonucleotide
ccgcaccacucugcuggcu

SEQ ID NO: 1275565 - RNA, 19 nt, Artificial Sequence
  Description of Artificial Sequence: Synthetic oligonucleotide
uuauauaccagccuuauag

SEQ ID NO: 1275566 - RNA, 19 nt, Artificial Sequence
  Description of Artificial Sequence: Synthetic oligonucleotide
uguacagagacauaacagg

SEQ ID NO: 1275567 - RNA, 19 nt, Artificial Sequence
  Description of Artificial Sequence: Synthetic oligonucleotide
aacccuguaagcaucaugg

SEQ ID NO: 1275568 - RNA, 19 nt, Artificial Sequence
  Description of Artificial Sequence: Synthetic oligonucleotide
  modified_base (9)..(9): a, c, u, g, unknown or other
ugaucccanagccaggugg

SEQ ID NO: 1275569 - RNA, 19 nt, Artificial Sequence
  Description of Artificial Sequence: Synthetic oligonucleotide
aaggaaucagaacucccac

SEQ ID NO: 1275570 - RNA, 19 nt, Artificial Sequence
  Description of Artificial Sequence: Synthetic oligonucleotide
augaccaucuuucgaaggc

SEQ ID NO: 1275571 - RNA, 19 nt, Artificial Sequence
  Description of Artificial Sequence: Synthetic oligonucleotide
ugucgauagagcuccaggg

SEQ ID NO: 1275572 - RNA, 19 nt, Artificial Sequence
  Description of Artificial Sequence: Synthetic oligonucleotide
ucuaugaccaucuuucgaa

SEQ ID NO: 1275573 - RNA, 19 nt, Artificial Sequence
  Description of Artificial Sequence: Synthetic oligonucleotide
uuaaacguccccuuacccc

SEQ ID NO: 1275574 - RNA, 19 nt, Artificial Sequence
  Description of Artificial Sequence: Synthetic oligonucleotide
augucuaugaccaucuuuc

SEQ ID NO: 1275575 - RNA, 19 nt, Artificial Sequence
  Description of Artificial Sequence: Synthetic oligonucleotide
aguaagaggaguguugagg

SEQ ID NO: 1275576 - RNA, 19 nt, Artificial Sequence
  Description of Artificial Sequence: Synthetic oligonucleotide
uuuuaaacguccccuuacc

SEQ ID NO: 1275577 - RNA, 19 nt, Artificial Sequence
  Description of Artificial Sequence: Synthetic oligonucleotide
auaauuuauauaccagccu

SEQ ID NO: 1275578 - RNA, 19 nt, Artificial Sequence
  Description of Artificial Sequence: Synthetic oligonucleotide
uuuaaacguccccuuaccc

SEQ ID NO: 1275579 - RNA, 19 nt, Artificial Sequence
  Description of Artificial Sequence: Synthetic oligonucleotide
ucccagaacaggcauaagc

SEQ ID NO: 1275580 - RNA, 19 nt, Artificial Sequence
  Description of Artificial Sequence: Synthetic oligonucleotide
aucaggauggacgagaucu

SEQ ID NO: 1275581 - RNA, 19 nt, Artificial Sequence
  Description of Artificial Sequence: Synthetic oligonucleotide
acagaaacuaaccucugcu

SEQ ID NO: 1275582 - RNA, 19 nt, Artificial Sequence
  Description of Artificial Sequence: Synthetic oligonucleotide
auugcuuagggacugccug

SEQ ID NO: 1275583 - RNA, 19 nt, Artificial Sequence
  Description of Artificial Sequence: Synthetic oligonucleotide
uaugaccaucuuucgaagg

SEQ ID NO: 1275584 - RNA, 19 nt, Artificial Sequence
  Description of Artificial Sequence: Synthetic oligonucleotide
uauaccagccuuauaguau

SEQ ID NO: 1275585 - RNA, 19 nt, Artificial Sequence
  Description of Artificial Sequence: Synthetic oligonucleotide
agccuuauaguauguacag

SEQ ID NO: 1275586 - RNA, 19 nt, Artificial Sequence
  Description of Artificial Sequence: Synthetic oligonucleotide
uugggaguagcacaugcug

SEQ ID NO: 1275587 - RNA, 19 nt, Artificial Sequence
  Description of Artificial Sequence: Synthetic oligonucleotide
guacagagacauaacaggg

SEQ ID NO: 1275588 - RNA, 19 nt, Artificial Sequence
  Description of Artificial Sequence: Synthetic oligonucleotide
agagacauaacagggcagg

SEQ ID NO: 1275589 - RNA, 19 nt, Artificial Sequence
  Description of Artificial Sequence: Synthetic oligonucleotide
uauauaccagccuuauagu

SEQ ID NO: 1275590 - RNA, 19 nt, Artificial Sequence
  Description of Artificial Sequence: Synthetic oligonucleotide
auauguuuggacaugucug

SEQ ID NO: 1275591 - RNA, 19 nt, Artificial Sequence
  Description of Artificial Sequence: Synthetic oligonucleotide
ugugauaccaaucccuguu

SEQ ID NO: 1275592 - RNA, 19 nt, Artificial Sequence
  Description of Artificial Sequence: Synthetic oligonucleotide
aggagcaacccacagucuc

SEQ ID NO: 1275593 - RNA, 19 nt, Artificial Sequence
  Description of Artificial Sequence: Synthetic oligonucleotide
auaccagccuuauaguaug

SEQ ID NO: 1275594 - RNA, 19 nt, Artificial Sequence
  Description of Artificial Sequence: Synthetic oligonucleotide
ugucuaugaccaucuuucg

SEQ ID NO: 1275595 - RNA, 19 nt, Artificial Sequence
  Description of Artificial Sequence: Synthetic oligonucleotide
aggagggucauauguuugg

SEQ ID NO: 1275596 - RNA, 19 nt, Artificial Sequence
  Description of Artificial Sequence: Synthetic oligonucleotide
agcgggguuauucucauca

SEQ ID NO: 1275597 - RNA, 19 nt, Artificial Sequence
  Description of Artificial Sequence: Synthetic oligonucleotide
acuaaccucugcuuaauaa

SEQ ID NO: 1275598 - RNA, 19 nt, Artificial Sequence
  Description of Artificial Sequence: Synthetic oligonucleotide
gucgauagagcuccagggg

SEQ ID NO: 1275599 - RNA, 19 nt, Artificial Sequence
  Description of Artificial Sequence: Synthetic oligonucleotide
gaugcggucagcguaguug

SEQ ID NO: 1275600 - RNA, 19 nt, Artificial Sequence
  Description of Artificial Sequence: Synthetic oligonucleotide
aaccugucuccuguugucc

SEQ ID NO: 1275601 - RNA, 19 nt, Artificial Sequence
  Description of Artificial Sequence: Synthetic oligonucleotide
agaacaggcauaagcgccc

SEQ ID NO: 1275602 - RNA, 19 nt, Artificial Sequence
  Description of Artificial Sequence: Synthetic oligonucleotide
agaaacuaaccucugcuua

SEQ ID NO: 1275603 - RNA, 19 nt, Artificial Sequence
  Description of Artificial Sequence: Synthetic oligonucleotide
gacauaacagggcaggcaa

SEQ ID NO: 1275604 - RNA, 19 nt, Artificial Sequence
  Description of Artificial Sequence: Synthetic oligonucleotide
cagacagauggacaucugg

SEQ ID NO: 1275605 - RNA, 19 nt, Artificial Sequence
  Description of Artificial Sequence: Synthetic oligonucleotide
cauaacagggcaggcaagg

SEQ ID NO: 1275606 - RNA, 19 nt, Artificial Sequence
  Description of Artificial Sequence: Synthetic oligonucleotide
aaccccacacacuuggaaa

SEQ ID NO: 1275607 - RNA, 19 nt, Artificial Sequence
  Description of Artificial Sequence: Synthetic oligonucleotide
cagcgggugaacaauguag

SEQ ID NO: 1275608 - RNA, 19 nt, Artificial Sequence
  Description of Artificial Sequence: Synthetic oligonucleotide
  modified_base (2)..(2): a, c, u, g, unknown or other
anagccagguggugguucu

SEQ ID NO: 1275609 - RNA, 19 nt, Artificial Sequence
  Description of Artificial Sequence: Synthetic oligonucleotide
cuuagggacugccuguggc

SEQ ID NO: 1275610 - RNA, 19 nt, Artificial Sequence
  Description of Artificial Sequence: Synthetic oligonucleotide
ugauaccaaucccuguugu

SEQ ID NO: 1275611 - RNA, 19 nt, Artificial Sequence
  Description of Artificial Sequence: Synthetic oligonucleotide
caugggguaaggagagugg

SEQ ID NO: 1275612 - RNA, 19 nt, Artificial Sequence
  Description of Artificial Sequence: Synthetic oligonucleotide
ggcauaagcgcccucgagg

SEQ ID NO: 1275613 - RNA, 19 nt, Artificial Sequence
  Description of Artificial Sequence: Synthetic oligonucleotide
ucggccaugaugcggucag

SEQ ID NO: 1275614 - RNA, 19 nt, Artificial Sequence
  Description of Artificial Sequence: Synthetic oligonucleotide
auggacgagaucugcccac

SEQ ID NO: 1275615 - RNA, 19 nt, Artificial Sequence
  Description of Artificial Sequence: Synthetic oligonucleotide
cuaugaccaucuuucgaag

SEQ ID NO: 1275616 - RNA, 19 nt, Artificial Sequence
  Description of Artificial Sequence: Synthetic oligonucleotide
cugucgauagagcuccagg

SEQ ID NO: 1275617 - RNA, 19 nt, Artificial Sequence
  Description of Artificial Sequence: Synthetic oligonucleotide
aaaccccacacacuuggaa

SEQ ID NO: 1275618 - RNA, 19 nt, Artificial Sequence
  Description of Artificial Sequence: Synthetic oligonucleotide
guauguacagaaaacccca

SEQ ID NO: 1275619 - RNA, 19 nt, Artificial Sequence
  Description of Artificial Sequence: Synthetic oligonucleotide
agaaaauggccuugcucug

SEQ ID NO: 1275620 - RNA, 19 nt, Artificial Sequence
  Description of Artificial Sequence: Synthetic oligonucleotide
ugccgaauggcacugugau

SEQ ID NO: 1275621 - RNA, 19 nt, Artificial Sequence
  Description of Artificial Sequence: Synthetic oligonucleotide
uauugcuuagggacugccu

SEQ ID NO: 1275622 - RNA, 19 nt, Artificial Sequence
  Description of Artificial Sequence: Synthetic oligonucleotide
agaguucgggucuuugucu

SEQ ID NO: 1275623 - RNA, 19 nt, Artificial Sequence
  Description of Artificial Sequence: Synthetic oligonucleotide
accccacacacuuggaaag

SEQ ID NO: 1275624 - RNA, 19 nt, Artificial Sequence
  Description of Artificial Sequence: Synthetic oligonucleotide
uaagcaucaugggguaagg

SEQ ID NO: 1275625 - RNA, 19 nt, Artificial Sequence
  Description of Artificial Sequence: Synthetic oligonucleotide
cugagacuucuccacagag

SEQ ID NO: 1275626 - RNA, 19 nt, Artificial Sequence
  Description of Artificial Sequence: Synthetic oligonucleotide
cauuccacgcucccguucc

SEQ ID NO: 1275627 - RNA, 19 nt, Artificial Sequence
  Description of Artificial Sequence: Synthetic oligonucleotide
caaggaaucagaacuccca

SEQ ID NO: 1275628 - RNA, 19 nt, Artificial Sequence
  Description of Artificial Sequence: Synthetic oligonucleotide
  modified_base (6)..(6): a, c, u, g, unknown or other
ucccanagccagguggugg

SEQ ID NO: 1275629 - RNA, 19 nt, Artificial Sequence
  Description of Artificial Sequence: Synthetic oligonucleotide
accucugccgccauggagg

SEQ ID NO: 1275630 - RNA, 19 nt, Artificial Sequence
  Description of Artificial Sequence: Synthetic oligonucleotide
auaagcgcccucgaggcag

SEQ ID NO: 1275631 - RNA, 19 nt, Artificial Sequence
  Description of Artificial Sequence: Synthetic oligonucleotide
gauaccaaucccuguuguc

SEQ ID NO: 1275632 - RNA, 19 nt, Artificial Sequence
  Description of Artificial Sequence: Synthetic oligonucleotide
uccuguugucccagaacag

SEQ ID NO: 1275633 - RNA, 19 nt, Artificial Sequence
  Description of Artificial Sequence: Synthetic oligonucleotide
ggguccucaagucaggcag

SEQ ID NO: 1275634 - RNA, 19 nt, Artificial Sequence
  Description of Artificial Sequence: Synthetic oligonucleotide
uuagggacugccuguggcu

SEQ ID NO: 1275635 - RNA, 19 nt, Artificial Sequence
  Description of Artificial Sequence: Synthetic oligonucleotide
uuggaaagcgggguuauuc

SEQ ID NO: 1275636 - RNA, 19 nt, Artificial Sequence
  Description of Artificial Sequence: Synthetic oligonucleotide
ucugccgccauggagggga

SEQ ID NO: 1275637 - RNA, 19 nt, Artificial Sequence
  Description of Artificial Sequence: Synthetic oligonucleotide
ucagaguucgggucuuugu

SEQ ID NO: 1275638 - RNA, 19 nt, Artificial Sequence
  Description of Artificial Sequence: Synthetic oligonucleotide
caguccacugucgauagag

SEQ ID NO: 1275639 - RNA, 19 nt, Artificial Sequence
  Description of Artificial Sequence: Synthetic oligonucleotide
guaguuguccagcaagaga

SEQ ID NO: 1275640 - RNA, 19 nt, Artificial Sequence
  Description of Artificial Sequence: Synthetic oligonucleotide
guaagaggaguguugaggu

SEQ ID NO: 1275641 - RNA, 19 nt, Artificial Sequence
  Description of Artificial Sequence: Synthetic oligonucleotide
cuguggacaaucccagagc

SEQ ID NO: 1275642 - RNA, 19 nt, Artificial Sequence
  Description of Artificial Sequence: Synthetic oligonucleotide
cuucgucuccaccauaguc

SEQ ID NO: 1275643 - RNA, 19 nt, Artificial Sequence
  Description of Artificial Sequence: Synthetic oligonucleotide
aggauggacgagaucugcc

SEQ ID NO: 1275644 - RNA, 19 nt, Artificial Sequence
  Description of Artificial Sequence: Synthetic oligonucleotide
cugagacgauggcagaacc

SEQ ID NO: 1275645 - RNA, 19 nt, Artificial Sequence
  Description of Artificial Sequence: Synthetic oligonucleotide
gauggccaagauguccugg

SEQ ID NO: 1275646 - RNA, 19 nt, Artificial Sequence
  Description of Artificial Sequence: Synthetic oligonucleotide
aggaaucagaacucccacu

SEQ ID NO: 1275647 - RNA, 19 nt, Artificial Sequence
  Description of Artificial Sequence: Synthetic oligonucleotide
ugcggucaguccacugucg

SEQ ID NO: 1275648 - RNA, 19 nt, Artificial Sequence
  Description of Artificial Sequence: Synthetic oligonucleotide
gcuaaucuccauuccacgc

SEQ ID NO: 1275649 - RNA, 19 nt, Artificial Sequence
  Description of Artificial Sequence: Synthetic oligonucleotide
gucaguccacugucgauag

SEQ ID NO: 1275650 - RNA, 19 nt, Artificial Sequence
  Description of Artificial Sequence: Synthetic oligonucleotide
augcggucaguccacuguc

SEQ ID NO: 1275651 - RNA, 19 nt, Artificial Sequence
  Description of Artificial Sequence: Synthetic oligonucleotide
cccaaaagggugaagggag

SEQ ID NO: 1275652 - RNA, 19 nt, Artificial Sequence
  Description of Artificial Sequence: Synthetic oligonucleotide
agauggacaucuggggagg

SEQ ID NO: 1275653 - RNA, 19 nt, Artificial Sequence
  Description of Artificial Sequence: Synthetic oligonucleotide
acugugauaccaaucccug

SEQ ID NO: 1275654 - RNA, 19 nt, Artificial Sequence
  Description of Artificial Sequence: Synthetic oligonucleotide
cagccuuauaguauguaca

SEQ ID NO: 1275655 - RNA, 19 nt, Artificial Sequence
  Description of Artificial Sequence: Synthetic oligonucleotide
accguguacagagacauaa

SEQ ID NO: 1275656 - RNA, 19 nt, Artificial Sequence
  Description of Artificial Sequence: Synthetic oligonucleotide
gugauaccaaucccuguug

SEQ ID NO: 1275657 - RNA, 19 nt, Artificial Sequence
  Description of Artificial Sequence: Synthetic oligonucleotide
cauauguuuggacaugucu

SEQ ID NO: 1275658 - RNA, 19 nt, Artificial Sequence
  Description of Artificial Sequence: Synthetic oligonucleotide
ggcuaaucuccauuccacg

SEQ ID NO: 1275659 - RNA, 19 nt, Artificial Sequence
  Description of Artificial Sequence: Synthetic oligonucleotide
gagggucauauguuuggac

SEQ ID NO: 1275660 - RNA, 19 nt, Artificial Sequence
  Description of Artificial Sequence: Synthetic oligonucleotide
gauggacgagaucugccca

SEQ ID NO: 1275661 - RNA, 19 nt, Artificial Sequence
  Description of Artificial Sequence: Synthetic oligonucleotide
ugacuguucuguagccuga

SEQ ID NO: 1275662 - RNA, 19 nt, Artificial Sequence
  Description of Artificial Sequence: Synthetic oligonucleotide
aagggcuacaguaccgugu

SEQ ID NO: 1275663 - RNA, 19 nt, Artificial Sequence
  Description of Artificial Sequence: Synthetic oligonucleotide
agaacucccgagcugguua

SEQ ID NO: 1275664 - RNA, 19 nt, Artificial Sequence
  Description of Artificial Sequence: Synthetic oligonucleotide
cagagacauaacagggcag

SEQ ID NO: 1275665 - RNA, 19 nt, Artificial Sequence
  Description of Artificial Sequence: Synthetic oligonucleotide
augcggucagcguaguugu

SEQ ID NO: 1275666 - RNA, 19 nt, Artificial Sequence
  Description of Artificial Sequence: Synthetic oligonucleotide
uggggcuaaucuccauucc

SEQ ID NO: 1275667 - RNA, 19 nt, Artificial Sequence
  Description of Artificial Sequence: Synthetic oligonucleotide
ucgaaggcucugccgcugg

SEQ ID NO: 1275668 - RNA, 19 nt, Artificial Sequence
  Description of Artificial Sequence: Synthetic oligonucleotide
guaggucagacagauggac

SEQ ID NO: 1275669 - RNA, 19 nt, Artificial Sequence
  Description of Artificial Sequence: Synthetic oligonucleotide
gcauaagcgcccucgaggc

SEQ ID NO: 1275670 - RNA, 19 nt, Artificial Sequence
  Description of Artificial Sequence: Synthetic oligonucleotide
cagcaagagaacucccgag

SEQ ID NO: 1275671 - RNA, 19 nt, Artificial Sequence
  Description of Artificial Sequence: Synthetic oligonucleotide
cagaguucgggucuuuguc

SEQ ID NO: 1275672 - RNA, 19 nt, Artificial Sequence
  Description of Artificial Sequence: Synthetic oligonucleotide
ggauggacgagaucugccc

SEQ ID NO: 1275673 - RNA, 19 nt, Artificial Sequence
  Description of Artificial Sequence: Synthetic oligonucleotide
gcuacaguaccguguacag

SEQ ID NO: 1275674 - RNA, 19 nt, Artificial Sequence
  Description of Artificial Sequence: Synthetic oligonucleotide
gucucuuggggccuccacc

SEQ ID NO: 1275675 - RNA, 19 nt, Artificial Sequence
  Description of Artificial Sequence: Synthetic oligonucleotide
agucaggcagaaugggagu

SEQ ID NO: 1275676 - RNA, 19 nt, Artificial Sequence
  Description of Artificial Sequence: Synthetic oligonucleotide
caguaccguguacagagac

SEQ ID NO: 1275677 - RNA, 19 nt, Artificial Sequence
  Description of Artificial Sequence: Synthetic oligonucleotide
aaucccuguugucuuccaa

SEQ ID NO: 1275678 - RNA, 19 nt, Artificial Sequence
  Description of Artificial Sequence: Synthetic oligonucleotide
gaaccugucuccuguuguc

SEQ ID NO: 1275679 - RNA, 19 nt, Artificial Sequence
  Description of Artificial Sequence: Synthetic oligonucleotide
aacuaaccucugcuuaaua

SEQ ID NO: 1275680 - RNA, 19 nt, Artificial Sequence
  Description of Artificial Sequence: Synthetic oligonucleotide
ugaccaucuuucgaaggcu

SEQ ID NO: 1275681 - RNA, 19 nt, Artificial Sequence
  Description of Artificial Sequence: Synthetic oligonucleotide
agacauaacagggcaggca

SEQ ID NO: 1275682 - RNA, 19 nt, Artificial Sequence
  Description of Artificial Sequence: Synthetic oligonucleotide
gcaacccacagucuccacg

SEQ ID NO: 1275683 - RNA, 19 nt, Artificial Sequence
  Description of Artificial Sequence: Synthetic oligonucleotide
caucuuucgaaggcucugc

SEQ ID NO: 1275684 - RNA, 19 nt, Artificial Sequence
  Description of Artificial Sequence: Synthetic oligonucleotide
gaccuggaugcggucagcg

SEQ ID NO: 1275685 - RNA, 19 nt, Artificial Sequence
  Description of Artificial Sequence: Synthetic oligonucleotide
gucuaugaccaucuuucga

SEQ ID NO: 1275686 - RNA, 19 nt, Artificial Sequence
  Description of Artificial Sequence: Synthetic oligonucleotide
uccacgcucccguucccgg

SEQ ID NO: 1275687 - RNA, 19 nt, Artificial Sequence
  Description of Artificial Sequence: Synthetic oligonucleotide
cccuguaagcaucaugggg

SEQ ID NO: 1275688 - RNA, 19 nt, Artificial Sequence
  Description of Artificial Sequence: Synthetic oligonucleotide
uggacgagaucugcccacg

SEQ ID NO: 1275689 - RNA, 19 nt, Artificial Sequence
  Description of Artificial Sequence: Synthetic oligonucleotide
gagacauaacagggcaggc

SEQ ID NO: 1275690 - RNA, 19 nt, Artificial Sequence
  Description of Artificial Sequence: Synthetic oligonucleotide
gaacucccgagcugguuac

SEQ ID NO: 1275691 - RNA, 19 nt, Artificial Sequence
  Description of Artificial Sequence: Synthetic oligonucleotide
gcccacgucucccacagcg

SEQ ID NO: 1275692 - RNA, 19 nt, Artificial Sequence
  Description of Artificial Sequence: Synthetic oligonucleotide
aacguguccaggaugucuu

SEQ ID NO: 1275693 - RNA, 19 nt, Artificial Sequence
  Description of Artificial Sequence: Synthetic oligonucleotide
uaggguuggauggccaaga

SEQ ID NO: 1275694 - RNA, 19 nt, Artificial Sequence
  Description of Artificial Sequence: Synthetic oligonucleotide
aguguugaggugguccaug

SEQ ID NO: 1275695 - RNA, 19 nt, Artificial Sequence
  Description of Artificial Sequence: Synthetic oligonucleotide
acgauggcagaaccugucu

SEQ ID NO: 1275696 - RNA, 19 nt, Artificial Sequence
  Description of Artificial Sequence: Synthetic oligonucleotide
cagugcaccauguuccuga

SEQ ID NO: 1275697 - RNA, 19 nt, Artificial Sequence
  Description of Artificial Sequence: Synthetic oligonucleotide
aggcauaagcgcccucgag

SEQ ID NO: 1275698 - RNA, 19 nt, Artificial Sequence
  Description of Artificial Sequence: Synthetic oligonucleotide
caguaagaggaguguugag

SEQ ID NO: 1275699 - RNA, 19 nt, Artificial Sequence
  Description of Artificial Sequence: Synthetic oligonucleotide
uucagaguucgggucuuug

SEQ ID NO: 1275700 - RNA, 19 nt, Artificial Sequence
  Description of Artificial Sequence: Synthetic oligonucleotide
ccagccuuauaguauguac

SEQ ID NO: 1275701 - RNA, 19 nt, Artificial Sequence
  Description of Artificial Sequence: Synthetic oligonucleotide
guauugcuuagggacugcc

SEQ ID NO: 1275702 - RNA, 19 nt, Artificial Sequence
  Description of Artificial Sequence: Synthetic oligonucleotide
gacgagaucugcccacguc

SEQ ID NO: 1275703 - RNA, 19 nt, Artificial Sequence
  Description of Artificial Sequence: Synthetic oligonucleotide
uggcacugugauaccaauc

SEQ ID NO: 1275704 - RNA, 19 nt, Artificial Sequence
  Description of Artificial Sequence: Synthetic oligonucleotide
uggacaucuggggaggaau

SEQ ID NO: 1275705 - RNA, 19 nt, Artificial Sequence
  Description of Artificial Sequence: Synthetic oligonucleotide
ucccgagcugguuacuuuc

SEQ ID NO: 1275706 - RNA, 19 nt, Artificial Sequence
  Description of Artificial Sequence: Synthetic oligonucleotide
agggcuacaguaccgugua

SEQ ID NO: 1275707 - RNA, 19 nt, Artificial Sequence
  Description of Artificial Sequence: Synthetic oligonucleotide
caggcagaaugggaguucc

SEQ ID NO: 1275708 - RNA, 19 nt, Artificial Sequence
  Description of Artificial Sequence: Synthetic oligonucleotide
agcgggugaacaauguagu

SEQ ID NO: 1275709 - RNA, 19 nt, Artificial Sequence
  Description of Artificial Sequence: Synthetic oligonucleotide
aacuugccagguaggguug

SEQ ID NO: 1275710 - RNA, 19 nt, Artificial Sequence
  Description of Artificial Sequence: Synthetic oligonucleotide
ugcuuagggacugccugug

SEQ ID NO: 1275711 - RNA, 19 nt, Artificial Sequence
  Description of Artificial Sequence: Synthetic oligonucleotide
ggcagaaugggaguuccag

SEQ ID NO: 1275712 - RNA, 19 nt, Artificial Sequence
  Description of Artificial Sequence: Synthetic oligonucleotide
gaccccaaugugccugaag

SEQ ID NO: 1275713 - RNA, 19 nt, Artificial Sequence
  Description of Artificial Sequence: Synthetic oligonucleotide
agcugguuacuuucuucgu

SEQ ID NO: 1275714 - RNA, 19 nt, Artificial Sequence
  Description of Artificial Sequence: Synthetic oligonucleotide
aagcaucaugggguaagga

SEQ ID NO: 1275715 - RNA, 19 nt, Artificial Sequence
  Description of Artificial Sequence: Synthetic oligonucleotide
ucgggucuuugucuuugac

SEQ ID NO: 1275716 - RNA, 19 nt, Artificial Sequence
  Description of Artificial Sequence: Synthetic oligonucleotide
gacuguucuguagccugag

SEQ ID NO: 1275717 - RNA, 19 nt, Artificial Sequence
  Description of Artificial Sequence: Synthetic oligonucleotide
caggauggacgagaucugc

SEQ ID NO: 1275718 - RNA, 19 nt, Artificial Sequence
  Description of Artificial Sequence: Synthetic oligonucleotide
ugguuacuuucuucgucuc

SEQ ID NO: 1275719 - RNA, 19 nt, Artificial Sequence
  Description of Artificial Sequence: Synthetic oligonucleotide
cacugugauaccaaucccu

SEQ ID NO: 1275720 - RNA, 19 nt, Artificial Sequence
  Description of Artificial Sequence: Synthetic oligonucleotide
aguaccguguacagagaca

SEQ ID NO: 1275721 - RNA, 19 nt, Artificial Sequence
  Description of Artificial Sequence: Synthetic oligonucleotide
ccuugggaguagcacaugc

SEQ ID NO: 1275722 - RNA, 19 nt, Artificial Sequence
  Description of Artificial Sequence: Synthetic oligonucleotide
gacgauggcagaaccuguc

SEQ ID NO: 1275723 - RNA, 19 nt, Artificial Sequence
  Description of Artificial Sequence: Synthetic oligonucleotide
uugcucugucuguauugcu

SEQ ID NO: 1275724 - RNA, 19 nt, Artificial Sequence
  Description of Artificial Sequence: Synthetic oligonucleotide
auaacagggcaggcaagga

SEQ ID NO: 1275725 - RNA, 19 nt, Artificial Sequence
  Description of Artificial Sequence: Synthetic oligonucleotide
uaccagccuuauaguaugu

SEQ ID NO: 1275726 - RNA, 19 nt, Artificial Sequence
  Description of Artificial Sequence: Synthetic oligonucleotide
acauaacagggcaggcaag

SEQ ID NO: 1275727 - RNA, 19 nt, Artificial Sequence
  Description of Artificial Sequence: Synthetic oligonucleotide
guugguaggucagacagau

SEQ ID NO: 1275728 - RNA, 19 nt, Artificial Sequence
  Description of Artificial Sequence: Synthetic oligonucleotide
caccaugucuaugaccauc

SEQ ID NO: 1275729 - RNA, 19 nt, Artificial Sequence
  Description of Artificial Sequence: Synthetic oligonucleotide
gaccaucuuucgaaggcuc

SEQ ID NO: 1275730 - RNA, 19 nt, Artificial Sequence
  Description of Artificial Sequence: Synthetic oligonucleotide
ggaguguugagguggucca

SEQ ID NO: 1275731 - RNA, 19 nt, Artificial Sequence
  Description of Artificial Sequence: Synthetic oligonucleotide
uaagcgcccucgaggcagc

SEQ ID NO: 1275732 - RNA, 19 nt, Artificial Sequence
  Description of Artificial Sequence: Synthetic oligonucleotide
ucaggcagaaugggaguuc

SEQ ID NO: 1275733 - RNA, 19 nt, Artificial Sequence
  Description of Artificial Sequence: Synthetic oligonucleotide
caaaagggugaagggagca

SEQ ID NO: 1275734 - RNA, 19 nt, Artificial Sequence
  Description of Artificial Sequence: Synthetic oligonucleotide
uucgaaggcucugccgcug

SEQ ID NO: 1275735 - RNA, 19 nt, Artificial Sequence
  Description of Artificial Sequence: Synthetic oligonucleotide
uguaagcaucaugggguaa

SEQ ID NO: 1275736 - RNA, 19 nt, Artificial Sequence
  Description of Artificial Sequence: Synthetic oligonucleotide
aacccacagucuccacgga

SEQ ID NO: 1275737 - RNA, 19 nt, Artificial Sequence
  Description of Artificial Sequence: Synthetic oligonucleotide
caccucugccgccauggag

SEQ ID NO: 1275738 - RNA, 19 nt, Artificial Sequence
  Description of Artificial Sequence: Synthetic oligonucleotide
ggagauuuccucagcugug

SEQ ID NO: 1275739 - RNA, 19 nt, Artificial Sequence
  Description of Artificial Sequence: Synthetic oligonucleotide
ucaguccacugucgauaga

SEQ ID NO: 1275740 - RNA, 19 nt, Artificial Sequence
  Description of Artificial Sequence: Synthetic oligonucleotide
gccaugaugcggucagucc

SEQ ID NO: 1275741 - RNA, 19 nt, Artificial Sequence
  Description of Artificial Sequence: Synthetic oligonucleotide
ggggcuaaucuccauucca

SEQ ID NO: 1275742 - RNA, 19 nt, Artificial Sequence
  Description of Artificial Sequence: Synthetic oligonucleotide
cuggcgcuugcugagguuc

SEQ ID NO: 1275743 - RNA, 19 nt, Artificial Sequence
  Description of Artificial Sequence: Synthetic oligonucleotide
uccuccaaugugagcucaa

SEQ ID NO: 1275744 - RNA, 19 nt, Artificial Sequence
  Description of Artificial Sequence: Synthetic oligonucleotide
gacuggccggguguggcag

SEQ ID NO: 1275745 - RNA, 19 nt, Artificial Sequence
  Description of Artificial Sequence: Synthetic oligonucleotide
gggagauuuccucagcugu

SEQ ID NO: 1275746 - RNA, 19 nt, Artificial Sequence
  Description of Artificial Sequence: Synthetic oligonucleotide
  modified_base (8)..(8): a, c, u, g, unknown or other
gaucccanagccagguggu

SEQ ID NO: 1275747 - RNA, 19 nt, Artificial Sequence
  Description of Artificial Sequence: Synthetic oligonucleotide
ggguuggauggccaagaug

SEQ ID NO: 1275748 - RNA, 19 nt, Artificial Sequence
  Description of Artificial Sequence: Synthetic oligonucleotide
aaggagcaacccacagucu

SEQ ID NO: 1275749 - RNA, 19 nt, Artificial Sequence
  Description of Artificial Sequence: Synthetic oligonucleotide
cagguaggguuggauggcc

SEQ ID NO: 1275750 - RNA, 19 nt, Artificial Sequence
  Description of Artificial Sequence: Synthetic oligonucleotide
guaccguguacagagacau

SEQ ID NO: 1275751 - RNA, 19 nt, Artificial Sequence
  Description of Artificial Sequence: Synthetic oligonucleotide
cuaccacuucagaguucgg

SEQ ID NO: 1275752 - RNA, 19 nt, Artificial Sequence
  Description of Artificial Sequence: Synthetic oligonucleotide
gaucugcccacgucuccca

SEQ ID NO: 1275753 - RNA, 19 nt, Artificial Sequence
  Description of Artificial Sequence: Synthetic oligonucleotide
ggcuacaguaccguguaca

SEQ ID NO: 1275754 - RNA, 19 nt, Artificial Sequence
  Description of Artificial Sequence: Synthetic oligonucleotide
acuuggaaagcgggguuau

SEQ ID NO: 1275755 - RNA, 19 nt, Artificial Sequence
  Description of Artificial Sequence: Synthetic oligonucleotide
acgucucccacagcgggug

SEQ ID NO: 1275756 - RNA, 19 nt, Artificial Sequence
  Description of Artificial Sequence: Synthetic oligonucleotide
acguguccaggaugucuug

SEQ ID NO: 1275757 - RNA, 19 nt, Artificial Sequence
  Description of Artificial Sequence: Synthetic oligonucleotide
cuguugucuuccaacgugu

SEQ ID NO: 1275758 - RNA, 19 nt, Artificial Sequence
  Description of Artificial Sequence: Synthetic oligonucleotide
cucucucuaccacuucaga

SEQ ID NO: 1275759 - RNA, 19 nt, Artificial Sequence
  Description of Artificial Sequence: Synthetic oligonucleotide
guuguccagcaagagaacu

SEQ ID NO: 1275760 - RNA, 19 nt, Artificial Sequence
  Description of Artificial Sequence: Synthetic oligonucleotide
  modified_base (7)..(7): a, c, u, g, unknown or other
aucccanagccagguggug

SEQ ID NO: 1275761 - RNA, 19 nt, Artificial Sequence
  Description of Artificial Sequence: Synthetic oligonucleotide
gggcuaaucuccauuccac

SEQ ID NO: 1275762 - RNA, 19 nt, Artificial Sequence
  Description of Artificial Sequence: Synthetic oligonucleotide
gagaguggguugguagguc

SEQ ID NO: 1275763 - RNA, 19 nt, Artificial Sequence
  Description of Artificial Sequence: Synthetic oligonucleotide
ccacgucucccacagcggg

SEQ ID NO: 1275764 - RNA, 19 nt, Artificial Sequence
  Description of Artificial Sequence: Synthetic oligonucleotide
cuugggaguagcacaugcu

SEQ ID NO: 1275765 - RNA, 19 nt, Artificial Sequence
  Description of Artificial Sequence: Synthetic oligonucleotide
cguguacagagacauaaca

SEQ ID NO: 1275766 - RNA, 19 nt, Artificial Sequence
  Description of Artificial Sequence: Synthetic oligonucleotide
agacgauggcagaaccugu

SEQ ID NO: 1275767 - RNA, 19 nt, Artificial Sequence
  Description of Artificial Sequence: Synthetic oligonucleotide
agcugagacgauggcagaa

SEQ ID NO: 1275768 - RNA, 19 nt, Artificial Sequence
  Description of Artificial Sequence: Synthetic oligonucleotide
gcuuagggacugccugugg

SEQ ID NO: 1275769 - RNA, 19 nt, Artificial Sequence
  Description of Artificial Sequence: Synthetic oligonucleotide
aagcgcccucgaggcagcc

SEQ ID NO: 1275770 - RNA, 19 nt, Artificial Sequence
  Description of Artificial Sequence: Synthetic oligonucleotide
cugccgaauggcacuguga

SEQ ID NO: 1275771 - RNA, 19 nt, Artificial Sequence
  Description of Artificial Sequence: Synthetic oligonucleotide
caagauguccuggcuccuc

SEQ ID NO: 1275772 - RNA, 19 nt, Artificial Sequence
  Description of Artificial Sequence: Synthetic oligonucleotide
aguucgggucuuugucuuu

SEQ ID NO: 1275773 - RNA, 19 nt, Artificial Sequence
  Description of Artificial Sequence: Synthetic oligonucleotide
cuacaguaccguguacaga

SEQ ID NO: 1275774 - RNA, 19 nt, Artificial Sequence
  Description of Artificial Sequence: Synthetic oligonucleotide
gaguucgggucuuugucuu

SEQ ID NO: 1275775 - RNA, 19 nt, Artificial Sequence
  Description of Artificial Sequence: Synthetic oligonucleotide
gauggacaucuggggagga

SEQ ID NO: 1275776 - RNA, 19 nt, Artificial Sequence
  Description of Artificial Sequence: Synthetic oligonucleotide
augggaguuccagggcuga

SEQ ID NO: 1275777 - RNA, 19 nt, Artificial Sequence
  Description of Artificial Sequence: Synthetic oligonucleotide
uccauuccacgcucccguu

SEQ ID NO: 1275778 - RNA, 19 nt, Artificial Sequence
  Description of Artificial Sequence: Synthetic oligonucleotide
aacucccgagcugguuacu

SEQ ID NO: 1275779 - RNA, 19 nt, Artificial Sequence
  Description of Artificial Sequence: Synthetic oligonucleotide
ggucaguccacugucgaua

SEQ ID NO: 1275780 - RNA, 19 nt, Artificial Sequence
  Description of Artificial Sequence: Synthetic oligonucleotide
ugcggucagcguaguuguc

SEQ ID NO: 1275781 - RNA, 19 nt, Artificial Sequence
  Description of Artificial Sequence: Synthetic oligonucleotide
cauaagcgcccucgaggca

SEQ ID NO: 1275782 - RNA, 19 nt, Artificial Sequence
  Description of Artificial Sequence: Synthetic oligonucleotide
acggacuccuugggaguag

SEQ ID NO: 1275783 - RNA, 19 nt, Artificial Sequence
  Description of Artificial Sequence: Synthetic oligonucleotide
accagccuuauaguaugua

SEQ ID NO: 1275784 - RNA, 19 nt, Artificial Sequence
  Description of Artificial Sequence: Synthetic oligonucleotide
cugaccccaaugugccuga

SEQ ID NO: 1275785 - RNA, 19 nt, Artificial Sequence
  Description of Artificial Sequence: Synthetic oligonucleotide
ccguguacagagacauaac

SEQ ID NO: 1275786 - RNA, 19 nt, Artificial Sequence
  Description of Artificial Sequence: Synthetic oligonucleotide
cuuucuucgucuccaccau

SEQ ID NO: 1275787 - RNA, 19 nt, Artificial Sequence
  Description of Artificial Sequence: Synthetic oligonucleotide
ccugaccccaaugugccug

SEQ ID NO: 1275788 - RNA, 19 nt, Artificial Sequence
  Description of Artificial Sequence: Synthetic oligonucleotide
ccucugccgccauggaggg

SEQ ID NO: 1275789 - RNA, 19 nt, Artificial Sequence
  Description of Artificial Sequence: Synthetic oligonucleotide
aucaugggguaaggagagu

SEQ ID NO: 1275790 - RNA, 19 nt, Artificial Sequence
  Description of Artificial Sequence: Synthetic oligonucleotide
gcgggugaacaauguaguc

SEQ ID NO: 1275791 - RNA, 19 nt, Artificial Sequence
  Description of Artificial Sequence: Synthetic oligonucleotide
caggcauaagcgcccucga

SEQ ID NO: 1275792 - RNA, 19 nt, Artificial Sequence
  Description of Artificial Sequence: Synthetic oligonucleotide
cugugauaccaaucccugu

SEQ ID NO: 1275793 - RNA, 19 nt, Artificial Sequence
  Description of Artificial Sequence: Synthetic oligonucleotide
guucaguaagaggaguguu

SEQ ID NO: 1275794 - RNA, 19 nt, Artificial Sequence
  Description of Artificial Sequence: Synthetic oligonucleotide
cguaguuguccagcaagag

SEQ ID NO: 1275795 - RNA, 19 nt, Artificial Sequence
  Description of Artificial Sequence: Synthetic oligonucleotide
cuggccggguguggcagag

SEQ ID NO: 1275796 - RNA, 19 nt, Artificial Sequence
  Description of Artificial Sequence: Synthetic oligonucleotide
caacguguccaggaugucu

SEQ ID NO: 1275797 - RNA, 19 nt, Artificial Sequence
  Description of Artificial Sequence: Synthetic oligonucleotide
acucccgagcugguuacuu

SEQ ID NO: 1275798 - RNA, 19 nt, Artificial Sequence
  Description of Artificial Sequence: Synthetic oligonucleotide
gccuuauaguauguacaga

SEQ ID NO: 1275799 - RNA, 19 nt, Artificial Sequence
  Description of Artificial Sequence: Synthetic oligonucleotide
cauggggcuaaucuccauu

SEQ ID NO: 1275800 - RNA, 19 nt, Artificial Sequence
  Description of Artificial Sequence: Synthetic oligonucleotide
cacagcgggugaacaaugu

SEQ ID NO: 1275801 - RNA, 19 nt, Artificial Sequence
  Description of Artificial Sequence: Synthetic oligonucleotide
gcgggguuauucucaucac

SEQ ID NO: 1275802 - RNA, 19 nt, Artificial Sequence
  Description of Artificial Sequence: Synthetic oligonucleotide
gaacaggcauaagcgcccu

SEQ ID NO: 1275803 - RNA, 19 nt, Artificial Sequence
  Description of Artificial Sequence: Synthetic oligonucleotide
cgggugaacaauguaguca

SEQ ID NO: 1275804 - RNA, 19 nt, Artificial Sequence
  Description of Artificial Sequence: Synthetic oligonucleotide
gcggucaguccacugucga

SEQ ID NO: 1275805 - RNA, 19 nt, Artificial Sequence
  Description of Artificial Sequence: Synthetic oligonucleotide
gugaagagagagggacaaa

SEQ ID NO: 1275806 - RNA, 19 nt, Artificial Sequence
  Description of Artificial Sequence: Synthetic oligonucleotide
ggcucugccgaauggcacu

SEQ ID NO: 1275807 - RNA, 19 nt, Artificial Sequence
  Description of Artificial Sequence: Synthetic oligonucleotide
caucugaagccagggagau

SEQ ID NO: 1275808 - RNA, 19 nt, Artificial Sequence
  Description of Artificial Sequence: Synthetic oligonucleotide
ggcccgggaccuccucugg

SEQ ID NO: 1275809 - RNA, 19 nt, Artificial Sequence
  Description of Artificial Sequence: Synthetic oligonucleotide
cgagaucugcccacgucuc

SEQ ID NO: 1275810 - RNA, 19 nt, Artificial Sequence
  Description of Artificial Sequence: Synthetic oligonucleotide
ggaagggcuacaguaccgu

SEQ ID NO: 1275811 - RNA, 19 nt, Artificial Sequence
  Description of Artificial Sequence: Synthetic oligonucleotide
cugccgccauggaggggag

SEQ ID NO: 1275812 - RNA, 19 nt, Artificial Sequence
  Description of Artificial Sequence: Synthetic oligonucleotide
gcucugccgaauggcacug

SEQ ID NO: 1275813 - RNA, 19 nt, Artificial Sequence
  Description of Artificial Sequence: Synthetic oligonucleotide
cuugccagguaggguugga

SEQ ID NO: 1275814 - RNA, 19 nt, Artificial Sequence
  Description of Artificial Sequence: Synthetic oligonucleotide
guaaggagaguggguuggu

SEQ ID NO: 1275815 - RNA, 19 nt, Artificial Sequence
  Description of Artificial Sequence: Synthetic oligonucleotide
ggggcucugccgaauggca

SEQ ID NO: 1275816 - RNA, 19 nt, Artificial Sequence
  Description of Artificial Sequence: Synthetic oligonucleotide
cucggccaugaugcgguca

SEQ ID NO: 1275817 - RNA, 19 nt, Artificial Sequence
  Description of Artificial Sequence: Synthetic oligonucleotide
agcccaccugagacuucuc

SEQ ID NO: 1275818 - RNA, 19 nt, Artificial Sequence
  Description of Artificial Sequence: Synthetic oligonucleotide
cacggacuccuugggagua

SEQ ID NO: 1275819 - RNA, 19 nt, Artificial Sequence
  Description of Artificial Sequence: Synthetic oligonucleotide
gggcuacaguaccguguac

SEQ ID NO: 1275820 - RNA, 19 nt, Artificial Sequence
  Description of Artificial Sequence: Synthetic oligonucleotide
  modified_base (5)..(5): a, c, u, g, unknown or other
cccanagccaggugguggu

SEQ ID NO: 1275821 - RNA, 19 nt, Artificial Sequence
  Description of Artificial Sequence: Synthetic oligonucleotide
ccguucccggucacccugc

SEQ ID NO: 1275822 - RNA, 19 nt, Artificial Sequence
  Description of Artificial Sequence: Synthetic oligonucleotide
gccgaauggcacugugaua

SEQ ID NO: 1275823 - RNA, 19 nt, Artificial Sequence
  Description of Artificial Sequence: Synthetic oligonucleotide
ggaguagcacaugcugggu

SEQ ID NO: 1275824 - RNA, 19 nt, Artificial Sequence
  Description of Artificial Sequence: Synthetic oligonucleotide
cggucagcguaguugucca

SEQ ID NO: 1275825 - RNA, 19 nt, Artificial Sequence
  Description of Artificial Sequence: Synthetic oligonucleotide
cucccgagcugguuacuuu

SEQ ID NO: 1275826 - RNA, 19 nt, Artificial Sequence
  Description of Artificial Sequence: Synthetic oligonucleotide
ggacgagaucugcccacgu

SEQ ID NO: 1275827 - RNA, 19 nt, Artificial Sequence
  Description of Artificial Sequence: Synthetic oligonucleotide
cgaaggcucugccgcuggc

SEQ ID NO: 1275828 - RNA, 19 nt, Artificial Sequence
  Description of Artificial Sequence: Synthetic oligonucleotide
ccuccaaugugagcucaaa

SEQ ID NO: 1275829 - RNA, 19 nt, Artificial Sequence
  Description of Artificial Sequence: Synthetic oligonucleotide
ggacugccuguggcugggc

SEQ ID NO: 1275830 - RNA, 19 nt, Artificial Sequence
  Description of Artificial Sequence: Synthetic oligonucleotide
ccacggacuccuugggagu

SEQ ID NO: 1275831 - RNA, 19 nt, Artificial Sequence
  Description of Artificial Sequence: Synthetic oligonucleotide
gcagaaccugucuccuguu

SEQ ID NO: 1275832 - RNA, 19 nt, Artificial Sequence
  Description of Artificial Sequence: Synthetic oligonucleotide
cccgagcugguuacuuucu

SEQ ID NO: 1275833 - RNA, 19 nt, Artificial Sequence
  Description of Artificial Sequence: Synthetic oligonucleotide
ggaugcggucagcguaguu

SEQ ID NO: 1275834 - RNA, 19 nt, Artificial Sequence
  Description of Artificial Sequence: Synthetic oligonucleotide
gcuggcgcuugcugagguu

SEQ ID NO: 1275835 - RNA, 19 nt, Artificial Sequence
  Description of Artificial Sequence: Synthetic oligonucleotide
ccgagcugguuacuuucuu

SEQ ID NO: 1275836 - RNA, 19 nt, Artificial Sequence
  Description of Artificial Sequence: Synthetic oligonucleotide
cggucaguccacugucgau

SEQ ID NO: 1275837 - RNA, 19 nt, Artificial Sequence
  Description of Artificial Sequence: Synthetic oligonucleotide
  modified_base (4)..(4): a, c, u, g, unknown or other
ccanagccagguggugguu

SEQ ID NO: 1275838 - RNA, 19 nt, Artificial Sequence
  Description of Artificial Sequence: Synthetic oligonucleotide
aaaacaagugcccagcucc

SEQ ID NO: 1275839 - RNA, 19 nt, Artificial Sequence
  Description of Artificial Sequence: Synthetic oligonucleotide
ugugaauuccuauagaagg

SEQ ID NO: 1275840 - RNA, 19 nt, Artificial Sequence
  Description of Artificial Sequence: Synthetic oligonucleotide
aaugaaaguaugucucucc

SEQ ID NO: 1275841 - RNA, 19 nt, Artificial Sequence
  Description of Artificial Sequence: Synthetic oligonucleotide
agagacagcuacuaaagcc

SEQ ID NO: 1275842 - RNA, 19 nt, Artificial Sequence
  Description of Artificial Sequence: Synthetic oligonucleotide
aaaacaagcugugaauucc

SEQ ID NO: 1275843 - RNA, 19 nt, Artificial Sequence
  Description of Artificial Sequence: Synthetic oligonucleotide
aaacuaagccaagaaaucc

SEQ ID NO: 1275844 - RNA, 19 nt, Artificial Sequence
  Description of Artificial Sequence: Synthetic oligonucleotide
ugaucucugaugcuuaucg

SEQ ID NO: 1275845 - RNA, 19 nt, Artificial Sequence
  Description of Artificial Sequence: Synthetic oligonucleotide
aaaucccacguacuguucc

SEQ ID NO: 1275846 - RNA, 19 nt, Artificial Sequence
  Description of Artificial Sequence: Synthetic oligonucleotide
agauggggcauuuauaggg

SEQ ID NO: 1275847 - RNA, 19 nt, Artificial Sequence
  Description of Artificial Sequence: Synthetic oligonucleotide
aaagcgaugcagcucacuc

SEQ ID NO: 1275848 - RNA, 19 nt, Artificial Sequence
  Description of Artificial Sequence: Synthetic oligonucleotide
aauaacaucccuccaugug

SEQ ID NO: 1275849 - RNA, 19 nt, Artificial Sequence
  Description of Artificial Sequence: Synthetic oligonucleotide
uuaucuacaugacaugucu

SEQ ID NO: 1275850 - RNA, 19 nt, Artificial Sequence
  Description of Artificial Sequence: Synthetic oligonucleotide
aaaacuaagccaagaaauc

SEQ ID NO: 1275851 - RNA, 19 nt, Artificial Sequence
  Description of Artificial Sequence: Synthetic oligonucleotide
uggaguuagaaauaccugc

SEQ ID NO: 1275852 - RNA, 19 nt, Artificial Sequence
  Description of Artificial Sequence: Synthetic oligonucleotide
ugucuauuaaaguuugacc

SEQ ID NO: 1275853 - RNA, 19 nt, Artificial Sequence
  Description of Artificial Sequence: Synthetic oligonucleotide
ugacagaaaacauccagag

SEQ ID NO: 1275854 - RNA, 19 nt, Artificial Sequence
  Description of Artificial Sequence: Synthetic oligonucleotide
acagauggggcauuuauag

SEQ ID NO: 1275855 - RNA, 19 nt, Artificial Sequence
  Description of Artificial Sequence: Synthetic oligonucleotide
aaagcuggcgagcagucuc

SEQ ID NO: 1275856 - RNA, 19 nt, Artificial Sequence
  Description of Artificial Sequence: Synthetic oligonucleotide
agcaugaaaucccacguac

SEQ ID NO: 1275857 - RNA, 19 nt, Artificial Sequence
  Description of Artificial Sequence: Synthetic oligonucleotide
uuugucauuuucuugucug

SEQ ID NO: 1275858 - RNA, 19 nt, Artificial Sequence
  Description of Artificial Sequence: Synthetic oligonucleotide
agaaugcuguuccaugucc

SEQ ID NO: 1275859 - RNA, 19 nt, Artificial Sequence
  Description of Artificial Sequence: Synthetic oligonucleotide
uuuaaguucucuuugucau

SEQ ID NO: 1275860 - RNA, 19 nt, Artificial Sequence
  Description of Artificial Sequence: Synthetic oligonucleotide
  modified_base (14)..(14): a, c, u, g, unknown or other
acugccuggacacnguuuc

SEQ ID NO: 1275861 - RNA, 19 nt, Artificial Sequence
  Description of Artificial Sequence: Synthetic oligonucleotide
cucagaauaacaucccucc

SEQ ID NO: 1275862 - RNA, 19 nt, Artificial Sequence
  Description of Artificial Sequence: Synthetic oligonucleotide
ugaauaaaccuuuucucac

SEQ ID NO: 1275863 - RNA, 19 nt, Artificial Sequence
  Description of Artificial Sequence: Synthetic oligonucleotide
aaaacauccagagaccccu

SEQ ID NO: 1275864 - RNA, 19 nt, Artificial Sequence
  Description of Artificial Sequence: Synthetic oligonucleotide
augcagcucacucucaccc

SEQ ID NO: 1275865 - RNA, 19 nt, Artificial Sequence
  Description of Artificial Sequence: Synthetic oligonucleotide
gauugcaguaccuccaggc

SEQ ID NO: 1275866 - RNA, 19 nt, Artificial Sequence
  Description of Artificial Sequence: Synthetic oligonucleotide
ugaugucuauuaaaguuug

SEQ ID NO: 1275867 - RNA, 19 nt, Artificial Sequence
  Description of Artificial Sequence: Synthetic oligonucleotide
uugguggaaaacaagcugu

SEQ ID NO: 1275868 - RNA, 19 nt, Artificial Sequence
  Description of Artificial Sequence: Synthetic oligonucleotide
augucuauuaaaguuugac

SEQ ID NO: 1275869 - RNA, 19 nt, Artificial Sequence
  Description of Artificial Sequence: Synthetic oligonucleotide
auaacaucccuccauguga

SEQ ID NO: 1275870 - RNA, 19 nt, Artificial Sequence
  Description of Artificial Sequence: Synthetic oligonucleotide
uugaccucugaauaaaccu

SEQ ID NO: 1275871 - RNA, 19 nt, Artificial Sequence
  Description of Artificial Sequence: Synthetic oligonucleotide
agaauaacaucccuccaug

SEQ ID NO: 1275872 - RNA, 19 nt, Artificial Sequence
  Description of Artificial Sequence: Synthetic oligonucleotide
agucuugguaucuucucac

SEQ ID NO: 1275873 - RNA, 19 nt, Artificial Sequence
  Description of Artificial Sequence: Synthetic oligonucleotide
ucugaguagaauccaggug

SEQ ID NO: 1275874 - RNA, 19 nt, Artificial Sequence
  Description of Artificial Sequence: Synthetic oligonucleotide
acugccauagucuccgagg

SEQ ID NO: 1275875 - RNA, 19 nt, Artificial Sequence
  Description of Artificial Sequence: Synthetic oligonucleotide
ugaaaguaugucucuccgg

SEQ ID NO: 1275876 - RNA, 19 nt, Artificial Sequence
  Description of Artificial Sequence: Synthetic oligonucleotide
agaaauaccugcuccugag

SEQ ID NO: 1275877 - RNA, 19 nt, Artificial Sequence
  Description of Artificial Sequence: Synthetic oligonucleotide
uuccguaguugucucaggg

SEQ ID NO: 1275878 - RNA, 19 nt, Artificial Sequence
  Description of Artificial Sequence: Synthetic oligonucleotide
uggugugaaccucuggccg

SEQ ID NO: 1275879 - RNA, 19 nt, Artificial Sequence
  Description of Artificial Sequence: Synthetic oligonucleotide
gucuauuaaaguuugaccu

SEQ ID NO: 1275880 - RNA, 19 nt, Artificial Sequence
  Description of Artificial Sequence: Synthetic oligonucleotide
uguuagucaggucagguuu

SEQ ID NO: 1275881 - RNA, 19 nt, Artificial Sequence
  Description of Artificial Sequence: Synthetic oligonucleotide
cauccuucacccucgaagg

SEQ ID NO: 1275882 - RNA, 19 nt, Artificial Sequence
  Description of Artificial Sequence: Synthetic oligonucleotide
ugcuuaucgaggcuggagc

SEQ ID NO: 1275883 - RNA, 19 nt, Artificial Sequence
  Description of Artificial Sequence: Synthetic oligonucleotide
ucugcuauguuagucaggu

SEQ ID NO: 1275884 - RNA, 19 nt, Artificial Sequence
  Description of Artificial Sequence: Synthetic oligonucleotide
uuggaguuagaaauaccug

SEQ ID NO: 1275885 - RNA, 19 nt, Artificial Sequence
  Description of Artificial Sequence: Synthetic oligonucleotide
ucugauugcaguaccucca

SEQ ID NO: 1275886 - RNA, 19 nt, Artificial Sequence
  Description of Artificial Sequence: Synthetic oligonucleotide
uuuccagagcuucagggac

SEQ ID NO: 1275887 - RNA, 19 nt, Artificial Sequence
  Description of Artificial Sequence: Synthetic oligonucleotide
caaguuuaaguucucuuug

SEQ ID NO: 1275888 - RNA, 19 nt, Artificial Sequence
  Description of Artificial Sequence: Synthetic oligonucleotide
aaguaugucucuccgguau

SEQ ID NO: 1275889 - RNA, 19 nt, Artificial Sequence
  Description of Artificial Sequence: Synthetic oligonucleotide
ucuugguaucuucucacug

SEQ ID NO: 1275890 - RNA, 19 nt, Artificial Sequence
  Description of Artificial Sequence: Synthetic oligonucleotide
aacccuuugaugucuauua

SEQ ID NO: 1275891 - RNA, 19 nt, Artificial Sequence
  Description of Artificial Sequence: Synthetic oligonucleotide
ucuucucacugauaugaag

SEQ ID NO: 1275892 - RNA, 19 nt, Artificial Sequence
  Description of Artificial Sequence: Synthetic oligonucleotide
uaccugguaacgaaacugc

SEQ ID NO: 1275893 - RNA, 19 nt, Artificial Sequence
  Description of Artificial Sequence: Synthetic oligonucleotide
uuaccugguaacgaaacug

SEQ ID NO: 1275894 - RNA, 19 nt, Artificial Sequence
  Description of Artificial Sequence: Synthetic oligonucleotide
acucucacccaggaaaucc

SEQ ID NO: 1275895 - RNA, 19 nt, Artificial Sequence
  Description of Artificial Sequence: Synthetic oligonucleotide
uucugauugcaguaccucc

SEQ ID NO: 1275896 - RNA, 19 nt, Artificial Sequence
  Description of Artificial Sequence: Synthetic oligonucleotide
aacuuggacgccaauccac

SEQ ID NO: 1275897 - RNA, 19 nt, Artificial Sequence
  Description of Artificial Sequence: Synthetic oligonucleotide
aaauccaaggcagucugug

SEQ ID NO: 1275898 - RNA, 19 nt, Artificial Sequence
  Description of Artificial Sequence: Synthetic oligonucleotide
uucacaaagucugagcuuc

SEQ ID NO: 1275899 - RNA, 19 nt, Artificial Sequence
  Description of Artificial Sequence: Synthetic oligonucleotide
uagucugcuauguuaguca

SEQ ID NO: 1275900 - RNA, 19 nt, Artificial Sequence
  Description of Artificial Sequence: Synthetic oligonucleotide
  modified_base (5)..(5): a, c, u, g, unknown or other
acacnguuuccucacccac

SEQ ID NO: 1275901 - RNA, 19 nt, Artificial Sequence
  Description of Artificial Sequence: Synthetic oligonucleotide
uccacugccauagucuccg

SEQ ID NO: 1275902 - RNA, 19 nt, Artificial Sequence
  Description of Artificial Sequence: Synthetic oligonucleotide
aguagaauccaggugucuc

SEQ ID NO: 1275903 - RNA, 19 nt, Artificial Sequence
  Description of Artificial Sequence: Synthetic oligonucleotide
cuacaugacaugucuuucc

SEQ ID NO: 1275904 - RNA, 19 nt, Artificial Sequence
  Description of Artificial Sequence: Synthetic oligonucleotide
gaauaaaccuuuucucaca

SEQ ID NO: 1275905 - RNA, 19 nt, Artificial Sequence
  Description of Artificial Sequence: Synthetic oligonucleotide
uucagggacauucucuccu

SEQ ID NO: 1275906 - RNA, 19 nt, Artificial Sequence
  Description of Artificial Sequence: Synthetic oligonucleotide
uaaucacauuuacagggcu

SEQ ID NO: 1275907 - RNA, 19 nt, Artificial Sequence
  Description of Artificial Sequence: Synthetic oligonucleotide
auccacucagaauaacauc

SEQ ID NO: 1275908 - RNA, 19 nt, Artificial Sequence
  Description of Artificial Sequence: Synthetic oligonucleotide
guuuaaguucucuuuguca

SEQ ID NO: 1275909 - RNA, 19 nt, Artificial Sequence
  Description of Artificial Sequence: Synthetic oligonucleotide
agccaagaaauccacucag

SEQ ID NO: 1275910 - RNA, 19 nt, Artificial Sequence
  Description of Artificial Sequence: Synthetic oligonucleotide
acuaaagccauuaucuaca

SEQ ID NO: 1275911 - RNA, 19 nt, Artificial Sequence
  Description of Artificial Sequence: Synthetic oligonucleotide
uucugaguagaauccaggu

SEQ ID NO: 1275912 - RNA, 19 nt, Artificial Sequence
  Description of Artificial Sequence: Synthetic oligonucleotide
aaauggggcaaugaaagua

SEQ ID NO: 1275913 - RNA, 19 nt, Artificial Sequence
  Description of Artificial Sequence: Synthetic oligonucleotide
ugaugccugacagaaaaca

SEQ ID NO: 1275914 - RNA, 19 nt, Artificial Sequence
  Description of Artificial Sequence: Synthetic oligonucleotide
caaaguaagagaccagcuc

SEQ ID NO: 1275915 - RNA, 19 nt, Artificial Sequence
  Description of Artificial Sequence: Synthetic oligonucleotide
uccuuugguggaaaacaag

SEQ ID NO: 1275916 - RNA, 19 nt, Artificial Sequence
  Description of Artificial Sequence: Synthetic oligonucleotide
ucuucuuugcaggugaguc

SEQ ID NO: 1275917 - RNA, 19 nt, Artificial Sequence
  Description of Artificial Sequence: Synthetic oligonucleotide
aguucucugauguuucaca

SEQ ID NO: 1275918 - RNA, 19 nt, Artificial Sequence
  Description of Artificial Sequence: Synthetic oligonucleotide
auuuucucgugguagcgca

SEQ ID NO: 1275919 - RNA, 19 nt, Artificial Sequence
  Description of Artificial Sequence: Synthetic oligonucleotide
cauuaccugguaacgaaac

SEQ ID NO: 1275920 - RNA, 19 nt, Artificial Sequence
  Description of Artificial Sequence: Synthetic oligonucleotide
uuagaaauaccugcuccug

SEQ ID NO: 1275921 - RNA, 19 nt, Artificial Sequence
  Description of Artificial Sequence: Synthetic oligonucleotide
aauccacucagaauaacau

SEQ ID NO: 1275922 - RNA, 19 nt, Artificial Sequence
  Description of Artificial Sequence: Synthetic oligonucleotide
uucuuuuccuggugcaaag

SEQ ID NO: 1275923 - RNA, 19 nt, Artificial Sequence
  Description of Artificial Sequence: Synthetic oligonucleotide
uuuuagagacagcuacuaa

SEQ ID NO: 1275924 - RNA, 19 nt, Artificial Sequence
  Description of Artificial Sequence: Synthetic oligonucleotide
auuaucuacaugacauguc

SEQ ID NO: 1275925 - RNA, 19 nt, Artificial Sequence
  Description of Artificial Sequence: Synthetic oligonucleotide
guagaauccaggugucucc

SEQ ID NO: 1275926 - RNA, 19 nt, Artificial Sequence
  Description of Artificial Sequence: Synthetic oligonucleotide
ugaaaucccacguacuguu

SEQ ID NO: 1275927 - RNA, 19 nt, Artificial Sequence
  Description of Artificial Sequence: Synthetic oligonucleotide
ucagaauaacaucccucca

SEQ ID NO: 1275928 - RNA, 19 nt, Artificial Sequence
  Description of Artificial Sequence: Synthetic oligonucleotide
ggaaacagagcuuccguag

SEQ ID NO: 1275929 - RNA, 19 nt, Artificial Sequence
  Description of Artificial Sequence: Synthetic oligonucleotide
gagacagcuacuaaagcca

SEQ ID NO: 1275930 - RNA, 19 nt, Artificial Sequence
  Description of Artificial Sequence: Synthetic oligonucleotide
aauggggcaaugaaaguau

SEQ ID NO: 1275931 - RNA, 19 nt, Artificial Sequence
  Description of Artificial Sequence: Synthetic oligonucleotide
uuugcaaauggggcaauga

SEQ ID NO: 1275932 - RNA, 19 nt, Artificial Sequence
  Description of Artificial Sequence: Synthetic oligonucleotide
uucccauaggucuccagca

SEQ ID NO: 1275933 - RNA, 19 nt, Artificial Sequence
  Description of Artificial Sequence: Synthetic oligonucleotide
agagaggagagguccuuuc

SEQ ID NO: 1275934 - RNA, 19 nt, Artificial Sequence
  Description of Artificial Sequence: Synthetic oligonucleotide
uauguuagucaggucaggu

SEQ ID NO: 1275935 - RNA, 19 nt, Artificial Sequence
  Description of Artificial Sequence: Synthetic oligonucleotide
uuaucgaggcuggagcucc

SEQ ID NO: 1275936 - RNA, 19 nt, Artificial Sequence
  Description of Artificial Sequence: Synthetic oligonucleotide
auuaccugguaacgaaacu

SEQ ID NO: 1275937 - RNA, 19 nt, Artificial Sequence
  Description of Artificial Sequence: Synthetic oligonucleotide
cagacauuaccugguaacg

SEQ ID NO: 1275938 - RNA, 19 nt, Artificial Sequence
  Description of Artificial Sequence: Synthetic oligonucleotide
ugcaggugagucuugguau

SEQ ID NO: 1275939 - RNA, 19 nt, Artificial Sequence
  Description of Artificial Sequence: Synthetic oligonucleotide
gacauuaccugguaacgaa

SEQ ID NO: 1275940 - RNA, 19 nt, Artificial Sequence
  Description of Artificial Sequence: Synthetic oligonucleotide
ugaccucugaauaaaccuu

SEQ ID NO: 1275941 - RNA, 19 nt, Artificial Sequence
  Description of Artificial Sequence: Synthetic oligonucleotide
gauaugaaguugcagcccu

SEQ ID NO: 1275942 - RNA, 19 nt, Artificial Sequence
  Description of Artificial Sequence: Synthetic oligonucleotide
uucaccuucucagacggga

SEQ ID NO: 1275943 - RNA, 19 nt, Artificial Sequence
  Description of Artificial Sequence: Synthetic oligonucleotide
cugaguagaauccaggugu

SEQ ID NO: 1275944 - RNA, 19 nt, Artificial Sequence
  Description of Artificial Sequence: Synthetic oligonucleotide
agccugauaagucacuaaa

SEQ ID NO: 1275945 - RNA, 19 nt, Artificial Sequence
  Description of Artificial Sequence: Synthetic oligonucleotide
uguuccauguccuggucuc

SEQ ID NO: 1275946 - RNA, 19 nt, Artificial Sequence
  Description of Artificial Sequence: Synthetic oligonucleotide
uccacuguuccugauguac

SEQ ID NO: 1275947 - RNA, 19 nt, Artificial Sequence
  Description of Artificial Sequence: Synthetic oligonucleotide
aucuacaugacaugucuuu

SEQ ID NO: 1275948 - RNA, 19 nt, Artificial Sequence
  Description of Artificial Sequence: Synthetic oligonucleotide
ucacaaagucugagcuucg

SEQ ID NO: 1275949 - RNA, 19 nt, Artificial Sequence
  Description of Artificial Sequence: Synthetic oligonucleotide
uccacaagggucacugccu

SEQ ID NO: 1275950 - RNA, 19 nt, Artificial Sequence
  Description of Artificial Sequence: Synthetic oligonucleotide
gcauccuucacccucgaag

SEQ ID NO: 1275951 - RNA, 19 nt, Artificial Sequence
  Description of Artificial Sequence: Synthetic oligonucleotide
aacagagcuuccguaguug

SEQ ID NO: 1275952 - RNA, 19 nt, Artificial Sequence
  Description of Artificial Sequence: Synthetic oligonucleotide
aaucccacguacuguuccu

SEQ ID NO: 1275953 - RNA, 19 nt, Artificial Sequence
  Description of Artificial Sequence: Synthetic oligonucleotide
ucucagacgggaucucuug

SEQ ID NO: 1275954 - RNA, 19 nt, Artificial Sequence
  Description of Artificial Sequence: Synthetic oligonucleotide
gaaaacauccagagacccc

SEQ ID NO: 1275955 - RNA, 19 nt, Artificial Sequence
  Description of Artificial Sequence: Synthetic oligonucleotide
uugguaucuucucacugau

SEQ ID NO: 1275956 - RNA, 19 nt, Artificial Sequence
  Description of Artificial Sequence: Synthetic oligonucleotide
auccuucacccucgaaggc

SEQ ID NO: 1275957 - RNA, 19 nt, Artificial Sequence
  Description of Artificial Sequence: Synthetic oligonucleotide
uggggcaaugaaaguaugu

SEQ ID NO: 1275958 - RNA, 19 nt, Artificial Sequence
  Description of Artificial Sequence: Synthetic oligonucleotide
aaaccuuuucucacagaug

SEQ ID NO: 1275959 - RNA, 19 nt, Artificial Sequence
  Description of Artificial Sequence: Synthetic oligonucleotide
gauuuucucgugguagcgc

SEQ ID NO: 1275960 - RNA, 19 nt, Artificial Sequence
  Description of Artificial Sequence: Synthetic oligonucleotide
gguagcgcaagccugauaa

SEQ ID NO: 1275961 - RNA, 19 nt, Artificial Sequence
  Description of Artificial Sequence: Synthetic oligonucleotide
ugaguagaauccagguguc

SEQ ID NO: 1275962 - RNA, 19 nt, Artificial Sequence
  Description of Artificial Sequence: Synthetic oligonucleotide
uuagucaggucagguuugg

SEQ ID NO: 1275963 - RNA, 19 nt, Artificial Sequence
  Description of Artificial Sequence: Synthetic oligonucleotide
augccugacagaaaacauc

SEQ ID NO: 1275964 - RNA, 19 nt, Artificial Sequence
  Description of Artificial Sequence: Synthetic oligonucleotide
uugcaggugagucuuggua

SEQ ID NO: 1275965 - RNA, 19 nt, Artificial Sequence
  Description of Artificial Sequence: Synthetic oligonucleotide
  modified_base (3)..(3): a, c, u, g, unknown or other
acnguuuccucacccacau

SEQ ID NO: 1275966 - RNA, 19 nt, Artificial Sequence
  Description of Artificial Sequence: Synthetic oligonucleotide
ucacugauaugaaguugca

SEQ ID NO: 1275967 - RNA, 19 nt, Artificial Sequence
  Description of Artificial Sequence: Synthetic oligonucleotide
ucuacaugacaugucuuuc

SEQ ID NO: 1275968 - RNA, 19 nt, Artificial Sequence
  Description of Artificial Sequence: Synthetic oligonucleotide
uagucuccgaggaucuccc

SEQ ID NO: 1275969 - RNA, 19 nt, Artificial Sequence
  Description of Artificial Sequence: Synthetic oligonucleotide
ugagucuugguaucuucuc

SEQ ID NO: 1275970 - RNA, 19 nt, Artificial Sequence
  Description of Artificial Sequence: Synthetic oligonucleotide
caugacaugucuuucccaa

SEQ ID NO: 1275971 - RNA, 19 nt, Artificial Sequence
  Description of Artificial Sequence: Synthetic oligonucleotide
uguccuggucucuuucacc

SEQ ID NO: 1275972 - RNA, 19 nt, Artificial Sequence
  Description of Artificial Sequence: Synthetic oligonucleotide
caugaggaucuccaggauc

SEQ ID NO: 1275973 - RNA, 19 nt, Artificial Sequence
  Description of Artificial Sequence: Synthetic oligonucleotide
ugugaacccuuugaugucu

SEQ ID NO: 1275974 - RNA, 19 nt, Artificial Sequence
  Description of Artificial Sequence: Synthetic oligonucleotide
agccauuaucuacaugaca

SEQ ID NO: 1275975 - RNA, 19 nt, Artificial Sequence
  Description of Artificial Sequence: Synthetic oligonucleotide
gagucuugguaucuucuca

SEQ ID NO: 1275976 - RNA, 19 nt, Artificial Sequence
  Description of Artificial Sequence: Synthetic oligonucleotide
aauuccuauagaagguuuu

SEQ ID NO: 1275977 - RNA, 19 nt, Artificial Sequence
  Description of Artificial Sequence: Synthetic oligonucleotide
uagaacuuggacgccaauc

SEQ ID NO: 1275978 - RNA, 19 nt, Artificial Sequence
  Description of Artificial Sequence: Synthetic oligonucleotide
uucucacugauaugaaguu

SEQ ID NO: 1275979 - RNA, 19 nt, Artificial Sequence
  Description of Artificial Sequence: Synthetic oligonucleotide
ccauagucugcuauguuag

SEQ ID NO: 1275980 - RNA, 19 nt, Artificial Sequence
  Description of Artificial Sequence: Synthetic oligonucleotide
uuccccauagucugcuaug

SEQ ID NO: 1275981 - RNA, 19 nt, Artificial Sequence
  Description of Artificial Sequence: Synthetic oligonucleotide
guacuguuccuucugagua

SEQ ID NO: 1275982 - RNA, 19 nt, Artificial Sequence
  Description of Artificial Sequence: Synthetic oligonucleotide
aguaugucucuccgguaug

SEQ ID NO: 1275983 - RNA, 19 nt, Artificial Sequence
  Description of Artificial Sequence: Synthetic oligonucleotide
ugaauuccuauagaagguu

SEQ ID NO: 1275984 - RNA, 19 nt, Artificial Sequence
  Description of Artificial Sequence: Synthetic oligonucleotide
cagacgggaucucuugucc

SEQ ID NO: 1275985 - RNA, 19 nt, Artificial Sequence
  Description of Artificial Sequence: Synthetic oligonucleotide
  modified_base (9)..(9): a, c, u, g, unknown or other
cuggacacnguuuccucac

SEQ ID NO: 1275986 - RNA, 19 nt, Artificial Sequence
  Description of Artificial Sequence: Synthetic oligonucleotide
acaagcugugaauuccuau

SEQ ID NO: 1275987 - RNA, 19 nt, Artificial Sequence
  Description of Artificial Sequence: Synthetic oligonucleotide
agaauccaggugucuccac

SEQ ID NO: 1275988 - RNA, 19 nt, Artificial Sequence
  Description of Artificial Sequence: Synthetic oligonucleotide
acagcuacuaaagccauua

SEQ ID NO: 1275989 - RNA, 19 nt, Artificial Sequence
  Description of Artificial Sequence: Synthetic oligonucleotide
aagccugauaagucacuaa

SEQ ID NO: 1275990 - RNA, 19 nt, Artificial Sequence
  Description of Artificial Sequence: Synthetic oligonucleotide
agcgcaagccugauaaguc

SEQ ID NO: 1275991 - RNA, 19 nt, Artificial Sequence
  Description of Artificial Sequence: Synthetic oligonucleotide
acguacuguuccuucugag

SEQ ID NO: 1275992 - RNA, 19 nt, Artificial Sequence
  Description of Artificial Sequence: Synthetic oligonucleotide
uccguaguugucucagggu

SEQ ID NO: 1275993 - RNA, 19 nt, Artificial Sequence
  Description of Artificial Sequence: Synthetic oligonucleotide
ucagacgggaucucuuguc

SEQ ID NO: 1275994 - RNA, 19 nt, Artificial Sequence
  Description of Artificial Sequence: Synthetic oligonucleotide
  modified_base (6)..(6): a, c, u, g, unknown or other
gacacnguuuccucaccca

SEQ ID NO: 1275995 - RNA, 19 nt, Artificial Sequence
  Description of Artificial Sequence: Synthetic oligonucleotide
uaucuacaugacaugucuu

SEQ ID NO: 1275996 - RNA, 19 nt, Artificial Sequence
  Description of Artificial Sequence: Synthetic oligonucleotide
guaagagaccagcucaaaa

SEQ ID NO: 1275997 - RNA, 19 nt, Artificial Sequence
  Description of Artificial Sequence: Synthetic oligonucleotide
ggcaaugaaaguaugucuc

SEQ ID NO: 1275998 - RNA, 19 nt, Artificial Sequence
  Description of Artificial Sequence: Synthetic oligonucleotide
uuccuggugcaaaggaaaa

SEQ ID NO: 1275999 - RNA, 19 nt, Artificial Sequence
  Description of Artificial Sequence: Synthetic oligonucleotide
ucucgugguagcgcaagcc

SEQ ID NO: 1276000 - RNA, 19 nt, Artificial Sequence
  Description of Artificial Sequence: Synthetic oligonucleotide
uagcgcaagccugauaagu

SEQ ID NO: 1276001 - RNA, 19 nt, Artificial Sequence
  Description of Artificial Sequence: Synthetic oligonucleotide
augaaaucccacguacugu

SEQ ID NO: 1276002 - RNA, 19 nt, Artificial Sequence
  Description of Artificial Sequence: Synthetic oligonucleotide
  modified_base (7)..(7): a, c, u, g, unknown or other
ggacacnguuuccucaccc

SEQ ID NO: 1276003 - RNA, 19 nt, Artificial Sequence
  Description of Artificial Sequence: Synthetic oligonucleotide
uucuuugcaggugagucuu

SEQ ID NO: 1276004 - RNA, 19 nt, Artificial Sequence
  Description of Artificial Sequence: Synthetic oligonucleotide
aacaagugcccagcuccuc

SEQ ID NO: 1276005 - RNA, 19 nt, Artificial Sequence
  Description of Artificial Sequence: Synthetic oligonucleotide
gcugugaauuccuauagaa

SEQ ID NO: 1276006 - RNA, 19 nt, Artificial Sequence
  Description of Artificial Sequence: Synthetic oligonucleotide
agacauuaccugguaacga

SEQ ID NO: 1276007 - RNA, 19 nt, Artificial Sequence
  Description of Artificial Sequence: Synthetic oligonucleotide
gaucucugaugcuuaucga

SEQ ID NO: 1276008 - RNA, 19 nt, Artificial Sequence
  Description of Artificial Sequence: Synthetic oligonucleotide
acaugacaugucuuuccca

SEQ ID NO: 1276009 - RNA, 19 nt, Artificial Sequence
  Description of Artificial Sequence: Synthetic oligonucleotide
aaucacauuuacagggcuu

SEQ ID NO: 1276010 - RNA, 19 nt, Artificial Sequence
  Description of Artificial Sequence: Synthetic oligonucleotide
caaugaaaguaugucucuc

SEQ ID NO: 1276011 - RNA, 19 nt, Artificial Sequence
  Description of Artificial Sequence: Synthetic oligonucleotide
cucacccaggaaauccaag

SEQ ID NO: 1276012 - RNA, 19 nt, Artificial Sequence
  Description of Artificial Sequence: Synthetic oligonucleotide
guuagucaggucagguuug

SEQ ID NO: 1276013 - RNA, 19 nt, Artificial Sequence
  Description of Artificial Sequence: Synthetic oligonucleotide
aaguaagagaccagcucaa

SEQ ID NO: 1276014 - RNA, 19 nt, Artificial Sequence
  Description of Artificial Sequence: Synthetic oligonucleotide
guaacgaaacugccuaaaa

SEQ ID NO: 1276015 - RNA, 19 nt, Artificial Sequence
  Description of Artificial Sequence: Synthetic oligonucleotide
caagcugugaauuccuaua

SEQ ID NO: 1276016 - RNA, 19 nt, Artificial Sequence
  Description of Artificial Sequence: Synthetic oligonucleotide
  modified_base (8)..(8): a, c, u, g, unknown or other
uggacacnguuuccucacc

SEQ ID NO: 1276017 - RNA, 19 nt, Artificial Sequence
  Description of Artificial Sequence: Synthetic oligonucleotide
uccuucacccucgaaggcu

SEQ ID NO: 1276018 - RNA, 19 nt, Artificial Sequence
  Description of Artificial Sequence: Synthetic oligonucleotide
auguuagucaggucagguu

SEQ ID NO: 1276019 - RNA, 19 nt, Artificial Sequence
  Description of Artificial Sequence: Synthetic oligonucleotide
aaaagcuggcgagcagucu

SEQ ID NO: 1276020 - RNA, 19 nt, Artificial Sequence
  Description of Artificial Sequence: Synthetic oligonucleotide
ucaccugaugccugacaga

SEQ ID NO: 1276021 - RNA, 19 nt, Artificial Sequence
  Description of Artificial Sequence: Synthetic oligonucleotide
cuuccguaguugucucagg

SEQ ID NO: 1276022 - RNA, 19 nt, Artificial Sequence
  Description of Artificial Sequence: Synthetic oligonucleotide
ugugaucucugaugcuuau

SEQ ID NO: 1276023 - RNA, 19 nt, Artificial Sequence
  Description of Artificial Sequence: Synthetic oligonucleotide
aaacaagugcccagcuccu

SEQ ID NO: 1276024 - RNA, 19 nt, Artificial Sequence
  Description of Artificial Sequence: Synthetic oligonucleotide
aggaucucccuucaagcuu

SEQ ID NO: 1276025 - RNA, 19 nt, Artificial Sequence
  Description of Artificial Sequence: Synthetic oligonucleotide
gaauaacaucccuccaugu

SEQ ID NO: 1276026 - RNA, 19 nt, Artificial Sequence
  Description of Artificial Sequence: Synthetic oligonucleotide
uggggcauuuauaggguuu

SEQ ID NO: 1276027 - RNA, 19 nt, Artificial Sequence
  Description of Artificial Sequence: Synthetic oligonucleotide
augcuuaucgaggcuggag

SEQ ID NO: 1276028 - RNA, 19 nt, Artificial Sequence
  Description of Artificial Sequence: Synthetic oligonucleotide
cuuugguggaaaacaagcu

SEQ ID NO: 1276029 - RNA, 19 nt, Artificial Sequence
  Description of Artificial Sequence: Synthetic oligonucleotide
gcuauguuagucaggucag

SEQ ID NO: 1276030 - RNA, 19 nt, Artificial Sequence
  Description of Artificial Sequence: Synthetic oligonucleotide
gucuccacuguuccugaug

SEQ ID NO: 1276031 - RNA, 19 nt, Artificial Sequence
  Description of Artificial Sequence: Synthetic oligonucleotide
ggauuuucucgugguagcg

SEQ ID NO: 1276032 - RNA, 19 nt, Artificial Sequence
  Description of Artificial Sequence: Synthetic oligonucleotide
gggagaaugcuguuccaug

SEQ ID NO: 1276033 - RNA, 19 nt, Artificial Sequence
  Description of Artificial Sequence: Synthetic oligonucleotide
cucgaaggcuuuccagagc

SEQ ID NO: 1276034 - RNA, 19 nt, Artificial Sequence
  Description of Artificial Sequence: Synthetic oligonucleotide
agacgggaucucuuguccu

SEQ ID NO: 1276035 - RNA, 19 nt, Artificial Sequence
  Description of Artificial Sequence: Synthetic oligonucleotide
ucccugugauuuuccaagu

SEQ ID NO: 1276036 - RNA, 19 nt, Artificial Sequence
  Description of Artificial Sequence: Synthetic oligonucleotide
gauaagucacuaaagccuu

SEQ ID NO: 1276037 - RNA, 19 nt, Artificial Sequence
  Description of Artificial Sequence: Synthetic oligonucleotide
aucuccccaggaaggaugg

SEQ ID NO: 1276038 - RNA, 19 nt, Artificial Sequence
  Description of Artificial Sequence: Synthetic oligonucleotide
gggcccagacauuaccugg

SEQ ID NO: 1276039 - RNA, 19 nt, Artificial Sequence
  Description of Artificial Sequence: Synthetic oligonucleotide
cauuaucuacaugacaugu

SEQ ID NO: 1276040 - RNA, 19 nt, Artificial Sequence
  Description of Artificial Sequence: Synthetic oligonucleotide
gcaguggguacauuuauaa

SEQ ID NO: 1276041 - RNA, 19 nt, Artificial Sequence
  Description of Artificial Sequence: Synthetic oligonucleotide
uuuucucgugguagcgcaa

SEQ ID NO: 1276042 - RNA, 19 nt, Artificial Sequence
  Description of Artificial Sequence: Synthetic oligonucleotide
acuguuccuucugaguaga

SEQ ID NO: 1276043 - RNA, 19 nt, Artificial Sequence
  Description of Artificial Sequence: Synthetic oligonucleotide
agcuucagggacauucucu

SEQ ID NO: 1276044 - RNA, 19 nt, Artificial Sequence
  Description of Artificial Sequence: Synthetic oligonucleotide
gggguccaaaguaagagac

SEQ ID NO: 1276045 - RNA, 19 nt, Artificial Sequence
  Description of Artificial Sequence: Synthetic oligonucleotide
cuuggacgccaauccacug

SEQ ID NO: 1276046 - RNA, 19 nt, Artificial Sequence
  Description of Artificial Sequence: Synthetic oligonucleotide
  modified_base (4)..(4): a, c, u, g, unknown or other
cacnguuuccucacccaca

SEQ ID NO: 1276047 - RNA, 19 nt, Artificial Sequence
  Description of Artificial Sequence: Synthetic oligonucleotide
ggugugaaccucuggccgc

SEQ ID NO: 1276048 - RNA, 19 nt, Artificial Sequence
  Description of Artificial Sequence: Synthetic oligonucleotide
ggaucucuuguccuagaac

SEQ ID NO: 1276049 - RNA, 19 nt, Artificial Sequence
  Description of Artificial Sequence: Synthetic oligonucleotide
guagcgcaagccugauaag

SEQ ID NO: 1276050 - RNA, 19 nt, Artificial Sequence
  Description of Artificial Sequence: Synthetic oligonucleotide
guuugaccucugaauaaac

SEQ ID NO: 1276051 - RNA, 19 nt, Artificial Sequence
  Description of Artificial Sequence: Synthetic oligonucleotide
ugguaacgaaacugccuaa

SEQ ID NO: 1276052 - RNA, 19 nt, Artificial Sequence
  Description of Artificial Sequence: Synthetic oligonucleotide
uccccauagucugcuaugu

SEQ ID NO: 1276053 - RNA, 19 nt, Artificial Sequence
  Description of Artificial Sequence: Synthetic oligonucleotide
ucacccucgaaggcuuucc

SEQ ID NO: 1276054 - RNA, 19 nt, Artificial Sequence
  Description of Artificial Sequence: Synthetic oligonucleotide
uaugaguccuuugguggaa

SEQ ID NO: 1276055 - RNA, 19 nt, Artificial Sequence
  Description of Artificial Sequence: Synthetic oligonucleotide
gaauccaggugucuccacu

SEQ ID NO: 1276056 - RNA, 19 nt, Artificial Sequence
  Description of Artificial Sequence: Synthetic oligonucleotide
  modified_base (12)..(12): a, c, u, g, unknown or other
ugccuggacacnguuuccu

SEQ ID NO: 1276057 - RNA, 19 nt, Artificial Sequence
  Description of Artificial Sequence: Synthetic oligonucleotide
  modified_base (17)..(17): a, c, u, g, unknown or other
uccacugccuggacacngu

SEQ ID NO: 1276058 - RNA, 19 nt, Artificial Sequence
  Description of Artificial Sequence: Synthetic oligonucleotide
cacaaagucugagcuucgc

SEQ ID NO: 1276059 - RNA, 19 nt, Artificial Sequence
  Description of Artificial Sequence: Synthetic oligonucleotide
gaugucuauuaaaguuuga

SEQ ID NO: 1276060 - RNA, 19 nt, Artificial Sequence
  Description of Artificial Sequence: Synthetic oligonucleotide
aguugcagcccugccagcu

SEQ ID NO: 1276061 - RNA, 19 nt, Artificial Sequence
  Description of Artificial Sequence: Synthetic oligonucleotide
ugccgcaguggguacauuu

SEQ ID NO: 1276062 - RNA, 19 nt, Artificial Sequence
  Description of Artificial Sequence: Synthetic oligonucleotide
uggucccugugauuuucca

SEQ ID NO: 1276063 - RNA, 19 nt, Artificial Sequence
  Description of Artificial Sequence: Synthetic oligonucleotide
acccuuugaugucuauuaa

SEQ ID NO: 1276064 - RNA, 19 nt, Artificial Sequence
  Description of Artificial Sequence: Synthetic oligonucleotide
ugggagaaugcuguuccau

SEQ ID NO: 1276065 - RNA, 19 nt, Artificial Sequence
  Description of Artificial Sequence: Synthetic oligonucleotide
acuuggacgccaauccacu

SEQ ID NO: 1276066 - RNA, 19 nt, Artificial Sequence
  Description of Artificial Sequence: Synthetic oligonucleotide
ccuuucugauugcaguacc

SEQ ID NO: 1276067 - RNA, 19 nt, Artificial Sequence
  Description of Artificial Sequence: Synthetic oligonucleotide
cuaugggcagggcuucuuc

SEQ ID NO: 1276068 - RNA, 19 nt, Artificial Sequence
  Description of Artificial Sequence: Synthetic oligonucleotide
uuccccaggugugaucucu

SEQ ID NO: 1276069 - RNA, 19 nt, Artificial Sequence
  Description of Artificial Sequence: Synthetic oligonucleotide
cuuaucgaggcuggagcuc

SEQ ID NO: 1276070 - RNA, 19 nt, Artificial Sequence
  Description of Artificial Sequence: Synthetic oligonucleotide
caguuucugggccauggga

SEQ ID NO: 1276071 - RNA, 19 nt, Artificial Sequence
  Description of Artificial Sequence: Synthetic oligonucleotide
cgaggaucucccuucaagc

SEQ ID NO: 1276072 - RNA, 19 nt, Artificial Sequence
  Description of Artificial Sequence: Synthetic oligonucleotide
  modified_base (13)..(13): a, c, u, g, unknown or other
cugccuggacacnguuucc

SEQ ID NO: 1276073 - RNA, 19 nt, Artificial Sequence
  Description of Artificial Sequence: Synthetic oligonucleotide
gagcuucagggacauucuc

SEQ ID NO: 1276074 - RNA, 19 nt, Artificial Sequence
  Description of Artificial Sequence: Synthetic oligonucleotide
aaacauccagagaccccug

SEQ ID NO: 1276075 - RNA, 19 nt, Artificial Sequence
  Description of Artificial Sequence: Synthetic oligonucleotide
gccugauaagucacuaaag

SEQ ID NO: 1276076 - RNA, 19 nt, Artificial Sequence
  Description of Artificial Sequence: Synthetic oligonucleotide
gccauuaucuacaugacau

SEQ ID NO: 1276077 - RNA, 19 nt, Artificial Sequence
  Description of Artificial Sequence: Synthetic oligonucleotide
uccccaggugugaucucug

SEQ ID NO: 1276078 - RNA, 19 nt, Artificial Sequence
  Description of Artificial Sequence: Synthetic oligonucleotide
gugaauuccuauagaaggu

SEQ ID NO: 1276079 - RNA, 19 nt, Artificial Sequence
  Description of Artificial Sequence: Synthetic oligonucleotide
guaguugucucagggucuc

SEQ ID NO: 1276080 - RNA, 19 nt, Artificial Sequence
  Description of Artificial Sequence: Synthetic oligonucleotide
ccaagggguccaaaguaag

SEQ ID NO: 1276081 - RNA, 19 nt, Artificial Sequence
  Description of Artificial Sequence: Synthetic oligonucleotide
ccugaugccugacagaaaa

SEQ ID NO: 1276082 - RNA, 19 nt, Artificial Sequence
  Description of Artificial Sequence: Synthetic oligonucleotide
cagaauaacaucccuccau

SEQ ID NO: 1276083 - RNA, 19 nt, Artificial Sequence
  Description of Artificial Sequence: Synthetic oligonucleotide
gaaaucccacguacuguuc

SEQ ID NO: 1276084 - RNA, 19 nt, Artificial Sequence
  Description of Artificial Sequence: Synthetic oligonucleotide
ugguaucuucucacugaua

SEQ ID NO: 1276085 - RNA, 19 nt, Artificial Sequence
  Description of Artificial Sequence: Synthetic oligonucleotide
cugagaggccucucucuuc

SEQ ID NO: 1276086 - RNA, 19 nt, Artificial Sequence
  Description of Artificial Sequence: Synthetic oligonucleotide
ccguaguugucucaggguc

SEQ ID NO: 1276087 - RNA, 19 nt, Artificial Sequence
  Description of Artificial Sequence: Synthetic oligonucleotide
guccaaaguaagagaccag

SEQ ID NO: 1276088 - RNA, 19 nt, Artificial Sequence
  Description of Artificial Sequence: Synthetic oligonucleotide
ugaacccuuugaugucuau

SEQ ID NO: 1276089 - RNA, 19 nt, Artificial Sequence
  Description of Artificial Sequence: Synthetic oligonucleotide
acgggaucucuuguccuag

SEQ ID NO: 1276090 - RNA, 19 nt, Artificial Sequence
  Description of Artificial Sequence: Synthetic oligonucleotide
aacaagcugugaauuccua

SEQ ID NO: 1276091 - RNA, 19 nt, Artificial Sequence
  Description of Artificial Sequence: Synthetic oligonucleotide
aguaagagaccagcucaaa

SEQ ID NO: 1276092 - RNA, 19 nt, Artificial Sequence
  Description of Artificial Sequence: Synthetic oligonucleotide
guaugucucuccgguauga

SEQ ID NO: 1276093 - RNA, 19 nt, Artificial Sequence
  Description of Artificial Sequence: Synthetic oligonucleotide
acauuaccugguaacgaaa

SEQ ID NO: 1276094 - RNA, 19 nt, Artificial Sequence
  Description of Artificial Sequence: Synthetic oligonucleotide
gaugccugacagaaaacau

SEQ ID NO: 1276095 - RNA, 19 nt, Artificial Sequence
  Description of Artificial Sequence: Synthetic oligonucleotide
gguccuuucugauugcagu

SEQ ID NO: 1276096 - RNA, 19 nt, Artificial Sequence
  Description of Artificial Sequence: Synthetic oligonucleotide
cagucugugguggugccuc

SEQ ID NO: 1276097 - RNA, 19 nt, Artificial Sequence
  Description of Artificial Sequence: Synthetic oligonucleotide
ggagaaugcuguuccaugu

SEQ ID NO: 1276098 - RNA, 19 nt, Artificial Sequence
  Description of Artificial Sequence: Synthetic oligonucleotide
ccaagaaauccacucagaa

SEQ ID NO: 1276099 - RNA, 19 nt, Artificial Sequence
  Description of Artificial Sequence: Synthetic oligonucleotide
gauggggcauuuauagggu

SEQ ID NO: 1276100 - RNA, 19 nt, Artificial Sequence
  Description of Artificial Sequence: Synthetic oligonucleotide
ccgaggaucucccuucaag

SEQ ID NO: 1276101 - RNA, 19 nt, Artificial Sequence
  Description of Artificial Sequence: Synthetic oligonucleotide
gacgggaucucuuguccua

SEQ ID NO: 1276102 - RNA, 19 nt, Artificial Sequence
  Description of Artificial Sequence: Synthetic oligonucleotide
auaugaaguugcagcccug

SEQ ID NO: 1276103 - RNA, 19 nt, Artificial Sequence
  Description of Artificial Sequence: Synthetic oligonucleotide
agaccccuggucccuguga

SEQ ID NO: 1276104 - RNA, 19 nt, Artificial Sequence
  Description of Artificial Sequence: Synthetic oligonucleotide
cacagauggggcauuuaua

SEQ ID NO: 1276105 - RNA, 19 nt, Artificial Sequence
  Description of Artificial Sequence: Synthetic oligonucleotide
acaaggcauccuucacccu

SEQ ID NO: 1276106 - RNA, 19 nt, Artificial Sequence
  Description of Artificial Sequence: Synthetic oligonucleotide
gggcaaugaaaguaugucu

SEQ ID NO: 1276107 - RNA, 19 nt, Artificial Sequence
  Description of Artificial Sequence: Synthetic oligonucleotide
gaauuccuauagaagguuu

SEQ ID NO: 1276108 - RNA, 19 nt, Artificial Sequence
  Description of Artificial Sequence: Synthetic oligonucleotide
ggaguuagaaauaccugcu

SEQ ID NO: 1276109 - RNA, 19 nt, Artificial Sequence
  Description of Artificial Sequence: Synthetic oligonucleotide
cacguacuguuccuucuga

SEQ ID NO: 1276110 - RNA, 19 nt, Artificial Sequence
  Description of Artificial Sequence: Synthetic oligonucleotide
auggggcaaugaaaguaug

SEQ ID NO: 1276111 - RNA, 19 nt, Artificial Sequence
  Description of Artificial Sequence: Synthetic oligonucleotide
cuccaaagcgaugcagcuc

SEQ ID NO: 1276112 - RNA, 19 nt, Artificial Sequence
  Description of Artificial Sequence: Synthetic oligonucleotide
  modified_base (10)..(10): a, c, u, g, unknown or other
ccuggacacnguuuccuca

SEQ ID NO: 1276113 - RNA, 19 nt, Artificial Sequence
  Description of Artificial Sequence: Synthetic oligonucleotide
gacgccaauccacugccau

SEQ ID NO: 1276114 - RNA, 19 nt, Artificial Sequence
  Description of Artificial Sequence: Synthetic oligonucleotide
ggguccaaaguaagagacc

SEQ ID NO: 1276115 - RNA, 19 nt, Artificial Sequence
  Description of Artificial Sequence: Synthetic oligonucleotide
uccgaggaucucccuucaa

SEQ ID NO: 1276116 - RNA, 19 nt, Artificial Sequence
  Description of Artificial Sequence: Synthetic oligonucleotide
cuggaaacagagcuuccgu

SEQ ID NO: 1276117 - RNA, 19 nt, Artificial Sequence
  Description of Artificial Sequence: Synthetic oligonucleotide
ccaaggcagucuguggugg

SEQ ID NO: 1276118 - RNA, 19 nt, Artificial Sequence
  Description of Artificial Sequence: Synthetic oligonucleotide
gaaccucuggccgcagcca

SEQ ID NO: 1276119 - RNA, 19 nt, Artificial Sequence
  Description of Artificial Sequence: Synthetic oligonucleotide
uagucaggucagguuugga

SEQ ID NO: 1276120 - RNA, 19 nt, Artificial Sequence
  Description of Artificial Sequence: Synthetic oligonucleotide
gcaggugagucuugguauc

SEQ ID NO: 1276121 - RNA, 19 nt, Artificial Sequence
  Description of Artificial Sequence: Synthetic oligonucleotide
acgccaauccacugccaua

SEQ ID NO: 1276122 - RNA, 19 nt, Artificial Sequence
  Description of Artificial Sequence: Synthetic oligonucleotide
gguggaaaacaagcuguga

SEQ ID NO: 1276123 - RNA, 19 nt, Artificial Sequence
  Description of Artificial Sequence: Synthetic oligonucleotide
gcgcaagccugauaaguca

SEQ ID NO: 1276124 - RNA, 19 nt, Artificial Sequence
  Description of Artificial Sequence: Synthetic oligonucleotide
cccauagucugcuauguua

SEQ ID NO: 1276125 - RNA, 19 nt, Artificial Sequence
  Description of Artificial Sequence: Synthetic oligonucleotide
cucucccuccaaccuucag

SEQ ID NO: 1276126 - RNA, 19 nt, Artificial Sequence
  Description of Artificial Sequence: Synthetic oligonucleotide
gaccucugaauaaaccuuu

SEQ ID NO: 1276127 - RNA, 19 nt, Artificial Sequence
  Description of Artificial Sequence: Synthetic oligonucleotide
cugcuauguuagucagguc

SEQ ID NO: 1276128 - RNA, 19 nt, Artificial Sequence
  Description of Artificial Sequence: Synthetic oligonucleotide
ugucuccacuguuccugau

SEQ ID NO: 1276129 - RNA, 19 nt, Artificial Sequence
  Description of Artificial Sequence: Synthetic oligonucleotide
gugaucucugaugcuuauc

SEQ ID NO: 1276130 - RNA, 19 nt, Artificial Sequence
  Description of Artificial Sequence: Synthetic oligonucleotide
agucuccgaggaucucccu

SEQ ID NO: 1276131 - RNA, 19 nt, Artificial Sequence
  Description of Artificial Sequence: Synthetic oligonucleotide
ugguagcgcaagccugaua

SEQ ID NO: 1276132 - RNA, 19 nt, Artificial Sequence
  Description of Artificial Sequence: Synthetic oligonucleotide
caagccugauaagucacua

SEQ ID NO: 1276133 - RNA, 19 nt, Artificial Sequence
  Description of Artificial Sequence: Synthetic oligonucleotide
ugguggugccucaccugau

SEQ ID NO: 1276134 - RNA, 19 nt, Artificial Sequence
  Description of Artificial Sequence: Synthetic oligonucleotide
ucuuccccauagucugcua

SEQ ID NO: 1276135 - RNA, 19 nt, Artificial Sequence
  Description of Artificial Sequence: Synthetic oligonucleotide
cagcaugaaaucccacgua

SEQ ID NO: 1276136 - RNA, 19 nt, Artificial Sequence
  Description of Artificial Sequence: Synthetic oligonucleotide
gccacaaggcauccuucac

SEQ ID NO: 1276137 - RNA, 19 nt, Artificial Sequence
  Description of Artificial Sequence: Synthetic oligonucleotide
cauagucugcuauguuagu

SEQ ID NO: 1276138 - RNA, 19 nt, Artificial Sequence
  Description of Artificial Sequence: Synthetic oligonucleotide
cgccaauccacugccauag

SEQ ID NO: 1276139 - RNA, 19 nt, Artificial Sequence
  Description of Artificial Sequence: Synthetic oligonucleotide
gcuuaucgaggcuggagcu

SEQ ID NO: 1276140 - RNA, 19 nt, Artificial Sequence
  Description of Artificial Sequence: Synthetic oligonucleotide
cgcaagccugauaagucac

SEQ ID NO: 1276141 - RNA, 19 nt, Artificial Sequence
  Description of Artificial Sequence: Synthetic oligonucleotide
gaguagaauccaggugucu

SEQ ID NO: 1276142 - RNA, 19 nt, Artificial Sequence
  Description of Artificial Sequence: Synthetic oligonucleotide
cacucucacccaggaaauc

SEQ ID NO: 1276143 - RNA, 19 nt, Artificial Sequence
  Description of Artificial Sequence: Synthetic oligonucleotide
accucugaauaaaccuuuu

SEQ ID NO: 1276144 - RNA, 19 nt, Artificial Sequence
  Description of Artificial Sequence: Synthetic oligonucleotide
gugugaucucugaugcuua

SEQ ID NO: 1276145 - RNA, 19 nt, Artificial Sequence
  Description of Artificial Sequence: Synthetic oligonucleotide
gagcuucgcagaaaggcuu

SEQ ID NO: 1276146 - RNA, 19 nt, Artificial Sequence
  Description of Artificial Sequence: Synthetic oligonucleotide
  modified_base (2)..(2): a, c, u, g, unknown or other
cnguuuccucacccacauc

SEQ ID NO: 1276147 - RNA, 19 nt, Artificial Sequence
  Description of Artificial Sequence: Synthetic oligonucleotide
gccaagaaauccacucaga

SEQ ID NO: 1276148 - RNA, 19 nt, Artificial Sequence
  Description of Artificial Sequence: Synthetic oligonucleotide
cucagacgggaucucuugu

SEQ ID NO: 1276149 - RNA, 19 nt, Artificial Sequence
  Description of Artificial Sequence: Synthetic oligonucleotide
cuuccccaggugugaucuc

SEQ ID NO: 1276150 - RNA, 19 nt, Artificial Sequence
  Description of Artificial Sequence: Synthetic oligonucleotide
ccagcaugaaaucccacgu

SEQ ID NO: 1276151 - RNA, 19 nt, Artificial Sequence
  Description of Artificial Sequence: Synthetic oligonucleotide
ccugguaacgaaacugccu

SEQ ID NO: 1276152 - RNA, 19 nt, Artificial Sequence
  Description of Artificial Sequence: Synthetic oligonucleotide
aggugagucuugguaucuu

SEQ ID NO: 1276153 - RNA, 19 nt, Artificial Sequence
  Description of Artificial Sequence: Synthetic oligonucleotide
  modified_base (11)..(11): a, c, u, g, unknown or other
gccuggacacnguuuccuc

SEQ ID NO: 1276154 - RNA, 19 nt, Artificial Sequence
  Description of Artificial Sequence: Synthetic oligonucleotide
ccauguccuggucucuuuc

SEQ ID NO: 1276155 - RNA, 19 nt, Artificial Sequence
  Description of Artificial Sequence: Synthetic oligonucleotide
ggugccucaccugaugccu

SEQ ID NO: 1276156 - RNA, 19 nt, Artificial Sequence
  Description of Artificial Sequence: Synthetic oligonucleotide
gucugugguggugccucac

SEQ ID NO: 1276157 - RNA, 19 nt, Artificial Sequence
  Description of Artificial Sequence: Synthetic oligonucleotide
aucccacguacuguuccuu

SEQ ID NO: 1276158 - RNA, 19 nt, Artificial Sequence
  Description of Artificial Sequence: Synthetic oligonucleotide
ccuagaacuuggacgccaa

SEQ ID NO: 1276159 - RNA, 19 nt, Artificial Sequence
  Description of Artificial Sequence: Synthetic oligonucleotide
gcaugaaaucccacguacu

SEQ ID NO: 1276160 - RNA, 19 nt, Artificial Sequence
  Description of Artificial Sequence: Synthetic oligonucleotide
uaccugcuccugagaccau

SEQ ID NO: 1276161 - RNA, 19 nt, Artificial Sequence
  Description of Artificial Sequence: Synthetic oligonucleotide
accugaugccugacagaaa

SEQ ID NO: 1276162 - RNA, 19 nt, Artificial Sequence
  Description of Artificial Sequence: Synthetic oligonucleotide
gugaacccuuugaugucua

SEQ ID NO: 1276163 - RNA, 19 nt, Artificial Sequence
  Description of Artificial Sequence: Synthetic oligonucleotide
accucuggccgcagccacu

SEQ ID NO: 1276164 - RNA, 19 nt, Artificial Sequence
  Description of Artificial Sequence: Synthetic oligonucleotide
ccuccaaagcgaugcagcu

SEQ ID NO: 1276165 - RNA, 19 nt, Artificial Sequence
  Description of Artificial Sequence: Synthetic oligonucleotide
caggugagucuugguaucu

SEQ ID NO: 1276166 - RNA, 19 nt, Artificial Sequence
  Description of Artificial Sequence: Synthetic oligonucleotide
cuagaacuuggacgccaau

SEQ ID NO: 1276167 - RNA, 19 nt, Artificial Sequence
  Description of Artificial Sequence: Synthetic oligonucleotide
ccaaagcgaugcagcucac

SEQ ID NO: 1276168 - RNA, 19 nt, Artificial Sequence
  Description of Artificial Sequence: Synthetic oligonucleotide
cccagacauuaccugguaa

SEQ ID NO: 1276169 - RNA, 19 nt, Artificial Sequence
  Description of Artificial Sequence: Synthetic oligonucleotide
guguggcuaugggcagggc

SEQ ID NO: 1276170 - RNA, 19 nt, Artificial Sequence
  Description of Artificial Sequence: Synthetic oligonucleotide
gcucacucucacccaggaa

SEQ ID NO: 1276171 - RNA, 19 nt, Artificial Sequence
  Description of Artificial Sequence: Synthetic oligonucleotide
gccugacagaaaacaucca

SEQ ID NO: 1276172 - RNA, 19 nt, Artificial Sequence
  Description of Artificial Sequence: Synthetic oligonucleotide
cagcuacuaaagccauuau

SEQ ID NO: 1276173 - RNA, 19 nt, Artificial Sequence
  Description of Artificial Sequence: Synthetic oligonucleotide
cguaguugucucagggucu

SEQ ID NO: 1276174 - RNA, 19 nt, Artificial Sequence
  Description of Artificial Sequence: Synthetic oligonucleotide
cuugccgcaguggguacau

SEQ ID NO: 1276175 - RNA, 19 nt, Artificial Sequence
  Description of Artificial Sequence: Synthetic oligonucleotide
gccgcaguggguacauuua

SEQ ID NO: 1276176 - RNA, 19 nt, Artificial Sequence
  Description of Artificial Sequence: Synthetic oligonucleotide
ggcccagacauuaccuggu

SEQ ID NO: 1276177 - RNA, 19 nt, Artificial Sequence
  Description of Artificial Sequence: Synthetic oligonucleotide
gcaagccugauaagucacu

SEQ ID NO: 1276178 - RNA, 19 nt, Artificial Sequence
  Description of Artificial Sequence: Synthetic oligonucleotide
gcgcuugccgcagugggua

SEQ ID NO: 1276179 - RNA, 19 nt, Artificial Sequence
  Description of Artificial Sequence: Synthetic oligonucleotide
gcccagacauuaccuggua

SEQ ID NO: 1276180 - RNA, 19 nt, Artificial Sequence
  Description of Artificial Sequence: Synthetic oligonucleotide
cuucuuccccaggugugau

SEQ ID NO: 1276181 - RNA, 19 nt, Artificial Sequence
  Description of Artificial Sequence: Synthetic oligonucleotide
ccccaggugugaucucuga

SEQ ID NO: 1276182 - RNA, 19 nt, Artificial Sequence
  Description of Artificial Sequence: Synthetic oligonucleotide
cgcaguggguacauuuaua

SEQ ID NO: 1276183 - RNA, 19 nt, Artificial Sequence
  Description of Artificial Sequence: Synthetic oligonucleotide
uugccgcaguggguacauu

SEQ ID NO: 1276184 - RNA, 19 nt, Artificial Sequence
  Description of Artificial Sequence: Synthetic oligonucleotide
ccuucacccucgaaggcuu

SEQ ID NO: 1276185 - RNA, 19 nt, Artificial Sequence
  Description of Artificial Sequence: Synthetic oligonucleotide
gccucaccugaugccugac

SEQ ID NO: 1276186 - RNA, 19 nt, Artificial Sequence
  Description of Artificial Sequence: Synthetic oligonucleotide
ccgcaguggguacauuuau

SEQ ID NO: 1276187 - RNA, 19 nt, Artificial Sequence
  Description of Artificial Sequence: Synthetic oligonucleotide
cccaggugugaucucugau

SEQ ID NO: 1276188 - RNA, 19 nt, Artificial Sequence
  Description of Artificial Sequence: Synthetic oligonucleotide
cgggaucucuuguccuaga

SEQ ID NO: 1276189 - RNA, 19 nt, Artificial Sequence
  Description of Artificial Sequence: Synthetic oligonucleotide
  modified_base (16)..(16): a, c, u, g, unknown or other
ccacugccuggacacnguu

SEQ ID NO: 1276190 - RNA, 19 nt, Artificial Sequence
  Description of Artificial Sequence: Synthetic oligonucleotide
ccacugccauagucuccga

SEQ ID NO: 1276191 - RNA, 19 nt, Artificial Sequence
  Description of Artificial Sequence: Synthetic oligonucleotide
gcuucgcagaaaggcuuuu

SEQ ID NO: 1276192 - RNA, 19 nt, Artificial Sequence
  Description of Artificial Sequence: Synthetic oligonucleotide
cuccuggggcccagacauu

SEQ ID NO: 1276193 - RNA, 19 nt, Artificial Sequence
  Description of Artificial Sequence: Synthetic oligonucleotide
ccccauagucugcuauguu

SEQ ID NO: 1276194 - RNA, 19 nt, Artificial Sequence
  Description of Artificial Sequence: Synthetic oligonucleotide
aaugguaccacccaauaac

SEQ ID NO: 1276195 - RNA, 19 nt, Artificial Sequence
  Description of Artificial Sequence: Synthetic oligonucleotide
ucuuauuuaaguauuucgg

SEQ ID NO: 1276196 - RNA, 19 nt, Artificial Sequence
  Description of Artificial Sequence: Synthetic oligonucleotide
auuauauggacuaacaauc

SEQ ID NO: 1276197 - RNA, 19 nt, Artificial Sequence
  Description of Artificial Sequence: Synthetic oligonucleotide
ugguguuuuaguuugacgc

SEQ ID NO: 1276198 - RNA, 19 nt, Artificial Sequence
  Description of Artificial Sequence: Synthetic oligonucleotide
uggacuaacaaucauucca

SEQ ID NO: 1276199 - RNA, 19 nt, Artificial Sequence
  Description of Artificial Sequence: Synthetic oligonucleotide
aaaucuaauaaaggaguac

SEQ ID NO: 1276200 - RNA, 19 nt, Artificial Sequence
  Description of Artificial Sequence: Synthetic oligonucleotide
cuucaggccacuaacaagg

SEQ ID NO: 1276201 - RNA, 19 nt, Artificial Sequence
  Description of Artificial Sequence: Synthetic oligonucleotide
caaugucucguaaagacgg

SEQ ID NO: 1276202 - RNA, 19 nt, Artificial Sequence
  Description of Artificial Sequence: Synthetic oligonucleotide
gacuaaaucuaauaaagga

SEQ ID NO: 1276203 - RNA, 19 nt, Artificial Sequence
  Description of Artificial Sequence: Synthetic oligonucleotide
gauuuaguagguuugcuac

SEQ ID NO: 1276204 - RNA, 19 nt, Artificial Sequence
  Description of Artificial Sequence: Synthetic oligonucleotide
auauugccugcucacaucc

SEQ ID NO: 1276205 - RNA, 19 nt, Artificial Sequence
  Description of Artificial Sequence: Synthetic oligonucleotide
uaaaggaguacuauuauua

SEQ ID NO: 1276206 - RNA, 19 nt, Artificial Sequence
  Description of Artificial Sequence: Synthetic oligonucleotide
ucacauccaaaauugauug

SEQ ID NO: 1276207 - RNA, 19 nt, Artificial Sequence
  Description of Artificial Sequence: Synthetic oligonucleotide
aaucuaauaaaggaguacu

SEQ ID NO: 1276208 - RNA, 19 nt, Artificial Sequence
  Description of Artificial Sequence: Synthetic oligonucleotide
aacacuguagccucuaaga

SEQ ID NO: 1276209 - RNA, 19 nt, Artificial Sequence
  Description of Artificial Sequence: Synthetic oligonucleotide
auccaaaauugauugcucc

SEQ ID NO: 1276210 - RNA, 19 nt, Artificial Sequence
  Description of Artificial Sequence: Synthetic oligonucleotide
ucaaugucucguaaagacg

SEQ ID NO: 1276211 - RNA, 19 nt, Artificial Sequence
  Description of Artificial Sequence: Synthetic oligonucleotide
uuccaaugaacuuugcucc

SEQ ID NO: 1276212 - RNA, 19 nt, Artificial Sequence
  Description of Artificial Sequence: Synthetic oligonucleotide
acuaaaucuaauaaaggag

SEQ ID NO: 1276213 - RNA, 19 nt, Artificial Sequence
  Description of Artificial Sequence: Synthetic oligonucleotide
acaauuauuaaaugaacau

SEQ ID NO: 1276214 - RNA, 19 nt, Artificial Sequence
  Description of Artificial Sequence: Synthetic oligonucleotide
ugugauacaggauccaucu

SEQ ID NO: 1276215 - RNA, 19 nt, Artificial Sequence
  Description of Artificial Sequence: Synthetic oligonucleotide
ucuaauuuucaaauagcgu

SEQ ID NO: 1276216 - RNA, 19 nt, Artificial Sequence
  Description of Artificial Sequence: Synthetic oligonucleotide
cuaacaaucauuccaauga

SEQ ID NO: 1276217 - RNA, 19 nt, Artificial Sequence
  Description of Artificial Sequence: Synthetic oligonucleotide
guaaagacggauuaggauc

SEQ ID NO: 1276218 - RNA, 19 nt, Artificial Sequence
  Description of Artificial Sequence: Synthetic oligonucleotide
uccuuguacgcauagacug

SEQ ID NO: 1276219 - RNA, 19 nt, Artificial Sequence
  Description of Artificial Sequence: Synthetic oligonucleotide
uacuuuaucaacuggcugu

SEQ ID NO: 1276220 - RNA, 19 nt, Artificial Sequence
  Description of Artificial Sequence: Synthetic oligonucleotide
uuucaaacacgguaaagga

SEQ ID NO: 1276221 - RNA, 19 nt, Artificial Sequence
  Description of Artificial Sequence: Synthetic oligonucleotide
aacacaauuauuaaaugaa

SEQ ID NO: 1276222 - RNA, 19 nt, Artificial Sequence
  Description of Artificial Sequence: Synthetic oligonucleotide
gauugcuccuaucaacucg

SEQ ID NO: 1276223 - RNA, 19 nt, Artificial Sequence
  Description of Artificial Sequence: Synthetic oligonucleotide
agucaagaauuccucagcg

SEQ ID NO: 1276224 - RNA, 19 nt, Artificial Sequence
  Description of Artificial Sequence: Synthetic oligonucleotide
uuuucuaucugagucaaga

SEQ ID NO: 1276225 - RNA, 19 nt, Artificial Sequence
  Description of Artificial Sequence: Synthetic oligonucleotide
aaguauuucgguuugcaua

SEQ ID NO: 1276226 - RNA, 19 nt, Artificial Sequence
  Description of Artificial Sequence: Synthetic oligonucleotide
uccuuagacacuccaaaag

SEQ ID NO: 1276227 - RNA, 19 nt, Artificial Sequence
  Description of Artificial Sequence: Synthetic oligonucleotide
uaaagacggauuaggauca

SEQ ID NO: 1276228 - RNA, 19 nt, Artificial Sequence
  Description of Artificial Sequence: Synthetic oligonucleotide
uaauagcccaaucaccucc

SEQ ID NO: 1276229 - RNA, 19 nt, Artificial Sequence
  Description of Artificial Sequence: Synthetic oligonucleotide
agaagacuaaaucuaauaa

SEQ ID NO: 1276230 - RNA, 19 nt, Artificial Sequence
  Description of Artificial Sequence: Synthetic oligonucleotide
aaugguucgaggguaaaug

SEQ ID NO: 1276231 - RNA, 19 nt, Artificial Sequence
  Description of Artificial Sequence: Synthetic oligonucleotide
ucguacuuuaucaacuggc

SEQ ID NO: 1276232 - RNA, 19 nt, Artificial Sequence
  Description of Artificial Sequence: Synthetic oligonucleotide
uuauauggacuaacaauca

SEQ ID NO: 1276233 - RNA, 19 nt, Artificial Sequence
  Description of Artificial Sequence: Synthetic oligonucleotide
uuucgguuugcauauuucc

SEQ ID NO: 1276234 - RNA, 19 nt, Artificial Sequence
  Description of Artificial Sequence: Synthetic oligonucleotide
uguuugugauacaggaucc

SEQ ID NO: 1276235 - RNA, 19 nt, Artificial Sequence
  Description of Artificial Sequence: Synthetic oligonucleotide
ucugcaaacaaguuagguc

SEQ ID NO: 1276236 - RNA, 19 nt, Artificial Sequence
  Description of Artificial Sequence: Synthetic oligonucleotide
uacgcauagacuguaggcg

SEQ ID NO: 1276237 - RNA, 19 nt, Artificial Sequence
  Description of Artificial Sequence: Synthetic oligonucleotide
gcauauuucccacugaucc

SEQ ID NO: 1276238 - RNA, 19 nt, Artificial Sequence
  Description of Artificial Sequence: Synthetic oligonucleotide
uugauugcuccuaucaacu

SEQ ID NO: 1276239 - RNA, 19 nt, Artificial Sequence
  Description of Artificial Sequence: Synthetic oligonucleotide
acuaacaaucauuccaaug

SEQ ID NO: 1276240 - RNA, 19 nt, Artificial Sequence
  Description of Artificial Sequence: Synthetic oligonucleotide
aguuuuaccuugcuggucu

SEQ ID NO: 1276241 - RNA, 19 nt, Artificial Sequence
  Description of Artificial Sequence: Synthetic oligonucleotide
uuauuuaaguauuucgguu

SEQ ID NO: 1276242 - RNA, 19 nt, Artificial Sequence
  Description of Artificial Sequence: Synthetic oligonucleotide
aacaaucauuccaaugaac

SEQ ID NO: 1276243 - RNA, 19 nt, Artificial Sequence
  Description of Artificial Sequence: Synthetic oligonucleotide
aaaggaguacuauuauuaa

SEQ ID NO: 1276244 - RNA, 19 nt, Artificial Sequence
  Description of Artificial Sequence: Synthetic oligonucleotide
ucgauuauauggacuaaca

SEQ ID NO: 1276245 - RNA, 19 nt, Artificial Sequence
  Description of Artificial Sequence: Synthetic oligonucleotide
cacccaauaacacuguagc

SEQ ID NO: 1276246 - RNA, 19 nt, Artificial Sequence
  Description of Artificial Sequence: Synthetic oligonucleotide
cacgugagcaugcaaaucc

SEQ ID NO: 1276247 - RNA, 19 nt, Artificial Sequence
  Description of Artificial Sequence: Synthetic oligonucleotide
uucgguuugcauauuuccc

SEQ ID NO: 1276248 - RNA, 19 nt, Artificial Sequence
  Description of Artificial Sequence: Synthetic oligonucleotide
aaaccucaugaacugugag

SEQ ID NO: 1276249 - RNA, 19 nt, Artificial Sequence
  Description of Artificial Sequence: Synthetic oligonucleotide
uccuaauagcccaaucacc

SEQ ID NO: 1276250 - RNA, 19 nt, Artificial Sequence
  Description of Artificial Sequence: Synthetic oligonucleotide
agagccaagguuucugagg

SEQ ID NO: 1276251 - RNA, 19 nt, Artificial Sequence
  Description of Artificial Sequence: Synthetic oligonucleotide
uuuuguuuggaaggggucc

SEQ ID NO: 1276252 - RNA, 19 nt, Artificial Sequence
  Description of Artificial Sequence: Synthetic oligonucleotide
cucuacgucuccuuguacg

SEQ ID NO: 1276253 - RNA, 19 nt, Artificial Sequence
  Description of Artificial Sequence: Synthetic oligonucleotide
acugaggucuuauuuaagu

SEQ ID NO: 1276254 - RNA, 19 nt, Artificial Sequence
  Description of Artificial Sequence: Synthetic oligonucleotide
aagguaucaguuggaaggg

SEQ ID NO: 1276255 - RNA, 19 nt, Artificial Sequence
  Description of Artificial Sequence: Synthetic oligonucleotide
ugaggucuuauuuaaguau

SEQ ID NO: 1276256 - RNA, 19 nt, Artificial Sequence
  Description of Artificial Sequence: Synthetic oligonucleotide
ugagcacagggucaaacca

SEQ ID NO: 1276257 - RNA, 19 nt, Artificial Sequence
  Description of Artificial Sequence: Synthetic oligonucleotide
ucaacucgagguauguaug

SEQ ID NO: 1276258 - RNA, 19 nt, Artificial Sequence
  Description of Artificial Sequence: Synthetic oligonucleotide
uuaucaacuggcuguggcc

SEQ ID NO: 1276259 - RNA, 19 nt, Artificial Sequence
  Description of Artificial Sequence: Synthetic oligonucleotide
ucuaauaaaggaguacuau

SEQ ID NO: 1276260 - RNA, 19 nt, Artificial Sequence
  Description of Artificial Sequence: Synthetic oligonucleotide
uggccaaggaguuuuaccu

SEQ ID NO: 1276261 - RNA, 19 nt, Artificial Sequence
  Description of Artificial Sequence: Synthetic oligonucleotide
auggacuaacaaucauucc

SEQ ID NO: 1276262 - RNA, 19 nt, Artificial Sequence
  Description of Artificial Sequence: Synthetic oligonucleotide
uuuacccaggucagaacag

SEQ ID NO: 1276263 - RNA, 19 nt, Artificial Sequence
  Description of Artificial Sequence: Synthetic oligonucleotide
agacuaaaucuaauaaagg

SEQ ID NO: 1276264 - RNA, 19 nt, Artificial Sequence
  Description of Artificial Sequence: Synthetic oligonucleotide
caauacaauuaacaucccc

SEQ ID NO: 1276265 - RNA, 19 nt, Artificial Sequence
  Description of Artificial Sequence: Synthetic oligonucleotide
aaggaguacuauuauuaau

SEQ ID NO: 1276266 - RNA, 19 nt, Artificial Sequence
  Description of Artificial Sequence: Synthetic oligonucleotide
acuucgauuauauggacua

SEQ ID NO: 1276267 - RNA, 19 nt, Artificial Sequence
  Description of Artificial Sequence: Synthetic oligonucleotide
cuaauuuucaaauagcguu

SEQ ID NO: 1276268 - RNA, 19 nt, Artificial Sequence
  Description of Artificial Sequence: Synthetic oligonucleotide
guagguuugcuacuuuucc

SEQ ID NO: 1276269 - RNA, 19 nt, Artificial Sequence
  Description of Artificial Sequence: Synthetic oligonucleotide
aguuggaagggaucaagug

SEQ ID NO: 1276270 - RNA, 19 nt, Artificial Sequence
  Description of Artificial Sequence: Synthetic oligonucleotide
acucacucguacuuuauca

SEQ ID NO: 1276271 - RNA, 19 nt, Artificial Sequence
  Description of Artificial Sequence: Synthetic oligonucleotide
auucuauccauggggacac

SEQ ID NO: 1276272 - RNA, 19 nt, Artificial Sequence
  Description of Artificial Sequence: Synthetic oligonucleotide
aucaacucgagguauguau

SEQ ID NO: 1276273 - RNA, 19 nt, Artificial Sequence
  Description of Artificial Sequence: Synthetic oligonucleotide
aguuaggucagaaucccgg

SEQ ID NO: 1276274 - RNA, 19 nt, Artificial Sequence
  Description of Artificial Sequence: Synthetic oligonucleotide
aguuuuaguauuaaaggaa

SEQ ID NO: 1276275 - RNA, 19 nt, Artificial Sequence
  Description of Artificial Sequence: Synthetic oligonucleotide
ucgaggguaaaugauggcc

SEQ ID NO: 1276276 - RNA, 19 nt, Artificial Sequence
  Description of Artificial Sequence: Synthetic oligonucleotide
agauucuauccauggggac

SEQ ID NO: 1276277 - RNA, 19 nt, Artificial Sequence
  Description of Artificial Sequence: Synthetic oligonucleotide
acgcauagacuguaggcgg

SEQ ID NO: 1276278 - RNA, 19 nt, Artificial Sequence
  Description of Artificial Sequence: Synthetic oligonucleotide
cucguaaagacggauuagg

SEQ ID NO: 1276279 - RNA, 19 nt, Artificial Sequence
  Description of Artificial Sequence: Synthetic oligonucleotide
ucguaaagacggauuagga

SEQ ID NO: 1276280 - RNA, 19 nt, Artificial Sequence
  Description of Artificial Sequence: Synthetic oligonucleotide
uuucuaucuauuuccacuu

SEQ ID NO: 1276281 - RNA, 19 nt, Artificial Sequence
  Description of Artificial Sequence: Synthetic oligonucleotide
ucuacgucuccuuguacgc

SEQ ID NO: 1276282 - RNA, 19 nt, Artificial Sequence
  Description of Artificial Sequence: Synthetic oligonucleotide
aacacgguaaaggauuacu

SEQ ID NO: 1276283 - RNA, 19 nt, Artificial Sequence
  Description of Artificial Sequence: Synthetic oligonucleotide
aguuucugcaaacaaguua

SEQ ID NO: 1276284 - RNA, 19 nt, Artificial Sequence
  Description of Artificial Sequence: Synthetic oligonucleotide
gaagauuuaguagguuugc

SEQ ID NO: 1276285 - RNA, 19 nt, Artificial Sequence
  Description of Artificial Sequence: Synthetic oligonucleotide
gagucaagaauuccucagc

SEQ ID NO: 1276286 - RNA, 19 nt, Artificial Sequence
  Description of Artificial Sequence: Synthetic oligonucleotide
ucuuucucggacucuacgu

SEQ ID NO: 1276287 - RNA, 19 nt, Artificial Sequence
  Description of Artificial Sequence: Synthetic oligonucleotide
uaucaguuggaagggauca

SEQ ID NO: 1276288 - RNA, 19 nt, Artificial Sequence
  Description of Artificial Sequence: Synthetic oligonucleotide
aaacaaguuaggucagaau

SEQ ID NO: 1276289 - RNA, 19 nt, Artificial Sequence
  Description of Artificial Sequence: Synthetic oligonucleotide
aagauucuauccaugggga

SEQ ID NO: 1276290 - RNA, 19 nt, Artificial Sequence
  Description of Artificial Sequence: Synthetic oligonucleotide
aaaggauuacuucgauuau

SEQ ID NO: 1276291 - RNA, 19 nt, Artificial Sequence
  Description of Artificial Sequence: Synthetic oligonucleotide
aacuuugcuccuccucuag

SEQ ID NO: 1276292 - RNA, 19 nt, Artificial Sequence
  Description of Artificial Sequence: Synthetic oligonucleotide
uuugcuacuuuuccucuuc

SEQ ID NO: 1276293 - RNA, 19 nt, Artificial Sequence
  Description of Artificial Sequence: Synthetic oligonucleotide
uacuucgauuauauggacu

SEQ ID NO: 1276294 - RNA, 19 nt, Artificial Sequence
  Description of Artificial Sequence: Synthetic oligonucleotide
uaggucagaaucccggcga

SEQ ID NO: 1276295 - RNA, 19 nt, Artificial Sequence
  Description of Artificial Sequence: Synthetic oligonucleotide
uaauuuacccaggucagaa

SEQ ID NO: 1276296 - RNA, 19 nt, Artificial Sequence
  Description of Artificial Sequence: Synthetic oligonucleotide
aauagcccaaucaccuccg

SEQ ID NO: 1276297 - RNA, 19 nt, Artificial Sequence
  Description of Artificial Sequence: Synthetic oligonucleotide
aguuugacgccccucaaaa

SEQ ID NO: 1276298 - RNA, 19 nt, Artificial Sequence
  Description of Artificial Sequence: Synthetic oligonucleotide
ugcuuaguguuuuccuuag

SEQ ID NO: 1276299 - RNA, 19 nt, Artificial Sequence
  Description of Artificial Sequence: Synthetic oligonucleotide
uauguaugaauccguccaa

SEQ ID NO: 1276300 - RNA, 19 nt, Artificial Sequence
  Description of Artificial Sequence: Synthetic oligonucleotide
ugcuccuaucaacucgagg

SEQ ID NO: 1276301 - RNA, 19 nt, Artificial Sequence
  Description of Artificial Sequence: Synthetic oligonucleotide
auaaaggaguacuauuauu

SEQ ID NO: 1276302 - RNA, 19 nt, Artificial Sequence
  Description of Artificial Sequence: Synthetic oligonucleotide
auuuaguagguuugcuacu

SEQ ID NO: 1276303 - RNA, 19 nt, Artificial Sequence
  Description of Artificial Sequence: Synthetic oligonucleotide
ugugucaaugucucguaaa

SEQ ID NO: 1276304 - RNA, 19 nt, Artificial Sequence
  Description of Artificial Sequence: Synthetic oligonucleotide
accaacucuagaaauggag

SEQ ID NO: 1276305 - RNA, 19 nt, Artificial Sequence
  Description of Artificial Sequence: Synthetic oligonucleotide
uucgauuauauggacuaac

SEQ ID NO: 1276306 - RNA, 19 nt, Artificial Sequence
  Description of Artificial Sequence: Synthetic oligonucleotide
cugguguuuuaguuugacg

SEQ ID NO: 1276307 - RNA, 19 nt, Artificial Sequence
  Description of Artificial Sequence: Synthetic oligonucleotide
ucacucguacuuuaucaac

SEQ ID NO: 1276308 - RNA, 19 nt, Artificial Sequence
  Description of Artificial Sequence: Synthetic oligonucleotide
aauccguccaauacaauua

SEQ ID NO: 1276309 - RNA, 19 nt, Artificial Sequence
  Description of Artificial Sequence: Synthetic oligonucleotide
cacgguaaaggauuacuuc

SEQ ID NO: 1276310 - RNA, 19 nt, Artificial Sequence
  Description of Artificial Sequence: Synthetic oligonucleotide
gauucuauccauggggaca

SEQ ID NO: 1276311 - RNA, 19 nt, Artificial Sequence
  Description of Artificial Sequence: Synthetic oligonucleotide
acacugcuaugagaaaacc

SEQ ID NO: 1276312 - RNA, 19 nt, Artificial Sequence
  Description of Artificial Sequence: Synthetic oligonucleotide
guaccacccaauaacacug

SEQ ID NO: 1276313 - RNA, 19 nt, Artificial Sequence
  Description of Artificial Sequence: Synthetic oligonucleotide
aaacacgguaaaggauuac

SEQ ID NO: 1276314 - RNA, 19 nt, Artificial Sequence
  Description of Artificial Sequence: Synthetic oligonucleotide
uuacccaggucagaacagg

SEQ ID NO: 1276315 - RNA, 19 nt, Artificial Sequence
  Description of Artificial Sequence: Synthetic oligonucleotide
gguguuuuaguuugacgcc

SEQ ID NO: 1276316 - RNA, 19 nt, Artificial Sequence
  Description of Artificial Sequence: Synthetic oligonucleotide
cauagacacgugagcaugc

SEQ ID NO: 1276317 - RNA, 19 nt, Artificial Sequence
  Description of Artificial Sequence: Synthetic oligonucleotide
cucguacuuuaucaacugg

SEQ ID NO: 1276318 - RNA, 19 nt, Artificial Sequence
  Description of Artificial Sequence: Synthetic oligonucleotide
uuacuucgauuauauggac

SEQ ID NO: 1276319 - RNA, 19 nt, Artificial Sequence
  Description of Artificial Sequence: Synthetic oligonucleotide
uaagucugguauuuggcuu

SEQ ID NO: 1276320 - RNA, 19 nt, Artificial Sequence
  Description of Artificial Sequence: Synthetic oligonucleotide
cagcgaugaagcaauuggc

SEQ ID NO: 1276321 - RNA, 19 nt, Artificial Sequence
  Description of Artificial Sequence: Synthetic oligonucleotide
uccaaguuuuaguauuaaa

SEQ ID NO: 1276322 - RNA, 19 nt, Artificial Sequence
  Description of Artificial Sequence: Synthetic oligonucleotide
uguaugaauccguccaaua

SEQ ID NO: 1276323 - RNA, 19 nt, Artificial Sequence
  Description of Artificial Sequence: Synthetic oligonucleotide
guacucagacuguuacacg

SEQ ID NO: 1276324 - RNA, 19 nt, Artificial Sequence
  Description of Artificial Sequence: Synthetic oligonucleotide
guuaggucagaaucccggc

SEQ ID NO: 1276325 - RNA, 19 nt, Artificial Sequence
  Description of Artificial Sequence: Synthetic oligonucleotide
ccaacucuagaaauggagc

SEQ ID NO: 1276326 - RNA, 19 nt, Artificial Sequence
  Description of Artificial Sequence: Synthetic oligonucleotide
augguucgaggguaaauga

SEQ ID NO: 1276327 - RNA, 19 nt, Artificial Sequence
  Description of Artificial Sequence: Synthetic oligonucleotide
uaucaacuggcuguggccu

SEQ ID NO: 1276328 - RNA, 19 nt, Artificial Sequence
  Description of Artificial Sequence: Synthetic oligonucleotide
ugcauauuucccacugauc

SEQ ID NO: 1276329 - RNA, 19 nt, Artificial Sequence
  Description of Artificial Sequence: Synthetic oligonucleotide
gguauguaugaauccgucc

SEQ ID NO: 1276330 - RNA, 19 nt, Artificial Sequence
  Description of Artificial Sequence: Synthetic oligonucleotide
uuuaguagguuugcuacuu

SEQ ID NO: 1276331 - RNA, 19 nt, Artificial Sequence
  Description of Artificial Sequence: Synthetic oligonucleotide
uuccuuagacacuccaaaa

SEQ ID NO: 1276332 - RNA, 19 nt, Artificial Sequence
  Description of Artificial Sequence: Synthetic oligonucleotide
ucucguaaagacggauuag

SEQ ID NO: 1276333 - RNA, 19 nt, Artificial Sequence
  Description of Artificial Sequence: Synthetic oligonucleotide
gaucaaaugcaggaugaga

SEQ ID NO: 1276334 - RNA, 19 nt, Artificial Sequence
  Description of Artificial Sequence: Synthetic oligonucleotide
cauccaaaauugauugcuc

SEQ ID NO: 1276335 - RNA, 19 nt, Artificial Sequence
  Description of Artificial Sequence: Synthetic oligonucleotide
uacacgguucugcugcaca

SEQ ID NO: 1276336 - RNA, 19 nt, Artificial Sequence
  Description of Artificial Sequence: Synthetic oligonucleotide
aaguuaggucagaaucccg

SEQ ID NO: 1276337 - RNA, 19 nt, Artificial Sequence
  Description of Artificial Sequence: Synthetic oligonucleotide
cgaaagauucuauccaugg

SEQ ID NO: 1276338 - RNA, 19 nt, Artificial Sequence
  Description of Artificial Sequence: Synthetic oligonucleotide
uagccucuaagagccaagg

SEQ ID NO: 1276339 - RNA, 19 nt, Artificial Sequence
  Description of Artificial Sequence: Synthetic oligonucleotide
guguuuuaguuugacgccc

SEQ ID NO: 1276340 - RNA, 19 nt, Artificial Sequence
  Description of Artificial Sequence: Synthetic oligonucleotide
ggucaaaccaacucuagaa

SEQ ID NO: 1276341 - RNA, 19 nt, Artificial Sequence
  Description of Artificial Sequence: Synthetic oligonucleotide
ucagacuguuacacgguuc

SEQ ID NO: 1276342 - RNA, 19 nt, Artificial Sequence
  Description of Artificial Sequence: Synthetic oligonucleotide
aaggauuacuucgauuaua

SEQ ID NO: 1276343 - RNA, 19 nt, Artificial Sequence
  Description of Artificial Sequence: Synthetic oligonucleotide
ccuguuauauauugccugc

SEQ ID NO: 1276344 - RNA, 19 nt, Artificial Sequence
  Description of Artificial Sequence: Synthetic oligonucleotide
caauuggcuacuuugcuua

SEQ ID NO: 1276345 - RNA, 19 nt, Artificial Sequence
  Description of Artificial Sequence: Synthetic oligonucleotide
ugguaccacccaauaacac

SEQ ID NO: 1276346 - RNA, 19 nt, Artificial Sequence
  Description of Artificial Sequence: Synthetic oligonucleotide
agguauguaugaauccguc

SEQ ID NO: 1276347 - RNA, 19 nt, Artificial Sequence
  Description of Artificial Sequence: Synthetic oligonucleotide
aggauuacuucgauuauau

SEQ ID NO: 1276348 - RNA, 19 nt, Artificial Sequence
  Description of Artificial Sequence: Synthetic oligonucleotide
gaguacuauuauuaauuua

SEQ ID NO: 1276349 - RNA, 19 nt, Artificial Sequence
  Description of Artificial Sequence: Synthetic oligonucleotide
uucgaggguaaaugauggc

SEQ ID NO: 1276350 - RNA, 19 nt, Artificial Sequence
  Description of Artificial Sequence: Synthetic oligonucleotide
agaaugguaccacccaaua

SEQ ID NO: 1276351 - RNA, 19 nt, Artificial Sequence
  Description of Artificial Sequence: Synthetic oligonucleotide
acuuucaccugaaacggcu

SEQ ID NO: 1276352 - RNA, 19 nt, Artificial Sequence
  Description of Artificial Sequence: Synthetic oligonucleotide
auagcccaaucaccuccgc

SEQ ID NO: 1276353 - RNA, 19 nt, Artificial Sequence
  Description of Artificial Sequence: Synthetic oligonucleotide
ugguucgaggguaaaugau

SEQ ID NO: 1276354 - RNA, 19 nt, Artificial Sequence
  Description of Artificial Sequence: Synthetic oligonucleotide
uucuaucuauuuccacuuc

SEQ ID NO: 1276355 - RNA, 19 nt, Artificial Sequence
  Description of Artificial Sequence: Synthetic oligonucleotide
gaauccguccaauacaauu

SEQ ID NO: 1276356 - RNA, 19 nt, Artificial Sequence
  Description of Artificial Sequence: Synthetic oligonucleotide
acucuacgucuccuuguac

SEQ ID NO: 1276357 - RNA, 19 nt, Artificial Sequence
  Description of Artificial Sequence: Synthetic oligonucleotide
acguacugaggucuuauuu

SEQ ID NO: 1276358 - RNA, 19 nt, Artificial Sequence
  Description of Artificial Sequence: Synthetic oligonucleotide
auccauuauuaaaagugcu

SEQ ID NO: 1276359 - RNA, 19 nt, Artificial Sequence
  Description of Artificial Sequence: Synthetic oligonucleotide
ucuauccauggggacacug

SEQ ID NO: 1276360 - RNA, 19 nt, Artificial Sequence
  Description of Artificial Sequence: Synthetic oligonucleotide
aacucuagaaauggagcuu

SEQ ID NO: 1276361 - RNA, 19 nt, Artificial Sequence
  Description of Artificial Sequence: Synthetic oligonucleotide
aauaacacuguagccucua

SEQ ID NO: 1276362 - RNA, 19 nt, Artificial Sequence
  Description of Artificial Sequence: Synthetic oligonucleotide
aggaucaaaugcaggauga

SEQ ID NO: 1276363 - RNA, 19 nt, Artificial Sequence
  Description of Artificial Sequence: Synthetic oligonucleotide
uaguuugacgccccucaaa

SEQ ID NO: 1276364 - RNA, 19 nt, Artificial Sequence
  Description of Artificial Sequence: Synthetic oligonucleotide
guacugaggucuuauuuaa

SEQ ID NO: 1276365 - RNA, 19 nt, Artificial Sequence
  Description of Artificial Sequence: Synthetic oligonucleotide
auugccugcucacauccaa

SEQ ID NO: 1276366 - RNA, 19 nt, Artificial Sequence
  Description of Artificial Sequence: Synthetic oligonucleotide
auugcuccuaucaacucga

SEQ ID NO: 1276367 - RNA, 19 nt, Artificial Sequence
  Description of Artificial Sequence: Synthetic oligonucleotide
agcgaugaagcaauuggcu

SEQ ID NO: 1276368 - RNA, 19 nt, Artificial Sequence
  Description of Artificial Sequence: Synthetic oligonucleotide
ugaagcaauuggcuacuuu

SEQ ID NO: 1276369 - RNA, 19 nt, Artificial Sequence
  Description of Artificial Sequence: Synthetic oligonucleotide
ggauccaucucacauugca

SEQ ID NO: 1276370 - RNA, 19 nt, Artificial Sequence
  Description of Artificial Sequence: Synthetic oligonucleotide
ugugugucaaugucucgua

SEQ ID NO: 1276371 - RNA, 19 nt, Artificial Sequence
  Description of Artificial Sequence: Synthetic oligonucleotide
guaagucugguauuuggcu

SEQ ID NO: 1276372 - RNA, 19 nt, Artificial Sequence
  Description of Artificial Sequence: Synthetic oligonucleotide
ugauugcuccuaucaacuc

SEQ ID NO: 1276373 - RNA, 19 nt, Artificial Sequence
  Description of Artificial Sequence: Synthetic oligonucleotide
gaaucccggcgaaagauuc

SEQ ID NO: 1276374 - RNA, 19 nt, Artificial Sequence
  Description of Artificial Sequence: Synthetic oligonucleotide
uagcguucugguguuuuag

SEQ ID NO: 1276375 - RNA, 19 nt, Artificial Sequence
  Description of Artificial Sequence: Synthetic oligonucleotide
uuugaagauuuaguagguu

SEQ ID NO: 1276376 - RNA, 19 nt, Artificial Sequence
  Description of Artificial Sequence: Synthetic oligonucleotide
augaauccguccaauacaa

SEQ ID NO: 1276377 - RNA, 19 nt, Artificial Sequence
  Description of Artificial Sequence: Synthetic oligonucleotide
cuaauaaaggaguacuauu

SEQ ID NO: 1276378 - RNA, 19 nt, Artificial Sequence
  Description of Artificial Sequence: Synthetic oligonucleotide
uucaggccacuaacaagga

SEQ ID NO: 1276379 - RNA, 19 nt, Artificial Sequence
  Description of Artificial Sequence: Synthetic oligonucleotide
guuuuaguauuaaaggaau

SEQ ID NO: 1276380 - RNA, 19 nt, Artificial Sequence
  Description of Artificial Sequence: Synthetic oligonucleotide
uccguccaauacaauuaac

SEQ ID NO: 1276381 - RNA, 19 nt, Artificial Sequence
  Description of Artificial Sequence: Synthetic oligonucleotide
gguucgaggguaaaugaug

SEQ ID NO: 1276382 - RNA, 19 nt, Artificial Sequence
  Description of Artificial Sequence: Synthetic oligonucleotide
ccggcgaaagauucuaucc

SEQ ID NO: 1276383 - RNA, 19 nt, Artificial Sequence
  Description of Artificial Sequence: Synthetic oligonucleotide
cacuuucaccugaaacggc

SEQ ID NO: 1276384 - RNA, 19 nt, Artificial Sequence
  Description of Artificial Sequence: Synthetic oligonucleotide
uaccuugcuggucuuguuu

SEQ ID NO: 1276385 - RNA, 19 nt, Artificial Sequence
  Description of Artificial Sequence: Synthetic oligonucleotide
gucaagaauuccucagcga

SEQ ID NO: 1276386 - RNA, 19 nt, Artificial Sequence
  Description of Artificial Sequence: Synthetic oligonucleotide
auccguccaauacaauuaa

SEQ ID NO: 1276387 - RNA, 19 nt, Artificial Sequence
  Description of Artificial Sequence: Synthetic oligonucleotide
aacggcuccugcuuuucuu

SEQ ID NO: 1276388 - RNA, 19 nt, Artificial Sequence
  Description of Artificial Sequence: Synthetic oligonucleotide
uacgucuccuuguacgcau

SEQ ID NO: 1276389 - RNA, 19 nt, Artificial Sequence
  Description of Artificial Sequence: Synthetic oligonucleotide
caacucuagaaauggagcu

SEQ ID NO: 1276390 - RNA, 19 nt, Artificial Sequence
  Description of Artificial Sequence: Synthetic oligonucleotide
gucucguaaagacggauua

SEQ ID NO: 1276391 - RNA, 19 nt, Artificial Sequence
  Description of Artificial Sequence: Synthetic oligonucleotide
agcguucugguguuuuagu

SEQ ID NO: 1276392 - RNA, 19 nt, Artificial Sequence
  Description of Artificial Sequence: Synthetic oligonucleotide
aaugucucguaaagacgga

SEQ ID NO: 1276393 - RNA, 19 nt, Artificial Sequence
  Description of Artificial Sequence: Synthetic oligonucleotide
agacacgugagcaugcaaa

SEQ ID NO: 1276394 - RNA, 19 nt, Artificial Sequence
  Description of Artificial Sequence: Synthetic oligonucleotide
ugccugcucacauccaaaa

SEQ ID NO: 1276395 - RNA, 19 nt, Artificial Sequence
  Description of Artificial Sequence: Synthetic oligonucleotide
uccuaucaacucgagguau

SEQ ID NO: 1276396 - RNA, 19 nt, Artificial Sequence
  Description of Artificial Sequence: Synthetic oligonucleotide
acacgugagcaugcaaauc

SEQ ID NO: 1276397 - RNA, 19 nt, Artificial Sequence
  Description of Artificial Sequence: Synthetic oligonucleotide
ucucggacucuacgucucc

SEQ ID NO: 1276398 - RNA, 19 nt, Artificial Sequence
  Description of Artificial Sequence: Synthetic oligonucleotide
aacucgagguauguaugaa

SEQ ID NO: 1276399 - RNA, 19 nt, Artificial Sequence
  Description of Artificial Sequence: Synthetic oligonucleotide
acaaggacuggagaagaau

SEQ ID NO: 1276400 - RNA, 19 nt, Artificial Sequence
  Description of Artificial Sequence: Synthetic oligonucleotide
augguaccacccaauaaca

SEQ ID NO: 1276401 - RNA, 19 nt, Artificial Sequence
  Description of Artificial Sequence: Synthetic oligonucleotide
gccaaggaguuuuaccuug

SEQ ID NO: 1276402 - RNA, 19 nt, Artificial Sequence
  Description of Artificial Sequence: Synthetic oligonucleotide
uagacacgugagcaugcaa

SEQ ID NO: 1276403 - RNA, 19 nt, Artificial Sequence
  Description of Artificial Sequence: Synthetic oligonucleotide
caacucgagguauguauga

SEQ ID NO: 1276404 - RNA, 19 nt, Artificial Sequence
  Description of Artificial Sequence: Synthetic oligonucleotide
cugaggucuuauuuaagua

SEQ ID NO: 1276405 - RNA, 19 nt, Artificial Sequence
  Description of Artificial Sequence: Synthetic oligonucleotide
uuucugucacucacucgua

SEQ ID NO: 1276406 - RNA, 19 nt, Artificial Sequence
  Description of Artificial Sequence: Synthetic oligonucleotide
aucuaauaaaggaguacua

SEQ ID NO: 1276407 - RNA, 19 nt, Artificial Sequence
  Description of Artificial Sequence: Synthetic oligonucleotide
guaucaguuggaagggauc

SEQ ID NO: 1276408 - RNA, 19 nt, Artificial Sequence
  Description of Artificial Sequence: Synthetic oligonucleotide
ccguccaauacaauuaaca

SEQ ID NO: 1276409 - RNA, 19 nt, Artificial Sequence
  Description of Artificial Sequence: Synthetic oligonucleotide
uugcuccuaucaacucgag

SEQ ID NO: 1276410 - RNA, 19 nt, Artificial Sequence
  Description of Artificial Sequence: Synthetic oligonucleotide
ccacccaauaacacuguag

SEQ ID NO: 1276411 - RNA, 19 nt, Artificial Sequence
  Description of Artificial Sequence: Synthetic oligonucleotide
ugaauccguccaauacaau

SEQ ID NO: 1276412 - RNA, 19 nt, Artificial Sequence
  Description of Artificial Sequence: Synthetic oligonucleotide
uugccugcucacauccaaa

SEQ ID NO: 1276413 - RNA, 19 nt, Artificial Sequence
  Description of Artificial Sequence: Synthetic oligonucleotide
aacaaggacuggagaagaa

SEQ ID NO: 1276414 - RNA, 19 nt, Artificial Sequence
  Description of Artificial Sequence: Synthetic oligonucleotide
cgagguauguaugaauccg

SEQ ID NO: 1276415 - RNA, 19 nt, Artificial Sequence
  Description of Artificial Sequence: Synthetic oligonucleotide
cucagcgaugaagcaauug

SEQ ID NO: 1276416 - RNA, 19 nt, Artificial Sequence
  Description of Artificial Sequence: Synthetic oligonucleotide
agccucuaagagccaaggu

SEQ ID NO: 1276417 - RNA, 19 nt, Artificial Sequence
  Description of Artificial Sequence: Synthetic oligonucleotide
aggguaaaugauggccaag

SEQ ID NO: 1276418 - RNA, 19 nt, Artificial Sequence
  Description of Artificial Sequence: Synthetic oligonucleotide
uccuguacucagacuguua

SEQ ID NO: 1276419 - RNA, 19 nt, Artificial Sequence
  Description of Artificial Sequence: Synthetic oligonucleotide
caaacaaguuaggucagaa

SEQ ID NO: 1276420 - RNA, 19 nt, Artificial Sequence
  Description of Artificial Sequence: Synthetic oligonucleotide
gacucuacgucuccuugua

SEQ ID NO: 1276421 - RNA, 19 nt, Artificial Sequence
  Description of Artificial Sequence: Synthetic oligonucleotide
cacucguacuuuaucaacu

SEQ ID NO: 1276422 - RNA, 19 nt, Artificial Sequence
  Description of Artificial Sequence: Synthetic oligonucleotide
ccuccucuagagaaguaag

SEQ ID NO: 1276423 - RNA, 19 nt, Artificial Sequence
  Description of Artificial Sequence: Synthetic oligonucleotide
ccuaauagcccaaucaccu

SEQ ID NO: 1276424 - RNA, 19 nt, Artificial Sequence
  Description of Artificial Sequence: Synthetic oligonucleotide
aaucccggcgaaagauucu

SEQ ID NO: 1276425 - RNA, 19 nt, Artificial Sequence
  Description of Artificial Sequence: Synthetic oligonucleotide
gaguuuuaccuugcugguc

SEQ ID NO: 1276426 - RNA, 19 nt, Artificial Sequence
  Description of Artificial Sequence: Synthetic oligonucleotide
caugaacugugagcacagg

SEQ ID NO: 1276427 - RNA, 19 nt, Artificial Sequence
  Description of Artificial Sequence: Synthetic oligonucleotide
guagccucuaagagccaag

SEQ ID NO: 1276428 - RNA, 19 nt, Artificial Sequence
  Description of Artificial Sequence: Synthetic oligonucleotide
auagacacgugagcaugca

SEQ ID NO: 1276429 - RNA, 19 nt, Artificial Sequence
  Description of Artificial Sequence: Synthetic oligonucleotide
ggacuaacaaucauuccaa

SEQ ID NO: 1276430 - RNA, 19 nt, Artificial Sequence
  Description of Artificial Sequence: Synthetic oligonucleotide
cagacuguuacacgguucu

SEQ ID NO: 1276431 - RNA, 19 nt, Artificial Sequence
  Description of Artificial Sequence: Synthetic oligonucleotide
auagcguucugguguuuua

SEQ ID NO: 1276432 - RNA, 19 nt, Artificial Sequence
  Description of Artificial Sequence: Synthetic oligonucleotide
caaacacgguaaaggauua

SEQ ID NO: 1276433 - RNA, 19 nt, Artificial Sequence
  Description of Artificial Sequence: Synthetic oligonucleotide
ccaaucaccuccgccauag

SEQ ID NO: 1276434 - RNA, 19 nt, Artificial Sequence
  Description of Artificial Sequence: Synthetic oligonucleotide
uguaggcgggcaggcaagc

SEQ ID NO: 1276435 - RNA, 19 nt, Artificial Sequence
  Description of Artificial Sequence: Synthetic oligonucleotide
gaacuuugcuccuccucua

SEQ ID NO: 1276436 - RNA, 19 nt, Artificial Sequence
  Description of Artificial Sequence: Synthetic oligonucleotide
acacgguaaaggauuacuu

SEQ ID NO: 1276437 - RNA, 19 nt, Artificial Sequence
  Description of Artificial Sequence: Synthetic oligonucleotide
gccacuaacaaggacugga

SEQ ID NO: 1276438 - RNA, 19 nt, Artificial Sequence
  Description of Artificial Sequence: Synthetic oligonucleotide
uaucaacucgagguaugua

SEQ ID NO: 1276439 - RNA, 19 nt, Artificial Sequence
  Description of Artificial Sequence: Synthetic oligonucleotide
ccuaucaacucgagguaug

SEQ ID NO: 1276440 - RNA, 19 nt, Artificial Sequence
  Description of Artificial Sequence: Synthetic oligonucleotide
gaggucuuauuuaaguauu

SEQ ID NO: 1276441 - RNA, 19 nt, Artificial Sequence
  Description of Artificial Sequence: Synthetic oligonucleotide
cacugcuaugagaaaaccu

SEQ ID NO: 1276442 - RNA, 19 nt, Artificial Sequence
  Description of Artificial Sequence: Synthetic oligonucleotide
gagguauguaugaauccgu

SEQ ID NO: 1276443 - RNA, 19 nt, Artificial Sequence
  Description of Artificial Sequence: Synthetic oligonucleotide
ccaaggaguuuuaccuugc

SEQ ID NO: 1276444 - RNA, 19 nt, Artificial Sequence
  Description of Artificial Sequence: Synthetic oligonucleotide
gaaacggcuccugcuuuuc

SEQ ID NO: 1276445 - RNA, 19 nt, Artificial Sequence
  Description of Artificial Sequence: Synthetic oligonucleotide
aggucagaaucccggcgaa

SEQ ID NO: 1276446 - RNA, 19 nt, Artificial Sequence
  Description of Artificial Sequence: Synthetic oligonucleotide
aaagacggauuaggaucaa

SEQ ID NO: 1276447 - RNA, 19 nt, Artificial Sequence
  Description of Artificial Sequence: Synthetic oligonucleotide
gcaugcaaauccauuauua

SEQ ID NO: 1276448 - RNA, 19 nt, Artificial Sequence
  Description of Artificial Sequence: Synthetic oligonucleotide
guuacacgguucugcugca

SEQ ID NO: 1276449 - RNA, 19 nt, Artificial Sequence
  Description of Artificial Sequence: Synthetic oligonucleotide
ucggacucuacgucuccuu

SEQ ID NO: 1276450 - RNA, 19 nt, Artificial Sequence
  Description of Artificial Sequence: Synthetic oligonucleotide
gacuaacaaucauuccaau

SEQ ID NO: 1276451 - RNA, 19 nt, Artificial Sequence
  Description of Artificial Sequence: Synthetic oligonucleotide
acgugagcaugcaaaucca

SEQ ID NO: 1276452 - RNA, 19 nt, Artificial Sequence
  Description of Artificial Sequence: Synthetic oligonucleotide
aggucuuauuuaaguauuu

SEQ ID NO: 1276453 - RNA, 19 nt, Artificial Sequence
  Description of Artificial Sequence: Synthetic oligonucleotide
gcgaaagauucuauccaug

SEQ ID NO: 1276454 - RNA, 19 nt, Artificial Sequence
  Description of Artificial Sequence: Synthetic oligonucleotide
accacccaauaacacugua

SEQ ID NO: 1276455 - RNA, 19 nt, Artificial Sequence
  Description of Artificial Sequence: Synthetic oligonucleotide
gcgaugaagcaauuggcua

SEQ ID NO: 1276456 - RNA, 19 nt, Artificial Sequence
  Description of Artificial Sequence: Synthetic oligonucleotide
agguaucaguuggaaggga

SEQ ID NO: 1276457 - RNA, 19 nt, Artificial Sequence
  Description of Artificial Sequence: Synthetic oligonucleotide
cuccuuguacgcauagacu

SEQ ID NO: 1276458 - RNA, 19 nt, Artificial Sequence
  Description of Artificial Sequence: Synthetic oligonucleotide
agacuguuacacgguucug

SEQ ID NO: 1276459 - RNA, 19 nt, Artificial Sequence
  Description of Artificial Sequence: Synthetic oligonucleotide
agaaucccggcgaaagauu

SEQ ID NO: 1276460 - RNA, 19 nt, Artificial Sequence
  Description of Artificial Sequence: Synthetic oligonucleotide
ggaguuuuaccuugcuggu

SEQ ID NO: 1276461 - RNA, 19 nt, Artificial Sequence
  Description of Artificial Sequence: Synthetic oligonucleotide
aucaguuggaagggaucaa

SEQ ID NO: 1276462 - RNA, 19 nt, Artificial Sequence
  Description of Artificial Sequence: Synthetic oligonucleotide
ucccggcgaaagauucuau

SEQ ID NO: 1276463 - RNA, 19 nt, Artificial Sequence
  Description of Artificial Sequence: Synthetic oligonucleotide
cccaauaacacuguagccu

SEQ ID NO: 1276464 - RNA, 19 nt, Artificial Sequence
  Description of Artificial Sequence: Synthetic oligonucleotide
aaauagcguucugguguuu

SEQ ID NO: 1276465 - RNA, 19 nt, Artificial Sequence
  Description of Artificial Sequence: Synthetic oligonucleotide
gaaugguucgaggguaaau

SEQ ID NO: 1276466 - RNA, 19 nt, Artificial Sequence
  Description of Artificial Sequence: Synthetic oligonucleotide
cgcauagacuguaggcggg

SEQ ID NO: 1276467 - RNA, 19 nt, Artificial Sequence
  Description of Artificial Sequence: Synthetic oligonucleotide
cgaggguaaaugauggcca

SEQ ID NO: 1276468 - RNA, 19 nt, Artificial Sequence
  Description of Artificial Sequence: Synthetic oligonucleotide
gaggccuguguuugugaua

SEQ ID NO: 1276469 - RNA, 19 nt, Artificial Sequence
  Description of Artificial Sequence: Synthetic oligonucleotide
cuucaggccaggacguacu

SEQ ID NO: 1276470 - RNA, 19 nt, Artificial Sequence
  Description of Artificial Sequence: Synthetic oligonucleotide
aucccggcgaaagauucua

SEQ ID NO: 1276471 - RNA, 19 nt, Artificial Sequence
  Description of Artificial Sequence: Synthetic oligonucleotide
ggcgaaagauucuauccau

SEQ ID NO: 1276472 - RNA, 19 nt, Artificial Sequence
  Description of Artificial Sequence: Synthetic oligonucleotide
cuaucaacucgagguaugu

SEQ ID NO: 1276473 - RNA, 19 nt, Artificial Sequence
  Description of Artificial Sequence: Synthetic oligonucleotide
caaauagcguucugguguu

SEQ ID NO: 1276474 - RNA, 19 nt, Artificial Sequence
  Description of Artificial Sequence: Synthetic oligonucleotide
aaagugcuuggggccuaaa

SEQ ID NO: 1276475 - RNA, 19 nt, Artificial Sequence
  Description of Artificial Sequence: Synthetic oligonucleotide
cuucgauuauauggacuaa

SEQ ID NO: 1276476 - RNA, 19 nt, Artificial Sequence
  Description of Artificial Sequence: Synthetic oligonucleotide
acccaggucagaacaggaa

SEQ ID NO: 1276477 - RNA, 19 nt, Artificial Sequence
  Description of Artificial Sequence: Synthetic oligonucleotide
cgauuauauggacuaacaa

SEQ ID NO: 1276478 - RNA, 19 nt, Artificial Sequence
  Description of Artificial Sequence: Synthetic oligonucleotide
cccggcgaaagauucuauc

SEQ ID NO: 1276479 - RNA, 19 nt, Artificial Sequence
  Description of Artificial Sequence: Synthetic oligonucleotide
ccucuaagagccaagguuu

SEQ ID NO: 1276480 - RNA, 19 nt, Artificial Sequence
  Description of Artificial Sequence: Synthetic oligonucleotide
ccgccauagacacgugagc

SEQ ID NO: 1276481 - RNA, 19 nt, Artificial Sequence
  Description of Artificial Sequence: Synthetic oligonucleotide
cuacgucuccuuguacgca

SEQ ID NO: 1276482 - RNA, 19 nt, Artificial Sequence
  Description of Artificial Sequence: Synthetic oligonucleotide
cuguuauauauugccugcu

SEQ ID NO: 1276483 - RNA, 19 nt, Artificial Sequence
  Description of Artificial Sequence: Synthetic oligonucleotide
gacuguaggcgggcaggca

SEQ ID NO: 1276484 - RNA, 19 nt, Artificial Sequence
  Description of Artificial Sequence: Synthetic oligonucleotide
guuugcuacuuuuccucuu

SEQ ID NO: 1276485 - RNA, 19 nt, Artificial Sequence
  Description of Artificial Sequence: Synthetic oligonucleotide
uucuucaggccaggacgua

SEQ ID NO: 1276486 - RNA, 19 nt, Artificial Sequence
  Description of Artificial Sequence: Synthetic oligonucleotide
ccccacaguucuucaggcc

SEQ ID NO: 1276487 - RNA, 19 nt, Artificial Sequence
  Description of Artificial Sequence: Synthetic oligonucleotide
gguaucaguuggaagggau

SEQ ID NO: 1276488 - RNA, 19 nt, Artificial Sequence
  Description of Artificial Sequence: Synthetic oligonucleotide
gacguacugaggucuuauu

SEQ ID NO: 1276489 - RNA, 19 nt, Artificial Sequence
  Description of Artificial Sequence: Synthetic oligonucleotide
uucuauccauggggacacu

SEQ ID NO: 1276490 - RNA, 19 nt, Artificial Sequence
  Description of Artificial Sequence: Synthetic oligonucleotide
gcaaacaaguuaggucaga

SEQ ID NO: 1276491 - RNA, 19 nt, Artificial Sequence
  Description of Artificial Sequence: Synthetic oligonucleotide
cgguaaaggauuacuucga

SEQ ID NO: 1276492 - RNA, 19 nt, Artificial Sequence
  Description of Artificial Sequence: Synthetic oligonucleotide
cucagacuguuacacgguu

SEQ ID NO: 1276493 - RNA, 19 nt, Artificial Sequence
  Description of Artificial Sequence: Synthetic oligonucleotide
cguaaagacggauuaggau

SEQ ID NO: 1276494 - RNA, 19 nt, Artificial Sequence
  Description of Artificial Sequence: Synthetic oligonucleotide
gcucacauccaaaauugau

SEQ ID NO: 1276495 - RNA, 19 nt, Artificial Sequence
  Description of Artificial Sequence: Synthetic oligonucleotide
cggcgaaagauucuaucca

SEQ ID NO: 1276496 - RNA, 19 nt, Artificial Sequence
  Description of Artificial Sequence: Synthetic oligonucleotide
aggacguacugaggucuua

SEQ ID NO: 1276497 - RNA, 19 nt, Artificial Sequence
  Description of Artificial Sequence: Synthetic oligonucleotide
caaucaccuccgccauaga

SEQ ID NO: 1276498 - RNA, 19 nt, Artificial Sequence
  Description of Artificial Sequence: Synthetic oligonucleotide
gcguucugguguuuuaguu

SEQ ID NO: 1276499 - RNA, 19 nt, Artificial Sequence
  Description of Artificial Sequence: Synthetic oligonucleotide
agggaucaagugagcuuuu

SEQ ID NO: 1276500 - RNA, 19 nt, Artificial Sequence
  Description of Artificial Sequence: Synthetic oligonucleotide
ccauggggacacugcuaug

SEQ ID NO: 1276501 - RNA, 19 nt, Artificial Sequence
  Description of Artificial Sequence: Synthetic oligonucleotide
ccaggacguacugaggucu

SEQ ID NO: 1276502 - RNA, 19 nt, Artificial Sequence
  Description of Artificial Sequence: Synthetic oligonucleotide
acgucuccuuguacgcaua

SEQ ID NO: 1276503 - RNA, 19 nt, Artificial Sequence
  Description of Artificial Sequence: Synthetic oligonucleotide
ggacguacugaggucuuau

SEQ ID NO: 1276504 - RNA, 19 nt, Artificial Sequence
  Description of Artificial Sequence: Synthetic oligonucleotide
guccuguacucagacuguu

SEQ ID NO: 1276505 - RNA, 19 nt, Artificial Sequence
  Description of Artificial Sequence: Synthetic oligonucleotide
cucggacucuacgucuccu

SEQ ID NO: 1276506 - RNA, 19 nt, Artificial Sequence
  Description of Artificial Sequence: Synthetic oligonucleotide
guaggcgggcaggcaagcu

SEQ ID NO: 1276507 - RNA, 19 nt, Artificial Sequence
  Description of Artificial Sequence: Synthetic oligonucleotide
caggacguacugaggucuu

SEQ ID NO: 1276508 - RNA, 19 nt, Artificial Sequence
  Description of Artificial Sequence: Synthetic oligonucleotide
guauuucgguuugcauauu

SEQ ID NO: 1276509 - RNA, 19 nt, Artificial Sequence
  Description of Artificial Sequence: Synthetic oligonucleotide
ccuccgccauagacacgug

SEQ ID NO: 1276510 - RNA, 19 nt, Artificial Sequence
  Description of Artificial Sequence: Synthetic oligonucleotide
ccucagcgaugaagcaauu

SEQ ID NO: 1276511 - RNA, 19 nt, Artificial Sequence
  Description of Artificial Sequence: Synthetic oligonucleotide
uuugucauacccuauaugg

SEQ ID NO: 1276512 - RNA, 19 nt, Artificial Sequence
  Description of Artificial Sequence: Synthetic oligonucleotide
aacauaaccacugaauucc

SEQ ID NO: 1276513 - RNA, 19 nt, Artificial Sequence
  Description of Artificial Sequence: Synthetic oligonucleotide
aauacuuaucaguugggac

SEQ ID NO: 1276514 - RNA, 19 nt, Artificial Sequence
  Description of Artificial Sequence: Synthetic oligonucleotide
aaacguucaacucaaaaug

SEQ ID NO: 1276515 - RNA, 19 nt, Artificial Sequence
  Description of Artificial Sequence: Synthetic oligonucleotide
auacuuaucaguugggacc

SEQ ID NO: 1276516 - RNA, 19 nt, Artificial Sequence
  Description of Artificial Sequence: Synthetic oligonucleotide
uggaucaagaccauaaucc

SEQ ID NO: 1276517 - RNA, 19 nt, Artificial Sequence
  Description of Artificial Sequence: Synthetic oligonucleotide
ugcauaaugaacuugcuga

SEQ ID NO: 1276518 - RNA, 19 nt, Artificial Sequence
  Description of Artificial Sequence: Synthetic oligonucleotide
uuuaccuucagcuaccuca

SEQ ID NO: 1276519 - RNA, 19 nt, Artificial Sequence
  Description of Artificial Sequence: Synthetic oligonucleotide
auaaccacugaauuccugc

SEQ ID NO: 1276520 - RNA, 19 nt, Artificial Sequence
  Description of Artificial Sequence: Synthetic oligonucleotide
aaaacguucaacucaaaau

SEQ ID NO: 1276521 - RNA, 19 nt, Artificial Sequence
  Description of Artificial Sequence: Synthetic oligonucleotide
ugucauacccuauaugggg

SEQ ID NO: 1276522 - RNA, 19 nt, Artificial Sequence
  Description of Artificial Sequence: Synthetic oligonucleotide
aaguucaauagccguuucc

SEQ ID NO: 1276523 - RNA, 19 nt, Artificial Sequence
  Description of Artificial Sequence: Synthetic oligonucleotide
uuaguuuaccuucagcuac

SEQ ID NO: 1276524 - RNA, 19 nt, Artificial Sequence
  Description of Artificial Sequence: Synthetic oligonucleotide
aagaucagcucuccuaaac

SEQ ID NO: 1276525 - RNA, 19 nt, Artificial Sequence
  Description of Artificial Sequence: Synthetic oligonucleotide
aaggugucauauucuauac

SEQ ID NO: 1276526 - RNA, 19 nt, Artificial Sequence
  Description of Artificial Sequence: Synthetic oligonucleotide
auuaagagcugucaccaac

SEQ ID NO: 1276527 - RNA, 19 nt, Artificial Sequence
  Description of Artificial Sequence: Synthetic oligonucleotide
caaucuuuggaucaagacc

SEQ ID NO: 1276528 - RNA, 19 nt, Artificial Sequence
  Description of Artificial Sequence: Synthetic oligonucleotide
auagccguuuccuuuaagg

SEQ ID NO: 1276529 - RNA, 19 nt, Artificial Sequence
  Description of Artificial Sequence: Synthetic oligonucleotide
uuaauaacugggauuggca

SEQ ID NO: 1276530 - RNA, 19 nt, Artificial Sequence
  Description of Artificial Sequence: Synthetic oligonucleotide
agaucagcucuccuaaacc

SEQ ID NO: 1276531 - RNA, 19 nt, Artificial Sequence
  Description of Artificial Sequence: Synthetic oligonucleotide
uauucuauacggaaggaau

SEQ ID NO: 1276532 - RNA, 19 nt, Artificial Sequence
  Description of Artificial Sequence: Synthetic oligonucleotide
uucauuauugcacuagcaa

SEQ ID NO: 1276533 - RNA, 19 nt, Artificial Sequence
  Description of Artificial Sequence: Synthetic oligonucleotide
aauccugguuuacuucagc

SEQ ID NO: 1276534 - RNA, 19 nt, Artificial Sequence
  Description of Artificial Sequence: Synthetic oligonucleotide
uugucauacccuauauggg

SEQ ID NO: 1276535 - RNA, 19 nt, Artificial Sequence
  Description of Artificial Sequence: Synthetic oligonucleotide
uuggcuugccauucgagcg

SEQ ID NO: 1276536 - RNA, 19 nt, Artificial Sequence
  Description of Artificial Sequence: Synthetic oligonucleotide
auuggcauacguuccgucg

SEQ ID NO: 1276537 - RNA, 19 nt, Artificial Sequence
  Description of Artificial Sequence: Synthetic oligonucleotide
uuauucacauggucguugg

SEQ ID NO: 1276538 - RNA, 19 nt, Artificial Sequence
  Description of Artificial Sequence: Synthetic oligonucleotide
uuuauucucgccauugcau

SEQ ID NO: 1276539 - RNA, 19 nt, Artificial Sequence
  Description of Artificial Sequence: Synthetic oligonucleotide
agugagauagccaaguuca

SEQ ID NO: 1276540 - RNA, 19 nt, Artificial Sequence
  Description of Artificial Sequence: Synthetic oligonucleotide
uuaagagcugucaccaaca

SEQ ID NO: 1276541 - RNA, 19 nt, Artificial Sequence
  Description of Artificial Sequence: Synthetic oligonucleotide
gaccucaugaacuuccacc

SEQ ID NO: 1276542 - RNA, 19 nt, Artificial Sequence
  Description of Artificial Sequence: Synthetic oligonucleotide
caugauuccccauaacuug

SEQ ID NO: 1276543 - RNA, 19 nt, Artificial Sequence
  Description of Artificial Sequence: Synthetic oligonucleotide
ucuuaaucaucauugguuu

SEQ ID NO: 1276544 - RNA, 19 nt, Artificial Sequence
  Description of Artificial Sequence: Synthetic oligonucleotide
cuaaaccugaccgaggacc

SEQ ID NO: 1276545 - RNA, 19 nt, Artificial Sequence
  Description of Artificial Sequence: Synthetic oligonucleotide
auaauccugguuuacuuca

SEQ ID NO: 1276546 - RNA, 19 nt, Artificial Sequence
  Description of Artificial Sequence: Synthetic oligonucleotide
uccaacaguaacagcaaca

SEQ ID NO: 1276547 - RNA, 19 nt, Artificial Sequence
  Description of Artificial Sequence: Synthetic oligonucleotide
uuggcauacguuccgucgg

SEQ ID NO: 1276548 - RNA, 19 nt, Artificial Sequence
  Description of Artificial Sequence: Synthetic oligonucleotide
acuagcaaucuuuggauca

SEQ ID NO: 1276549 - RNA, 19 nt, Artificial Sequence
  Description of Artificial Sequence: Synthetic oligonucleotide
ucauagauucuuggcaugg

SEQ ID NO: 1276550 - RNA, 19 nt, Artificial Sequence
  Description of Artificial Sequence: Synthetic oligonucleotide
gaacauaaccacugaauuc

SEQ ID NO: 1276551 - RNA, 19 nt, Artificial Sequence
  Description of Artificial Sequence: Synthetic oligonucleotide
uauugcacuagcaaucuuu

SEQ ID NO: 1276552 - RNA, 19 nt, Artificial Sequence
  Description of Artificial Sequence: Synthetic oligonucleotide
cauugcuucacauugagua

SEQ ID NO: 1276553 - RNA, 19 nt, Artificial Sequence
  Description of Artificial Sequence: Synthetic oligonucleotide
gaguguaacacauucuuaa

SEQ ID NO: 1276554 - RNA, 19 nt, Artificial Sequence
  Description of Artificial Sequence: Synthetic oligonucleotide
uuccccauaacuugggcug

SEQ ID NO: 1276555 - RNA, 19 nt, Artificial Sequence
  Description of Artificial Sequence: Synthetic oligonucleotide
aucgugagcggccagagcu

SEQ ID NO: 1276556 - RNA, 19 nt, Artificial Sequence
  Description of Artificial Sequence: Synthetic oligonucleotide
uccuaaaccugaccgagga

SEQ ID NO: 1276557 - RNA, 19 nt, Artificial Sequence
  Description of Artificial Sequence: Synthetic oligonucleotide
agcucauagauucuuggca

SEQ ID NO: 1276558 - RNA, 19 nt, Artificial Sequence
  Description of Artificial Sequence: Synthetic oligonucleotide
uuuaguuuaccuucagcua

SEQ ID NO: 1276559 - RNA, 19 nt, Artificial Sequence
  Description of Artificial Sequence: Synthetic oligonucleotide
auugcugugggaaaggugu

SEQ ID NO: 1276560 - RNA, 19 nt, Artificial Sequence
  Description of Artificial Sequence: Synthetic oligonucleotide
ggcaccauaauacuuauca

SEQ ID NO: 1276561 - RNA, 19 nt, Artificial Sequence
  Description of Artificial Sequence: Synthetic oligonucleotide
ugguaacaagaccucauga

SEQ ID NO: 1276562 - RNA, 19 nt, Artificial Sequence
  Description of Artificial Sequence: Synthetic oligonucleotide
gguguuuaaaccugucccg

SEQ ID NO: 1276563 - RNA, 19 nt, Artificial Sequence
  Description of Artificial Sequence: Synthetic oligonucleotide
uccugauccagucugccac

SEQ ID NO: 1276564 - RNA, 19 nt, Artificial Sequence
  Description of Artificial Sequence: Synthetic oligonucleotide
aacaagaccucaugaacuu

SEQ ID NO: 1276565 - RNA, 19 nt, Artificial Sequence
  Description of Artificial Sequence: Synthetic oligonucleotide
cuauacggaaggaauuuug

SEQ ID NO: 1276566 - RNA, 19 nt, Artificial Sequence
  Description of Artificial Sequence: Synthetic oligonucleotide
ucaaacuuauuuggggcag

SEQ ID NO: 1276567 - RNA, 19 nt, Artificial Sequence
  Description of Artificial Sequence: Synthetic oligonucleotide
uaauacuuaucaguuggga

SEQ ID NO: 1276568 - RNA, 19 nt, Artificial Sequence
  Description of Artificial Sequence: Synthetic oligonucleotide
aaggaauuuuggcuugcca

SEQ ID NO: 1276569 - RNA, 19 nt, Artificial Sequence
  Description of Artificial Sequence: Synthetic oligonucleotide
ucuccuaaaccugaccgag

SEQ ID NO: 1276570 - RNA, 19 nt, Artificial Sequence
  Description of Artificial Sequence: Synthetic oligonucleotide
uaaaccugaccgaggacca

SEQ ID NO: 1276571 - RNA, 19 nt, Artificial Sequence
  Description of Artificial Sequence: Synthetic oligonucleotide
cauuguagaucucacgguc

SEQ ID NO: 1276572 - RNA, 19 nt, Artificial Sequence
  Description of Artificial Sequence: Synthetic oligonucleotide
cugggauuggcauacguuc

SEQ ID NO: 1276573 - RNA, 19 nt, Artificial Sequence
  Description of Artificial Sequence: Synthetic oligonucleotide
aguaagugggacagcgucc

SEQ ID NO: 1276574 - RNA, 19 nt, Artificial Sequence
  Description of Artificial Sequence: Synthetic oligonucleotide
aguccugguaacaagaccu

SEQ ID NO: 1276575 - RNA, 19 nt, Artificial Sequence
  Description of Artificial Sequence: Synthetic oligonucleotide
agcggccagagcuucaaac

SEQ ID NO: 1276576 - RNA, 19 nt, Artificial Sequence
  Description of Artificial Sequence: Synthetic oligonucleotide
aauugcucuguugcuaaug

SEQ ID NO: 1276577 - RNA, 19 nt, Artificial Sequence
  Description of Artificial Sequence: Synthetic oligonucleotide
aguucaauagccguuuccu

SEQ ID NO: 1276578 - RNA, 19 nt, Artificial Sequence
  Description of Artificial Sequence: Synthetic oligonucleotide
uaucaguugggaccuucag

SEQ ID NO: 1276579 - RNA, 19 nt, Artificial Sequence
  Description of Artificial Sequence: Synthetic oligonucleotide
uaguuuaccuucagcuacc

SEQ ID NO: 1276580 - RNA, 19 nt, Artificial Sequence
  Description of Artificial Sequence: Synthetic oligonucleotide
ucaauugcucuguugcuaa

SEQ ID NO: 1276581 - RNA, 19 nt, Artificial Sequence
  Description of Artificial Sequence: Synthetic oligonucleotide
caugcaacuucuguagucc

SEQ ID NO: 1276582 - RNA, 19 nt, Artificial Sequence
  Description of Artificial Sequence: Synthetic oligonucleotide
uguggguucgcccaauuuu

SEQ ID NO: 1276583 - RNA, 19 nt, Artificial Sequence
  Description of Artificial Sequence: Synthetic oligonucleotide
uaaaccugucccgacagca

SEQ ID NO: 1276584 - RNA, 19 nt, Artificial Sequence
  Description of Artificial Sequence: Synthetic oligonucleotide
ugggauuggcauacguucc

SEQ ID NO: 1276585 - RNA, 19 nt, Artificial Sequence
  Description of Artificial Sequence: Synthetic oligonucleotide
ccuauauggggauuaagag

SEQ ID NO: 1276586 - RNA, 19 nt, Artificial Sequence
  Description of Artificial Sequence: Synthetic oligonucleotide
guucgcccaauuuugauga

SEQ ID NO: 1276587 - RNA, 19 nt, Artificial Sequence
  Description of Artificial Sequence: Synthetic oligonucleotide
ucgccauugcauaaugaac

SEQ ID NO: 1276588 - RNA, 19 nt, Artificial Sequence
  Description of Artificial Sequence: Synthetic oligonucleotide
cauaauccugguuuacuuc

SEQ ID NO: 1276589 - RNA, 19 nt, Artificial Sequence
  Description of Artificial Sequence: Synthetic oligonucleotide
uuaucaguugggaccuuca

SEQ ID NO: 1276590 - RNA, 19 nt, Artificial Sequence
  Description of Artificial Sequence: Synthetic oligonucleotide
gcucuuauucacauggucg

SEQ ID NO: 1276591 - RNA, 19 nt, Artificial Sequence
  Description of Artificial Sequence: Synthetic oligonucleotide
cugguguuuaaaccugucc

SEQ ID NO: 1276592 - RNA, 19 nt, Artificial Sequence
  Description of Artificial Sequence: Synthetic oligonucleotide
uuauucucgccauugcaua

SEQ ID NO: 1276593 - RNA, 19 nt, Artificial Sequence
  Description of Artificial Sequence: Synthetic oligonucleotide
gaucaagaccauaauccug

SEQ ID NO: 1276594 - RNA, 19 nt, Artificial Sequence
  Description of Artificial Sequence: Synthetic oligonucleotide
uauucacauggucguuggg

SEQ ID NO: 1276595 - RNA, 19 nt, Artificial Sequence
  Description of Artificial Sequence: Synthetic oligonucleotide
auuccccauaacuugggcu

SEQ ID NO: 1276596 - RNA, 19 nt, Artificial Sequence
  Description of Artificial Sequence: Synthetic oligonucleotide
guagaucucacggucuggg

SEQ ID NO: 1276597 - RNA, 19 nt, Artificial Sequence
  Description of Artificial Sequence: Synthetic oligonucleotide
acugaauuccugcccaaga

SEQ ID NO: 1276598 - RNA, 19 nt, Artificial Sequence
  Description of Artificial Sequence: Synthetic oligonucleotide
aaacuuauuuggggcagug

SEQ ID NO: 1276599 - RNA, 19 nt, Artificial Sequence
  Description of Artificial Sequence: Synthetic oligonucleotide
ucaugcaacuucuguaguc

SEQ ID NO: 1276600 - RNA, 19 nt, Artificial Sequence
  Description of Artificial Sequence: Synthetic oligonucleotide
guucgggacacgcugcggg

SEQ ID NO: 1276601 - RNA, 19 nt, Artificial Sequence
  Description of Artificial Sequence: Synthetic oligonucleotide
aagugaucguuuaguuuac

SEQ ID NO: 1276602 - RNA, 19 nt, Artificial Sequence
  Description of Artificial Sequence: Synthetic oligonucleotide
auucgagcgacguucggga

SEQ ID NO: 1276603 - RNA, 19 nt, Artificial Sequence
  Description of Artificial Sequence: Synthetic oligonucleotide
aucaguugggaccuucagu

SEQ ID NO: 1276604 - RNA, 19 nt, Artificial Sequence
  Description of Artificial Sequence: Synthetic oligonucleotide
uguuuaaaccugucccgac

SEQ ID NO: 1276605 - RNA, 19 nt, Artificial Sequence
  Description of Artificial Sequence: Synthetic oligonucleotide
uugcacuagcaaucuuugg

SEQ ID NO: 1276606 - RNA, 19 nt, Artificial Sequence
  Description of Artificial Sequence: Synthetic oligonucleotide
acggaaggaauuuuggcuu

SEQ ID NO: 1276607 - RNA, 19 nt, Artificial Sequence
  Description of Artificial Sequence: Synthetic oligonucleotide
uuaaaccugucccgacagc

SEQ ID NO: 1276608 - RNA, 19 nt, Artificial Sequence
  Description of Artificial Sequence: Synthetic oligonucleotide
gggauuaagagcugucacc

SEQ ID NO: 1276609 - RNA, 19 nt, Artificial Sequence
  Description of Artificial Sequence: Synthetic oligonucleotide
caccagggcaucgugagcg

SEQ ID NO: 1276610 - RNA, 19 nt, Artificial Sequence
  Description of Artificial Sequence: Synthetic oligonucleotide
agcagcucgcuucaagaug

SEQ ID NO: 1276611 - RNA, 19 nt, Artificial Sequence
  Description of Artificial Sequence: Synthetic oligonucleotide
auuccugcccaagaguaag

SEQ ID NO: 1276612 - RNA, 19 nt, Artificial Sequence
  Description of Artificial Sequence: Synthetic oligonucleotide
uggcauacguuccgucggg

SEQ ID NO: 1276613 - RNA, 19 nt, Artificial Sequence
  Description of Artificial Sequence: Synthetic oligonucleotide
gcagcgagcucauagauuc

SEQ ID NO: 1276614 - RNA, 19 nt, Artificial Sequence
  Description of Artificial Sequence: Synthetic oligonucleotide
ugcuuugucauacccuaua

SEQ ID NO: 1276615 - RNA, 19 nt, Artificial Sequence
  Description of Artificial Sequence: Synthetic oligonucleotide
gauuccccauaacuugggc

SEQ ID NO: 1276616 - RNA, 19 nt, Artificial Sequence
  Description of Artificial Sequence: Synthetic oligonucleotide
auugcacuagcaaucuuug

SEQ ID NO: 1276617 - RNA, 19 nt, Artificial Sequence
  Description of Artificial Sequence: Synthetic oligonucleotide
guuuaaaccugucccgaca

SEQ ID NO: 1276618 - RNA, 19 nt, Artificial Sequence
  Description of Artificial Sequence: Synthetic oligonucleotide
cauucgagcgacguucggg

SEQ ID NO: 1276619 - RNA, 19 nt, Artificial Sequence
  Description of Artificial Sequence: Synthetic oligonucleotide
acguucaacucaaaauguc

SEQ ID NO: 1276620 - RNA, 19 nt, Artificial Sequence
  Description of Artificial Sequence: Synthetic oligonucleotide
aguaggguucaccuuuccu

SEQ ID NO: 1276621 - RNA, 19 nt, Artificial Sequence
  Description of Artificial Sequence: Synthetic oligonucleotide
ugcugccaaguucaccucc

SEQ ID NO: 1276622 - RNA, 19 nt, Artificial Sequence
  Description of Artificial Sequence: Synthetic oligonucleotide
ugcugaacauaaccacuga

SEQ ID NO: 1276623 - RNA, 19 nt, Artificial Sequence
  Description of Artificial Sequence: Synthetic oligonucleotide
agugaucguuuaguuuacc

SEQ ID NO: 1276624 - RNA, 19 nt, Artificial Sequence
  Description of Artificial Sequence: Synthetic oligonucleotide
uucuauacggaaggaauuu

SEQ ID NO: 1276625 - RNA, 19 nt, Artificial Sequence
  Description of Artificial Sequence: Synthetic oligonucleotide
uccuaacauuucaauugcu

SEQ ID NO: 1276626 - RNA, 19 nt, Artificial Sequence
  Description of Artificial Sequence: Synthetic oligonucleotide
cugguaacaagaccucaug

SEQ ID NO: 1276627 - RNA, 19 nt, Artificial Sequence
  Description of Artificial Sequence: Synthetic oligonucleotide
ucauugcuucacauugagu

SEQ ID NO: 1276628 - RNA, 19 nt, Artificial Sequence
  Description of Artificial Sequence: Synthetic oligonucleotide
caaucuuaaaauucauugu

SEQ ID NO: 1276629 - RNA, 19 nt, Artificial Sequence
  Description of Artificial Sequence: Synthetic oligonucleotide
cuuauuuggggcagugaca

SEQ ID NO: 1276630 - RNA, 19 nt, Artificial Sequence
  Description of Artificial Sequence: Synthetic oligonucleotide
auauucuauacggaaggaa

SEQ ID NO: 1276631 - RNA, 19 nt, Artificial Sequence
  Description of Artificial Sequence: Synthetic oligonucleotide
aacuugggcugcaaccauc

SEQ ID NO: 1276632 - RNA, 19 nt, Artificial Sequence
  Description of Artificial Sequence: Synthetic oligonucleotide
gagugcgcgguacauggug

SEQ ID NO: 1276633 - RNA, 19 nt, Artificial Sequence
  Description of Artificial Sequence: Synthetic oligonucleotide
uggggauuaagagcuguca

SEQ ID NO: 1276634 - RNA, 19 nt, Artificial Sequence
  Description of Artificial Sequence: Synthetic oligonucleotide
agcggauaucauuugcuau

SEQ ID NO: 1276635 - RNA, 19 nt, Artificial Sequence
  Description of Artificial Sequence: Synthetic oligonucleotide
gaacuuccaccgcagcggc

SEQ ID NO: 1276636 - RNA, 19 nt, Artificial Sequence
  Description of Artificial Sequence: Synthetic oligonucleotide
uauggggauuaagagcugu

SEQ ID NO: 1276637 - RNA, 19 nt, Artificial Sequence
  Description of Artificial Sequence: Synthetic oligonucleotide
agugcgcgguacauggugc

SEQ ID NO: 1276638 - RNA, 19 nt, Artificial Sequence
  Description of Artificial Sequence: Synthetic oligonucleotide
uucaauugcucuguugcua

SEQ ID NO: 1276639 - RNA, 19 nt, Artificial Sequence
  Description of Artificial Sequence: Synthetic oligonucleotide
agaggaaagugaucguuua

SEQ ID NO: 1276640 - RNA, 19 nt, Artificial Sequence
  Description of Artificial Sequence: Synthetic oligonucleotide
agcgacguucgggacacgc

SEQ ID NO: 1276641 - RNA, 19 nt, Artificial Sequence
  Description of Artificial Sequence: Synthetic oligonucleotide
ucauucgagcucuggcucu

SEQ ID NO: 1276642 - RNA, 19 nt, Artificial Sequence
  Description of Artificial Sequence: Synthetic oligonucleotide
gaccagaacccaggaagcg

SEQ ID NO: 1276643 - RNA, 19 nt, Artificial Sequence
  Description of Artificial Sequence: Synthetic oligonucleotide
ucugguguuuaaaccuguc

SEQ ID NO: 1276644 - RNA, 19 nt, Artificial Sequence
  Description of Artificial Sequence: Synthetic oligonucleotide
ucucgccauugcauaauga

SEQ ID NO: 1276645 - RNA, 19 nt, Artificial Sequence
  Description of Artificial Sequence: Synthetic oligonucleotide
cauugcugugggaaaggug

SEQ ID NO: 1276646 - RNA, 19 nt, Artificial Sequence
  Description of Artificial Sequence: Synthetic oligonucleotide
ucgagcgacguucgggaca

SEQ ID NO: 1276647 - RNA, 19 nt, Artificial Sequence
  Description of Artificial Sequence: Synthetic oligonucleotide
ugccacaccaccagaggaa

SEQ ID NO: 1276648 - RNA, 19 nt, Artificial Sequence
  Description of Artificial Sequence: Synthetic oligonucleotide
aacuuauuuggggcaguga

SEQ ID NO: 1276649 - RNA, 19 nt, Artificial Sequence
  Description of Artificial Sequence: Synthetic oligonucleotide
ucacauugaguaggguuca

SEQ ID NO: 1276650 - RNA, 19 nt, Artificial Sequence
  Description of Artificial Sequence: Synthetic oligonucleotide
gguucgcccaauuuugaug

SEQ ID NO: 1276651 - RNA, 19 nt, Artificial Sequence
  Description of Artificial Sequence: Synthetic oligonucleotide
ggaagcggauaucauuugc

SEQ ID NO: 1276652 - RNA, 19 nt, Artificial Sequence
  Description of Artificial Sequence: Synthetic oligonucleotide
agccguuuccuuuaagguu

SEQ ID NO: 1276653 - RNA, 19 nt, Artificial Sequence
  Description of Artificial Sequence: Synthetic oligonucleotide
gucauucgagcucuggcuc

SEQ ID NO: 1276654 - RNA, 19 nt, Artificial Sequence
  Description of Artificial Sequence: Synthetic oligonucleotide
cuccuaaaccugaccgagg

SEQ ID NO: 1276655 - RNA, 19 nt, Artificial Sequence
  Description of Artificial Sequence: Synthetic oligonucleotide
gaaggaauuuuggcuugcc

SEQ ID NO: 1276656 - RNA, 19 nt, Artificial Sequence
  Description of Artificial Sequence: Synthetic oligonucleotide
cucgccauugcauaaugaa

SEQ ID NO: 1276657 - RNA, 19 nt, Artificial Sequence
  Description of Artificial Sequence: Synthetic oligonucleotide
auuguagaucucacggucu

SEQ ID NO: 1276658 - RNA, 19 nt, Artificial Sequence
  Description of Artificial Sequence: Synthetic oligonucleotide
cacuagcaaucuuuggauc

SEQ ID NO: 1276659 - RNA, 19 nt, Artificial Sequence
  Description of Artificial Sequence: Synthetic oligonucleotide
ugguuuacuucagcagcag

SEQ ID NO: 1276660 - RNA, 19 nt, Artificial Sequence
  Description of Artificial Sequence: Synthetic oligonucleotide
acaagaccucaugaacuuc

SEQ ID NO: 1276661 - RNA, 19 nt, Artificial Sequence
  Description of Artificial Sequence: Synthetic oligonucleotide
auugaguaggguucaccuu

SEQ ID NO: 1276662 - RNA, 19 nt, Artificial Sequence
  Description of Artificial Sequence: Synthetic oligonucleotide
gauuggcauacguuccguc

SEQ ID NO: 1276663 - RNA, 19 nt, Artificial Sequence
  Description of Artificial Sequence: Synthetic oligonucleotide
cauggcggcuuuuauucuc

SEQ ID NO: 1276664 - RNA, 19 nt, Artificial Sequence
  Description of Artificial Sequence: Synthetic oligonucleotide
ucauacccuauauggggau

SEQ ID NO: 1276665 - RNA, 19 nt, Artificial Sequence
  Description of Artificial Sequence: Synthetic oligonucleotide
ugaguaggguucaccuuuc

SEQ ID NO: 1276666 - RNA, 19 nt, Artificial Sequence
  Description of Artificial Sequence: Synthetic oligonucleotide
cauugaguaggguucaccu

SEQ ID NO: 1276667 - RNA, 19 nt, Artificial Sequence
  Description of Artificial Sequence: Synthetic oligonucleotide
ccaagaguaagugggacag

SEQ ID NO: 1276668 - RNA, 19 nt, Artificial Sequence
  Description of Artificial Sequence: Synthetic oligonucleotide
ggcugaguguaacacauuc

SEQ ID NO: 1276669 - RNA, 19 nt, Artificial Sequence
  Description of Artificial Sequence: Synthetic oligonucleotide
cuuuaagguugauccuuuc

SEQ ID NO: 1276670 - RNA, 19 nt, Artificial Sequence
  Description of Artificial Sequence: Synthetic oligonucleotide
gggauuggcauacguuccg

SEQ ID NO: 1276671 - RNA, 19 nt, Artificial Sequence
  Description of Artificial Sequence: Synthetic oligonucleotide
uuagcuuguugauccucuc

SEQ ID NO: 1276672 - RNA, 19 nt, Artificial Sequence
  Description of Artificial Sequence: Synthetic oligonucleotide
guggguucgcccaauuuug

SEQ ID NO: 1276673 - RNA, 19 nt, Artificial Sequence
  Description of Artificial Sequence: Synthetic oligonucleotide
ucgcccaauuuugaugacc

SEQ ID NO: 1276674 - RNA, 19 nt, Artificial Sequence
  Description of Artificial Sequence: Synthetic oligonucleotide
uggguucgcccaauuuuga

SEQ ID NO: 1276675 - RNA, 19 nt, Artificial Sequence
  Description of Artificial Sequence: Synthetic oligonucleotide
gcaccauaauacuuaucag

SEQ ID NO: 1276676 - RNA, 19 nt, Artificial Sequence
  Description of Artificial Sequence: Synthetic oligonucleotide
ucuauacggaaggaauuuu

SEQ ID NO: 1276677 - RNA, 19 nt, Artificial Sequence
  Description of Artificial Sequence: Synthetic oligonucleotide
acguucgggacacgcugcg

SEQ ID NO: 1276678 - RNA, 19 nt, Artificial Sequence
  Description of Artificial Sequence: Synthetic oligonucleotide
gacacgcugcgggagggcg

SEQ ID NO: 1276679 - RNA, 19 nt, Artificial Sequence
  Description of Artificial Sequence: Synthetic oligonucleotide
cucuuauucacauggucgu

SEQ ID NO: 1276680 - RNA, 19 nt, Artificial Sequence
  Description of Artificial Sequence: Synthetic oligonucleotide
agaccauaauccugguuua

SEQ ID NO: 1276681 - RNA, 19 nt, Artificial Sequence
  Description of Artificial Sequence: Synthetic oligonucleotide
uccgucgggccuccaaucu

SEQ ID NO: 1276682 - RNA, 19 nt, Artificial Sequence
  Description of Artificial Sequence: Synthetic oligonucleotide
auucuauacggaaggaauu

SEQ ID NO: 1276683 - RNA, 19 nt, Artificial Sequence
  Description of Artificial Sequence: Synthetic oligonucleotide
aacccaggaagcggauauc

SEQ ID NO: 1276684 - RNA, 19 nt, Artificial Sequence
  Description of Artificial Sequence: Synthetic oligonucleotide
gcggauaucauuugcuauc

SEQ ID NO: 1276685 - RNA, 19 nt, Artificial Sequence
  Description of Artificial Sequence: Synthetic oligonucleotide
cuggcaugaugcugcuucc

SEQ ID NO: 1276686 - RNA, 19 nt, Artificial Sequence
  Description of Artificial Sequence: Synthetic oligonucleotide
auacguuccgucgggccuc

SEQ ID NO: 1276687 - RNA, 19 nt, Artificial Sequence
  Description of Artificial Sequence: Synthetic oligonucleotide
auugcauaaugaacuugcu

SEQ ID NO: 1276688 - RNA, 19 nt, Artificial Sequence
  Description of Artificial Sequence: Synthetic oligonucleotide
ccacuaagcuccaccaggg

SEQ ID NO: 1276689 - RNA, 19 nt, Artificial Sequence
  Description of Artificial Sequence: Synthetic oligonucleotide
ggggauuaagagcugucac

SEQ ID NO: 1276690 - RNA, 19 nt, Artificial Sequence
  Description of Artificial Sequence: Synthetic oligonucleotide
cuuaucaguugggaccuuc

SEQ ID NO: 1276691 - RNA, 19 nt, Artificial Sequence
  Description of Artificial Sequence: Synthetic oligonucleotide
cccuauauggggauuaaga

SEQ ID NO: 1276692 - RNA, 19 nt, Artificial Sequence
  Description of Artificial Sequence: Synthetic oligonucleotide
gaguaggguucaccuuucc

SEQ ID NO: 1276693 - RNA, 19 nt, Artificial Sequence
  Description of Artificial Sequence: Synthetic oligonucleotide
cugggcaccauaauacuua

SEQ ID NO: 1276694 - RNA, 19 nt, Artificial Sequence
  Description of Artificial Sequence: Synthetic oligonucleotide
uggcucuuauucacauggu

SEQ ID NO: 1276695 - RNA, 19 nt, Artificial Sequence
  Description of Artificial Sequence: Synthetic oligonucleotide
guaguccugguaacaagac

SEQ ID NO: 1276696 - RNA, 19 nt, Artificial Sequence
  Description of Artificial Sequence: Synthetic oligonucleotide
uuauugcacuagcaaucuu

SEQ ID NO: 1276697 - RNA, 19 nt, Artificial Sequence
  Description of Artificial Sequence: Synthetic oligonucleotide
auggggauuaagagcuguc

SEQ ID NO: 1276698 - RNA, 19 nt, Artificial Sequence
  Description of Artificial Sequence: Synthetic oligonucleotide
gcggcuuuuauucucgcca

SEQ ID NO: 1276699 - RNA, 19 nt, Artificial Sequence
  Description of Artificial Sequence: Synthetic oligonucleotide
gaccuucaguucaccaaag

SEQ ID NO: 1276700 - RNA, 19 nt, Artificial Sequence
  Description of Artificial Sequence: Synthetic oligonucleotide
uccaccgcagcggcgaugu

SEQ ID NO: 1276701 - RNA, 19 nt, Artificial Sequence
  Description of Artificial Sequence: Synthetic oligonucleotide
gaacccaggaagcggauau

SEQ ID NO: 1276702 - RNA, 19 nt, Artificial Sequence
  Description of Artificial Sequence: Synthetic oligonucleotide
gugaucguuuaguuuaccu

SEQ ID NO: 1276703 - RNA, 19 nt, Artificial Sequence
  Description of Artificial Sequence: Synthetic oligonucleotide
uuccugcccaagaguaagu

SEQ ID NO: 1276704 - RNA, 19 nt, Artificial Sequence
  Description of Artificial Sequence: Synthetic oligonucleotide
guguuuaaaccugucccga

SEQ ID NO: 1276705 - RNA, 19 nt, Artificial Sequence
  Description of Artificial Sequence: Synthetic oligonucleotide
acccaggaagcggauauca

SEQ ID NO: 1276706 - RNA, 19 nt, Artificial Sequence
  Description of Artificial Sequence: Synthetic oligonucleotide
uuaagucacuuuggaccca

SEQ ID NO: 1276707 - RNA, 19 nt, Artificial Sequence
  Description of Artificial Sequence: Synthetic oligonucleotide
gucauacccuauaugggga

SEQ ID NO: 1276708 - RNA, 19 nt, Artificial Sequence
  Description of Artificial Sequence: Synthetic oligonucleotide
cauauucuauacggaagga

SEQ ID NO: 1276709 - RNA, 19 nt, Artificial Sequence
  Description of Artificial Sequence: Synthetic oligonucleotide
cauuagcuuguugauccuc

SEQ ID NO: 1276710 - RNA, 19 nt, Artificial Sequence
  Description of Artificial Sequence: Synthetic oligonucleotide
gaggcgacgcgagcgggcg

SEQ ID NO: 1276711 - RNA, 19 nt, Artificial Sequence
  Description of Artificial Sequence: Synthetic oligonucleotide
uucgggacacgcugcggga

SEQ ID NO: 1276712 - RNA, 19 nt, Artificial Sequence
  Description of Artificial Sequence: Synthetic oligonucleotide
cacuaagcuccaccagggc

SEQ ID NO: 1276713 - RNA, 19 nt, Artificial Sequence
  Description of Artificial Sequence: Synthetic oligonucleotide
gacguucgggacacgcugc

SEQ ID NO: 1276714 - RNA, 19 nt, Artificial Sequence
  Description of Artificial Sequence: Synthetic oligonucleotide
gaccauaauccugguuuac

SEQ ID NO: 1276715 - RNA, 19 nt, Artificial Sequence
  Description of Artificial Sequence: Synthetic oligonucleotide
ggaucaagaccauaauccu

SEQ ID NO: 1276716 - RNA, 19 nt, Artificial Sequence
  Description of Artificial Sequence: Synthetic oligonucleotide
auacccuauauggggauua

SEQ ID NO: 1276717 - RNA, 19 nt, Artificial Sequence
  Description of Artificial Sequence: Synthetic oligonucleotide
gacgcgagcgggcgaggag

SEQ ID NO: 1276718 - RNA, 19 nt, Artificial Sequence
  Description of Artificial Sequence: Synthetic oligonucleotide
uaagugggacagcguccug

SEQ ID NO: 1276719 - RNA, 19 nt, Artificial Sequence
  Description of Artificial Sequence: Synthetic oligonucleotide
agcggcgaugugcauugcu

SEQ ID NO: 1276720 - RNA, 19 nt, Artificial Sequence
  Description of Artificial Sequence: Synthetic oligonucleotide
aacuuccaccgcagcggcg

SEQ ID NO: 1276721 - RNA, 19 nt, Artificial Sequence
  Description of Artificial Sequence: Synthetic oligonucleotide
acccuauauggggauuaag

SEQ ID NO: 1276722 - RNA, 19 nt, Artificial Sequence
  Description of Artificial Sequence: Synthetic oligonucleotide
gcgaugugcauugcugugg

SEQ ID NO: 1276723 - RNA, 19 nt, Artificial Sequence
  Description of Artificial Sequence: Synthetic oligonucleotide
cggagugcgcgguacaugg

SEQ ID NO: 1276724 - RNA, 19 nt, Artificial Sequence
  Description of Artificial Sequence: Synthetic oligonucleotide
aguuuaccuucagcuaccu

SEQ ID NO: 1276725 - RNA, 19 nt, Artificial Sequence
  Description of Artificial Sequence: Synthetic oligonucleotide
gcaacaugauuccccauaa

SEQ ID NO: 1276726 - RNA, 19 nt, Artificial Sequence
  Description of Artificial Sequence: Synthetic oligonucleotide
aaagccgauucugguguuu

SEQ ID NO: 1276727 - RNA, 19 nt, Artificial Sequence
  Description of Artificial Sequence: Synthetic oligonucleotide
gcauacguuccgucgggcc

SEQ ID NO: 1276728 - RNA, 19 nt, Artificial Sequence
  Description of Artificial Sequence: Synthetic oligonucleotide
uuccgucgggccuccaauc

SEQ ID NO: 1276729 - RNA, 19 nt, Artificial Sequence
  Description of Artificial Sequence: Synthetic oligonucleotide
ggcgaugugcauugcugug

SEQ ID NO: 1276730 - RNA, 19 nt, Artificial Sequence
  Description of Artificial Sequence: Synthetic oligonucleotide
uucgcccaauuuugaugac

SEQ ID NO: 1276731 - RNA, 19 nt, Artificial Sequence
  Description of Artificial Sequence: Synthetic oligonucleotide
ucacggucugggcaccaua

SEQ ID NO: 1276732 - RNA, 19 nt, Artificial Sequence
  Description of Artificial Sequence: Synthetic oligonucleotide
ucguuggggugcacaggcu

SEQ ID NO: 1276733 - RNA, 19 nt, Artificial Sequence
  Description of Artificial Sequence: Synthetic oligonucleotide
agaguaagugggacagcgu

SEQ ID NO: 1276734 - RNA, 19 nt, Artificial Sequence
  Description of Artificial Sequence: Synthetic oligonucleotide
cugcguguggguucgccca

SEQ ID NO: 1276735 - RNA, 19 nt, Artificial Sequence
  Description of Artificial Sequence: Synthetic oligonucleotide
gggaccuucaguucaccaa

SEQ ID NO: 1276736 - RNA, 19 nt, Artificial Sequence
  Description of Artificial Sequence: Synthetic oligonucleotide
guaagugggacagcguccu

SEQ ID NO: 1276737 - RNA, 19 nt, Artificial Sequence
  Description of Artificial Sequence: Synthetic oligonucleotide
uggcggcuuuuauucucgc

SEQ ID NO: 1276738 - RNA, 19 nt, Artificial Sequence
  Description of Artificial Sequence: Synthetic oligonucleotide
auggucguuggggugcaca

SEQ ID NO: 1276739 - RNA, 19 nt, Artificial Sequence
  Description of Artificial Sequence: Synthetic oligonucleotide
cuagcaaucuuuggaucaa

SEQ ID NO: 1276740 - RNA, 19 nt, Artificial Sequence
  Description of Artificial Sequence: Synthetic oligonucleotide
aggcaagaucagcucuccu

SEQ ID NO: 1276741 - RNA, 19 nt, Artificial Sequence
  Description of Artificial Sequence: Synthetic oligonucleotide
ugcguguggguucgcccaa

SEQ ID NO: 1276742 - RNA, 19 nt, Artificial Sequence
  Description of Artificial Sequence: Synthetic oligonucleotide
ggaaggaauuuuggcuugc

SEQ ID NO: 1276743 - RNA, 19 nt, Artificial Sequence
  Description of Artificial Sequence: Synthetic oligonucleotide
cauacguuccgucgggccu

SEQ ID NO: 1276744 - RNA, 19 nt, Artificial Sequence
  Description of Artificial Sequence: Synthetic oligonucleotide
acacgcugcgggagggcgc

SEQ ID NO: 1276745 - RNA, 19 nt, Artificial Sequence
  Description of Artificial Sequence: Synthetic oligonucleotide
uacccuauauggggauuaa

SEQ ID NO: 1276746 - RNA, 19 nt, Artificial Sequence
  Description of Artificial Sequence: Synthetic oligonucleotide
cacggucugggcaccauaa

SEQ ID NO: 1276747 - RNA, 19 nt, Artificial Sequence
  Description of Artificial Sequence: Synthetic oligonucleotide
agcgagcucauagauucuu

SEQ ID NO: 1276748 - RNA, 19 nt, Artificial Sequence
  Description of Artificial Sequence: Synthetic oligonucleotide
ggcggcuuuuauucucgcc

SEQ ID NO: 1276749 - RNA, 19 nt, Artificial Sequence
  Description of Artificial Sequence: Synthetic oligonucleotide
ggaaagugaucguuuaguu

SEQ ID NO: 1276750 - RNA, 19 nt, Artificial Sequence
  Description of Artificial Sequence: Synthetic oligonucleotide
uccugcguguggguucgcc

SEQ ID NO: 1276751 - RNA, 19 nt, Artificial Sequence
  Description of Artificial Sequence: Synthetic oligonucleotide
auauggggauuaagagcug

SEQ ID NO: 1276752 - RNA, 19 nt, Artificial Sequence
  Description of Artificial Sequence: Synthetic oligonucleotide
cugauccagucugccacac

SEQ ID NO: 1276753 - RNA, 19 nt, Artificial Sequence
  Description of Artificial Sequence: Synthetic oligonucleotide
ugcgcgguacauggugcug

SEQ ID NO: 1276754 - RNA, 19 nt, Artificial Sequence
  Description of Artificial Sequence: Synthetic oligonucleotide
gucccgacagcagugccuc

SEQ ID NO: 1276755 - RNA, 19 nt, Artificial Sequence
  Description of Artificial Sequence: Synthetic oligonucleotide
agccgauucugguguuuaa

SEQ ID NO: 1276756 - RNA, 19 nt, Artificial Sequence
  Description of Artificial Sequence: Synthetic oligonucleotide
cacgcugcgggagggcgcc

SEQ ID NO: 1276757 - RNA, 19 nt, Artificial Sequence
  Description of Artificial Sequence: Synthetic oligonucleotide
gauucuuggcauggcggcu

SEQ ID NO: 1276758 - RNA, 19 nt, Artificial Sequence
  Description of Artificial Sequence: Synthetic oligonucleotide
ccugcguguggguucgccc

SEQ ID NO: 1276759 - RNA, 19 nt, Artificial Sequence
  Description of Artificial Sequence: Synthetic oligonucleotide
gccauucgagcgacguucg

SEQ ID NO: 1276760 - RNA, 19 nt, Artificial Sequence
  Description of Artificial Sequence: Synthetic oligonucleotide
acggucugggcaccauaau

SEQ ID NO: 1276761 - RNA, 19 nt, Artificial Sequence
  Description of Artificial Sequence: Synthetic oligonucleotide
cacauugaguaggguucac

SEQ ID NO: 1276762 - RNA, 19 nt, Artificial Sequence
  Description of Artificial Sequence: Synthetic oligonucleotide
cccagcauauccuugggcu

SEQ ID NO: 1276763 - RNA, 19 nt, Artificial Sequence
  Description of Artificial Sequence: Synthetic oligonucleotide
cgacggugcccucaggagg

SEQ ID NO: 1276764 - RNA, 19 nt, Artificial Sequence
  Description of Artificial Sequence: Synthetic oligonucleotide
cccaagaguaagugggaca

SEQ ID NO: 1276765 - RNA, 19 nt, Artificial Sequence
  Description of Artificial Sequence: Synthetic oligonucleotide
ugagugcaucaugcaacuu

SEQ ID NO: 1276766 - RNA, 19 nt, Artificial Sequence
  Description of Artificial Sequence: Synthetic oligonucleotide
gcaucgugagcggccagag

SEQ ID NO: 1276767 - RNA, 19 nt, Artificial Sequence
  Description of Artificial Sequence: Synthetic oligonucleotide
gcucgcuucaagaugccaa

SEQ ID NO: 1276768 - RNA, 19 nt, Artificial Sequence
  Description of Artificial Sequence: Synthetic oligonucleotide
ccuaaaccugaccgaggac

SEQ ID NO: 1276769 - RNA, 19 nt, Artificial Sequence
  Description of Artificial Sequence: Synthetic oligonucleotide
cacuuuggacccagcauau

SEQ ID NO: 1276770 - RNA, 19 nt, Artificial Sequence
  Description of Artificial Sequence: Synthetic oligonucleotide
uacguuccgucgggccucc

SEQ ID NO: 1276771 - RNA, 19 nt, Artificial Sequence
  Description of Artificial Sequence: Synthetic oligonucleotide
agccggagugcgcgguaca

SEQ ID NO: 1276772 - RNA, 19 nt, Artificial Sequence
  Description of Artificial Sequence: Synthetic oligonucleotide
acauggucguuggggugca

SEQ ID NO: 1276773 - RNA, 19 nt, Artificial Sequence
  Description of Artificial Sequence: Synthetic oligonucleotide
gcgagcucauagauucuug

SEQ ID NO: 1276774 - RNA, 19 nt, Artificial Sequence
  Description of Artificial Sequence: Synthetic oligonucleotide
cgacguucgggacacgcug

SEQ ID NO: 1276775 - RNA, 19 nt, Artificial Sequence
  Description of Artificial Sequence: Synthetic oligonucleotide
uuccaccgcagcggcgaug

SEQ ID NO: 1276776 - RNA, 19 nt, Artificial Sequence
  Description of Artificial Sequence: Synthetic oligonucleotide
ucccgacagcagugccucc

SEQ ID NO: 1276777 - RNA, 19 nt, Artificial Sequence
  Description of Artificial Sequence: Synthetic oligonucleotide
gcggccagagcuucaaacu

SEQ ID NO: 1276778 - RNA, 19 nt, Artificial Sequence
  Description of Artificial Sequence: Synthetic oligonucleotide
guuccgucgggccuccaau

SEQ ID NO: 1276779 - RNA, 19 nt, Artificial Sequence
  Description of Artificial Sequence: Synthetic oligonucleotide
cccaauuuugaugaccugu

SEQ ID NO: 1276780 - RNA, 19 nt, Artificial Sequence
  Description of Artificial Sequence: Synthetic oligonucleotide
gcccucaggaggcgacgcg

SEQ ID NO: 1276781 - RNA, 19 nt, Artificial Sequence
  Description of Artificial Sequence: Synthetic oligonucleotide
ccauucgagcgacguucgg

SEQ ID NO: 1276782 - RNA, 19 nt, Artificial Sequence
  Description of Artificial Sequence: Synthetic oligonucleotide
ggcauacguuccgucgggc

SEQ ID NO: 1276783 - RNA, 19 nt, Artificial Sequence
  Description of Artificial Sequence: Synthetic oligonucleotide
cgggcgaggagccggagug

SEQ ID NO: 1276784 - RNA, 19 nt, Artificial Sequence
  Description of Artificial Sequence: Synthetic oligonucleotide
acggugcccucaggaggcg

SEQ ID NO: 1276785 - RNA, 19 nt, Artificial Sequence
  Description of Artificial Sequence: Synthetic oligonucleotide
ccauaauccugguuuacuu

SEQ ID NO: 1276786 - RNA, 19 nt, Artificial Sequence
  Description of Artificial Sequence: Synthetic oligonucleotide
ggcaucgugagcggccaga

SEQ ID NO: 1276787 - RNA, 19 nt, Artificial Sequence
  Description of Artificial Sequence: Synthetic oligonucleotide
gcguccugcguguggguuc

SEQ ID NO: 1276788 - RNA, 19 nt, Artificial Sequence
  Description of Artificial Sequence: Synthetic oligonucleotide
ccugauccagucugccaca

SEQ ID NO: 1276789 - RNA, 19 nt, Artificial Sequence
  Description of Artificial Sequence: Synthetic oligonucleotide
gugcgcgguacauggugcu

SEQ ID NO: 1276790 - RNA, 19 nt, Artificial Sequence
  Description of Artificial Sequence: Synthetic oligonucleotide
cgagcgacguucgggacac

SEQ ID NO: 1276791 - RNA, 19 nt, Artificial Sequence
  Description of Artificial Sequence: Synthetic oligonucleotide
gcagcgccggccgacggug

SEQ ID NO: 1276792 - RNA, 19 nt, Artificial Sequence
  Description of Artificial Sequence: Synthetic oligonucleotide
cagcgccggccgacggugc

SEQ ID NO: 1276793 - RNA, 19 nt, Artificial Sequence
  Description of Artificial Sequence: Synthetic oligonucleotide
guguggguucgcccaauuu

SEQ ID NO: 1276794 - RNA, 19 nt, Artificial Sequence
  Description of Artificial Sequence: Synthetic oligonucleotide
gcgggagggcgccugcuuc

SEQ ID NO: 1276795 - RNA, 19 nt, Artificial Sequence
  Description of Artificial Sequence: Synthetic oligonucleotide
cgcccaauuuugaugaccu

SEQ ID NO: 1276796 - RNA, 19 nt, Artificial Sequence
  Description of Artificial Sequence: Synthetic oligonucleotide
ggguucgcccaauuuugau

SEQ ID NO: 1276797 - RNA, 19 nt, Artificial Sequence
  Description of Artificial Sequence: Synthetic oligonucleotide
ggauuggcauacguuccgu

SEQ ID NO: 1276798 - RNA, 19 nt, Artificial Sequence
  Description of Artificial Sequence: Synthetic oligonucleotide
gugagcggccagagcuuca

SEQ ID NO: 1276799 - RNA, 19 nt, Artificial Sequence
  Description of Artificial Sequence: Synthetic oligonucleotide
aggugucauucgagcucug

SEQ ID NO: 1276800 - RNA, 19 nt, Artificial Sequence
  Description of Artificial Sequence: Synthetic oligonucleotide
ccuuuaagguugauccuuu

SEQ ID NO: 1276801 - RNA, 19 nt, Artificial Sequence
  Description of Artificial Sequence: Synthetic oligonucleotide
gagcgacguucgggacacg

SEQ ID NO: 1276802 - RNA, 19 nt, Artificial Sequence
  Description of Artificial Sequence: Synthetic oligonucleotide
cauggucguuggggugcac

SEQ ID NO: 1276803 - RNA, 19 nt, Artificial Sequence
  Description of Artificial Sequence: Synthetic oligonucleotide
cauacccuauauggggauu

SEQ ID NO: 1276804 - RNA, 19 nt, Artificial Sequence
  Description of Artificial Sequence: Synthetic oligonucleotide
gcauggcggcuuuuauucu

SEQ ID NO: 1276805 - RNA, 19 nt, Artificial Sequence
  Description of Artificial Sequence: Synthetic oligonucleotide
gcagugagauagccaaguu

SEQ ID NO: 1276806 - RNA, 19 nt, Artificial Sequence
  Description of Artificial Sequence: Synthetic oligonucleotide
gucgggccuccaaucuuaa

SEQ ID NO: 1276807 - RNA, 19 nt, Artificial Sequence
  Description of Artificial Sequence: Synthetic oligonucleotide
cuugggcugcaaccaucgu

SEQ ID NO: 1276808 - RNA, 19 nt, Artificial Sequence
  Description of Artificial Sequence: Synthetic oligonucleotide
ggacacgcugcgggagggc

SEQ ID NO: 1276809 - RNA, 19 nt, Artificial Sequence
  Description of Artificial Sequence: Synthetic oligonucleotide
caaagccgauucugguguu

SEQ ID NO: 1276810 - RNA, 19 nt, Artificial Sequence
  Description of Artificial Sequence: Synthetic oligonucleotide
cagcgagcucauagauucu

SEQ ID NO: 1276811 - RNA, 19 nt, Artificial Sequence
  Description of Artificial Sequence: Synthetic oligonucleotide
cggucugggcaccauaaua

SEQ ID NO: 1276812 - RNA, 19 nt, Artificial Sequence
  Description of Artificial Sequence: Synthetic oligonucleotide
ccggagugcgcgguacaug

SEQ ID NO: 1276813 - RNA, 19 nt, Artificial Sequence
  Description of Artificial Sequence: Synthetic oligonucleotide
ccacugaauuccugcccaa

SEQ ID NO: 1276814 - RNA, 19 nt, Artificial Sequence
  Description of Artificial Sequence: Synthetic oligonucleotide
cguucgggacacgcugcgg

SEQ ID NO: 1276815 - RNA, 19 nt, Artificial Sequence
  Description of Artificial Sequence: Synthetic oligonucleotide
cagcaacaugauuccccau

SEQ ID NO: 1276816 - RNA, 19 nt, Artificial Sequence
  Description of Artificial Sequence: Synthetic oligonucleotide
cgugagcggccagagcuuc

SEQ ID NO: 1276817 - RNA, 19 nt, Artificial Sequence
  Description of Artificial Sequence: Synthetic oligonucleotide
cauucgagcucuggcucuu

SEQ ID NO: 1276818 - RNA, 19 nt, Artificial Sequence
  Description of Artificial Sequence: Synthetic oligonucleotide
cgucgggccuccaaucuua

SEQ ID NO: 1276819 - RNA, 19 nt, Artificial Sequence
  Description of Artificial Sequence: Synthetic oligonucleotide
gcgacgcgagcgggcgagg

SEQ ID NO: 1276820 - RNA, 19 nt, Artificial Sequence
  Description of Artificial Sequence: Synthetic oligonucleotide
gcgacguucgggacacgcu

SEQ ID NO: 1276821 - RNA, 19 nt, Artificial Sequence
  Description of Artificial Sequence: Synthetic oligonucleotide
cagcguccugcgugugggu

SEQ ID NO: 1276822 - RNA, 19 nt, Artificial Sequence
  Description of Artificial Sequence: Synthetic oligonucleotide
cuuccaccgcagcggcgau

SEQ ID NO: 1276823 - RNA, 19 nt, Artificial Sequence
  Description of Artificial Sequence: Synthetic oligonucleotide
cggcuuuuauucucgccau

SEQ ID NO: 1276824 - RNA, 19 nt, Artificial Sequence
  Description of Artificial Sequence: Synthetic oligonucleotide
cucacggucugggcaccau

SEQ ID NO: 1276825 - RNA, 19 nt, Artificial Sequence
  Description of Artificial Sequence: Synthetic oligonucleotide
cguuccgucgggccuccaa

SEQ ID NO: 1276826 - RNA, 19 nt, Artificial Sequence
  Description of Artificial Sequence: Synthetic oligonucleotide
acguuccgucgggccucca

SEQ ID NO: 1276827 - RNA, 19 nt, Artificial Sequence
  Description of Artificial Sequence: Synthetic oligonucleotide
gccggagugcgcgguacau

SEQ ID NO: 1276828 - RNA, 19 nt, Artificial Sequence
  Description of Artificial Sequence: Synthetic oligonucleotide
ccgucgggccuccaaucuu

SEQ ID NO: 1276829 - RNA, 19 nt, Artificial Sequence
  Description of Artificial Sequence: Synthetic oligonucleotide
gccggccgacggugcccuc

SEQ ID NO: 1276830 - RNA, 19 nt, Artificial Sequence
  Description of Artificial Sequence: Synthetic oligonucleotide
cguuuccuuuaagguugau

SEQ ID NO: 1276831 - RNA, 19 nt, Artificial Sequence
  Description of Artificial Sequence: Synthetic oligonucleotide
aguucuauagacuugaguc

SEQ ID NO: 1276832 - RNA, 19 nt, Artificial Sequence
  Description of Artificial Sequence: Synthetic oligonucleotide
auuaugauuccuuucaaac

SEQ ID NO: 1276833 - RNA, 19 nt, Artificial Sequence
  Description of Artificial Sequence: Synthetic oligonucleotide
gauaaugucagacaauucc

SEQ ID NO: 1276834 - RNA, 19 nt, Artificial Sequence
  Description of Artificial Sequence: Synthetic oligonucleotide
uucacuguaaugaacaucc

SEQ ID NO: 1276835 - RNA, 19 nt, Artificial Sequence
  Description of Artificial Sequence: Synthetic oligonucleotide
uguaugaaaagcuugacga

SEQ ID NO: 1276836 - RNA, 19 nt, Artificial Sequence
  Description of Artificial Sequence: Synthetic oligonucleotide
uuauuaagcaguaauuaag

SEQ ID NO: 1276837 - RNA, 19 nt, Artificial Sequence
  Description of Artificial Sequence: Synthetic oligonucleotide
aaagacuggccauaaaagg

SEQ ID NO: 1276838 - RNA, 19 nt, Artificial Sequence
  Description of Artificial Sequence: Synthetic oligonucleotide
aaaccaagcacaguggugc

SEQ ID NO: 1276839 - RNA, 19 nt, Artificial Sequence
  Description of Artificial Sequence: Synthetic oligonucleotide
ucaaggaaaucucugaaag

SEQ ID NO: 1276840 - RNA, 19 nt, Artificial Sequence
  Description of Artificial Sequence: Synthetic oligonucleotide
uaaauuggaauaaucaacu

SEQ ID NO: 1276841 - RNA, 19 nt, Artificial Sequence
  Description of Artificial Sequence: Synthetic oligonucleotide
ucuacuuuucagcauauag

SEQ ID NO: 1276842 - RNA, 19 nt, Artificial Sequence
  Description of Artificial Sequence: Synthetic oligonucleotide
aauuaagcgaauugaauga

SEQ ID NO: 1276843 - RNA, 19 nt, Artificial Sequence
  Description of Artificial Sequence: Synthetic oligonucleotide
ugacuuucauuuaagaaag

SEQ ID NO: 1276844 - RNA, 19 nt, Artificial Sequence
  Description of Artificial Sequence: Synthetic oligonucleotide
aaaacaaaucuguugauau

SEQ ID NO: 1276845 - RNA, 19 nt, Artificial Sequence
  Description of Artificial Sequence: Synthetic oligonucleotide
aguuucacgagucucaagg

SEQ ID NO: 1276846 - RNA, 19 nt, Artificial Sequence
  Description of Artificial Sequence: Synthetic oligonucleotide
augguacucgacuugaucc

SEQ ID NO: 1276847 - RNA, 19 nt, Artificial Sequence
  Description of Artificial Sequence: Synthetic oligonucleotide
uguaauguguuguucaucc

SEQ ID NO: 1276848 - RNA, 19 nt, Artificial Sequence
  Description of Artificial Sequence: Synthetic oligonucleotide
auagacuugagucaauuuc

SEQ ID NO: 1276849 - RNA, 19 nt, Artificial Sequence
  Description of Artificial Sequence: Synthetic oligonucleotide
aagaaaguaccuaaaaguc

SEQ ID NO: 1276850 - RNA, 19 nt, Artificial Sequence
  Description of Artificial Sequence: Synthetic oligonucleotide
uucaccauaaaguuucacg

SEQ ID NO: 1276851 - RNA, 19 nt, Artificial Sequence
  Description of Artificial Sequence: Synthetic oligonucleotide
agaaauuacuucauaacgc

SEQ ID NO: 1276852 - RNA, 19 nt, Artificial Sequence
  Description of Artificial Sequence: Synthetic oligonucleotide
auaaauuggaauaaucaac

SEQ ID NO: 1276853 - RNA, 19 nt, Artificial Sequence
  Description of Artificial Sequence: Synthetic oligonucleotide
uguauaugagcaaauuuug

SEQ ID NO: 1276854 - RNA, 19 nt, Artificial Sequence
  Description of Artificial Sequence: Synthetic oligonucleotide
uaagcaguaauuaagcgaa

SEQ ID NO: 1276855 - RNA, 19 nt, Artificial Sequence
  Description of Artificial Sequence: Synthetic oligonucleotide
gauauuaugauuccuuuca

SEQ ID NO: 1276856 - RNA, 19 nt, Artificial Sequence
  Description of Artificial Sequence: Synthetic oligonucleotide
aaugcuacaugccuguaug

SEQ ID NO: 1276857 - RNA, 19 nt, Artificial Sequence
  Description of Artificial Sequence: Synthetic oligonucleotide
aauccugaauuauuuugac

SEQ ID NO: 1276858 - RNA, 19 nt, Artificial Sequence
  Description of Artificial Sequence: Synthetic oligonucleotide
ugccugauaagguauaagg

SEQ ID NO: 1276859 - RNA, 19 nt, Artificial Sequence
  Description of Artificial Sequence: Synthetic oligonucleotide
uauaugagcaaauuuugga

SEQ ID NO: 1276860 - RNA, 19 nt, Artificial Sequence
  Description of Artificial Sequence: Synthetic oligonucleotide
uuaagcaguaauuaagcga

SEQ ID NO: 1276861 - RNA, 19 nt, Artificial Sequence
  Description of Artificial Sequence: Synthetic oligonucleotide
acuaauugcacaaaauacg

SEQ ID NO: 1276862 - RNA, 19 nt, Artificial Sequence
  Description of Artificial Sequence: Synthetic oligonucleotide
aagcgaauugaaugaaugg

SEQ ID NO: 1276863 - RNA, 19 nt, Artificial Sequence
  Description of Artificial Sequence: Synthetic oligonucleotide
ggaguaauuuucuugaagg

SEQ ID NO: 1276864 - RNA, 19 nt, Artificial Sequence
  Description of Artificial Sequence: Synthetic oligonucleotide
uaugaauuuccuaaacaug

SEQ ID NO: 1276865 - RNA, 19 nt, Artificial Sequence
  Description of Artificial Sequence: Synthetic oligonucleotide
cauauuucagcauaucuug

SEQ ID NO: 1276866 - RNA, 19 nt, Artificial Sequence
  Description of Artificial Sequence: Synthetic oligonucleotide
auuaagcaguaauuaagcg

SEQ ID NO: 1276867 - RNA, 19 nt, Artificial Sequence
  Description of Artificial Sequence: Synthetic oligonucleotide
aaaucuguugauauuauga

SEQ ID NO: 1276868 - RNA, 19 nt, Artificial Sequence
  Description of Artificial Sequence: Synthetic oligonucleotide
uaauggaccagcauugacc

SEQ ID NO: 1276869 - RNA, 19 nt, Artificial Sequence
  Description of Artificial Sequence: Synthetic oligonucleotide
ucuucgucuauauugggag

SEQ ID NO: 1276870 - RNA, 19 nt, Artificial Sequence
  Description of Artificial Sequence: Synthetic oligonucleotide
uaaugaacauccaucauuc

SEQ ID NO: 1276871 - RNA, 19 nt, Artificial Sequence
  Description of Artificial Sequence: Synthetic oligonucleotide
caauuucucaaacucacgg

SEQ ID NO: 1276872 - RNA, 19 nt, Artificial Sequence
  Description of Artificial Sequence: Synthetic oligonucleotide
uaagcgaauugaaugaaug

SEQ ID NO: 1276873 - RNA, 19 nt, Artificial Sequence
  Description of Artificial Sequence: Synthetic oligonucleotide
ucagcauauagauuuaccu

SEQ ID NO: 1276874 - RNA, 19 nt, Artificial Sequence
  Description of Artificial Sequence: Synthetic oligonucleotide
gaaugaaugguuuugaccu

SEQ ID NO: 1276875 - RNA, 19 nt, Artificial Sequence
  Description of Artificial Sequence: Synthetic oligonucleotide
uucaucaguagcaacguca

SEQ ID NO: 1276876 - RNA, 19 nt, Artificial Sequence
  Description of Artificial Sequence: Synthetic oligonucleotide
ucaccauaaaguuucacga

SEQ ID NO: 1276877 - RNA, 19 nt, Artificial Sequence
  Description of Artificial Sequence: Synthetic oligonucleotide
uuguaauaucugcucaugg

SEQ ID NO: 1276878 - RNA, 19 nt, Artificial Sequence
  Description of Artificial Sequence: Synthetic oligonucleotide
uacguaagcacccuguaug

SEQ ID NO: 1276879 - RNA, 19 nt, Artificial Sequence
  Description of Artificial Sequence: Synthetic oligonucleotide
auaagugacuuguauauga

SEQ ID NO: 1276880 - RNA, 19 nt, Artificial Sequence
  Description of Artificial Sequence: Synthetic oligonucleotide
uuuaagaaagcccuugcau

SEQ ID NO: 1276881 - RNA, 19 nt, Artificial Sequence
  Description of Artificial Sequence: Synthetic oligonucleotide
auaaaaggcaacucugaag

SEQ ID NO: 1276882 - RNA, 19 nt, Artificial Sequence
  Description of Artificial Sequence: Synthetic oligonucleotide
cugauaagguauaaggggc

SEQ ID NO: 1276883 - RNA, 19 nt, Artificial Sequence
  Description of Artificial Sequence: Synthetic oligonucleotide
ucagaaauuacuucauaac

SEQ ID NO: 1276884 - RNA, 19 nt, Artificial Sequence
  Description of Artificial Sequence: Synthetic oligonucleotide
uuagguggauacuugguag

SEQ ID NO: 1276885 - RNA, 19 nt, Artificial Sequence
  Description of Artificial Sequence: Synthetic oligonucleotide
uacaaauacguaagcaccc

SEQ ID NO: 1276886 - RNA, 19 nt, Artificial Sequence
  Description of Artificial Sequence: Synthetic oligonucleotide
ucaaaauagggcuucacau

SEQ ID NO: 1276887 - RNA, 19 nt, Artificial Sequence
  Description of Artificial Sequence: Synthetic oligonucleotide
uaaaguuucacgagucuca

SEQ ID NO: 1276888 - RNA, 19 nt, Artificial Sequence
  Description of Artificial Sequence: Synthetic oligonucleotide
agucucguuauuauuaagc

SEQ ID NO: 1276889 - RNA, 19 nt, Artificial Sequence
  Description of Artificial Sequence: Synthetic oligonucleotide
cacuaauugcacaaaauac

SEQ ID NO: 1276890 - RNA, 19 nt, Artificial Sequence
  Description of Artificial Sequence: Synthetic oligonucleotide
aaucuguugauauuaugau

SEQ ID NO: 1276891 - RNA, 19 nt, Artificial Sequence
  Description of Artificial Sequence: Synthetic oligonucleotide
aauuacuucauaacgcucu

SEQ ID NO: 1276892 - RNA, 19 nt, Artificial Sequence
  Description of Artificial Sequence: Synthetic oligonucleotide
uuuaauuagccgcucauuu

SEQ ID NO: 1276893 - RNA, 19 nt, Artificial Sequence
  Description of Artificial Sequence: Synthetic oligonucleotide
ucagacaauuccuuuacca

SEQ ID NO: 1276894 - RNA, 19 nt, Artificial Sequence
  Description of Artificial Sequence: Synthetic oligonucleotide
uuuaccuuuuauuggauuc

SEQ ID NO: 1276895 - RNA, 19 nt, Artificial Sequence
  Description of Artificial Sequence: Synthetic oligonucleotide
uuauuauuaagcaguaauu

SEQ ID NO: 1276896 - RNA, 19 nt, Artificial Sequence
  Description of Artificial Sequence: Synthetic oligonucleotide
ugcauaaccuccaaaauuu

SEQ ID NO: 1276897 - RNA, 19 nt, Artificial Sequence
  Description of Artificial Sequence: Synthetic oligonucleotide
uuauuggauuccauuauac

SEQ ID NO: 1276898 - RNA, 19 nt, Artificial Sequence
  Description of Artificial Sequence: Synthetic oligonucleotide
aauacguguaauguguugu

SEQ ID NO: 1276899 - RNA, 19 nt, Artificial Sequence
  Description of Artificial Sequence: Synthetic oligonucleotide
agcuugacgauuuuggugu

SEQ ID NO: 1276900 - RNA, 19 nt, Artificial Sequence
  Description of Artificial Sequence: Synthetic oligonucleotide
gaaguggucaagauggucc

SEQ ID NO: 1276901 - RNA, 19 nt, Artificial Sequence
  Description of Artificial Sequence: Synthetic oligonucleotide
agcauauagauuuaccuaa

SEQ ID NO: 1276902 - RNA, 19 nt, Artificial Sequence
  Description of Artificial Sequence: Synthetic oligonucleotide
uugggaguaauuuucuuga

SEQ ID NO: 1276903 - RNA, 19 nt, Artificial Sequence
  Description of Artificial Sequence: Synthetic oligonucleotide
aaauacguguaauguguug

SEQ ID NO: 1276904 - RNA, 19 nt, Artificial Sequence
  Description of Artificial Sequence: Synthetic oligonucleotide
aagcuugacgauuuuggug

SEQ ID NO: 1276905 - RNA, 19 nt, Artificial Sequence
  Description of Artificial Sequence: Synthetic oligonucleotide
uuguguaagcgccaugaag

SEQ ID NO: 1276906 - RNA, 19 nt, Artificial Sequence
  Description of Artificial Sequence: Synthetic oligonucleotide
ucucguuauuauuaagcag

SEQ ID NO: 1276907 - RNA, 19 nt, Artificial Sequence
  Description of Artificial Sequence: Synthetic oligonucleotide
auagauguauucuuuucca

SEQ ID NO: 1276908 - RNA, 19 nt, Artificial Sequence
  Description of Artificial Sequence: Synthetic oligonucleotide
uuaagaaagcccuugcaua

SEQ ID NO: 1276909 - RNA, 19 nt, Artificial Sequence
  Description of Artificial Sequence: Synthetic oligonucleotide
uuugauuuuaacccuucau

SEQ ID NO: 1276910 - RNA, 19 nt, Artificial Sequence
  Description of Artificial Sequence: Synthetic oligonucleotide
uucuuagguggauacuugg

SEQ ID NO: 1276911 - RNA, 19 nt, Artificial Sequence
  Description of Artificial Sequence: Synthetic oligonucleotide
uuuuguguaagcgccauga

SEQ ID NO: 1276912 - RNA, 19 nt, Artificial Sequence
  Description of Artificial Sequence: Synthetic oligonucleotide
uuuugacauuuucaguacc

SEQ ID NO: 1276913 - RNA, 19 nt, Artificial Sequence
  Description of Artificial Sequence: Synthetic oligonucleotide
auaaaguuucacgagucuc

SEQ ID NO: 1276914 - RNA, 19 nt, Artificial Sequence
  Description of Artificial Sequence: Synthetic oligonucleotide
cacauaucaaaucuccaag

SEQ ID NO: 1276915 - RNA, 19 nt, Artificial Sequence
  Description of Artificial Sequence: Synthetic oligonucleotide
auaugagcaaauuuuggau

SEQ ID NO: 1276916 - RNA, 19 nt, Artificial Sequence
  Description of Artificial Sequence: Synthetic oligonucleotide
aaacucacggcguuucuca

SEQ ID NO: 1276917 - RNA, 19 nt, Artificial Sequence
  Description of Artificial Sequence: Synthetic oligonucleotide
uaccaugucucuaaaauuu

SEQ ID NO: 1276918 - RNA, 19 nt, Artificial Sequence
  Description of Artificial Sequence: Synthetic oligonucleotide
agacaauuccuuuaccaug

SEQ ID NO: 1276919 - RNA, 19 nt, Artificial Sequence
  Description of Artificial Sequence: Synthetic oligonucleotide
gucaauugguuucaaauuc

SEQ ID NO: 1276920 - RNA, 19 nt, Artificial Sequence
  Description of Artificial Sequence: Synthetic oligonucleotide
uaauugcacaaaauacgug

SEQ ID NO: 1276921 - RNA, 19 nt, Artificial Sequence
  Description of Artificial Sequence: Synthetic oligonucleotide
ucuauauugggaguaauuu

SEQ ID NO: 1276922 - RNA, 19 nt, Artificial Sequence
  Description of Artificial Sequence: Synthetic oligonucleotide
uuggaaaucucagaaauua

SEQ ID NO: 1276923 - RNA, 19 nt, Artificial Sequence
  Description of Artificial Sequence: Synthetic oligonucleotide
gauuccauuauacaauugu

SEQ ID NO: 1276924 - RNA, 19 nt, Artificial Sequence
  Description of Artificial Sequence: Synthetic oligonucleotide
uaacauuugcaccgcuccg

SEQ ID NO: 1276925 - RNA, 19 nt, Artificial Sequence
  Description of Artificial Sequence: Synthetic oligonucleotide
ucauggauaaugucagaca

SEQ ID NO: 1276926 - RNA, 19 nt, Artificial Sequence
  Description of Artificial Sequence: Synthetic oligonucleotide
cauuccagcaucuucuuuc

SEQ ID NO: 1276927 - RNA, 19 nt, Artificial Sequence
  Description of Artificial Sequence: Synthetic oligonucleotide
acauaucaaaucuccaagu

SEQ ID NO: 1276928 - RNA, 19 nt, Artificial Sequence
  Description of Artificial Sequence: Synthetic oligonucleotide
ucauuuaagaaagcccuug

SEQ ID NO: 1276929 - RNA, 19 nt, Artificial Sequence
  Description of Artificial Sequence: Synthetic oligonucleotide
accauaaaguuucacgagu

SEQ ID NO: 1276930 - RNA, 19 nt, Artificial Sequence
  Description of Artificial Sequence: Synthetic oligonucleotide
guauaugagcaaauuuugg

SEQ ID NO: 1276931 - RNA, 19 nt, Artificial Sequence
  Description of Artificial Sequence: Synthetic oligonucleotide
acuugagucaauuucucaa

SEQ ID NO: 1276932 - RNA, 19 nt, Artificial Sequence
  Description of Artificial Sequence: Synthetic oligonucleotide
uaacccuucaugguacucg

SEQ ID NO: 1276933 - RNA, 19 nt, Artificial Sequence
  Description of Artificial Sequence: Synthetic oligonucleotide
cuggauguaccacuaauug

SEQ ID NO: 1276934 - RNA, 19 nt, Artificial Sequence
  Description of Artificial Sequence: Synthetic oligonucleotide
aacgcucugccuuccacag

SEQ ID NO: 1276935 - RNA, 19 nt, Artificial Sequence
  Description of Artificial Sequence: Synthetic oligonucleotide
acgauuuuggugucgggag

SEQ ID NO: 1276936 - RNA, 19 nt, Artificial Sequence
  Description of Artificial Sequence: Synthetic oligonucleotide
uuuaacauuugcaccgcuc

SEQ ID NO: 1276937 - RNA, 19 nt, Artificial Sequence
  Description of Artificial Sequence: Synthetic oligonucleotide
uuugaccucuacuuuucag

SEQ ID NO: 1276938 - RNA, 19 nt, Artificial Sequence
  Description of Artificial Sequence: Synthetic oligonucleotide
auuuaagaaagcccuugca

SEQ ID NO: 1276939 - RNA, 19 nt, Artificial Sequence
  Description of Artificial Sequence: Synthetic oligonucleotide
uugauccucuuuaauuagc

SEQ ID NO: 1276940 - RNA, 19 nt, Artificial Sequence
  Description of Artificial Sequence: Synthetic oligonucleotide
acgucaauugguuucaaau

SEQ ID NO: 1276941 - RNA, 19 nt, Artificial Sequence
  Description of Artificial Sequence: Synthetic oligonucleotide
augguuuugaccucuacuu

SEQ ID NO: 1276942 - RNA, 19 nt, Artificial Sequence
  Description of Artificial Sequence: Synthetic oligonucleotide
aagugcaaugcuacaugcc

SEQ ID NO: 1276943 - RNA, 19 nt, Artificial Sequence
  Description of Artificial Sequence: Synthetic oligonucleotide
auacuugguagcuugacuu

SEQ ID NO: 1276944 - RNA, 19 nt, Artificial Sequence
  Description of Artificial Sequence: Synthetic oligonucleotide
uccucuuuaauuagccgcu

SEQ ID NO: 1276945 - RNA, 19 nt, Artificial Sequence
  Description of Artificial Sequence: Synthetic oligonucleotide
cuugauccucuuuaauuag

SEQ ID NO: 1276946 - RNA, 19 nt, Artificial Sequence
  Description of Artificial Sequence: Synthetic oligonucleotide
uuguacauagucucguuau

SEQ ID NO: 1276947 - RNA, 19 nt, Artificial Sequence
  Description of Artificial Sequence: Synthetic oligonucleotide
gcucauuuaguucaagugc

SEQ ID NO: 1276948 - RNA, 19 nt, Artificial Sequence
  Description of Artificial Sequence: Synthetic oligonucleotide
cuuggguucuuuauagaug

SEQ ID NO: 1276949 - RNA, 19 nt, Artificial Sequence
  Description of Artificial Sequence: Synthetic oligonucleotide
cucauuuaguucaagugca

SEQ ID NO: 1276950 - RNA, 19 nt, Artificial Sequence
  Description of Artificial Sequence: Synthetic oligonucleotide
acacauaucaaaucuccaa

SEQ ID NO: 1276951 - RNA, 19 nt, Artificial Sequence
  Description of Artificial Sequence: Synthetic oligonucleotide
aaauuggaauaaucaacuu

SEQ ID NO: 1276952 - RNA, 19 nt, Artificial Sequence
  Description of Artificial Sequence: Synthetic oligonucleotide
auaucaaaucuccaaguuu

SEQ ID NO: 1276953 - RNA, 19 nt, Artificial Sequence
  Description of Artificial Sequence: Synthetic oligonucleotide
gaaaucucugaaaggcccg

SEQ ID NO: 1276954 - RNA, 19 nt, Artificial Sequence
  Description of Artificial Sequence: Synthetic oligonucleotide
aaauacguaagcacccugu

SEQ ID NO: 1276955 - RNA, 19 nt, Artificial Sequence
  Description of Artificial Sequence: Synthetic oligonucleotide
uggaccagcauugaccugc

SEQ ID NO: 1276956 - RNA, 19 nt, Artificial Sequence
  Description of Artificial Sequence: Synthetic oligonucleotide
uuggggaaccauaaccucu

SEQ ID NO: 1276957 - RNA, 19 nt, Artificial Sequence
  Description of Artificial Sequence: Synthetic oligonucleotide
ugugcauaaccuccaaaau

SEQ ID NO: 1276958 - RNA, 19 nt, Artificial Sequence
  Description of Artificial Sequence: Synthetic oligonucleotide
uggaaaucucagaaauuac

SEQ ID NO: 1276959 - RNA, 19 nt, Artificial Sequence
  Description of Artificial Sequence: Synthetic oligonucleotide
aaacaaaucuguugauauu

SEQ ID NO: 1276960 - RNA, 19 nt, Artificial Sequence
  Description of Artificial Sequence: Synthetic oligonucleotide
uugacgauuuuggugucgg

SEQ ID NO: 1276961 - RNA, 19 nt, Artificial Sequence
  Description of Artificial Sequence: Synthetic oligonucleotide
uaaucaacuuggaaaucuc

SEQ ID NO: 1276962 - RNA, 19 nt, Artificial Sequence
  Description of Artificial Sequence: Synthetic oligonucleotide
uggauaaugucagacaauu

SEQ ID NO: 1276963 - RNA, 19 nt, Artificial Sequence
  Description of Artificial Sequence: Synthetic oligonucleotide
uugauauuaugauuccuuu

SEQ ID NO: 1276964 - RNA, 19 nt, Artificial Sequence
  Description of Artificial Sequence: Synthetic oligonucleotide
caaaauacguguaaugugu

SEQ ID NO: 1276965 - RNA, 19 nt, Artificial Sequence
  Description of Artificial Sequence: Synthetic oligonucleotide
auaacgcucugccuuccac

SEQ ID NO: 1276966 - RNA, 19 nt, Artificial Sequence
  Description of Artificial Sequence: Synthetic oligonucleotide
ggaaccauaaccucuguca

SEQ ID NO: 1276967 - RNA, 19 nt, Artificial Sequence
  Description of Artificial Sequence: Synthetic oligonucleotide
cagcaaaaccucuucacug

SEQ ID NO: 1276968 - RNA, 19 nt, Artificial Sequence
  Description of Artificial Sequence: Synthetic oligonucleotide
ugguccggcguuuacacug

SEQ ID NO: 1276969 - RNA, 19 nt, Artificial Sequence
  Description of Artificial Sequence: Synthetic oligonucleotide
auuugcaccgcuccgaaua

SEQ ID NO: 1276970 - RNA, 19 nt, Artificial Sequence
  Description of Artificial Sequence: Synthetic oligonucleotide
uuucucaaacucacggcgu

SEQ ID NO: 1276971 - RNA, 19 nt, Artificial Sequence
  Description of Artificial Sequence: Synthetic oligonucleotide
uuaauuagccgcucauuua

SEQ ID NO: 1276972 - RNA, 19 nt, Artificial Sequence
  Description of Artificial Sequence: Synthetic oligonucleotide
agcgaauugaaugaauggu

SEQ ID NO: 1276973 - RNA, 19 nt, Artificial Sequence
  Description of Artificial Sequence: Synthetic oligonucleotide
aauacguaagcacccugua

SEQ ID NO: 1276974 - RNA, 19 nt, Artificial Sequence
  Description of Artificial Sequence: Synthetic oligonucleotide
guucuauagacuugaguca

SEQ ID NO: 1276975 - RNA, 19 nt, Artificial Sequence
  Description of Artificial Sequence: Synthetic oligonucleotide
uucucauaaauuggaauaa

SEQ ID NO: 1276976 - RNA, 19 nt, Artificial Sequence
  Description of Artificial Sequence: Synthetic oligonucleotide
acguguaauguguuguuca

SEQ ID NO: 1276977 - RNA, 19 nt, Artificial Sequence
  Description of Artificial Sequence: Synthetic oligonucleotide
uguguuguucauccaggga

SEQ ID NO: 1276978 - RNA, 19 nt, Artificial Sequence
  Description of Artificial Sequence: Synthetic oligonucleotide
uuaagcgaauugaaugaau

SEQ ID NO: 1276979 - RNA, 19 nt, Artificial Sequence
  Description of Artificial Sequence: Synthetic oligonucleotide
auuacuucauaacgcucug

SEQ ID NO: 1276980 - RNA, 19 nt, Artificial Sequence
  Description of Artificial Sequence: Synthetic oligonucleotide
aagaugguccggcguuuac

SEQ ID NO: 1276981 - RNA, 19 nt, Artificial Sequence
  Description of Artificial Sequence: Synthetic oligonucleotide
aaccauaaccucugucacu

SEQ ID NO: 1276982 - RNA, 19 nt, Artificial Sequence
  Description of Artificial Sequence: Synthetic oligonucleotide
aauuuccuaaacaugucuu

SEQ ID NO: 1276983 - RNA, 19 nt, Artificial Sequence
  Description of Artificial Sequence: Synthetic oligonucleotide
ugaaaggcccgugagcuug

SEQ ID NO: 1276984 - RNA, 19 nt, Artificial Sequence
  Description of Artificial Sequence: Synthetic oligonucleotide
gaugguccggcguuuacac

SEQ ID NO: 1276985 - RNA, 19 nt, Artificial Sequence
  Description of Artificial Sequence: Synthetic oligonucleotide
gucucguuauuauuaagca

SEQ ID NO: 1276986 - RNA, 19 nt, Artificial Sequence
  Description of Artificial Sequence: Synthetic oligonucleotide
ugucacuggauguaccacu

SEQ ID NO: 1276987 - RNA, 19 nt, Artificial Sequence
  Description of Artificial Sequence: Synthetic oligonucleotide
ucucauugccauuucuuuc

SEQ ID NO: 1276988 - RNA, 19 nt, Artificial Sequence
  Description of Artificial Sequence: Synthetic oligonucleotide
uucuauagacuugagucaa

SEQ ID NO: 1276989 - RNA, 19 nt, Artificial Sequence
  Description of Artificial Sequence: Synthetic oligonucleotide
uccuaaacaugucuuucaa

SEQ ID NO: 1276990 - RNA, 19 nt, Artificial Sequence
  Description of Artificial Sequence: Synthetic oligonucleotide
uggggaaccauaaccucug

SEQ ID NO: 1276991 - RNA, 19 nt, Artificial Sequence
  Description of Artificial Sequence: Synthetic oligonucleotide
acaguggugcaauuuccag

SEQ ID NO: 1276992 - RNA, 19 nt, Artificial Sequence
  Description of Artificial Sequence: Synthetic oligonucleotide
cauggauaaugucagacaa

SEQ ID NO: 1276993 - RNA, 19 nt, Artificial Sequence
  Description of Artificial Sequence: Synthetic oligonucleotide
caaaucuguugauauuaug

SEQ ID NO: 1276994 - RNA, 19 nt, Artificial Sequence
  Description of Artificial Sequence: Synthetic oligonucleotide
aaucaacuuggaaaucuca

SEQ ID NO: 1276995 - RNA, 19 nt, Artificial Sequence
  Description of Artificial Sequence: Synthetic oligonucleotide
auugaaugaaugguuuuga

SEQ ID NO: 1276996 - RNA, 19 nt, Artificial Sequence
  Description of Artificial Sequence: Synthetic oligonucleotide
caccauaaaguuucacgag

SEQ ID NO: 1276997 - RNA, 19 nt, Artificial Sequence
  Description of Artificial Sequence: Synthetic oligonucleotide
uagguggauacuugguagc

SEQ ID NO: 1276998 - RNA, 19 nt, Artificial Sequence
  Description of Artificial Sequence: Synthetic oligonucleotide
ugauuccuuucaaacucug

SEQ ID NO: 1276999 - RNA, 19 nt, Artificial Sequence
  Description of Artificial Sequence: Synthetic oligonucleotide
acagguuauaggaauccuc

SEQ ID NO: 1277000 - RNA, 19 nt, Artificial Sequence
  Description of Artificial Sequence: Synthetic oligonucleotide
cacacacuguucuagcaac

SEQ ID NO: 1277001 - RNA, 19 nt, Artificial Sequence
  Description of Artificial Sequence: Synthetic oligonucleotide
aacauuugcaccgcuccga

SEQ ID NO: 1277002 - RNA, 19 nt, Artificial Sequence
  Description of Artificial Sequence: Synthetic oligonucleotide
aaaugaguuugaagugguc

SEQ ID NO: 1277003 - RNA, 19 nt, Artificial Sequence
  Description of Artificial Sequence: Synthetic oligonucleotide
uuuuaacauuugcaccgcu

SEQ ID NO: 1277004 - RNA, 19 nt, Artificial Sequence
  Description of Artificial Sequence: Synthetic oligonucleotide
cacuuucuuagguggauac

SEQ ID NO: 1277005 - RNA, 19 nt, Artificial Sequence
  Description of Artificial Sequence: Synthetic oligonucleotide
aacccuucaugguacucga

SEQ ID NO: 1277006 - RNA, 19 nt, Artificial Sequence
  Description of Artificial Sequence: Synthetic oligonucleotide
uagucucguuauuauuaag

SEQ ID NO: 1277007 - RNA, 19 nt, Artificial Sequence
  Description of Artificial Sequence: Synthetic oligonucleotide
auuguacauagucucguua

SEQ ID NO: 1277008 - RNA, 19 nt, Artificial Sequence
  Description of Artificial Sequence: Synthetic oligonucleotide
uggauuccauuauacaauu

SEQ ID NO: 1277009 - RNA, 19 nt, Artificial Sequence
  Description of Artificial Sequence: Synthetic oligonucleotide
uucaugguacucgacuuga

SEQ ID NO: 1277010 - RNA, 19 nt, Artificial Sequence
  Description of Artificial Sequence: Synthetic oligonucleotide
ucguuauuauuaagcagua

SEQ ID NO: 1277011 - RNA, 19 nt, Artificial Sequence
  Description of Artificial Sequence: Synthetic oligonucleotide
auccugaauuauuuugaca

SEQ ID NO: 1277012 - RNA, 19 nt, Artificial Sequence
  Description of Artificial Sequence: Synthetic oligonucleotide
uauagacuugagucaauuu

SEQ ID NO: 1277013 - RNA, 19 nt, Artificial Sequence
  Description of Artificial Sequence: Synthetic oligonucleotide
ugcaccgcuccgaauauuc

SEQ ID NO: 1277014 - RNA, 19 nt, Artificial Sequence
  Description of Artificial Sequence: Synthetic oligonucleotide
uucauaacgcucugccuuc

SEQ ID NO: 1277015 - RNA, 19 nt, Artificial Sequence
  Description of Artificial Sequence: Synthetic oligonucleotide
aggcuaauggaccagcauu

SEQ ID NO: 1277016 - RNA, 19 nt, Artificial Sequence
  Description of Artificial Sequence: Synthetic oligonucleotide
cuuguaauaucugcucaug

SEQ ID NO: 1277017 - RNA, 19 nt, Artificial Sequence
  Description of Artificial Sequence: Synthetic oligonucleotide
cugugcauaaccuccaaaa

SEQ ID NO: 1277018 - RNA, 19 nt, Artificial Sequence
  Description of Artificial Sequence: Synthetic oligonucleotide
cuaauggaccagcauugac

SEQ ID NO: 1277019 - RNA, 19 nt, Artificial Sequence
  Description of Artificial Sequence: Synthetic oligonucleotide
uagauguauucuuuuccau

SEQ ID NO: 1277020 - RNA, 19 nt, Artificial Sequence
  Description of Artificial Sequence: Synthetic oligonucleotide
uucauuuaagaaagcccuu

SEQ ID NO: 1277021 - RNA, 19 nt, Artificial Sequence
  Description of Artificial Sequence: Synthetic oligonucleotide
gguauaaggggccucaaaa

SEQ ID NO: 1277022 - RNA, 19 nt, Artificial Sequence
  Description of Artificial Sequence: Synthetic oligonucleotide
guguaagcgccaugaagag

SEQ ID NO: 1277023 - RNA, 19 nt, Artificial Sequence
  Description of Artificial Sequence: Synthetic oligonucleotide
uaacgcucugccuuccaca

SEQ ID NO: 1277024 - RNA, 19 nt, Artificial Sequence
  Description of Artificial Sequence: Synthetic oligonucleotide
ucugcucauggauaauguc

SEQ ID NO: 1277025 - RNA, 19 nt, Artificial Sequence
  Description of Artificial Sequence: Synthetic oligonucleotide
aaaguuucacgagucucaa

SEQ ID NO: 1277026 - RNA, 19 nt, Artificial Sequence
  Description of Artificial Sequence: Synthetic oligonucleotide
uuuguguaagcgccaugaa

SEQ ID NO: 1277027 - RNA, 19 nt, Artificial Sequence
  Description of Artificial Sequence: Synthetic oligonucleotide
aaauagggcuucacauaag

SEQ ID NO: 1277028 - RNA, 19 nt, Artificial Sequence
  Description of Artificial Sequence: Synthetic oligonucleotide
ugagaaaagucagucucau

SEQ ID NO: 1277029 - RNA, 19 nt, Artificial Sequence
  Description of Artificial Sequence: Synthetic oligonucleotide
uuuugccugauaagguaua

SEQ ID NO: 1277030 - RNA, 19 nt, Artificial Sequence
  Description of Artificial Sequence: Synthetic oligonucleotide
accucuacuuuucagcaua

SEQ ID NO: 1277031 - RNA, 19 nt, Artificial Sequence
  Description of Artificial Sequence: Synthetic oligonucleotide
cucugaagaaaguaccuaa

SEQ ID NO: 1277032 - RNA, 19 nt, Artificial Sequence
  Description of Artificial Sequence: Synthetic oligonucleotide
auaagguauaaggggccuc

SEQ ID NO: 1277033 - RNA, 19 nt, Artificial Sequence
  Description of Artificial Sequence: Synthetic oligonucleotide
acguaagcacccuguauga

SEQ ID NO: 1277034 - RNA, 19 nt, Artificial Sequence
  Description of Artificial Sequence: Synthetic oligonucleotide
gccugauaagguauaaggg

SEQ ID NO: 1277035 - RNA, 19 nt, Artificial Sequence
  Description of Artificial Sequence: Synthetic oligonucleotide
caugguacucgacuugauc

SEQ ID NO: 1277036 - RNA, 19 nt, Artificial Sequence
  Description of Artificial Sequence: Synthetic oligonucleotide
caaauacguaagcacccug

SEQ ID NO: 1277037 - RNA, 19 nt, Artificial Sequence
  Description of Artificial Sequence: Synthetic oligonucleotide
gacgauuuuggugucggga

SEQ ID NO: 1277038 - RNA, 19 nt, Artificial Sequence
  Description of Artificial Sequence: Synthetic oligonucleotide
cauugaccuugucugaauc

SEQ ID NO: 1277039 - RNA, 19 nt, Artificial Sequence
  Description of Artificial Sequence: Synthetic oligonucleotide
cuuggggaaccauaaccuc

SEQ ID NO: 1277040 - RNA, 19 nt, Artificial Sequence
  Description of Artificial Sequence: Synthetic oligonucleotide
aaaauacguguaauguguu

SEQ ID NO: 1277041 - RNA, 19 nt, Artificial Sequence
  Description of Artificial Sequence: Synthetic oligonucleotide
auuaagcgaauugaaugaa

SEQ ID NO: 1277042 - RNA, 19 nt, Artificial Sequence
  Description of Artificial Sequence: Synthetic oligonucleotide
ucgacuugauccucuuuaa

SEQ ID NO: 1277043 - RNA, 19 nt, Artificial Sequence
  Description of Artificial Sequence: Synthetic oligonucleotide
uucgucuauauugggagua

SEQ ID NO: 1277044 - RNA, 19 nt, Artificial Sequence
  Description of Artificial Sequence: Synthetic oligonucleotide
cauaaaaggcaacucugaa

SEQ ID NO: 1277045 - RNA, 19 nt, Artificial Sequence
  Description of Artificial Sequence: Synthetic oligonucleotide
auuagccgcucauuuaguu

SEQ ID NO: 1277046 - RNA, 19 nt, Artificial Sequence
  Description of Artificial Sequence: Synthetic oligonucleotide
ugacgauuuuggugucggg

SEQ ID NO: 1277047 - RNA, 19 nt, Artificial Sequence
  Description of Artificial Sequence: Synthetic oligonucleotide
ugguuuugaccucuacuuu

SEQ ID NO: 1277048 - RNA, 19 nt, Artificial Sequence
  Description of Artificial Sequence: Synthetic oligonucleotide
cagcauaucuuggggaacc

SEQ ID NO: 1277049 - RNA, 19 nt, Artificial Sequence
  Description of Artificial Sequence: Synthetic oligonucleotide
auacguaagcacccuguau

SEQ ID NO: 1277050 - RNA, 19 nt, Artificial Sequence
  Description of Artificial Sequence: Synthetic oligonucleotide
uugccugauaagguauaag

SEQ ID NO: 1277051 - RNA, 19 nt, Artificial Sequence
  Description of Artificial Sequence: Synthetic oligonucleotide
ggcguuucucauaaauugg

SEQ ID NO: 1277052 - RNA, 19 nt, Artificial Sequence
  Description of Artificial Sequence: Synthetic oligonucleotide
uaggcuaauggaccagcau

SEQ ID NO: 1277053 - RNA, 19 nt, Artificial Sequence
  Description of Artificial Sequence: Synthetic oligonucleotide
auaucuuggggaaccauaa

SEQ ID NO: 1277054 - RNA, 19 nt, Artificial Sequence
  Description of Artificial Sequence: Synthetic oligonucleotide
guuucucauaaauuggaau

SEQ ID NO: 1277055 - RNA, 19 nt, Artificial Sequence
  Description of Artificial Sequence: Synthetic oligonucleotide
ucuauagacuugagucaau

SEQ ID NO: 1277056 - RNA, 19 nt, Artificial Sequence
  Description of Artificial Sequence: Synthetic oligonucleotide
caguucuaucuuuuauuuc

SEQ ID NO: 1277057 - RNA, 19 nt, Artificial Sequence
  Description of Artificial Sequence: Synthetic oligonucleotide
aaguaccuaaaagucuuuu

SEQ ID NO: 1277058 - RNA, 19 nt, Artificial Sequence
  Description of Artificial Sequence: Synthetic oligonucleotide
uuugcaccgcuccgaauau

SEQ ID NO: 1277059 - RNA, 19 nt, Artificial Sequence
  Description of Artificial Sequence: Synthetic oligonucleotide
ucacuguaaugaacaucca

SEQ ID NO: 1277060 - RNA, 19 nt, Artificial Sequence
  Description of Artificial Sequence: Synthetic oligonucleotide
gauguaccacuaauugcac

SEQ ID NO: 1277061 - RNA, 19 nt, Artificial Sequence
  Description of Artificial Sequence: Synthetic oligonucleotide
ugcuacaugccuguaugaa

SEQ ID NO: 1277062 - RNA, 19 nt, Artificial Sequence
  Description of Artificial Sequence: Synthetic oligonucleotide
gucagacaauuccuuuacc

SEQ ID NO: 1277063 - RNA, 19 nt, Artificial Sequence
  Description of Artificial Sequence: Synthetic oligonucleotide
cuugacgauuuuggugucg

SEQ ID NO: 1277064 - RNA, 19 nt, Artificial Sequence
  Description of Artificial Sequence: Synthetic oligonucleotide
guuucacgagucucaagga

SEQ ID NO: 1277065 - RNA, 19 nt, Artificial Sequence
  Description of Artificial Sequence: Synthetic oligonucleotide
gucgggaggaaacacucca

SEQ ID NO: 1277066 - RNA, 19 nt, Artificial Sequence
  Description of Artificial Sequence: Synthetic oligonucleotide
cauaucuuggggaaccaua

SEQ ID NO: 1277067 - RNA, 19 nt, Artificial Sequence
  Description of Artificial Sequence: Synthetic oligonucleotide
aauuagccgcucauuuagu

SEQ ID NO: 1277068 - RNA, 19 nt, Artificial Sequence
  Description of Artificial Sequence: Synthetic oligonucleotide
gagaaugcauugugucuuc

SEQ ID NO: 1277069 - RNA, 19 nt, Artificial Sequence
  Description of Artificial Sequence: Synthetic oligonucleotide
cagguuauaggaauccucu

SEQ ID NO: 1277070 - RNA, 19 nt, Artificial Sequence
  Description of Artificial Sequence: Synthetic oligonucleotide
ucgggaggaaacacuccac

SEQ ID NO: 1277071 - RNA, 19 nt, Artificial Sequence
  Description of Artificial Sequence: Synthetic oligonucleotide
uccgaauauuccugagaaa

SEQ ID NO: 1277072 - RNA, 19 nt, Artificial Sequence
  Description of Artificial Sequence: Synthetic oligonucleotide
uguaagcgccaugaagagu

SEQ ID NO: 1277073 - RNA, 19 nt, Artificial Sequence
  Description of Artificial Sequence: Synthetic oligonucleotide
gccauaaaaggcaacucug

SEQ ID NO: 1277074 - RNA, 19 nt, Artificial Sequence
  Description of Artificial Sequence: Synthetic oligonucleotide
ugaaaagcuugacgauuuu

SEQ ID NO: 1277075 - RNA, 19 nt, Artificial Sequence
  Description of Artificial Sequence: Synthetic oligonucleotide
caaguucuuuggcauugac

SEQ ID NO: 1277076 - RNA, 19 nt, Artificial Sequence
  Description of Artificial Sequence: Synthetic oligonucleotide
auacguguaauguguuguu

SEQ ID NO: 1277077 - RNA, 19 nt, Artificial Sequence
  Description of Artificial Sequence: Synthetic oligonucleotide
uacguguaauguguuguuc

SEQ ID NO: 1277078 - RNA, 19 nt, Artificial Sequence
  Description of Artificial Sequence: Synthetic oligonucleotide
ggcuaauggaccagcauug

SEQ ID NO: 1277079 - RNA, 19 nt, Artificial Sequence
  Description of Artificial Sequence: Synthetic oligonucleotide
cucgacuugauccucuuua

SEQ ID NO: 1277080 - RNA, 19 nt, Artificial Sequence
  Description of Artificial Sequence: Synthetic oligonucleotide
cuccacacauaucaaaucu

SEQ ID NO: 1277081 - RNA, 19 nt, Artificial Sequence
  Description of Artificial Sequence: Synthetic oligonucleotide
ucagcauaucuuggggaac

SEQ ID NO: 1277082 - RNA, 19 nt, Artificial Sequence
  Description of Artificial Sequence: Synthetic oligonucleotide
guaauuaagcgaauugaau

SEQ ID NO: 1277083 - RNA, 19 nt, Artificial Sequence
  Description of Artificial Sequence: Synthetic oligonucleotide
agcaguaauuaagcgaauu

SEQ ID NO: 1277084 - RNA, 19 nt, Artificial Sequence
  Description of Artificial Sequence: Synthetic oligonucleotide
guggucaagaugguccggc

SEQ ID NO: 1277085 - RNA, 19 nt, Artificial Sequence
  Description of Artificial Sequence: Synthetic oligonucleotide
cauugugucuucuuguaau

SEQ ID NO: 1277086 - RNA, 19 nt, Artificial Sequence
  Description of Artificial Sequence: Synthetic oligonucleotide
guugauauuaugauuccuu

SEQ ID NO: 1277087 - RNA, 19 nt, Artificial Sequence
  Description of Artificial Sequence: Synthetic oligonucleotide
augcuacaugccuguauga

SEQ ID NO: 1277088 - RNA, 19 nt, Artificial Sequence
  Description of Artificial Sequence: Synthetic oligonucleotide
aucagccgaggagcaaagc

SEQ ID NO: 1277089 - RNA, 19 nt, Artificial Sequence
  Description of Artificial Sequence: Synthetic oligonucleotide
caucagccgaggagcaaag

SEQ ID NO: 1277090 - RNA, 19 nt, Artificial Sequence
  Description of Artificial Sequence: Synthetic oligonucleotide
aacucacggcguuucucau

SEQ ID NO: 1277091 - RNA, 19 nt, Artificial Sequence
  Description of Artificial Sequence: Synthetic oligonucleotide
guaagcgccaugaagaguu

SEQ ID NO: 1277092 - RNA, 19 nt, Artificial Sequence
  Description of Artificial Sequence: Synthetic oligonucleotide
cucacggcguuucucauaa

SEQ ID NO: 1277093 - RNA, 19 nt, Artificial Sequence
  Description of Artificial Sequence: Synthetic oligonucleotide
accacuaauugcacaaaau

SEQ ID NO: 1277094 - RNA, 19 nt, Artificial Sequence
  Description of Artificial Sequence: Synthetic oligonucleotide
acuggauguaccacuaauu

SEQ ID NO: 1277095 - RNA, 19 nt, Artificial Sequence
  Description of Artificial Sequence: Synthetic oligonucleotide
cacaguggugcaauuucca

SEQ ID NO: 1277096 - RNA, 19 nt, Artificial Sequence
  Description of Artificial Sequence: Synthetic oligonucleotide
uuggugucgggaggaaaca

SEQ ID NO: 1277097 - RNA, 19 nt, Artificial Sequence
  Description of Artificial Sequence: Synthetic oligonucleotide
acuuucuuagguggauacu

SEQ ID NO: 1277098 - RNA, 19 nt, Artificial Sequence
  Description of Artificial Sequence: Synthetic oligonucleotide
cuacaugccuguaugaauu

SEQ ID NO: 1277099 - RNA, 19 nt, Artificial Sequence
  Description of Artificial Sequence: Synthetic oligonucleotide
cuauauugggaguaauuuu

SEQ ID NO: 1277100 - RNA, 19 nt, Artificial Sequence
  Description of Artificial Sequence: Synthetic oligonucleotide
ggaaaucucagaaauuacu

SEQ ID NO: 1277101 - RNA, 19 nt, Artificial Sequence
  Description of Artificial Sequence: Synthetic oligonucleotide
uacaugccuguaugaauuu

SEQ ID NO: 1277102 - RNA, 19 nt, Artificial Sequence
  Description of Artificial Sequence: Synthetic oligonucleotide
ucauaacgcucugccuucc

SEQ ID NO: 1277103 - RNA, 19 nt, Artificial Sequence
  Description of Artificial Sequence: Synthetic oligonucleotide
ucaugguacucgacuugau

SEQ ID NO: 1277104 - RNA, 19 nt, Artificial Sequence
  Description of Artificial Sequence: Synthetic oligonucleotide
agguuauaggaauccucuu

SEQ ID NO: 1277105 - RNA, 19 nt, Artificial Sequence
  Description of Artificial Sequence: Synthetic oligonucleotide
ugagcaaauuuuggaucaa

SEQ ID NO: 1277106 - RNA, 19 nt, Artificial Sequence
  Description of Artificial Sequence: Synthetic oligonucleotide
uuaacccuucaugguacuc

SEQ ID NO: 1277107 - RNA, 19 nt, Artificial Sequence
  Description of Artificial Sequence: Synthetic oligonucleotide
guaugaaaagcuugacgau

SEQ ID NO: 1277108 - RNA, 19 nt, Artificial Sequence
  Description of Artificial Sequence: Synthetic oligonucleotide
agaugguccggcguuuaca

SEQ ID NO: 1277109 - RNA, 19 nt, Artificial Sequence
  Description of Artificial Sequence: Synthetic oligonucleotide
aguggucaagaugguccgg

SEQ ID NO: 1277110 - RNA, 19 nt, Artificial Sequence
  Description of Artificial Sequence: Synthetic oligonucleotide
cggcguuucucauaaauug

SEQ ID NO: 1277111 - RNA, 19 nt, Artificial Sequence
  Description of Artificial Sequence: Synthetic oligonucleotide
accugcuguucacagguua

SEQ ID NO: 1277112 - RNA, 19 nt, Artificial Sequence
  Description of Artificial Sequence: Synthetic oligonucleotide
cauaucaaaucuccaaguu

SEQ ID NO: 1277113 - RNA, 19 nt, Artificial Sequence
  Description of Artificial Sequence: Synthetic oligonucleotide
agguggauacuugguagcu

SEQ ID NO: 1277114 - RNA, 19 nt, Artificial Sequence
  Description of Artificial Sequence: Synthetic oligonucleotide
caugucucuaaaauuugau

SEQ ID NO: 1277115 - RNA, 19 nt, Artificial Sequence
  Description of Artificial Sequence: Synthetic oligonucleotide
ucgucuauauugggaguaa

SEQ ID NO: 1277116 - RNA, 19 nt, Artificial Sequence
  Description of Artificial Sequence: Synthetic oligonucleotide
cacacuguucuagcaacuc

SEQ ID NO: 1277117 - RNA, 19 nt, Artificial Sequence
  Description of Artificial Sequence: Synthetic oligonucleotide
uccggcguuuacacuguuc

SEQ ID NO: 1277118 - RNA, 19 nt, Artificial Sequence
  Description of Artificial Sequence: Synthetic oligonucleotide
accgcuccgaauauuccug

SEQ ID NO: 1277119 - RNA, 19 nt, Artificial Sequence
  Description of Artificial Sequence: Synthetic oligonucleotide
gugucgggaggaaacacuc

SEQ ID NO: 1277120 - RNA, 19 nt, Artificial Sequence
  Description of Artificial Sequence: Synthetic oligonucleotide
ccauaaaaggcaacucuga

SEQ ID NO: 1277121 - RNA, 19 nt, Artificial Sequence
  Description of Artificial Sequence: Synthetic oligonucleotide
auggauaaugucagacaau

SEQ ID NO: 1277122 - RNA, 19 nt, Artificial Sequence
  Description of Artificial Sequence: Synthetic oligonucleotide
uggugucgggaggaaacac

SEQ ID NO: 1277123 - RNA, 19 nt, Artificial Sequence
  Description of Artificial Sequence: Synthetic oligonucleotide
ccagggagaaugcauugug

SEQ ID NO: 1277124 - RNA, 19 nt, Artificial Sequence
  Description of Artificial Sequence: Synthetic oligonucleotide
aagcccuugcauaggcuaa

SEQ ID NO: 1277125 - RNA, 19 nt, Artificial Sequence
  Description of Artificial Sequence: Synthetic oligonucleotide
caauuguacauagucucgu

SEQ ID NO: 1277126 - RNA, 19 nt, Artificial Sequence
  Description of Artificial Sequence: Synthetic oligonucleotide
uacucgacuugauccucuu

SEQ ID NO: 1277127 - RNA, 19 nt, Artificial Sequence
  Description of Artificial Sequence: Synthetic oligonucleotide
acggcguuucucauaaauu

SEQ ID NO: 1277128 - RNA, 19 nt, Artificial Sequence
  Description of Artificial Sequence: Synthetic oligonucleotide
ggauacuugguagcuugac

SEQ ID NO: 1277129 - RNA, 19 nt, Artificial Sequence
  Description of Artificial Sequence: Synthetic oligonucleotide
augguccggcguuuacacu

SEQ ID NO: 1277130 - RNA, 19 nt, Artificial Sequence
  Description of Artificial Sequence: Synthetic oligonucleotide
acucacggcguuucucaua

SEQ ID NO: 1277131 - RNA, 19 nt, Artificial Sequence
  Description of Artificial Sequence: Synthetic oligonucleotide
ggauaaugucagacaauuc

SEQ ID NO: 1277132 - RNA, 19 nt, Artificial Sequence
  Description of Artificial Sequence: Synthetic oligonucleotide
uuguucauccagggagaau

SEQ ID NO: 1277133 - RNA, 19 nt, Artificial Sequence
  Description of Artificial Sequence: Synthetic oligonucleotide
gcacaguggugcaauuucc

SEQ ID NO: 1277134 - RNA, 19 nt, Artificial Sequence
  Description of Artificial Sequence: Synthetic oligonucleotide
gggaaccauaaccucuguc

SEQ ID NO: 1277135 - RNA, 19 nt, Artificial Sequence
  Description of Artificial Sequence: Synthetic oligonucleotide
ggcaacucugaagaaagua

SEQ ID NO: 1277136 - RNA, 19 nt, Artificial Sequence
  Description of Artificial Sequence: Synthetic oligonucleotide
ccaugucucuaaaauuuga

SEQ ID NO: 1277137 - RNA, 19 nt, Artificial Sequence
  Description of Artificial Sequence: Synthetic oligonucleotide
cgauuuuggugucgggagg

SEQ ID NO: 1277138 - RNA, 19 nt, Artificial Sequence
  Description of Artificial Sequence: Synthetic oligonucleotide
gacuggccauaaaaggcaa

SEQ ID NO: 1277139 - RNA, 19 nt, Artificial Sequence
  Description of Artificial Sequence: Synthetic oligonucleotide
gucaagaugguccggcguu

SEQ ID NO: 1277140 - RNA, 19 nt, Artificial Sequence
  Description of Artificial Sequence: Synthetic oligonucleotide
cuucuaugcagccuugcuu

SEQ ID NO: 1277141 - RNA, 19 nt, Artificial Sequence
  Description of Artificial Sequence: Synthetic oligonucleotide
auaucugcucauggauaau

SEQ ID NO: 1277142 - RNA, 19 nt, Artificial Sequence
  Description of Artificial Sequence: Synthetic oligonucleotide
acucgacuugauccucuuu

SEQ ID NO: 1277143 - RNA, 19 nt, Artificial Sequence
  Description of Artificial Sequence: Synthetic oligonucleotide
gacuuguauaugagcaaau

SEQ ID NO: 1277144 - RNA, 19 nt, Artificial Sequence
  Description of Artificial Sequence: Synthetic oligonucleotide
gucacuggauguaccacua

SEQ ID NO: 1277145 - RNA, 19 nt, Artificial Sequence
  Description of Artificial Sequence: Synthetic oligonucleotide
cuucgucuauauugggagu

SEQ ID NO: 1277146 - RNA, 19 nt, Artificial Sequence
  Description of Artificial Sequence: Synthetic oligonucleotide
cacggcguuucucauaaau

SEQ ID NO: 1277147 - RNA, 19 nt, Artificial Sequence
  Description of Artificial Sequence: Synthetic oligonucleotide
cauaacgcucugccuucca

SEQ ID NO: 1277148 - RNA, 19 nt, Artificial Sequence
  Description of Artificial Sequence: Synthetic oligonucleotide
accuuuuauuggauuccau

SEQ ID NO: 1277149 - RNA, 19 nt, Artificial Sequence
  Description of Artificial Sequence: Synthetic oligonucleotide
gcauaggcuaauggaccag

SEQ ID NO: 1277150 - RNA, 19 nt, Artificial Sequence
  Description of Artificial Sequence: Synthetic oligonucleotide
guaccacuaauugcacaaa

SEQ ID NO: 1277151 - RNA, 19 nt, Artificial Sequence
  Description of Artificial Sequence: Synthetic oligonucleotide
cacuggauguaccacuaau

SEQ ID NO: 1277152 - RNA, 19 nt, Artificial Sequence
  Description of Artificial Sequence: Synthetic oligonucleotide
caaugcuacaugccuguau

SEQ ID NO: 1277153 - RNA, 19 nt, Artificial Sequence
  Description of Artificial Sequence: Synthetic oligonucleotide
gcuacaugccuguaugaau

SEQ ID NO: 1277154 - RNA, 19 nt, Artificial Sequence
  Description of Artificial Sequence: Synthetic oligonucleotide
agcgccaugaagaguucua

SEQ ID NO: 1277155 - RNA, 19 nt, Artificial Sequence
  Description of Artificial Sequence: Synthetic oligonucleotide
aggcaacucugaagaaagu

SEQ ID NO: 1277156 - RNA, 19 nt, Artificial Sequence
  Description of Artificial Sequence: Synthetic oligonucleotide
gcguuuacacuguucuucu

SEQ ID NO: 1277157 - RNA, 19 nt, Artificial Sequence
  Description of Artificial Sequence: Synthetic oligonucleotide
ggugcaauuuccaggcacu

SEQ ID NO: 1277158 - RNA, 19 nt, Artificial Sequence
  Description of Artificial Sequence: Synthetic oligonucleotide
ccuuuuauuggauuccauu

SEQ ID NO: 1277159 - RNA, 19 nt, Artificial Sequence
  Description of Artificial Sequence: Synthetic oligonucleotide
accaagcacaguggugcaa

SEQ ID NO: 1277160 - RNA, 19 nt, Artificial Sequence
  Description of Artificial Sequence: Synthetic oligonucleotide
ggcauugaccuugucugaa

SEQ ID NO: 1277161 - RNA, 19 nt, Artificial Sequence
  Description of Artificial Sequence: Synthetic oligonucleotide
cagccgaggagcaaagcuu

SEQ ID NO: 1277162 - RNA, 19 nt, Artificial Sequence
  Description of Artificial Sequence: Synthetic oligonucleotide
gcgaauugaaugaaugguu

SEQ ID NO: 1277163 - RNA, 19 nt, Artificial Sequence
  Description of Artificial Sequence: Synthetic oligonucleotide
ggucaagaugguccggcgu

SEQ ID NO: 1277164 - RNA, 19 nt, Artificial Sequence
  Description of Artificial Sequence: Synthetic oligonucleotide
cguuucucauaaauuggaa

SEQ ID NO: 1277165 - RNA, 19 nt, Artificial Sequence
  Description of Artificial Sequence: Synthetic oligonucleotide
gcuugacgauuuugguguc

SEQ ID NO: 1277166 - RNA, 19 nt, Artificial Sequence
  Description of Artificial Sequence: Synthetic oligonucleotide
ccacacacuguucuagcaa

SEQ ID NO: 1277167 - RNA, 19 nt, Artificial Sequence
  Description of Artificial Sequence: Synthetic oligonucleotide
guacucgacuugauccucu

SEQ ID NO: 1277168 - RNA, 19 nt, Artificial Sequence
  Description of Artificial Sequence: Synthetic oligonucleotide
ccggcguuuacacuguucu

SEQ ID NO: 1277169 - RNA, 19 nt, Artificial Sequence
  Description of Artificial Sequence: Synthetic oligonucleotide
ucacggcguuucucauaaa

SEQ ID NO: 1277170 - RNA, 19 nt, Artificial Sequence
  Description of Artificial Sequence: Synthetic oligonucleotide
ggcuucacauaagugacuu

SEQ ID NO: 1277171 - RNA, 19 nt, Artificial Sequence
  Description of Artificial Sequence: Synthetic oligonucleotide
ggugucgggaggaaacacu

SEQ ID NO: 1277172 - RNA, 19 nt, Artificial Sequence
  Description of Artificial Sequence: Synthetic oligonucleotide
uugcaccgcuccgaauauu

SEQ ID NO: 1277173 - RNA, 19 nt, Artificial Sequence
  Description of Artificial Sequence: Synthetic oligonucleotide
gccgcucauuuaguucaag

SEQ ID NO: 1277174 - RNA, 19 nt, Artificial Sequence
  Description of Artificial Sequence: Synthetic oligonucleotide
gcccuugcauaggcuaaug

SEQ ID NO: 1277175 - RNA, 19 nt, Artificial Sequence
  Description of Artificial Sequence: Synthetic oligonucleotide
ccgcucauuuaguucaagu

SEQ ID NO: 1277176 - RNA, 19 nt, Artificial Sequence
  Description of Artificial Sequence: Synthetic oligonucleotide
caagcacaguggugcaauu

SEQ ID NO: 1277177 - RNA, 19 nt, Artificial Sequence
  Description of Artificial Sequence: Synthetic oligonucleotide
ccugcuguucacagguuau

SEQ ID NO: 1277178 - RNA, 19 nt, Artificial Sequence
  Description of Artificial Sequence: Synthetic oligonucleotide
ccauccacacacuguucua

SEQ ID NO: 1277179 - RNA, 19 nt, Artificial Sequence
  Description of Artificial Sequence: Synthetic oligonucleotide
cugaaaggcccgugagcuu

SEQ ID NO: 1277180 - RNA, 19 nt, Artificial Sequence
  Description of Artificial Sequence: Synthetic oligonucleotide
ccgcuccgaauauuccuga

SEQ ID NO: 1277181 - RNA, 19 nt, Artificial Sequence
  Description of Artificial Sequence: Synthetic oligonucleotide
gcuucaguugcagcugaau

SEQ ID NO: 1277182 - RNA, 19 nt, Artificial Sequence
  Description of Artificial Sequence: Synthetic oligonucleotide
cgccaugaagaguucuaua

SEQ ID NO: 1277183 - RNA, 19 nt, Artificial Sequence
  Description of Artificial Sequence: Synthetic oligonucleotide
ccucuacuuuucagcauau

SEQ ID NO: 1277184 - RNA, 19 nt, Artificial Sequence
  Description of Artificial Sequence: Synthetic oligonucleotide
gcgccaugaagaguucuau

SEQ ID NO: 1277185 - RNA, 19 nt, Artificial Sequence
  Description of Artificial Sequence: Synthetic oligonucleotide
gguccggcguuuacacugu

SEQ ID NO: 1277186 - RNA, 19 nt, Artificial Sequence
  Description of Artificial Sequence: Synthetic oligonucleotide
gccgaggagcaaagcuucu

SEQ ID NO: 1277187 - RNA, 19 nt, Artificial Sequence
  Description of Artificial Sequence: Synthetic oligonucleotide
guccggcguuuacacuguu

SEQ ID NO: 1277188 - RNA, 19 nt, Artificial Sequence
  Description of Artificial Sequence: Synthetic oligonucleotide
cgucuauauugggaguaau

SEQ ID NO: 1277189 - RNA, 19 nt, Artificial Sequence
  Description of Artificial Sequence: Synthetic oligonucleotide
ccgugagcuuggguucuuu

SEQ ID NO: 1277190 - RNA, 19 nt, Artificial Sequence
  Description of Artificial Sequence: Synthetic oligonucleotide
cccgugagcuuggguucuu

SEQ ID NO: 1277191 - RNA, 19 nt, Artificial Sequence
  Description of Artificial Sequence: Synthetic oligonucleotide
aaaguuauguuccacagac

SEQ ID NO: 1277192 - RNA, 19 nt, Artificial Sequence
  Description of Artificial Sequence: Synthetic oligonucleotide
uuaaauuugagaaaggagc

SEQ ID NO: 1277193 - RNA, 19 nt, Artificial Sequence
  Description of Artificial Sequence: Synthetic oligonucleotide
auaaugagcaagcugagcc

SEQ ID NO: 1277194 - RNA, 19 nt, Artificial Sequence
  Description of Artificial Sequence: Synthetic oligonucleotide
aauuccuaacuucuuaccc

SEQ ID NO: 1277195 - RNA, 19 nt, Artificial Sequence
  Description of Artificial Sequence: Synthetic oligonucleotide
agaaaugucccauuucucc

SEQ ID NO: 1277196 - RNA, 19 nt, Artificial Sequence
  Description of Artificial Sequence: Synthetic oligonucleotide
uuaaauaagaugaggguug

SEQ ID NO: 1277197 - RNA, 19 nt, Artificial Sequence
  Description of Artificial Sequence: Synthetic oligonucleotide
aagucugcgaugcaaacac

SEQ ID NO: 1277198 - RNA, 19 nt, Artificial Sequence
  Description of Artificial Sequence: Synthetic oligonucleotide
ucaaguauggcacgaacgg

SEQ ID NO: 1277199 - RNA, 19 nt, Artificial Sequence
  Description of Artificial Sequence: Synthetic oligonucleotide
uguguuacaugauugauga

SEQ ID NO: 1277200 - RNA, 19 nt, Artificial Sequence
  Description of Artificial Sequence: Synthetic oligonucleotide
uucuuaaggaaacaaauuc

SEQ ID NO: 1277201 - RNA, 19 nt, Artificial Sequence
  Description of Artificial Sequence: Synthetic oligonucleotide
aacggaucuaacgagcucc

SEQ ID NO: 1277202 - RNA, 19 nt, Artificial Sequence
  Description of Artificial Sequence: Synthetic oligonucleotide
caucuugaaaauuauacac

SEQ ID NO: 1277203 - RNA, 19 nt, Artificial Sequence
  Description of Artificial Sequence: Synthetic oligonucleotide
uacauuuugcuuaccauag

SEQ ID NO: 1277204 - RNA, 19 nt, Artificial Sequence
  Description of Artificial Sequence: Synthetic oligonucleotide
acuucuuaccccuauacag

SEQ ID NO: 1277205 - RNA, 19 nt, Artificial Sequence
  Description of Artificial Sequence: Synthetic oligonucleotide
uauauuauaugugaacagc

SEQ ID NO: 1277206 - RNA, 19 nt, Artificial Sequence
  Description of Artificial Sequence: Synthetic oligonucleotide
ugauugaugaaguacuuga

SEQ ID NO: 1277207 - RNA, 19 nt, Artificial Sequence
  Description of Artificial Sequence: Synthetic oligonucleotide
agcacguuccuucuuaccc

SEQ ID NO: 1277208 - RNA, 19 nt, Artificial Sequence
  Description of Artificial Sequence: Synthetic oligonucleotide
uucggcuuaaauuugagaa

SEQ ID NO: 1277209 - RNA, 19 nt, Artificial Sequence
  Description of Artificial Sequence: Synthetic oligonucleotide
uuaugaaugugcuauuuga

SEQ ID NO: 1277210 - RNA, 19 nt, Artificial Sequence
  Description of Artificial Sequence: Synthetic oligonucleotide
aaaaggcuaauauuuucug

SEQ ID NO: 1277211 - RNA, 19 nt, Artificial Sequence
  Description of Artificial Sequence: Synthetic oligonucleotide
aaaaguacuuccugagcag

SEQ ID NO: 1277212 - RNA, 19 nt, Artificial Sequence
  Description of Artificial Sequence: Synthetic oligonucleotide
aaaaugucaaguguguuga

SEQ ID NO: 1277213 - RNA, 19 nt, Artificial Sequence
  Description of Artificial Sequence: Synthetic oligonucleotide
ugagucuuagcccugggcc

SEQ ID NO: 1277214 - RNA, 19 nt, Artificial Sequence
  Description of Artificial Sequence: Synthetic oligonucleotide
aauaaugagcaagcugagc

SEQ ID NO: 1277215 - RNA, 19 nt, Artificial Sequence
  Description of Artificial Sequence: Synthetic oligonucleotide
ugauuuucgcaauuggcag

SEQ ID NO: 1277216 - RNA, 19 nt, Artificial Sequence
  Description of Artificial Sequence: Synthetic oligonucleotide
uguguguugacucggaggu

SEQ ID NO: 1277217 - RNA, 19 nt, Artificial Sequence
  Description of Artificial Sequence: Synthetic oligonucleotide
ucugauuuucgcaauuggc

SEQ ID NO: 1277218 - RNA, 19 nt, Artificial Sequence
  Description of Artificial Sequence: Synthetic oligonucleotide
agcagaacuauccaaaagu

SEQ ID NO: 1277219 - RNA, 19 nt, Artificial Sequence
  Description of Artificial Sequence: Synthetic oligonucleotide
aaugcacagcuguggaccc

SEQ ID NO: 1277220 - RNA, 19 nt, Artificial Sequence
  Description of Artificial Sequence: Synthetic oligonucleotide
uccuaugucucucugauuc

SEQ ID NO: 1277221 - RNA, 19 nt, Artificial Sequence
  Description of Artificial Sequence: Synthetic oligonucleotide
aaaguacuuccugagcagc

SEQ ID NO: 1277222 - RNA, 19 nt, Artificial Sequence
  Description of Artificial Sequence: Synthetic oligonucleotide
ucaugaguggaaauggcca

SEQ ID NO: 1277223 - RNA, 19 nt, Artificial Sequence
  Description of Artificial Sequence: Synthetic oligonucleotide
uauuuuggucagaauaaug

SEQ ID NO: 1277224 - RNA, 19 nt, Artificial Sequence
  Description of Artificial Sequence: Synthetic oligonucleotide
aguuauguuccacagacau

SEQ ID NO: 1277225 - RNA, 19 nt, Artificial Sequence
  Description of Artificial Sequence: Synthetic oligonucleotide
uguguugacccuucaaaag

SEQ ID NO: 1277226 - RNA, 19 nt, Artificial Sequence
  Description of Artificial Sequence: Synthetic oligonucleotide
uaccauagagaaauguccc

SEQ ID NO: 1277227 - RNA, 19 nt, Artificial Sequence
  Description of Artificial Sequence: Synthetic oligonucleotide
gaugaaguacuugauuccg

SEQ ID NO: 1277228 - RNA, 19 nt, Artificial Sequence
  Description of Artificial Sequence: Synthetic oligonucleotide
ugaaugugcuauuugacuc

SEQ ID NO: 1277229 - RNA, 19 nt, Artificial Sequence
  Description of Artificial Sequence: Synthetic oligonucleotide
uuggauagaacauuccuaa

SEQ ID NO: 1277230 - RNA, 19 nt, Artificial Sequence
  Description of Artificial Sequence: Synthetic oligonucleotide
gaaaggagcagaacuaucc

SEQ ID NO: 1277231 - RNA, 19 nt, Artificial Sequence
  Description of Artificial Sequence: Synthetic oligonucleotide
ugcuguguaagcuuccucc

SEQ ID NO: 1277232 - RNA, 19 nt, Artificial Sequence
  Description of Artificial Sequence: Synthetic oligonucleotide
aacgagcuccuuuggauuc

SEQ ID NO: 1277233 - RNA, 19 nt, Artificial Sequence
  Description of Artificial Sequence: Synthetic oligonucleotide
uaugcuaaacaucuuggau

SEQ ID NO: 1277234 - RNA, 19 nt, Artificial Sequence
  Description of Artificial Sequence: Synthetic oligonucleotide
aaacaaaucaguagugugu

SEQ ID NO: 1277235 - RNA, 19 nt, Artificial Sequence
  Description of Artificial Sequence: Synthetic oligonucleotide
ugguuuaaauaagaugagg

SEQ ID NO: 1277236 - RNA, 19 nt, Artificial Sequence
  Description of Artificial Sequence: Synthetic oligonucleotide
uuguuauuggagaaccucu

SEQ ID NO: 1277237 - RNA, 19 nt, Artificial Sequence
  Description of Artificial Sequence: Synthetic oligonucleotide
uggacuacaaccucucucu

SEQ ID NO: 1277238 - RNA, 19 nt, Artificial Sequence
  Description of Artificial Sequence: Synthetic oligonucleotide
gaucuaacgagcuccuuug

SEQ ID NO: 1277239 - RNA, 19 nt, Artificial Sequence
  Description of Artificial Sequence: Synthetic oligonucleotide
cauuuguuauuggagaacc

SEQ ID NO: 1277240 - RNA, 19 nt, Artificial Sequence
  Description of Artificial Sequence: Synthetic oligonucleotide
agguaagcaguccauauca

SEQ ID NO: 1277241 - RNA, 19 nt, Artificial Sequence
  Description of Artificial Sequence: Synthetic oligonucleotide
agcaagcugagccuuuagc

SEQ ID NO: 1277242 - RNA, 19 nt, Artificial Sequence
  Description of Artificial Sequence: Synthetic oligonucleotide
uugcuuaccauagagaaau

SEQ ID NO: 1277243 - RNA, 19 nt, Artificial Sequence
  Description of Artificial Sequence: Synthetic oligonucleotide
ugcaagcacuuuaugaaug

SEQ ID NO: 1277244 - RNA, 19 nt, Artificial Sequence
  Description of Artificial Sequence: Synthetic oligonucleotide
ggauagaacauuccuaaag

SEQ ID NO: 1277245 - RNA, 19 nt, Artificial Sequence
  Description of Artificial Sequence: Synthetic oligonucleotide
ucuauuuugacagcugccu

SEQ ID NO: 1277246 - RNA, 19 nt, Artificial Sequence
  Description of Artificial Sequence: Synthetic oligonucleotide
uaacuucuuaccccuauac

SEQ ID NO: 1277247 - RNA, 19 nt, Artificial Sequence
  Description of Artificial Sequence: Synthetic oligonucleotide
aaauuauacacaagacugu

SEQ ID NO: 1277248 - RNA, 19 nt, Artificial Sequence
  Description of Artificial Sequence: Synthetic oligonucleotide
ucagcuacggcuuuggcuu

SEQ ID NO: 1277249 - RNA, 19 nt, Artificial Sequence
  Description of Artificial Sequence: Synthetic oligonucleotide
aagcugagccuuuagcucu

SEQ ID NO: 1277250 - RNA, 19 nt, Artificial Sequence
  Description of Artificial Sequence: Synthetic oligonucleotide
uacaaccucucucugugag

SEQ ID NO: 1277251 - RNA, 19 nt, Artificial Sequence
  Description of Artificial Sequence: Synthetic oligonucleotide
ucaacaaggaaggugcucu

SEQ ID NO: 1277252 - RNA, 19 nt, Artificial Sequence
  Description of Artificial Sequence: Synthetic oligonucleotide
aaguuuuccgagccacuuc

SEQ ID NO: 1277253 - RNA, 19 nt, Artificial Sequence
  Description of Artificial Sequence: Synthetic oligonucleotide
gaaugcacagcuguggacc

SEQ ID NO: 1277254 - RNA, 19 nt, Artificial Sequence
  Description of Artificial Sequence: Synthetic oligonucleotide
caguccauaucaaguaugg

SEQ ID NO: 1277255 - RNA, 19 nt, Artificial Sequence
  Description of Artificial Sequence: Synthetic oligonucleotide
ucuguuaacugcuuccuau

SEQ ID NO: 1277256 - RNA, 19 nt, Artificial Sequence
  Description of Artificial Sequence: Synthetic oligonucleotide
gauggagccggcuucgcag

SEQ ID NO: 1277257 - RNA, 19 nt, Artificial Sequence
  Description of Artificial Sequence: Synthetic oligonucleotide
uggagaaccucuuccagca

SEQ ID NO: 1277258 - RNA, 19 nt, Artificial Sequence
  Description of Artificial Sequence: Synthetic oligonucleotide
augccuugaaaguuuuccg

SEQ ID NO: 1277259 - RNA, 19 nt, Artificial Sequence
  Description of Artificial Sequence: Synthetic oligonucleotide
uugacucucuauuuugaca

SEQ ID NO: 1277260 - RNA, 19 nt, Artificial Sequence
  Description of Artificial Sequence: Synthetic oligonucleotide
uuuguuauuggagaaccuc

SEQ ID NO: 1277261 - RNA, 19 nt, Artificial Sequence
  Description of Artificial Sequence: Synthetic oligonucleotide
augcuaaacaucuuggaua

SEQ ID NO: 1277262 - RNA, 19 nt, Artificial Sequence
  Description of Artificial Sequence: Synthetic oligonucleotide
aucagcccuauccccaugc

SEQ ID NO: 1277263 - RNA, 19 nt, Artificial Sequence
  Description of Artificial Sequence: Synthetic oligonucleotide
ugcaucaacaaggaaggug

SEQ ID NO: 1277264 - RNA, 19 nt, Artificial Sequence
  Description of Artificial Sequence: Synthetic oligonucleotide
aucaaguauggcacgaacg

SEQ ID NO: 1277265 - RNA, 19 nt, Artificial Sequence
  Description of Artificial Sequence: Synthetic oligonucleotide
auauuauaugugaacagcu

SEQ ID NO: 1277266 - RNA, 19 nt, Artificial Sequence
  Description of Artificial Sequence: Synthetic oligonucleotide
uguuaacugcuuccuaugu

SEQ ID NO: 1277267 - RNA, 19 nt, Artificial Sequence
  Description of Artificial Sequence: Synthetic oligonucleotide
aguuuuccgagccacuucu

SEQ ID NO: 1277268 - RNA, 19 nt, Artificial Sequence
  Description of Artificial Sequence: Synthetic oligonucleotide
aaugugcuauuugacucuc

SEQ ID NO: 1277269 - RNA, 19 nt, Artificial Sequence
  Description of Artificial Sequence: Synthetic oligonucleotide
ucuaacgagcuccuuugga

SEQ ID NO: 1277270 - RNA, 19 nt, Artificial Sequence
  Description of Artificial Sequence: Synthetic oligonucleotide
uuaaggaaacaaauuccua

SEQ ID NO: 1277271 - RNA, 19 nt, Artificial Sequence
  Description of Artificial Sequence: Synthetic oligonucleotide
aaaauucccacaggcauau

SEQ ID NO: 1277272 - RNA, 19 nt, Artificial Sequence
  Description of Artificial Sequence: Synthetic oligonucleotide
uguguaagcuuccucccac

SEQ ID NO: 1277273 - RNA, 19 nt, Artificial Sequence
  Description of Artificial Sequence: Synthetic oligonucleotide
auuuucgcaauuggcaguc

SEQ ID NO: 1277274 - RNA, 19 nt, Artificial Sequence
  Description of Artificial Sequence: Synthetic oligonucleotide
uucgcaauuggcagucaag

SEQ ID NO: 1277275 - RNA, 19 nt, Artificial Sequence
  Description of Artificial Sequence: Synthetic oligonucleotide
cuguguuacaugauugaug

SEQ ID NO: 1277276 - RNA, 19 nt, Artificial Sequence
  Description of Artificial Sequence: Synthetic oligonucleotide
uguaagcuuccucccaccc

SEQ ID NO: 1277277 - RNA, 19 nt, Artificial Sequence
  Description of Artificial Sequence: Synthetic oligonucleotide
aguggaaauggccaacaga

SEQ ID NO: 1277278 - RNA, 19 nt, Artificial Sequence
  Description of Artificial Sequence: Synthetic oligonucleotide
uaaaauucccacaggcaua

SEQ ID NO: 1277279 - RNA, 19 nt, Artificial Sequence
  Description of Artificial Sequence: Synthetic oligonucleotide
cagucaagaacugugacuc

SEQ ID NO: 1277280 - RNA, 19 nt, Artificial Sequence
  Description of Artificial Sequence: Synthetic oligonucleotide
uguucguccagcugaaguc

SEQ ID NO: 1277281 - RNA, 19 nt, Artificial Sequence
  Description of Artificial Sequence: Synthetic oligonucleotide
agaacauuccuaaaguuau

SEQ ID NO: 1277282 - RNA, 19 nt, Artificial Sequence
  Description of Artificial Sequence: Synthetic oligonucleotide
uguguguguguguugacuc

SEQ ID NO: 1277283 - RNA, 19 nt, Artificial Sequence
  Description of Artificial Sequence: Synthetic oligonucleotide
ggcuaauauuuucugauug

SEQ ID NO: 1277284 - RNA, 19 nt, Artificial Sequence
  Description of Artificial Sequence: Synthetic oligonucleotide
guguguguugacucggagg

SEQ ID NO: 1277285 - RNA, 19 nt, Artificial Sequence
  Description of Artificial Sequence: Synthetic oligonucleotide
caaaucaguagugugugug

SEQ ID NO: 1277286 - RNA, 19 nt, Artificial Sequence
  Description of Artificial Sequence: Synthetic oligonucleotide
ucugcgaugcaaacacagc

SEQ ID NO: 1277287 - RNA, 19 nt, Artificial Sequence
  Description of Artificial Sequence: Synthetic oligonucleotide
cucuauuuugacagcugcc

SEQ ID NO: 1277288 - RNA, 19 nt, Artificial Sequence
  Description of Artificial Sequence: Synthetic oligonucleotide
ugccuugaaaguuuuccga

SEQ ID NO: 1277289 - RNA, 19 nt, Artificial Sequence
  Description of Artificial Sequence: Synthetic oligonucleotide
ugaagcacuguucguccag

SEQ ID NO: 1277290 - RNA, 19 nt, Artificial Sequence
  Description of Artificial Sequence: Synthetic oligonucleotide
augaggguugaaagcaucc

SEQ ID NO: 1277291 - RNA, 19 nt, Artificial Sequence
  Description of Artificial Sequence: Synthetic oligonucleotide
ugauugugcaagcacuuua

SEQ ID NO: 1277292 - RNA, 19 nt, Artificial Sequence
  Description of Artificial Sequence: Synthetic oligonucleotide
ucggguuucuucagcuacg

SEQ ID NO: 1277293 - RNA, 19 nt, Artificial Sequence
  Description of Artificial Sequence: Synthetic oligonucleotide
uugacccuucaaaaguuac

SEQ ID NO: 1277294 - RNA, 19 nt, Artificial Sequence
  Description of Artificial Sequence: Synthetic oligonucleotide
uuucggcuuaaauuugaga

SEQ ID NO: 1277295 - RNA, 19 nt, Artificial Sequence
  Description of Artificial Sequence: Synthetic oligonucleotide
aaggggacugacuggacau

SEQ ID NO: 1277296 - RNA, 19 nt, Artificial Sequence
  Description of Artificial Sequence: Synthetic oligonucleotide
aguagugugugugugugug

SEQ ID NO: 1277297 - RNA, 19 nt, Artificial Sequence
  Description of Artificial Sequence: Synthetic oligonucleotide
ggcacgaacggaucuaacg

SEQ ID NO: 1277298 - RNA, 19 nt, Artificial Sequence
  Description of Artificial Sequence: Synthetic oligonucleotide
ucaguagugugugugugug

SEQ ID NO: 1277299 - RNA, 19 nt, Artificial Sequence
  Description of Artificial Sequence: Synthetic oligonucleotide
uauuuugacagcugccuuu

SEQ ID NO: 1277300 - RNA, 19 nt, Artificial Sequence
  Description of Artificial Sequence: Synthetic oligonucleotide
uaaauaagaugaggguuga

SEQ ID NO: 1277301 - RNA, 19 nt, Artificial Sequence
  Description of Artificial Sequence: Synthetic oligonucleotide
gacacucaucacaggaugg

SEQ ID NO: 1277302 - RNA, 19 nt, Artificial Sequence
  Description of Artificial Sequence: Synthetic oligonucleotide
gaggcuuucaguagaugcc

SEQ ID NO: 1277303 - RNA, 19 nt, Artificial Sequence
  Description of Artificial Sequence: Synthetic oligonucleotide
acgaacggaucuaacgagc

SEQ ID NO: 1277304 - RNA, 19 nt, Artificial Sequence
  Description of Artificial Sequence: Synthetic oligonucleotide
uucuuaccccuauacagaa

SEQ ID NO: 1277305 - RNA, 19 nt, Artificial Sequence
  Description of Artificial Sequence: Synthetic oligonucleotide
ucggcuuaaauuugagaaa

SEQ ID NO: 1277306 - RNA, 19 nt, Artificial Sequence
  Description of Artificial Sequence: Synthetic oligonucleotide
uuuucugauugugcaagca

SEQ ID NO: 1277307 - RNA, 19 nt, Artificial Sequence
  Description of Artificial Sequence: Synthetic oligonucleotide
auauuuucugauugugcaa

SEQ ID NO: 1277308 - RNA, 19 nt, Artificial Sequence
  Description of Artificial Sequence: Synthetic oligonucleotide
uucauucuccucugagcag

SEQ ID NO: 1277309 - RNA, 19 nt, Artificial Sequence
  Description of Artificial Sequence: Synthetic oligonucleotide
cuuaccccuauacagaaaa

SEQ ID NO: 1277310 - RNA, 19 nt, Artificial Sequence
  Description of Artificial Sequence: Synthetic oligonucleotide
uguuauuggagaaccucuu

SEQ ID NO: 1277311 - RNA, 19 nt, Artificial Sequence
  Description of Artificial Sequence: Synthetic oligonucleotide
uguugacccuucaaaaguu

SEQ ID NO: 1277312 - RNA, 19 nt, Artificial Sequence
  Description of Artificial Sequence: Synthetic oligonucleotide
ugcgaugcaaacacagcuc

SEQ ID NO: 1277313 - RNA, 19 nt, Artificial Sequence
  Description of Artificial Sequence: Synthetic oligonucleotide
ucgcaauuggcagucaaga

SEQ ID NO: 1277314 - RNA, 19 nt, Artificial Sequence
  Description of Artificial Sequence: Synthetic oligonucleotide
uucuagccaagguaguggu

SEQ ID NO: 1277315 - RNA, 19 nt, Artificial Sequence
  Description of Artificial Sequence: Synthetic oligonucleotide
gcaauuggcagucaagaac

SEQ ID NO: 1277316 - RNA, 19 nt, Artificial Sequence
  Description of Artificial Sequence: Synthetic oligonucleotide
uggauugcguggaaugcac

SEQ ID NO: 1277317 - RNA, 19 nt, Artificial Sequence
  Description of Artificial Sequence: Synthetic oligonucleotide
cacgaacggaucuaacgag

SEQ ID NO: 1277318 - RNA, 19 nt, Artificial Sequence
  Description of Artificial Sequence: Synthetic oligonucleotide
ucugauugugcaagcacuu

SEQ ID NO: 1277319 - RNA, 19 nt, Artificial Sequence
  Description of Artificial Sequence: Synthetic oligonucleotide
uuacccuuuucuagccaag

SEQ ID NO: 1277320 - RNA, 19 nt, Artificial Sequence
  Description of Artificial Sequence: Synthetic oligonucleotide
acaaggaaggugcucugcu

SEQ ID NO: 1277321 - RNA, 19 nt, Artificial Sequence
  Description of Artificial Sequence: Synthetic oligonucleotide
aguccauaucaaguauggc

SEQ ID NO: 1277322 - RNA, 19 nt, Artificial Sequence
  Description of Artificial Sequence: Synthetic oligonucleotide
caauuggcagucaagaacu

SEQ ID NO: 1277323 - RNA, 19 nt, Artificial Sequence
  Description of Artificial Sequence: Synthetic oligonucleotide
caaccucucucugugaggc

SEQ ID NO: 1277324 - RNA, 19 nt, Artificial Sequence
  Description of Artificial Sequence: Synthetic oligonucleotide
uccuuucggcuuaaauuug

SEQ ID NO: 1277325 - RNA, 19 nt, Artificial Sequence
  Description of Artificial Sequence: Synthetic oligonucleotide
ugaagucugcgaugcaaac

SEQ ID NO: 1277326 - RNA, 19 nt, Artificial Sequence
  Description of Artificial Sequence: Synthetic oligonucleotide
aaaguuuuccgagccacuu

SEQ ID NO: 1277327 - RNA, 19 nt, Artificial Sequence
  Description of Artificial Sequence: Synthetic oligonucleotide
guugacucggagguggucc

SEQ ID NO: 1277328 - RNA, 19 nt, Artificial Sequence
  Description of Artificial Sequence: Synthetic oligonucleotide
gucaugaguggaaauggcc

SEQ ID NO: 1277329 - RNA, 19 nt, Artificial Sequence
  Description of Artificial Sequence: Synthetic oligonucleotide
gcuaugcuaaacaucuugg

SEQ ID NO: 1277330 - RNA, 19 nt, Artificial Sequence
  Description of Artificial Sequence: Synthetic oligonucleotide
cugcauaaguaucauaaaa

SEQ ID NO: 1277331 - RNA, 19 nt, Artificial Sequence
  Description of Artificial Sequence: Synthetic oligonucleotide
acagacauauucuguuuaa

SEQ ID NO: 1277332 - RNA, 19 nt, Artificial Sequence
  Description of Artificial Sequence: Synthetic oligonucleotide
cuguuaacugcuuccuaug

SEQ ID NO: 1277333 - RNA, 19 nt, Artificial Sequence
  Description of Artificial Sequence: Synthetic oligonucleotide
uacccuuuucuagccaagg

SEQ ID NO: 1277334 - RNA, 19 nt, Artificial Sequence
  Description of Artificial Sequence: Synthetic oligonucleotide
guguguguguguugacucg

SEQ ID NO: 1277335 - RNA, 19 nt, Artificial Sequence
  Description of Artificial Sequence: Synthetic oligonucleotide
uuucgcaauuggcagucaa

SEQ ID NO: 1277336 - RNA, 19 nt, Artificial Sequence
  Description of Artificial Sequence: Synthetic oligonucleotide
augauugaugaaguacuug

SEQ ID NO: 1277337 - RNA, 19 nt, Artificial Sequence
  Description of Artificial Sequence: Synthetic oligonucleotide
agcagugggagugaagucu

SEQ ID NO: 1277338 - RNA, 19 nt, Artificial Sequence
  Description of Artificial Sequence: Synthetic oligonucleotide
uggucuguguuacaugauu

SEQ ID NO: 1277339 - RNA, 19 nt, Artificial Sequence
  Description of Artificial Sequence: Synthetic oligonucleotide
ucuuacccuuuucuagcca

SEQ ID NO: 1277340 - RNA, 19 nt, Artificial Sequence
  Description of Artificial Sequence: Synthetic oligonucleotide
uagugugugugugugugug

SEQ ID NO: 1277341 - RNA, 19 nt, Artificial Sequence
  Description of Artificial Sequence: Synthetic oligonucleotide
ucaaguguguugacccuuc

SEQ ID NO: 1277342 - RNA, 19 nt, Artificial Sequence
  Description of Artificial Sequence: Synthetic oligonucleotide
agaaaggagcagaacuauc

SEQ ID NO: 1277343 - RNA, 19 nt, Artificial Sequence
  Description of Artificial Sequence: Synthetic oligonucleotide
auuuugcuuaccauagaga

SEQ ID NO: 1277344 - RNA, 19 nt, Artificial Sequence
  Description of Artificial Sequence: Synthetic oligonucleotide
ucuguguuacaugauugau

SEQ ID NO: 1277345 - RNA, 19 nt, Artificial Sequence
  Description of Artificial Sequence: Synthetic oligonucleotide
aguagaugccuugaaaguu

SEQ ID NO: 1277346 - RNA, 19 nt, Artificial Sequence
  Description of Artificial Sequence: Synthetic oligonucleotide
cuaugcuaaacaucuugga

SEQ ID NO: 1277347 - RNA, 19 nt, Artificial Sequence
  Description of Artificial Sequence: Synthetic oligonucleotide
auuccgucugcuguguaag

SEQ ID NO: 1277348 - RNA, 19 nt, Artificial Sequence
  Description of Artificial Sequence: Synthetic oligonucleotide
aucaguagugugugugugu

SEQ ID NO: 1277349 - RNA, 19 nt, Artificial Sequence
  Description of Artificial Sequence: Synthetic oligonucleotide
uuggauugcguggaaugca

SEQ ID NO: 1277350 - RNA, 19 nt, Artificial Sequence
  Description of Artificial Sequence: Synthetic oligonucleotide
aaguguguugacccuucaa

SEQ ID NO: 1277351 - RNA, 19 nt, Artificial Sequence
  Description of Artificial Sequence: Synthetic oligonucleotide
caguccucuuucauucucc

SEQ ID NO: 1277352 - RNA, 19 nt, Artificial Sequence
  Description of Artificial Sequence: Synthetic oligonucleotide
agcugcgccccauucuuuc

SEQ ID NO: 1277353 - RNA, 19 nt, Artificial Sequence
  Description of Artificial Sequence: Synthetic oligonucleotide
ugaggguugaaagcaucca

SEQ ID NO: 1277354 - RNA, 19 nt, Artificial Sequence
  Description of Artificial Sequence: Synthetic oligonucleotide
aguccauuuccaucccaug

SEQ ID NO: 1277355 - RNA, 19 nt, Artificial Sequence
  Description of Artificial Sequence: Synthetic oligonucleotide
uguguguguguguguguug

SEQ ID NO: 1277356 - RNA, 19 nt, Artificial Sequence
  Description of Artificial Sequence: Synthetic oligonucleotide
uccagcacguuccuucuua

SEQ ID NO: 1277357 - RNA, 19 nt, Artificial Sequence
  Description of Artificial Sequence: Synthetic oligonucleotide
aagauggagccggcuucgc

SEQ ID NO: 1277358 - RNA, 19 nt, Artificial Sequence
  Description of Artificial Sequence: Synthetic oligonucleotide
caauuuccauaauuauuca

SEQ ID NO: 1277359 - RNA, 19 nt, Artificial Sequence
  Description of Artificial Sequence: Synthetic oligonucleotide
uaacgagcuccuuuggauu

SEQ ID NO: 1277360 - RNA, 19 nt, Artificial Sequence
  Description of Artificial Sequence: Synthetic oligonucleotide
gccuugaaaguuuuccgag

SEQ ID NO: 1277361 - RNA, 19 nt, Artificial Sequence
  Description of Artificial Sequence: Synthetic oligonucleotide
ggagugaagucugcgaugc

SEQ ID NO: 1277362 - RNA, 19 nt, Artificial Sequence
  Description of Artificial Sequence: Synthetic oligonucleotide
acaagacugugaaagcugu

SEQ ID NO: 1277363 - RNA, 19 nt, Artificial Sequence
  Description of Artificial Sequence: Synthetic oligonucleotide
ggauggauccaggaugugg

SEQ ID NO: 1277364 - RNA, 19 nt, Artificial Sequence
  Description of Artificial Sequence: Synthetic oligonucleotide
gaagucugcgaugcaaaca

SEQ ID NO: 1277365 - RNA, 19 nt, Artificial Sequence
  Description of Artificial Sequence: Synthetic oligonucleotide
uggauagaacauuccuaaa

SEQ ID NO: 1277366 - RNA, 19 nt, Artificial Sequence
  Description of Artificial Sequence: Synthetic oligonucleotide
agugaagucugcgaugcaa

SEQ ID NO: 1277367 - RNA, 19 nt, Artificial Sequence
  Description of Artificial Sequence: Synthetic oligonucleotide
ucagcaagauggagccggc

SEQ ID NO: 1277368 - RNA, 19 nt, Artificial Sequence
  Description of Artificial Sequence: Synthetic oligonucleotide
agagcucggguuucuucag

SEQ ID NO: 1277369 - RNA, 19 nt, Artificial Sequence
  Description of Artificial Sequence: Synthetic oligonucleotide
guguguugacccuucaaaa

SEQ ID NO: 1277370 - RNA, 19 nt, Artificial Sequence
  Description of Artificial Sequence: Synthetic oligonucleotide
caaggaaggugcucugcug

SEQ ID NO: 1277371 - RNA, 19 nt, Artificial Sequence
  Description of Artificial Sequence: Synthetic oligonucleotide
uccuggauacuuucuuuau

SEQ ID NO: 1277372 - RNA, 19 nt, Artificial Sequence
  Description of Artificial Sequence: Synthetic oligonucleotide
agcucggguuucuucagcu

SEQ ID NO: 1277373 - RNA, 19 nt, Artificial Sequence
  Description of Artificial Sequence: Synthetic oligonucleotide
gauuuucgcaauuggcagu

SEQ ID NO: 1277374 - RNA, 19 nt, Artificial Sequence
  Description of Artificial Sequence: Synthetic oligonucleotide
gauggauccaggauguggu

SEQ ID NO: 1277375 - RNA, 19 nt, Artificial Sequence
  Description of Artificial Sequence: Synthetic oligonucleotide
gguugaaagcauccaucag

SEQ ID NO: 1277376 - RNA, 19 nt, Artificial Sequence
  Description of Artificial Sequence: Synthetic oligonucleotide
guguugacccuucaaaagu

SEQ ID NO: 1277377 - RNA, 19 nt, Artificial Sequence
  Description of Artificial Sequence: Synthetic oligonucleotide
gauuccgucugcuguguaa

SEQ ID NO: 1277378 - RNA, 19 nt, Artificial Sequence
  Description of Artificial Sequence: Synthetic oligonucleotide
acuuuaugaaugugcuauu

SEQ ID NO: 1277379 - RNA, 19 nt, Artificial Sequence
  Description of Artificial Sequence: Synthetic oligonucleotide
acccguaagguaagcaguc

SEQ ID NO: 1277380 - RNA, 19 nt, Artificial Sequence
  Description of Artificial Sequence: Synthetic oligonucleotide
caugugccugccucugugc

SEQ ID NO: 1277381 - RNA, 19 nt, Artificial Sequence
  Description of Artificial Sequence: Synthetic oligonucleotide
ugcuuaccauagagaaaug

SEQ ID NO: 1277382 - RNA, 19 nt, Artificial Sequence
  Description of Artificial Sequence: Synthetic oligonucleotide
aaggugcucugcuggacua

SEQ ID NO: 1277383 - RNA, 19 nt, Artificial Sequence
  Description of Artificial Sequence: Synthetic oligonucleotide
ugugugugugugugugugu

SEQ ID NO: 1277384 - RNA, 19 nt, Artificial Sequence
  Description of Artificial Sequence: Synthetic oligonucleotide
ccuugaaaguuuuccgagc

SEQ ID NO: 1277385 - RNA, 19 nt, Artificial Sequence
  Description of Artificial Sequence: Synthetic oligonucleotide
gugaacagcuaugcuaaac

SEQ ID NO: 1277386 - RNA, 19 nt, Artificial Sequence
  Description of Artificial Sequence: Synthetic oligonucleotide
aggcuaauauuuucugauu

SEQ ID NO: 1277387 - RNA, 19 nt, Artificial Sequence
  Description of Artificial Sequence: Synthetic oligonucleotide
ucuuaccccuauacagaaa

SEQ ID NO: 1277388 - RNA, 19 nt, Artificial Sequence
  Description of Artificial Sequence: Synthetic oligonucleotide
ggucuguguuacaugauug

SEQ ID NO: 1277389 - RNA, 19 nt, Artificial Sequence
  Description of Artificial Sequence: Synthetic oligonucleotide
acgagcuccuuuggauucc

SEQ ID NO: 1277390 - RNA, 19 nt, Artificial Sequence
  Description of Artificial Sequence: Synthetic oligonucleotide
gaacggaucuaacgagcuc

SEQ ID NO: 1277391 - RNA, 19 nt, Artificial Sequence
  Description of Artificial Sequence: Synthetic oligonucleotide
cuccuuucggcuuaaauuu

SEQ ID NO: 1277392 - RNA, 19 nt, Artificial Sequence
  Description of Artificial Sequence: Synthetic oligonucleotide
gugugugugugugugugug

SEQ ID NO: 1277393 - RNA, 19 nt, Artificial Sequence
  Description of Artificial Sequence: Synthetic oligonucleotide
caugaguggaaauggccaa

SEQ ID NO: 1277394 - RNA, 19 nt, Artificial Sequence
  Description of Artificial Sequence: Synthetic oligonucleotide
auuuguuauuggagaaccu

SEQ ID NO: 1277395 - RNA, 19 nt, Artificial Sequence
  Description of Artificial Sequence: Synthetic oligonucleotide
ugcguggaaugcacagcug

SEQ ID NO: 1277396 - RNA, 19 nt, Artificial Sequence
  Description of Artificial Sequence: Synthetic oligonucleotide
agugugugugugugugugu

SEQ ID NO: 1277397 - RNA, 19 nt, Artificial Sequence
  Description of Artificial Sequence: Synthetic oligonucleotide
gcacgaacggaucuaacga

SEQ ID NO: 1277398 - RNA, 19 nt, Artificial Sequence
  Description of Artificial Sequence: Synthetic oligonucleotide
uuccgagccacuucugauu

SEQ ID NO: 1277399 - RNA, 19 nt, Artificial Sequence
  Description of Artificial Sequence: Synthetic oligonucleotide
uugcugggaagcugcgccc

SEQ ID NO: 1277400 - RNA, 19 nt, Artificial Sequence
  Description of Artificial Sequence: Synthetic oligonucleotide
ccauaucaaguauggcacg

SEQ ID NO: 1277401 - RNA, 19 nt, Artificial Sequence
  Description of Artificial Sequence: Synthetic oligonucleotide
gcuguguaagcuuccuccc

SEQ ID NO: 1277402 - RNA, 19 nt, Artificial Sequence
  Description of Artificial Sequence: Synthetic oligonucleotide
ggcuuaaauuugagaaagg

SEQ ID NO: 1277403 - RNA, 19 nt, Artificial Sequence
  Description of Artificial Sequence: Synthetic oligonucleotide
gcacuguucguccagcuga

SEQ ID NO: 1277404 - RNA, 19 nt, Artificial Sequence
  Description of Artificial Sequence: Synthetic oligonucleotide
uguguguguguguguugac

SEQ ID NO: 1277405 - RNA, 19 nt, Artificial Sequence
  Description of Artificial Sequence: Synthetic oligonucleotide
gguccucuuggauugcgug

SEQ ID NO: 1277406 - RNA, 19 nt, Artificial Sequence
  Description of Artificial Sequence: Synthetic oligonucleotide
cagauggaucacuucuuca

SEQ ID NO: 1277407 - RNA, 19 nt, Artificial Sequence
  Description of Artificial Sequence: Synthetic oligonucleotide
uauggcacgaacggaucua

SEQ ID NO: 1277408 - RNA, 19 nt, Artificial Sequence
  Description of Artificial Sequence: Synthetic oligonucleotide
gcuuucaguagaugccuug

SEQ ID NO: 1277409 - RNA, 19 nt, Artificial Sequence
  Description of Artificial Sequence: Synthetic oligonucleotide
ccacccguaagguaagcag

SEQ ID NO: 1277410 - RNA, 19 nt, Artificial Sequence
  Description of Artificial Sequence: Synthetic oligonucleotide
caucaucuugaaaauuaua

SEQ ID NO: 1277411 - RNA, 19 nt, Artificial Sequence
  Description of Artificial Sequence: Synthetic oligonucleotide
gccggcuucgcagagcucg

SEQ ID NO: 1277412 - RNA, 19 nt, Artificial Sequence
  Description of Artificial Sequence: Synthetic oligonucleotide
cuaacgagcuccuuuggau

SEQ ID NO: 1277413 - RNA, 19 nt, Artificial Sequence
  Description of Artificial Sequence: Synthetic oligonucleotide
gagcucggguuucuucagc

SEQ ID NO: 1277414 - RNA, 19 nt, Artificial Sequence
  Description of Artificial Sequence: Synthetic oligonucleotide
ugguccucuuggauugcgu

SEQ ID NO: 1277415 - RNA, 19 nt, Artificial Sequence
  Description of Artificial Sequence: Synthetic oligonucleotide
cagcacguuccuucuuacc

SEQ ID NO: 1277416 - RNA, 19 nt, Artificial Sequence
  Description of Artificial Sequence: Synthetic oligonucleotide
cugcgaugcaaacacagcu

SEQ ID NO: 1277417 - RNA, 19 nt, Artificial Sequence
  Description of Artificial Sequence: Synthetic oligonucleotide
augaaguacuugauuccgu

SEQ ID NO: 1277418 - RNA, 19 nt, Artificial Sequence
  Description of Artificial Sequence: Synthetic oligonucleotide
uucguccagcugaagucau

SEQ ID NO: 1277419 - RNA, 19 nt, Artificial Sequence
  Description of Artificial Sequence: Synthetic oligonucleotide
guguguguguguguguuga

SEQ ID NO: 1277420 - RNA, 19 nt, Artificial Sequence
  Description of Artificial Sequence: Synthetic oligonucleotide
gauguggucuguguuacau

SEQ ID NO: 1277421 - RNA, 19 nt, Artificial Sequence
  Description of Artificial Sequence: Synthetic oligonucleotide
gaaggugcucugcuggacu

SEQ ID NO: 1277422 - RNA, 19 nt, Artificial Sequence
  Description of Artificial Sequence: Synthetic oligonucleotide
uugauuccgucugcugugu

SEQ ID NO: 1277423 - RNA, 19 nt, Artificial Sequence
  Description of Artificial Sequence: Synthetic oligonucleotide
gauugugcaagcacuuuau

SEQ ID NO: 1277424 - RNA, 19 nt, Artificial Sequence
  Description of Artificial Sequence: Synthetic oligonucleotide
cuuccuaugucucucugau

SEQ ID NO: 1277425 - RNA, 19 nt, Artificial Sequence
  Description of Artificial Sequence: Synthetic oligonucleotide
gggagugaagucugcgaug

SEQ ID NO: 1277426 - RNA, 19 nt, Artificial Sequence
  Description of Artificial Sequence: Synthetic oligonucleotide
gcaguccauaucaaguaug

SEQ ID NO: 1277427 - RNA, 19 nt, Artificial Sequence
  Description of Artificial Sequence: Synthetic oligonucleotide
cugcgccccauucuuuccc

SEQ ID NO: 1277428 - RNA, 19 nt, Artificial Sequence
  Description of Artificial Sequence: Synthetic oligonucleotide
ugcgccccauucuuuccca

SEQ ID NO: 1277429 - RNA, 19 nt, Artificial Sequence
  Description of Artificial Sequence: Synthetic oligonucleotide
augucccauuucucccuag

SEQ ID NO: 1277430 - RNA, 19 nt, Artificial Sequence
  Description of Artificial Sequence: Synthetic oligonucleotide
cagaagaugaggugugagu

SEQ ID NO: 1277431 - RNA, 19 nt, Artificial Sequence
  Description of Artificial Sequence: Synthetic oligonucleotide
uucucaaguccuggauacu

SEQ ID NO: 1277432 - RNA, 19 nt, Artificial Sequence
  Description of Artificial Sequence: Synthetic oligonucleotide
uggcacgaacggaucuaac

SEQ ID NO: 1277433 - RNA, 19 nt, Artificial Sequence
  Description of Artificial Sequence: Synthetic oligonucleotide
guuugcugggaagcugcgc

SEQ ID NO: 1277434 - RNA, 19 nt, Artificial Sequence
  Description of Artificial Sequence: Synthetic oligonucleotide
acccuucaaaaguuacauu

SEQ ID NO: 1277435 - RNA, 19 nt, Artificial Sequence
  Description of Artificial Sequence: Synthetic oligonucleotide
ggagcagaacuauccaaaa

SEQ ID NO: 1277436 - RNA, 19 nt, Artificial Sequence
  Description of Artificial Sequence: Synthetic oligonucleotide
aggugcucugcuggacuac

SEQ ID NO: 1277437 - RNA, 19 nt, Artificial Sequence
  Description of Artificial Sequence: Synthetic oligonucleotide
guaagguaagcaguccaua

SEQ ID NO: 1277438 - RNA, 19 nt, Artificial Sequence
  Description of Artificial Sequence: Synthetic oligonucleotide
uuuucgcaauuggcaguca

SEQ ID NO: 1277439 - RNA, 19 nt, Artificial Sequence
  Description of Artificial Sequence: Synthetic oligonucleotide
cuaacuucuuaccccuaua

SEQ ID NO: 1277440 - RNA, 19 nt, Artificial Sequence
  Description of Artificial Sequence: Synthetic oligonucleotide
guauggcacgaacggaucu

SEQ ID NO: 1277441 - RNA, 19 nt, Artificial Sequence
  Description of Artificial Sequence: Synthetic oligonucleotide
cuucauaguccauuuccau

SEQ ID NO: 1277442 - RNA, 19 nt, Artificial Sequence
  Description of Artificial Sequence: Synthetic oligonucleotide
uucgcagagcucggguuuc

SEQ ID NO: 1277443 - RNA, 19 nt, Artificial Sequence
  Description of Artificial Sequence: Synthetic oligonucleotide
ggacugacuggacauggaa

SEQ ID NO: 1277444 - RNA, 19 nt, Artificial Sequence
  Description of Artificial Sequence: Synthetic oligonucleotide
uuccuaugucucucugauu

SEQ ID NO: 1277445 - RNA, 19 nt, Artificial Sequence
  Description of Artificial Sequence: Synthetic oligonucleotide
ugauuccgucugcugugua

SEQ ID NO: 1277446 - RNA, 19 nt, Artificial Sequence
  Description of Artificial Sequence: Synthetic oligonucleotide
uuccucccacccguaaggu

SEQ ID NO: 1277447 - RNA, 19 nt, Artificial Sequence
  Description of Artificial Sequence: Synthetic oligonucleotide
cagcaauuuccauaauuau

SEQ ID NO: 1277448 - RNA, 19 nt, Artificial Sequence
  Description of Artificial Sequence: Synthetic oligonucleotide
gcagucaagaacugugacu

SEQ ID NO: 1277449 - RNA, 19 nt, Artificial Sequence
  Description of Artificial Sequence: Synthetic oligonucleotide
uguugacucggaggugguc

SEQ ID NO: 1277450 - RNA, 19 nt, Artificial Sequence
  Description of Artificial Sequence: Synthetic oligonucleotide
agggcaaaggggacugacu

SEQ ID NO: 1277451 - RNA, 19 nt, Artificial Sequence
  Description of Artificial Sequence: Synthetic oligonucleotide
ggacuacaaccucucucug

SEQ ID NO: 1277452 - RNA, 19 nt, Artificial Sequence
  Description of Artificial Sequence: Synthetic oligonucleotide
cacccguaagguaagcagu

SEQ ID NO: 1277453 - RNA, 19 nt, Artificial Sequence
  Description of Artificial Sequence: Synthetic oligonucleotide
gagccggcuucgcagagcu

SEQ ID NO: 1277454 - RNA, 19 nt, Artificial Sequence
  Description of Artificial Sequence: Synthetic oligonucleotide
gacugacuggacauggaau

SEQ ID NO: 1277455 - RNA, 19 nt, Artificial Sequence
  Description of Artificial Sequence: Synthetic oligonucleotide
gcuuccuaugucucucuga

SEQ ID NO: 1277456 - RNA, 19 nt, Artificial Sequence
  Description of Artificial Sequence: Synthetic oligonucleotide
agcagauggaucacuucuu

SEQ ID NO: 1277457 - RNA, 19 nt, Artificial Sequence
  Description of Artificial Sequence: Synthetic oligonucleotide
ucuuagcccugggccagga

SEQ ID NO: 1277458 - RNA, 19 nt, Artificial Sequence
  Description of Artificial Sequence: Synthetic oligonucleotide
acuguucguccagcugaag

SEQ ID NO: 1277459 - RNA, 19 nt, Artificial Sequence
  Description of Artificial Sequence: Synthetic oligonucleotide
gcaagcacuuuaugaaugu

SEQ ID NO: 1277460 - RNA, 19 nt, Artificial Sequence
  Description of Artificial Sequence: Synthetic oligonucleotide
aggggacugacuggacaug

SEQ ID NO: 1277461 - RNA, 19 nt, Artificial Sequence
  Description of Artificial Sequence: Synthetic oligonucleotide
gcgaugcaaacacagcucu

SEQ ID NO: 1277462 - RNA, 19 nt, Artificial Sequence
  Description of Artificial Sequence: Synthetic oligonucleotide
ggaucuaacgagcuccuuu

SEQ ID NO: 1277463 - RNA, 19 nt, Artificial Sequence
  Description of Artificial Sequence: Synthetic oligonucleotide
acggaucuaacgagcuccu

SEQ ID NO: 1277464 - RNA, 19 nt, Artificial Sequence
  Description of Artificial Sequence: Synthetic oligonucleotide
uggauuccagaagcagguu

SEQ ID NO: 1277465 - RNA, 19 nt, Artificial Sequence
  Description of Artificial Sequence: Synthetic oligonucleotide
ugggaagcugcgccccauu

SEQ ID NO: 1277466 - RNA, 19 nt, Artificial Sequence
  Description of Artificial Sequence: Synthetic oligonucleotide
gugcuauuugacucucuau

SEQ ID NO: 1277467 - RNA, 19 nt, Artificial Sequence
  Description of Artificial Sequence: Synthetic oligonucleotide
cacaggauggauccaggau

SEQ ID NO: 1277468 - RNA, 19 nt, Artificial Sequence
  Description of Artificial Sequence: Synthetic oligonucleotide
gcuuaccauagagaaaugu

SEQ ID NO: 1277469 - RNA, 19 nt, Artificial Sequence
  Description of Artificial Sequence: Synthetic oligonucleotide
guagugugugugugugugu

SEQ ID NO: 1277470 - RNA, 19 nt, Artificial Sequence
  Description of Artificial Sequence: Synthetic oligonucleotide
cuucacguuuuggaguucu

SEQ ID NO: 1277471 - RNA, 19 nt, Artificial Sequence
  Description of Artificial Sequence: Synthetic oligonucleotide
agucugcgaugcaaacaca

SEQ ID NO: 1277472 - RNA, 19 nt, Artificial Sequence
  Description of Artificial Sequence: Synthetic oligonucleotide
guguguguguguguugacu

SEQ ID NO: 1277473 - RNA, 19 nt, Artificial Sequence
  Description of Artificial Sequence: Synthetic oligonucleotide
ggauuccagaagcagguuu

SEQ ID NO: 1277474 - RNA, 19 nt, Artificial Sequence
  Description of Artificial Sequence: Synthetic oligonucleotide
gcguggaaugcacagcugu

SEQ ID NO: 1277475 - RNA, 19 nt, Artificial Sequence
  Description of Artificial Sequence: Synthetic oligonucleotide
ccguaagguaagcagucca

SEQ ID NO: 1277476 - RNA, 19 nt, Artificial Sequence
  Description of Artificial Sequence: Synthetic oligonucleotide
cccuuuucuagccaaggua

SEQ ID NO: 1277477 - RNA, 19 nt, Artificial Sequence
  Description of Artificial Sequence: Synthetic oligonucleotide
ucccacccguaagguaagc

SEQ ID NO: 1277478 - RNA, 19 nt, Artificial Sequence
  Description of Artificial Sequence: Synthetic oligonucleotide
ccagcacguuccuucuuac

SEQ ID NO: 1277479 - RNA, 19 nt, Artificial Sequence
  Description of Artificial Sequence: Synthetic oligonucleotide
cuacggcuuuggcuuccug

SEQ ID NO: 1277480 - RNA, 19 nt, Artificial Sequence
  Description of Artificial Sequence: Synthetic oligonucleotide
augugcuauuugacucucu

SEQ ID NO: 1277481 - RNA, 19 nt, Artificial Sequence
  Description of Artificial Sequence: Synthetic oligonucleotide
gguaagcaguccauaucaa

SEQ ID NO: 1277482 - RNA, 19 nt, Artificial Sequence
  Description of Artificial Sequence: Synthetic oligonucleotide
guguguguguugacucgga

SEQ ID NO: 1277483 - RNA, 19 nt, Artificial Sequence
  Description of Artificial Sequence: Synthetic oligonucleotide
cagcuacggcuuuggcuuc

SEQ ID NO: 1277484 - RNA, 19 nt, Artificial Sequence
  Description of Artificial Sequence: Synthetic oligonucleotide
ggacauggaaucagaagau

SEQ ID NO: 1277485 - RNA, 19 nt, Artificial Sequence
  Description of Artificial Sequence: Synthetic oligonucleotide
cccguaagguaagcagucc

SEQ ID NO: 1277486 - RNA, 19 nt, Artificial Sequence
  Description of Artificial Sequence: Synthetic oligonucleotide
ucgcagagcucggguuucu

SEQ ID NO: 1277487 - RNA, 19 nt, Artificial Sequence
  Description of Artificial Sequence: Synthetic oligonucleotide
cuucgcagagcucggguuu

SEQ ID NO: 1277488 - RNA, 19 nt, Artificial Sequence
  Description of Artificial Sequence: Synthetic oligonucleotide
ggugcucugcuggacuaca

SEQ ID NO: 1277489 - RNA, 19 nt, Artificial Sequence
  Description of Artificial Sequence: Synthetic oligonucleotide
cagacauauucuguuuaau

SEQ ID NO: 1277490 - RNA, 19 nt, Artificial Sequence
  Description of Artificial Sequence: Synthetic oligonucleotide
aagcugcgccccauucuuu

SEQ ID NO: 1277491 - RNA, 19 nt, Artificial Sequence
  Description of Artificial Sequence: Synthetic oligonucleotide
cggguuucuucagcuacgg

SEQ ID NO: 1277492 - RNA, 19 nt, Artificial Sequence
  Description of Artificial Sequence: Synthetic oligonucleotide
guguguguguguguguguu

SEQ ID NO: 1277493 - RNA, 19 nt, Artificial Sequence
  Description of Artificial Sequence: Synthetic oligonucleotide
gucaaguguguugacccuu

SEQ ID NO: 1277494 - RNA, 19 nt, Artificial Sequence
  Description of Artificial Sequence: Synthetic oligonucleotide
caguagugugugugugugu

SEQ ID NO: 1277495 - RNA, 19 nt, Artificial Sequence
  Description of Artificial Sequence: Synthetic oligonucleotide
cacguuccuucuuacccuu

SEQ ID NO: 1277496 - RNA, 19 nt, Artificial Sequence
  Description of Artificial Sequence: Synthetic oligonucleotide
ggcuucgcagagcucgggu

SEQ ID NO: 1277497 - RNA, 19 nt, Artificial Sequence
  Description of Artificial Sequence: Synthetic oligonucleotide
gcuaaacaucuuggauaga

SEQ ID NO: 1277498 - RNA, 19 nt, Artificial Sequence
  Description of Artificial Sequence: Synthetic oligonucleotide
cgaacggaucuaacgagcu

SEQ ID NO: 1277499 - RNA, 19 nt, Artificial Sequence
  Description of Artificial Sequence: Synthetic oligonucleotide
gcagguuugcugggaagcu

SEQ ID NO: 1277500 - RNA, 19 nt, Artificial Sequence
  Description of Artificial Sequence: Synthetic oligonucleotide
gcuucgcagagcucggguu

SEQ ID NO: 1277501 - RNA, 19 nt, Artificial Sequence
  Description of Artificial Sequence: Synthetic oligonucleotide
cguaagguaagcaguccau

SEQ ID NO: 1277502 - RNA, 19 nt, Artificial Sequence
  Description of Artificial Sequence: Synthetic oligonucleotide
acguuccuucuuacccuuu

SEQ ID NO: 1277503 - RNA, 19 nt, Artificial Sequence
  Description of Artificial Sequence: Synthetic oligonucleotide
ccccaugcugucugguuua

SEQ ID NO: 1277504 - RNA, 19 nt, Artificial Sequence
  Description of Artificial Sequence: Synthetic oligonucleotide
gcuucacguuuuggaguuc

SEQ ID NO: 1277505 - RNA, 19 nt, Artificial Sequence
  Description of Artificial Sequence: Synthetic oligonucleotide
cuuagcccugggccaggau

SEQ ID NO: 1277506 - RNA, 19 nt, Artificial Sequence
  Description of Artificial Sequence: Synthetic oligonucleotide
cagcugccuuucauuuguu

SEQ ID NO: 1277507 - RNA, 19 nt, Artificial Sequence
  Description of Artificial Sequence: Synthetic oligonucleotide
cggcuucgcagagcucggg

SEQ ID NO: 1277508 - RNA, 19 nt, Artificial Sequence
  Description of Artificial Sequence: Synthetic oligonucleotide
cggaucuaacgagcuccuu

SEQ ID NO: 1277509 - RNA, 19 nt, Artificial Sequence
  Description of Artificial Sequence: Synthetic oligonucleotide
uuugugaugacaaaguuga

SEQ ID NO: 1277510 - RNA, 19 nt, Artificial Sequence
  Description of Artificial Sequence: Synthetic oligonucleotide
uaaguuacuauucucuucc

SEQ ID NO: 1277511 - RNA, 19 nt, Artificial Sequence
  Description of Artificial Sequence: Synthetic oligonucleotide
caauuuaggacacauaagc

SEQ ID NO: 1277512 - RNA, 19 nt, Artificial Sequence
  Description of Artificial Sequence: Synthetic oligonucleotide
ugaacuaccguccucaaca

SEQ ID NO: 1277513 - RNA, 19 nt, Artificial Sequence
  Description of Artificial Sequence: Synthetic oligonucleotide
uauguugugaccgugugcg

SEQ ID NO: 1277514 - RNA, 19 nt, Artificial Sequence
  Description of Artificial Sequence: Synthetic oligonucleotide
agauguccgaucuucagcc

SEQ ID NO: 1277515 - RNA, 19 nt, Artificial Sequence
  Description of Artificial Sequence: Synthetic oligonucleotide
uggacaaaggacuuaacag

SEQ ID NO: 1277516 - RNA, 19 nt, Artificial Sequence
  Description of Artificial Sequence: Synthetic oligonucleotide
uucagauagauacaugccc

SEQ ID NO: 1277517 - RNA, 19 nt, Artificial Sequence
  Description of Artificial Sequence: Synthetic oligonucleotide
uguagcagcauacugcugc

SEQ ID NO: 1277518 - RNA, 19 nt, Artificial Sequence
  Description of Artificial Sequence: Synthetic oligonucleotide
uguucauuggugcugacca

SEQ ID NO: 1277519 - RNA, 19 nt, Artificial Sequence
  Description of Artificial Sequence: Synthetic oligonucleotide
agacuuauuuucaagagac

SEQ ID NO: 1277520 - RNA, 19 nt, Artificial Sequence
  Description of Artificial Sequence: Synthetic oligonucleotide
cauuuugaggaucuuaagg

SEQ ID NO: 1277521 - RNA, 19 nt, Artificial Sequence
  Description of Artificial Sequence: Synthetic oligonucleotide
uaaauguugucucaaugug

SEQ ID NO: 1277522 - RNA, 19 nt, Artificial Sequence
  Description of Artificial Sequence: Synthetic oligonucleotide
aauguugucucaauguguc

SEQ ID NO: 1277523 - RNA, 19 nt, Artificial Sequence
  Description of Artificial Sequence: Synthetic oligonucleotide
ucuuaagguaauuacaguc

SEQ ID NO: 1277524 - RNA, 19 nt, Artificial Sequence
  Description of Artificial Sequence: Synthetic oligonucleotide
acugauagaggacacaucu

SEQ ID NO: 1277525 - RNA, 19 nt, Artificial Sequence
  Description of Artificial Sequence: Synthetic oligonucleotide
acuaccguccucaacaucc

SEQ ID NO: 1277526 - RNA, 19 nt, Artificial Sequence
  Description of Artificial Sequence: Synthetic oligonucleotide
cucaguaggagcuaacagg

SEQ ID NO: 1277527 - RNA, 19 nt, Artificial Sequence
  Description of Artificial Sequence: Synthetic oligonucleotide
uuacuauucucuuccaaag

SEQ ID NO: 1277528 - RNA, 19 nt, Artificial Sequence
  Description of Artificial Sequence: Synthetic oligonucleotide
gagaagaugaacuaccguc

SEQ ID NO: 1277529 - RNA, 19 nt, Artificial Sequence
  Description of Artificial Sequence: Synthetic oligonucleotide
acuuauuuucaagagacag

SEQ ID NO: 1277530 - RNA, 19 nt, Artificial Sequence
  Description of Artificial Sequence: Synthetic oligonucleotide
aacuccauaacuuccccug

SEQ ID NO: 1277531 - RNA, 19 nt, Artificial Sequence
  Description of Artificial Sequence: Synthetic oligonucleotide
ucagauagauacaugccca

SEQ ID NO: 1277532 - RNA, 19 nt, Artificial Sequence
  Description of Artificial Sequence: Synthetic oligonucleotide
gaggacacaucucaguagg

SEQ ID NO: 1277533 - RNA, 19 nt, Artificial Sequence
  Description of Artificial Sequence: Synthetic oligonucleotide
ggagcuaugacugauagag

SEQ ID NO: 1277534 - RNA, 19 nt, Artificial Sequence
  Description of Artificial Sequence: Synthetic oligonucleotide
gacacucccggucugaagg

SEQ ID NO: 1277535 - RNA, 19 nt, Artificial Sequence
  Description of Artificial Sequence: Synthetic oligonucleotide
aaaguugacuucugagaag

SEQ ID NO: 1277536 - RNA, 19 nt, Artificial Sequence
  Description of Artificial Sequence: Synthetic oligonucleotide
ucaggaugagacaugguca

SEQ ID NO: 1277537 - RNA, 19 nt, Artificial Sequence
  Description of Artificial Sequence: Synthetic oligonucleotide
uaauuacagucucaccagg

SEQ ID NO: 1277538 - RNA, 19 nt, Artificial Sequence
  Description of Artificial Sequence: Synthetic oligonucleotide
aacuguugaguucugcugu

SEQ ID NO: 1277539 - RNA, 19 nt, Artificial Sequence
  Description of Artificial Sequence: Synthetic oligonucleotide
gguaauuacagucucacca

SEQ ID NO: 1277540 - RNA, 19 nt, Artificial Sequence
  Description of Artificial Sequence: Synthetic oligonucleotide
guacuuuucaggaacaggc

SEQ ID NO: 1277541 - RNA, 19 nt, Artificial Sequence
  Description of Artificial Sequence: Synthetic oligonucleotide
uuucacgcuuaacagaaga

SEQ ID NO: 1277542 - RNA, 19 nt, Artificial Sequence
  Description of Artificial Sequence: Synthetic oligonucleotide
uuugaggaucuuaagguaa

SEQ ID NO: 1277543 - RNA, 19 nt, Artificial Sequence
  Description of Artificial Sequence: Synthetic oligonucleotide
agugaagcggcugugcugc

SEQ ID NO: 1277544 - RNA, 19 nt, Artificial Sequence
  Description of Artificial Sequence: Synthetic oligonucleotide
agaccaucaacacauuuug

SEQ ID NO: 1277545 - RNA, 19 nt, Artificial Sequence
  Description of Artificial Sequence: Synthetic oligonucleotide
uuaggagacagcacucuag

SEQ ID NO: 1277546 - RNA, 19 nt, Artificial Sequence
  Description of Artificial Sequence: Synthetic oligonucleotide
aggagugccacuuccagag

SEQ ID NO: 1277547 - RNA, 19 nt, Artificial Sequence
  Description of Artificial Sequence: Synthetic oligonucleotide
aaggcggcucugcagagac

SEQ ID NO: 1277548 - RNA, 19 nt, Artificial Sequence
  Description of Artificial Sequence: Synthetic oligonucleotide
cauacuugccugaaguccc

SEQ ID NO: 1277549 - RNA, 19 nt, Artificial Sequence
  Description of Artificial Sequence: Synthetic oligonucleotide
caccaggauauucagauag

SEQ ID NO: 1277550 - RNA, 19 nt, Artificial Sequence
  Description of Artificial Sequence: Synthetic oligonucleotide
aaggcaacuggaaucuccc

SEQ ID NO: 1277551 - RNA, 19 nt, Artificial Sequence
  Description of Artificial Sequence: Synthetic oligonucleotide
ucaagagacagguaauuaa

SEQ ID NO: 1277552 - RNA, 19 nt, Artificial Sequence
  Description of Artificial Sequence: Synthetic oligonucleotide
auucagauagauacaugcc

SEQ ID NO: 1277553 - RNA, 19 nt, Artificial Sequence
  Description of Artificial Sequence: Synthetic oligonucleotide
ucuaucaggucgaggagug

SEQ ID NO: 1277554 - RNA, 19 nt, Artificial Sequence
  Description of Artificial Sequence: Synthetic oligonucleotide
uccuguacuuuucaggaac

SEQ ID NO: 1277555 - RNA, 19 nt, Artificial Sequence
  Description of Artificial Sequence: Synthetic oligonucleotide
acuauucucuuccaaagau

SEQ ID NO: 1277556 - RNA, 19 nt, Artificial Sequence
  Description of Artificial Sequence: Synthetic oligonucleotide
auggacaaaggacuuaaca

SEQ ID NO: 1277557 - RNA, 19 nt, Artificial Sequence
  Description of Artificial Sequence: Synthetic oligonucleotide
uucacgcuuaacagaagag

SEQ ID NO: 1277558 - RNA, 19 nt, Artificial Sequence
  Description of Artificial Sequence: Synthetic oligonucleotide
ugcuggauggacaaaggac

SEQ ID NO: 1277559 - RNA, 19 nt, Artificial Sequence
  Description of Artificial Sequence: Synthetic oligonucleotide
cuggguauggagugaagcg

SEQ ID NO: 1277560 - RNA, 19 nt, Artificial Sequence
  Description of Artificial Sequence: Synthetic oligonucleotide
ugaacuguugaguucugcu

SEQ ID NO: 1277561 - RNA, 19 nt, Artificial Sequence
  Description of Artificial Sequence: Synthetic oligonucleotide
aagaugaacuaccguccuc

SEQ ID NO: 1277562 - RNA, 19 nt, Artificial Sequence
  Description of Artificial Sequence: Synthetic oligonucleotide
ucuauguugugaccgugug

SEQ ID NO: 1277563 - RNA, 19 nt, Artificial Sequence
  Description of Artificial Sequence: Synthetic oligonucleotide
cauaauggaggucagccuc

SEQ ID NO: 1277564 - RNA, 19 nt, Artificial Sequence
  Description of Artificial Sequence: Synthetic oligonucleotide
cugagaagaugaacuaccg

SEQ ID NO: 1277565 - RNA, 19 nt, Artificial Sequence
  Description of Artificial Sequence: Synthetic oligonucleotide
gagacagguaauuaauguc

SEQ ID NO: 1277566 - RNA, 19 nt, Artificial Sequence
  Description of Artificial Sequence: Synthetic oligonucleotide
ugagcagaguuuaggagac

SEQ ID NO: 1277567 - RNA, 19 nt, Artificial Sequence
  Description of Artificial Sequence: Synthetic oligonucleotide
agguaauuacagucucacc

SEQ ID NO: 1277568 - RNA, 19 nt, Artificial Sequence
  Description of Artificial Sequence: Synthetic oligonucleotide
cucaggaugagacaugguc

SEQ ID NO: 1277569 - RNA, 19 nt, Artificial Sequence
  Description of Artificial Sequence: Synthetic oligonucleotide
agucccgugaucugcaaag

SEQ ID NO: 1277570 - RNA, 19 nt, Artificial Sequence
  Description of Artificial Sequence: Synthetic oligonucleotide
acuuaacagauguccggac

SEQ ID NO: 1277571 - RNA, 19 nt, Artificial Sequence
  Description of Artificial Sequence: Synthetic oligonucleotide
uacuauucucuuccaaaga

SEQ ID NO: 1277572 - RNA, 19 nt, Artificial Sequence
  Description of Artificial Sequence: Synthetic oligonucleotide
uaagguaauuacagucuca

SEQ ID NO: 1277573 - RNA, 19 nt, Artificial Sequence
  Description of Artificial Sequence: Synthetic oligonucleotide
uguugucucaaugugucca

SEQ ID NO: 1277574 - RNA, 19 nt, Artificial Sequence
  Description of Artificial Sequence: Synthetic oligonucleotide
aaauguugucucaaugugu

SEQ ID NO: 1277575 - RNA, 19 nt, Artificial Sequence
  Description of Artificial Sequence: Synthetic oligonucleotide
gagauguccgaucuucagc

SEQ ID NO: 1277576 - RNA, 19 nt, Artificial Sequence
  Description of Artificial Sequence: Synthetic oligonucleotide
uauggagugaagcggcugu

SEQ ID NO: 1277577 - RNA, 19 nt, Artificial Sequence
  Description of Artificial Sequence: Synthetic oligonucleotide
uaagcaagcugaacuucag

SEQ ID NO: 1277578 - RNA, 19 nt, Artificial Sequence
  Description of Artificial Sequence: Synthetic oligonucleotide
gagacuuauuuucaagaga

SEQ ID NO: 1277579 - RNA, 19 nt, Artificial Sequence
  Description of Artificial Sequence: Synthetic oligonucleotide
uuuugaggaucuuaaggua

SEQ ID NO: 1277580 - RNA, 19 nt, Artificial Sequence
  Description of Artificial Sequence: Synthetic oligonucleotide
ugugccaugagauguccga

SEQ ID NO: 1277581 - RNA, 19 nt, Artificial Sequence
  Description of Artificial Sequence: Synthetic oligonucleotide
guuacuauucucuuccaaa

SEQ ID NO: 1277582 - RNA, 19 nt, Artificial Sequence
  Description of Artificial Sequence: Synthetic oligonucleotide
aaagccucaggaugagaca

SEQ ID NO: 1277583 - RNA, 19 nt, Artificial Sequence
  Description of Artificial Sequence: Synthetic oligonucleotide
uugaguucugcugucaccu

SEQ ID NO: 1277584 - RNA, 19 nt, Artificial Sequence
  Description of Artificial Sequence: Synthetic oligonucleotide
gcaccugucuaucaggucg

SEQ ID NO: 1277585 - RNA, 19 nt, Artificial Sequence
  Description of Artificial Sequence: Synthetic oligonucleotide
uugucuaaauguugucuca

SEQ ID NO: 1277586 - RNA, 19 nt, Artificial Sequence
  Description of Artificial Sequence: Synthetic oligonucleotide
auugcuuaggucccacuca

SEQ ID NO: 1277587 - RNA, 19 nt, Artificial Sequence
  Description of Artificial Sequence: Synthetic oligonucleotide
gauugcuuaggucccacuc

SEQ ID NO: 1277588 - RNA, 19 nt, Artificial Sequence
  Description of Artificial Sequence: Synthetic oligonucleotide
auguugucucaaugugucc

SEQ ID NO: 1277589 - RNA, 19 nt, Artificial Sequence
  Description of Artificial Sequence: Synthetic oligonucleotide
ugucuaucaggucgaggag

SEQ ID NO: 1277590 - RNA, 19 nt, Artificial Sequence
  Description of Artificial Sequence: Synthetic oligonucleotide
agauuugucuaaauguugu

SEQ ID NO: 1277591 - RNA, 19 nt, Artificial Sequence
  Description of Artificial Sequence: Synthetic oligonucleotide
ucacgcuuaacagaagaga

SEQ ID NO: 1277592 - RNA, 19 nt, Artificial Sequence
  Description of Artificial Sequence: Synthetic oligonucleotide
gaguuuaggagacagcacu

SEQ ID NO: 1277593 - RNA, 19 nt, Artificial Sequence
  Description of Artificial Sequence: Synthetic oligonucleotide
uuuuggcuggagcucgugc

SEQ ID NO: 1277594 - RNA, 19 nt, Artificial Sequence
  Description of Artificial Sequence: Synthetic oligonucleotide
caggcuuccgcucaggcac

SEQ ID NO: 1277595 - RNA, 19 nt, Artificial Sequence
  Description of Artificial Sequence: Synthetic oligonucleotide
cucagcucuauguugugac

SEQ ID NO: 1277596 - RNA, 19 nt, Artificial Sequence
  Description of Artificial Sequence: Synthetic oligonucleotide
gcaaaguuaaugcagcuga

SEQ ID NO: 1277597 - RNA, 19 nt, Artificial Sequence
  Description of Artificial Sequence: Synthetic oligonucleotide
aauuacagucucaccagga

SEQ ID NO: 1277598 - RNA, 19 nt, Artificial Sequence
  Description of Artificial Sequence: Synthetic oligonucleotide
aucuuaagguaauuacagu

SEQ ID NO: 1277599 - RNA, 19 nt, Artificial Sequence
  Description of Artificial Sequence: Synthetic oligonucleotide
cugagcaaggaaugccucg

SEQ ID NO: 1277600 - RNA, 19 nt, Artificial Sequence
  Description of Artificial Sequence: Synthetic oligonucleotide
caaaguugacuucugagaa

SEQ ID NO: 1277601 - RNA, 19 nt, Artificial Sequence
  Description of Artificial Sequence: Synthetic oligonucleotide
auguucauuggugcugacc

SEQ ID NO: 1277602 - RNA, 19 nt, Artificial Sequence
  Description of Artificial Sequence: Synthetic oligonucleotide
agcuaacaggacuggcggc

SEQ ID NO: 1277603 - RNA, 19 nt, Artificial Sequence
  Description of Artificial Sequence: Synthetic oligonucleotide
gauuugucuaaauguuguc

SEQ ID NO: 1277604 - RNA, 19 nt, Artificial Sequence
  Description of Artificial Sequence: Synthetic oligonucleotide
agaugaacuaccguccuca

SEQ ID NO: 1277605 - RNA, 19 nt, Artificial Sequence
  Description of Artificial Sequence: Synthetic oligonucleotide
uccauaacuuccccugaga

SEQ ID NO: 1277606 - RNA, 19 nt, Artificial Sequence
  Description of Artificial Sequence: Synthetic oligonucleotide
cagauguccggacucuugg

SEQ ID NO: 1277607 - RNA, 19 nt, Artificial Sequence
  Description of Artificial Sequence: Synthetic oligonucleotide
aacuccuggaagcuccagu

SEQ ID NO: 1277608 - RNA, 19 nt, Artificial Sequence
  Description of Artificial Sequence: Synthetic oligonucleotide
cuuaagguaauuacagucu

SEQ ID NO: 1277609 - RNA, 19 nt, Artificial Sequence
  Description of Artificial Sequence: Synthetic oligonucleotide
aggacuuaacagauguccg

SEQ ID NO: 1277610 - RNA, 19 nt, Artificial Sequence
  Description of Artificial Sequence: Synthetic oligonucleotide
ggacucuugggcauaaugg

SEQ ID NO: 1277611 - RNA, 19 nt, Artificial Sequence
  Description of Artificial Sequence: Synthetic oligonucleotide
aacuaccguccucaacauc

SEQ ID NO: 1277612 - RNA, 19 nt, Artificial Sequence
  Description of Artificial Sequence: Synthetic oligonucleotide
uugcuuaggucccacucac

SEQ ID NO: 1277613 - RNA, 19 nt, Artificial Sequence
  Description of Artificial Sequence: Synthetic oligonucleotide
aggcaaaggauuuaauaua

SEQ ID NO: 1277614 - RNA, 19 nt, Artificial Sequence
  Description of Artificial Sequence: Synthetic oligonucleotide
ugucucaauguguccagcu

SEQ ID NO: 1277615 - RNA, 19 nt, Artificial Sequence
  Description of Artificial Sequence: Synthetic oligonucleotide
uuuucacgcuuaacagaag

SEQ ID NO: 1277616 - RNA, 19 nt, Artificial Sequence
  Description of Artificial Sequence: Synthetic oligonucleotide
uucauacuugccugaaguc

SEQ ID NO: 1277617 - RNA, 19 nt, Artificial Sequence
  Description of Artificial Sequence: Synthetic oligonucleotide
ugucuggagaugcugugaa

SEQ ID NO: 1277618 - RNA, 19 nt, Artificial Sequence
  Description of Artificial Sequence: Synthetic oligonucleotide
ugcgcaccugucuaucagg

SEQ ID NO: 1277619 - RNA, 19 nt, Artificial Sequence
  Description of Artificial Sequence: Synthetic oligonucleotide
ugaagucccgugaucugca

SEQ ID NO: 1277620 - RNA, 19 nt, Artificial Sequence
  Description of Artificial Sequence: Synthetic oligonucleotide
accaagcauuucuuagccg

SEQ ID NO: 1277621 - RNA, 19 nt, Artificial Sequence
  Description of Artificial Sequence: Synthetic oligonucleotide
caugagauguccgaucuuc

SEQ ID NO: 1277622 - RNA, 19 nt, Artificial Sequence
  Description of Artificial Sequence: Synthetic oligonucleotide
cugaacugucuggagaugc

SEQ ID NO: 1277623 - RNA, 19 nt, Artificial Sequence
  Description of Artificial Sequence: Synthetic oligonucleotide
uguugugaccgugugcggc

SEQ ID NO: 1277624 - RNA, 19 nt, Artificial Sequence
  Description of Artificial Sequence: Synthetic oligonucleotide
aaguuacuauucucuucca

SEQ ID NO: 1277625 - RNA, 19 nt, Artificial Sequence
  Description of Artificial Sequence: Synthetic oligonucleotide
uugaggaucuuaagguaau

SEQ ID NO: 1277626 - RNA, 19 nt, Artificial Sequence
  Description of Artificial Sequence: Synthetic oligonucleotide
uugucaauuuaggacacau

SEQ ID NO: 1277627 - RNA, 19 nt, Artificial Sequence
  Description of Artificial Sequence: Synthetic oligonucleotide
aggauuuaauauauuuugu

SEQ ID NO: 1277628 - RNA, 19 nt, Artificial Sequence
  Description of Artificial Sequence: Synthetic oligonucleotide
ugaaugaccuggacagcac

SEQ ID NO: 1277629 - RNA, 19 nt, Artificial Sequence
  Description of Artificial Sequence: Synthetic oligonucleotide
aguuuaggagacagcacuc

SEQ ID NO: 1277630 - RNA, 19 nt, Artificial Sequence
  Description of Artificial Sequence: Synthetic oligonucleotide
uugugccaugagauguccg

SEQ ID NO: 1277631 - RNA, 19 nt, Artificial Sequence
  Description of Artificial Sequence: Synthetic oligonucleotide
ugaacugucuggagaugcu

SEQ ID NO: 1277632 - RNA, 19 nt, Artificial Sequence
  Description of Artificial Sequence: Synthetic oligonucleotide
cagcucuauguugugaccg

SEQ ID NO: 1277633 - RNA, 19 nt, Artificial Sequence
  Description of Artificial Sequence: Synthetic oligonucleotide
cuauguugugaccgugugc

SEQ ID NO: 1277634 - RNA, 19 nt, Artificial Sequence
  Description of Artificial Sequence: Synthetic oligonucleotide
agauguccggacucuuggg

SEQ ID NO: 1277635 - RNA, 19 nt, Artificial Sequence
  Description of Artificial Sequence: Synthetic oligonucleotide
acacucccggucugaaggc

SEQ ID NO: 1277636 - RNA, 19 nt, Artificial Sequence
  Description of Artificial Sequence: Synthetic oligonucleotide
ggcauaauggaggucagcc

SEQ ID NO: 1277637 - RNA, 19 nt, Artificial Sequence
  Description of Artificial Sequence: Synthetic oligonucleotide
guuucauacuugccugaag

SEQ ID NO: 1277638 - RNA, 19 nt, Artificial Sequence
  Description of Artificial Sequence: Synthetic oligonucleotide
acaaaacaugccuggccug

SEQ ID NO: 1277639 - RNA, 19 nt, Artificial Sequence
  Description of Artificial Sequence: Synthetic oligonucleotide
agaugacaaaacaugccug

SEQ ID NO: 1277640 - RNA, 19 nt, Artificial Sequence
  Description of Artificial Sequence: Synthetic oligonucleotide
auaagcaagcugaacuuca

SEQ ID NO: 1277641 - RNA, 19 nt, Artificial Sequence
  Description of Artificial Sequence: Synthetic oligonucleotide
aguuacuauucucuuccaa

SEQ ID NO: 1277642 - RNA, 19 nt, Artificial Sequence
  Description of Artificial Sequence: Synthetic oligonucleotide
uugcgcaccugucuaucag

SEQ ID NO: 1277643 - RNA, 19 nt, Artificial Sequence
  Description of Artificial Sequence: Synthetic oligonucleotide
accgugugcggcucaacuc

SEQ ID NO: 1277644 - RNA, 19 nt, Artificial Sequence
  Description of Artificial Sequence: Synthetic oligonucleotide
ugucaauuuaggacacaua

SEQ ID NO: 1277645 - RNA, 19 nt, Artificial Sequence
  Description of Artificial Sequence: Synthetic oligonucleotide
aagccucaggaugagacau

SEQ ID NO: 1277646 - RNA, 19 nt, Artificial Sequence
  Description of Artificial Sequence: Synthetic oligonucleotide
ucagcaaggcggcucugca

SEQ ID NO: 1277647 - RNA, 19 nt, Artificial Sequence
  Description of Artificial Sequence: Synthetic oligonucleotide
aaaacaugccuggccugag

SEQ ID NO: 1277648 - RNA, 19 nt, Artificial Sequence
  Description of Artificial Sequence: Synthetic oligonucleotide
uuugugccaugagaugucc

SEQ ID NO: 1277649 - RNA, 19 nt, Artificial Sequence
  Description of Artificial Sequence: Synthetic oligonucleotide
cuaugacugauagaggaca

SEQ ID NO: 1277650 - RNA, 19 nt, Artificial Sequence
  Description of Artificial Sequence: Synthetic oligonucleotide
aaugccucguugccaugca

SEQ ID NO: 1277651 - RNA, 19 nt, Artificial Sequence
  Description of Artificial Sequence: Synthetic oligonucleotide
uucaagagacagguaauua

SEQ ID NO: 1277652 - RNA, 19 nt, Artificial Sequence
  Description of Artificial Sequence: Synthetic oligonucleotide
uuucaagagacagguaauu

SEQ ID NO: 1277653 - RNA, 19 nt, Artificial Sequence
  Description of Artificial Sequence: Synthetic oligonucleotide
gucucaccaggauauucag

SEQ ID NO: 1277654 - RNA, 19 nt, Artificial Sequence
  Description of Artificial Sequence: Synthetic oligonucleotide
ugagcaaggaaugccucgu

SEQ ID NO: 1277655 - RNA, 19 nt, Artificial Sequence
  Description of Artificial Sequence: Synthetic oligonucleotide
gaaugccucguugccaugc

SEQ ID NO: 1277656 - RNA, 19 nt, Artificial Sequence
  Description of Artificial Sequence: Synthetic oligonucleotide
ucagacuguccucgaggcc

SEQ ID NO: 1277657 - RNA, 19 nt, Artificial Sequence
  Description of Artificial Sequence: Synthetic oligonucleotide
caagccgggagcugcggcg

SEQ ID NO: 1277658 - RNA, 19 nt, Artificial Sequence
  Description of Artificial Sequence: Synthetic oligonucleotide
cugaagucccgugaucugc

SEQ ID NO: 1277659 - RNA, 19 nt, Artificial Sequence
  Description of Artificial Sequence: Synthetic oligonucleotide
ggucaucugacuguggccc

SEQ ID NO: 1277660 - RNA, 19 nt, Artificial Sequence
  Description of Artificial Sequence: Synthetic oligonucleotide
auguccggacucuugggca

SEQ ID NO: 1277661 - RNA, 19 nt, Artificial Sequence
  Description of Artificial Sequence: Synthetic oligonucleotide
cacauggcaggacucuggc

SEQ ID NO: 1277662 - RNA, 19 nt, Artificial Sequence
  Description of Artificial Sequence: Synthetic oligonucleotide
acacgcacauggcaggacu

SEQ ID NO: 1277663 - RNA, 19 nt, Artificial Sequence
  Description of Artificial Sequence: Synthetic oligonucleotide
ugggcauaauggaggucag

SEQ ID NO: 1277664 - RNA, 19 nt, Artificial Sequence
  Description of Artificial Sequence: Synthetic oligonucleotide
gcaacuggaaucucccacc

SEQ ID NO: 1277665 - RNA, 19 nt, Artificial Sequence
  Description of Artificial Sequence: Synthetic oligonucleotide
uccuugaacuguugaguuc

SEQ ID NO: 1277666 - RNA, 19 nt, Artificial Sequence
  Description of Artificial Sequence: Synthetic oligonucleotide
uacaugcccaggugcaacu

SEQ ID NO: 1277667 - RNA, 19 nt, Artificial Sequence
  Description of Artificial Sequence: Synthetic oligonucleotide
gagcuaugacugauagagg

SEQ ID NO: 1277668 - RNA, 19 nt, Artificial Sequence
  Description of Artificial Sequence: Synthetic oligonucleotide
ggaucuuaagguaauuaca

SEQ ID NO: 1277669 - RNA, 19 nt, Artificial Sequence
  Description of Artificial Sequence: Synthetic oligonucleotide
cugauagaggacacaucuc

SEQ ID NO: 1277670 - RNA, 19 nt, Artificial Sequence
  Description of Artificial Sequence: Synthetic oligonucleotide
gaacugucuggagaugcug

SEQ ID NO: 1277671 - RNA, 19 nt, Artificial Sequence
  Description of Artificial Sequence: Synthetic oligonucleotide
agauguucauuggugcuga

SEQ ID NO: 1277672 - RNA, 19 nt, Artificial Sequence
  Description of Artificial Sequence: Synthetic oligonucleotide
gcucagacuguccucgagg

SEQ ID NO: 1277673 - RNA, 19 nt, Artificial Sequence
  Description of Artificial Sequence: Synthetic oligonucleotide
guucauuggugcugaccag

SEQ ID NO: 1277674 - RNA, 19 nt, Artificial Sequence
  Description of Artificial Sequence: Synthetic oligonucleotide
uguuucauacuugccugaa

SEQ ID NO: 1277675 - RNA, 19 nt, Artificial Sequence
  Description of Artificial Sequence: Synthetic oligonucleotide
agcacucuagggucauuug

SEQ ID NO: 1277676 - RNA, 19 nt, Artificial Sequence
  Description of Artificial Sequence: Synthetic oligonucleotide
cauccuucgcuuccuguac

SEQ ID NO: 1277677 - RNA, 19 nt, Artificial Sequence
  Description of Artificial Sequence: Synthetic oligonucleotide
uuugucaauuuaggacaca

SEQ ID NO: 1277678 - RNA, 19 nt, Artificial Sequence
  Description of Artificial Sequence: Synthetic oligonucleotide
gaaucucccaccaggcauc

SEQ ID NO: 1277679 - RNA, 19 nt, Artificial Sequence
  Description of Artificial Sequence: Synthetic oligonucleotide
uggagcuaugacugauaga

SEQ ID NO: 1277680 - RNA, 19 nt, Artificial Sequence
  Description of Artificial Sequence: Synthetic oligonucleotide
agcucuauguugugaccgu

SEQ ID NO: 1277681 - RNA, 19 nt, Artificial Sequence
  Description of Artificial Sequence: Synthetic oligonucleotide
ugccaugagauguccgauc

SEQ ID NO: 1277682 - RNA, 19 nt, Artificial Sequence
  Description of Artificial Sequence: Synthetic oligonucleotide
ucgcuuccuguacuuuuca

SEQ ID NO: 1277683 - RNA, 19 nt, Artificial Sequence
  Description of Artificial Sequence: Synthetic oligonucleotide
cuugccugaagucccguga

SEQ ID NO: 1277684 - RNA, 19 nt, Artificial Sequence
  Description of Artificial Sequence: Synthetic oligonucleotide
aggagugccuccaggagug

SEQ ID NO: 1277685 - RNA, 19 nt, Artificial Sequence
  Description of Artificial Sequence: Synthetic oligonucleotide
aagucccgugaucugcaaa

SEQ ID NO: 1277686 - RNA, 19 nt, Artificial Sequence
  Description of Artificial Sequence: Synthetic oligonucleotide
aggauugcuuaggucccac

SEQ ID NO: 1277687 - RNA, 19 nt, Artificial Sequence
  Description of Artificial Sequence: Synthetic oligonucleotide
auaauggaggucagccuca

SEQ ID NO: 1277688 - RNA, 19 nt, Artificial Sequence
  Description of Artificial Sequence: Synthetic oligonucleotide
ugcucacuguagcagcaua

SEQ ID NO: 1277689 - RNA, 19 nt, Artificial Sequence
  Description of Artificial Sequence: Synthetic oligonucleotide
cuuaacagauguccggacu

SEQ ID NO: 1277690 - RNA, 19 nt, Artificial Sequence
  Description of Artificial Sequence: Synthetic oligonucleotide
cacgcuuaacagaagagau

SEQ ID NO: 1277691 - RNA, 19 nt, Artificial Sequence
  Description of Artificial Sequence: Synthetic oligonucleotide
acacauuuugaggaucuua

SEQ ID NO: 1277692 - RNA, 19 nt, Artificial Sequence
  Description of Artificial Sequence: Synthetic oligonucleotide
caacucuggagcuaugacu

SEQ ID NO: 1277693 - RNA, 19 nt, Artificial Sequence
  Description of Artificial Sequence: Synthetic oligonucleotide
ugcuuaggucccacucaca

SEQ ID NO: 1277694 - RNA, 19 nt, Artificial Sequence
  Description of Artificial Sequence: Synthetic oligonucleotide
auacuugccugaagucccg

SEQ ID NO: 1277695 - RNA, 19 nt, Artificial Sequence
  Description of Artificial Sequence: Synthetic oligonucleotide
agggucauuugugccauga

SEQ ID NO: 1277696 - RNA, 19 nt, Artificial Sequence
  Description of Artificial Sequence: Synthetic oligonucleotide
caucucaguaggagcuaac

SEQ ID NO: 1277697 - RNA, 19 nt, Artificial Sequence
  Description of Artificial Sequence: Synthetic oligonucleotide
gauggacaaaggacuuaac

SEQ ID NO: 1277698 - RNA, 19 nt, Artificial Sequence
  Description of Artificial Sequence: Synthetic oligonucleotide
uguccggacucuugggcau

SEQ ID NO: 1277699 - RNA, 19 nt, Artificial Sequence
  Description of Artificial Sequence: Synthetic oligonucleotide
ucccgugaucugcaaaguu

SEQ ID NO: 1277700 - RNA, 19 nt, Artificial Sequence
  Description of Artificial Sequence: Synthetic oligonucleotide
gacacauaagcaagcugaa

SEQ ID NO: 1277701 - RNA, 19 nt, Artificial Sequence
  Description of Artificial Sequence: Synthetic oligonucleotide
guauggagugaagcggcug

SEQ ID NO: 1277702 - RNA, 19 nt, Artificial Sequence
  Description of Artificial Sequence: Synthetic oligonucleotide
gccucaggaugagacaugg

SEQ ID NO: 1277703 - RNA, 19 nt, Artificial Sequence
  Description of Artificial Sequence: Synthetic oligonucleotide
cuguuucauacuugccuga

SEQ ID NO: 1277704 - RNA, 19 nt, Artificial Sequence
  Description of Artificial Sequence: Synthetic oligonucleotide
gaacuguggcucucuugca

SEQ ID NO: 1277705 - RNA, 19 nt, Artificial Sequence
  Description of Artificial Sequence: Synthetic oligonucleotide
gacugauagaggacacauc

SEQ ID NO: 1277706 - RNA, 19 nt, Artificial Sequence
  Description of Artificial Sequence: Synthetic oligonucleotide
ucuaggcagcucagacacu

SEQ ID NO: 1277707 - RNA, 19 nt, Artificial Sequence
  Description of Artificial Sequence: Synthetic oligonucleotide
gaugaacuaccguccucaa

SEQ ID NO: 1277708 - RNA, 19 nt, Artificial Sequence
  Description of Artificial Sequence: Synthetic oligonucleotide
gauguucauuggugcugac

SEQ ID NO: 1277709 - RNA, 19 nt, Artificial Sequence
  Description of Artificial Sequence: Synthetic oligonucleotide
aggaugagacauggucauc

SEQ ID NO: 1277710 - RNA, 19 nt, Artificial Sequence
  Description of Artificial Sequence: Synthetic oligonucleotide
cucagcaaggcggcucugc

SEQ ID NO: 1277711 - RNA, 19 nt, Artificial Sequence
  Description of Artificial Sequence: Synthetic oligonucleotide
ggauauucagauagauaca

SEQ ID NO: 1277712 - RNA, 19 nt, Artificial Sequence
  Description of Artificial Sequence: Synthetic oligonucleotide
gaagagauuuuaaguuacu

SEQ ID NO: 1277713 - RNA, 19 nt, Artificial Sequence
  Description of Artificial Sequence: Synthetic oligonucleotide
cacgcacauggcaggacuc

SEQ ID NO: 1277714 - RNA, 19 nt, Artificial Sequence
  Description of Artificial Sequence: Synthetic oligonucleotide
ccgugugcggcucaacucc

SEQ ID NO: 1277715 - RNA, 19 nt, Artificial Sequence
  Description of Artificial Sequence: Synthetic oligonucleotide
cagaccaucaacacauuuu

SEQ ID NO: 1277716 - RNA, 19 nt, Artificial Sequence
  Description of Artificial Sequence: Synthetic oligonucleotide
augagauguccgaucuuca

SEQ ID NO: 1277717 - RNA, 19 nt, Artificial Sequence
  Description of Artificial Sequence: Synthetic oligonucleotide
uggcccuccaagccauccu

SEQ ID NO: 1277718 - RNA, 19 nt, Artificial Sequence
  Description of Artificial Sequence: Synthetic oligonucleotide
caccaagccgggagcugcg

SEQ ID NO: 1277719 - RNA, 19 nt, Artificial Sequence
  Description of Artificial Sequence: Synthetic oligonucleotide
gcuggauggacaaaggacu

SEQ ID NO: 1277720 - RNA, 19 nt, Artificial Sequence
  Description of Artificial Sequence: Synthetic oligonucleotide
accaggauauucagauaga

SEQ ID NO: 1277721 - RNA, 19 nt, Artificial Sequence
  Description of Artificial Sequence: Synthetic oligonucleotide
gcuaugacugauagaggac

SEQ ID NO: 1277722 - RNA, 19 nt, Artificial Sequence
  Description of Artificial Sequence: Synthetic oligonucleotide
ccggucugaaggcaacugg

SEQ ID NO: 1277723 - RNA, 19 nt, Artificial Sequence
  Description of Artificial Sequence: Synthetic oligonucleotide
gacccaucaggccucucua

SEQ ID NO: 1277724 - RNA, 19 nt, Artificial Sequence
  Description of Artificial Sequence: Synthetic oligonucleotide
cuaucaggucgaggagugc

SEQ ID NO: 1277725 - RNA, 19 nt, Artificial Sequence
  Description of Artificial Sequence: Synthetic oligonucleotide
cucagacacucccggucug

SEQ ID NO: 1277726 - RNA, 19 nt, Artificial Sequence
  Description of Artificial Sequence: Synthetic oligonucleotide
auggagugaagcggcugug

SEQ ID NO: 1277727 - RNA, 19 nt, Artificial Sequence
  Description of Artificial Sequence: Synthetic oligonucleotide
guugugaccgugugcggcu

SEQ ID NO: 1277728 - RNA, 19 nt, Artificial Sequence
  Description of Artificial Sequence: Synthetic oligonucleotide
gaccgugugcggcucaacu

SEQ ID NO: 1277729 - RNA, 19 nt, Artificial Sequence
  Description of Artificial Sequence: Synthetic oligonucleotide
caggagugccacuuccaga

SEQ ID NO: 1277730 - RNA, 19 nt, Artificial Sequence
  Description of Artificial Sequence: Synthetic oligonucleotide
aucaggucgaggagugccu

SEQ ID NO: 1277731 - RNA, 19 nt, Artificial Sequence
  Description of Artificial Sequence: Synthetic oligonucleotide
caccugucuaucaggucga

SEQ ID NO: 1277732 - RNA, 19 nt, Artificial Sequence
  Description of Artificial Sequence: Synthetic oligonucleotide
cucccggucugaaggcaac

SEQ ID NO: 1277733 - RNA, 19 nt, Artificial Sequence
  Description of Artificial Sequence: Synthetic oligonucleotide
ggagauguucauuggugcu

SEQ ID NO: 1277734 - RNA, 19 nt, Artificial Sequence
  Description of Artificial Sequence: Synthetic oligonucleotide
augcccaggugcaacucug

SEQ ID NO: 1277735 - RNA, 19 nt, Artificial Sequence
  Description of Artificial Sequence: Synthetic oligonucleotide
aagccgggagcugcggcgu

SEQ ID NO: 1277736 - RNA, 19 nt, Artificial Sequence
  Description of Artificial Sequence: Synthetic oligonucleotide
cuaccguccucaacaucca

SEQ ID NO: 1277737 - RNA, 19 nt, Artificial Sequence
  Description of Artificial Sequence: Synthetic oligonucleotide
cucuauguugugaccgugu

SEQ ID NO: 1277738 - RNA, 19 nt, Artificial Sequence
  Description of Artificial Sequence: Synthetic oligonucleotide
caggaugagacauggucau

SEQ ID NO: 1277739 - RNA, 19 nt, Artificial Sequence
  Description of Artificial Sequence: Synthetic oligonucleotide
ggcacuccgugcugugggg

SEQ ID NO: 1277740 - RNA, 19 nt, Artificial Sequence
  Description of Artificial Sequence: Synthetic oligonucleotide
agcggcugugcugcacacg

SEQ ID NO: 1277741 - RNA, 19 nt, Artificial Sequence
  Description of Artificial Sequence: Synthetic oligonucleotide
ccacucacacucagcaaug

SEQ ID NO: 1277742 - RNA, 19 nt, Artificial Sequence
  Description of Artificial Sequence: Synthetic oligonucleotide
gaacuaccguccucaacau

SEQ ID NO: 1277743 - RNA, 19 nt, Artificial Sequence
  Description of Artificial Sequence: Synthetic oligonucleotide
gauguccgaucuucagccu

SEQ ID NO: 1277744 - RNA, 19 nt, Artificial Sequence
  Description of Artificial Sequence: Synthetic oligonucleotide
cauccugucugcucagacu

SEQ ID NO: 1277745 - RNA, 19 nt, Artificial Sequence
  Description of Artificial Sequence: Synthetic oligonucleotide
ucguugccaugcagggauc

SEQ ID NO: 1277746 - RNA, 19 nt, Artificial Sequence
  Description of Artificial Sequence: Synthetic oligonucleotide
cuguggugaaugaccugga

SEQ ID NO: 1277747 - RNA, 19 nt, Artificial Sequence
  Description of Artificial Sequence: Synthetic oligonucleotide
agccacuugcgcaccuguc

SEQ ID NO: 1277748 - RNA, 19 nt, Artificial Sequence
  Description of Artificial Sequence: Synthetic oligonucleotide
ggacuggcggccaccaagc

SEQ ID NO: 1277749 - RNA, 19 nt, Artificial Sequence
  Description of Artificial Sequence: Synthetic oligonucleotide
caaagacccagggucaacu

SEQ ID NO: 1277750 - RNA, 19 nt, Artificial Sequence
  Description of Artificial Sequence: Synthetic oligonucleotide
uagggucauuugugccaug

SEQ ID NO: 1277751 - RNA, 19 nt, Artificial Sequence
  Description of Artificial Sequence: Synthetic oligonucleotide
gaggauugcuuagguccca

SEQ ID NO: 1277752 - RNA, 19 nt, Artificial Sequence
  Description of Artificial Sequence: Synthetic oligonucleotide
cugcaaaguuaaugcagcu

SEQ ID NO: 1277753 - RNA, 19 nt, Artificial Sequence
  Description of Artificial Sequence: Synthetic oligonucleotide
uccgaucuucagccuccaa

SEQ ID NO: 1277754 - RNA, 19 nt, Artificial Sequence
  Description of Artificial Sequence: Synthetic oligonucleotide
ccaugcagggauccacagc

SEQ ID NO: 1277755 - RNA, 19 nt, Artificial Sequence
  Description of Artificial Sequence: Synthetic oligonucleotide
ccugagcaaggaaugccuc

SEQ ID NO: 1277756 - RNA, 19 nt, Artificial Sequence
  Description of Artificial Sequence: Synthetic oligonucleotide
cuaacaggacuggcggcca

SEQ ID NO: 1277757 - RNA, 19 nt, Artificial Sequence
  Description of Artificial Sequence: Synthetic oligonucleotide
cugucuggagaugcuguga

SEQ ID NO: 1277758 - RNA, 19 nt, Artificial Sequence
  Description of Artificial Sequence: Synthetic oligonucleotide
caggaacaggcaaaggauu

SEQ ID NO: 1277759 - RNA, 19 nt, Artificial Sequence
  Description of Artificial Sequence: Synthetic oligonucleotide
ccgugaucugcaaaguuaa

SEQ ID NO: 1277760 - RNA, 19 nt, Artificial Sequence
  Description of Artificial Sequence: Synthetic oligonucleotide
cagcauccauaaccaagca

SEQ ID NO: 1277761 - RNA, 19 nt, Artificial Sequence
  Description of Artificial Sequence: Synthetic oligonucleotide
ucccggucugaaggcaacu

SEQ ID NO: 1277762 - RNA, 19 nt, Artificial Sequence
  Description of Artificial Sequence: Synthetic oligonucleotide
guugccaugcagggaucca

SEQ ID NO: 1277763 - RNA, 19 nt, Artificial Sequence
  Description of Artificial Sequence: Synthetic oligonucleotide
accugucuaucaggucgag

SEQ ID NO: 1277764 - RNA, 19 nt, Artificial Sequence
  Description of Artificial Sequence: Synthetic oligonucleotide
gcauaauggaggucagccu

SEQ ID NO: 1277765 - RNA, 19 nt, Artificial Sequence
  Description of Artificial Sequence: Synthetic oligonucleotide
agggaacuguggcucucuu

SEQ ID NO: 1277766 - RNA, 19 nt, Artificial Sequence
  Description of Artificial Sequence: Synthetic oligonucleotide
cuucgcuuccuguacuuuu

SEQ ID NO: 1277767 - RNA, 19 nt, Artificial Sequence
  Description of Artificial Sequence: Synthetic oligonucleotide
gcucuauguugugaccgug

SEQ ID NO: 1277768 - RNA, 19 nt, Artificial Sequence
  Description of Artificial Sequence: Synthetic oligonucleotide
uccggacucuugggcauaa

SEQ ID NO: 1277769 - RNA, 19 nt, Artificial Sequence
  Description of Artificial Sequence: Synthetic oligonucleotide
cacucacacucagcaauga

SEQ ID NO: 1277770 - RNA, 19 nt, Artificial Sequence
  Description of Artificial Sequence: Synthetic oligonucleotide
cuuccgcucaggcacugcu

SEQ ID NO: 1277771 - RNA, 19 nt, Artificial Sequence
  Description of Artificial Sequence: Synthetic oligonucleotide
cuguggggugaguucccca

SEQ ID NO: 1277772 - RNA, 19 nt, Artificial Sequence
  Description of Artificial Sequence: Synthetic oligonucleotide
cccgaggacccaucaggcc

SEQ ID NO: 1277773 - RNA, 19 nt, Artificial Sequence
  Description of Artificial Sequence: Synthetic oligonucleotide
uugugaccgugugcggcuc

SEQ ID NO: 1277774 - RNA, 19 nt, Artificial Sequence
  Description of Artificial Sequence: Synthetic oligonucleotide
ggaaugccucguugccaug

SEQ ID NO: 1277775 - RNA, 19 nt, Artificial Sequence
  Description of Artificial Sequence: Synthetic oligonucleotide
gucaucugacuguggcccu

SEQ ID NO: 1277776 - RNA, 19 nt, Artificial Sequence
  Description of Artificial Sequence: Synthetic oligonucleotide
ugaccgugugcggcucaac

SEQ ID NO: 1277777 - RNA, 19 nt, Artificial Sequence
  Description of Artificial Sequence: Synthetic oligonucleotide
cgugcuguggggugaguuc

SEQ ID NO: 1277778 - RNA, 19 nt, Artificial Sequence
  Description of Artificial Sequence: Synthetic oligonucleotide
cuccgugcuguggggugag

SEQ ID NO: 1277779 - RNA, 19 nt, Artificial Sequence
  Description of Artificial Sequence: Synthetic oligonucleotide
ccaagccgggagcugcggc

SEQ ID NO: 1277780 - RNA, 19 nt, Artificial Sequence
  Description of Artificial Sequence: Synthetic oligonucleotide
cuagggucauuugugccau

SEQ ID NO: 1277781 - RNA, 19 nt, Artificial Sequence
  Description of Artificial Sequence: Synthetic oligonucleotide
gugugcggcucaacuccug

SEQ ID NO: 1277782 - RNA, 19 nt, Artificial Sequence
  Description of Artificial Sequence: Synthetic oligonucleotide
ucgaggcccgaggacccau

SEQ ID NO: 1277783 - RNA, 19 nt, Artificial Sequence
  Description of Artificial Sequence: Synthetic oligonucleotide
gcaaagacccagggucaac

SEQ ID NO: 1277784 - RNA, 19 nt, Artificial Sequence
  Description of Artificial Sequence: Synthetic oligonucleotide
agccgggagcugcggcgug

SEQ ID NO: 1277785 - RNA, 19 nt, Artificial Sequence
  Description of Artificial Sequence: Synthetic oligonucleotide
gcucugcagagacuuauuu

SEQ ID NO: 1277786 - RNA, 19 nt, Artificial Sequence
  Description of Artificial Sequence: Synthetic oligonucleotide
guggggugaguuccccaua

SEQ ID NO: 1277787 - RNA, 19 nt, Artificial Sequence
  Description of Artificial Sequence: Synthetic oligonucleotide
cacucccggucugaaggca

SEQ ID NO: 1277788 - RNA, 19 nt, Artificial Sequence
  Description of Artificial Sequence: Synthetic oligonucleotide
ggggugaguuccccauaga

SEQ ID NO: 1277789 - RNA, 19 nt, Artificial Sequence
  Description of Artificial Sequence: Synthetic oligonucleotide
cguugccaugcagggaucc

SEQ ID NO: 1277790 - RNA, 19 nt, Artificial Sequence
  Description of Artificial Sequence: Synthetic oligonucleotide
ggauugcuuaggucccacu

SEQ ID NO: 1277791 - RNA, 19 nt, Artificial Sequence
  Description of Artificial Sequence: Synthetic oligonucleotide
gacccagggucaacuuugu

SEQ ID NO: 1277792 - RNA, 19 nt, Artificial Sequence
  Description of Artificial Sequence: Synthetic oligonucleotide
caggacucuggcacuccgu

SEQ ID NO: 1277793 - RNA, 19 nt, Artificial Sequence
  Description of Artificial Sequence: Synthetic oligonucleotide
cccggucugaaggcaacug

SEQ ID NO: 1277794 - RNA, 19 nt, Artificial Sequence
  Description of Artificial Sequence: Synthetic oligonucleotide
aggcuuccgcucaggcacu

SEQ ID NO: 1277795 - RNA, 19 nt, Artificial Sequence
  Description of Artificial Sequence: Synthetic oligonucleotide
cgggaggauugcuuagguc

SEQ ID NO: 1277796 - RNA, 19 nt, Artificial Sequence
  Description of Artificial Sequence: Synthetic oligonucleotide
ggcgugggagcagggcagc

SEQ ID NO: 1277797 - RNA, 19 nt, Artificial Sequence
  Description of Artificial Sequence: Synthetic oligonucleotide
cugcucuaccucagcucua

SEQ ID NO: 1277798 - RNA, 19 nt, Artificial Sequence
  Description of Artificial Sequence: Synthetic oligonucleotide
gugccaugagauguccgau

SEQ ID NO: 1277799 - RNA, 19 nt, Artificial Sequence
  Description of Artificial Sequence: Synthetic oligonucleotide
cagcacucuagggucauuu

SEQ ID NO: 1277800 - RNA, 19 nt, Artificial Sequence
  Description of Artificial Sequence: Synthetic oligonucleotide
gucccgugaucugcaaagu

SEQ ID NO: 1277801 - RNA, 19 nt, Artificial Sequence
  Description of Artificial Sequence: Synthetic oligonucleotide
uccgugcuguggggugagu

SEQ ID NO: 1277802 - RNA, 19 nt, Artificial Sequence
  Description of Artificial Sequence: Synthetic oligonucleotide
gugaccgugugcggcucaa

SEQ ID NO: 1277803 - RNA, 19 nt, Artificial Sequence
  Description of Artificial Sequence: Synthetic oligonucleotide
cacuugcgcaccugucuau

SEQ ID NO: 1277804 - RNA, 19 nt, Artificial Sequence
  Description of Artificial Sequence: Synthetic oligonucleotide
gccgggagcugcggcgugg

SEQ ID NO: 1277805 - RNA, 19 nt, Artificial Sequence
  Description of Artificial Sequence: Synthetic oligonucleotide
ccacuugcgcaccugucua

SEQ ID NO: 1277806 - RNA, 19 nt, Artificial Sequence
  Description of Artificial Sequence: Synthetic oligonucleotide
aucucccaccaggcauccu

SEQ ID NO: 1277807 - RNA, 19 nt, Artificial Sequence
  Description of Artificial Sequence: Synthetic oligonucleotide
gugcucccgggaggauugc

SEQ ID NO: 1277808 - RNA, 19 nt, Artificial Sequence
  Description of Artificial Sequence: Synthetic oligonucleotide
ggcuuccgcucaggcacug

SEQ ID NO: 1277809 - RNA, 19 nt, Artificial Sequence
  Description of Artificial Sequence: Synthetic oligonucleotide
gacuguccucgaggcccga

SEQ ID NO: 1277810 - RNA, 19 nt, Artificial Sequence
  Description of Artificial Sequence: Synthetic oligonucleotide
gcgcaccugucuaucaggu

SEQ ID NO: 1277811 - RNA, 19 nt, Artificial Sequence
  Description of Artificial Sequence: Synthetic oligonucleotide
ccaaagccucaggaugaga

SEQ ID NO: 1277812 - RNA, 19 nt, Artificial Sequence
  Description of Artificial Sequence: Synthetic oligonucleotide
ggccaccaagccgggagcu

SEQ ID NO: 1277813 - RNA, 19 nt, Artificial Sequence
  Description of Artificial Sequence: Synthetic oligonucleotide
gcacuccgugcuguggggu

SEQ ID NO: 1277814 - RNA, 19 nt, Artificial Sequence
  Description of Artificial Sequence: Synthetic oligonucleotide
ccucaggaugagacauggu

SEQ ID NO: 1277815 - RNA, 19 nt, Artificial Sequence
  Description of Artificial Sequence: Synthetic oligonucleotide
ccucuggaggugccuuucu

SEQ ID NO: 1277816 - RNA, 19 nt, Artificial Sequence
  Description of Artificial Sequence: Synthetic oligonucleotide
gcucccgggaggauugcuu

SEQ ID NO: 1277817 - RNA, 19 nt, Artificial Sequence
  Description of Artificial Sequence: Synthetic oligonucleotide
cgugugcggcucaacuccu

SEQ ID NO: 1277818 - RNA, 19 nt, Artificial Sequence
  Description of Artificial Sequence: Synthetic oligonucleotide
cucgugcucccgggaggau

SEQ ID NO: 1277819 - RNA, 19 nt, Artificial Sequence
  Description of Artificial Sequence: Synthetic oligonucleotide
ccgugcuguggggugaguu

SEQ ID NO: 1277820 - RNA, 19 nt, Artificial Sequence
  Description of Artificial Sequence: Synthetic oligonucleotide
ccggacucuugggcauaau

SEQ ID NO: 1277821 - RNA, 19 nt, Artificial Sequence
  Description of Artificial Sequence: Synthetic oligonucleotide
aaugacaaccauuugaccc

SEQ ID NO: 1277822 - RNA, 19 nt, Artificial Sequence
  Description of Artificial Sequence: Synthetic oligonucleotide
aacauaauuauauuuucgg

SEQ ID NO: 1277823 - RNA, 19 nt, Artificial Sequence
  Description of Artificial Sequence: Synthetic oligonucleotide
aaacacuaugcacagaaac

SEQ ID NO: 1277824 - RNA, 19 nt, Artificial Sequence
  Description of Artificial Sequence: Synthetic oligonucleotide
uuuauaagaucacagcuag

SEQ ID NO: 1277825 - RNA, 19 nt, Artificial Sequence
  Description of Artificial Sequence: Synthetic oligonucleotide
aauuuaaaauuaaacugcc

SEQ ID NO: 1277826 - RNA, 19 nt, Artificial Sequence
  Description of Artificial Sequence: Synthetic oligonucleotide
aacuugaugguccacaauc

SEQ ID NO: 1277827 - RNA, 19 nt, Artificial Sequence
  Description of Artificial Sequence: Synthetic oligonucleotide
aguaauguagcucugucac

SEQ ID NO: 1277828 - RNA, 19 nt, Artificial Sequence
  Description of Artificial Sequence: Synthetic oligonucleotide
augcaugccaauuagaaac

SEQ ID NO: 1277829 - RNA, 19 nt, Artificial Sequence
  Description of Artificial Sequence: Synthetic oligonucleotide
aagguuaaacacuaugcac

SEQ ID NO: 1277830 - RNA, 19 nt, Artificial Sequence
  Description of Artificial Sequence: Synthetic oligonucleotide
uauauuuucggauaacuug

SEQ ID NO: 1277831 - RNA, 19 nt, Artificial Sequence
  Description of Artificial Sequence: Synthetic oligonucleotide
auuacaucgcaauaguugg

SEQ ID NO: 1277832 - RNA, 19 nt, Artificial Sequence
  Description of Artificial Sequence: Synthetic oligonucleotide
aaauuaaacugccaaguug

SEQ ID NO: 1277833 - RNA, 19 nt, Artificial Sequence
  Description of Artificial Sequence: Synthetic oligonucleotide
uuaauuuaggaaaagggaa

SEQ ID NO: 1277834 - RNA, 19 nt, Artificial Sequence
  Description of Artificial Sequence: Synthetic oligonucleotide
caauaguugguauugauag

SEQ ID NO: 1277835 - RNA, 19 nt, Artificial Sequence
  Description of Artificial Sequence: Synthetic oligonucleotide
aauuacucaguaauguagc

SEQ ID NO: 1277836 - RNA, 19 nt, Artificial Sequence
  Description of Artificial Sequence: Synthetic oligonucleotide
acaagucuacauuacaucg

SEQ ID NO: 1277837 - RNA, 19 nt, Artificial Sequence
  Description of Artificial Sequence: Synthetic oligonucleotide
ugaaucacgauccugcuug

SEQ ID NO: 1277838 - RNA, 19 nt, Artificial Sequence
  Description of Artificial Sequence: Synthetic oligonucleotide
auaguaaacguccaaucac

SEQ ID NO: 1277839 - RNA, 19 nt, Artificial Sequence
  Description of Artificial Sequence: Synthetic oligonucleotide
aucuuaaauaccuauaagu

SEQ ID NO: 1277840 - RNA, 19 nt, Artificial Sequence
  Description of Artificial Sequence: Synthetic oligonucleotide
caauuagaaaccaacagac

SEQ ID NO: 1277841 - RNA, 19 nt, Artificial Sequence
  Description of Artificial Sequence: Synthetic oligonucleotide
aagcaaugaaucacgaucc

SEQ ID NO: 1277842 - RNA, 19 nt, Artificial Sequence
  Description of Artificial Sequence: Synthetic oligonucleotide
aaaugacaaccauuugacc

SEQ ID NO: 1277843 - RNA, 19 nt, Artificial Sequence
  Description of Artificial Sequence: Synthetic oligonucleotide
aauaccuauaaguacugca

SEQ ID NO: 1277844 - RNA, 19 nt, Artificial Sequence
  Description of Artificial Sequence: Synthetic oligonucleotide
uguaguuccaacaucuuga

SEQ ID NO: 1277845 - RNA, 19 nt, Artificial Sequence
  Description of Artificial Sequence: Synthetic oligonucleotide
uacuuuuauaagaucacag

SEQ ID NO: 1277846 - RNA, 19 nt, Artificial Sequence
  Description of Artificial Sequence: Synthetic oligonucleotide
uuuucggauaacuugacga

SEQ ID NO: 1277847 - RNA, 19 nt, Artificial Sequence
  Description of Artificial Sequence: Synthetic oligonucleotide
aaauuacucaguaauguag

SEQ ID NO: 1277848 - RNA, 19 nt, Artificial Sequence
  Description of Artificial Sequence: Synthetic oligonucleotide
aauguacuuuuauaagauc

SEQ ID NO: 1277849 - RNA, 19 nt, Artificial Sequence
  Description of Artificial Sequence: Synthetic oligonucleotide
uugccuaucauuuaaggga

SEQ ID NO: 1277850 - RNA, 19 nt, Artificial Sequence
  Description of Artificial Sequence: Synthetic oligonucleotide
augacaaccauuugacccc

SEQ ID NO: 1277851 - RNA, 19 nt, Artificial Sequence
  Description of Artificial Sequence: Synthetic oligonucleotide
uauaagaucacagcuagga

SEQ ID NO: 1277852 - RNA, 19 nt, Artificial Sequence
  Description of Artificial Sequence: Synthetic oligonucleotide
guuguuaguagcucuauag

SEQ ID NO: 1277853 - RNA, 19 nt, Artificial Sequence
  Description of Artificial Sequence: Synthetic oligonucleotide
uaagaaguguauuaaauua

SEQ ID NO: 1277854 - RNA, 19 nt, Artificial Sequence
  Description of Artificial Sequence: Synthetic oligonucleotide
auugccuaucauuuaaggg

SEQ ID NO: 1277855 - RNA, 19 nt, Artificial Sequence
  Description of Artificial Sequence: Synthetic oligonucleotide
aauuagaaaccaacagacc

SEQ ID NO: 1277856 - RNA, 19 nt, Artificial Sequence
  Description of Artificial Sequence: Synthetic oligonucleotide
aaaauagaggauuggaauu

SEQ ID NO: 1277857 - RNA, 19 nt, Artificial Sequence
  Description of Artificial Sequence: Synthetic oligonucleotide
uuaucuuuaacaagucuac

SEQ ID NO: 1277858 - RNA, 19 nt, Artificial Sequence
  Description of Artificial Sequence: Synthetic oligonucleotide
ugcuaguuaauuuaggaaa

SEQ ID NO: 1277859 - RNA, 19 nt, Artificial Sequence
  Description of Artificial Sequence: Synthetic oligonucleotide
aagaucacagcuaggaagg

SEQ ID NO: 1277860 - RNA, 19 nt, Artificial Sequence
  Description of Artificial Sequence: Synthetic oligonucleotide
cuguaauccaccuuugagg

SEQ ID NO: 1277861 - RNA, 19 nt, Artificial Sequence
  Description of Artificial Sequence: Synthetic oligonucleotide
gaugccaagcaucaaaaug

SEQ ID NO: 1277862 - RNA, 19 nt, Artificial Sequence
  Description of Artificial Sequence: Synthetic oligonucleotide
ugauagucagcauugcucc

SEQ ID NO: 1277863 - RNA, 19 nt, Artificial Sequence
  Description of Artificial Sequence: Synthetic oligonucleotide
accacuaugaaaugacaac

SEQ ID NO: 1277864 - RNA, 19 nt, Artificial Sequence
  Description of Artificial Sequence: Synthetic oligonucleotide
aaaaggaggggagauauug

SEQ ID NO: 1277865 - RNA, 19 nt, Artificial Sequence
  Description of Artificial Sequence: Synthetic oligonucleotide
cauuacaucgcaauaguug

SEQ ID NO: 1277866 - RNA, 19 nt, Artificial Sequence
  Description of Artificial Sequence: Synthetic oligonucleotide
uguaauccaccuuugaggu

SEQ ID NO: 1277867 - RNA, 19 nt, Artificial Sequence
  Description of Artificial Sequence: Synthetic oligonucleotide
uggaauuacucucuaaagu

SEQ ID NO: 1277868 - RNA, 19 nt, Artificial Sequence
  Description of Artificial Sequence: Synthetic oligonucleotide
uauugccuaucauuuaagg

SEQ ID NO: 1277869 - RNA, 19 nt, Artificial Sequence
  Description of Artificial Sequence: Synthetic oligonucleotide
agauaguaaacguccaauc

SEQ ID NO: 1277870 - RNA, 19 nt, Artificial Sequence
  Description of Artificial Sequence: Synthetic oligonucleotide
uuuuauaagaucacagcua

SEQ ID NO: 1277871 - RNA, 19 nt, Artificial Sequence
  Description of Artificial Sequence: Synthetic oligonucleotide
uaaagcuagucucaaaguc

SEQ ID NO: 1277872 - RNA, 19 nt, Artificial Sequence
  Description of Artificial Sequence: Synthetic oligonucleotide
uacucaguaauguagcucu

SEQ ID NO: 1277873 - RNA, 19 nt, Artificial Sequence
  Description of Artificial Sequence: Synthetic oligonucleotide
aauuauauuuucggauaac

SEQ ID NO: 1277874 - RNA, 19 nt, Artificial Sequence
  Description of Artificial Sequence: Synthetic oligonucleotide
gaccccuucacaaagaacc

SEQ ID NO: 1277875 - RNA, 19 nt, Artificial Sequence
  Description of Artificial Sequence: Synthetic oligonucleotide
agugcaaacuugauggucc

SEQ ID NO: 1277876 - RNA, 19 nt, Artificial Sequence
  Description of Artificial Sequence: Synthetic oligonucleotide
aaauaaucgaaggaucuca

SEQ ID NO: 1277877 - RNA, 19 nt, Artificial Sequence
  Description of Artificial Sequence: Synthetic oligonucleotide
ucaaauuacucaguaaugu

SEQ ID NO: 1277878 - RNA, 19 nt, Artificial Sequence
  Description of Artificial Sequence: Synthetic oligonucleotide
uuuaacaagucuacauuac

SEQ ID NO: 1277879 - RNA, 19 nt, Artificial Sequence
  Description of Artificial Sequence: Synthetic oligonucleotide
aaggguguaaagcuagucu

SEQ ID NO: 1277880 - RNA, 19 nt, Artificial Sequence
  Description of Artificial Sequence: Synthetic oligonucleotide
cauacuuaguacugaaagc

SEQ ID NO: 1277881 - RNA, 19 nt, Artificial Sequence
  Description of Artificial Sequence: Synthetic oligonucleotide
uuaguagcucuauagaguc

SEQ ID NO: 1277882 - RNA, 19 nt, Artificial Sequence
  Description of Artificial Sequence: Synthetic oligonucleotide
gauaguaaacguccaauca

SEQ ID NO: 1277883 - RNA, 19 nt, Artificial Sequence
  Description of Artificial Sequence: Synthetic oligonucleotide
ucauuuaagggauuccugu

SEQ ID NO: 1277884 - RNA, 19 nt, Artificial Sequence
  Description of Artificial Sequence: Synthetic oligonucleotide
uggcagauaguaaacgucc

SEQ ID NO: 1277885 - RNA, 19 nt, Artificial Sequence
  Description of Artificial Sequence: Synthetic oligonucleotide
uccaacaucuugaagugca

SEQ ID NO: 1277886 - RNA, 19 nt, Artificial Sequence
  Description of Artificial Sequence: Synthetic oligonucleotide
aaaccaacagacccgagaa

SEQ ID NO: 1277887 - RNA, 19 nt, Artificial Sequence
  Description of Artificial Sequence: Synthetic oligonucleotide
aagucuacauuacaucgca

SEQ ID NO: 1277888 - RNA, 19 nt, Artificial Sequence
  Description of Artificial Sequence: Synthetic oligonucleotide
aggguguaaagcuagucuc

SEQ ID NO: 1277889 - RNA, 19 nt, Artificial Sequence
  Description of Artificial Sequence: Synthetic oligonucleotide
ugaagucauaagaaguucu

SEQ ID NO: 1277890 - RNA, 19 nt, Artificial Sequence
  Description of Artificial Sequence: Synthetic oligonucleotide
uaagggcuacaaaaggagg

SEQ ID NO: 1277891 - RNA, 19 nt, Artificial Sequence
  Description of Artificial Sequence: Synthetic oligonucleotide
ggaauuacucucuaaagug

SEQ ID NO: 1277892 - RNA, 19 nt, Artificial Sequence
  Description of Artificial Sequence: Synthetic oligonucleotide
aauagaaggagaggcauga

SEQ ID NO: 1277893 - RNA, 19 nt, Artificial Sequence
  Description of Artificial Sequence: Synthetic oligonucleotide
aaauaccuauaaguacugc

SEQ ID NO: 1277894 - RNA, 19 nt, Artificial Sequence
  Description of Artificial Sequence: Synthetic oligonucleotide
ucucuaaagugcaaacuug

SEQ ID NO: 1277895 - RNA, 19 nt, Artificial Sequence
  Description of Artificial Sequence: Synthetic oligonucleotide
aauaagggcuacaaaagga

SEQ ID NO: 1277896 - RNA, 19 nt, Artificial Sequence
  Description of Artificial Sequence: Synthetic oligonucleotide
agaggcaugaaacagggaa

SEQ ID NO: 1277897 - RNA, 19 nt, Artificial Sequence
  Description of Artificial Sequence: Synthetic oligonucleotide
aaauagccaaagucauaac

SEQ ID NO: 1277898 - RNA, 19 nt, Artificial Sequence
  Description of Artificial Sequence: Synthetic oligonucleotide
uggaagguuaaacacuaug

SEQ ID NO: 1277899 - RNA, 19 nt, Artificial Sequence
  Description of Artificial Sequence: Synthetic oligonucleotide
agauuuaaccugaauguac

SEQ ID NO: 1277900 - RNA, 19 nt, Artificial Sequence
  Description of Artificial Sequence: Synthetic oligonucleotide
ucauaaaugucaguccuag

SEQ ID NO: 1277901 - RNA, 19 nt, Artificial Sequence
  Description of Artificial Sequence: Synthetic oligonucleotide
aacaucauaaauaugccua

SEQ ID NO: 1277902 - RNA, 19 nt, Artificial Sequence
  Description of Artificial Sequence: Synthetic oligonucleotide
uuuaaacuggauaccagau

SEQ ID NO: 1277903 - RNA, 19 nt, Artificial Sequence
  Description of Artificial Sequence: Synthetic oligonucleotide
caaagaaccacuccugaag

SEQ ID NO: 1277904 - RNA, 19 nt, Artificial Sequence
  Description of Artificial Sequence: Synthetic oligonucleotide
cuguaagcaaugaaucacg

SEQ ID NO: 1277905 - RNA, 19 nt, Artificial Sequence
  Description of Artificial Sequence: Synthetic oligonucleotide
aaauugauuuguauaguca

SEQ ID NO: 1277906 - RNA, 19 nt, Artificial Sequence
  Description of Artificial Sequence: Synthetic oligonucleotide
guuaauuuaggaaaaggga

SEQ ID NO: 1277907 - RNA, 19 nt, Artificial Sequence
  Description of Artificial Sequence: Synthetic oligonucleotide
ugagcauacauguccuccg

SEQ ID NO: 1277908 - RNA, 19 nt, Artificial Sequence
  Description of Artificial Sequence: Synthetic oligonucleotide
cuaaagugcaaacuugaug

SEQ ID NO: 1277909 - RNA, 19 nt, Artificial Sequence
  Description of Artificial Sequence: Synthetic oligonucleotide
uaacaagucuacauuacau

SEQ ID NO: 1277910 - RNA, 19 nt, Artificial Sequence
  Description of Artificial Sequence: Synthetic oligonucleotide
guauagucaacaaaucaag

SEQ ID NO: 1277911 - RNA, 19 nt, Artificial Sequence
  Description of Artificial Sequence: Synthetic oligonucleotide
auuauauuuucggauaacu

SEQ ID NO: 1277912 - RNA, 19 nt, Artificial Sequence
  Description of Artificial Sequence: Synthetic oligonucleotide
agcacaaggagucuagaug

SEQ ID NO: 1277913 - RNA, 19 nt, Artificial Sequence
  Description of Artificial Sequence: Synthetic oligonucleotide
uacauuacaucgcaauagu

SEQ ID NO: 1277914 - RNA, 19 nt, Artificial Sequence
  Description of Artificial Sequence: Synthetic oligonucleotide
uguacucugaaugucaaaa

SEQ ID NO: 1277915 - RNA, 19 nt, Artificial Sequence
  Description of Artificial Sequence: Synthetic oligonucleotide
aacaacaauuugcacaaua

SEQ ID NO: 1277916 - RNA, 19 nt, Artificial Sequence
  Description of Artificial Sequence: Synthetic oligonucleotide
ucaggcaaguuagaguugg

SEQ ID NO: 1277917 - RNA, 19 nt, Artificial Sequence
  Description of Artificial Sequence: Synthetic oligonucleotide
augugcuguacucugaaug

SEQ ID NO: 1277918 - RNA, 19 nt, Artificial Sequence
  Description of Artificial Sequence: Synthetic oligonucleotide
aauaguugguauugauagu

SEQ ID NO: 1277919 - RNA, 19 nt, Artificial Sequence
  Description of Artificial Sequence: Synthetic oligonucleotide
aaagcuagucucaaagucu

SEQ ID NO: 1277920 - RNA, 19 nt, Artificial Sequence
  Description of Artificial Sequence: Synthetic oligonucleotide
aauuaagggaaguguugcu

SEQ ID NO: 1277921 - RNA, 19 nt, Artificial Sequence
  Description of Artificial Sequence: Synthetic oligonucleotide
gaauuacucucuaaagugc

SEQ ID NO: 1277922 - RNA, 19 nt, Artificial Sequence
  Description of Artificial Sequence: Synthetic oligonucleotide
auuuucggauaacuugacg

SEQ ID NO: 1277923 - RNA, 19 nt, Artificial Sequence
  Description of Artificial Sequence: Synthetic oligonucleotide
aaaguacugggucucaauu

SEQ ID NO: 1277924 - RNA, 19 nt, Artificial Sequence
  Description of Artificial Sequence: Synthetic oligonucleotide
aaacucaguguccauugca

SEQ ID NO: 1277925 - RNA, 19 nt, Artificial Sequence
  Description of Artificial Sequence: Synthetic oligonucleotide
aacagacccgagaaugugc

SEQ ID NO: 1277926 - RNA, 19 nt, Artificial Sequence
  Description of Artificial Sequence: Synthetic oligonucleotide
gauauugccuaucauuuaa

SEQ ID NO: 1277927 - RNA, 19 nt, Artificial Sequence
  Description of Artificial Sequence: Synthetic oligonucleotide
cuaggaaggccauacuuag

SEQ ID NO: 1277928 - RNA, 19 nt, Artificial Sequence
  Description of Artificial Sequence: Synthetic oligonucleotide
cuacauuacaucgcaauag

SEQ ID NO: 1277929 - RNA, 19 nt, Artificial Sequence
  Description of Artificial Sequence: Synthetic oligonucleotide
uuauaagaucacagcuagg

SEQ ID NO: 1277930 - RNA, 19 nt, Artificial Sequence
  Description of Artificial Sequence: Synthetic oligonucleotide
ugguccacaaucuuaaaua

SEQ ID NO: 1277931 - RNA, 19 nt, Artificial Sequence
  Description of Artificial Sequence: Synthetic oligonucleotide
auguacuuuuauaagauca

SEQ ID NO: 1277932 - RNA, 19 nt, Artificial Sequence
  Description of Artificial Sequence: Synthetic oligonucleotide
uguaagcaaugaaucacga

SEQ ID NO: 1277933 - RNA, 19 nt, Artificial Sequence
  Description of Artificial Sequence: Synthetic oligonucleotide
acaacaauuugcacaauag

SEQ ID NO: 1277934 - RNA, 19 nt, Artificial Sequence
  Description of Artificial Sequence: Synthetic oligonucleotide
ugccaauuagaaaccaaca

SEQ ID NO: 1277935 - RNA, 19 nt, Artificial Sequence
  Description of Artificial Sequence: Synthetic oligonucleotide
aauuacucucuaaagugca

SEQ ID NO: 1277936 - RNA, 19 nt, Artificial Sequence
  Description of Artificial Sequence: Synthetic oligonucleotide
cucuauagaguccugagca

SEQ ID NO: 1277937 - RNA, 19 nt, Artificial Sequence
  Description of Artificial Sequence: Synthetic oligonucleotide
uaucauuuaagggauuccu

SEQ ID NO: 1277938 - RNA, 19 nt, Artificial Sequence
  Description of Artificial Sequence: Synthetic oligonucleotide
agucaacaaaucaagaaca

SEQ ID NO: 1277939 - RNA, 19 nt, Artificial Sequence
  Description of Artificial Sequence: Synthetic oligonucleotide
auaccuauaaguacugcag

SEQ ID NO: 1277940 - RNA, 19 nt, Artificial Sequence
  Description of Artificial Sequence: Synthetic oligonucleotide
ugauaagaaguguauuaaa

SEQ ID NO: 1277941 - RNA, 19 nt, Artificial Sequence
  Description of Artificial Sequence: Synthetic oligonucleotide
uaagggauuccuguaagca

SEQ ID NO: 1277942 - RNA, 19 nt, Artificial Sequence
  Description of Artificial Sequence: Synthetic oligonucleotide
auauuuucggauaacuuga

SEQ ID NO: 1277943 - RNA, 19 nt, Artificial Sequence
  Description of Artificial Sequence: Synthetic oligonucleotide
uguccauugcaacauaauu

SEQ ID NO: 1277944 - RNA, 19 nt, Artificial Sequence
  Description of Artificial Sequence: Synthetic oligonucleotide
ucacgauccugcuuggugc

SEQ ID NO: 1277945 - RNA, 19 nt, Artificial Sequence
  Description of Artificial Sequence: Synthetic oligonucleotide
auaagggcuacaaaaggag

SEQ ID NO: 1277946 - RNA, 19 nt, Artificial Sequence
  Description of Artificial Sequence: Synthetic oligonucleotide
ucuuuggacuuuaaugaaa

SEQ ID NO: 1277947 - RNA, 19 nt, Artificial Sequence
  Description of Artificial Sequence: Synthetic oligonucleotide
augccaauuagaaaccaac

SEQ ID NO: 1277948 - RNA, 19 nt, Artificial Sequence
  Description of Artificial Sequence: Synthetic oligonucleotide
cagggcuucuuccugaagg

SEQ ID NO: 1277949 - RNA, 19 nt, Artificial Sequence
  Description of Artificial Sequence: Synthetic oligonucleotide
guaaacguccaaucacagg

SEQ ID NO: 1277950 - RNA, 19 nt, Artificial Sequence
  Description of Artificial Sequence: Synthetic oligonucleotide
uaccuauaaguacugcaga

SEQ ID NO: 1277951 - RNA, 19 nt, Artificial Sequence
  Description of Artificial Sequence: Synthetic oligonucleotide
aaacguccaaucacagggc

SEQ ID NO: 1277952 - RNA, 19 nt, Artificial Sequence
  Description of Artificial Sequence: Synthetic oligonucleotide
agguuaaacacuaugcaca

SEQ ID NO: 1277953 - RNA, 19 nt, Artificial Sequence
  Description of Artificial Sequence: Synthetic oligonucleotide
guaaaaggaagccaauuaa

SEQ ID NO: 1277954 - RNA, 19 nt, Artificial Sequence
  Description of Artificial Sequence: Synthetic oligonucleotide
gaaaccaacagacccgaga

SEQ ID NO: 1277955 - RNA, 19 nt, Artificial Sequence
  Description of Artificial Sequence: Synthetic oligonucleotide
cugaaggguguaaagcuag

SEQ ID NO: 1277956 - RNA, 19 nt, Artificial Sequence
  Description of Artificial Sequence: Synthetic oligonucleotide
guuccaacaucuugaagug

SEQ ID NO: 1277957 - RNA, 19 nt, Artificial Sequence
  Description of Artificial Sequence: Synthetic oligonucleotide
uccguuccagcucuaacug

SEQ ID NO: 1277958 - RNA, 19 nt, Artificial Sequence
  Description of Artificial Sequence: Synthetic oligonucleotide
cugcagaauagaaggagag

SEQ ID NO: 1277959 - RNA, 19 nt, Artificial Sequence
  Description of Artificial Sequence: Synthetic oligonucleotide
uccuccgucaaauuaaauu

SEQ ID NO: 1277960 - RNA, 19 nt, Artificial Sequence
  Description of Artificial Sequence: Synthetic oligonucleotide
ucggauaacuugacgaauc

SEQ ID NO: 1277961 - RNA, 19 nt, Artificial Sequence
  Description of Artificial Sequence: Synthetic oligonucleotide
ucacacaagcuugauaaga

SEQ ID NO: 1277962 - RNA, 19 nt, Artificial Sequence
  Description of Artificial Sequence: Synthetic oligonucleotide
uuucggauaacuugacgaa

SEQ ID NO: 1277963 - RNA, 19 nt, Artificial Sequence
  Description of Artificial Sequence: Synthetic oligonucleotide
auuuaagggauuccuguaa

SEQ ID NO: 1277964 - RNA, 19 nt, Artificial Sequence
  Description of Artificial Sequence: Synthetic oligonucleotide
aaauaaggguaaaagugau

SEQ ID NO: 1277965 - RNA, 19 nt, Artificial Sequence
  Description of Artificial Sequence: Synthetic oligonucleotide
uucuggcagauaguaaacg

SEQ ID NO: 1277966 - RNA, 19 nt, Artificial Sequence
  Description of Artificial Sequence: Synthetic oligonucleotide
ggaagguuaaacacuaugc

SEQ ID NO: 1277967 - RNA, 19 nt, Artificial Sequence
  Description of Artificial Sequence: Synthetic oligonucleotide
auuacucaguaauguagcu

SEQ ID NO: 1277968 - RNA, 19 nt, Artificial Sequence
  Description of Artificial Sequence: Synthetic oligonucleotide
uccgucaaauuaaauuuaa

SEQ ID NO: 1277969 - RNA, 19 nt, Artificial Sequence
  Description of Artificial Sequence: Synthetic oligonucleotide
auuaagggaaguguugcug

SEQ ID NO: 1277970 - RNA, 19 nt, Artificial Sequence
  Description of Artificial Sequence: Synthetic oligonucleotide
aagggauuccuguaagcaa

SEQ ID NO: 1277971 - RNA, 19 nt, Artificial Sequence
  Description of Artificial Sequence: Synthetic oligonucleotide
uaaccacuaugaaaugaca

SEQ ID NO: 1277972 - RNA, 19 nt, Artificial Sequence
  Description of Artificial Sequence: Synthetic oligonucleotide
uaugcaugccaauuagaaa

SEQ ID NO: 1277973 - RNA, 19 nt, Artificial Sequence
  Description of Artificial Sequence: Synthetic oligonucleotide
agcucuauagaguccugag

SEQ ID NO: 1277974 - RNA, 19 nt, Artificial Sequence
  Description of Artificial Sequence: Synthetic oligonucleotide
ggauuuugauuaaauagcc

SEQ ID NO: 1277975 - RNA, 19 nt, Artificial Sequence
  Description of Artificial Sequence: Synthetic oligonucleotide
uacaagcccaaacuucaca

SEQ ID NO: 1277976 - RNA, 19 nt, Artificial Sequence
  Description of Artificial Sequence: Synthetic oligonucleotide
caucaaaauguuacacuug

SEQ ID NO: 1277977 - RNA, 19 nt, Artificial Sequence
  Description of Artificial Sequence: Synthetic oligonucleotide
accaacagacccgagaaug

SEQ ID NO: 1277978 - RNA, 19 nt, Artificial Sequence
  Description of Artificial Sequence: Synthetic oligonucleotide
gguuaaacacuaugcacag

SEQ ID NO: 1277979 - RNA, 19 nt, Artificial Sequence
  Description of Artificial Sequence: Synthetic oligonucleotide
uucuucaggcaaguuagag

SEQ ID NO: 1277980 - RNA, 19 nt, Artificial Sequence
  Description of Artificial Sequence: Synthetic oligonucleotide
ucuaaagugcaaacuugau

SEQ ID NO: 1277981 - RNA, 19 nt, Artificial Sequence
  Description of Artificial Sequence: Synthetic oligonucleotide
cuccugaagucauaagaag

SEQ ID NO: 1277982 - RNA, 19 nt, Artificial Sequence
  Description of Artificial Sequence: Synthetic oligonucleotide
aguagcucuauagaguccu

SEQ ID NO: 1277983 - RNA, 19 nt, Artificial Sequence
  Description of Artificial Sequence: Synthetic oligonucleotide
uugaugguccacaaucuua

SEQ ID NO: 1277984 - RNA, 19 nt, Artificial Sequence
  Description of Artificial Sequence: Synthetic oligonucleotide
ugccuaucauuuaagggau

SEQ ID NO: 1277985 - RNA, 19 nt, Artificial Sequence
  Description of Artificial Sequence: Synthetic oligonucleotide
acaagcccaaacuucacaa

SEQ ID NO: 1277986 - RNA, 19 nt, Artificial Sequence
  Description of Artificial Sequence: Synthetic oligonucleotide
aucacgauccugcuuggug

SEQ ID NO: 1277987 - RNA, 19 nt, Artificial Sequence
  Description of Artificial Sequence: Synthetic oligonucleotide
auccguuccagcucuaacu

SEQ ID NO: 1277988 - RNA, 19 nt, Artificial Sequence
  Description of Artificial Sequence: Synthetic oligonucleotide
caaucacagggcuucuucc

SEQ ID NO: 1277989 - RNA, 19 nt, Artificial Sequence
  Description of Artificial Sequence: Synthetic oligonucleotide
agucuagaugccaagcauc

SEQ ID NO: 1277990 - RNA, 19 nt, Artificial Sequence
  Description of Artificial Sequence: Synthetic oligonucleotide
ugaucuacaguugcugcug

SEQ ID NO: 1277991 - RNA, 19 nt, Artificial Sequence
  Description of Artificial Sequence: Synthetic oligonucleotide
aggaaggccauacuuagua

SEQ ID NO: 1277992 - RNA, 19 nt, Artificial Sequence
  Description of Artificial Sequence: Synthetic oligonucleotide
guuacaagcccaaacuuca

SEQ ID NO: 1277993 - RNA, 19 nt, Artificial Sequence
  Description of Artificial Sequence: Synthetic oligonucleotide
aucaaauuacucaguaaug

SEQ ID NO: 1277994 - RNA, 19 nt, Artificial Sequence
  Description of Artificial Sequence: Synthetic oligonucleotide
cuaugcaugccaauuagaa

SEQ ID NO: 1277995 - RNA, 19 nt, Artificial Sequence
  Description of Artificial Sequence: Synthetic oligonucleotide
aggagucuagaugccaagc

SEQ ID NO: 1277996 - RNA, 19 nt, Artificial Sequence
  Description of Artificial Sequence: Synthetic oligonucleotide
uccaaugggccuugcaaca

SEQ ID NO: 1277997 - RNA, 19 nt, Artificial Sequence
  Description of Artificial Sequence: Synthetic oligonucleotide
cuaacuguucagcaacuuc

SEQ ID NO: 1277998 - RNA, 19 nt, Artificial Sequence
  Description of Artificial Sequence: Synthetic oligonucleotide
gcaaguuagaguuggucag

SEQ ID NO: 1277999 - RNA, 19 nt, Artificial Sequence
  Description of Artificial Sequence: Synthetic oligonucleotide
uaccuaaagacuuguuauc

SEQ ID NO: 1278000 - RNA, 19 nt, Artificial Sequence
  Description of Artificial Sequence: Synthetic oligonucleotide
uuugaccccuucacaaaga

SEQ ID NO: 1278001 - RNA, 19 nt, Artificial Sequence
  Description of Artificial Sequence: Synthetic oligonucleotide
cuuaguacugaaagcagaa

SEQ ID NO: 1278002 - RNA, 19 nt, Artificial Sequence
  Description of Artificial Sequence: Synthetic oligonucleotide
gauaagaaguguauuaaau

SEQ ID NO: 1278003 - RNA, 19 nt, Artificial Sequence
  Description of Artificial Sequence: Synthetic oligonucleotide
cucuaaagugcaaacuuga

SEQ ID NO: 1278004 - RNA, 19 nt, Artificial Sequence
  Description of Artificial Sequence: Synthetic oligonucleotide
accaagcucaaguaggcaa

SEQ ID NO: 1278005 - RNA, 19 nt, Artificial Sequence
  Description of Artificial Sequence: Synthetic oligonucleotide
uccuauccguuccagcucu

SEQ ID NO: 1278006 - RNA, 19 nt, Artificial Sequence
  Description of Artificial Sequence: Synthetic oligonucleotide
uggugcugagguccuaucc

SEQ ID NO: 1278007 - RNA, 19 nt, Artificial Sequence
  Description of Artificial Sequence: Synthetic oligonucleotide
accuaaagacuuguuaucu

SEQ ID NO: 1278008 - RNA, 19 nt, Artificial Sequence
  Description of Artificial Sequence: Synthetic oligonucleotide
accuauaaguacugcagaa

SEQ ID NO: 1278009 - RNA, 19 nt, Artificial Sequence
  Description of Artificial Sequence: Synthetic oligonucleotide
agcagaaaauaagggcuac

SEQ ID NO: 1278010 - RNA, 19 nt, Artificial Sequence
  Description of Artificial Sequence: Synthetic oligonucleotide
cuggcagauaguaaacguc

SEQ ID NO: 1278011 - RNA, 19 nt, Artificial Sequence
  Description of Artificial Sequence: Synthetic oligonucleotide
ggugcugagguccuauccg

SEQ ID NO: 1278012 - RNA, 19 nt, Artificial Sequence
  Description of Artificial Sequence: Synthetic oligonucleotide
aauaaucgaaggaucucaa

SEQ ID NO: 1278013 - RNA, 19 nt, Artificial Sequence
  Description of Artificial Sequence: Synthetic oligonucleotide
cuaucauuuaagggauucc

SEQ ID NO: 1278014 - RNA, 19 nt, Artificial Sequence
  Description of Artificial Sequence: Synthetic oligonucleotide
ugucaguccuagcugaauu

SEQ ID NO: 1278015 - RNA, 19 nt, Artificial Sequence
  Description of Artificial Sequence: Synthetic oligonucleotide
uccuagcugaauuaucuuu

SEQ ID NO: 1278016 - RNA, 19 nt, Artificial Sequence
  Description of Artificial Sequence: Synthetic oligonucleotide
gaauuaucuuuaacaaguc

SEQ ID NO: 1278017 - RNA, 19 nt, Artificial Sequence
  Description of Artificial Sequence: Synthetic oligonucleotide
cucaaguaggcaaaguuua

SEQ ID NO: 1278018 - RNA, 19 nt, Artificial Sequence
  Description of Artificial Sequence: Synthetic oligonucleotide
ucaaguaggcaaaguuuau

SEQ ID NO: 1278019 - RNA, 19 nt, Artificial Sequence
  Description of Artificial Sequence: Synthetic oligonucleotide
guauucuccuugcucauuc

SEQ ID NO: 1278020 - RNA, 19 nt, Artificial Sequence
  Description of Artificial Sequence: Synthetic oligonucleotide
uagaaaccaacagacccga

SEQ ID NO: 1278021 - RNA, 19 nt, Artificial Sequence
  Description of Artificial Sequence: Synthetic oligonucleotide
cuccaaugggccuugcaac

SEQ ID NO: 1278022 - RNA, 19 nt, Artificial Sequence
  Description of Artificial Sequence: Synthetic oligonucleotide
gaaucacgauccugcuugg

SEQ ID NO: 1278023 - RNA, 19 nt, Artificial Sequence
  Description of Artificial Sequence: Synthetic oligonucleotide
uauugauagucagcauugc

SEQ ID NO: 1278024 - RNA, 19 nt, Artificial Sequence
  Description of Artificial Sequence: Synthetic oligonucleotide
cuuggaagguuaaacacua

SEQ ID NO: 1278025 - RNA, 19 nt, Artificial Sequence
  Description of Artificial Sequence: Synthetic oligonucleotide
gacccgagaaugugcuugg

SEQ ID NO: 1278026 - RNA, 19 nt, Artificial Sequence
  Description of Artificial Sequence: Synthetic oligonucleotide
uuacucaguaauguagcuc

SEQ ID NO: 1278027 - RNA, 19 nt, Artificial Sequence
  Description of Artificial Sequence: Synthetic oligonucleotide
aguaaacguccaaucacag

SEQ ID NO: 1278028 - RNA, 19 nt, Artificial Sequence
  Description of Artificial Sequence: Synthetic oligonucleotide
uuacaucgcaauaguuggu

SEQ ID NO: 1278029 - RNA, 19 nt, Artificial Sequence
  Description of Artificial Sequence: Synthetic oligonucleotide
ucuauagaguccugagcau

SEQ ID NO: 1278030 - RNA, 19 nt, Artificial Sequence
  Description of Artificial Sequence: Synthetic oligonucleotide
accauuugaccccuucaca

SEQ ID NO: 1278031 - RNA, 19 nt, Artificial Sequence
  Description of Artificial Sequence: Synthetic oligonucleotide
uaguagcucuauagagucc

SEQ ID NO: 1278032 - RNA, 19 nt, Artificial Sequence
  Description of Artificial Sequence: Synthetic oligonucleotide
uguuguuaguagcucuaua

SEQ ID NO: 1278033 - RNA, 19 nt, Artificial Sequence
  Description of Artificial Sequence: Synthetic oligonucleotide
acuuaguacugaaagcaga

SEQ ID NO: 1278034 - RNA, 19 nt, Artificial Sequence
  Description of Artificial Sequence: Synthetic oligonucleotide
gaucacagcuaggaaggcc

SEQ ID NO: 1278035 - RNA, 19 nt, Artificial Sequence
  Description of Artificial Sequence: Synthetic oligonucleotide
cagaaacaacaauuugcac

SEQ ID NO: 1278036 - RNA, 19 nt, Artificial Sequence
  Description of Artificial Sequence: Synthetic oligonucleotide
cuugcaacaacaccuggaa

SEQ ID NO: 1278037 - RNA, 19 nt, Artificial Sequence
  Description of Artificial Sequence: Synthetic oligonucleotide
agccaauuaagggaagugu

SEQ ID NO: 1278038 - RNA, 19 nt, Artificial Sequence
  Description of Artificial Sequence: Synthetic oligonucleotide
agacccgagaaugugcuug

SEQ ID NO: 1278039 - RNA, 19 nt, Artificial Sequence
  Description of Artificial Sequence: Synthetic oligonucleotide
aggcaaguuagaguugguc

SEQ ID NO: 1278040 - RNA, 19 nt, Artificial Sequence
  Description of Artificial Sequence: Synthetic oligonucleotide
aacucaguguccauugcaa

SEQ ID NO: 1278041 - RNA, 19 nt, Artificial Sequence
  Description of Artificial Sequence: Synthetic oligonucleotide
agcuaggaaggccauacuu

SEQ ID NO: 1278042 - RNA, 19 nt, Artificial Sequence
  Description of Artificial Sequence: Synthetic oligonucleotide
uucaggcaaguuagaguug

SEQ ID NO: 1278043 - RNA, 19 nt, Artificial Sequence
  Description of Artificial Sequence: Synthetic oligonucleotide
uuacaagcccaaacuucac

SEQ ID NO: 1278044 - RNA, 19 nt, Artificial Sequence
  Description of Artificial Sequence: Synthetic oligonucleotide
cugagguccuauccguucc

SEQ ID NO: 1278045 - RNA, 19 nt, Artificial Sequence
  Description of Artificial Sequence: Synthetic oligonucleotide
ccacuaugaaaugacaacc

SEQ ID NO: 1278046 - RNA, 19 nt, Artificial Sequence
  Description of Artificial Sequence: Synthetic oligonucleotide
ccgagaaugugcuuggaag

SEQ ID NO: 1278047 - RNA, 19 nt, Artificial Sequence
  Description of Artificial Sequence: Synthetic oligonucleotide
caaauuacucaguaaugua

SEQ ID NO: 1278048 - RNA, 19 nt, Artificial Sequence
  Description of Artificial Sequence: Synthetic oligonucleotide
auauugccuaucauuuaag

SEQ ID NO: 1278049 - RNA, 19 nt, Artificial Sequence
  Description of Artificial Sequence: Synthetic oligonucleotide
aggguaaaagugauggagu

SEQ ID NO: 1278050 - RNA, 19 nt, Artificial Sequence
  Description of Artificial Sequence: Synthetic oligonucleotide
aaugggccuugcaacaaca

SEQ ID NO: 1278051 - RNA, 19 nt, Artificial Sequence
  Description of Artificial Sequence: Synthetic oligonucleotide
ugaaggguguaaagcuagu

SEQ ID NO: 1278052 - RNA, 19 nt, Artificial Sequence
  Description of Artificial Sequence: Synthetic oligonucleotide
aagcuugauaagaagugua

SEQ ID NO: 1278053 - RNA, 19 nt, Artificial Sequence
  Description of Artificial Sequence: Synthetic oligonucleotide
acucucuaaagugcaaacu

SEQ ID NO: 1278054 - RNA, 19 nt, Artificial Sequence
  Description of Artificial Sequence: Synthetic oligonucleotide
uacaucgcaauaguuggua

SEQ ID NO: 1278055 - RNA, 19 nt, Artificial Sequence
  Description of Artificial Sequence: Synthetic oligonucleotide
gcucuaacuguucagcaac

SEQ ID NO: 1278056 - RNA, 19 nt, Artificial Sequence
  Description of Artificial Sequence: Synthetic oligonucleotide
agguuacaagcccaaacuu

SEQ ID NO: 1278057 - RNA, 19 nt, Artificial Sequence
  Description of Artificial Sequence: Synthetic oligonucleotide
uuaguacugaaagcagaaa

SEQ ID NO: 1278058 - RNA, 19 nt, Artificial Sequence
  Description of Artificial Sequence: Synthetic oligonucleotide
gauuggaauuacucucuaa

SEQ ID NO: 1278059 - RNA, 19 nt, Artificial Sequence
  Description of Artificial Sequence: Synthetic oligonucleotide
ccuguaauccaccuuugag

SEQ ID NO: 1278060 - RNA, 19 nt, Artificial Sequence
  Description of Artificial Sequence: Synthetic oligonucleotide
cacacaagcuugauaagaa

SEQ ID NO: 1278061 - RNA, 19 nt, Artificial Sequence
  Description of Artificial Sequence: Synthetic oligonucleotide
ccaauuaagggaaguguug

SEQ ID NO: 1278062 - RNA, 19 nt, Artificial Sequence
  Description of Artificial Sequence: Synthetic oligonucleotide
cuucaugagguacuucaca

SEQ ID NO: 1278063 - RNA, 19 nt, Artificial Sequence
  Description of Artificial Sequence: Synthetic oligonucleotide
agcucuaacuguucagcaa

SEQ ID NO: 1278064 - RNA, 19 nt, Artificial Sequence
  Description of Artificial Sequence: Synthetic oligonucleotide
guuagaguuggucaggauu

SEQ ID NO: 1278065 - RNA, 19 nt, Artificial Sequence
  Description of Artificial Sequence: Synthetic oligonucleotide
agauauugccuaucauuua

SEQ ID NO: 1278066 - RNA, 19 nt, Artificial Sequence
  Description of Artificial Sequence: Synthetic oligonucleotide
agcaaugaaucacgauccu

SEQ ID NO: 1278067 - RNA, 19 nt, Artificial Sequence
  Description of Artificial Sequence: Synthetic oligonucleotide
acaaucuuaaauaccuaua

SEQ ID NO: 1278068 - RNA, 19 nt, Artificial Sequence
  Description of Artificial Sequence: Synthetic oligonucleotide
uugcaacaacaccuggaaa

SEQ ID NO: 1278069 - RNA, 19 nt, Artificial Sequence
  Description of Artificial Sequence: Synthetic oligonucleotide
gacgaaucuucuucaucuc

SEQ ID NO: 1278070 - RNA, 19 nt, Artificial Sequence
  Description of Artificial Sequence: Synthetic oligonucleotide
aggauuggaauuacucucu

SEQ ID NO: 1278071 - RNA, 19 nt, Artificial Sequence
  Description of Artificial Sequence: Synthetic oligonucleotide
guuaguagcucuauagagu

SEQ ID NO: 1278072 - RNA, 19 nt, Artificial Sequence
  Description of Artificial Sequence: Synthetic oligonucleotide
acuugaugguccacaaucu

SEQ ID NO: 1278073 - RNA, 19 nt, Artificial Sequence
  Description of Artificial Sequence: Synthetic oligonucleotide
caguaauguagcucuguca

SEQ ID NO: 1278074 - RNA, 19 nt, Artificial Sequence
  Description of Artificial Sequence: Synthetic oligonucleotide
ugagguccuauccguucca

SEQ ID NO: 1278075 - RNA, 19 nt, Artificial Sequence
  Description of Artificial Sequence: Synthetic oligonucleotide
uaacuugacgaaucuucuu

SEQ ID NO: 1278076 - RNA, 19 nt, Artificial Sequence
  Description of Artificial Sequence: Synthetic oligonucleotide
aaccaacagacccgagaau

SEQ ID NO: 1278077 - RNA, 19 nt, Artificial Sequence
  Description of Artificial Sequence: Synthetic oligonucleotide
uuuggacuuuaaugaaauu

SEQ ID NO: 1278078 - RNA, 19 nt, Artificial Sequence
  Description of Artificial Sequence: Synthetic oligonucleotide
ucaguccuagcugaauuau

SEQ ID NO: 1278079 - RNA, 19 nt, Artificial Sequence
  Description of Artificial Sequence: Synthetic oligonucleotide
uucggauaacuugacgaau

SEQ ID NO: 1278080 - RNA, 19 nt, Artificial Sequence
  Description of Artificial Sequence: Synthetic oligonucleotide
gaaggguguaaagcuaguc

SEQ ID NO: 1278081 - RNA, 19 nt, Artificial Sequence
  Description of Artificial Sequence: Synthetic oligonucleotide
cagaaaauaagggcuacaa

SEQ ID NO: 1278082 - RNA, 19 nt, Artificial Sequence
  Description of Artificial Sequence: Synthetic oligonucleotide
caacuguaguuccaacauc

SEQ ID NO: 1278083 - RNA, 19 nt, Artificial Sequence
  Description of Artificial Sequence: Synthetic oligonucleotide
guaauguagcucugucaca

SEQ ID NO: 1278084 - RNA, 19 nt, Artificial Sequence
  Description of Artificial Sequence: Synthetic oligonucleotide
gucuagaugccaagcauca

SEQ ID NO: 1278085 - RNA, 19 nt, Artificial Sequence
  Description of Artificial Sequence: Synthetic oligonucleotide
gcucauucauaaaugucag

SEQ ID NO: 1278086 - RNA, 19 nt, Artificial Sequence
  Description of Artificial Sequence: Synthetic oligonucleotide
agaguccugagcauacaug

SEQ ID NO: 1278087 - RNA, 19 nt, Artificial Sequence
  Description of Artificial Sequence: Synthetic oligonucleotide
gguuacaagcccaaacuuc

SEQ ID NO: 1278088 - RNA, 19 nt, Artificial Sequence
  Description of Artificial Sequence: Synthetic oligonucleotide
gcucuauagaguccugagc

SEQ ID NO: 1278089 - RNA, 19 nt, Artificial Sequence
  Description of Artificial Sequence: Synthetic oligonucleotide
gccuaugcaugccaauuag

SEQ ID NO: 1278090 - RNA, 19 nt, Artificial Sequence
  Description of Artificial Sequence: Synthetic oligonucleotide
cacaaucuuaaauaccuau

SEQ ID NO: 1278091 - RNA, 19 nt, Artificial Sequence
  Description of Artificial Sequence: Synthetic oligonucleotide
uagcucuauagaguccuga

SEQ ID NO: 1278092 - RNA, 19 nt, Artificial Sequence
  Description of Artificial Sequence: Synthetic oligonucleotide
auaccagauguuguuagua

SEQ ID NO: 1278093 - RNA, 19 nt, Artificial Sequence
  Description of Artificial Sequence: Synthetic oligonucleotide
guaguuccaacaucuugaa

SEQ ID NO: 1278094 - RNA, 19 nt, Artificial Sequence
  Description of Artificial Sequence: Synthetic oligonucleotide
aguuccuggaggguauucu

SEQ ID NO: 1278095 - RNA, 19 nt, Artificial Sequence
  Description of Artificial Sequence: Synthetic oligonucleotide
gauguuguuaguagcucua

SEQ ID NO: 1278096 - RNA, 19 nt, Artificial Sequence
  Description of Artificial Sequence: Synthetic oligonucleotide
aaccaagcucaaguaggca

SEQ ID NO: 1278097 - RNA, 19 nt, Artificial Sequence
  Description of Artificial Sequence: Synthetic oligonucleotide
ugccaaguugaaguuccug

SEQ ID NO: 1278098 - RNA, 19 nt, Artificial Sequence
  Description of Artificial Sequence: Synthetic oligonucleotide
cauuuaagggauuccugua

SEQ ID NO: 1278099 - RNA, 19 nt, Artificial Sequence
  Description of Artificial Sequence: Synthetic oligonucleotide
cuaaagacuuguuaucuuu

SEQ ID NO: 1278100 - RNA, 19 nt, Artificial Sequence
  Description of Artificial Sequence: Synthetic oligonucleotide
cagguuacaagcccaaacu

SEQ ID NO: 1278101 - RNA, 19 nt, Artificial Sequence
  Description of Artificial Sequence: Synthetic oligonucleotide
aggcaugaaacagggaaau

SEQ ID NO: 1278102 - RNA, 19 nt, Artificial Sequence
  Description of Artificial Sequence: Synthetic oligonucleotide
ccagauuuaaccugaaugu

SEQ ID NO: 1278103 - RNA, 19 nt, Artificial Sequence
  Description of Artificial Sequence: Synthetic oligonucleotide
ggagucuagaugccaagca

SEQ ID NO: 1278104 - RNA, 19 nt, Artificial Sequence
  Description of Artificial Sequence: Synthetic oligonucleotide
cauccagguuacaagccca

SEQ ID NO: 1278105 - RNA, 19 nt, Artificial Sequence
  Description of Artificial Sequence: Synthetic oligonucleotide
auacauguccuccgucaaa

SEQ ID NO: 1278106 - RNA, 19 nt, Artificial Sequence
  Description of Artificial Sequence: Synthetic oligonucleotide
cuagcugaauuaucuuuaa

SEQ ID NO: 1278107 - RNA, 19 nt, Artificial Sequence
  Description of Artificial Sequence: Synthetic oligonucleotide
acagacccgagaaugugcu

SEQ ID NO: 1278108 - RNA, 19 nt, Artificial Sequence
  Description of Artificial Sequence: Synthetic oligonucleotide
agccuaugcaugccaauua

SEQ ID NO: 1278109 - RNA, 19 nt, Artificial Sequence
  Description of Artificial Sequence: Synthetic oligonucleotide
augaaucacgauccugcuu

SEQ ID NO: 1278110 - RNA, 19 nt, Artificial Sequence
  Description of Artificial Sequence: Synthetic oligonucleotide
uuggaagguuaaacacuau

SEQ ID NO: 1278111 - RNA, 19 nt, Artificial Sequence
  Description of Artificial Sequence: Synthetic oligonucleotide
aaugugcuuggaagguuaa

SEQ ID NO: 1278112 - RNA, 19 nt, Artificial Sequence
  Description of Artificial Sequence: Synthetic oligonucleotide
caaugggccuugcaacaac

SEQ ID NO: 1278113 - RNA, 19 nt, Artificial Sequence
  Description of Artificial Sequence: Synthetic oligonucleotide
ucuaacuguucagcaacuu

SEQ ID NO: 1278114 - RNA, 19 nt, Artificial Sequence
  Description of Artificial Sequence: Synthetic oligonucleotide
gcuccugaauucuccaaug

SEQ ID NO: 1278115 - RNA, 19 nt, Artificial Sequence
  Description of Artificial Sequence: Synthetic oligonucleotide
ugguauugauagucagcau

SEQ ID NO: 1278116 - RNA, 19 nt, Artificial Sequence
  Description of Artificial Sequence: Synthetic oligonucleotide
ccagguuacaagcccaaac

SEQ ID NO: 1278117 - RNA, 19 nt, Artificial Sequence
  Description of Artificial Sequence: Synthetic oligonucleotide
uggauaccagauguuguua

SEQ ID NO: 1278118 - RNA, 19 nt, Artificial Sequence
  Description of Artificial Sequence: Synthetic oligonucleotide
aguuagaguuggucaggau

SEQ ID NO: 1278119 - RNA, 19 nt, Artificial Sequence
  Description of Artificial Sequence: Synthetic oligonucleotide
caguccuagcugaauuauc

SEQ ID NO: 1278120 - RNA, 19 nt, Artificial Sequence
  Description of Artificial Sequence: Synthetic oligonucleotide
augggccuugcaacaacac

SEQ ID NO: 1278121 - RNA, 19 nt, Artificial Sequence
  Description of Artificial Sequence: Synthetic oligonucleotide
aaucacgauccugcuuggu

SEQ ID NO: 1278122 - RNA, 19 nt, Artificial Sequence
  Description of Artificial Sequence: Synthetic oligonucleotide
ugacaaccauuugaccccu

SEQ ID NO: 1278123 - RNA, 19 nt, Artificial Sequence
  Description of Artificial Sequence: Synthetic oligonucleotide
cuccgucaaauuaaauuua

SEQ ID NO: 1278124 - RNA, 19 nt, Artificial Sequence
  Description of Artificial Sequence: Synthetic oligonucleotide
ucgcaauaguugguauuga

SEQ ID NO: 1278125 - RNA, 19 nt, Artificial Sequence
  Description of Artificial Sequence: Synthetic oligonucleotide
gucaguccuagcugaauua

SEQ ID NO: 1278126 - RNA, 19 nt, Artificial Sequence
  Description of Artificial Sequence: Synthetic oligonucleotide
gcuagucucaaagucuuca

SEQ ID NO: 1278127 - RNA, 19 nt, Artificial Sequence
  Description of Artificial Sequence: Synthetic oligonucleotide
auuacucucuaaagugcaa

SEQ ID NO: 1278128 - RNA, 19 nt, Artificial Sequence
  Description of Artificial Sequence: Synthetic oligonucleotide
gagguccuauccguuccag

SEQ ID NO: 1278129 - RNA, 19 nt, Artificial Sequence
  Description of Artificial Sequence: Synthetic oligonucleotide
ucugucacacaagcuugau

SEQ ID NO: 1278130 - RNA, 19 nt, Artificial Sequence
  Description of Artificial Sequence: Synthetic oligonucleotide
gaugguccacaaucuuaaa

SEQ ID NO: 1278131 - RNA, 19 nt, Artificial Sequence
  Description of Artificial Sequence: Synthetic oligonucleotide
cagauuuaaccugaaugua

SEQ ID NO: 1278132 - RNA, 19 nt, Artificial Sequence
  Description of Artificial Sequence: Synthetic oligonucleotide
auagaguccugagcauaca

SEQ ID NO: 1278133 - RNA, 19 nt, Artificial Sequence
  Description of Artificial Sequence: Synthetic oligonucleotide
guaagcaaugaaucacgau

SEQ ID NO: 1278134 - RNA, 19 nt, Artificial Sequence
  Description of Artificial Sequence: Synthetic oligonucleotide
ggaggggagauauugccua

SEQ ID NO: 1278135 - RNA, 19 nt, Artificial Sequence
  Description of Artificial Sequence: Synthetic oligonucleotide
aaacaacaauuugcacaau

SEQ ID NO: 1278136 - RNA, 19 nt, Artificial Sequence
  Description of Artificial Sequence: Synthetic oligonucleotide
guccuauccguuccagcuc

SEQ ID NO: 1278137 - RNA, 19 nt, Artificial Sequence
  Description of Artificial Sequence: Synthetic oligonucleotide
ugcaaacuugaugguccac

SEQ ID NO: 1278138 - RNA, 19 nt, Artificial Sequence
  Description of Artificial Sequence: Synthetic oligonucleotide
auguuguuaguagcucuau

SEQ ID NO: 1278139 - RNA, 19 nt, Artificial Sequence
  Description of Artificial Sequence: Synthetic oligonucleotide
gguaaaagugauggaguaa

SEQ ID NO: 1278140 - RNA, 19 nt, Artificial Sequence
  Description of Artificial Sequence: Synthetic oligonucleotide
aggccauacuuaguacuga

SEQ ID NO: 1278141 - RNA, 19 nt, Artificial Sequence
  Description of Artificial Sequence: Synthetic oligonucleotide
ccuagcugaauuaucuuua

SEQ ID NO: 1278142 - RNA, 19 nt, Artificial Sequence
  Description of Artificial Sequence: Synthetic oligonucleotide
gcaauaguugguauugaua

SEQ ID NO: 1278143 - RNA, 19 nt, Artificial Sequence
  Description of Artificial Sequence: Synthetic oligonucleotide
gucaggauuuugauuaaau

SEQ ID NO: 1278144 - RNA, 19 nt, Artificial Sequence
  Description of Artificial Sequence: Synthetic oligonucleotide
acucaguaauguagcucug

SEQ ID NO: 1278145 - RNA, 19 nt, Artificial Sequence
  Description of Artificial Sequence: Synthetic oligonucleotide
gcagauaguaaacguccaa

SEQ ID NO: 1278146 - RNA, 19 nt, Artificial Sequence
  Description of Artificial Sequence: Synthetic oligonucleotide
acauguccuccgucaaauu

SEQ ID NO: 1278147 - RNA, 19 nt, Artificial Sequence
  Description of Artificial Sequence: Synthetic oligonucleotide
agaaaccaacagacccgag

SEQ ID NO: 1278148 - RNA, 19 nt, Artificial Sequence
  Description of Artificial Sequence: Synthetic oligonucleotide
uccagguuacaagcccaaa

SEQ ID NO: 1278149 - RNA, 19 nt, Artificial Sequence
  Description of Artificial Sequence: Synthetic oligonucleotide
cagauaguaaacguccaau

SEQ ID NO: 1278150 - RNA, 19 nt, Artificial Sequence
  Description of Artificial Sequence: Synthetic oligonucleotide
gcuaggaaggccauacuua

SEQ ID NO: 1278151 - RNA, 19 nt, Artificial Sequence
  Description of Artificial Sequence: Synthetic oligonucleotide
ggguguaaagcuagucuca

SEQ ID NO: 1278152 - RNA, 19 nt, Artificial Sequence
  Description of Artificial Sequence: Synthetic oligonucleotide
ccuccgucaaauuaaauuu

SEQ ID NO: 1278153 - RNA, 19 nt, Artificial Sequence
  Description of Artificial Sequence: Synthetic oligonucleotide
guagcucuauagaguccug

SEQ ID NO: 1278154 - RNA, 19 nt, Artificial Sequence
  Description of Artificial Sequence: Synthetic oligonucleotide
ggccauacuuaguacugaa

SEQ ID NO: 1278155 - RNA, 19 nt, Artificial Sequence
  Description of Artificial Sequence: Synthetic oligonucleotide
gguguaaagcuagucucaa

SEQ ID NO: 1278156 - RNA, 19 nt, Artificial Sequence
  Description of Artificial Sequence: Synthetic oligonucleotide
ggaagccaauuaagggaag

SEQ ID NO: 1278157 - RNA, 19 nt, Artificial Sequence
  Description of Artificial Sequence: Synthetic oligonucleotide
augucaguccuagcugaau

SEQ ID NO: 1278158 - RNA, 19 nt, Artificial Sequence
  Description of Artificial Sequence: Synthetic oligonucleotide
caaaguacugggucucaau

SEQ ID NO: 1278159 - RNA, 19 nt, Artificial Sequence
  Description of Artificial Sequence: Synthetic oligonucleotide
ccagauguuguuaguagcu

SEQ ID NO: 1278160 - RNA, 19 nt, Artificial Sequence
  Description of Artificial Sequence: Synthetic oligonucleotide
gggauuccuguaagcaaug

SEQ ID NO: 1278161 - RNA, 19 nt, Artificial Sequence
  Description of Artificial Sequence: Synthetic oligonucleotide
ggcagauaguaaacgucca

SEQ ID NO: 1278162 - RNA, 19 nt, Artificial Sequence
  Description of Artificial Sequence: Synthetic oligonucleotide
ggccuugcaacaacaccug

SEQ ID NO: 1278163 - RNA, 19 nt, Artificial Sequence
  Description of Artificial Sequence: Synthetic oligonucleotide
ccaagcucaaguaggcaaa

SEQ ID NO: 1278164 - RNA, 19 nt, Artificial Sequence
  Description of Artificial Sequence: Synthetic oligonucleotide
gcagaaaauaagggcuaca

SEQ ID NO: 1278165 - RNA, 19 nt, Artificial Sequence
  Description of Artificial Sequence: Synthetic oligonucleotide
agcagccuaugcaugccaa

SEQ ID NO: 1278166 - RNA, 19 nt, Artificial Sequence
  Description of Artificial Sequence: Synthetic oligonucleotide
cucaguaauguagcucugu

SEQ ID NO: 1278167 - RNA, 19 nt, Artificial Sequence
  Description of Artificial Sequence: Synthetic oligonucleotide
auccagguuacaagcccaa

SEQ ID NO: 1278168 - RNA, 19 nt, Artificial Sequence
  Description of Artificial Sequence: Synthetic oligonucleotide
ggauuccuguaagcaauga

SEQ ID NO: 1278169 - RNA, 19 nt, Artificial Sequence
  Description of Artificial Sequence: Synthetic oligonucleotide
cuccuugcucauucauaaa

SEQ ID NO: 1278170 - RNA, 19 nt, Artificial Sequence
  Description of Artificial Sequence: Synthetic oligonucleotide
gggcuacaaaaggagggga

SEQ ID NO: 1278171 - RNA, 19 nt, Artificial Sequence
  Description of Artificial Sequence: Synthetic oligonucleotide
cacgauccugcuuggugcu

SEQ ID NO: 1278172 - RNA, 19 nt, Artificial Sequence
  Description of Artificial Sequence: Synthetic oligonucleotide
gccaauuaagggaaguguu

SEQ ID NO: 1278173 - RNA, 19 nt, Artificial Sequence
  Description of Artificial Sequence: Synthetic oligonucleotide
cuauccguuccagcucuaa

SEQ ID NO: 1278174 - RNA, 19 nt, Artificial Sequence
  Description of Artificial Sequence: Synthetic oligonucleotide
acguccaaucacagggcuu

SEQ ID NO: 1278175 - RNA, 19 nt, Artificial Sequence
  Description of Artificial Sequence: Synthetic oligonucleotide
gccauacuuaguacugaaa

SEQ ID NO: 1278176 - RNA, 19 nt, Artificial Sequence
  Description of Artificial Sequence: Synthetic oligonucleotide
acccgagaaugugcuugga

SEQ ID NO: 1278177 - RNA, 19 nt, Artificial Sequence
  Description of Artificial Sequence: Synthetic oligonucleotide
gcaaaguacugggucucaa

SEQ ID NO: 1278178 - RNA, 19 nt, Artificial Sequence
  Description of Artificial Sequence: Synthetic oligonucleotide
gggagauauugccuaucau

SEQ ID NO: 1278179 - RNA, 19 nt, Artificial Sequence
  Description of Artificial Sequence: Synthetic oligonucleotide
ccuauaaguacugcagaau

SEQ ID NO: 1278180 - RNA, 19 nt, Artificial Sequence
  Description of Artificial Sequence: Synthetic oligonucleotide
ccuaaagacuuguuaucuu

SEQ ID NO: 1278181 - RNA, 19 nt, Artificial Sequence
  Description of Artificial Sequence: Synthetic oligonucleotide
caauuccuuccuccuucgu

SEQ ID NO: 1278182 - RNA, 19 nt, Artificial Sequence
  Description of Artificial Sequence: Synthetic oligonucleotide
ggauaacuugacgaaucuu

SEQ ID NO: 1278183 - RNA, 19 nt, Artificial Sequence
  Description of Artificial Sequence: Synthetic oligonucleotide
cagccuaugcaugccaauu

SEQ ID NO: 1278184 - RNA, 19 nt, Artificial Sequence
  Description of Artificial Sequence: Synthetic oligonucleotide
caggcaaguuagaguuggu

SEQ ID NO: 1278185 - RNA, 19 nt, Artificial Sequence
  Description of Artificial Sequence: Synthetic oligonucleotide
gggaaguguugcugucaua

SEQ ID NO: 1278186 - RNA, 19 nt, Artificial Sequence
  Description of Artificial Sequence: Synthetic oligonucleotide
cggauaacuugacgaaucu

SEQ ID NO: 1278187 - RNA, 19 nt, Artificial Sequence
  Description of Artificial Sequence: Synthetic oligonucleotide
guccuccgucaaauuaaau

SEQ ID NO: 1278188 - RNA, 19 nt, Artificial Sequence
  Description of Artificial Sequence: Synthetic oligonucleotide
cgauccugcuuggugcuga

SEQ ID NO: 1278189 - RNA, 19 nt, Artificial Sequence
  Description of Artificial Sequence: Synthetic oligonucleotide
cagacccgagaaugugcuu

SEQ ID NO: 1278190 - RNA, 19 nt, Artificial Sequence
  Description of Artificial Sequence: Synthetic oligonucleotide
ccuauccguuccagcucua

SEQ ID NO: 1278191 - RNA, 19 nt, Artificial Sequence
  Description of Artificial Sequence: Synthetic oligonucleotide
gccuaucauuuaagggauu

SEQ ID NO: 1278192 - RNA, 19 nt, Artificial Sequence
  Description of Artificial Sequence: Synthetic oligonucleotide
aaaugcucuagcccuaagc

SEQ ID NO: 1278193 - RNA, 19 nt, Artificial Sequence
  Description of Artificial Sequence: Synthetic oligonucleotide
uuacauaugaguacccagg

SEQ ID NO: 1278194 - RNA, 19 nt, Artificial Sequence
  Description of Artificial Sequence: Synthetic oligonucleotide
aauaaugggcuuuguagag

SEQ ID NO: 1278195 - RNA, 19 nt, Artificial Sequence
  Description of Artificial Sequence: Synthetic oligonucleotide
ugucccuagacccuuaacg

SEQ ID NO: 1278196 - RNA, 19 nt, Artificial Sequence
  Description of Artificial Sequence: Synthetic oligonucleotide
aaaacacccaguacgaugg

SEQ ID NO: 1278197 - RNA, 19 nt, Artificial Sequence
  Description of Artificial Sequence: Synthetic oligonucleotide
acaggauucagcaaagucc

SEQ ID NO: 1278198 - RNA, 19 nt, Artificial Sequence
  Description of Artificial Sequence: Synthetic oligonucleotide
gaugcuaaaagcugggagc

SEQ ID NO: 1278199 - RNA, 19 nt, Artificial Sequence
  Description of Artificial Sequence: Synthetic oligonucleotide
uuuauuagcccagaucugg

SEQ ID NO: 1278200 - RNA, 19 nt, Artificial Sequence
  Description of Artificial Sequence: Synthetic oligonucleotide
uguaccaaguggcaaaugc

SEQ ID NO: 1278201 - RNA, 19 nt, Artificial Sequence
  Description of Artificial Sequence: Synthetic oligonucleotide
auagaugacaggguuaagc

SEQ ID NO: 1278202 - RNA, 19 nt, Artificial Sequence
  Description of Artificial Sequence: Synthetic oligonucleotide
uuuguagaggacaggacag

SEQ ID NO: 1278203 - RNA, 19 nt, Artificial Sequence
  Description of Artificial Sequence: Synthetic oligonucleotide
aaacugaacuguuuauuag

SEQ ID NO: 1278204 - RNA, 19 nt, Artificial Sequence
  Description of Artificial Sequence: Synthetic oligonucleotide
aguugaguguggcaaaggc

SEQ ID NO: 1278205 - RNA, 19 nt, Artificial Sequence
  Description of Artificial Sequence: Synthetic oligonucleotide
uuggcuaucugucaguuca

SEQ ID NO: 1278206 - RNA, 19 nt, Artificial Sequence
  Description of Artificial Sequence: Synthetic oligonucleotide
uuaggccucagauugacag

SEQ ID NO: 1278207 - RNA, 19 nt, Artificial Sequence
  Description of Artificial Sequence: Synthetic oligonucleotide
uuaacucuguuauucauga

SEQ ID NO: 1278208 - RNA, 19 nt, Artificial Sequence
  Description of Artificial Sequence: Synthetic oligonucleotide
agaugaaccagcaauuccc

SEQ ID NO: 1278209 - RNA, 19 nt, Artificial Sequence
  Description of Artificial Sequence: Synthetic oligonucleotide
agaaucagugacaucagcc

SEQ ID NO: 1278210 - RNA, 19 nt, Artificial Sequence
  Description of Artificial Sequence: Synthetic oligonucleotide
ucuguuauucaugauaaca

SEQ ID NO: 1278211 - RNA, 19 nt, Artificial Sequence
  Description of Artificial Sequence: Synthetic oligonucleotide
ugaggaccggcaauuaucg

SEQ ID NO: 1278212 - RNA, 19 nt, Artificial Sequence
  Description of Artificial Sequence: Synthetic oligonucleotide
guugaugcaauugaggaag

SEQ ID NO: 1278213 - RNA, 19 nt, Artificial Sequence
  Description of Artificial Sequence: Synthetic oligonucleotide
ucuaagagaaggaugcuaa

SEQ ID NO: 1278214 - RNA, 19 nt, Artificial Sequence
  Description of Artificial Sequence: Synthetic oligonucleotide
augauaacaugcaagagag

SEQ ID NO: 1278215 - RNA, 19 nt, Artificial Sequence
  Description of Artificial Sequence: Synthetic oligonucleotide
aagggaagguuacauauga

SEQ ID NO: 1278216 - RNA, 19 nt, Artificial Sequence
  Description of Artificial Sequence: Synthetic oligonucleotide
gauucggacauacaaugcc

SEQ ID NO: 1278217 - RNA, 19 nt, Artificial Sequence
  Description of Artificial Sequence: Synthetic oligonucleotide
aggaccggcaauuaucggc

SEQ ID NO: 1278218 - RNA, 19 nt, Artificial Sequence
  Description of Artificial Sequence: Synthetic oligonucleotide
aguagauucggacauacaa

SEQ ID NO: 1278219 - RNA, 19 nt, Artificial Sequence
  Description of Artificial Sequence: Synthetic oligonucleotide
uguuauucaugauaacaug

SEQ ID NO: 1278220 - RNA, 19 nt, Artificial Sequence
  Description of Artificial Sequence: Synthetic oligonucleotide
ugcucuagcccuaagcucc

SEQ ID NO: 1278221 - RNA, 19 nt, Artificial Sequence
  Description of Artificial Sequence: Synthetic oligonucleotide
uuucuauaucuccacagga

SEQ ID NO: 1278222 - RNA, 19 nt, Artificial Sequence
  Description of Artificial Sequence: Synthetic oligonucleotide
cuguuuaaaaggaggaggc

SEQ ID NO: 1278223 - RNA, 19 nt, Artificial Sequence
  Description of Artificial Sequence: Synthetic oligonucleotide
uacaaugccacgauagcca

SEQ ID NO: 1278224 - RNA, 19 nt, Artificial Sequence
  Description of Artificial Sequence: Synthetic oligonucleotide
accagaaucagugacauca

SEQ ID NO: 1278225 - RNA, 19 nt, Artificial Sequence
  Description of Artificial Sequence: Synthetic oligonucleotide
ugagaggagauacacuccc

SEQ ID NO: 1278226 - RNA, 19 nt, Artificial Sequence
  Description of Artificial Sequence: Synthetic oligonucleotide
gagucuaagagaaggaugc

SEQ ID NO: 1278227 - RNA, 19 nt, Artificial Sequence
  Description of Artificial Sequence: Synthetic oligonucleotide
uuucagacuacuguguugc

SEQ ID NO: 1278228 - RNA, 19 nt, Artificial Sequence
  Description of Artificial Sequence: Synthetic oligonucleotide
acaauaaguggccuaaggu

SEQ ID NO: 1278229 - RNA, 19 nt, Artificial Sequence
  Description of Artificial Sequence: Synthetic oligonucleotide
uuauuagcccagaucuggg

SEQ ID NO: 1278230 - RNA, 19 nt, Artificial Sequence
  Description of Artificial Sequence: Synthetic oligonucleotide
guuacauaugaguacccag

SEQ ID NO: 1278231 - RNA, 19 nt, Artificial Sequence
  Description of Artificial Sequence: Synthetic oligonucleotide
gaaacguaggugauguagg

SEQ ID NO: 1278232 - RNA, 19 nt, Artificial Sequence
  Description of Artificial Sequence: Synthetic oligonucleotide
aaauacaguuuguaccgca

SEQ ID NO: 1278233 - RNA, 19 nt, Artificial Sequence
  Description of Artificial Sequence: Synthetic oligonucleotide
ugguacuacaaucuguuuc

SEQ ID NO: 1278234 - RNA, 19 nt, Artificial Sequence
  Description of Artificial Sequence: Synthetic oligonucleotide
ugaguacccaggaaugucc

SEQ ID NO: 1278235 - RNA, 19 nt, Artificial Sequence
  Description of Artificial Sequence: Synthetic oligonucleotide
gacaggguuaagcagugag

SEQ ID NO: 1278236 - RNA, 19 nt, Artificial Sequence
  Description of Artificial Sequence: Synthetic oligonucleotide
agaaacguaggugauguag

SEQ ID NO: 1278237 - RNA, 19 nt, Artificial Sequence
  Description of Artificial Sequence: Synthetic oligonucleotide
caauuaucggcauggcugg

SEQ ID NO: 1278238 - RNA, 19 nt, Artificial Sequence
  Description of Artificial Sequence: Synthetic oligonucleotide
uaacaugcaagagaggugu

SEQ ID NO: 1278239 - RNA, 19 nt, Artificial Sequence
  Description of Artificial Sequence: Synthetic oligonucleotide
agagaugcgaacacgagag

SEQ ID NO: 1278240 - RNA, 19 nt, Artificial Sequence
  Description of Artificial Sequence: Synthetic oligonucleotide
gguagagucuaagagaagg

SEQ ID NO: 1278241 - RNA, 19 nt, Artificial Sequence
  Description of Artificial Sequence: Synthetic oligonucleotide
auuagcccagaucuggguc

SEQ ID NO: 1278242 - RNA, 19 nt, Artificial Sequence
  Description of Artificial Sequence: Synthetic oligonucleotide
ucauggacccuacucacug

SEQ ID NO: 1278243 - RNA, 19 nt, Artificial Sequence
  Description of Artificial Sequence: Synthetic oligonucleotide
aaguggcaaaugcucuagc

SEQ ID NO: 1278244 - RNA, 19 nt, Artificial Sequence
  Description of Artificial Sequence: Synthetic oligonucleotide
auucaugauaacaugcaag

SEQ ID NO: 1278245 - RNA, 19 nt, Artificial Sequence
  Description of Artificial Sequence: Synthetic oligonucleotide
uacauaugaguacccagga

SEQ ID NO: 1278246 - RNA, 19 nt, Artificial Sequence
  Description of Artificial Sequence: Synthetic oligonucleotide
gacuacaaaguagauucgg

SEQ ID NO: 1278247 - RNA, 19 nt, Artificial Sequence
  Description of Artificial Sequence: Synthetic oligonucleotide
ucaacagagaugcgaacac

SEQ ID NO: 1278248 - RNA, 19 nt, Artificial Sequence
  Description of Artificial Sequence: Synthetic oligonucleotide
gaagcuauaugagaggaga

SEQ ID NO: 1278249 - RNA, 19 nt, Artificial Sequence
  Description of Artificial Sequence: Synthetic oligonucleotide
gcuggaacggacuacaaag

SEQ ID NO: 1278250 - RNA, 19 nt, Artificial Sequence
  Description of Artificial Sequence: Synthetic oligonucleotide
caauaagaugacagaaaag

SEQ ID NO: 1278251 - RNA, 19 nt, Artificial Sequence
  Description of Artificial Sequence: Synthetic oligonucleotide
aggaggauaucugggaagc

SEQ ID NO: 1278252 - RNA, 19 nt, Artificial Sequence
  Description of Artificial Sequence: Synthetic oligonucleotide
gucccuagacccuuaacgg

SEQ ID NO: 1278253 - RNA, 19 nt, Artificial Sequence
  Description of Artificial Sequence: Synthetic oligonucleotide
gagaugaaccagcaauucc

SEQ ID NO: 1278254 - RNA, 19 nt, Artificial Sequence
  Description of Artificial Sequence: Synthetic oligonucleotide
uucaacagagaugcgaaca

SEQ ID NO: 1278255 - RNA, 19 nt, Artificial Sequence
  Description of Artificial Sequence: Synthetic oligonucleotide
accagcaauucccaagggg

SEQ ID NO: 1278256 - RNA, 19 nt, Artificial Sequence
  Description of Artificial Sequence: Synthetic oligonucleotide
agcaaaugaugaaaacacc

SEQ ID NO: 1278257 - RNA, 19 nt, Artificial Sequence
  Description of Artificial Sequence: Synthetic oligonucleotide
cuugcaucccaaauuuccc

SEQ ID NO: 1278258 - RNA, 19 nt, Artificial Sequence
  Description of Artificial Sequence: Synthetic oligonucleotide
auggacccuacucacuggc

SEQ ID NO: 1278259 - RNA, 19 nt, Artificial Sequence
  Description of Artificial Sequence: Synthetic oligonucleotide
uucuauaucuccacaggau

SEQ ID NO: 1278260 - RNA, 19 nt, Artificial Sequence
  Description of Artificial Sequence: Synthetic oligonucleotide
gaaacugaacuguuuauua

SEQ ID NO: 1278261 - RNA, 19 nt, Artificial Sequence
  Description of Artificial Sequence: Synthetic oligonucleotide
acccuuuguaccaaguggc

SEQ ID NO: 1278262 - RNA, 19 nt, Artificial Sequence
  Description of Artificial Sequence: Synthetic oligonucleotide
aggguuuccacaauaagug

SEQ ID NO: 1278263 - RNA, 19 nt, Artificial Sequence
  Description of Artificial Sequence: Synthetic oligonucleotide
uggcaaaugcucuagcccu

SEQ ID NO: 1278264 - RNA, 19 nt, Artificial Sequence
  Description of Artificial Sequence: Synthetic oligonucleotide
auagccaccucacaucucu

SEQ ID NO: 1278265 - RNA, 19 nt, Artificial Sequence
  Description of Artificial Sequence: Synthetic oligonucleotide
cuauguguggaagagauga

SEQ ID NO: 1278266 - RNA, 19 nt, Artificial Sequence
  Description of Artificial Sequence: Synthetic oligonucleotide
auaucugggaagcuauaug

SEQ ID NO: 1278267 - RNA, 19 nt, Artificial Sequence
  Description of Artificial Sequence: Synthetic oligonucleotide
cacauaguacuugucauag

SEQ ID NO: 1278268 - RNA, 19 nt, Artificial Sequence
  Description of Artificial Sequence: Synthetic oligonucleotide
uaucugucaguucaccccu

SEQ ID NO: 1278269 - RNA, 19 nt, Artificial Sequence
  Description of Artificial Sequence: Synthetic oligonucleotide
cacccuuuguaccaagugg

SEQ ID NO: 1278270 - RNA, 19 nt, Artificial Sequence
  Description of Artificial Sequence: Synthetic oligonucleotide
ugggaagcuauaugagagg

SEQ ID NO: 1278271 - RNA, 19 nt, Artificial Sequence
  Description of Artificial Sequence: Synthetic oligonucleotide
ugauaacaugcaagagagg

SEQ ID NO: 1278272 - RNA, 19 nt, Artificial Sequence
  Description of Artificial Sequence: Synthetic oligonucleotide
cacgauagccaauaagaug

SEQ ID NO: 1278273 - RNA, 19 nt, Artificial Sequence
  Description of Artificial Sequence: Synthetic oligonucleotide
cuagcccuaagcuccagcc

SEQ ID NO: 1278274 - RNA, 19 nt, Artificial Sequence
  Description of Artificial Sequence: Synthetic oligonucleotide
cauacaaugccacgauagc

SEQ ID NO: 1278275 - RNA, 19 nt, Artificial Sequence
  Description of Artificial Sequence: Synthetic oligonucleotide
cuauaucuccacaggauuc

SEQ ID NO: 1278276 - RNA, 19 nt, Artificial Sequence
  Description of Artificial Sequence: Synthetic oligonucleotide
augucauggacccuacuca

SEQ ID NO: 1278277 - RNA, 19 nt, Artificial Sequence
  Description of Artificial Sequence: Synthetic oligonucleotide
auuuaggccucagauugac

SEQ ID NO: 1278278 - RNA, 19 nt, Artificial Sequence
  Description of Artificial Sequence: Synthetic oligonucleotide
ucaugauaacaugcaagag

SEQ ID NO: 1278279 - RNA, 19 nt, Artificial Sequence
  Description of Artificial Sequence: Synthetic oligonucleotide
uggccuaagguugucagcc

SEQ ID NO: 1278280 - RNA, 19 nt, Artificial Sequence
  Description of Artificial Sequence: Synthetic oligonucleotide
gcaauuaucggcauggcug

SEQ ID NO: 1278281 - RNA, 19 nt, Artificial Sequence
  Description of Artificial Sequence: Synthetic oligonucleotide
guaggcauaugcaagcccc

SEQ ID NO: 1278282 - RNA, 19 nt, Artificial Sequence
  Description of Artificial Sequence: Synthetic oligonucleotide
gaaggucccggcuacacca

SEQ ID NO: 1278283 - RNA, 19 nt, Artificial Sequence
  Description of Artificial Sequence: Synthetic oligonucleotide
aaaagauggugaccacaca

SEQ ID NO: 1278284 - RNA, 19 nt, Artificial Sequence
  Description of Artificial Sequence: Synthetic oligonucleotide
uacccaggaauguccauag

SEQ ID NO: 1278285 - RNA, 19 nt, Artificial Sequence
  Description of Artificial Sequence: Synthetic oligonucleotide
ugccacgauagccaauaag

SEQ ID NO: 1278286 - RNA, 19 nt, Artificial Sequence
  Description of Artificial Sequence: Synthetic oligonucleotide
guuccacuaagccuguggc

SEQ ID NO: 1278287 - RNA, 19 nt, Artificial Sequence
  Description of Artificial Sequence: Synthetic oligonucleotide
uuggccaacugaccuauga

SEQ ID NO: 1278288 - RNA, 19 nt, Artificial Sequence
  Description of Artificial Sequence: Synthetic oligonucleotide
acaggguuuccacaauaag

SEQ ID NO: 1278289 - RNA, 19 nt, Artificial Sequence
  Description of Artificial Sequence: Synthetic oligonucleotide
aaugccacgauagccaaua

SEQ ID NO: 1278290 - RNA, 19 nt, Artificial Sequence
  Description of Artificial Sequence: Synthetic oligonucleotide
auaaugggcuuuguagagg

SEQ ID NO: 1278291 - RNA, 19 nt, Artificial Sequence
  Description of Artificial Sequence: Synthetic oligonucleotide
cugaacuguuuauuagccc

SEQ ID NO: 1278292 - RNA, 19 nt, Artificial Sequence
  Description of Artificial Sequence: Synthetic oligonucleotide
ugagggacacgugagguca

SEQ ID NO: 1278293 - RNA, 19 nt, Artificial Sequence
  Description of Artificial Sequence: Synthetic oligonucleotide
ugagcuguggucaguucca

SEQ ID NO: 1278294 - RNA, 19 nt, Artificial Sequence
  Description of Artificial Sequence: Synthetic oligonucleotide
gagcaucaacauucgacag

SEQ ID NO: 1278295 - RNA, 19 nt, Artificial Sequence
  Description of Artificial Sequence: Synthetic oligonucleotide
gaacggacuacaaaguaga

SEQ ID NO: 1278296 - RNA, 19 nt, Artificial Sequence
  Description of Artificial Sequence: Synthetic oligonucleotide
agugaguugaguguggcaa

SEQ ID NO: 1278297 - RNA, 19 nt, Artificial Sequence
  Description of Artificial Sequence: Synthetic oligonucleotide
aaccagcaauucccaaggg

SEQ ID NO: 1278298 - RNA, 19 nt, Artificial Sequence
  Description of Artificial Sequence: Synthetic oligonucleotide
gagaggcccuguuuaaaag

SEQ ID NO: 1278299 - RNA, 19 nt, Artificial Sequence
  Description of Artificial Sequence: Synthetic oligonucleotide
gguccagacaauuccagcc

SEQ ID NO: 1278300 - RNA, 19 nt, Artificial Sequence
  Description of Artificial Sequence: Synthetic oligonucleotide
uguggauuuaggccucaga

SEQ ID NO: 1278301 - RNA, 19 nt, Artificial Sequence
  Description of Artificial Sequence: Synthetic oligonucleotide
uuagcccagaucugggucu

SEQ ID NO: 1278302 - RNA, 19 nt, Artificial Sequence
  Description of Artificial Sequence: Synthetic oligonucleotide
ggaugcuaaaagcugggag

SEQ ID NO: 1278303 - RNA, 19 nt, Artificial Sequence
  Description of Artificial Sequence: Synthetic oligonucleotide
cacacagagcacauaguac

SEQ ID NO: 1278304 - RNA, 19 nt, Artificial Sequence
  Description of Artificial Sequence: Synthetic oligonucleotide
accacguauagaugacagg

SEQ ID NO: 1278305 - RNA, 19 nt, Artificial Sequence
  Description of Artificial Sequence: Synthetic oligonucleotide
ccagcaauucccaaggggc

SEQ ID NO: 1278306 - RNA, 19 nt, Artificial Sequence
  Description of Artificial Sequence: Synthetic oligonucleotide
ugcaauugaggaagcugug

SEQ ID NO: 1278307 - RNA, 19 nt, Artificial Sequence
  Description of Artificial Sequence: Synthetic oligonucleotide
ugucauggacccuacucac

SEQ ID NO: 1278308 - RNA, 19 nt, Artificial Sequence
  Description of Artificial Sequence: Synthetic oligonucleotide
uccuuucagacuacugugu

SEQ ID NO: 1278309 - RNA, 19 nt, Artificial Sequence
  Description of Artificial Sequence: Synthetic oligonucleotide
agacccuuaacgguccucg

SEQ ID NO: 1278310 - RNA, 19 nt, Artificial Sequence
  Description of Artificial Sequence: Synthetic oligonucleotide
agagucuaagagaaggaug

SEQ ID NO: 1278311 - RNA, 19 nt, Artificial Sequence
  Description of Artificial Sequence: Synthetic oligonucleotide
caaucuguuucagucagug

SEQ ID NO: 1278312 - RNA, 19 nt, Artificial Sequence
  Description of Artificial Sequence: Synthetic oligonucleotide
gcaagagagguguuugugg

SEQ ID NO: 1278313 - RNA, 19 nt, Artificial Sequence
  Description of Artificial Sequence: Synthetic oligonucleotide
auaugaguacccaggaaug

SEQ ID NO: 1278314 - RNA, 19 nt, Artificial Sequence
  Description of Artificial Sequence: Synthetic oligonucleotide
ccuguuuaaaaggaggagg

SEQ ID NO: 1278315 - RNA, 19 nt, Artificial Sequence
  Description of Artificial Sequence: Synthetic oligonucleotide
uuaucggcauggcuggaac

SEQ ID NO: 1278316 - RNA, 19 nt, Artificial Sequence
  Description of Artificial Sequence: Synthetic oligonucleotide
cuuucagacuacuguguug

SEQ ID NO: 1278317 - RNA, 19 nt, Artificial Sequence
  Description of Artificial Sequence: Synthetic oligonucleotide
aagaggcccgaugagcauc

SEQ ID NO: 1278318 - RNA, 19 nt, Artificial Sequence
  Description of Artificial Sequence: Synthetic oligonucleotide
uguuuaaaaggaggaggca

SEQ ID NO: 1278319 - RNA, 19 nt, Artificial Sequence
  Description of Artificial Sequence: Synthetic oligonucleotide
uggcuuggcuaucugucag

SEQ ID NO: 1278320 - RNA, 19 nt, Artificial Sequence
  Description of Artificial Sequence: Synthetic oligonucleotide
augagaggagauacacucc

SEQ ID NO: 1278321 - RNA, 19 nt, Artificial Sequence
  Description of Artificial Sequence: Synthetic oligonucleotide
ucagacuacuguguugccc

SEQ ID NO: 1278322 - RNA, 19 nt, Artificial Sequence
  Description of Artificial Sequence: Synthetic oligonucleotide
uggaacggacuacaaagua

SEQ ID NO: 1278323 - RNA, 19 nt, Artificial Sequence
  Description of Artificial Sequence: Synthetic oligonucleotide
agucaugguacuacaaucu

SEQ ID NO: 1278324 - RNA, 19 nt, Artificial Sequence
  Description of Artificial Sequence: Synthetic oligonucleotide
uggugcaccccugugauac

SEQ ID NO: 1278325 - RNA, 19 nt, Artificial Sequence
  Description of Artificial Sequence: Synthetic oligonucleotide
accgcauuggacuuucuau

SEQ ID NO: 1278326 - RNA, 19 nt, Artificial Sequence
  Description of Artificial Sequence: Synthetic oligonucleotide
uaaauacaguuuguaccgc

SEQ ID NO: 1278327 - RNA, 19 nt, Artificial Sequence
  Description of Artificial Sequence: Synthetic oligonucleotide
acucuguuauucaugauaa

SEQ ID NO: 1278328 - RNA, 19 nt, Artificial Sequence
  Description of Artificial Sequence: Synthetic oligonucleotide
ucuacggccugucacucuc

SEQ ID NO: 1278329 - RNA, 19 nt, Artificial Sequence
  Description of Artificial Sequence: Synthetic oligonucleotide
uugaugcaauugaggaagc

SEQ ID NO: 1278330 - RNA, 19 nt, Artificial Sequence
  Description of Artificial Sequence: Synthetic oligonucleotide
gcuauaugagaggagauac

SEQ ID NO: 1278331 - RNA, 19 nt, Artificial Sequence
  Description of Artificial Sequence: Synthetic oligonucleotide
caugcaagagagguguuug

SEQ ID NO: 1278332 - RNA, 19 nt, Artificial Sequence
  Description of Artificial Sequence: Synthetic oligonucleotide
uacaccacguauagaugac

SEQ ID NO: 1278333 - RNA, 19 nt, Artificial Sequence
  Description of Artificial Sequence: Synthetic oligonucleotide
ucuagcccuaagcuccagc

SEQ ID NO: 1278334 - RNA, 19 nt, Artificial Sequence
  Description of Artificial Sequence: Synthetic oligonucleotide
cauuggacuuucuauaucu

SEQ ID NO: 1278335 - RNA, 19 nt, Artificial Sequence
  Description of Artificial Sequence: Synthetic oligonucleotide
uuucaacagagaugcgaac

SEQ ID NO: 1278336 - RNA, 19 nt, Artificial Sequence
  Description of Artificial Sequence: Synthetic oligonucleotide
gaugacaggguuaagcagu

SEQ ID NO: 1278337 - RNA, 19 nt, Artificial Sequence
  Description of Artificial Sequence: Synthetic oligonucleotide
gugaacuggagcugcggag

SEQ ID NO: 1278338 - RNA, 19 nt, Artificial Sequence
  Description of Artificial Sequence: Synthetic oligonucleotide
agaugcgaacacgagaggu

SEQ ID NO: 1278339 - RNA, 19 nt, Artificial Sequence
  Description of Artificial Sequence: Synthetic oligonucleotide
ugguccagacaauuccagc

SEQ ID NO: 1278340 - RNA, 19 nt, Artificial Sequence
  Description of Artificial Sequence: Synthetic oligonucleotide
agacaauuccagcccagga

SEQ ID NO: 1278341 - RNA, 19 nt, Artificial Sequence
  Description of Artificial Sequence: Synthetic oligonucleotide
gagaugcgaacacgagagg

SEQ ID NO: 1278342 - RNA, 19 nt, Artificial Sequence
  Description of Artificial Sequence: Synthetic oligonucleotide
uacuacaaucuguuucagu

SEQ ID NO: 1278343 - RNA, 19 nt, Artificial Sequence
  Description of Artificial Sequence: Synthetic oligonucleotide
auaacaugcaagagaggug

SEQ ID NO: 1278344 - RNA, 19 nt, Artificial Sequence
  Description of Artificial Sequence: Synthetic oligonucleotide
cagcaauucccaaggggcc

SEQ ID NO: 1278345 - RNA, 19 nt, Artificial Sequence
  Description of Artificial Sequence: Synthetic oligonucleotide
auguccauagccaccucac

SEQ ID NO: 1278346 - RNA, 19 nt, Artificial Sequence
  Description of Artificial Sequence: Synthetic oligonucleotide
cugggacaugucauggacc

SEQ ID NO: 1278347 - RNA, 19 nt, Artificial Sequence
  Description of Artificial Sequence: Synthetic oligonucleotide
ggcacacagacauauauaa

SEQ ID NO: 1278348 - RNA, 19 nt, Artificial Sequence
  Description of Artificial Sequence: Synthetic oligonucleotide
cauaugaguacccaggaau

SEQ ID NO: 1278349 - RNA, 19 nt, Artificial Sequence
  Description of Artificial Sequence: Synthetic oligonucleotide
acuacaaaguagauucgga

SEQ ID NO: 1278350 - RNA, 19 nt, Artificial Sequence
  Description of Artificial Sequence: Synthetic oligonucleotide
aguacgauggugacugucu

SEQ ID NO: 1278351 - RNA, 19 nt, Artificial Sequence
  Description of Artificial Sequence: Synthetic oligonucleotide
uacgauggugacugucuug

SEQ ID NO: 1278352 - RNA, 19 nt, Artificial Sequence
  Description of Artificial Sequence: Synthetic oligonucleotide
ggaacggacuacaaaguag

SEQ ID NO: 1278353 - RNA, 19 nt, Artificial Sequence
  Description of Artificial Sequence: Synthetic oligonucleotide
guauagaugacaggguuaa

SEQ ID NO: 1278354 - RNA, 19 nt, Artificial Sequence
  Description of Artificial Sequence: Synthetic oligonucleotide
uuccacuaagccuguggca

SEQ ID NO: 1278355 - RNA, 19 nt, Artificial Sequence
  Description of Artificial Sequence: Synthetic oligonucleotide
ucccuagacccuuaacggu

SEQ ID NO: 1278356 - RNA, 19 nt, Artificial Sequence
  Description of Artificial Sequence: Synthetic oligonucleotide
aggguuaagcagugaguug

SEQ ID NO: 1278357 - RNA, 19 nt, Artificial Sequence
  Description of Artificial Sequence: Synthetic oligonucleotide
caacagagaugcgaacacg

SEQ ID NO: 1278358 - RNA, 19 nt, Artificial Sequence
  Description of Artificial Sequence: Synthetic oligonucleotide
agguuacauaugaguaccc

SEQ ID NO: 1278359 - RNA, 19 nt, Artificial Sequence
  Description of Artificial Sequence: Synthetic oligonucleotide
acuguuuauuagcccagau

SEQ ID NO: 1278360 - RNA, 19 nt, Artificial Sequence
  Description of Artificial Sequence: Synthetic oligonucleotide
cuguuauucaugauaacau

SEQ ID NO: 1278361 - RNA, 19 nt, Artificial Sequence
  Description of Artificial Sequence: Synthetic oligonucleotide
uguccauagccaccucaca

SEQ ID NO: 1278362 - RNA, 19 nt, Artificial Sequence
  Description of Artificial Sequence: Synthetic oligonucleotide
agcacaaggaggauaucug

SEQ ID NO: 1278363 - RNA, 19 nt, Artificial Sequence
  Description of Artificial Sequence: Synthetic oligonucleotide
cauagagaggcccuguuua

SEQ ID NO: 1278364 - RNA, 19 nt, Artificial Sequence
  Description of Artificial Sequence: Synthetic oligonucleotide
gaugcgaacacgagagguc

SEQ ID NO: 1278365 - RNA, 19 nt, Artificial Sequence
  Description of Artificial Sequence: Synthetic oligonucleotide
gaguugaguguggcaaagg

SEQ ID NO: 1278366 - RNA, 19 nt, Artificial Sequence
  Description of Artificial Sequence: Synthetic oligonucleotide
cuauaugagaggagauaca

SEQ ID NO: 1278367 - RNA, 19 nt, Artificial Sequence
  Description of Artificial Sequence: Synthetic oligonucleotide
accucuacggccugucacu

SEQ ID NO: 1278368 - RNA, 19 nt, Artificial Sequence
  Description of Artificial Sequence: Synthetic oligonucleotide
cacuguaggggccucagca

SEQ ID NO: 1278369 - RNA, 19 nt, Artificial Sequence
  Description of Artificial Sequence: Synthetic oligonucleotide
acauaugaguacccaggaa

SEQ ID NO: 1278370 - RNA, 19 nt, Artificial Sequence
  Description of Artificial Sequence: Synthetic oligonucleotide
gccacgauagccaauaaga

SEQ ID NO: 1278371 - RNA, 19 nt, Artificial Sequence
  Description of Artificial Sequence: Synthetic oligonucleotide
cauggacccuacucacugg

SEQ ID NO: 1278372 - RNA, 19 nt, Artificial Sequence
  Description of Artificial Sequence: Synthetic oligonucleotide
uguuuguggugcaccccug

SEQ ID NO: 1278373 - RNA, 19 nt, Artificial Sequence
  Description of Artificial Sequence: Synthetic oligonucleotide
caaguggcaaaugcucuag

SEQ ID NO: 1278374 - RNA, 19 nt, Artificial Sequence
  Description of Artificial Sequence: Synthetic oligonucleotide
gaacacgagaggucagaca

SEQ ID NO: 1278375 - RNA, 19 nt, Artificial Sequence
  Description of Artificial Sequence: Synthetic oligonucleotide
auagagaggcccuguuuaa

SEQ ID NO: 1278376 - RNA, 19 nt, Artificial Sequence
  Description of Artificial Sequence: Synthetic oligonucleotide
gcuaucugucaguucaccc

SEQ ID NO: 1278377 - RNA, 19 nt, Artificial Sequence
  Description of Artificial Sequence: Synthetic oligonucleotide
cucgcagucaugguacuac

SEQ ID NO: 1278378 - RNA, 19 nt, Artificial Sequence
  Description of Artificial Sequence: Synthetic oligonucleotide
ggacgggacagguagaguc

SEQ ID NO: 1278379 - RNA, 19 nt, Artificial Sequence
  Description of Artificial Sequence: Synthetic oligonucleotide
gaggaccggcaauuaucgg

SEQ ID NO: 1278380 - RNA, 19 nt, Artificial Sequence
  Description of Artificial Sequence: Synthetic oligonucleotide
uaggcauaugcaagccccu

SEQ ID NO: 1278381 - RNA, 19 nt, Artificial Sequence
  Description of Artificial Sequence: Synthetic oligonucleotide
accuaugagcuguggucag

SEQ ID NO: 1278382 - RNA, 19 nt, Artificial Sequence
  Description of Artificial Sequence: Synthetic oligonucleotide
aacuggcuccuugcauccc

SEQ ID NO: 1278383 - RNA, 19 nt, Artificial Sequence
  Description of Artificial Sequence: Synthetic oligonucleotide
gacaauuccagcccaggau

SEQ ID NO: 1278384 - RNA, 19 nt, Artificial Sequence
  Description of Artificial Sequence: Synthetic oligonucleotide
gauugacagggaggaagcc

SEQ ID NO: 1278385 - RNA, 19 nt, Artificial Sequence
  Description of Artificial Sequence: Synthetic oligonucleotide
caauaaguggccuaagguu

SEQ ID NO: 1278386 - RNA, 19 nt, Artificial Sequence
  Description of Artificial Sequence: Synthetic oligonucleotide
cuuaacgguccucgcaguc

SEQ ID NO: 1278387 - RNA, 19 nt, Artificial Sequence
  Description of Artificial Sequence: Synthetic oligonucleotide
ugcgaacacgagaggucag

SEQ ID NO: 1278388 - RNA, 19 nt, Artificial Sequence
  Description of Artificial Sequence: Synthetic oligonucleotide
uggucccaccucuacggcc

SEQ ID NO: 1278389 - RNA, 19 nt, Artificial Sequence
  Description of Artificial Sequence: Synthetic oligonucleotide
ccaauaagaugacagaaaa

SEQ ID NO: 1278390 - RNA, 19 nt, Artificial Sequence
  Description of Artificial Sequence: Synthetic oligonucleotide
acccuacucacuggcacac

SEQ ID NO: 1278391 - RNA, 19 nt, Artificial Sequence
  Description of Artificial Sequence: Synthetic oligonucleotide
gcaauugaggaagcugugg

SEQ ID NO: 1278392 - RNA, 19 nt, Artificial Sequence
  Description of Artificial Sequence: Synthetic oligonucleotide
ggcccuguuuaaaaggagg

SEQ ID NO: 1278393 - RNA, 19 nt, Artificial Sequence
  Description of Artificial Sequence: Synthetic oligonucleotide
augcgaacacgagagguca

SEQ ID NO: 1278394 - RNA, 19 nt, Artificial Sequence
  Description of Artificial Sequence: Synthetic oligonucleotide
cagacaauuccagcccagg

SEQ ID NO: 1278395 - RNA, 19 nt, Artificial Sequence
  Description of Artificial Sequence: Synthetic oligonucleotide
gaugagcaucaacauucga

SEQ ID NO: 1278396 - RNA, 19 nt, Artificial Sequence
  Description of Artificial Sequence: Synthetic oligonucleotide
ggguuaagcagugaguuga

SEQ ID NO: 1278397 - RNA, 19 nt, Artificial Sequence
  Description of Artificial Sequence: Synthetic oligonucleotide
uucagacuacuguguugcc

SEQ ID NO: 1278398 - RNA, 19 nt, Artificial Sequence
  Description of Artificial Sequence: Synthetic oligonucleotide
cucuguuauucaugauaac

SEQ ID NO: 1278399 - RNA, 19 nt, Artificial Sequence
  Description of Artificial Sequence: Synthetic oligonucleotide
gcuaaaagcugggagccag

SEQ ID NO: 1278400 - RNA, 19 nt, Artificial Sequence
  Description of Artificial Sequence: Synthetic oligonucleotide
agccggugacccguggucc

SEQ ID NO: 1278401 - RNA, 19 nt, Artificial Sequence
  Description of Artificial Sequence: Synthetic oligonucleotide
ugaugcaauugaggaagcu

SEQ ID NO: 1278402 - RNA, 19 nt, Artificial Sequence
  Description of Artificial Sequence: Synthetic oligonucleotide
acccuuaacgguccucgca

SEQ ID NO: 1278403 - RNA, 19 nt, Artificial Sequence
  Description of Artificial Sequence: Synthetic oligonucleotide
acaggauacugacacccuu

SEQ ID NO: 1278404 - RNA, 19 nt, Artificial Sequence
  Description of Artificial Sequence: Synthetic oligonucleotide
uguaccgcauuggacuuuc

SEQ ID NO: 1278405 - RNA, 19 nt, Artificial Sequence
  Description of Artificial Sequence: Synthetic oligonucleotide
aaacacccaguacgauggu

SEQ ID NO: 1278406 - RNA, 19 nt, Artificial Sequence
  Description of Artificial Sequence: Synthetic oligonucleotide
ugacacccuuuguaccaag

SEQ ID NO: 1278407 - RNA, 19 nt, Artificial Sequence
  Description of Artificial Sequence: Synthetic oligonucleotide
augcaagagagguguuugu

SEQ ID NO: 1278408 - RNA, 19 nt, Artificial Sequence
  Description of Artificial Sequence: Synthetic oligonucleotide
agcaccucccuccgaaggu

SEQ ID NO: 1278409 - RNA, 19 nt, Artificial Sequence
  Description of Artificial Sequence: Synthetic oligonucleotide
acgugaggucaccuggucu

SEQ ID NO: 1278410 - RNA, 19 nt, Artificial Sequence
  Description of Artificial Sequence: Synthetic oligonucleotide
ucgcagucaugguacuaca

SEQ ID NO: 1278411 - RNA, 19 nt, Artificial Sequence
  Description of Artificial Sequence: Synthetic oligonucleotide
uaccgcauuggacuuucua

SEQ ID NO: 1278412 - RNA, 19 nt, Artificial Sequence
  Description of Artificial Sequence: Synthetic oligonucleotide
aggauaucugggaagcuau

SEQ ID NO: 1278413 - RNA, 19 nt, Artificial Sequence
  Description of Artificial Sequence: Synthetic oligonucleotide
cagcaccucccuccgaagg

SEQ ID NO: 1278414 - RNA, 19 nt, Artificial Sequence
  Description of Artificial Sequence: Synthetic oligonucleotide
agcuauaugagaggagaua

SEQ ID NO: 1278415 - RNA, 19 nt, Artificial Sequence
  Description of Artificial Sequence: Synthetic oligonucleotide
agacuacuguguugcccuc

SEQ ID NO: 1278416 - RNA, 19 nt, Artificial Sequence
  Description of Artificial Sequence: Synthetic oligonucleotide
auaaguggccuaagguugu

SEQ ID NO: 1278417 - RNA, 19 nt, Artificial Sequence
  Description of Artificial Sequence: Synthetic oligonucleotide
uggacccuacucacuggca

SEQ ID NO: 1278418 - RNA, 19 nt, Artificial Sequence
  Description of Artificial Sequence: Synthetic oligonucleotide
ggcacugagggacacguga

SEQ ID NO: 1278419 - RNA, 19 nt, Artificial Sequence
  Description of Artificial Sequence: Synthetic oligonucleotide
acacgagaggucagacagc

SEQ ID NO: 1278420 - RNA, 19 nt, Artificial Sequence
  Description of Artificial Sequence: Synthetic oligonucleotide
caccucuacggccugucac

SEQ ID NO: 1278421 - RNA, 19 nt, Artificial Sequence
  Description of Artificial Sequence: Synthetic oligonucleotide
uccuugcaucccaaauuuc

SEQ ID NO: 1278422 - RNA, 19 nt, Artificial Sequence
  Description of Artificial Sequence: Synthetic oligonucleotide
ggcuacaccacguauagau

SEQ ID NO: 1278423 - RNA, 19 nt, Artificial Sequence
  Description of Artificial Sequence: Synthetic oligonucleotide
acaggguuaagcagugagu

SEQ ID NO: 1278424 - RNA, 19 nt, Artificial Sequence
  Description of Artificial Sequence: Synthetic oligonucleotide
ugugucccuagacccuuaa

SEQ ID NO: 1278425 - RNA, 19 nt, Artificial Sequence
  Description of Artificial Sequence: Synthetic oligonucleotide
gacccuacucacuggcaca

SEQ ID NO: 1278426 - RNA, 19 nt, Artificial Sequence
  Description of Artificial Sequence: Synthetic oligonucleotide
aguucaccccuuccuuuca

SEQ ID NO: 1278427 - RNA, 19 nt, Artificial Sequence
  Description of Artificial Sequence: Synthetic oligonucleotide
acugaccuaugagcugugg

SEQ ID NO: 1278428 - RNA, 19 nt, Artificial Sequence
  Description of Artificial Sequence: Synthetic oligonucleotide
gaggauaucugggaagcua

SEQ ID NO: 1278429 - RNA, 19 nt, Artificial Sequence
  Description of Artificial Sequence: Synthetic oligonucleotide
caagagagguguuuguggu

SEQ ID NO: 1278430 - RNA, 19 nt, Artificial Sequence
  Description of Artificial Sequence: Synthetic oligonucleotide
guggccuaagguugucagc

SEQ ID NO: 1278431 - RNA, 19 nt, Artificial Sequence
  Description of Artificial Sequence: Synthetic oligonucleotide
guucaccccuuccuuucag

SEQ ID NO: 1278432 - RNA, 19 nt, Artificial Sequence
  Description of Artificial Sequence: Synthetic oligonucleotide
ugucugaggaccggcaauu

SEQ ID NO: 1278433 - RNA, 19 nt, Artificial Sequence
  Description of Artificial Sequence: Synthetic oligonucleotide
cagacuacuguguugcccu

SEQ ID NO: 1278434 - RNA, 19 nt, Artificial Sequence
  Description of Artificial Sequence: Synthetic oligonucleotide
cuuggcuaucugucaguuc

SEQ ID NO: 1278435 - RNA, 19 nt, Artificial Sequence
  Description of Artificial Sequence: Synthetic oligonucleotide
caguuuguaccgcauugga

SEQ ID NO: 1278436 - RNA, 19 nt, Artificial Sequence
  Description of Artificial Sequence: Synthetic oligonucleotide
gacuacuguguugcccucc

SEQ ID NO: 1278437 - RNA, 19 nt, Artificial Sequence
  Description of Artificial Sequence: Synthetic oligonucleotide
accggcaauuaucggcaug

SEQ ID NO: 1278438 - RNA, 19 nt, Artificial Sequence
  Description of Artificial Sequence: Synthetic oligonucleotide
gauaucugggaagcuauau

SEQ ID NO: 1278439 - RNA, 19 nt, Artificial Sequence
  Description of Artificial Sequence: Synthetic oligonucleotide
aauuaucggcauggcugga

SEQ ID NO: 1278440 - RNA, 19 nt, Artificial Sequence
  Description of Artificial Sequence: Synthetic oligonucleotide
agggacacgugaggucacc

SEQ ID NO: 1278441 - RNA, 19 nt, Artificial Sequence
  Description of Artificial Sequence: Synthetic oligonucleotide
gacccuuaacgguccucgc

SEQ ID NO: 1278442 - RNA, 19 nt, Artificial Sequence
  Description of Artificial Sequence: Synthetic oligonucleotide
cacgagaggucagacagca

SEQ ID NO: 1278443 - RNA, 19 nt, Artificial Sequence
  Description of Artificial Sequence: Synthetic oligonucleotide
ccuacucacuggcacacag

SEQ ID NO: 1278444 - RNA, 19 nt, Artificial Sequence
  Description of Artificial Sequence: Synthetic oligonucleotide
aggcauaugcaagccccuc

SEQ ID NO: 1278445 - RNA, 19 nt, Artificial Sequence
  Description of Artificial Sequence: Synthetic oligonucleotide
ggacuacaaaguagauucg

SEQ ID NO: 1278446 - RNA, 19 nt, Artificial Sequence
  Description of Artificial Sequence: Synthetic oligonucleotide
ggcuuuguagaggacagga

SEQ ID NO: 1278447 - RNA, 19 nt, Artificial Sequence
  Description of Artificial Sequence: Synthetic oligonucleotide
uaggugauguaggcauaug

SEQ ID NO: 1278448 - RNA, 19 nt, Artificial Sequence
  Description of Artificial Sequence: Synthetic oligonucleotide
cccuuaacgguccucgcag

SEQ ID NO: 1278449 - RNA, 19 nt, Artificial Sequence
  Description of Artificial Sequence: Synthetic oligonucleotide
ccugccgacagcacuguag

SEQ ID NO: 1278450 - RNA, 19 nt, Artificial Sequence
  Description of Artificial Sequence: Synthetic oligonucleotide
ggaagcuauaugagaggag

SEQ ID NO: 1278451 - RNA, 19 nt, Artificial Sequence
  Description of Artificial Sequence: Synthetic oligonucleotide
cguggucccaccucuacgg

SEQ ID NO: 1278452 - RNA, 19 nt, Artificial Sequence
  Description of Artificial Sequence: Synthetic oligonucleotide
auuaucggcauggcuggaa

SEQ ID NO: 1278453 - RNA, 19 nt, Artificial Sequence
  Description of Artificial Sequence: Synthetic oligonucleotide
ggacccuacucacuggcac

SEQ ID NO: 1278454 - RNA, 19 nt, Artificial Sequence
  Description of Artificial Sequence: Synthetic oligonucleotide
gggaagcuauaugagagga

SEQ ID NO: 1278455 - RNA, 19 nt, Artificial Sequence
  Description of Artificial Sequence: Synthetic oligonucleotide
aacggacuacaaaguagau

SEQ ID NO: 1278456 - RNA, 19 nt, Artificial Sequence
  Description of Artificial Sequence: Synthetic oligonucleotide
ugacccguggucccaccuc

SEQ ID NO: 1278457 - RNA, 19 nt, Artificial Sequence
  Description of Artificial Sequence: Synthetic oligonucleotide
gguuacauaugaguaccca

SEQ ID NO: 1278458 - RNA, 19 nt, Artificial Sequence
  Description of Artificial Sequence: Synthetic oligonucleotide
ccuagacccuuaacggucc

SEQ ID NO: 1278459 - RNA, 19 nt, Artificial Sequence
  Description of Artificial Sequence: Synthetic oligonucleotide
guagauucggacauacaau

SEQ ID NO: 1278460 - RNA, 19 nt, Artificial Sequence
  Description of Artificial Sequence: Synthetic oligonucleotide
cugucuugagcagggccag

SEQ ID NO: 1278461 - RNA, 19 nt, Artificial Sequence
  Description of Artificial Sequence: Synthetic oligonucleotide
gcccggacgggacagguag

SEQ ID NO: 1278462 - RNA, 19 nt, Artificial Sequence
  Description of Artificial Sequence: Synthetic oligonucleotide
gcugggagccagcaaauga

SEQ ID NO: 1278463 - RNA, 19 nt, Artificial Sequence
  Description of Artificial Sequence: Synthetic oligonucleotide
gucuaagagaaggaugcua

SEQ ID NO: 1278464 - RNA, 19 nt, Artificial Sequence
  Description of Artificial Sequence: Synthetic oligonucleotide
gagccggugacccgugguc

SEQ ID NO: 1278465 - RNA, 19 nt, Artificial Sequence
  Description of Artificial Sequence: Synthetic oligonucleotide
acaugcaagagagguguuu

SEQ ID NO: 1278466 - RNA, 19 nt, Artificial Sequence
  Description of Artificial Sequence: Synthetic oligonucleotide
guguuuguggugcaccccu

SEQ ID NO: 1278467 - RNA, 19 nt, Artificial Sequence
  Description of Artificial Sequence: Synthetic oligonucleotide
ggucaguuccacuaagccu

SEQ ID NO: 1278468 - RNA, 19 nt, Artificial Sequence
  Description of Artificial Sequence: Synthetic oligonucleotide
cccuagacccuuaacgguc

SEQ ID NO: 1278469 - RNA, 19 nt, Artificial Sequence
  Description of Artificial Sequence: Synthetic oligonucleotide
cuacucacuggcacacaga

SEQ ID NO: 1278470 - RNA, 19 nt, Artificial Sequence
  Description of Artificial Sequence: Synthetic oligonucleotide
gggccagugucugaggacc

SEQ ID NO: 1278471 - RNA, 19 nt, Artificial Sequence
  Description of Artificial Sequence: Synthetic oligonucleotide
cuccgaaggucccggcuac

SEQ ID NO: 1278472 - RNA, 19 nt, Artificial Sequence
  Description of Artificial Sequence: Synthetic oligonucleotide
gcaagagaaacugaacugu

SEQ ID NO: 1278473 - RNA, 19 nt, Artificial Sequence
  Description of Artificial Sequence: Synthetic oligonucleotide
ccggcuacaccacguauag

SEQ ID NO: 1278474 - RNA, 19 nt, Artificial Sequence
  Description of Artificial Sequence: Synthetic oligonucleotide
caguggagcaggccuccag

SEQ ID NO: 1278475 - RNA, 19 nt, Artificial Sequence
  Description of Artificial Sequence: Synthetic oligonucleotide
gagaggagauacacuccca

SEQ ID NO: 1278476 - RNA, 19 nt, Artificial Sequence
  Description of Artificial Sequence: Synthetic oligonucleotide
ucccggcuacaccacguau

SEQ ID NO: 1278477 - RNA, 19 nt, Artificial Sequence
  Description of Artificial Sequence: Synthetic oligonucleotide
aacugaccuaugagcugug

SEQ ID NO: 1278478 - RNA, 19 nt, Artificial Sequence
  Description of Artificial Sequence: Synthetic oligonucleotide
ccaagaggcccgaugagca

SEQ ID NO: 1278479 - RNA, 19 nt, Artificial Sequence
  Description of Artificial Sequence: Synthetic oligonucleotide
gggacagguagagucuaag

SEQ ID NO: 1278480 - RNA, 19 nt, Artificial Sequence
  Description of Artificial Sequence: Synthetic oligonucleotide
ggacacgugaggucaccug

SEQ ID NO: 1278481 - RNA, 19 nt, Artificial Sequence
  Description of Artificial Sequence: Synthetic oligonucleotide
uggcacugagggacacgug

SEQ ID NO: 1278482 - RNA, 19 nt, Artificial Sequence
  Description of Artificial Sequence: Synthetic oligonucleotide
guaccaaguggcaaaugcu

SEQ ID NO: 1278483 - RNA, 19 nt, Artificial Sequence
  Description of Artificial Sequence: Synthetic oligonucleotide
aggcccuguuuaaaaggag

SEQ ID NO: 1278484 - RNA, 19 nt, Artificial Sequence
  Description of Artificial Sequence: Synthetic oligonucleotide
ggagccagcaaaugaugaa

SEQ ID NO: 1278485 - RNA, 19 nt, Artificial Sequence
  Description of Artificial Sequence: Synthetic oligonucleotide
gcauuggacuuucuauauc

SEQ ID NO: 1278486 - RNA, 19 nt, Artificial Sequence
  Description of Artificial Sequence: Synthetic oligonucleotide
agguagagucuaagagaag

SEQ ID NO: 1278487 - RNA, 19 nt, Artificial Sequence
  Description of Artificial Sequence: Synthetic oligonucleotide
ggaccggcaauuaucggca

SEQ ID NO: 1278488 - RNA, 19 nt, Artificial Sequence
  Description of Artificial Sequence: Synthetic oligonucleotide
guaggacaggauacugaca

SEQ ID NO: 1278489 - RNA, 19 nt, Artificial Sequence
  Description of Artificial Sequence: Synthetic oligonucleotide
cacgugaggucaccugguc

SEQ ID NO: 1278490 - RNA, 19 nt, Artificial Sequence
  Description of Artificial Sequence: Synthetic oligonucleotide
gcuacaccacguauagaug

SEQ ID NO: 1278491 - RNA, 19 nt, Artificial Sequence
  Description of Artificial Sequence: Synthetic oligonucleotide
uggugaccacacagagcac

SEQ ID NO: 1278492 - RNA, 19 nt, Artificial Sequence
  Description of Artificial Sequence: Synthetic oligonucleotide
gggcaagccaccagaauca

SEQ ID NO: 1278493 - RNA, 19 nt, Artificial Sequence
  Description of Artificial Sequence: Synthetic oligonucleotide
uaaguggccuaagguuguc

SEQ ID NO: 1278494 - RNA, 19 nt, Artificial Sequence
  Description of Artificial Sequence: Synthetic oligonucleotide
cuccuugcaucccaaauuu

SEQ ID NO: 1278495 - RNA, 19 nt, Artificial Sequence
  Description of Artificial Sequence: Synthetic oligonucleotide
gugucccuagacccuuaac

SEQ ID NO: 1278496 - RNA, 19 nt, Artificial Sequence
  Description of Artificial Sequence: Synthetic oligonucleotide
ccagacaauuccagcccag

SEQ ID NO: 1278497 - RNA, 19 nt, Artificial Sequence
  Description of Artificial Sequence: Synthetic oligonucleotide
ggcaauuaucggcauggcu

SEQ ID NO: 1278498 - RNA, 19 nt, Artificial Sequence
  Description of Artificial Sequence: Synthetic oligonucleotide
gcacugagggacacgugag

SEQ ID NO: 1278499 - RNA, 19 nt, Artificial Sequence
  Description of Artificial Sequence: Synthetic oligonucleotide
acgagaggucagacagcac

SEQ ID NO: 1278500 - RNA, 19 nt, Artificial Sequence
  Description of Artificial Sequence: Synthetic oligonucleotide
guuuguggugcaccccugu

SEQ ID NO: 1278501 - RNA, 19 nt, Artificial Sequence
  Description of Artificial Sequence: Synthetic oligonucleotide
gacgggacagguagagucu

SEQ ID NO: 1278502 - RNA, 19 nt, Artificial Sequence
  Description of Artificial Sequence: Synthetic oligonucleotide
gacccguggucccaccucu

SEQ ID NO: 1278503 - RNA, 19 nt, Artificial Sequence
  Description of Artificial Sequence: Synthetic oligonucleotide
cccuccagaaacguaggug

SEQ ID NO: 1278504 - RNA, 19 nt, Artificial Sequence
  Description of Artificial Sequence: Synthetic oligonucleotide
ggacaugucauggacccua

SEQ ID NO: 1278505 - RNA, 19 nt, Artificial Sequence
  Description of Artificial Sequence: Synthetic oligonucleotide
acccaguacgauggugacu

SEQ ID NO: 1278506 - RNA, 19 nt, Artificial Sequence
  Description of Artificial Sequence: Synthetic oligonucleotide
gcagucaugguacuacaau

SEQ ID NO: 1278507 - RNA, 19 nt, Artificial Sequence
  Description of Artificial Sequence: Synthetic oligonucleotide
ggcuggaacggacuacaaa

SEQ ID NO: 1278508 - RNA, 19 nt, Artificial Sequence
  Description of Artificial Sequence: Synthetic oligonucleotide
augccacgauagccaauaa

SEQ ID NO: 1278509 - RNA, 19 nt, Artificial Sequence
  Description of Artificial Sequence: Synthetic oligonucleotide
guuaagcagugaguugagu

SEQ ID NO: 1278510 - RNA, 19 nt, Artificial Sequence
  Description of Artificial Sequence: Synthetic oligonucleotide
uggcuccuugcaucccaaa

SEQ ID NO: 1278511 - RNA, 19 nt, Artificial Sequence
  Description of Artificial Sequence: Synthetic oligonucleotide
ccguggucccaccucuacg

SEQ ID NO: 1278512 - RNA, 19 nt, Artificial Sequence
  Description of Artificial Sequence: Synthetic oligonucleotide
gcaauucccaaggggccug

SEQ ID NO: 1278513 - RNA, 19 nt, Artificial Sequence
  Description of Artificial Sequence: Synthetic oligonucleotide
caggauacugacacccuuu

SEQ ID NO: 1278514 - RNA, 19 nt, Artificial Sequence
  Description of Artificial Sequence: Synthetic oligonucleotide
uuguaccgcauuggacuuu

SEQ ID NO: 1278515 - RNA, 19 nt, Artificial Sequence
  Description of Artificial Sequence: Synthetic oligonucleotide
gggcuuuguagaggacagg

SEQ ID NO: 1278516 - RNA, 19 nt, Artificial Sequence
  Description of Artificial Sequence: Synthetic oligonucleotide
ggcauaugcaagccccucu

SEQ ID NO: 1278517 - RNA, 19 nt, Artificial Sequence
  Description of Artificial Sequence: Synthetic oligonucleotide
uccgaaggucccggcuaca

SEQ ID NO: 1278518 - RNA, 19 nt, Artificial Sequence
  Description of Artificial Sequence: Synthetic oligonucleotide
gccugcugugucccuagac

SEQ ID NO: 1278519 - RNA, 19 nt, Artificial Sequence
  Description of Artificial Sequence: Synthetic oligonucleotide
gugucugaggaccggcaau

SEQ ID NO: 1278520 - RNA, 19 nt, Artificial Sequence
  Description of Artificial Sequence: Synthetic oligonucleotide
guacgauggugacugucuu

SEQ ID NO: 1278521 - RNA, 19 nt, Artificial Sequence
  Description of Artificial Sequence: Synthetic oligonucleotide
ccgcauuggacuuucuaua

SEQ ID NO: 1278522 - RNA, 19 nt, Artificial Sequence
  Description of Artificial Sequence: Synthetic oligonucleotide
cgauagccaauaagaugac

SEQ ID NO: 1278523 - RNA, 19 nt, Artificial Sequence
  Description of Artificial Sequence: Synthetic oligonucleotide
cucuagcccuaagcuccag

SEQ ID NO: 1278524 - RNA, 19 nt, Artificial Sequence
  Description of Artificial Sequence: Synthetic oligonucleotide
gcacuguaggggccucagc

SEQ ID NO: 1278525 - RNA, 19 nt, Artificial Sequence
  Description of Artificial Sequence: Synthetic oligonucleotide
ccacaauaaguggccuaag

SEQ ID NO: 1278526 - RNA, 19 nt, Artificial Sequence
  Description of Artificial Sequence: Synthetic oligonucleotide
gucauggacccuacucacu

SEQ ID NO: 1278527 - RNA, 19 nt, Artificial Sequence
  Description of Artificial Sequence: Synthetic oligonucleotide
cuccagaaacguaggugau

SEQ ID NO: 1278528 - RNA, 19 nt, Artificial Sequence
  Description of Artificial Sequence: Synthetic oligonucleotide
ggugacccguggucccacc

SEQ ID NO: 1278529 - RNA, 19 nt, Artificial Sequence
  Description of Artificial Sequence: Synthetic oligonucleotide
ccauagccaccucacaucu

SEQ ID NO: 1278530 - RNA, 19 nt, Artificial Sequence
  Description of Artificial Sequence: Synthetic oligonucleotide
aggcccggacgggacaggu

SEQ ID NO: 1278531 - RNA, 19 nt, Artificial Sequence
  Description of Artificial Sequence: Synthetic oligonucleotide
cuaugagcuguggucaguu

SEQ ID NO: 1278532 - RNA, 19 nt, Artificial Sequence
  Description of Artificial Sequence: Synthetic oligonucleotide
cugacacccuuuguaccaa

SEQ ID NO: 1278533 - RNA, 19 nt, Artificial Sequence
  Description of Artificial Sequence: Synthetic oligonucleotide
ccggacgggacagguagag

SEQ ID NO: 1278534 - RNA, 19 nt, Artificial Sequence
  Description of Artificial Sequence: Synthetic oligonucleotide
gcgaacacgagaggucaga

SEQ ID NO: 1278535 - RNA, 19 nt, Artificial Sequence
  Description of Artificial Sequence: Synthetic oligonucleotide
cgaacacgagaggucagac

SEQ ID NO: 1278536 - RNA, 19 nt, Artificial Sequence
  Description of Artificial Sequence: Synthetic oligonucleotide
ggcuccuugcaucccaaau

SEQ ID NO: 1278537 - RNA, 19 nt, Artificial Sequence
  Description of Artificial Sequence: Synthetic oligonucleotide
gucccaccucuacggccug

SEQ ID NO: 1278538 - RNA, 19 nt, Artificial Sequence
  Description of Artificial Sequence: Synthetic oligonucleotide
ccacgauagccaauaagau

SEQ ID NO: 1278539 - RNA, 19 nt, Artificial Sequence
  Description of Artificial Sequence: Synthetic oligonucleotide
gucccggcuacaccacgua

SEQ ID NO: 1278540 - RNA, 19 nt, Artificial Sequence
  Description of Artificial Sequence: Synthetic oligonucleotide
ggucccaccucuacggccu

SEQ ID NO: 1278541 - RNA, 19 nt, Artificial Sequence
  Description of Artificial Sequence: Synthetic oligonucleotide
gugacccguggucccaccu

SEQ ID NO: 1278542 - RNA, 19 nt, Artificial Sequence
  Description of Artificial Sequence: Synthetic oligonucleotide
gcaaaugcucuagcccuaa

SEQ ID NO: 1278543 - RNA, 19 nt, Artificial Sequence
  Description of Artificial Sequence: Synthetic oligonucleotide
ggauaucugggaagcuaua

SEQ ID NO: 1278544 - RNA, 19 nt, Artificial Sequence
  Description of Artificial Sequence: Synthetic oligonucleotide
ccgaaggucccggcuacac

SEQ ID NO: 1278545 - RNA, 19 nt, Artificial Sequence
  Description of Artificial Sequence: Synthetic oligonucleotide
cccggcuacaccacguaua

SEQ ID NO: 1278546 - RNA, 19 nt, Artificial Sequence
  Description of Artificial Sequence: Synthetic oligonucleotide
cucuacggccugucacucu

SEQ ID NO: 1278547 - RNA, 19 nt, Artificial Sequence
  Description of Artificial Sequence: Synthetic oligonucleotide
cuagacccuuaacgguccu

SEQ ID NO: 1278548 - RNA, 19 nt, Artificial Sequence
  Description of Artificial Sequence: Synthetic oligonucleotide
gaccggcaauuaucggcau

SEQ ID NO: 1278549 - RNA, 19 nt, Artificial Sequence
  Description of Artificial Sequence: Synthetic oligonucleotide
ggcaaaugcucuagcccua

SEQ ID NO: 1278550 - RNA, 19 nt, Artificial Sequence
  Description of Artificial Sequence: Synthetic oligonucleotide
aucugucaguucaccccuu

SEQ ID NO: 1278551 - RNA, 19 nt, Artificial Sequence
  Description of Artificial Sequence: Synthetic oligonucleotide
aucagccaagaggcccgau

SEQ ID NO: 1278552 - RNA, 19 nt, Artificial Sequence
  Description of Artificial Sequence: Synthetic oligonucleotide
ccucuacggccugucacuc

SEQ ID NO: 1278553 - RNA, 19 nt, Artificial Sequence
  Description of Artificial Sequence: Synthetic oligonucleotide
caaugccacgauagccaau

SEQ ID NO: 1278554 - RNA, 19 nt, Artificial Sequence
  Description of Artificial Sequence: Synthetic oligonucleotide
gcaccccugugauacaguu

SEQ ID NO: 1278555 - RNA, 19 nt, Artificial Sequence
  Description of Artificial Sequence: Synthetic oligonucleotide
ccuccgaaggucccggcua

SEQ ID NO: 1278556 - RNA, 19 nt, Artificial Sequence
  Description of Artificial Sequence: Synthetic oligonucleotide
cuacggccugucacucucu

SEQ ID NO: 1278557 - RNA, 19 nt, Artificial Sequence
  Description of Artificial Sequence: Synthetic oligonucleotide
ggccuaagguugucagccu

SEQ ID NO: 1278558 - RNA, 19 nt, Artificial Sequence
  Description of Artificial Sequence: Synthetic oligonucleotide
gccuaagguugucagccuu

SEQ ID NO: 1278559 - RNA, 19 nt, Artificial Sequence
  Description of Artificial Sequence: Synthetic oligonucleotide
gcucuagcccuaagcucca

SEQ ID NO: 1278560 - RNA, 19 nt, Artificial Sequence
  Description of Artificial Sequence: Synthetic oligonucleotide
cgcauuggacuuucuauau

SEQ ID NO: 1278561 - RNA, 19 nt, Artificial Sequence
  Description of Artificial Sequence: Synthetic oligonucleotide
cgcagucaugguacuacaa

SEQ ID NO: 1278562 - RNA, 19 nt, Artificial Sequence
  Description of Artificial Sequence: Synthetic oligonucleotide
cggcaauuaucggcauggc

SEQ ID NO: 1278563 - RNA, 19 nt, Artificial Sequence
  Description of Artificial Sequence: Synthetic oligonucleotide
ccuuaacgguccucgcagu

SEQ ID NO: 1278564 - RNA, 19 nt, Artificial Sequence
  Description of Artificial Sequence: Synthetic oligonucleotide
gggacacgugaggucaccu

SEQ ID NO: 1278565 - RNA, 19 nt, Artificial Sequence
  Description of Artificial Sequence: Synthetic oligonucleotide
cccgaugagcaucaacauu

SEQ ID NO: 1278566 - RNA, 19 nt, Artificial Sequence
  Description of Artificial Sequence: Synthetic oligonucleotide
ccacuaagccuguggcacu

SEQ ID NO: 1278567 - RNA, 19 nt, Artificial Sequence
  Description of Artificial Sequence: Synthetic oligonucleotide
cccaacuggcuccuugcau

SEQ ID NO: 1278568 - RNA, 19 nt, Artificial Sequence
  Description of Artificial Sequence: Synthetic oligonucleotide
cccggacgggacagguaga

SEQ ID NO: 1278569 - RNA, 19 nt, Artificial Sequence
  Description of Artificial Sequence: Synthetic oligonucleotide
guaccgcauuggacuuucu

SEQ ID NO: 1278570 - RNA, 19 nt, Artificial Sequence
  Description of Artificial Sequence: Synthetic oligonucleotide
ccccuaucucucuggcagu

SEQ ID NO: 1278571 - RNA, 19 nt, Artificial Sequence
  Description of Artificial Sequence: Synthetic oligonucleotide
cccuccgaaggucccggcu

SEQ ID NO: 1278572 - RNA, 19 nt, Artificial Sequence
  Description of Artificial Sequence: Synthetic oligonucleotide
cccuacucacuggcacaca

SEQ ID NO: 1278573 - RNA, 19 nt, Artificial Sequence
  Description of Artificial Sequence: Synthetic oligonucleotide
ccucgcagucaugguacua

SEQ ID NO: 1278574 - RNA, 19 nt, Artificial Sequence
  Description of Artificial Sequence: Synthetic oligonucleotide
ccggugacccgugguccca

SEQ ID NO: 1278575 - RNA, 19 nt, Artificial Sequence
  Description of Artificial Sequence: Synthetic oligonucleotide
ggcccggacgggacaggua

SEQ ID NO: 1278576 - RNA, 19 nt, Artificial Sequence
  Description of Artificial Sequence: Synthetic oligonucleotide
cccuaucucucuggcaguu

SEQ ID NO: 1278577 - RNA, 19 nt, Artificial Sequence
  Description of Artificial Sequence: Synthetic oligonucleotide
cggcuacaccacguauaga

SEQ ID NO: 1278578 - RNA, 19 nt, Artificial Sequence
  Description of Artificial Sequence: Synthetic oligonucleotide
cccugccgacagcacugua

SEQ ID NO: 1278579 - RNA, 19 nt, Artificial Sequence
  Description of Artificial Sequence: Synthetic oligonucleotide
cggacgggacagguagagu

SEQ ID NO: 1278580 - RNA, 19 nt, Artificial Sequence
  Description of Artificial Sequence: Synthetic oligonucleotide
uugaacauaacacggaagg

SEQ ID NO: 1278581 - RNA, 19 nt, Artificial Sequence
  Description of Artificial Sequence: Synthetic oligonucleotide
gaauagucgaaccucacgg

SEQ ID NO: 1278582 - RNA, 19 nt, Artificial Sequence
  Description of Artificial Sequence: Synthetic oligonucleotide
ugcgugagaagcaugaagg

SEQ ID NO: 1278583 - RNA, 19 nt, Artificial Sequence
  Description of Artificial Sequence: Synthetic oligonucleotide
aacauaacacggaaggugc

SEQ ID NO: 1278584 - RNA, 19 nt, Artificial Sequence
  Description of Artificial Sequence: Synthetic oligonucleotide
aaaccagugucguucuggc

SEQ ID NO: 1278585 - RNA, 19 nt, Artificial Sequence
  Description of Artificial Sequence: Synthetic oligonucleotide
agcauugaauagucgaacc

SEQ ID NO: 1278586 - RNA, 19 nt, Artificial Sequence
  Description of Artificial Sequence: Synthetic oligonucleotide
aaugucagugaaucccucg

SEQ ID NO: 1278587 - RNA, 19 nt, Artificial Sequence
  Description of Artificial Sequence: Synthetic oligonucleotide
ugaauagucgaaccucacg

SEQ ID NO: 1278588 - RNA, 19 nt, Artificial Sequence
  Description of Artificial Sequence: Synthetic oligonucleotide
aaccggaugagaccuaggg

SEQ ID NO: 1278589 - RNA, 19 nt, Artificial Sequence
  Description of Artificial Sequence: Synthetic oligonucleotide
acugcauacuucuuggcgg

SEQ ID NO: 1278590 - RNA, 19 nt, Artificial Sequence
  Description of Artificial Sequence: Synthetic oligonucleotide
ucguuguugaagaggaagg

SEQ ID NO: 1278591 - RNA, 19 nt, Artificial Sequence
  Description of Artificial Sequence: Synthetic oligonucleotide
agucgaaccucacggaugc

SEQ ID NO: 1278592 - RNA, 19 nt, Artificial Sequence
  Description of Artificial Sequence: Synthetic oligonucleotide
uugagcagugccaggaagg

SEQ ID NO: 1278593 - RNA, 19 nt, Artificial Sequence
  Description of Artificial Sequence: Synthetic oligonucleotide
uugacacucagcuucagac

SEQ ID NO: 1278594 - RNA, 19 nt, Artificial Sequence
  Description of Artificial Sequence: Synthetic oligonucleotide
uugucuaugcucuccaggc

SEQ ID NO: 1278595 - RNA, 19 nt, Artificial Sequence
  Description of Artificial Sequence: Synthetic oligonucleotide
gaacauaacacggaaggug

SEQ ID NO: 1278596 - RNA, 19 nt, Artificial Sequence
  Description of Artificial Sequence: Synthetic oligonucleotide
uugcguaagccuuuggugc

SEQ ID NO: 1278597 - RNA, 19 nt, Artificial Sequence
  Description of Artificial Sequence: Synthetic oligonucleotide
uguccauacacgaccaggc

SEQ ID NO: 1278598 - RNA, 19 nt, Artificial Sequence
  Description of Artificial Sequence: Synthetic oligonucleotide
cuccuugaacauaacacgg

SEQ ID NO: 1278599 - RNA, 19 nt, Artificial Sequence
  Description of Artificial Sequence: Synthetic oligonucleotide
aacucaauuucaguggaug

SEQ ID NO: 1278600 - RNA, 19 nt, Artificial Sequence
  Description of Artificial Sequence: Synthetic oligonucleotide
aggucaaugucagugaauc

SEQ ID NO: 1278601 - RNA, 19 nt, Artificial Sequence
  Description of Artificial Sequence: Synthetic oligonucleotide
gcuagcacaaaccugugcg

SEQ ID NO: 1278602 - RNA, 19 nt, Artificial Sequence
  Description of Artificial Sequence: Synthetic oligonucleotide
ugcccaccaagacugaggg

SEQ ID NO: 1278603 - RNA, 19 nt, Artificial Sequence
  Description of Artificial Sequence: Synthetic oligonucleotide
aaagagccgagccugcgug

SEQ ID NO: 1278604 - RNA, 19 nt, Artificial Sequence
  Description of Artificial Sequence: Synthetic oligonucleotide
ucaggcaacucaauuucag

SEQ ID NO: 1278605 - RNA, 19 nt, Artificial Sequence
  Description of Artificial Sequence: Synthetic oligonucleotide
uuucauuuggggauacagu

SEQ ID NO: 1278606 - RNA, 19 nt, Artificial Sequence
  Description of Artificial Sequence: Synthetic oligonucleotide
agguaaagcaugccuuagc

SEQ ID NO: 1278607 - RNA, 19 nt, Artificial Sequence
  Description of Artificial Sequence: Synthetic oligonucleotide
uugauagucagugggcccg

SEQ ID NO: 1278608 - RNA, 19 nt, Artificial Sequence
  Description of Artificial Sequence: Synthetic oligonucleotide
auguccuagguguagaaga

SEQ ID NO: 1278609 - RNA, 19 nt, Artificial Sequence
  Description of Artificial Sequence: Synthetic oligonucleotide
gaguccgggcccuugagcg

SEQ ID NO: 1278610 - RNA, 19 nt, Artificial Sequence
  Description of Artificial Sequence: Synthetic oligonucleotide
ucaaugucagugaaucccu

SEQ ID NO: 1278611 - RNA, 19 nt, Artificial Sequence
  Description of Artificial Sequence: Synthetic oligonucleotide
aagugcacgucgcacagca

SEQ ID NO: 1278612 - RNA, 19 nt, Artificial Sequence
  Description of Artificial Sequence: Synthetic oligonucleotide
gaaaccagugucguucugg

SEQ ID NO: 1278613 - RNA, 19 nt, Artificial Sequence
  Description of Artificial Sequence: Synthetic oligonucleotide
ugugguagccauuccacca

SEQ ID NO: 1278614 - RNA, 19 nt, Artificial Sequence
  Description of Artificial Sequence: Synthetic oligonucleotide
ugacggagaaccugauucg

SEQ ID NO: 1278615 - RNA, 19 nt, Artificial Sequence
  Description of Artificial Sequence: Synthetic oligonucleotide
auguucacuugauagucag

SEQ ID NO: 1278616 - RNA, 19 nt, Artificial Sequence
  Description of Artificial Sequence: Synthetic oligonucleotide
augucagugaaucccucgg

SEQ ID NO: 1278617 - RNA, 19 nt, Artificial Sequence
  Description of Artificial Sequence: Synthetic oligonucleotide
cuugaacauaacacggaag

SEQ ID NO: 1278618 - RNA, 19 nt, Artificial Sequence
  Description of Artificial Sequence: Synthetic oligonucleotide
cuugcguaagccuuuggug

SEQ ID NO: 1278619 - RNA, 19 nt, Artificial Sequence
  Description of Artificial Sequence: Synthetic oligonucleotide
gacaguaaagugcaggaaa

SEQ ID NO: 1278620 - RNA, 19 nt, Artificial Sequence
  Description of Artificial Sequence: Synthetic oligonucleotide
guacuguccauacacgacc

SEQ ID NO: 1278621 - RNA, 19 nt, Artificial Sequence
  Description of Artificial Sequence: Synthetic oligonucleotide
cugaauacaggaacuugag

SEQ ID NO: 1278622 - RNA, 19 nt, Artificial Sequence
  Description of Artificial Sequence: Synthetic oligonucleotide
augugguagccauuccacc

SEQ ID NO: 1278623 - RNA, 19 nt, Artificial Sequence
  Description of Artificial Sequence: Synthetic oligonucleotide
aaucccucggcggcgaugg

SEQ ID NO: 1278624 - RNA, 19 nt, Artificial Sequence
  Description of Artificial Sequence: Synthetic oligonucleotide
gguaaagcaugccuuagcc

SEQ ID NO: 1278625 - RNA, 19 nt, Artificial Sequence
  Description of Artificial Sequence: Synthetic oligonucleotide
gacacucagcuucagacca

SEQ ID NO: 1278626 - RNA, 19 nt, Artificial Sequence
  Description of Artificial Sequence: Synthetic oligonucleotide
gcuccuugaacauaacacg

SEQ ID NO: 1278627 - RNA, 19 nt, Artificial Sequence
  Description of Artificial Sequence: Synthetic oligonucleotide
aggaaggcgaagcggcucc

SEQ ID NO: 1278628 - RNA, 19 nt, Artificial Sequence
  Description of Artificial Sequence: Synthetic oligonucleotide
aaccagugucguucuggcc

SEQ ID NO: 1278629 - RNA, 19 nt, Artificial Sequence
  Description of Artificial Sequence: Synthetic oligonucleotide
agaccagcguacuacagca

SEQ ID NO: 1278630 - RNA, 19 nt, Artificial Sequence
  Description of Artificial Sequence: Synthetic oligonucleotide
agcuagcacaaaccugugc

SEQ ID NO: 1278631 - RNA, 19 nt, Artificial Sequence
  Description of Artificial Sequence: Synthetic oligonucleotide
uccuugaacauaacacgga

SEQ ID NO: 1278632 - RNA, 19 nt, Artificial Sequence
  Description of Artificial Sequence: Synthetic oligonucleotide
agccaucgcagcugaaacc

SEQ ID NO: 1278633 - RNA, 19 nt, Artificial Sequence
  Description of Artificial Sequence: Synthetic oligonucleotide
uacuacagcauugaauagu

SEQ ID NO: 1278634 - RNA, 19 nt, Artificial Sequence
  Description of Artificial Sequence: Synthetic oligonucleotide
auaacacggaaggugcugg

SEQ ID NO: 1278635 - RNA, 19 nt, Artificial Sequence
  Description of Artificial Sequence: Synthetic oligonucleotide
augacuuccgggaucugcc

SEQ ID NO: 1278636 - RNA, 19 nt, Artificial Sequence
  Description of Artificial Sequence: Synthetic oligonucleotide
ugacacucagcuucagacc

SEQ ID NO: 1278637 - RNA, 19 nt, Artificial Sequence
  Description of Artificial Sequence: Synthetic oligonucleotide
gagggauugucuugacagg

SEQ ID NO: 1278638 - RNA, 19 nt, Artificial Sequence
  Description of Artificial Sequence: Synthetic oligonucleotide
guggucauuacugucucgg

SEQ ID NO: 1278639 - RNA, 19 nt, Artificial Sequence
  Description of Artificial Sequence: Synthetic oligonucleotide
aaaccugugcgcagggacg

SEQ ID NO: 1278640 - RNA, 19 nt, Artificial Sequence
  Description of Artificial Sequence: Synthetic oligonucleotide
acucaauuucaguggaugu

SEQ ID NO: 1278641 - RNA, 19 nt, Artificial Sequence
  Description of Artificial Sequence: Synthetic oligonucleotide
ugagucaccuugcguaagc

SEQ ID NO: 1278642 - RNA, 19 nt, Artificial Sequence
  Description of Artificial Sequence: Synthetic oligonucleotide
uucccuagcgccuuccucu

SEQ ID NO: 1278643 - RNA, 19 nt, Artificial Sequence
  Description of Artificial Sequence: Synthetic oligonucleotide
cagagugucacgcuccagc

SEQ ID NO: 1278644 - RNA, 19 nt, Artificial Sequence
  Description of Artificial Sequence: Synthetic oligonucleotide
ggggauacaguguggaggg

SEQ ID NO: 1278645 - RNA, 19 nt, Artificial Sequence
  Description of Artificial Sequence: Synthetic oligonucleotide
ucauuacugucucgggccc

SEQ ID NO: 1278646 - RNA, 19 nt, Artificial Sequence
  Description of Artificial Sequence: Synthetic oligonucleotide
uagucgaaccucacggaug

SEQ ID NO: 1278647 - RNA, 19 nt, Artificial Sequence
  Description of Artificial Sequence: Synthetic oligonucleotide
ugucagugaaucccucggc

SEQ ID NO: 1278648 - RNA, 19 nt, Artificial Sequence
  Description of Artificial Sequence: Synthetic oligonucleotide
ggcauugucagcccgcagg

SEQ ID NO: 1278649 - RNA, 19 nt, Artificial Sequence
  Description of Artificial Sequence: Synthetic oligonucleotide
gaggggucaccucccaugg

SEQ ID NO: 1278650 - RNA, 19 nt, Artificial Sequence
  Description of Artificial Sequence: Synthetic oligonucleotide
acgcgcugcgagcugagcc

SEQ ID NO: 1278651 - RNA, 19 nt, Artificial Sequence
  Description of Artificial Sequence: Synthetic oligonucleotide
ccggaugagaccuagggcc

SEQ ID NO: 1278652 - RNA, 19 nt, Artificial Sequence
  Description of Artificial Sequence: Synthetic oligonucleotide
uacacgaccaggcccacuc

SEQ ID NO: 1278653 - RNA, 19 nt, Artificial Sequence
  Description of Artificial Sequence: Synthetic oligonucleotide
accucgguggagaaugucc

SEQ ID NO: 1278654 - RNA, 19 nt, Artificial Sequence
  Description of Artificial Sequence: Synthetic oligonucleotide
cuagcacaaaccugugcgc

SEQ ID NO: 1278655 - RNA, 19 nt, Artificial Sequence
  Description of Artificial Sequence: Synthetic oligonucleotide
auugaauagucgaaccuca

SEQ ID NO: 1278656 - RNA, 19 nt, Artificial Sequence
  Description of Artificial Sequence: Synthetic oligonucleotide
caaaccugugcgcagggac

SEQ ID NO: 1278657 - RNA, 19 nt, Artificial Sequence
  Description of Artificial Sequence: Synthetic oligonucleotide
aauuucaguggauguggua

SEQ ID NO: 1278658 - RNA, 19 nt, Artificial Sequence
  Description of Artificial Sequence: Synthetic oligonucleotide
caaagaugcgcuuguugac

SEQ ID NO: 1278659 - RNA, 19 nt, Artificial Sequence
  Description of Artificial Sequence: Synthetic oligonucleotide
cauggcccgaccaacuccc

SEQ ID NO: 1278660 - RNA, 19 nt, Artificial Sequence
  Description of Artificial Sequence: Synthetic oligonucleotide
ugaacauaacacggaaggu

SEQ ID NO: 1278661 - RNA, 19 nt, Artificial Sequence
  Description of Artificial Sequence: Synthetic oligonucleotide
cauugaacccacagcuagc

SEQ ID NO: 1278662 - RNA, 19 nt, Artificial Sequence
  Description of Artificial Sequence: Synthetic oligonucleotide
auagucgaaccucacggau

SEQ ID NO: 1278663 - RNA, 19 nt, Artificial Sequence
  Description of Artificial Sequence: Synthetic oligonucleotide
uugaauagucgaaccucac

SEQ ID NO: 1278664 - RNA, 19 nt, Artificial Sequence
  Description of Artificial Sequence: Synthetic oligonucleotide
ucguucuggccgaggaccg

SEQ ID NO: 1278665 - RNA, 19 nt, Artificial Sequence
  Description of Artificial Sequence: Synthetic oligonucleotide
cuucagaccagcguacuac

SEQ ID NO: 1278666 - RNA, 19 nt, Artificial Sequence
  Description of Artificial Sequence: Synthetic oligonucleotide
guggagaauguccuaggug

SEQ ID NO: 1278667 - RNA, 19 nt, Artificial Sequence
  Description of Artificial Sequence: Synthetic oligonucleotide
uucagaccagcguacuaca

SEQ ID NO: 1278668 - RNA, 19 nt, Artificial Sequence
  Description of Artificial Sequence: Synthetic oligonucleotide
uguccuagguguagaagau

SEQ ID NO: 1278669 - RNA, 19 nt, Artificial Sequence
  Description of Artificial Sequence: Synthetic oligonucleotide
uagucagugggcccgugga

SEQ ID NO: 1278670 - RNA, 19 nt, Artificial Sequence
  Description of Artificial Sequence: Synthetic oligonucleotide
gacggagaaccugauucgg

SEQ ID NO: 1278671 - RNA, 19 nt, Artificial Sequence
  Description of Artificial Sequence: Synthetic oligonucleotide
ucgguggagaauguccuag

SEQ ID NO: 1278672 - RNA, 19 nt, Artificial Sequence
  Description of Artificial Sequence: Synthetic oligonucleotide
cagaccagcguacuacagc

SEQ ID NO: 1278673 - RNA, 19 nt, Artificial Sequence
  Description of Artificial Sequence: Synthetic oligonucleotide
auugaacccacagcuagca

SEQ ID NO: 1278674 - RNA, 19 nt, Artificial Sequence
  Description of Artificial Sequence: Synthetic oligonucleotide
cuacagcauugaauagucg

SEQ ID NO: 1278675 - RNA, 19 nt, Artificial Sequence
  Description of Artificial Sequence: Synthetic oligonucleotide
gaagguaaagcaugccuua

SEQ ID NO: 1278676 - RNA, 19 nt, Artificial Sequence
  Description of Artificial Sequence: Synthetic oligonucleotide
guacuacagcauugaauag

SEQ ID NO: 1278677 - RNA, 19 nt, Artificial Sequence
  Description of Artificial Sequence: Synthetic oligonucleotide
cugcgugagaagcaugaag

SEQ ID NO: 1278678 - RNA, 19 nt, Artificial Sequence
  Description of Artificial Sequence: Synthetic oligonucleotide
ucgaaccucacggaugccc

SEQ ID NO: 1278679 - RNA, 19 nt, Artificial Sequence
  Description of Artificial Sequence: Synthetic oligonucleotide
gugaccucgguggagaaug

SEQ ID NO: 1278680 - RNA, 19 nt, Artificial Sequence
  Description of Artificial Sequence: Synthetic oligonucleotide
gagccaucgcagcugaaac

SEQ ID NO: 1278681 - RNA, 19 nt, Artificial Sequence
  Description of Artificial Sequence: Synthetic oligonucleotide
agcacaaaccugugcgcag

SEQ ID NO: 1278682 - RNA, 19 nt, Artificial Sequence
  Description of Artificial Sequence: Synthetic oligonucleotide
ugucucgggcccaauuugu

SEQ ID NO: 1278683 - RNA, 19 nt, Artificial Sequence
  Description of Artificial Sequence: Synthetic oligonucleotide
gaccguauugcugucugug

SEQ ID NO: 1278684 - RNA, 19 nt, Artificial Sequence
  Description of Artificial Sequence: Synthetic oligonucleotide
uguacagcguggucauuac

SEQ ID NO: 1278685 - RNA, 19 nt, Artificial Sequence
  Description of Artificial Sequence: Synthetic oligonucleotide
accgguugaugcugcacuc

SEQ ID NO: 1278686 - RNA, 19 nt, Artificial Sequence
  Description of Artificial Sequence: Synthetic oligonucleotide
uguucacuugauagucagu

SEQ ID NO: 1278687 - RNA, 19 nt, Artificial Sequence
  Description of Artificial Sequence: Synthetic oligonucleotide
cagugaaucccucggcggc

SEQ ID NO: 1278688 - RNA, 19 nt, Artificial Sequence
  Description of Artificial Sequence: Synthetic oligonucleotide
cugcccaccaagacugagg

SEQ ID NO: 1278689 - RNA, 19 nt, Artificial Sequence
  Description of Artificial Sequence: Synthetic oligonucleotide
gucguucuggccgaggacc

SEQ ID NO: 1278690 - RNA, 19 nt, Artificial Sequence
  Description of Artificial Sequence: Synthetic oligonucleotide
gcggcuuuccaccugcugg

SEQ ID NO: 1278691 - RNA, 19 nt, Artificial Sequence
  Description of Artificial Sequence: Synthetic oligonucleotide
acgucaggcaacucaauuu

SEQ ID NO: 1278692 - RNA, 19 nt, Artificial Sequence
  Description of Artificial Sequence: Synthetic oligonucleotide
uucaguggaugugguagcc

SEQ ID NO: 1278693 - RNA, 19 nt, Artificial Sequence
  Description of Artificial Sequence: Synthetic oligonucleotide
agaagguaaagcaugccuu

SEQ ID NO: 1278694 - RNA, 19 nt, Artificial Sequence
  Description of Artificial Sequence: Synthetic oligonucleotide
cguggauggauccauagag

SEQ ID NO: 1278695 - RNA, 19 nt, Artificial Sequence
  Description of Artificial Sequence: Synthetic oligonucleotide
uagcacaaaccugugcgca

SEQ ID NO: 1278696 - RNA, 19 nt, Artificial Sequence
  Description of Artificial Sequence: Synthetic oligonucleotide
ugcacgucgcacagcaccu

SEQ ID NO: 1278697 - RNA, 19 nt, Artificial Sequence
  Description of Artificial Sequence: Synthetic oligonucleotide
cuuggcgguguacagcgug

SEQ ID NO: 1278698 - RNA, 19 nt, Artificial Sequence
  Description of Artificial Sequence: Synthetic oligonucleotide
ucucgggcccaauuuguac

SEQ ID NO: 1278699 - RNA, 19 nt, Artificial Sequence
  Description of Artificial Sequence: Synthetic oligonucleotide
uguucccggcggcauaaca

SEQ ID NO: 1278700 - RNA, 19 nt, Artificial Sequence
  Description of Artificial Sequence: Synthetic oligonucleotide
uucccggcggcauaacaga

SEQ ID NO: 1278701 - RNA, 19 nt, Artificial Sequence
  Description of Artificial Sequence: Synthetic oligonucleotide
acaguaaagugcaggaaaa

SEQ ID NO: 1278702 - RNA, 19 nt, Artificial Sequence
  Description of Artificial Sequence: Synthetic oligonucleotide
gauucggucacuggugcca

SEQ ID NO: 1278703 - RNA, 19 nt, Artificial Sequence
  Description of Artificial Sequence: Synthetic oligonucleotide
gaaggcauugucagcccgc

SEQ ID NO: 1278704 - RNA, 19 nt, Artificial Sequence
  Description of Artificial Sequence: Synthetic oligonucleotide
cauuguuguucccggcggc

SEQ ID NO: 1278705 - RNA, 19 nt, Artificial Sequence
  Description of Artificial Sequence: Synthetic oligonucleotide
uggaaccgguugaugcugc

SEQ ID NO: 1278706 - RNA, 19 nt, Artificial Sequence
  Description of Artificial Sequence: Synthetic oligonucleotide
ugcgagcugagccccuugc

SEQ ID NO: 1278707 - RNA, 19 nt, Artificial Sequence
  Description of Artificial Sequence: Synthetic oligonucleotide
cauaacacggaaggugcug

SEQ ID NO: 1278708 - RNA, 19 nt, Artificial Sequence
  Description of Artificial Sequence: Synthetic oligonucleotide
gauguucacuugauaguca

SEQ ID NO: 1278709 - RNA, 19 nt, Artificial Sequence
  Description of Artificial Sequence: Synthetic oligonucleotide
acgcagugugccucgagug

SEQ ID NO: 1278710 - RNA, 19 nt, Artificial Sequence
  Description of Artificial Sequence: Synthetic oligonucleotide
caccauugaacccacagcu

SEQ ID NO: 1278711 - RNA, 19 nt, Artificial Sequence
  Description of Artificial Sequence: Synthetic oligonucleotide
ggcauaacagaagguaaag

SEQ ID NO: 1278712 - RNA, 19 nt, Artificial Sequence
  Description of Artificial Sequence: Synthetic oligonucleotide
gccauuguuguucccggcg

SEQ ID NO: 1278713 - RNA, 19 nt, Artificial Sequence
  Description of Artificial Sequence: Synthetic oligonucleotide
aacuccacgcgaggcuugg

SEQ ID NO: 1278714 - RNA, 19 nt, Artificial Sequence
  Description of Artificial Sequence: Synthetic oligonucleotide
guucccggcggcauaacag

SEQ ID NO: 1278715 - RNA, 19 nt, Artificial Sequence
  Description of Artificial Sequence: Synthetic oligonucleotide
gauacaguguggagggguc

SEQ ID NO: 1278716 - RNA, 19 nt, Artificial Sequence
  Description of Artificial Sequence: Synthetic oligonucleotide
aacuccccagugccuuggg

SEQ ID NO: 1278717 - RNA, 19 nt, Artificial Sequence
  Description of Artificial Sequence: Synthetic oligonucleotide
uaacacggaaggugcuggc

SEQ ID NO: 1278718 - RNA, 19 nt, Artificial Sequence
  Description of Artificial Sequence: Synthetic oligonucleotide
cguacuacagcauugaaua

SEQ ID NO: 1278719 - RNA, 19 nt, Artificial Sequence
  Description of Artificial Sequence: Synthetic oligonucleotide
gcugaaaccagugucguuc

SEQ ID NO: 1278720 - RNA, 19 nt, Artificial Sequence
  Description of Artificial Sequence: Synthetic oligonucleotide
uagcugcggcucaucaaag

SEQ ID NO: 1278721 - RNA, 19 nt, Artificial Sequence
  Description of Artificial Sequence: Synthetic oligonucleotide
cagcauugaauagucgaac

SEQ ID NO: 1278722 - RNA, 19 nt, Artificial Sequence
  Description of Artificial Sequence: Synthetic oligonucleotide
uggccgaggaccguauugc

SEQ ID NO: 1278723 - RNA, 19 nt, Artificial Sequence
  Description of Artificial Sequence: Synthetic oligonucleotide
cuagcugcggcucaucaaa

SEQ ID NO: 1278724 - RNA, 19 nt, Artificial Sequence
  Description of Artificial Sequence: Synthetic oligonucleotide
gcugcggcucaucaaagag

SEQ ID NO: 1278725 - RNA, 19 nt, Artificial Sequence
  Description of Artificial Sequence: Synthetic oligonucleotide
agaauguccuagguguaga

SEQ ID NO: 1278726 - RNA, 19 nt, Artificial Sequence
  Description of Artificial Sequence: Synthetic oligonucleotide
accuagggccuucccuagc

SEQ ID NO: 1278727 - RNA, 19 nt, Artificial Sequence
  Description of Artificial Sequence: Synthetic oligonucleotide
caccucguuguugaagagg

SEQ ID NO: 1278728 - RNA, 19 nt, Artificial Sequence
  Description of Artificial Sequence: Synthetic oligonucleotide
cuccacgcgaggcuugggg

SEQ ID NO: 1278729 - RNA, 19 nt, Artificial Sequence
  Description of Artificial Sequence: Synthetic oligonucleotide
uguugccguugacacucag

SEQ ID NO: 1278730 - RNA, 19 nt, Artificial Sequence
  Description of Artificial Sequence: Synthetic oligonucleotide
ugacuuccgggaucugccc

SEQ ID NO: 1278731 - RNA, 19 nt, Artificial Sequence
  Description of Artificial Sequence: Synthetic oligonucleotide
accguauugcugucugugu

SEQ ID NO: 1278732 - RNA, 19 nt, Artificial Sequence
  Description of Artificial Sequence: Synthetic oligonucleotide
ugccuuagccccuguggug

SEQ ID NO: 1278733 - RNA, 19 nt, Artificial Sequence
  Description of Artificial Sequence: Synthetic oligonucleotide
ugcuggccgagccaucgca

SEQ ID NO: 1278734 - RNA, 19 nt, Artificial Sequence
  Description of Artificial Sequence: Synthetic oligonucleotide
ugucguucuggccgaggac

SEQ ID NO: 1278735 - RNA, 19 nt, Artificial Sequence
  Description of Artificial Sequence: Synthetic oligonucleotide
ugacaguaaagugcaggaa

SEQ ID NO: 1278736 - RNA, 19 nt, Artificial Sequence
  Description of Artificial Sequence: Synthetic oligonucleotide
guccauacacgaccaggcc

SEQ ID NO: 1278737 - RNA, 19 nt, Artificial Sequence
  Description of Artificial Sequence: Synthetic oligonucleotide
acagcauugaauagucgaa

SEQ ID NO: 1278738 - RNA, 19 nt, Artificial Sequence
  Description of Artificial Sequence: Synthetic oligonucleotide
gaauguccuagguguagaa

SEQ ID NO: 1278739 - RNA, 19 nt, Artificial Sequence
  Description of Artificial Sequence: Synthetic oligonucleotide
aggaugccggacugugccg

SEQ ID NO: 1278740 - RNA, 19 nt, Artificial Sequence
  Description of Artificial Sequence: Synthetic oligonucleotide
gaacuccacgcagugugcc

SEQ ID NO: 1278741 - RNA, 19 nt, Artificial Sequence
  Description of Artificial Sequence: Synthetic oligonucleotide
uccacgcgaggcuuggggu

SEQ ID NO: 1278742 - RNA, 19 nt, Artificial Sequence
  Description of Artificial Sequence: Synthetic oligonucleotide
aagagccgagccugcguga

SEQ ID NO: 1278743 - RNA, 19 nt, Artificial Sequence
  Description of Artificial Sequence: Synthetic oligonucleotide
aaagcaugccuuagccccu

SEQ ID NO: 1278744 - RNA, 19 nt, Artificial Sequence
  Description of Artificial Sequence: Synthetic oligonucleotide
auggcgucggcuguguucu

SEQ ID NO: 1278745 - RNA, 19 nt, Artificial Sequence
  Description of Artificial Sequence: Synthetic oligonucleotide
aaggcauugucagcccgca

SEQ ID NO: 1278746 - RNA, 19 nt, Artificial Sequence
  Description of Artificial Sequence: Synthetic oligonucleotide
cacaaaccugugcgcaggg

SEQ ID NO: 1278747 - RNA, 19 nt, Artificial Sequence
  Description of Artificial Sequence: Synthetic oligonucleotide
accagcguacuacagcauu

SEQ ID NO: 1278748 - RNA, 19 nt, Artificial Sequence
  Description of Artificial Sequence: Synthetic oligonucleotide
guagccauuccaccauuga

SEQ ID NO: 1278749 - RNA, 19 nt, Artificial Sequence
  Description of Artificial Sequence: Synthetic oligonucleotide
cugucucgggcccaauuug

SEQ ID NO: 1278750 - RNA, 19 nt, Artificial Sequence
  Description of Artificial Sequence: Synthetic oligonucleotide
acgaccaggcccacucugc

SEQ ID NO: 1278751 - RNA, 19 nt, Artificial Sequence
  Description of Artificial Sequence: Synthetic oligonucleotide
gaaccucacggaugcccag

SEQ ID NO: 1278752 - RNA, 19 nt, Artificial Sequence
  Description of Artificial Sequence: Synthetic oligonucleotide
guugacacucagcuucaga

SEQ ID NO: 1278753 - RNA, 19 nt, Artificial Sequence
  Description of Artificial Sequence: Synthetic oligonucleotide
gaugccggacugugccggg

SEQ ID NO: 1278754 - RNA, 19 nt, Artificial Sequence
  Description of Artificial Sequence: Synthetic oligonucleotide
ugcccagagugucacgcuc

SEQ ID NO: 1278755 - RNA, 19 nt, Artificial Sequence
  Description of Artificial Sequence: Synthetic oligonucleotide
gcauaacagaagguaaagc

SEQ ID NO: 1278756 - RNA, 19 nt, Artificial Sequence
  Description of Artificial Sequence: Synthetic oligonucleotide
ucaguggaugugguagcca

SEQ ID NO: 1278757 - RNA, 19 nt, Artificial Sequence
  Description of Artificial Sequence: Synthetic oligonucleotide
cuggccgaggaccguauug

SEQ ID NO: 1278758 - RNA, 19 nt, Artificial Sequence
  Description of Artificial Sequence: Synthetic oligonucleotide
ugccauuguuguucccggc

SEQ ID NO: 1278759 - RNA, 19 nt, Artificial Sequence
  Description of Artificial Sequence: Synthetic oligonucleotide
cagaagguaaagcaugccu

SEQ ID NO: 1278760 - RNA, 19 nt, Artificial Sequence
  Description of Artificial Sequence: Synthetic oligonucleotide
ggaugugguagccauucca

SEQ ID NO: 1278761 - RNA, 19 nt, Artificial Sequence
  Description of Artificial Sequence: Synthetic oligonucleotide
gagaguccgggcccuugag

SEQ ID NO: 1278762 - RNA, 19 nt, Artificial Sequence
  Description of Artificial Sequence: Synthetic oligonucleotide
cauggguucuggguaggag

SEQ ID NO: 1278763 - RNA, 19 nt, Artificial Sequence
  Description of Artificial Sequence: Synthetic oligonucleotide
uguugacggagaaccugau

SEQ ID NO: 1278764 - RNA, 19 nt, Artificial Sequence
  Description of Artificial Sequence: Synthetic oligonucleotide
cacuugucacugugaacac

SEQ ID NO: 1278765 - RNA, 19 nt, Artificial Sequence
  Description of Artificial Sequence: Synthetic oligonucleotide
ccggcggcauaacagaagg

SEQ ID NO: 1278766 - RNA, 19 nt, Artificial Sequence
  Description of Artificial Sequence: Synthetic oligonucleotide
auuguuguucccggcggca

SEQ ID NO: 1278767 - RNA, 19 nt, Artificial Sequence
  Description of Artificial Sequence: Synthetic oligonucleotide
cgacucaugagucaccuug

SEQ ID NO: 1278768 - RNA, 19 nt, Artificial Sequence
  Description of Artificial Sequence: Synthetic oligonucleotide
ccauuguuguucccggcgg

SEQ ID NO: 1278769 - RNA, 19 nt, Artificial Sequence
  Description of Artificial Sequence: Synthetic oligonucleotide
cagcuucagaccagcguac

SEQ ID NO: 1278770 - RNA, 19 nt, Artificial Sequence
  Description of Artificial Sequence: Synthetic oligonucleotide
agcugcggcucaucaaaga

SEQ ID NO: 1278771 - RNA, 19 nt, Artificial Sequence
  Description of Artificial Sequence: Synthetic oligonucleotide
caccacaaagaugcgcuug

SEQ ID NO: 1278772 - RNA, 19 nt, Artificial Sequence
  Description of Artificial Sequence: Synthetic oligonucleotide
ugccggacugugccgggcc

SEQ ID NO: 1278773 - RNA, 19 nt, Artificial Sequence
  Description of Artificial Sequence: Synthetic oligonucleotide
ugagcguggcgcaggcagu

SEQ ID NO: 1278774 - RNA, 19 nt, Artificial Sequence
  Description of Artificial Sequence: Synthetic oligonucleotide
cuagguguagaagaugacu

SEQ ID NO: 1278775 - RNA, 19 nt, Artificial Sequence
  Description of Artificial Sequence: Synthetic oligonucleotide
uguuguucccggcggcaua

SEQ ID NO: 1278776 - RNA, 19 nt, Artificial Sequence
  Description of Artificial Sequence: Synthetic oligonucleotide
gaaccggaugagaccuagg

SEQ ID NO: 1278777 - RNA, 19 nt, Artificial Sequence
  Description of Artificial Sequence: Synthetic oligonucleotide
caugagucaccuugcguaa

SEQ ID NO: 1278778 - RNA, 19 nt, Artificial Sequence
  Description of Artificial Sequence: Synthetic oligonucleotide
gucgcacagcaccucguug

SEQ ID NO: 1278779 - RNA, 19 nt, Artificial Sequence
  Description of Artificial Sequence: Synthetic oligonucleotide
guggugggcgacucaugag

SEQ ID NO: 1278780 - RNA, 19 nt, Artificial Sequence
  Description of Artificial Sequence: Synthetic oligonucleotide
aaccucacggaugcccaga

SEQ ID NO: 1278781 - RNA, 19 nt, Artificial Sequence
  Description of Artificial Sequence: Synthetic oligonucleotide
cucgagugcaggcacugca

SEQ ID NO: 1278782 - RNA, 19 nt, Artificial Sequence
  Description of Artificial Sequence: Synthetic oligonucleotide
gguacuguccauacacgac

SEQ ID NO: 1278783 - RNA, 19 nt, Artificial Sequence
  Description of Artificial Sequence: Synthetic oligonucleotide
gugucguucuggccgagga

SEQ ID NO: 1278784 - RNA, 19 nt, Artificial Sequence
  Description of Artificial Sequence: Synthetic oligonucleotide
caggaagugcacgucgcac

SEQ ID NO: 1278785 - RNA, 19 nt, Artificial Sequence
  Description of Artificial Sequence: Synthetic oligonucleotide
gacugaccaccucucgguc

SEQ ID NO: 1278786 - RNA, 19 nt, Artificial Sequence
  Description of Artificial Sequence: Synthetic oligonucleotide
gcgugagaagcaugaaggc

SEQ ID NO: 1278787 - RNA, 19 nt, Artificial Sequence
  Description of Artificial Sequence: Synthetic oligonucleotide
agcguacuacagcauugaa

SEQ ID NO: 1278788 - RNA, 19 nt, Artificial Sequence
  Description of Artificial Sequence: Synthetic oligonucleotide
caccaagacugagggauug

SEQ ID NO: 1278789 - RNA, 19 nt, Artificial Sequence
  Description of Artificial Sequence: Synthetic oligonucleotide
cacgaccaggcccacucug

SEQ ID NO: 1278790 - RNA, 19 nt, Artificial Sequence
  Description of Artificial Sequence: Synthetic oligonucleotide
aagcaugccuuagccccug

SEQ ID NO: 1278791 - RNA, 19 nt, Artificial Sequence
  Description of Artificial Sequence: Synthetic oligonucleotide
ugaccucgguggagaaugu

SEQ ID NO: 1278792 - RNA, 19 nt, Artificial Sequence
  Description of Artificial Sequence: Synthetic oligonucleotide
agugucguucuggccgagg

SEQ ID NO: 1278793 - RNA, 19 nt, Artificial Sequence
  Description of Artificial Sequence: Synthetic oligonucleotide
ugugcgcagggacgcgcug

SEQ ID NO: 1278794 - RNA, 19 nt, Artificial Sequence
  Description of Artificial Sequence: Synthetic oligonucleotide
cuucccuagcgccuuccuc

SEQ ID NO: 1278795 - RNA, 19 nt, Artificial Sequence
  Description of Artificial Sequence: Synthetic oligonucleotide
gaaccgguugaugcugcac

SEQ ID NO: 1278796 - RNA, 19 nt, Artificial Sequence
  Description of Artificial Sequence: Synthetic oligonucleotide
ggaaccggaugagaccuag

SEQ ID NO: 1278797 - RNA, 19 nt, Artificial Sequence
  Description of Artificial Sequence: Synthetic oligonucleotide
uggcccgaccaacucccca

SEQ ID NO: 1278798 - RNA, 19 nt, Artificial Sequence
  Description of Artificial Sequence: Synthetic oligonucleotide
ccagcguacuacagcauug

SEQ ID NO: 1278799 - RNA, 19 nt, Artificial Sequence
  Description of Artificial Sequence: Synthetic oligonucleotide
acauaacacggaaggugcu

SEQ ID NO: 1278800 - RNA, 19 nt, Artificial Sequence
  Description of Artificial Sequence: Synthetic oligonucleotide
guccuagguguagaagaug

SEQ ID NO: 1278801 - RNA, 19 nt, Artificial Sequence
  Description of Artificial Sequence: Synthetic oligonucleotide
gaugagaccuagggccuuc

SEQ ID NO: 1278802 - RNA, 19 nt, Artificial Sequence
  Description of Artificial Sequence: Synthetic oligonucleotide
acucagcuucagaccagcg

SEQ ID NO: 1278803 - RNA, 19 nt, Artificial Sequence
  Description of Artificial Sequence: Synthetic oligonucleotide
ucccggcggcauaacagaa

SEQ ID NO: 1278804 - RNA, 19 nt, Artificial Sequence
  Description of Artificial Sequence: Synthetic oligonucleotide
ggaugccggacugugccgg

SEQ ID NO: 1278805 - RNA, 19 nt, Artificial Sequence
  Description of Artificial Sequence: Synthetic oligonucleotide
cacggaugcccagaguguc

SEQ ID NO: 1278806 - RNA, 19 nt, Artificial Sequence
  Description of Artificial Sequence: Synthetic oligonucleotide
cugagggauugucuugaca

SEQ ID NO: 1278807 - RNA, 19 nt, Artificial Sequence
  Description of Artificial Sequence: Synthetic oligonucleotide
ggcccgaccaacuccccag

SEQ ID NO: 1278808 - RNA, 19 nt, Artificial Sequence
  Description of Artificial Sequence: Synthetic oligonucleotide
auuacugucucgggcccaa

SEQ ID NO: 1278809 - RNA, 19 nt, Artificial Sequence
  Description of Artificial Sequence: Synthetic oligonucleotide
agcggggccugucaaugaa

SEQ ID NO: 1278810 - RNA, 19 nt, Artificial Sequence
  Description of Artificial Sequence: Synthetic oligonucleotide
gguucuggguaggagguca

SEQ ID NO: 1278811 - RNA, 19 nt, Artificial Sequence
  Description of Artificial Sequence: Synthetic oligonucleotide
ugguagccauuccaccauu

SEQ ID NO: 1278812 - RNA, 19 nt, Artificial Sequence
  Description of Artificial Sequence: Synthetic oligonucleotide
cagcaccucguuguugaag

SEQ ID NO: 1278813 - RNA, 19 nt, Artificial Sequence
  Description of Artificial Sequence: Synthetic oligonucleotide
aguucacauugggcaggac

SEQ ID NO: 1278814 - RNA, 19 nt, Artificial Sequence
  Description of Artificial Sequence: Synthetic oligonucleotide
ccguauugcugucugugug

SEQ ID NO: 1278815 - RNA, 19 nt, Artificial Sequence
  Description of Artificial Sequence: Synthetic oligonucleotide
aggcauugucagcccgcag

SEQ ID NO: 1278816 - RNA, 19 nt, Artificial Sequence
  Description of Artificial Sequence: Synthetic oligonucleotide
uucuggccgaggaccguau

SEQ ID NO: 1278817 - RNA, 19 nt, Artificial Sequence
  Description of Artificial Sequence: Synthetic oligonucleotide
cagcuagcacaaaccugug

SEQ ID NO: 1278818 - RNA, 19 nt, Artificial Sequence
  Description of Artificial Sequence: Synthetic oligonucleotide
agcuucagaccagcguacu

SEQ ID NO: 1278819 - RNA, 19 nt, Artificial Sequence
  Description of Artificial Sequence: Synthetic oligonucleotide
gggcccuugagcguggcgc

SEQ ID NO: 1278820 - RNA, 19 nt, Artificial Sequence
  Description of Artificial Sequence: Synthetic oligonucleotide
uagugagaguccgggcccu

SEQ ID NO: 1278821 - RNA, 19 nt, Artificial Sequence
  Description of Artificial Sequence: Synthetic oligonucleotide
acggagaaccugauucggu

SEQ ID NO: 1278822 - RNA, 19 nt, Artificial Sequence
  Description of Artificial Sequence: Synthetic oligonucleotide
ccuugaacauaacacggaa

SEQ ID NO: 1278823 - RNA, 19 nt, Artificial Sequence
  Description of Artificial Sequence: Synthetic oligonucleotide
gagcguggcgcaggcagug

SEQ ID NO: 1278824 - RNA, 19 nt, Artificial Sequence
  Description of Artificial Sequence: Synthetic oligonucleotide
gauagucagugggcccgug

SEQ ID NO: 1278825 - RNA, 19 nt, Artificial Sequence
  Description of Artificial Sequence: Synthetic oligonucleotide
ggcggcauaacagaaggua

SEQ ID NO: 1278826 - RNA, 19 nt, Artificial Sequence
  Description of Artificial Sequence: Synthetic oligonucleotide
gucacagguacuguccaua

SEQ ID NO: 1278827 - RNA, 19 nt, Artificial Sequence
  Description of Artificial Sequence: Synthetic oligonucleotide
ccgaccaacuccccagugc

SEQ ID NO: 1278828 - RNA, 19 nt, Artificial Sequence
  Description of Artificial Sequence: Synthetic oligonucleotide
gguagccauuccaccauug

SEQ ID NO: 1278829 - RNA, 19 nt, Artificial Sequence
  Description of Artificial Sequence: Synthetic oligonucleotide
ccuagguguagaagaugac

SEQ ID NO: 1278830 - RNA, 19 nt, Artificial Sequence
  Description of Artificial Sequence: Synthetic oligonucleotide
accaagacugagggauugu

SEQ ID NO: 1278831 - RNA, 19 nt, Artificial Sequence
  Description of Artificial Sequence: Synthetic oligonucleotide
ggcucaucaaagagccgag

SEQ ID NO: 1278832 - RNA, 19 nt, Artificial Sequence
  Description of Artificial Sequence: Synthetic oligonucleotide
cccguggauggauccauag

SEQ ID NO: 1278833 - RNA, 19 nt, Artificial Sequence
  Description of Artificial Sequence: Synthetic oligonucleotide
ucgguccgccaggaugccg

SEQ ID NO: 1278834 - RNA, 19 nt, Artificial Sequence
  Description of Artificial Sequence: Synthetic oligonucleotide
acaaaccugugcgcaggga

SEQ ID NO: 1278835 - RNA, 19 nt, Artificial Sequence
  Description of Artificial Sequence: Synthetic oligonucleotide
cuguggugggcgacucaug

SEQ ID NO: 1278836 - RNA, 19 nt, Artificial Sequence
  Description of Artificial Sequence: Synthetic oligonucleotide
agugcacgucgcacagcac

SEQ ID NO: 1278837 - RNA, 19 nt, Artificial Sequence
  Description of Artificial Sequence: Synthetic oligonucleotide
acacgaccaggcccacucu

SEQ ID NO: 1278838 - RNA, 19 nt, Artificial Sequence
  Description of Artificial Sequence: Synthetic oligonucleotide
uuccaccauugaacccaca

SEQ ID NO: 1278839 - RNA, 19 nt, Artificial Sequence
  Description of Artificial Sequence: Synthetic oligonucleotide
cauacuucuuggcggugua

SEQ ID NO: 1278840 - RNA, 19 nt, Artificial Sequence
  Description of Artificial Sequence: Synthetic oligonucleotide
ugccguugacacucagcuu

SEQ ID NO: 1278841 - RNA, 19 nt, Artificial Sequence
  Description of Artificial Sequence: Synthetic oligonucleotide
cauugucagcccgcaggug

SEQ ID NO: 1278842 - RNA, 19 nt, Artificial Sequence
  Description of Artificial Sequence: Synthetic oligonucleotide
cacgcgaggcuugggguug

SEQ ID NO: 1278843 - RNA, 19 nt, Artificial Sequence
  Description of Artificial Sequence: Synthetic oligonucleotide
cgaagcggcuccugcaccg

SEQ ID NO: 1278844 - RNA, 19 nt, Artificial Sequence
  Description of Artificial Sequence: Synthetic oligonucleotide
accauugaacccacagcua

SEQ ID NO: 1278845 - RNA, 19 nt, Artificial Sequence
  Description of Artificial Sequence: Synthetic oligonucleotide
cagcguacuacagcauuga

SEQ ID NO: 1278846 - RNA, 19 nt, Artificial Sequence
  Description of Artificial Sequence: Synthetic oligonucleotide
ucuggccgaggaccguauu

SEQ ID NO: 1278847 - RNA, 19 nt, Artificial Sequence
  Description of Artificial Sequence: Synthetic oligonucleotide
ggaacuccacgcagugugc

SEQ ID NO: 1278848 - RNA, 19 nt, Artificial Sequence
  Description of Artificial Sequence: Synthetic oligonucleotide
gcgcaggcaguguaguuca

SEQ ID NO: 1278849 - RNA, 19 nt, Artificial Sequence
  Description of Artificial Sequence: Synthetic oligonucleotide
caucgcagcugaaaccagu

SEQ ID NO: 1278850 - RNA, 19 nt, Artificial Sequence
  Description of Artificial Sequence: Synthetic oligonucleotide
gguggagaauguccuaggu

SEQ ID NO: 1278851 - RNA, 19 nt, Artificial Sequence
  Description of Artificial Sequence: Synthetic oligonucleotide
gucaccuugcguaagccuu

SEQ ID NO: 1278852 - RNA, 19 nt, Artificial Sequence
  Description of Artificial Sequence: Synthetic oligonucleotide
caguggaugugguagccau

SEQ ID NO: 1278853 - RNA, 19 nt, Artificial Sequence
  Description of Artificial Sequence: Synthetic oligonucleotide
acggaaggugcuggccgag

SEQ ID NO: 1278854 - RNA, 19 nt, Artificial Sequence
  Description of Artificial Sequence: Synthetic oligonucleotide
gccucgaaggcagcagcgg

SEQ ID NO: 1278855 - RNA, 19 nt, Artificial Sequence
  Description of Artificial Sequence: Synthetic oligonucleotide
ccgagccugcgugagaagc

SEQ ID NO: 1278856 - RNA, 19 nt, Artificial Sequence
  Description of Artificial Sequence: Synthetic oligonucleotide
auggcccgaccaacucccc

SEQ ID NO: 1278857 - RNA, 19 nt, Artificial Sequence
  Description of Artificial Sequence: Synthetic oligonucleotide
gugucacgcuccagcacug

SEQ ID NO: 1278858 - RNA, 19 nt, Artificial Sequence
  Description of Artificial Sequence: Synthetic oligonucleotide
ucccuagcgccuuccucuu

SEQ ID NO: 1278859 - RNA, 19 nt, Artificial Sequence
  Description of Artificial Sequence: Synthetic oligonucleotide
agccccuguggugggcgac

SEQ ID NO: 1278860 - RNA, 19 nt, Artificial Sequence
  Description of Artificial Sequence: Synthetic oligonucleotide
gaccucgguggagaauguc

SEQ ID NO: 1278861 - RNA, 19 nt, Artificial Sequence
  Description of Artificial Sequence: Synthetic oligonucleotide
gguugacaguaaagugcag

SEQ ID NO: 1278862 - RNA, 19 nt, Artificial Sequence
  Description of Artificial Sequence: Synthetic oligonucleotide
uggauccauagagcccaaa

SEQ ID NO: 1278863 - RNA, 19 nt, Artificial Sequence
  Description of Artificial Sequence: Synthetic oligonucleotide
gcagcggggccugucaaug

SEQ ID NO: 1278864 - RNA, 19 nt, Artificial Sequence
  Description of Artificial Sequence: Synthetic oligonucleotide
gugagaguccgggcccuug

SEQ ID NO: 1278865 - RNA, 19 nt, Artificial Sequence
  Description of Artificial Sequence: Synthetic oligonucleotide
cccaccacaaagaugcgcu

SEQ ID NO: 1278866 - RNA, 19 nt, Artificial Sequence
  Description of Artificial Sequence: Synthetic oligonucleotide
ggccugucaaugaacucca

SEQ ID NO: 1278867 - RNA, 19 nt, Artificial Sequence
  Description of Artificial Sequence: Synthetic oligonucleotide
cgguccgccaggaugccgg

SEQ ID NO: 1278868 - RNA, 19 nt, Artificial Sequence
  Description of Artificial Sequence: Synthetic oligonucleotide
gcgagcugagccccuugcc

SEQ ID NO: 1278869 - RNA, 19 nt, Artificial Sequence
  Description of Artificial Sequence: Synthetic oligonucleotide
caccuugcguaagccuuug

SEQ ID NO: 1278870 - RNA, 19 nt, Artificial Sequence
  Description of Artificial Sequence: Synthetic oligonucleotide
gcggcauaacagaagguaa

SEQ ID NO: 1278871 - RNA, 19 nt, Artificial Sequence
  Description of Artificial Sequence: Synthetic oligonucleotide
uagccccuguggugggcga

SEQ ID NO: 1278872 - RNA, 19 nt, Artificial Sequence
  Description of Artificial Sequence: Synthetic oligonucleotide
cacgcagugugccucgagu

SEQ ID NO: 1278873 - RNA, 19 nt, Artificial Sequence
  Description of Artificial Sequence: Synthetic oligonucleotide
gcguggucauuacugucuc

SEQ ID NO: 1278874 - RNA, 19 nt, Artificial Sequence
  Description of Artificial Sequence: Synthetic oligonucleotide
accugugcgcagggacgcg

SEQ ID NO: 1278875 - RNA, 19 nt, Artificial Sequence
  Description of Artificial Sequence: Synthetic oligonucleotide
acuccacgcgaggcuuggg

SEQ ID NO: 1278876 - RNA, 19 nt, Artificial Sequence
  Description of Artificial Sequence: Synthetic oligonucleotide
caaagagccgagccugcgu

SEQ ID NO: 1278877 - RNA, 19 nt, Artificial Sequence
  Description of Artificial Sequence: Synthetic oligonucleotide
gccugcgugagaagcauga

SEQ ID NO: 1278878 - RNA, 19 nt, Artificial Sequence
  Description of Artificial Sequence: Synthetic oligonucleotide
cauacacgaccaggcccac

SEQ ID NO: 1278879 - RNA, 19 nt, Artificial Sequence
  Description of Artificial Sequence: Synthetic oligonucleotide
cgcagugugccucgagugc

SEQ ID NO: 1278880 - RNA, 19 nt, Artificial Sequence
  Description of Artificial Sequence: Synthetic oligonucleotide
gcgaagcggcuccugcacc

SEQ ID NO: 1278881 - RNA, 19 nt, Artificial Sequence
  Description of Artificial Sequence: Synthetic oligonucleotide
cccggcggcauaacagaag

SEQ ID NO: 1278882 - RNA, 19 nt, Artificial Sequence
  Description of Artificial Sequence: Synthetic oligonucleotide
cauuacugucucgggccca

SEQ ID NO: 1278883 - RNA, 19 nt, Artificial Sequence
  Description of Artificial Sequence: Synthetic oligonucleotide
ggggaaccggaugagaccu

SEQ ID NO: 1278884 - RNA, 19 nt, Artificial Sequence
  Description of Artificial Sequence: Synthetic oligonucleotide
guugacggagaaccugauu

SEQ ID NO: 1278885 - RNA, 19 nt, Artificial Sequence
  Description of Artificial Sequence: Synthetic oligonucleotide
aguggaugugguagccauu

SEQ ID NO: 1278886 - RNA, 19 nt, Artificial Sequence
  Description of Artificial Sequence: Synthetic oligonucleotide
cgcgcugcgagcugagccc

SEQ ID NO: 1278887 - RNA, 19 nt, Artificial Sequence
  Description of Artificial Sequence: Synthetic oligonucleotide
gacgcgcugcgagcugagc

SEQ ID NO: 1278888 - RNA, 19 nt, Artificial Sequence
  Description of Artificial Sequence: Synthetic oligonucleotide
gccgaggaccguauugcug

SEQ ID NO: 1278889 - RNA, 19 nt, Artificial Sequence
  Description of Artificial Sequence: Synthetic oligonucleotide
caccguggguuugguggcc

SEQ ID NO: 1278890 - RNA, 19 nt, Artificial Sequence
  Description of Artificial Sequence: Synthetic oligonucleotide
ccgaggaccguauugcugu

SEQ ID NO: 1278891 - RNA, 19 nt, Artificial Sequence
  Description of Artificial Sequence: Synthetic oligonucleotide
gcccagagugucacgcucc

SEQ ID NO: 1278892 - RNA, 19 nt, Artificial Sequence
  Description of Artificial Sequence: Synthetic oligonucleotide
gcuagcugcggcucaucaa

SEQ ID NO: 1278893 - RNA, 19 nt, Artificial Sequence
  Description of Artificial Sequence: Synthetic oligonucleotide
ccgggaucugcccauccuc

SEQ ID NO: 1278894 - RNA, 19 nt, Artificial Sequence
  Description of Artificial Sequence: Synthetic oligonucleotide
cucgguggagaauguccua

SEQ ID NO: 1278895 - RNA, 19 nt, Artificial Sequence
  Description of Artificial Sequence: Synthetic oligonucleotide
gcugucuguguggaugauc

SEQ ID NO: 1278896 - RNA, 19 nt, Artificial Sequence
  Description of Artificial Sequence: Synthetic oligonucleotide
ggaaccgguugaugcugca

SEQ ID NO: 1278897 - RNA, 19 nt, Artificial Sequence
  Description of Artificial Sequence: Synthetic oligonucleotide
caacucaauuucaguggau

SEQ ID NO: 1278898 - RNA, 19 nt, Artificial Sequence
  Description of Artificial Sequence: Synthetic oligonucleotide
agaugacuuccgggaucug

SEQ ID NO: 1278899 - RNA, 19 nt, Artificial Sequence
  Description of Artificial Sequence: Synthetic oligonucleotide
agccugcgugagaagcaug

SEQ ID NO: 1278900 - RNA, 19 nt, Artificial Sequence
  Description of Artificial Sequence: Synthetic oligonucleotide
ccccagugccuugggaugg

SEQ ID NO: 1278901 - RNA, 19 nt, Artificial Sequence
  Description of Artificial Sequence: Synthetic oligonucleotide
uuguucccggcggcauaac

SEQ ID NO: 1278902 - RNA, 19 nt, Artificial Sequence
  Description of Artificial Sequence: Synthetic oligonucleotide
ccgguugaugcugcacucc

SEQ ID NO: 1278903 - RNA, 19 nt, Artificial Sequence
  Description of Artificial Sequence: Synthetic oligonucleotide
ugucagcccgcagguguuu

SEQ ID NO: 1278904 - RNA, 19 nt, Artificial Sequence
  Description of Artificial Sequence: Synthetic oligonucleotide
ccuugcguaagccuuuggu

SEQ ID NO: 1278905 - RNA, 19 nt, Artificial Sequence
  Description of Artificial Sequence: Synthetic oligonucleotide
gcaggcaguguaguucaca

SEQ ID NO: 1278906 - RNA, 19 nt, Artificial Sequence
  Description of Artificial Sequence: Synthetic oligonucleotide
guucuggccgaggaccgua

SEQ ID NO: 1278907 - RNA, 19 nt, Artificial Sequence
  Description of Artificial Sequence: Synthetic oligonucleotide
gucgaaccucacggaugcc

SEQ ID NO: 1278908 - RNA, 19 nt, Artificial Sequence
  Description of Artificial Sequence: Synthetic oligonucleotide
gaacacaaggcagccccuu

SEQ ID NO: 1278909 - RNA, 19 nt, Artificial Sequence
  Description of Artificial Sequence: Synthetic oligonucleotide
ggcgucggcuguguucuug

SEQ ID NO: 1278910 - RNA, 19 nt, Artificial Sequence
  Description of Artificial Sequence: Synthetic oligonucleotide
cucgguccgccaggaugcc

SEQ ID NO: 1278911 - RNA, 19 nt, Artificial Sequence
  Description of Artificial Sequence: Synthetic oligonucleotide
acgucgcacagcaccucgu

SEQ ID NO: 1278912 - RNA, 19 nt, Artificial Sequence
  Description of Artificial Sequence: Synthetic oligonucleotide
gcuucagaccagcguacua

SEQ ID NO: 1278913 - RNA, 19 nt, Artificial Sequence
  Description of Artificial Sequence: Synthetic oligonucleotide
gcguacuacagcauugaau

SEQ ID NO: 1278914 - RNA, 19 nt, Artificial Sequence
  Description of Artificial Sequence: Synthetic oligonucleotide
cagcggggccugucaauga

SEQ ID NO: 1278915 - RNA, 19 nt, Artificial Sequence
  Description of Artificial Sequence: Synthetic oligonucleotide
cggcauaacagaagguaaa

SEQ ID NO: 1278916 - RNA, 19 nt, Artificial Sequence
  Description of Artificial Sequence: Synthetic oligonucleotide
cggcucaucaaagagccga

SEQ ID NO: 1278917 - RNA, 19 nt, Artificial Sequence
  Description of Artificial Sequence: Synthetic oligonucleotide
gagccugcgugagaagcau

SEQ ID NO: 1278918 - RNA, 19 nt, Artificial Sequence
  Description of Artificial Sequence: Synthetic oligonucleotide
gucucgggcccaauuugua

SEQ ID NO: 1278919 - RNA, 19 nt, Artificial Sequence
  Description of Artificial Sequence: Synthetic oligonucleotide
ccagugucguucuggccga

SEQ ID NO: 1278920 - RNA, 19 nt, Artificial Sequence
  Description of Artificial Sequence: Synthetic oligonucleotide
cagcugaaaccagugucgu

SEQ ID NO: 1278921 - RNA, 19 nt, Artificial Sequence
  Description of Artificial Sequence: Synthetic oligonucleotide
ggcgacucaugagucaccu

SEQ ID NO: 1278922 - RNA, 19 nt, Artificial Sequence
  Description of Artificial Sequence: Synthetic oligonucleotide
ggcgauggcgucggcugug

SEQ ID NO: 1278923 - RNA, 19 nt, Artificial Sequence
  Description of Artificial Sequence: Synthetic oligonucleotide
agcguggcgcaggcagugu

SEQ ID NO: 1278924 - RNA, 19 nt, Artificial Sequence
  Description of Artificial Sequence: Synthetic oligonucleotide
ccguggauggauccauaga

SEQ ID NO: 1278925 - RNA, 19 nt, Artificial Sequence
  Description of Artificial Sequence: Synthetic oligonucleotide
gaccaacuccccagugccu

SEQ ID NO: 1278926 - RNA, 19 nt, Artificial Sequence
  Description of Artificial Sequence: Synthetic oligonucleotide
cuugagcguggcgcaggca

SEQ ID NO: 1278927 - RNA, 19 nt, Artificial Sequence
  Description of Artificial Sequence: Synthetic oligonucleotide
gugggcccguggauggauc

SEQ ID NO: 1278928 - RNA, 19 nt, Artificial Sequence
  Description of Artificial Sequence: Synthetic oligonucleotide
cagugucguucuggccgag

SEQ ID NO: 1278929 - RNA, 19 nt, Artificial Sequence
  Description of Artificial Sequence: Synthetic oligonucleotide
gaagcggcuccugcaccgu

SEQ ID NO: 1278930 - RNA, 19 nt, Artificial Sequence
  Description of Artificial Sequence: Synthetic oligonucleotide
gggcgacucaugagucacc

SEQ ID NO: 1278931 - RNA, 19 nt, Artificial Sequence
  Description of Artificial Sequence: Synthetic oligonucleotide
agugagaguccgggcccuu

SEQ ID NO: 1278932 - RNA, 19 nt, Artificial Sequence
  Description of Artificial Sequence: Synthetic oligonucleotide
cugugccgggccugcugca

SEQ ID NO: 1278933 - RNA, 19 nt, Artificial Sequence
  Description of Artificial Sequence: Synthetic oligonucleotide
cccgaccaacuccccagug

SEQ ID NO: 1278934 - RNA, 19 nt, Artificial Sequence
  Description of Artificial Sequence: Synthetic oligonucleotide
gccgagccugcgugagaag

SEQ ID NO: 1278935 - RNA, 19 nt, Artificial Sequence
  Description of Artificial Sequence: Synthetic oligonucleotide
auggauccauagagcccaa

SEQ ID NO: 1278936 - RNA, 19 nt, Artificial Sequence
  Description of Artificial Sequence: Synthetic oligonucleotide
cugugcgcagggacgcgcu

SEQ ID NO: 1278937 - RNA, 19 nt, Artificial Sequence
  Description of Artificial Sequence: Synthetic oligonucleotide
gcgcuuguugacggagaac

SEQ ID NO: 1278938 - RNA, 19 nt, Artificial Sequence
  Description of Artificial Sequence: Synthetic oligonucleotide
cgagccugcgugagaagca

SEQ ID NO: 1278939 - RNA, 19 nt, Artificial Sequence
  Description of Artificial Sequence: Synthetic oligonucleotide
cagcagcggggccugucaa

SEQ ID NO: 1278940 - RNA, 19 nt, Artificial Sequence
  Description of Artificial Sequence: Synthetic oligonucleotide
gcgcugcgagcugagcccc

SEQ ID NO: 1278941 - RNA, 19 nt, Artificial Sequence
  Description of Artificial Sequence: Synthetic oligonucleotide
ccccuuccaugaugaugag

SEQ ID NO: 1278942 - RNA, 19 nt, Artificial Sequence
  Description of Artificial Sequence: Synthetic oligonucleotide
ggaccguauugcugucugu

SEQ ID NO: 1278943 - RNA, 19 nt, Artificial Sequence
  Description of Artificial Sequence: Synthetic oligonucleotide
acgcgaggcuugggguuga

SEQ ID NO: 1278944 - RNA, 19 nt, Artificial Sequence
  Description of Artificial Sequence: Synthetic oligonucleotide
gaccagcguacuacagcau

SEQ ID NO: 1278945 - RNA, 19 nt, Artificial Sequence
  Description of Artificial Sequence: Synthetic oligonucleotide
ggacgcgcugcgagcugag

SEQ ID NO: 1278946 - RNA, 19 nt, Artificial Sequence
  Description of Artificial Sequence: Synthetic oligonucleotide
ggccgaggaccguauugcu

SEQ ID NO: 1278947 - RNA, 19 nt, Artificial Sequence
  Description of Artificial Sequence: Synthetic oligonucleotide
gcccaccaagacugaggga

SEQ ID NO: 1278948 - RNA, 19 nt, Artificial Sequence
  Description of Artificial Sequence: Synthetic oligonucleotide
gggugaccucgguggagaa

SEQ ID NO: 1278949 - RNA, 19 nt, Artificial Sequence
  Description of Artificial Sequence: Synthetic oligonucleotide
cgagccaucgcagcugaaa

SEQ ID NO: 1278950 - RNA, 19 nt, Artificial Sequence
  Description of Artificial Sequence: Synthetic oligonucleotide
ggucaccucccauggcuuu

SEQ ID NO: 1278951 - RNA, 19 nt, Artificial Sequence
  Description of Artificial Sequence: Synthetic oligonucleotide
gcguggcgcaggcagugua

SEQ ID NO: 1278952 - RNA, 19 nt, Artificial Sequence
  Description of Artificial Sequence: Synthetic oligonucleotide
cgaggaccguauugcuguc

SEQ ID NO: 1278953 - RNA, 19 nt, Artificial Sequence
  Description of Artificial Sequence: Synthetic oligonucleotide
ggcuuuccaccugcuggaa

SEQ ID NO: 1278954 - RNA, 19 nt, Artificial Sequence
  Description of Artificial Sequence: Synthetic oligonucleotide
uggcgucggcuguguucuu

SEQ ID NO: 1278955 - RNA, 19 nt, Artificial Sequence
  Description of Artificial Sequence: Synthetic oligonucleotide
cccuagcgccuuccucuug

SEQ ID NO: 1278956 - RNA, 19 nt, Artificial Sequence
  Description of Artificial Sequence: Synthetic oligonucleotide
cggacugugccgggccugc

SEQ ID NO: 1278957 - RNA, 19 nt, Artificial Sequence
  Description of Artificial Sequence: Synthetic oligonucleotide
cccucggcggcgauggcgu

SEQ ID NO: 1278958 - RNA, 19 nt, Artificial Sequence
  Description of Artificial Sequence: Synthetic oligonucleotide
ccggacugugccgggccug

SEQ ID NO: 1278959 - RNA, 19 nt, Artificial Sequence
  Description of Artificial Sequence: Synthetic oligonucleotide
ggugaccucgguggagaau

SEQ ID NO: 1278960 - RNA, 19 nt, Artificial Sequence
  Description of Artificial Sequence: Synthetic oligonucleotide
ccugcgugagaagcaugaa

SEQ ID NO: 1278961 - RNA, 19 nt, Artificial Sequence
  Description of Artificial Sequence: Synthetic oligonucleotide
cgggcccuugagcguggcg

SEQ ID NO: 1278962 - RNA, 19 nt, Artificial Sequence
  Description of Artificial Sequence: Synthetic oligonucleotide
gcccgaccaacuccccagu

SEQ ID NO: 1278963 - RNA, 19 nt, Artificial Sequence
  Description of Artificial Sequence: Synthetic oligonucleotide
ccccuugccccaccaggaa

SEQ ID NO: 1278964 - RNA, 19 nt, Artificial Sequence
  Description of Artificial Sequence: Synthetic oligonucleotide
gggaaccggaugagaccua

SEQ ID NO: 1278965 - RNA, 19 nt, Artificial Sequence
  Description of Artificial Sequence: Synthetic oligonucleotide
gccggacugugccgggccu

SEQ ID NO: 1278966 - RNA, 19 nt, Artificial Sequence
  Description of Artificial Sequence: Synthetic oligonucleotide
ccuucccuagcgccuuccu

SEQ ID NO: 1278967 - RNA, 19 nt, Artificial Sequence
  Description of Artificial Sequence: Synthetic oligonucleotide
gcgacucaugagucaccuu

SEQ ID NO: 1278968 - RNA, 19 nt, Artificial Sequence
  Description of Artificial Sequence: Synthetic oligonucleotide
ccaccacaaagaugcgcuu

SEQ ID NO: 1278969 - RNA, 19 nt, Artificial Sequence
  Description of Artificial Sequence: Synthetic oligonucleotide
gcccguggauggauccaua

SEQ ID NO: 1278970 - RNA, 19 nt, Artificial Sequence
  Description of Artificial Sequence: Synthetic oligonucleotide
gccgggccugcugcaaacu

SEQ ID NO: 1278971 - RNA, 19 nt, Artificial Sequence
  Description of Artificial Sequence: Synthetic oligonucleotide
gccccuguggugggcgacu

SEQ ID NO: 1278972 - RNA, 19 nt, Artificial Sequence
  Description of Artificial Sequence: Synthetic oligonucleotide
gggccuucccuagcgccuu

SEQ ID NO: 1278973 - RNA, 19 nt, Artificial Sequence
  Description of Artificial Sequence: Synthetic oligonucleotide
ggacugugccgggccugcu

SEQ ID NO: 1278974 - RNA, 19 nt, Artificial Sequence
  Description of Artificial Sequence: Synthetic oligonucleotide
ccugcaccguggguuuggu

SEQ ID NO: 1278975 - RNA, 19 nt, Artificial Sequence
  Description of Artificial Sequence: Synthetic oligonucleotide
cgcgaggcuugggguugac

SEQ ID NO: 1278976 - RNA, 19 nt, Artificial Sequence
  Description of Artificial Sequence: Synthetic oligonucleotide
cguucuggccgaggaccgu

SEQ ID NO: 1278977 - RNA, 19 nt, Artificial Sequence
  Description of Artificial Sequence: Synthetic oligonucleotide
ccucucgguccgccaggau

SEQ ID NO: 1278978 - RNA, 19 nt, Artificial Sequence
  Description of Artificial Sequence: Synthetic oligonucleotide
acauaaacuacuuaaagag

SEQ ID NO: 1278979 - RNA, 19 nt, Artificial Sequence
  Description of Artificial Sequence: Synthetic oligonucleotide
aaauuuucgacaaucuugc

SEQ ID NO: 1278980 - RNA, 19 nt, Artificial Sequence
  Description of Artificial Sequence: Synthetic oligonucleotide
aauggaaugagauagcaaa

SEQ ID NO: 1278981 - RNA, 19 nt, Artificial Sequence
  Description of Artificial Sequence: Synthetic oligonucleotide
aaacuacuuaaagagaagc

SEQ ID NO: 1278982 - RNA, 19 nt, Artificial Sequence
  Description of Artificial Sequence: Synthetic oligonucleotide
auaaauagacaccugagug

SEQ ID NO: 1278983 - RNA, 19 nt, Artificial Sequence
  Description of Artificial Sequence: Synthetic oligonucleotide
aaaauuuucgacaaucuug

SEQ ID NO: 1278984 - RNA, 19 nt, Artificial Sequence
  Description of Artificial Sequence: Synthetic oligonucleotide
uuuucgacaaucuugcuug

SEQ ID NO: 1278985 - RNA, 19 nt, Artificial Sequence
  Description of Artificial Sequence: Synthetic oligonucleotide
ucauaguuaaagagcaucg

SEQ ID NO: 1278986 - RNA, 19 nt, Artificial Sequence
  Description of Artificial Sequence: Synthetic oligonucleotide
ugauuauuggggcuaaggg

SEQ ID NO: 1278987 - RNA, 19 nt, Artificial Sequence
  Description of Artificial Sequence: Synthetic oligonucleotide
agaguugaaaccugcacgc

SEQ ID NO: 1278988 - RNA, 19 nt, Artificial Sequence
  Description of Artificial Sequence: Synthetic oligonucleotide
ugagauagcaaaaucaaaa

SEQ ID NO: 1278989 - RNA, 19 nt, Artificial Sequence
  Description of Artificial Sequence: Synthetic oligonucleotide
agauagcaaaaucaaaacg

SEQ ID NO: 1278990 - RNA, 19 nt, Artificial Sequence
  Description of Artificial Sequence: Synthetic oligonucleotide
agagacaugauucuuaagu

SEQ ID NO: 1278991 - RNA, 19 nt, Artificial Sequence
  Description of Artificial Sequence: Synthetic oligonucleotide
ucuuaaguguuuucaaagg

SEQ ID NO: 1278992 - RNA, 19 nt, Artificial Sequence
  Description of Artificial Sequence: Synthetic oligonucleotide
ucuagcuuggacacaaagg

SEQ ID NO: 1278993 - RNA, 19 nt, Artificial Sequence
  Description of Artificial Sequence: Synthetic oligonucleotide
gaugcggucgcucuuaggg

SEQ ID NO: 1278994 - RNA, 19 nt, Artificial Sequence
  Description of Artificial Sequence: Synthetic oligonucleotide
gaugcuuuguuuugggacg

SEQ ID NO: 1278995 - RNA, 19 nt, Artificial Sequence
  Description of Artificial Sequence: Synthetic oligonucleotide
acgaacacacgcuaguugc

SEQ ID NO: 1278996 - RNA, 19 nt, Artificial Sequence
  Description of Artificial Sequence: Synthetic oligonucleotide
gauuauuggggcuaagggc

SEQ ID NO: 1278997 - RNA, 19 nt, Artificial Sequence
  Description of Artificial Sequence: Synthetic oligonucleotide
uaguuaaagagcaucgggc

SEQ ID NO: 1278998 - RNA, 19 nt, Artificial Sequence
  Description of Artificial Sequence: Synthetic oligonucleotide
ucuuccaacauaaacuacu

SEQ ID NO: 1278999 - RNA, 19 nt, Artificial Sequence
  Description of Artificial Sequence: Synthetic oligonucleotide
ugagcuuuaguccacuggc

SEQ ID NO: 1279000 - RNA, 19 nt, Artificial Sequence
  Description of Artificial Sequence: Synthetic oligonucleotide
ucacaaaaguggcagcucg

SEQ ID NO: 1279001 - RNA, 19 nt, Artificial Sequence
  Description of Artificial Sequence: Synthetic oligonucleotide
gaaaccugcacgcuuuucg

SEQ ID NO: 1279002 - RNA, 19 nt, Artificial Sequence
  Description of Artificial Sequence: Synthetic oligonucleotide
aauacacacuucccuuacc

SEQ ID NO: 1279003 - RNA, 19 nt, Artificial Sequence
  Description of Artificial Sequence: Synthetic oligonucleotide
uaaauagacaccugaguga

SEQ ID NO: 1279004 - RNA, 19 nt, Artificial Sequence
  Description of Artificial Sequence: Synthetic oligonucleotide
uuuucagacucaaaguaac

SEQ ID NO: 1279005 - RNA, 19 nt, Artificial Sequence
  Description of Artificial Sequence: Synthetic oligonucleotide
acuucgugauuauuggggc

SEQ ID NO: 1279006 - RNA, 19 nt, Artificial Sequence
  Description of Artificial Sequence: Synthetic oligonucleotide
aauaccugugauguguccg

SEQ ID NO: 1279007 - RNA, 19 nt, Artificial Sequence
  Description of Artificial Sequence: Synthetic oligonucleotide
uguguugcgguccucagug

SEQ ID NO: 1279008 - RNA, 19 nt, Artificial Sequence
  Description of Artificial Sequence: Synthetic oligonucleotide
uuuugggacgucuagcuug

SEQ ID NO: 1279009 - RNA, 19 nt, Artificial Sequence
  Description of Artificial Sequence: Synthetic oligonucleotide
aggucaaacagccacgguc

SEQ ID NO: 1279010 - RNA, 19 nt, Artificial Sequence
  Description of Artificial Sequence: Synthetic oligonucleotide
guuagugugacaaucuucc

SEQ ID NO: 1279011 - RNA, 19 nt, Artificial Sequence
  Description of Artificial Sequence: Synthetic oligonucleotide
guaacaaacagagaugagc

SEQ ID NO: 1279012 - RNA, 19 nt, Artificial Sequence
  Description of Artificial Sequence: Synthetic oligonucleotide
uaaacuacuuaaagagaag

SEQ ID NO: 1279013 - RNA, 19 nt, Artificial Sequence
  Description of Artificial Sequence: Synthetic oligonucleotide
aacauccacacgaacacac

SEQ ID NO: 1279014 - RNA, 19 nt, Artificial Sequence
  Description of Artificial Sequence: Synthetic oligonucleotide
ucugaaacgaaggacacac

SEQ ID NO: 1279015 - RNA, 19 nt, Artificial Sequence
  Description of Artificial Sequence: Synthetic oligonucleotide
uagugcaaaauuuucgaca

SEQ ID NO: 1279016 - RNA, 19 nt, Artificial Sequence
  Description of Artificial Sequence: Synthetic oligonucleotide
ugcacuucgugauuauugg

SEQ ID NO: 1279017 - RNA, 19 nt, Artificial Sequence
  Description of Artificial Sequence: Synthetic oligonucleotide
gagacaugauucuuaagug

SEQ ID NO: 1279018 - RNA, 19 nt, Artificial Sequence
  Description of Artificial Sequence: Synthetic oligonucleotide
ucgacaaucuugcuugucc

SEQ ID NO: 1279019 - RNA, 19 nt, Artificial Sequence
  Description of Artificial Sequence: Synthetic oligonucleotide
aagcugaccccaugcaccc

SEQ ID NO: 1279020 - RNA, 19 nt, Artificial Sequence
  Description of Artificial Sequence: Synthetic oligonucleotide
gaaugagauagcaaaauca

SEQ ID NO: 1279021 - RNA, 19 nt, Artificial Sequence
  Description of Artificial Sequence: Synthetic oligonucleotide
aaugagauagcaaaaucaa

SEQ ID NO: 1279022 - RNA, 19 nt, Artificial Sequence
  Description of Artificial Sequence: Synthetic oligonucleotide
ucaccauaugaacgaaugg

SEQ ID NO: 1279023 - RNA, 19 nt, Artificial Sequence
  Description of Artificial Sequence: Synthetic oligonucleotide
cacuucgugauuauugggg

SEQ ID NO: 1279024 - RNA, 19 nt, Artificial Sequence
  Description of Artificial Sequence: Synthetic oligonucleotide
aguugcuugauagugugac

SEQ ID NO: 1279025 - RNA, 19 nt, Artificial Sequence
  Description of Artificial Sequence: Synthetic oligonucleotide
uuucggaagcguuccaugg

SEQ ID NO: 1279026 - RNA, 19 nt, Artificial Sequence
  Description of Artificial Sequence: Synthetic oligonucleotide
uaaguuagugugacaaucu

SEQ ID NO: 1279027 - RNA, 19 nt, Artificial Sequence
  Description of Artificial Sequence: Synthetic oligonucleotide
uguuuucugaaacgaagga

SEQ ID NO: 1279028 - RNA, 19 nt, Artificial Sequence
  Description of Artificial Sequence: Synthetic oligonucleotide
ucagucgacgcgaacaggc

SEQ ID NO: 1279029 - RNA, 19 nt, Artificial Sequence
  Description of Artificial Sequence: Synthetic oligonucleotide
cagacucaaaguaacaaac

SEQ ID NO: 1279030 - RNA, 19 nt, Artificial Sequence
  Description of Artificial Sequence: Synthetic oligonucleotide
ucugacuccagacguaggc

SEQ ID NO: 1279031 - RNA, 19 nt, Artificial Sequence
  Description of Artificial Sequence: Synthetic oligonucleotide
aguuaaagagcaucgggca

SEQ ID NO: 1279032 - RNA, 19 nt, Artificial Sequence
  Description of Artificial Sequence: Synthetic oligonucleotide
augaacgaaugguagagug

SEQ ID NO: 1279033 - RNA, 19 nt, Artificial Sequence
  Description of Artificial Sequence: Synthetic oligonucleotide
ucaaaacgaaacgaaagga

SEQ ID NO: 1279034 - RNA, 19 nt, Artificial Sequence
  Description of Artificial Sequence: Synthetic oligonucleotide
aacugaugcagagacauga

SEQ ID NO: 1279035 - RNA, 19 nt, Artificial Sequence
  Description of Artificial Sequence: Synthetic oligonucleotide
acgaaugguagagugagcg

SEQ ID NO: 1279036 - RNA, 19 nt, Artificial Sequence
  Description of Artificial Sequence: Synthetic oligonucleotide
ugaaaucccaaauugucau

SEQ ID NO: 1279037 - RNA, 19 nt, Artificial Sequence
  Description of Artificial Sequence: Synthetic oligonucleotide
cacgcuaguugcuugauag

SEQ ID NO: 1279038 - RNA, 19 nt, Artificial Sequence
  Description of Artificial Sequence: Synthetic oligonucleotide
gaacgaaugguagagugag

SEQ ID NO: 1279039 - RNA, 19 nt, Artificial Sequence
  Description of Artificial Sequence: Synthetic oligonucleotide
cucggcuucacauuauccg

SEQ ID NO: 1279040 - RNA, 19 nt, Artificial Sequence
  Description of Artificial Sequence: Synthetic oligonucleotide
uacuuaaagagaagcuuug

SEQ ID NO: 1279041 - RNA, 19 nt, Artificial Sequence
  Description of Artificial Sequence: Synthetic oligonucleotide
uuaaguuagugugacaauc

SEQ ID NO: 1279042 - RNA, 19 nt, Artificial Sequence
  Description of Artificial Sequence: Synthetic oligonucleotide
auaugaacgaaugguagag

SEQ ID NO: 1279043 - RNA, 19 nt, Artificial Sequence
  Description of Artificial Sequence: Synthetic oligonucleotide
uuagcagacaauacacacu

SEQ ID NO: 1279044 - RNA, 19 nt, Artificial Sequence
  Description of Artificial Sequence: Synthetic oligonucleotide
ucggcuucacauuauccgg

SEQ ID NO: 1279045 - RNA, 19 nt, Artificial Sequence
  Description of Artificial Sequence: Synthetic oligonucleotide
uuugggacgucuagcuugg

SEQ ID NO: 1279046 - RNA, 19 nt, Artificial Sequence
  Description of Artificial Sequence: Synthetic oligonucleotide
ucgguuaauucucaggauc

SEQ ID NO: 1279047 - RNA, 19 nt, Artificial Sequence
  Description of Artificial Sequence: Synthetic oligonucleotide
uguuuugggacgucuagcu

SEQ ID NO: 1279048 - RNA, 19 nt, Artificial Sequence
  Description of Artificial Sequence: Synthetic oligonucleotide
cuuguagaugugcacuucg

SEQ ID NO: 1279049 - RNA, 19 nt, Artificial Sequence
  Description of Artificial Sequence: Synthetic oligonucleotide
aaauagacaccugagugau

SEQ ID NO: 1279050 - RNA, 19 nt, Artificial Sequence
  Description of Artificial Sequence: Synthetic oligonucleotide
agugagcgaaguccguucc

SEQ ID NO: 1279051 - RNA, 19 nt, Artificial Sequence
  Description of Artificial Sequence: Synthetic oligonucleotide
augagcuuuaguccacugg

SEQ ID NO: 1279052 - RNA, 19 nt, Artificial Sequence
  Description of Artificial Sequence: Synthetic oligonucleotide
agacaauacacacuucccu

SEQ ID NO: 1279053 - RNA, 19 nt, Artificial Sequence
  Description of Artificial Sequence: Synthetic oligonucleotide
uuaaagagcaucgggcagc

SEQ ID NO: 1279054 - RNA, 19 nt, Artificial Sequence
  Description of Artificial Sequence: Synthetic oligonucleotide
aaaacguuguugggaugcc

SEQ ID NO: 1279055 - RNA, 19 nt, Artificial Sequence
  Description of Artificial Sequence: Synthetic oligonucleotide
ugaacgaaugguagaguga

SEQ ID NO: 1279056 - RNA, 19 nt, Artificial Sequence
  Description of Artificial Sequence: Synthetic oligonucleotide
ucuugcugccccaaggugu

SEQ ID NO: 1279057 - RNA, 19 nt, Artificial Sequence
  Description of Artificial Sequence: Synthetic oligonucleotide
aucggcaacagacacggug

SEQ ID NO: 1279058 - RNA, 19 nt, Artificial Sequence
  Description of Artificial Sequence: Synthetic oligonucleotide
acaagugacgaugcggucg

SEQ ID NO: 1279059 - RNA, 19 nt, Artificial Sequence
  Description of Artificial Sequence: Synthetic oligonucleotide
cuaguugcuugauagugug

SEQ ID NO: 1279060 - RNA, 19 nt, Artificial Sequence
  Description of Artificial Sequence: Synthetic oligonucleotide
caaaacguuguugggaugc

SEQ ID NO: 1279061 - RNA, 19 nt, Artificial Sequence
  Description of Artificial Sequence: Synthetic oligonucleotide
aacuacuuaaagagaagcu

SEQ ID NO: 1279062 - RNA, 19 nt, Artificial Sequence
  Description of Artificial Sequence: Synthetic oligonucleotide
guaggcagaaaacacucug

SEQ ID NO: 1279063 - RNA, 19 nt, Artificial Sequence
  Description of Artificial Sequence: Synthetic oligonucleotide
guuaaagagcaucgggcag

SEQ ID NO: 1279064 - RNA, 19 nt, Artificial Sequence
  Description of Artificial Sequence: Synthetic oligonucleotide
ccaaaaggcaucuugcugc

SEQ ID NO: 1279065 - RNA, 19 nt, Artificial Sequence
  Description of Artificial Sequence: Synthetic oligonucleotide
uuucagacucaaaguaaca

SEQ ID NO: 1279066 - RNA, 19 nt, Artificial Sequence
  Description of Artificial Sequence: Synthetic oligonucleotide
cuaagggcgaucuggguac

SEQ ID NO: 1279067 - RNA, 19 nt, Artificial Sequence
  Description of Artificial Sequence: Synthetic oligonucleotide
cauaguuaaagagcaucgg

SEQ ID NO: 1279068 - RNA, 19 nt, Artificial Sequence
  Description of Artificial Sequence: Synthetic oligonucleotide
agacauguugcgcuggaug

SEQ ID NO: 1279069 - RNA, 19 nt, Artificial Sequence
  Description of Artificial Sequence: Synthetic oligonucleotide
auuuucgacaaucuugcuu

SEQ ID NO: 1279070 - RNA, 19 nt, Artificial Sequence
  Description of Artificial Sequence: Synthetic oligonucleotide
aaaccugcacgcuuuucga

SEQ ID NO: 1279071 - RNA, 19 nt, Artificial Sequence
  Description of Artificial Sequence: Synthetic oligonucleotide
caaacagagaugagccggg

SEQ ID NO: 1279072 - RNA, 19 nt, Artificial Sequence
  Description of Artificial Sequence: Synthetic oligonucleotide
acuuaaagagaagcuuugg

SEQ ID NO: 1279073 - RNA, 19 nt, Artificial Sequence
  Description of Artificial Sequence: Synthetic oligonucleotide
auagugugacaguguuucc

SEQ ID NO: 1279074 - RNA, 19 nt, Artificial Sequence
  Description of Artificial Sequence: Synthetic oligonucleotide
ucucuuguccauguuucgg

SEQ ID NO: 1279075 - RNA, 19 nt, Artificial Sequence
  Description of Artificial Sequence: Synthetic oligonucleotide
acagccacggucgucauag

SEQ ID NO: 1279076 - RNA, 19 nt, Artificial Sequence
  Description of Artificial Sequence: Synthetic oligonucleotide
augauucuuaaguguuuuc

SEQ ID NO: 1279077 - RNA, 19 nt, Artificial Sequence
  Description of Artificial Sequence: Synthetic oligonucleotide
agcaaaacguuguugggau

SEQ ID NO: 1279078 - RNA, 19 nt, Artificial Sequence
  Description of Artificial Sequence: Synthetic oligonucleotide
cauaaacuacuuaaagaga

SEQ ID NO: 1279079 - RNA, 19 nt, Artificial Sequence
  Description of Artificial Sequence: Synthetic oligonucleotide
auggcagacauguugcgcu

SEQ ID NO: 1279080 - RNA, 19 nt, Artificial Sequence
  Description of Artificial Sequence: Synthetic oligonucleotide
gugauuauuggggcuaagg

SEQ ID NO: 1279081 - RNA, 19 nt, Artificial Sequence
  Description of Artificial Sequence: Synthetic oligonucleotide
gauucgcggacucugguca

SEQ ID NO: 1279082 - RNA, 19 nt, Artificial Sequence
  Description of Artificial Sequence: Synthetic oligonucleotide
ggucgucauaguuaaagag

SEQ ID NO: 1279083 - RNA, 19 nt, Artificial Sequence
  Description of Artificial Sequence: Synthetic oligonucleotide
uucagacucaaaguaacaa

SEQ ID NO: 1279084 - RNA, 19 nt, Artificial Sequence
  Description of Artificial Sequence: Synthetic oligonucleotide
aggaccguggagcgaaucg

SEQ ID NO: 1279085 - RNA, 19 nt, Artificial Sequence
  Description of Artificial Sequence: Synthetic oligonucleotide
uuuaaguuagugugacaau

SEQ ID NO: 1279086 - RNA, 19 nt, Artificial Sequence
  Description of Artificial Sequence: Synthetic oligonucleotide
acuacuuaaagagaagcuu

SEQ ID NO: 1279087 - RNA, 19 nt, Artificial Sequence
  Description of Artificial Sequence: Synthetic oligonucleotide
aaugguagagugagcgaag

SEQ ID NO: 1279088 - RNA, 19 nt, Artificial Sequence
  Description of Artificial Sequence: Synthetic oligonucleotide
acggucgucauaguuaaag

SEQ ID NO: 1279089 - RNA, 19 nt, Artificial Sequence
  Description of Artificial Sequence: Synthetic oligonucleotide
cauccacacgaacacacgc

SEQ ID NO: 1279090 - RNA, 19 nt, Artificial Sequence
  Description of Artificial Sequence: Synthetic oligonucleotide
aggcaucggcaacagacac

SEQ ID NO: 1279091 - RNA, 19 nt, Artificial Sequence
  Description of Artificial Sequence: Synthetic oligonucleotide
uccaucgaugccaguagug

SEQ ID NO: 1279092 - RNA, 19 nt, Artificial Sequence
  Description of Artificial Sequence: Synthetic oligonucleotide
guuuucugaaacgaaggac

SEQ ID NO: 1279093 - RNA, 19 nt, Artificial Sequence
  Description of Artificial Sequence: Synthetic oligonucleotide
aauuuucgacaaucuugcu

SEQ ID NO: 1279094 - RNA, 19 nt, Artificial Sequence
  Description of Artificial Sequence: Synthetic oligonucleotide
acaggugauuggcucuagc

SEQ ID NO: 1279095 - RNA, 19 nt, Artificial Sequence
  Description of Artificial Sequence: Synthetic oligonucleotide
uccagacguaggcauugcg

SEQ ID NO: 1279096 - RNA, 19 nt, Artificial Sequence
  Description of Artificial Sequence: Synthetic oligonucleotide
ucggaagcguuccauggca

SEQ ID NO: 1279097 - RNA, 19 nt, Artificial Sequence
  Description of Artificial Sequence: Synthetic oligonucleotide
uucccuuacccuuuaaguu

SEQ ID NO: 1279098 - RNA, 19 nt, Artificial Sequence
  Description of Artificial Sequence: Synthetic oligonucleotide
aaguuagugugacaaucuu

SEQ ID NO: 1279099 - RNA, 19 nt, Artificial Sequence
  Description of Artificial Sequence: Synthetic oligonucleotide
ucccuuacccuuuaaguua

SEQ ID NO: 1279100 - RNA, 19 nt, Artificial Sequence
  Description of Artificial Sequence: Synthetic oligonucleotide
gucauaguuaaagagcauc

SEQ ID NO: 1279101 - RNA, 19 nt, Artificial Sequence
  Description of Artificial Sequence: Synthetic oligonucleotide
guagugcaaaauuuucgac

SEQ ID NO: 1279102 - RNA, 19 nt, Artificial Sequence
  Description of Artificial Sequence: Synthetic oligonucleotide
cauaugaacgaaugguaga

SEQ ID NO: 1279103 - RNA, 19 nt, Artificial Sequence
  Description of Artificial Sequence: Synthetic oligonucleotide
uucggaagcguuccauggc

SEQ ID NO: 1279104 - RNA, 19 nt, Artificial Sequence
  Description of Artificial Sequence: Synthetic oligonucleotide
ggucaaacagccacggucg

SEQ ID NO: 1279105 - RNA, 19 nt, Artificial Sequence
  Description of Artificial Sequence: Synthetic oligonucleotide
aguccguuccccaugcugg

SEQ ID NO: 1279106 - RNA, 19 nt, Artificial Sequence
  Description of Artificial Sequence: Synthetic oligonucleotide
ucacauuauccggaggccc

SEQ ID NO: 1279107 - RNA, 19 nt, Artificial Sequence
  Description of Artificial Sequence: Synthetic oligonucleotide
ucgguuuucagaguugaaa

SEQ ID NO: 1279108 - RNA, 19 nt, Artificial Sequence
  Description of Artificial Sequence: Synthetic oligonucleotide
ccaccagucauuuucagac

SEQ ID NO: 1279109 - RNA, 19 nt, Artificial Sequence
  Description of Artificial Sequence: Synthetic oligonucleotide
aacgaaugguagagugagc

SEQ ID NO: 1279110 - RNA, 19 nt, Artificial Sequence
  Description of Artificial Sequence: Synthetic oligonucleotide
gacgcgaacaggcuccggc

SEQ ID NO: 1279111 - RNA, 19 nt, Artificial Sequence
  Description of Artificial Sequence: Synthetic oligonucleotide
acacucuccccacaacauc

SEQ ID NO: 1279112 - RNA, 19 nt, Artificial Sequence
  Description of Artificial Sequence: Synthetic oligonucleotide
uucacauuauccggaggcc

SEQ ID NO: 1279113 - RNA, 19 nt, Artificial Sequence
  Description of Artificial Sequence: Synthetic oligonucleotide
agucgacgcgaacaggcuc

SEQ ID NO: 1279114 - RNA, 19 nt, Artificial Sequence
  Description of Artificial Sequence: Synthetic oligonucleotide
gaaugguagagugagcgaa

SEQ ID NO: 1279115 - RNA, 19 nt, Artificial Sequence
  Description of Artificial Sequence: Synthetic oligonucleotide
caagugacgaugcggucgc

SEQ ID NO: 1279116 - RNA, 19 nt, Artificial Sequence
  Description of Artificial Sequence: Synthetic oligonucleotide
uggucagucgacgcgaaca

SEQ ID NO: 1279117 - RNA, 19 nt, Artificial Sequence
  Description of Artificial Sequence: Synthetic oligonucleotide
ccucaucaccauaugaacg

SEQ ID NO: 1279118 - RNA, 19 nt, Artificial Sequence
  Description of Artificial Sequence: Synthetic oligonucleotide
ccauaugaacgaaugguag

SEQ ID NO: 1279119 - RNA, 19 nt, Artificial Sequence
  Description of Artificial Sequence: Synthetic oligonucleotide
ugcggucgcucuuaggggc

SEQ ID NO: 1279120 - RNA, 19 nt, Artificial Sequence
  Description of Artificial Sequence: Synthetic oligonucleotide
aaauggaaugagauagcaa

SEQ ID NO: 1279121 - RNA, 19 nt, Artificial Sequence
  Description of Artificial Sequence: Synthetic oligonucleotide
ugauguguccguuguguuc

SEQ ID NO: 1279122 - RNA, 19 nt, Artificial Sequence
  Description of Artificial Sequence: Synthetic oligonucleotide
uggguacgaucccuguucc

SEQ ID NO: 1279123 - RNA, 19 nt, Artificial Sequence
  Description of Artificial Sequence: Synthetic oligonucleotide
cuuuaguccacuggcuccc

SEQ ID NO: 1279124 - RNA, 19 nt, Artificial Sequence
  Description of Artificial Sequence: Synthetic oligonucleotide
ggaaugagauagcaaaauc

SEQ ID NO: 1279125 - RNA, 19 nt, Artificial Sequence
  Description of Artificial Sequence: Synthetic oligonucleotide
gacaaucuugcuuguccac

SEQ ID NO: 1279126 - RNA, 19 nt, Artificial Sequence
  Description of Artificial Sequence: Synthetic oligonucleotide
ugagcgaaguccguucccc

SEQ ID NO: 1279127 - RNA, 19 nt, Artificial Sequence
  Description of Artificial Sequence: Synthetic oligonucleotide
guacgaucccuguuccagg

SEQ ID NO: 1279128 - RNA, 19 nt, Artificial Sequence
  Description of Artificial Sequence: Synthetic oligonucleotide
caacgcuguuuucugaaac

SEQ ID NO: 1279129 - RNA, 19 nt, Artificial Sequence
  Description of Artificial Sequence: Synthetic oligonucleotide
ucuccaaggcuguguugcg

SEQ ID NO: 1279130 - RNA, 19 nt, Artificial Sequence
  Description of Artificial Sequence: Synthetic oligonucleotide
gagcgaaucggcuucuuaa

SEQ ID NO: 1279131 - RNA, 19 nt, Artificial Sequence
  Description of Artificial Sequence: Synthetic oligonucleotide
aacgauucgcggacucugg

SEQ ID NO: 1279132 - RNA, 19 nt, Artificial Sequence
  Description of Artificial Sequence: Synthetic oligonucleotide
cuggguacgaucccuguuc

SEQ ID NO: 1279133 - RNA, 19 nt, Artificial Sequence
  Description of Artificial Sequence: Synthetic oligonucleotide
cucucuuguccauguuucg

SEQ ID NO: 1279134 - RNA, 19 nt, Artificial Sequence
  Description of Artificial Sequence: Synthetic oligonucleotide
gagugaugcuauucuggug

SEQ ID NO: 1279135 - RNA, 19 nt, Artificial Sequence
  Description of Artificial Sequence: Synthetic oligonucleotide
uguccguuguguuccuuca

SEQ ID NO: 1279136 - RNA, 19 nt, Artificial Sequence
  Description of Artificial Sequence: Synthetic oligonucleotide
aaaggucagaaagcuggga

SEQ ID NO: 1279137 - RNA, 19 nt, Artificial Sequence
  Description of Artificial Sequence: Synthetic oligonucleotide
gugcacuucgugauuauug

SEQ ID NO: 1279138 - RNA, 19 nt, Artificial Sequence
  Description of Artificial Sequence: Synthetic oligonucleotide
auaccugugauguguccgu

SEQ ID NO: 1279139 - RNA, 19 nt, Artificial Sequence
  Description of Artificial Sequence: Synthetic oligonucleotide
uuauuggggcuaagggcga

SEQ ID NO: 1279140 - RNA, 19 nt, Artificial Sequence
  Description of Artificial Sequence: Synthetic oligonucleotide
aguugaaaccugcacgcuu

SEQ ID NO: 1279141 - RNA, 19 nt, Artificial Sequence
  Description of Artificial Sequence: Synthetic oligonucleotide
gaacgauucgcggacucug

SEQ ID NO: 1279142 - RNA, 19 nt, Artificial Sequence
  Description of Artificial Sequence: Synthetic oligonucleotide
augcggucgcucuuagggg

SEQ ID NO: 1279143 - RNA, 19 nt, Artificial Sequence
  Description of Artificial Sequence: Synthetic oligonucleotide
uaugaacgaaugguagagu

SEQ ID NO: 1279144 - RNA, 19 nt, Artificial Sequence
  Description of Artificial Sequence: Synthetic oligonucleotide
uugucauggcuccaucgau

SEQ ID NO: 1279145 - RNA, 19 nt, Artificial Sequence
  Description of Artificial Sequence: Synthetic oligonucleotide
acgcgaacaggcuccggcg

SEQ ID NO: 1279146 - RNA, 19 nt, Artificial Sequence
  Description of Artificial Sequence: Synthetic oligonucleotide
augccaguagugcaaaauu

SEQ ID NO: 1279147 - RNA, 19 nt, Artificial Sequence
  Description of Artificial Sequence: Synthetic oligonucleotide
cacgaacacacgcuaguug

SEQ ID NO: 1279148 - RNA, 19 nt, Artificial Sequence
  Description of Artificial Sequence: Synthetic oligonucleotide
cuuaaagagaagcuuuggu

SEQ ID NO: 1279149 - RNA, 19 nt, Artificial Sequence
  Description of Artificial Sequence: Synthetic oligonucleotide
guugggaugccaguccaag

SEQ ID NO: 1279150 - RNA, 19 nt, Artificial Sequence
  Description of Artificial Sequence: Synthetic oligonucleotide
uccauguuucggaagcguu

SEQ ID NO: 1279151 - RNA, 19 nt, Artificial Sequence
  Description of Artificial Sequence: Synthetic oligonucleotide
uuccaacauaaacuacuua

SEQ ID NO: 1279152 - RNA, 19 nt, Artificial Sequence
  Description of Artificial Sequence: Synthetic oligonucleotide
aucuugcugccccaaggug

SEQ ID NO: 1279153 - RNA, 19 nt, Artificial Sequence
  Description of Artificial Sequence: Synthetic oligonucleotide
gagcgaacgauucgcggac

SEQ ID NO: 1279154 - RNA, 19 nt, Artificial Sequence
  Description of Artificial Sequence: Synthetic oligonucleotide
aguaacaaacagagaugag

SEQ ID NO: 1279155 - RNA, 19 nt, Artificial Sequence
  Description of Artificial Sequence: Synthetic oligonucleotide
ugggacgucuagcuuggac

SEQ ID NO: 1279156 - RNA, 19 nt, Artificial Sequence
  Description of Artificial Sequence: Synthetic oligonucleotide
gguacgaucccuguuccag

SEQ ID NO: 1279157 - RNA, 19 nt, Artificial Sequence
  Description of Artificial Sequence: Synthetic oligonucleotide
gaagcguuccauggcagac

SEQ ID NO: 1279158 - RNA, 19 nt, Artificial Sequence
  Description of Artificial Sequence: Synthetic oligonucleotide
uucgugauuauuggggcua

SEQ ID NO: 1279159 - RNA, 19 nt, Artificial Sequence
  Description of Artificial Sequence: Synthetic oligonucleotide
aggcgguucccacuggcag

SEQ ID NO: 1279160 - RNA, 19 nt, Artificial Sequence
  Description of Artificial Sequence: Synthetic oligonucleotide
auuggcucuagcagaaacu

SEQ ID NO: 1279161 - RNA, 19 nt, Artificial Sequence
  Description of Artificial Sequence: Synthetic oligonucleotide
aggcgugacaggugauugg

SEQ ID NO: 1279162 - RNA, 19 nt, Artificial Sequence
  Description of Artificial Sequence: Synthetic oligonucleotide
caggugauuggcucuagca

SEQ ID NO: 1279163 - RNA, 19 nt, Artificial Sequence
  Description of Artificial Sequence: Synthetic oligonucleotide
auugcggucugccccacaa

SEQ ID NO: 1279164 - RNA, 19 nt, Artificial Sequence
  Description of Artificial Sequence: Synthetic oligonucleotide
cacgcuuuucgaggcaucg

SEQ ID NO: 1279165 - RNA, 19 nt, Artificial Sequence
  Description of Artificial Sequence: Synthetic oligonucleotide
uaguugcuugauaguguga

SEQ ID NO: 1279166 - RNA, 19 nt, Artificial Sequence
  Description of Artificial Sequence: Synthetic oligonucleotide
agcgaaucggcuucuuaau

SEQ ID NO: 1279167 - RNA, 19 nt, Artificial Sequence
  Description of Artificial Sequence: Synthetic oligonucleotide
ugauagugugacaguguuu

SEQ ID NO: 1279168 - RNA, 19 nt, Artificial Sequence
  Description of Artificial Sequence: Synthetic oligonucleotide
ggggcuaagggcgaucugg

SEQ ID NO: 1279169 - RNA, 19 nt, Artificial Sequence
  Description of Artificial Sequence: Synthetic oligonucleotide
cuucccuuacccuuuaagu

SEQ ID NO: 1279170 - RNA, 19 nt, Artificial Sequence
  Description of Artificial Sequence: Synthetic oligonucleotide
cgaggcaucggcaacagac

SEQ ID NO: 1279171 - RNA, 19 nt, Artificial Sequence
  Description of Artificial Sequence: Synthetic oligonucleotide
cagucaauaccugugaugu

SEQ ID NO: 1279172 - RNA, 19 nt, Artificial Sequence
  Description of Artificial Sequence: Synthetic oligonucleotide
agugacgaugcggucgcuc

SEQ ID NO: 1279173 - RNA, 19 nt, Artificial Sequence
  Description of Artificial Sequence: Synthetic oligonucleotide
aaacugaugcagagacaug

SEQ ID NO: 1279174 - RNA, 19 nt, Artificial Sequence
  Description of Artificial Sequence: Synthetic oligonucleotide
acauccacacgaacacacg

SEQ ID NO: 1279175 - RNA, 19 nt, Artificial Sequence
  Description of Artificial Sequence: Synthetic oligonucleotide
ugguagagugagcgaaguc

SEQ ID NO: 1279176 - RNA, 19 nt, Artificial Sequence
  Description of Artificial Sequence: Synthetic oligonucleotide
caugagcuuuaguccacug

SEQ ID NO: 1279177 - RNA, 19 nt, Artificial Sequence
  Description of Artificial Sequence: Synthetic oligonucleotide
ggucagucgacgcgaacag

SEQ ID NO: 1279178 - RNA, 19 nt, Artificial Sequence
  Description of Artificial Sequence: Synthetic oligonucleotide
uuauccggaggcccuggau

SEQ ID NO: 1279179 - RNA, 19 nt, Artificial Sequence
  Description of Artificial Sequence: Synthetic oligonucleotide
uguuucggaagcguuccau

SEQ ID NO: 1279180 - RNA, 19 nt, Artificial Sequence
  Description of Artificial Sequence: Synthetic oligonucleotide
uagggugggcuuccagaug

SEQ ID NO: 1279181 - RNA, 19 nt, Artificial Sequence
  Description of Artificial Sequence: Synthetic oligonucleotide
gucgacgcgaacaggcucc

SEQ ID NO: 1279182 - RNA, 19 nt, Artificial Sequence
  Description of Artificial Sequence: Synthetic oligonucleotide
uuucgacaaucuugcuugu

SEQ ID NO: 1279183 - RNA, 19 nt, Artificial Sequence
  Description of Artificial Sequence: Synthetic oligonucleotide
cagagacaugauucuuaag

SEQ ID NO: 1279184 - RNA, 19 nt, Artificial Sequence
  Description of Artificial Sequence: Synthetic oligonucleotide
acgaucccuguuccaggcg

SEQ ID NO: 1279185 - RNA, 19 nt, Artificial Sequence
  Description of Artificial Sequence: Synthetic oligonucleotide
gcacuucgugauuauuggg

SEQ ID NO: 1279186 - RNA, 19 nt, Artificial Sequence
  Description of Artificial Sequence: Synthetic oligonucleotide
ucauggcuccaucgaugcc

SEQ ID NO: 1279187 - RNA, 19 nt, Artificial Sequence
  Description of Artificial Sequence: Synthetic oligonucleotide
accugugauguguccguug

SEQ ID NO: 1279188 - RNA, 19 nt, Artificial Sequence
  Description of Artificial Sequence: Synthetic oligonucleotide
agccggagcgaacgauucg

SEQ ID NO: 1279189 - RNA, 19 nt, Artificial Sequence
  Description of Artificial Sequence: Synthetic oligonucleotide
gaucuggguacgaucccug

SEQ ID NO: 1279190 - RNA, 19 nt, Artificial Sequence
  Description of Artificial Sequence: Synthetic oligonucleotide
ucuggguacgaucccuguu

SEQ ID NO: 1279191 - RNA, 19 nt, Artificial Sequence
  Description of Artificial Sequence: Synthetic oligonucleotide
ugaugcuauucuggugcag

SEQ ID NO: 1279192 - RNA, 19 nt, Artificial Sequence
  Description of Artificial Sequence: Synthetic oligonucleotide
aagcguuccauggcagaca

SEQ ID NO: 1279193 - RNA, 19 nt, Artificial Sequence
  Description of Artificial Sequence: Synthetic oligonucleotide
uagagugagcgaaguccgu

SEQ ID NO: 1279194 - RNA, 19 nt, Artificial Sequence
  Description of Artificial Sequence: Synthetic oligonucleotide
cauggcugacccaggccag

SEQ ID NO: 1279195 - RNA, 19 nt, Artificial Sequence
  Description of Artificial Sequence: Synthetic oligonucleotide
ggacgucuagcuuggacac

SEQ ID NO: 1279196 - RNA, 19 nt, Artificial Sequence
  Description of Artificial Sequence: Synthetic oligonucleotide
auucgcggacucuggucag

SEQ ID NO: 1279197 - RNA, 19 nt, Artificial Sequence
  Description of Artificial Sequence: Synthetic oligonucleotide
ggagcgaacgauucgcgga

SEQ ID NO: 1279198 - RNA, 19 nt, Artificial Sequence
  Description of Artificial Sequence: Synthetic oligonucleotide
uguugggaugccaguccaa

SEQ ID NO: 1279199 - RNA, 19 nt, Artificial Sequence
  Description of Artificial Sequence: Synthetic oligonucleotide
ggcagaaaacacucugcac

SEQ ID NO: 1279200 - RNA, 19 nt, Artificial Sequence
  Description of Artificial Sequence: Synthetic oligonucleotide
acaugagccugcagccagc

SEQ ID NO: 1279201 - RNA, 19 nt, Artificial Sequence
  Description of Artificial Sequence: Synthetic oligonucleotide
gaccguggagcgaaucggc

SEQ ID NO: 1279202 - RNA, 19 nt, Artificial Sequence
  Description of Artificial Sequence: Synthetic oligonucleotide
caccauaugaacgaauggu

SEQ ID NO: 1279203 - RNA, 19 nt, Artificial Sequence
  Description of Artificial Sequence: Synthetic oligonucleotide
ugggcgguccggagagccg

SEQ ID NO: 1279204 - RNA, 19 nt, Artificial Sequence
  Description of Artificial Sequence: Synthetic oligonucleotide
acgucuagcuuggacacaa

SEQ ID NO: 1279205 - RNA, 19 nt, Artificial Sequence
  Description of Artificial Sequence: Synthetic oligonucleotide
auuauccggaggcccugga

SEQ ID NO: 1279206 - RNA, 19 nt, Artificial Sequence
  Description of Artificial Sequence: Synthetic oligonucleotide
acgauucgcggacucuggu

SEQ ID NO: 1279207 - RNA, 19 nt, Artificial Sequence
  Description of Artificial Sequence: Synthetic oligonucleotide
gaacucgguuuucagaguu

SEQ ID NO: 1279208 - RNA, 19 nt, Artificial Sequence
  Description of Artificial Sequence: Synthetic oligonucleotide
acgcuaguugcuugauagu

SEQ ID NO: 1279209 - RNA, 19 nt, Artificial Sequence
  Description of Artificial Sequence: Synthetic oligonucleotide
ucuggucagucgacgcgaa

SEQ ID NO: 1279210 - RNA, 19 nt, Artificial Sequence
  Description of Artificial Sequence: Synthetic oligonucleotide
aggaaccccuaucuugaaa

SEQ ID NO: 1279211 - RNA, 19 nt, Artificial Sequence
  Description of Artificial Sequence: Synthetic oligonucleotide
uaagggcgaucuggguacg

SEQ ID NO: 1279212 - RNA, 19 nt, Artificial Sequence
  Description of Artificial Sequence: Synthetic oligonucleotide
gugagcgaaguccguuccc

SEQ ID NO: 1279213 - RNA, 19 nt, Artificial Sequence
  Description of Artificial Sequence: Synthetic oligonucleotide
cauuauccggaggcccugg

SEQ ID NO: 1279214 - RNA, 19 nt, Artificial Sequence
  Description of Artificial Sequence: Synthetic oligonucleotide
auuggggcuaagggcgauc

SEQ ID NO: 1279215 - RNA, 19 nt, Artificial Sequence
  Description of Artificial Sequence: Synthetic oligonucleotide
guguugcgguccucagugg

SEQ ID NO: 1279216 - RNA, 19 nt, Artificial Sequence
  Description of Artificial Sequence: Synthetic oligonucleotide
aucgaugccaguagugcaa

SEQ ID NO: 1279217 - RNA, 19 nt, Artificial Sequence
  Description of Artificial Sequence: Synthetic oligonucleotide
gccacaacgcuguuuucug

SEQ ID NO: 1279218 - RNA, 19 nt, Artificial Sequence
  Description of Artificial Sequence: Synthetic oligonucleotide
ggaccacuucacaaaagug

SEQ ID NO: 1279219 - RNA, 19 nt, Artificial Sequence
  Description of Artificial Sequence: Synthetic oligonucleotide
ggaccguggagcgaaucgg

SEQ ID NO: 1279220 - RNA, 19 nt, Artificial Sequence
  Description of Artificial Sequence: Synthetic oligonucleotide
agcgaaguccguuccccau

SEQ ID NO: 1279221 - RNA, 19 nt, Artificial Sequence
  Description of Artificial Sequence: Synthetic oligonucleotide
cccacaagugacgaugcgg

SEQ ID NO: 1279222 - RNA, 19 nt, Artificial Sequence
  Description of Artificial Sequence: Synthetic oligonucleotide
uugaaaccugcacgcuuuu

SEQ ID NO: 1279223 - RNA, 19 nt, Artificial Sequence
  Description of Artificial Sequence: Synthetic oligonucleotide
acgcuuuucgaggcaucgg

SEQ ID NO: 1279224 - RNA, 19 nt, Artificial Sequence
  Description of Artificial Sequence: Synthetic oligonucleotide
cugggaucugggcgguccg

SEQ ID NO: 1279225 - RNA, 19 nt, Artificial Sequence
  Description of Artificial Sequence: Synthetic oligonucleotide
gucagucgacgcgaacagg

SEQ ID NO: 1279226 - RNA, 19 nt, Artificial Sequence
  Description of Artificial Sequence: Synthetic oligonucleotide
guccguuguguuccuucag

SEQ ID NO: 1279227 - RNA, 19 nt, Artificial Sequence
  Description of Artificial Sequence: Synthetic oligonucleotide
gaacaggcuccggcgggcg

SEQ ID NO: 1279228 - RNA, 19 nt, Artificial Sequence
  Description of Artificial Sequence: Synthetic oligonucleotide
acccuuuaaguuaguguga

SEQ ID NO: 1279229 - RNA, 19 nt, Artificial Sequence
  Description of Artificial Sequence: Synthetic oligonucleotide
acauuauccggaggcccug

SEQ ID NO: 1279230 - RNA, 19 nt, Artificial Sequence
  Description of Artificial Sequence: Synthetic oligonucleotide
agcagacaauacacacuuc

SEQ ID NO: 1279231 - RNA, 19 nt, Artificial Sequence
  Description of Artificial Sequence: Synthetic oligonucleotide
cacaagugacgaugcgguc

SEQ ID NO: 1279232 - RNA, 19 nt, Artificial Sequence
  Description of Artificial Sequence: Synthetic oligonucleotide
ccccacaacauccacacga

SEQ ID NO: 1279233 - RNA, 19 nt, Artificial Sequence
  Description of Artificial Sequence: Synthetic oligonucleotide
uucgacaaucuugcuuguc

SEQ ID NO: 1279234 - RNA, 19 nt, Artificial Sequence
  Description of Artificial Sequence: Synthetic oligonucleotide
acgaugcggucgcucuuag

SEQ ID NO: 1279235 - RNA, 19 nt, Artificial Sequence
  Description of Artificial Sequence: Synthetic oligonucleotide
ucgacgcgaacaggcuccg

SEQ ID NO: 1279236 - RNA, 19 nt, Artificial Sequence
  Description of Artificial Sequence: Synthetic oligonucleotide
ggcaucggcaacagacacg

SEQ ID NO: 1279237 - RNA, 19 nt, Artificial Sequence
  Description of Artificial Sequence: Synthetic oligonucleotide
gggaccacuucacaaaagu

SEQ ID NO: 1279238 - RNA, 19 nt, Artificial Sequence
  Description of Artificial Sequence: Synthetic oligonucleotide
gcuaagggcgaucugggua

SEQ ID NO: 1279239 - RNA, 19 nt, Artificial Sequence
  Description of Artificial Sequence: Synthetic oligonucleotide
agagugagcgaaguccguu

SEQ ID NO: 1279240 - RNA, 19 nt, Artificial Sequence
  Description of Artificial Sequence: Synthetic oligonucleotide
cugggcgguccggagagcc

SEQ ID NO: 1279241 - RNA, 19 nt, Artificial Sequence
  Description of Artificial Sequence: Synthetic oligonucleotide
ucgaugccaguagugcaaa

SEQ ID NO: 1279242 - RNA, 19 nt, Artificial Sequence
  Description of Artificial Sequence: Synthetic oligonucleotide
ugacaggugauuggcucua

SEQ ID NO: 1279243 - RNA, 19 nt, Artificial Sequence
  Description of Artificial Sequence: Synthetic oligonucleotide
caugggcuggcgauccuca

SEQ ID NO: 1279244 - RNA, 19 nt, Artificial Sequence
  Description of Artificial Sequence: Synthetic oligonucleotide
auguuucggaagcguucca

SEQ ID NO: 1279245 - RNA, 19 nt, Artificial Sequence
  Description of Artificial Sequence: Synthetic oligonucleotide
uuuaguccacuggcuccca

SEQ ID NO: 1279246 - RNA, 19 nt, Artificial Sequence
  Description of Artificial Sequence: Synthetic oligonucleotide
ugugcacuucgugauuauu

SEQ ID NO: 1279247 - RNA, 19 nt, Artificial Sequence
  Description of Artificial Sequence: Synthetic oligonucleotide
cuuucugacuccagacgua

SEQ ID NO: 1279248 - RNA, 19 nt, Artificial Sequence
  Description of Artificial Sequence: Synthetic oligonucleotide
ggacggaggagggaggccc

SEQ ID NO: 1279249 - RNA, 19 nt, Artificial Sequence
  Description of Artificial Sequence: Synthetic oligonucleotide
aaagagcaucgggcagcag

SEQ ID NO: 1279250 - RNA, 19 nt, Artificial Sequence
  Description of Artificial Sequence: Synthetic oligonucleotide
gagcgaaguccguucccca

SEQ ID NO: 1279251 - RNA, 19 nt, Artificial Sequence
  Description of Artificial Sequence: Synthetic oligonucleotide
agccacggucgucauaguu

SEQ ID NO: 1279252 - RNA, 19 nt, Artificial Sequence
  Description of Artificial Sequence: Synthetic oligonucleotide
cugugauguguccguugug

SEQ ID NO: 1279253 - RNA, 19 nt, Artificial Sequence
  Description of Artificial Sequence: Synthetic oligonucleotide
caugcacccauccaccagu

SEQ ID NO: 1279254 - RNA, 19 nt, Artificial Sequence
  Description of Artificial Sequence: Synthetic oligonucleotide
ucggcuucuuaaugugcuu

SEQ ID NO: 1279255 - RNA, 19 nt, Artificial Sequence
  Description of Artificial Sequence: Synthetic oligonucleotide
cugccccaaggugugcugg

SEQ ID NO: 1279256 - RNA, 19 nt, Artificial Sequence
  Description of Artificial Sequence: Synthetic oligonucleotide
acugaugcagagacaugau

SEQ ID NO: 1279257 - RNA, 19 nt, Artificial Sequence
  Description of Artificial Sequence: Synthetic oligonucleotide
ucgugauuauuggggcuaa

SEQ ID NO: 1279258 - RNA, 19 nt, Artificial Sequence
  Description of Artificial Sequence: Synthetic oligonucleotide
cacuagggugggcuuccag

SEQ ID NO: 1279259 - RNA, 19 nt, Artificial Sequence
  Description of Artificial Sequence: Synthetic oligonucleotide
gcaaaacguuguugggaug

SEQ ID NO: 1279260 - RNA, 19 nt, Artificial Sequence
  Description of Artificial Sequence: Synthetic oligonucleotide
cgcuuuucgaggcaucggc

SEQ ID NO: 1279261 - RNA, 19 nt, Artificial Sequence
  Description of Artificial Sequence: Synthetic oligonucleotide
cacauuauccggaggcccu

SEQ ID NO: 1279262 - RNA, 19 nt, Artificial Sequence
  Description of Artificial Sequence: Synthetic oligonucleotide
gacaaucuuccaacauaaa

SEQ ID NO: 1279263 - RNA, 19 nt, Artificial Sequence
  Description of Artificial Sequence: Synthetic oligonucleotide
gugacgaugcggucgcucu

SEQ ID NO: 1279264 - RNA, 19 nt, Artificial Sequence
  Description of Artificial Sequence: Synthetic oligonucleotide
cugacuccagacguaggca

SEQ ID NO: 1279265 - RNA, 19 nt, Artificial Sequence
  Description of Artificial Sequence: Synthetic oligonucleotide
acacgcuaguugcuugaua

SEQ ID NO: 1279266 - RNA, 19 nt, Artificial Sequence
  Description of Artificial Sequence: Synthetic oligonucleotide
ugacgaugcggucgcucuu

SEQ ID NO: 1279267 - RNA, 19 nt, Artificial Sequence
  Description of Artificial Sequence: Synthetic oligonucleotide
cuucgugauuauuggggcu

SEQ ID NO: 1279268 - RNA, 19 nt, Artificial Sequence
  Description of Artificial Sequence: Synthetic oligonucleotide
ggaagcguuccauggcaga

SEQ ID NO: 1279269 - RNA, 19 nt, Artificial Sequence
  Description of Artificial Sequence: Synthetic oligonucleotide
cugaggaccguggagcgaa

SEQ ID NO: 1279270 - RNA, 19 nt, Artificial Sequence
  Description of Artificial Sequence: Synthetic oligonucleotide
ugauuggcucuagcagaaa

SEQ ID NO: 1279271 - RNA, 19 nt, Artificial Sequence
  Description of Artificial Sequence: Synthetic oligonucleotide
gcuguguugcgguccucag

SEQ ID NO: 1279272 - RNA, 19 nt, Artificial Sequence
  Description of Artificial Sequence: Synthetic oligonucleotide
cgguuaauucucaggauca

SEQ ID NO: 1279273 - RNA, 19 nt, Artificial Sequence
  Description of Artificial Sequence: Synthetic oligonucleotide
gcgaaguccguuccccaug

SEQ ID NO: 1279274 - RNA, 19 nt, Artificial Sequence
  Description of Artificial Sequence: Synthetic oligonucleotide
ccccaugcacccauccacc

SEQ ID NO: 1279275 - RNA, 19 nt, Artificial Sequence
  Description of Artificial Sequence: Synthetic oligonucleotide
cgcuaguugcuugauagug

SEQ ID NO: 1279276 - RNA, 19 nt, Artificial Sequence
  Description of Artificial Sequence: Synthetic oligonucleotide
agagccggagcgaacgauu

SEQ ID NO: 1279277 - RNA, 19 nt, Artificial Sequence
  Description of Artificial Sequence: Synthetic oligonucleotide
ucccucggcuucacauuau

SEQ ID NO: 1279278 - RNA, 19 nt, Artificial Sequence
  Description of Artificial Sequence: Synthetic oligonucleotide
aagggcgaucuggguacga

SEQ ID NO: 1279279 - RNA, 19 nt, Artificial Sequence
  Description of Artificial Sequence: Synthetic oligonucleotide
caacauccacacgaacaca

SEQ ID NO: 1279280 - RNA, 19 nt, Artificial Sequence
  Description of Artificial Sequence: Synthetic oligonucleotide
cuggucagucgacgcgaac

SEQ ID NO: 1279281 - RNA, 19 nt, Artificial Sequence
  Description of Artificial Sequence: Synthetic oligonucleotide
accguggagcgaaucggcu

SEQ ID NO: 1279282 - RNA, 19 nt, Artificial Sequence
  Description of Artificial Sequence: Synthetic oligonucleotide
gacgaugcggucgcucuua

SEQ ID NO: 1279283 - RNA, 19 nt, Artificial Sequence
  Description of Artificial Sequence: Synthetic oligonucleotide
gagcuuuaguccacuggcu

SEQ ID NO: 1279284 - RNA, 19 nt, Artificial Sequence
  Description of Artificial Sequence: Synthetic oligonucleotide
cgaaguccguuccccaugc

SEQ ID NO: 1279285 - RNA, 19 nt, Artificial Sequence
  Description of Artificial Sequence: Synthetic oligonucleotide
gcagccacaacgcuguuuu

SEQ ID NO: 1279286 - RNA, 19 nt, Artificial Sequence
  Description of Artificial Sequence: Synthetic oligonucleotide
ccggagcgaacgauucgcg

SEQ ID NO: 1279287 - RNA, 19 nt, Artificial Sequence
  Description of Artificial Sequence: Synthetic oligonucleotide
gacgucuagcuuggacaca

SEQ ID NO: 1279288 - RNA, 19 nt, Artificial Sequence
  Description of Artificial Sequence: Synthetic oligonucleotide
ggcucuagcagaaacugau

SEQ ID NO: 1279289 - RNA, 19 nt, Artificial Sequence
  Description of Artificial Sequence: Synthetic oligonucleotide
ucccuguuccaggcgugac

SEQ ID NO: 1279290 - RNA, 19 nt, Artificial Sequence
  Description of Artificial Sequence: Synthetic oligonucleotide
agggcgaucuggguacgau

SEQ ID NO: 1279291 - RNA, 19 nt, Artificial Sequence
  Description of Artificial Sequence: Synthetic oligonucleotide
cucgguuaauucucaggau

SEQ ID NO: 1279292 - RNA, 19 nt, Artificial Sequence
  Description of Artificial Sequence: Synthetic oligonucleotide
ccacaagugacgaugcggu

SEQ ID NO: 1279293 - RNA, 19 nt, Artificial Sequence
  Description of Artificial Sequence: Synthetic oligonucleotide
caggcgguucccacuggca

SEQ ID NO: 1279294 - RNA, 19 nt, Artificial Sequence
  Description of Artificial Sequence: Synthetic oligonucleotide
ccaugcacccauccaccag

SEQ ID NO: 1279295 - RNA, 19 nt, Artificial Sequence
  Description of Artificial Sequence: Synthetic oligonucleotide
gaggaccguggagcgaauc

SEQ ID NO: 1279296 - RNA, 19 nt, Artificial Sequence
  Description of Artificial Sequence: Synthetic oligonucleotide
agcgaacgauucgcggacu

SEQ ID NO: 1279297 - RNA, 19 nt, Artificial Sequence
  Description of Artificial Sequence: Synthetic oligonucleotide
gggcgguccggagagccgg

SEQ ID NO: 1279298 - RNA, 19 nt, Artificial Sequence
  Description of Artificial Sequence: Synthetic oligonucleotide
ggcaggaacucgguuuuca

SEQ ID NO: 1279299 - RNA, 19 nt, Artificial Sequence
  Description of Artificial Sequence: Synthetic oligonucleotide
cggagcgaacgauucgcgg

SEQ ID NO: 1279300 - RNA, 19 nt, Artificial Sequence
  Description of Artificial Sequence: Synthetic oligonucleotide
guuuugggacgucuagcuu

SEQ ID NO: 1279301 - RNA, 19 nt, Artificial Sequence
  Description of Artificial Sequence: Synthetic oligonucleotide
cugaccccaugcacccauc

SEQ ID NO: 1279302 - RNA, 19 nt, Artificial Sequence
  Description of Artificial Sequence: Synthetic oligonucleotide
ggucugccccacaagugac

SEQ ID NO: 1279303 - RNA, 19 nt, Artificial Sequence
  Description of Artificial Sequence: Synthetic oligonucleotide
ggcuccaucgaugccagua

SEQ ID NO: 1279304 - RNA, 19 nt, Artificial Sequence
  Description of Artificial Sequence: Synthetic oligonucleotide
ccacggucgucauaguuaa

SEQ ID NO: 1279305 - RNA, 19 nt, Artificial Sequence
  Description of Artificial Sequence: Synthetic oligonucleotide
cggagagccggagcgaacg

SEQ ID NO: 1279306 - RNA, 19 nt, Artificial Sequence
  Description of Artificial Sequence: Synthetic oligonucleotide
gcuaguugcuugauagugu

SEQ ID NO: 1279307 - RNA, 19 nt, Artificial Sequence
  Description of Artificial Sequence: Synthetic oligonucleotide
cacacuucccuuacccuuu

SEQ ID NO: 1279308 - RNA, 19 nt, Artificial Sequence
  Description of Artificial Sequence: Synthetic oligonucleotide
cugaaacgaaggacacacu

SEQ ID NO: 1279309 - RNA, 19 nt, Artificial Sequence
  Description of Artificial Sequence: Synthetic oligonucleotide
gccacggucgucauaguua

SEQ ID NO: 1279310 - RNA, 19 nt, Artificial Sequence
  Description of Artificial Sequence: Synthetic oligonucleotide
caccagucauuuucagacu

SEQ ID NO: 1279311 - RNA, 19 nt, Artificial Sequence
  Description of Artificial Sequence: Synthetic oligonucleotide
gucaaacagccacggucgu

SEQ ID NO: 1279312 - RNA, 19 nt, Artificial Sequence
  Description of Artificial Sequence: Synthetic oligonucleotide
gcgaacgauucgcggacuc

SEQ ID NO: 1279313 - RNA, 19 nt, Artificial Sequence
  Description of Artificial Sequence: Synthetic oligonucleotide
ccguuccccaugcuggaug

SEQ ID NO: 1279314 - RNA, 19 nt, Artificial Sequence
  Description of Artificial Sequence: Synthetic oligonucleotide
uccguuccccaugcuggau

SEQ ID NO: 1279315 - RNA, 19 nt, Artificial Sequence
  Description of Artificial Sequence: Synthetic oligonucleotide
ucgcucuuaggggcccagu

SEQ ID NO: 1279316 - RNA, 19 nt, Artificial Sequence
  Description of Artificial Sequence: Synthetic oligonucleotide
ccacuucacaaaaguggca

SEQ ID NO: 1279317 - RNA, 19 nt, Artificial Sequence
  Description of Artificial Sequence: Synthetic oligonucleotide
ggagcgaaucggcuucuua

SEQ ID NO: 1279318 - RNA, 19 nt, Artificial Sequence
  Description of Artificial Sequence: Synthetic oligonucleotide
cgaaucggcuucuuaaugu

SEQ ID NO: 1279319 - RNA, 19 nt, Artificial Sequence
  Description of Artificial Sequence: Synthetic oligonucleotide
gcgcggacggaggagggag

SEQ ID NO: 1279320 - RNA, 19 nt, Artificial Sequence
  Description of Artificial Sequence: Synthetic oligonucleotide
cagccacaacgcuguuuuc

SEQ ID NO: 1279321 - RNA, 19 nt, Artificial Sequence
  Description of Artificial Sequence: Synthetic oligonucleotide
caaaaguggcagcucgguu

SEQ ID NO: 1279322 - RNA, 19 nt, Artificial Sequence
  Description of Artificial Sequence: Synthetic oligonucleotide
cgcgaacaggcuccggcgg

SEQ ID NO: 1279323 - RNA, 19 nt, Artificial Sequence
  Description of Artificial Sequence: Synthetic oligonucleotide
uguguccguuguguuccuu

SEQ ID NO: 1279324 - RNA, 19 nt, Artificial Sequence
  Description of Artificial Sequence: Synthetic oligonucleotide
cccacaacauccacacgaa

SEQ ID NO: 1279325 - RNA, 19 nt, Artificial Sequence
  Description of Artificial Sequence: Synthetic oligonucleotide
gcggucugccccacaagug

SEQ ID NO: 1279326 - RNA, 19 nt, Artificial Sequence
  Description of Artificial Sequence: Synthetic oligonucleotide
cgauucgcggacucugguc

SEQ ID NO: 1279327 - RNA, 19 nt, Artificial Sequence
  Description of Artificial Sequence: Synthetic oligonucleotide
gaaguccguuccccaugcu

SEQ ID NO: 1279328 - RNA, 19 nt, Artificial Sequence
  Description of Artificial Sequence: Synthetic oligonucleotide
ggagagccggagcgaacga

SEQ ID NO: 1279329 - RNA, 19 nt, Artificial Sequence
  Description of Artificial Sequence: Synthetic oligonucleotide
cagucgacgcgaacaggcu

SEQ ID NO: 1279330 - RNA, 19 nt, Artificial Sequence
  Description of Artificial Sequence: Synthetic oligonucleotide
cggaagcguuccauggcag

SEQ ID NO: 1279331 - RNA, 19 nt, Artificial Sequence
  Description of Artificial Sequence: Synthetic oligonucleotide
cuguguugcgguccucagu

SEQ ID NO: 1279332 - RNA, 19 nt, Artificial Sequence
  Description of Artificial Sequence: Synthetic oligonucleotide
cugcacgcuuuucgaggca

SEQ ID NO: 1279333 - RNA, 19 nt, Artificial Sequence
  Description of Artificial Sequence: Synthetic oligonucleotide
ggcucccucggcuucacau

SEQ ID NO: 1279334 - RNA, 19 nt, Artificial Sequence
  Description of Artificial Sequence: Synthetic oligonucleotide
ggguacgaucccuguucca

SEQ ID NO: 1279335 - RNA, 19 nt, Artificial Sequence
  Description of Artificial Sequence: Synthetic oligonucleotide
uugggacgucuagcuugga

SEQ ID NO: 1279336 - RNA, 19 nt, Artificial Sequence
  Description of Artificial Sequence: Synthetic oligonucleotide
cgaaugguagagugagcga

SEQ ID NO: 1279337 - RNA, 19 nt, Artificial Sequence
  Description of Artificial Sequence: Synthetic oligonucleotide
cggucgucauaguuaaaga

SEQ ID NO: 1279338 - RNA, 19 nt, Artificial Sequence
  Description of Artificial Sequence: Synthetic oligonucleotide
aaguggcagcucgguuaau

SEQ ID NO: 1279339 - RNA, 19 nt, Artificial Sequence
  Description of Artificial Sequence: Synthetic oligonucleotide
gagagccggagcgaacgau

SEQ ID NO: 1279340 - RNA, 19 nt, Artificial Sequence
  Description of Artificial Sequence: Synthetic oligonucleotide
ccacaacgcuguuuucuga

SEQ ID NO: 1279341 - RNA, 19 nt, Artificial Sequence
  Description of Artificial Sequence: Synthetic oligonucleotide
ggcgauccucaucaccaua

SEQ ID NO: 1279342 - RNA, 19 nt, Artificial Sequence
  Description of Artificial Sequence: Synthetic oligonucleotide
gccaccaaacucagacauc

SEQ ID NO: 1279343 - RNA, 19 nt, Artificial Sequence
  Description of Artificial Sequence: Synthetic oligonucleotide
uggagcgaaucggcuucuu

SEQ ID NO: 1279344 - RNA, 19 nt, Artificial Sequence
  Description of Artificial Sequence: Synthetic oligonucleotide
cauguugcgcuggaugcuu

SEQ ID NO: 1279345 - RNA, 19 nt, Artificial Sequence
  Description of Artificial Sequence: Synthetic oligonucleotide
auguugcgcuggaugcuuu

SEQ ID NO: 1279346 - RNA, 19 nt, Artificial Sequence
  Description of Artificial Sequence: Synthetic oligonucleotide
cggucugccccacaaguga

SEQ ID NO: 1279347 - RNA, 19 nt, Artificial Sequence
  Description of Artificial Sequence: Synthetic oligonucleotide
gggaucugggcgguccgga

SEQ ID NO: 1279348 - RNA, 19 nt, Artificial Sequence
  Description of Artificial Sequence: Synthetic oligonucleotide
gcggucgcucuuaggggcc

SEQ ID NO: 1279349 - RNA, 19 nt, Artificial Sequence
  Description of Artificial Sequence: Synthetic oligonucleotide
cgaugcggucgcucuuagg

SEQ ID NO: 1279350 - RNA, 19 nt, Artificial Sequence
  Description of Artificial Sequence: Synthetic oligonucleotide
cggcuucacauuauccgga

SEQ ID NO: 1279351 - RNA, 19 nt, Artificial Sequence
  Description of Artificial Sequence: Synthetic oligonucleotide
ggcuaagggcgaucugggu

SEQ ID NO: 1279352 - RNA, 19 nt, Artificial Sequence
  Description of Artificial Sequence: Synthetic oligonucleotide
cacggucgucauaguuaaa

SEQ ID NO: 1279353 - RNA, 19 nt, Artificial Sequence
  Description of Artificial Sequence: Synthetic oligonucleotide
ggaucacuagggugggcuu

SEQ ID NO: 1279354 - RNA, 19 nt, Artificial Sequence
  Description of Artificial Sequence: Synthetic oligonucleotide
cgugauuauuggggcuaag

SEQ ID NO: 1279355 - RNA, 19 nt, Artificial Sequence
  Description of Artificial Sequence: Synthetic oligonucleotide
gcgcuggaugcuuuguuuu

SEQ ID NO: 1279356 - RNA, 19 nt, Artificial Sequence
  Description of Artificial Sequence: Synthetic oligonucleotide
ccggagagccggagcgaac

SEQ ID NO: 1279357 - RNA, 19 nt, Artificial Sequence
  Description of Artificial Sequence: Synthetic oligonucleotide
guggagcgaaucggcuucu

SEQ ID NO: 1279358 - RNA, 19 nt, Artificial Sequence
  Description of Artificial Sequence: Synthetic oligonucleotide
ggcuccggcgggcgcggac

SEQ ID NO: 1279359 - RNA, 19 nt, Artificial Sequence
  Description of Artificial Sequence: Synthetic oligonucleotide
caguggcaggaacucgguu

SEQ ID NO: 1279360 - RNA, 19 nt, Artificial Sequence
  Description of Artificial Sequence: Synthetic oligonucleotide
gcgguccggagagccggag

SEQ ID NO: 1279361 - RNA, 19 nt, Artificial Sequence
  Description of Artificial Sequence: Synthetic oligonucleotide
gcaguggcaggaacucggu

SEQ ID NO: 1279362 - RNA, 19 nt, Artificial Sequence
  Description of Artificial Sequence: Synthetic oligonucleotide
caucggcaacagacacggu

SEQ ID NO: 1279363 - RNA, 19 nt, Artificial Sequence
  Description of Artificial Sequence: Synthetic oligonucleotide
cggucgcucuuaggggccc

SEQ ID NO: 1279364 - RNA, 19 nt, Artificial Sequence
  Description of Artificial Sequence: Synthetic oligonucleotide
ccguggagcgaaucggcuu

SEQ ID NO: 1279365 - RNA, 19 nt, Artificial Sequence
  Description of Artificial Sequence: Synthetic oligonucleotide
cgaucuggguacgaucccu

SEQ ID NO: 1279366 - RNA, 19 nt, Artificial Sequence
  Description of Artificial Sequence: Synthetic oligonucleotide
ccacuccccacagcaaacu

SEQ ID NO: 1279367 - RNA, 19 nt, Artificial Sequence
  Description of Artificial Sequence: Synthetic oligonucleotide
gcgguccucagugguggcu

SEQ ID NO: 1279368 - RNA, 19 nt, Artificial Sequence
  Description of Artificial Sequence: Synthetic oligonucleotide
ggcgguccggagagccgga

SEQ ID NO: 1279369 - RNA, 19 nt, Artificial Sequence
  Description of Artificial Sequence: Synthetic oligonucleotide
ccggaggcccuggauggaa

SEQ ID NO: 1279370 - RNA, 19 nt, Artificial Sequence
  Description of Artificial Sequence: Synthetic oligonucleotide
cgacgcgaacaggcuccgg

SEQ ID NO: 1279371 - RNA, 19 nt, Artificial Sequence
  Description of Artificial Sequence: Synthetic oligonucleotide
cgaacgauucgcggacucu

SEQ ID NO: 1279372 - RNA, 19 nt, Artificial Sequence
  Description of Artificial Sequence: Synthetic oligonucleotide
cgucuagcuuggacacaaa

SEQ ID NO: 1279373 - RNA, 19 nt, Artificial Sequence
  Description of Artificial Sequence: Synthetic oligonucleotide
gugaaauaagguuagaggg

SEQ ID NO: 1279374 - RNA, 19 nt, Artificial Sequence
  Description of Artificial Sequence: Synthetic oligonucleotide
uguaauugcauucuggucu

SEQ ID NO: 1279375 - RNA, 19 nt, Artificial Sequence
  Description of Artificial Sequence: Synthetic oligonucleotide
agugaaauaagguuagagg

SEQ ID NO: 1279376 - RNA, 19 nt, Artificial Sequence
  Description of Artificial Sequence: Synthetic oligonucleotide
agugauucaacccuaagag

SEQ ID NO: 1279377 - RNA, 19 nt, Artificial Sequence
  Description of Artificial Sequence: Synthetic oligonucleotide
aagacguuucgguaguggc

SEQ ID NO: 1279378 - RNA, 19 nt, Artificial Sequence
  Description of Artificial Sequence: Synthetic oligonucleotide
agaauuuagagaguuaaag

SEQ ID NO: 1279379 - RNA, 19 nt, Artificial Sequence
  Description of Artificial Sequence: Synthetic oligonucleotide
ucggaugccauucauuagg

SEQ ID NO: 1279380 - RNA, 19 nt, Artificial Sequence
  Description of Artificial Sequence: Synthetic oligonucleotide
gagggaacgaagcugaucc

SEQ ID NO: 1279381 - RNA, 19 nt, Artificial Sequence
  Description of Artificial Sequence: Synthetic oligonucleotide
ugccauaccacucaacaag

SEQ ID NO: 1279382 - RNA, 19 nt, Artificial Sequence
  Description of Artificial Sequence: Synthetic oligonucleotide
aguaacaccuggcuuuugc

SEQ ID NO: 1279383 - RNA, 19 nt, Artificial Sequence
  Description of Artificial Sequence: Synthetic oligonucleotide
ucagauaucccuuacgcuc

SEQ ID NO: 1279384 - RNA, 19 nt, Artificial Sequence
  Description of Artificial Sequence: Synthetic oligonucleotide
aaguccaucggucaguagu

SEQ ID NO: 1279385 - RNA, 19 nt, Artificial Sequence
  Description of Artificial Sequence: Synthetic oligonucleotide
gauugggcuucccagauag

SEQ ID NO: 1279386 - RNA, 19 nt, Artificial Sequence
  Description of Artificial Sequence: Synthetic oligonucleotide
uuaagauugcggcuaagga

SEQ ID NO: 1279387 - RNA, 19 nt, Artificial Sequence
  Description of Artificial Sequence: Synthetic oligonucleotide
aagugaaauaagguuagag

SEQ ID NO: 1279388 - RNA, 19 nt, Artificial Sequence
  Description of Artificial Sequence: Synthetic oligonucleotide
ugggauuacaggcuagggg

SEQ ID NO: 1279389 - RNA, 19 nt, Artificial Sequence
  Description of Artificial Sequence: Synthetic oligonucleotide
aauaagguuagagggaacu

SEQ ID NO: 1279390 - RNA, 19 nt, Artificial Sequence
  Description of Artificial Sequence: Synthetic oligonucleotide
ugguuauagagccuugugc

SEQ ID NO: 1279391 - RNA, 19 nt, Artificial Sequence
  Description of Artificial Sequence: Synthetic oligonucleotide
uugacuuggguauaguaga

SEQ ID NO: 1279392 - RNA, 19 nt, Artificial Sequence
  Description of Artificial Sequence: Synthetic oligonucleotide
uuauagagccuugugcucg

SEQ ID NO: 1279393 - RNA, 19 nt, Artificial Sequence
  Description of Artificial Sequence: Synthetic oligonucleotide
auuaggaacugguacaaga

SEQ ID NO: 1279394 - RNA, 19 nt, Artificial Sequence
  Description of Artificial Sequence: Synthetic oligonucleotide
aaggaaguuaagauugcgg

SEQ ID NO: 1279395 - RNA, 19 nt, Artificial Sequence
  Description of Artificial Sequence: Synthetic oligonucleotide
uaguguauguguuguagag

SEQ ID NO: 1279396 - RNA, 19 nt, Artificial Sequence
  Description of Artificial Sequence: Synthetic oligonucleotide
agcuuggcaagguagcuac

SEQ ID NO: 1279397 - RNA, 19 nt, Artificial Sequence
  Description of Artificial Sequence: Synthetic oligonucleotide
aagugucagggucaaaugu

SEQ ID NO: 1279398 - RNA, 19 nt, Artificial Sequence
  Description of Artificial Sequence: Synthetic oligonucleotide
agcagagcgucgaagaucc

SEQ ID NO: 1279399 - RNA, 19 nt, Artificial Sequence
  Description of Artificial Sequence: Synthetic oligonucleotide
caaggcgaaaauaggaggc

SEQ ID NO: 1279400 - RNA, 19 nt, Artificial Sequence
  Description of Artificial Sequence: Synthetic oligonucleotide
aaacgguagcuggagagac

SEQ ID NO: 1279401 - RNA, 19 nt, Artificial Sequence
  Description of Artificial Sequence: Synthetic oligonucleotide
gguauuuugggaaaacgcg

SEQ ID NO: 1279402 - RNA, 19 nt, Artificial Sequence
  Description of Artificial Sequence: Synthetic oligonucleotide
uaagauugcggcuaaggau

SEQ ID NO: 1279403 - RNA, 19 nt, Artificial Sequence
  Description of Artificial Sequence: Synthetic oligonucleotide
aguggguugguuauagagc

SEQ ID NO: 1279404 - RNA, 19 nt, Artificial Sequence
  Description of Artificial Sequence: Synthetic oligonucleotide
aguagagcaacucauuuua

SEQ ID NO: 1279405 - RNA, 19 nt, Artificial Sequence
  Description of Artificial Sequence: Synthetic oligonucleotide
aggaacugguacaagagcg

SEQ ID NO: 1279406 - RNA, 19 nt, Artificial Sequence
  Description of Artificial Sequence: Synthetic oligonucleotide
auggaagacguuucgguag

SEQ ID NO: 1279407 - RNA, 19 nt, Artificial Sequence
  Description of Artificial Sequence: Synthetic oligonucleotide
uagagaguuaaagugucag

SEQ ID NO: 1279408 - RNA, 19 nt, Artificial Sequence
  Description of Artificial Sequence: Synthetic oligonucleotide
cuaaggaugagcuuggcaa

SEQ ID NO: 1279409 - RNA, 19 nt, Artificial Sequence
  Description of Artificial Sequence: Synthetic oligonucleotide
gaaccgaugacaacucugg

SEQ ID NO: 1279410 - RNA, 19 nt, Artificial Sequence
  Description of Artificial Sequence: Synthetic oligonucleotide
uauacccuuguacaugcca

SEQ ID NO: 1279411 - RNA, 19 nt, Artificial Sequence
  Description of Artificial Sequence: Synthetic oligonucleotide
guuaagauugcggcuaagg

SEQ ID NO: 1279412 - RNA, 19 nt, Artificial Sequence
  Description of Artificial Sequence: Synthetic oligonucleotide
gugaguaucaguggguugg

SEQ ID NO: 1279413 - RNA, 19 nt, Artificial Sequence
  Description of Artificial Sequence: Synthetic oligonucleotide
guagcuacggagcuggagc

SEQ ID NO: 1279414 - RNA, 19 nt, Artificial Sequence
  Description of Artificial Sequence: Synthetic oligonucleotide
gaauuuagagaguuaaagu

SEQ ID NO: 1279415 - RNA, 19 nt, Artificial Sequence
  Description of Artificial Sequence: Synthetic oligonucleotide
aaggaucugaggucaagga

SEQ ID NO: 1279416 - RNA, 19 nt, Artificial Sequence
  Description of Artificial Sequence: Synthetic oligonucleotide
uaaggaugagcuuggcaag

SEQ ID NO: 1279417 - RNA, 19 nt, Artificial Sequence
  Description of Artificial Sequence: Synthetic oligonucleotide
ucggucaguagucacugag

SEQ ID NO: 1279418 - RNA, 19 nt, Artificial Sequence
  Description of Artificial Sequence: Synthetic oligonucleotide
ugcccuacagcaauuucag

SEQ ID NO: 1279419 - RNA, 19 nt, Artificial Sequence
  Description of Artificial Sequence: Synthetic oligonucleotide
auacuggugcccuacagca

SEQ ID NO: 1279420 - RNA, 19 nt, Artificial Sequence
  Description of Artificial Sequence: Synthetic oligonucleotide
uuggguauaguagagcaac

SEQ ID NO: 1279421 - RNA, 19 nt, Artificial Sequence
  Description of Artificial Sequence: Synthetic oligonucleotide
uguagagggaacgaagcug

SEQ ID NO: 1279422 - RNA, 19 nt, Artificial Sequence
  Description of Artificial Sequence: Synthetic oligonucleotide
caggcuagggguauuuugg

SEQ ID NO: 1279423 - RNA, 19 nt, Artificial Sequence
  Description of Artificial Sequence: Synthetic oligonucleotide
uaagguuagagggaacuug

SEQ ID NO: 1279424 - RNA, 19 nt, Artificial Sequence
  Description of Artificial Sequence: Synthetic oligonucleotide
uuugggaaaacgcggaguu

SEQ ID NO: 1279425 - RNA, 19 nt, Artificial Sequence
  Description of Artificial Sequence: Synthetic oligonucleotide
agaggaaccgaugacaacu

SEQ ID NO: 1279426 - RNA, 19 nt, Artificial Sequence
  Description of Artificial Sequence: Synthetic oligonucleotide
ugcucagauaucccuuacg

SEQ ID NO: 1279427 - RNA, 19 nt, Artificial Sequence
  Description of Artificial Sequence: Synthetic oligonucleotide
gaaggaaguuaagauugcg

SEQ ID NO: 1279428 - RNA, 19 nt, Artificial Sequence
  Description of Artificial Sequence: Synthetic oligonucleotide
agaagugaaauaagguuag

SEQ ID NO: 1279429 - RNA, 19 nt, Artificial Sequence
  Description of Artificial Sequence: Synthetic oligonucleotide
ugcauucuggucuucacaa

SEQ ID NO: 1279430 - RNA, 19 nt, Artificial Sequence
  Description of Artificial Sequence: Synthetic oligonucleotide
auugcggcuaaggaugagc

SEQ ID NO: 1279431 - RNA, 19 nt, Artificial Sequence
  Description of Artificial Sequence: Synthetic oligonucleotide
gauguuuauacuggugccc

SEQ ID NO: 1279432 - RNA, 19 nt, Artificial Sequence
  Description of Artificial Sequence: Synthetic oligonucleotide
uggaugagaaggugcacag

SEQ ID NO: 1279433 - RNA, 19 nt, Artificial Sequence
  Description of Artificial Sequence: Synthetic oligonucleotide
uugguuauagagccuugug

SEQ ID NO: 1279434 - RNA, 19 nt, Artificial Sequence
  Description of Artificial Sequence: Synthetic oligonucleotide
ugacuuggguauaguagag

SEQ ID NO: 1279435 - RNA, 19 nt, Artificial Sequence
  Description of Artificial Sequence: Synthetic oligonucleotide
aguagaggcagaggugucc

SEQ ID NO: 1279436 - RNA, 19 nt, Artificial Sequence
  Description of Artificial Sequence: Synthetic oligonucleotide
gaugagaaggugcacagcu

SEQ ID NO: 1279437 - RNA, 19 nt, Artificial Sequence
  Description of Artificial Sequence: Synthetic oligonucleotide
gaugacaacucugggcagg

SEQ ID NO: 1279438 - RNA, 19 nt, Artificial Sequence
  Description of Artificial Sequence: Synthetic oligonucleotide
auaguaaguagaggcagag

SEQ ID NO: 1279439 - RNA, 19 nt, Artificial Sequence
  Description of Artificial Sequence: Synthetic oligonucleotide
aggggauuggugaacacac

SEQ ID NO: 1279440 - RNA, 19 nt, Artificial Sequence
  Description of Artificial Sequence: Synthetic oligonucleotide
uuagagaguuaaaguguca

SEQ ID NO: 1279441 - RNA, 19 nt, Artificial Sequence
  Description of Artificial Sequence: Synthetic oligonucleotide
gaaaauaggaggcaccuau

SEQ ID NO: 1279442 - RNA, 19 nt, Artificial Sequence
  Description of Artificial Sequence: Synthetic oligonucleotide
ucaaguggaugagaagucc

SEQ ID NO: 1279443 - RNA, 19 nt, Artificial Sequence
  Description of Artificial Sequence: Synthetic oligonucleotide
gguagauugggcuucccag

SEQ ID NO: 1279444 - RNA, 19 nt, Artificial Sequence
  Description of Artificial Sequence: Synthetic oligonucleotide
uggguuagugccugaaaca

SEQ ID NO: 1279445 - RNA, 19 nt, Artificial Sequence
  Description of Artificial Sequence: Synthetic oligonucleotide
gguuagagggaacuugggg

SEQ ID NO: 1279446 - RNA, 19 nt, Artificial Sequence
  Description of Artificial Sequence: Synthetic oligonucleotide
aacgaagcugaucccagaa

SEQ ID NO: 1279447 - RNA, 19 nt, Artificial Sequence
  Description of Artificial Sequence: Synthetic oligonucleotide
aaacgcggaguugggaaac

SEQ ID NO: 1279448 - RNA, 19 nt, Artificial Sequence
  Description of Artificial Sequence: Synthetic oligonucleotide
aaauaagguuagagggaac

SEQ ID NO: 1279449 - RNA, 19 nt, Artificial Sequence
  Description of Artificial Sequence: Synthetic oligonucleotide
gaaaacgcggaguugggaa

SEQ ID NO: 1279450 - RNA, 19 nt, Artificial Sequence
  Description of Artificial Sequence: Synthetic oligonucleotide
guagcaaaggccuaccaaa

SEQ ID NO: 1279451 - RNA, 19 nt, Artificial Sequence
  Description of Artificial Sequence: Synthetic oligonucleotide
uuguagagggaacgaagcu

SEQ ID NO: 1279452 - RNA, 19 nt, Artificial Sequence
  Description of Artificial Sequence: Synthetic oligonucleotide
uucaacccuaagagaacag

SEQ ID NO: 1279453 - RNA, 19 nt, Artificial Sequence
  Description of Artificial Sequence: Synthetic oligonucleotide
caucagugcucagauaucc

SEQ ID NO: 1279454 - RNA, 19 nt, Artificial Sequence
  Description of Artificial Sequence: Synthetic oligonucleotide
aaaacgcggaguugggaaa

SEQ ID NO: 1279455 - RNA, 19 nt, Artificial Sequence
  Description of Artificial Sequence: Synthetic oligonucleotide
aguaucaguggguugguua

SEQ ID NO: 1279456 - RNA, 19 nt, Artificial Sequence
  Description of Artificial Sequence: Synthetic oligonucleotide
uuuauacuggugcccuaca

SEQ ID NO: 1279457 - RNA, 19 nt, Artificial Sequence
  Description of Artificial Sequence: Synthetic oligonucleotide
caaaggccuaccaaaagca

SEQ ID NO: 1279458 - RNA, 19 nt, Artificial Sequence
  Description of Artificial Sequence: Synthetic oligonucleotide
agucggaugccauucauua

SEQ ID NO: 1279459 - RNA, 19 nt, Artificial Sequence
  Description of Artificial Sequence: Synthetic oligonucleotide
guuagagggaacuuggggu

SEQ ID NO: 1279460 - RNA, 19 nt, Artificial Sequence
  Description of Artificial Sequence: Synthetic oligonucleotide
cccuacagcaauuucagag

SEQ ID NO: 1279461 - RNA, 19 nt, Artificial Sequence
  Description of Artificial Sequence: Synthetic oligonucleotide
agcaaaggccuaccaaaag

SEQ ID NO: 1279462 - RNA, 19 nt, Artificial Sequence
  Description of Artificial Sequence: Synthetic oligonucleotide
gaaguuaagauugcggcua

SEQ ID NO: 1279463 - RNA, 19 nt, Artificial Sequence
  Description of Artificial Sequence: Synthetic oligonucleotide
gaucagagggaagaacccc

SEQ ID NO: 1279464 - RNA, 19 nt, Artificial Sequence
  Description of Artificial Sequence: Synthetic oligonucleotide
aaaugcccucuguccgagc

SEQ ID NO: 1279465 - RNA, 19 nt, Artificial Sequence
  Description of Artificial Sequence: Synthetic oligonucleotide
gggauuggugaacacacag

SEQ ID NO: 1279466 - RNA, 19 nt, Artificial Sequence
  Description of Artificial Sequence: Synthetic oligonucleotide
ugugcucgccacaucaaaa

SEQ ID NO: 1279467 - RNA, 19 nt, Artificial Sequence
  Description of Artificial Sequence: Synthetic oligonucleotide
gguauaguagagcaacuca

SEQ ID NO: 1279468 - RNA, 19 nt, Artificial Sequence
  Description of Artificial Sequence: Synthetic oligonucleotide
gcgaaggaaguuaagauug

SEQ ID NO: 1279469 - RNA, 19 nt, Artificial Sequence
  Description of Artificial Sequence: Synthetic oligonucleotide
uaguaaguagaggcagagg

SEQ ID NO: 1279470 - RNA, 19 nt, Artificial Sequence
  Description of Artificial Sequence: Synthetic oligonucleotide
cugagauaguaaguagagg

SEQ ID NO: 1279471 - RNA, 19 nt, Artificial Sequence
  Description of Artificial Sequence: Synthetic oligonucleotide
cacugagauaguaaguaga

SEQ ID NO: 1279472 - RNA, 19 nt, Artificial Sequence
  Description of Artificial Sequence: Synthetic oligonucleotide
auucaacccuaagagaaca

SEQ ID NO: 1279473 - RNA, 19 nt, Artificial Sequence
  Description of Artificial Sequence: Synthetic oligonucleotide
aguuaaagugucaggguca

SEQ ID NO: 1279474 - RNA, 19 nt, Artificial Sequence
  Description of Artificial Sequence: Synthetic oligonucleotide
aggcuagggguauuuuggg

SEQ ID NO: 1279475 - RNA, 19 nt, Artificial Sequence
  Description of Artificial Sequence: Synthetic oligonucleotide
uggaagacguuucgguagu

SEQ ID NO: 1279476 - RNA, 19 nt, Artificial Sequence
  Description of Artificial Sequence: Synthetic oligonucleotide
gugcucgccacaucaaaag

SEQ ID NO: 1279477 - RNA, 19 nt, Artificial Sequence
  Description of Artificial Sequence: Synthetic oligonucleotide
cuguaauugcauucugguc

SEQ ID NO: 1279478 - RNA, 19 nt, Artificial Sequence
  Description of Artificial Sequence: Synthetic oligonucleotide
uacccggggaagcuugcgg

SEQ ID NO: 1279479 - RNA, 19 nt, Artificial Sequence
  Description of Artificial Sequence: Synthetic oligonucleotide
cuuuacccggggaagcuug

SEQ ID NO: 1279480 - RNA, 19 nt, Artificial Sequence
  Description of Artificial Sequence: Synthetic oligonucleotide
caguucucccuguaauugc

SEQ ID NO: 1279481 - RNA, 19 nt, Artificial Sequence
  Description of Artificial Sequence: Synthetic oligonucleotide
aaguuaagauugcggcuaa

SEQ ID NO: 1279482 - RNA, 19 nt, Artificial Sequence
  Description of Artificial Sequence: Synthetic oligonucleotide
uauagagccuugugcucgc

SEQ ID NO: 1279483 - RNA, 19 nt, Artificial Sequence
  Description of Artificial Sequence: Synthetic oligonucleotide
uagauugggcuucccagau

SEQ ID NO: 1279484 - RNA, 19 nt, Artificial Sequence
  Description of Artificial Sequence: Synthetic oligonucleotide
gguuauagagccuugugcu

SEQ ID NO: 1279485 - RNA, 19 nt, Artificial Sequence
  Description of Artificial Sequence: Synthetic oligonucleotide
uaucccuuacgcucugcca

SEQ ID NO: 1279486 - RNA, 19 nt, Artificial Sequence
  Description of Artificial Sequence: Synthetic oligonucleotide
guuauagagccuugugcuc

SEQ ID NO: 1279487 - RNA, 19 nt, Artificial Sequence
  Description of Artificial Sequence: Synthetic oligonucleotide
agacguuucgguaguggcg

SEQ ID NO: 1279488 - RNA, 19 nt, Artificial Sequence
  Description of Artificial Sequence: Synthetic oligonucleotide
ggcuuuugcaguccaggcg

SEQ ID NO: 1279489 - RNA, 19 nt, Artificial Sequence
  Description of Artificial Sequence: Synthetic oligonucleotide
aguccaucggucaguaguc

SEQ ID NO: 1279490 - RNA, 19 nt, Artificial Sequence
  Description of Artificial Sequence: Synthetic oligonucleotide
guagagggaacgaagcuga

SEQ ID NO: 1279491 - RNA, 19 nt, Artificial Sequence
  Description of Artificial Sequence: Synthetic oligonucleotide
auguuuauacuggugcccu

SEQ ID NO: 1279492 - RNA, 19 nt, Artificial Sequence
  Description of Artificial Sequence: Synthetic oligonucleotide
uggguauaguagagcaacu

SEQ ID NO: 1279493 - RNA, 19 nt, Artificial Sequence
  Description of Artificial Sequence: Synthetic oligonucleotide
ugguacaagagcgcagggc

SEQ ID NO: 1279494 - RNA, 19 nt, Artificial Sequence
  Description of Artificial Sequence: Synthetic oligonucleotide
guagauugggcuucccaga

SEQ ID NO: 1279495 - RNA, 19 nt, Artificial Sequence
  Description of Artificial Sequence: Synthetic oligonucleotide
gugauucaacccuaagaga

SEQ ID NO: 1279496 - RNA, 19 nt, Artificial Sequence
  Description of Artificial Sequence: Synthetic oligonucleotide
ccuaccaaaagcagggaug

SEQ ID NO: 1279497 - RNA, 19 nt, Artificial Sequence
  Description of Artificial Sequence: Synthetic oligonucleotide
ggcaccuauacccuuguac

SEQ ID NO: 1279498 - RNA, 19 nt, Artificial Sequence
  Description of Artificial Sequence: Synthetic oligonucleotide
aacugguacaagagcgcag

SEQ ID NO: 1279499 - RNA, 19 nt, Artificial Sequence
  Description of Artificial Sequence: Synthetic oligonucleotide
guuuauacuggugcccuac

SEQ ID NO: 1279500 - RNA, 19 nt, Artificial Sequence
  Description of Artificial Sequence: Synthetic oligonucleotide
uuuacccggggaagcuugc

SEQ ID NO: 1279501 - RNA, 19 nt, Artificial Sequence
  Description of Artificial Sequence: Synthetic oligonucleotide
gcgacaagcaagaggaggg

SEQ ID NO: 1279502 - RNA, 19 nt, Artificial Sequence
  Description of Artificial Sequence: Synthetic oligonucleotide
gacuuggguauaguagagc

SEQ ID NO: 1279503 - RNA, 19 nt, Artificial Sequence
  Description of Artificial Sequence: Synthetic oligonucleotide
agagggaacgaagcugauc

SEQ ID NO: 1279504 - RNA, 19 nt, Artificial Sequence
  Description of Artificial Sequence: Synthetic oligonucleotide
agcugaucccagaagaaga

SEQ ID NO: 1279505 - RNA, 19 nt, Artificial Sequence
  Description of Artificial Sequence: Synthetic oligonucleotide
gggauuacaggcuaggggu

SEQ ID NO: 1279506 - RNA, 19 nt, Artificial Sequence
  Description of Artificial Sequence: Synthetic oligonucleotide
cugaggacgccuucaucag

SEQ ID NO: 1279507 - RNA, 19 nt, Artificial Sequence
  Description of Artificial Sequence: Synthetic oligonucleotide
accgaaggaucugagguca

SEQ ID NO: 1279508 - RNA, 19 nt, Artificial Sequence
  Description of Artificial Sequence: Synthetic oligonucleotide
aguugggaaacgguagcug

SEQ ID NO: 1279509 - RNA, 19 nt, Artificial Sequence
  Description of Artificial Sequence: Synthetic oligonucleotide
gcugccauaccacucaaca

SEQ ID NO: 1279510 - RNA, 19 nt, Artificial Sequence
  Description of Artificial Sequence: Synthetic oligonucleotide
uugugcucgccacaucaaa

SEQ ID NO: 1279511 - RNA, 19 nt, Artificial Sequence
  Description of Artificial Sequence: Synthetic oligonucleotide
ucccuguaauugcauucug

SEQ ID NO: 1279512 - RNA, 19 nt, Artificial Sequence
  Description of Artificial Sequence: Synthetic oligonucleotide
uagcuacggagcuggagcu

SEQ ID NO: 1279513 - RNA, 19 nt, Artificial Sequence
  Description of Artificial Sequence: Synthetic oligonucleotide
aacgcggaguugggaaacg

SEQ ID NO: 1279514 - RNA, 19 nt, Artificial Sequence
  Description of Artificial Sequence: Synthetic oligonucleotide
uccaucggucaguagucac

SEQ ID NO: 1279515 - RNA, 19 nt, Artificial Sequence
  Description of Artificial Sequence: Synthetic oligonucleotide
gaccgaaggaucugagguc

SEQ ID NO: 1279516 - RNA, 19 nt, Artificial Sequence
  Description of Artificial Sequence: Synthetic oligonucleotide
ggcgacaagcaagaggagg

SEQ ID NO: 1279517 - RNA, 19 nt, Artificial Sequence
  Description of Artificial Sequence: Synthetic oligonucleotide
gucggaugccauucauuag

SEQ ID NO: 1279518 - RNA, 19 nt, Artificial Sequence
  Description of Artificial Sequence: Synthetic oligonucleotide
gaagcuugcggaggccggg

SEQ ID NO: 1279519 - RNA, 19 nt, Artificial Sequence
  Description of Artificial Sequence: Synthetic oligonucleotide
gaacugguacaagagcgca

SEQ ID NO: 1279520 - RNA, 19 nt, Artificial Sequence
  Description of Artificial Sequence: Synthetic oligonucleotide
cuggguagaggaaccgaug

SEQ ID NO: 1279521 - RNA, 19 nt, Artificial Sequence
  Description of Artificial Sequence: Synthetic oligonucleotide
ugaggacgccuucaucagu

SEQ ID NO: 1279522 - RNA, 19 nt, Artificial Sequence
  Description of Artificial Sequence: Synthetic oligonucleotide
guaggugcccagucggaug

SEQ ID NO: 1279523 - RNA, 19 nt, Artificial Sequence
  Description of Artificial Sequence: Synthetic oligonucleotide
gguagggguagcaaaggcc

SEQ ID NO: 1279524 - RNA, 19 nt, Artificial Sequence
  Description of Artificial Sequence: Synthetic oligonucleotide
guagagcaacucauuuuag

SEQ ID NO: 1279525 - RNA, 19 nt, Artificial Sequence
  Description of Artificial Sequence: Synthetic oligonucleotide
gaaacgguagcuggagaga

SEQ ID NO: 1279526 - RNA, 19 nt, Artificial Sequence
  Description of Artificial Sequence: Synthetic oligonucleotide
cuuuugcaguccaggcggc

SEQ ID NO: 1279527 - RNA, 19 nt, Artificial Sequence
  Description of Artificial Sequence: Synthetic oligonucleotide
agcuugcggaggccgggcc

SEQ ID NO: 1279528 - RNA, 19 nt, Artificial Sequence
  Description of Artificial Sequence: Synthetic oligonucleotide
uagaggaaccgaugacaac

SEQ ID NO: 1279529 - RNA, 19 nt, Artificial Sequence
  Description of Artificial Sequence: Synthetic oligonucleotide
gucgcgaaggaaguuaaga

SEQ ID NO: 1279530 - RNA, 19 nt, Artificial Sequence
  Description of Artificial Sequence: Synthetic oligonucleotide
uagagccuugugcucgcca

SEQ ID NO: 1279531 - RNA, 19 nt, Artificial Sequence
  Description of Artificial Sequence: Synthetic oligonucleotide
uccaggggauuggugaaca

SEQ ID NO: 1279532 - RNA, 19 nt, Artificial Sequence
  Description of Artificial Sequence: Synthetic oligonucleotide
cugucugcagcagagcguc

SEQ ID NO: 1279533 - RNA, 19 nt, Artificial Sequence
  Description of Artificial Sequence: Synthetic oligonucleotide
cccuguaauugcauucugg

SEQ ID NO: 1279534 - RNA, 19 nt, Artificial Sequence
  Description of Artificial Sequence: Synthetic oligonucleotide
aaccccacuagaccauguu

SEQ ID NO: 1279535 - RNA, 19 nt, Artificial Sequence
  Description of Artificial Sequence: Synthetic oligonucleotide
guggaugagaaggugcaca

SEQ ID NO: 1279536 - RNA, 19 nt, Artificial Sequence
  Description of Artificial Sequence: Synthetic oligonucleotide
cuauacccuuguacaugcc

SEQ ID NO: 1279537 - RNA, 19 nt, Artificial Sequence
  Description of Artificial Sequence: Synthetic oligonucleotide
cugguacaagagcgcaggg

SEQ ID NO: 1279538 - RNA, 19 nt, Artificial Sequence
  Description of Artificial Sequence: Synthetic oligonucleotide
uacagcaauuucagagguu

SEQ ID NO: 1279539 - RNA, 19 nt, Artificial Sequence
  Description of Artificial Sequence: Synthetic oligonucleotide
uggcgagaaggcccuguug

SEQ ID NO: 1279540 - RNA, 19 nt, Artificial Sequence
  Description of Artificial Sequence: Synthetic oligonucleotide
gccaaggcgaaaauaggag

SEQ ID NO: 1279541 - RNA, 19 nt, Artificial Sequence
  Description of Artificial Sequence: Synthetic oligonucleotide
aguucucccuguaauugca

SEQ ID NO: 1279542 - RNA, 19 nt, Artificial Sequence
  Description of Artificial Sequence: Synthetic oligonucleotide
cauggaagacguuucggua

SEQ ID NO: 1279543 - RNA, 19 nt, Artificial Sequence
  Description of Artificial Sequence: Synthetic oligonucleotide
accauguuucuggccaauc

SEQ ID NO: 1279544 - RNA, 19 nt, Artificial Sequence
  Description of Artificial Sequence: Synthetic oligonucleotide
cacucaccauggcagcugc

SEQ ID NO: 1279545 - RNA, 19 nt, Artificial Sequence
  Description of Artificial Sequence: Synthetic oligonucleotide
uucucccuguaauugcauu

SEQ ID NO: 1279546 - RNA, 19 nt, Artificial Sequence
  Description of Artificial Sequence: Synthetic oligonucleotide
gugcccuacagcaauuuca

SEQ ID NO: 1279547 - RNA, 19 nt, Artificial Sequence
  Description of Artificial Sequence: Synthetic oligonucleotide
gcuagggguauuuugggaa

SEQ ID NO: 1279548 - RNA, 19 nt, Artificial Sequence
  Description of Artificial Sequence: Synthetic oligonucleotide
gaacgaagcugaucccaga

SEQ ID NO: 1279549 - RNA, 19 nt, Artificial Sequence
  Description of Artificial Sequence: Synthetic oligonucleotide
cauuaggaacugguacaag

SEQ ID NO: 1279550 - RNA, 19 nt, Artificial Sequence
  Description of Artificial Sequence: Synthetic oligonucleotide
gaagcugaucccagaagaa

SEQ ID NO: 1279551 - RNA, 19 nt, Artificial Sequence
  Description of Artificial Sequence: Synthetic oligonucleotide
agcgcugcggacaggacug

SEQ ID NO: 1279552 - RNA, 19 nt, Artificial Sequence
  Description of Artificial Sequence: Synthetic oligonucleotide
uuacccggggaagcuugcg

SEQ ID NO: 1279553 - RNA, 19 nt, Artificial Sequence
  Description of Artificial Sequence: Synthetic oligonucleotide
guauaguagagcaacucau

SEQ ID NO: 1279554 - RNA, 19 nt, Artificial Sequence
  Description of Artificial Sequence: Synthetic oligonucleotide
ggaacugguacaagagcgc

SEQ ID NO: 1279555 - RNA, 19 nt, Artificial Sequence
  Description of Artificial Sequence: Synthetic oligonucleotide
auaagguuagagggaacuu

SEQ ID NO: 1279556 - RNA, 19 nt, Artificial Sequence
  Description of Artificial Sequence: Synthetic oligonucleotide
gcugaucccagaagaagag

SEQ ID NO: 1279557 - RNA, 19 nt, Artificial Sequence
  Description of Artificial Sequence: Synthetic oligonucleotide
gaagugaaauaagguuaga

SEQ ID NO: 1279558 - RNA, 19 nt, Artificial Sequence
  Description of Artificial Sequence: Synthetic oligonucleotide
guaucaguggguugguuau

SEQ ID NO: 1279559 - RNA, 19 nt, Artificial Sequence
  Description of Artificial Sequence: Synthetic oligonucleotide
acccggggaagcuugcgga

SEQ ID NO: 1279560 - RNA, 19 nt, Artificial Sequence
  Description of Artificial Sequence: Synthetic oligonucleotide
uccuuuacccggggaagcu

SEQ ID NO: 1279561 - RNA, 19 nt, Artificial Sequence
  Description of Artificial Sequence: Synthetic oligonucleotide
aguuaagauugcggcuaag

SEQ ID NO: 1279562 - RNA, 19 nt, Artificial Sequence
  Description of Artificial Sequence: Synthetic oligonucleotide
cuagggguauuuugggaaa

SEQ ID NO: 1279563 - RNA, 19 nt, Artificial Sequence
  Description of Artificial Sequence: Synthetic oligonucleotide
uggcgacaagcaagaggag

SEQ ID NO: 1279564 - RNA, 19 nt, Artificial Sequence
  Description of Artificial Sequence: Synthetic oligonucleotide
gcccugauguuuauacugg

SEQ ID NO: 1279565 - RNA, 19 nt, Artificial Sequence
  Description of Artificial Sequence: Synthetic oligonucleotide
gcugguagguucccggggc

SEQ ID NO: 1279566 - RNA, 19 nt, Artificial Sequence
  Description of Artificial Sequence: Synthetic oligonucleotide
cuaagagaacagagaggga

SEQ ID NO: 1279567 - RNA, 19 nt, Artificial Sequence
  Description of Artificial Sequence: Synthetic oligonucleotide
auagagccuugugcucgcc

SEQ ID NO: 1279568 - RNA, 19 nt, Artificial Sequence
  Description of Artificial Sequence: Synthetic oligonucleotide
uacuggugcccuacagcaa

SEQ ID NO: 1279569 - RNA, 19 nt, Artificial Sequence
  Description of Artificial Sequence: Synthetic oligonucleotide
uccaugguagggguagcaa

SEQ ID NO: 1279570 - RNA, 19 nt, Artificial Sequence
  Description of Artificial Sequence: Synthetic oligonucleotide
guacaagagcgcagggccc

SEQ ID NO: 1279571 - RNA, 19 nt, Artificial Sequence
  Description of Artificial Sequence: Synthetic oligonucleotide
gaggaaccgaugacaacuc

SEQ ID NO: 1279572 - RNA, 19 nt, Artificial Sequence
  Description of Artificial Sequence: Synthetic oligonucleotide
ugaguaucaguggguuggu

SEQ ID NO: 1279573 - RNA, 19 nt, Artificial Sequence
  Description of Artificial Sequence: Synthetic oligonucleotide
gguguugacuuggguauag

SEQ ID NO: 1279574 - RNA, 19 nt, Artificial Sequence
  Description of Artificial Sequence: Synthetic oligonucleotide
cugguagguucccggggcc

SEQ ID NO: 1279575 - RNA, 19 nt, Artificial Sequence
  Description of Artificial Sequence: Synthetic oligonucleotide
cuacagcaauuucagaggu

SEQ ID NO: 1279576 - RNA, 19 nt, Artificial Sequence
  Description of Artificial Sequence: Synthetic oligonucleotide
accccacuagaccauguuu

SEQ ID NO: 1279577 - RNA, 19 nt, Artificial Sequence
  Description of Artificial Sequence: Synthetic oligonucleotide
ccccacuagaccauguuuc

SEQ ID NO: 1279578 - RNA, 19 nt, Artificial Sequence
  Description of Artificial Sequence: Synthetic oligonucleotide
gaaccccggaggugguuug

SEQ ID NO: 1279579 - RNA, 19 nt, Artificial Sequence
  Description of Artificial Sequence: Synthetic oligonucleotide
ggaaguuaagauugcggcu

SEQ ID NO: 1279580 - RNA, 19 nt, Artificial Sequence
  Description of Artificial Sequence: Synthetic oligonucleotide
aacgguagcuggagagaca

SEQ ID NO: 1279581 - RNA, 19 nt, Artificial Sequence
  Description of Artificial Sequence: Synthetic oligonucleotide
uacuacugccaugccacuc

SEQ ID NO: 1279582 - RNA, 19 nt, Artificial Sequence
  Description of Artificial Sequence: Synthetic oligonucleotide
uagggguauuuugggaaaa

SEQ ID NO: 1279583 - RNA, 19 nt, Artificial Sequence
  Description of Artificial Sequence: Synthetic oligonucleotide
caggcugccauaccacuca

SEQ ID NO: 1279584 - RNA, 19 nt, Artificial Sequence
  Description of Artificial Sequence: Synthetic oligonucleotide
aagcagggauggauaucag

SEQ ID NO: 1279585 - RNA, 19 nt, Artificial Sequence
  Description of Artificial Sequence: Synthetic oligonucleotide
cagauaucccuuacgcucu

SEQ ID NO: 1279586 - RNA, 19 nt, Artificial Sequence
  Description of Artificial Sequence: Synthetic oligonucleotide
uaguggcgcugguagguuc

SEQ ID NO: 1279587 - RNA, 19 nt, Artificial Sequence
  Description of Artificial Sequence: Synthetic oligonucleotide
gcuaaggaugagcuuggca

SEQ ID NO: 1279588 - RNA, 19 nt, Artificial Sequence
  Description of Artificial Sequence: Synthetic oligonucleotide
gggaagcuugcggaggccg

SEQ ID NO: 1279589 - RNA, 19 nt, Artificial Sequence
  Description of Artificial Sequence: Synthetic oligonucleotide
cucagauaucccuuacgcu

SEQ ID NO: 1279590 - RNA, 19 nt, Artificial Sequence
  Description of Artificial Sequence: Synthetic oligonucleotide
gauugcggcuaaggaugag

SEQ ID NO: 1279591 - RNA, 19 nt, Artificial Sequence
  Description of Artificial Sequence: Synthetic oligonucleotide
agaccauguuucuggccaa

SEQ ID NO: 1279592 - RNA, 19 nt, Artificial Sequence
  Description of Artificial Sequence: Synthetic oligonucleotide
ucuggcgagaaggcccugu

SEQ ID NO: 1279593 - RNA, 19 nt, Artificial Sequence
  Description of Artificial Sequence: Synthetic oligonucleotide
uagagggaacuugggguuc

SEQ ID NO: 1279594 - RNA, 19 nt, Artificial Sequence
  Description of Artificial Sequence: Synthetic oligonucleotide
cuugcggaggccgggccgc

SEQ ID NO: 1279595 - RNA, 19 nt, Artificial Sequence
  Description of Artificial Sequence: Synthetic oligonucleotide
uuacaggcuagggguauuu

SEQ ID NO: 1279596 - RNA, 19 nt, Artificial Sequence
  Description of Artificial Sequence: Synthetic oligonucleotide
acgcggaguugggaaacgg

SEQ ID NO: 1279597 - RNA, 19 nt, Artificial Sequence
  Description of Artificial Sequence: Synthetic oligonucleotide
gguagcuacggagcuggag

SEQ ID NO: 1279598 - RNA, 19 nt, Artificial Sequence
  Description of Artificial Sequence: Synthetic oligonucleotide
cccguaggugcccagucgg

SEQ ID NO: 1279599 - RNA, 19 nt, Artificial Sequence
  Description of Artificial Sequence: Synthetic oligonucleotide
ggguauaguagagcaacuc

SEQ ID NO: 1279600 - RNA, 19 nt, Artificial Sequence
  Description of Artificial Sequence: Synthetic oligonucleotide
accccggaggugguuuggc

SEQ ID NO: 1279601 - RNA, 19 nt, Artificial Sequence
  Description of Artificial Sequence: Synthetic oligonucleotide
cugccauaccacucaacaa

SEQ ID NO: 1279602 - RNA, 19 nt, Artificial Sequence
  Description of Artificial Sequence: Synthetic oligonucleotide
uuucgguaguggcgcuggu

SEQ ID NO: 1279603 - RNA, 19 nt, Artificial Sequence
  Description of Artificial Sequence: Synthetic oligonucleotide
gcaacagguagaauuuaga

SEQ ID NO: 1279604 - RNA, 19 nt, Artificial Sequence
  Description of Artificial Sequence: Synthetic oligonucleotide
ugccugaaacaugcccuga

SEQ ID NO: 1279605 - RNA, 19 nt, Artificial Sequence
  Description of Artificial Sequence: Synthetic oligonucleotide
caggggauuggugaacaca

SEQ ID NO: 1279606 - RNA, 19 nt, Artificial Sequence
  Description of Artificial Sequence: Synthetic oligonucleotide
ggugucauggccaguacua

SEQ ID NO: 1279607 - RNA, 19 nt, Artificial Sequence
  Description of Artificial Sequence: Synthetic oligonucleotide
gucaguagucacugagaua

SEQ ID NO: 1279608 - RNA, 19 nt, Artificial Sequence
  Description of Artificial Sequence: Synthetic oligonucleotide
agauugggcuucccagaua

SEQ ID NO: 1279609 - RNA, 19 nt, Artificial Sequence
  Description of Artificial Sequence: Synthetic oligonucleotide
ugacaacucugggcaggcc

SEQ ID NO: 1279610 - RNA, 19 nt, Artificial Sequence
  Description of Artificial Sequence: Synthetic oligonucleotide
aaggcccuguugaccgaag

SEQ ID NO: 1279611 - RNA, 19 nt, Artificial Sequence
  Description of Artificial Sequence: Synthetic oligonucleotide
aggccgggccgccacucuc

SEQ ID NO: 1279612 - RNA, 19 nt, Artificial Sequence
  Description of Artificial Sequence: Synthetic oligonucleotide
guugguuauagagccuugu

SEQ ID NO: 1279613 - RNA, 19 nt, Artificial Sequence
  Description of Artificial Sequence: Synthetic oligonucleotide
ggaagcuugcggaggccgg

SEQ ID NO: 1279614 - RNA, 19 nt, Artificial Sequence
  Description of Artificial Sequence: Synthetic oligonucleotide
gcugcggacaggacugagg

SEQ ID NO: 1279615 - RNA, 19 nt, Artificial Sequence
  Description of Artificial Sequence: Synthetic oligonucleotide
ugcggcuaaggaugagcuu

SEQ ID NO: 1279616 - RNA, 19 nt, Artificial Sequence
  Description of Artificial Sequence: Synthetic oligonucleotide
gcuccuuuacccggggaag

SEQ ID NO: 1279617 - RNA, 19 nt, Artificial Sequence
  Description of Artificial Sequence: Synthetic oligonucleotide
ugguagguucccggggccu

SEQ ID NO: 1279618 - RNA, 19 nt, Artificial Sequence
  Description of Artificial Sequence: Synthetic oligonucleotide
ggcuagggguauuuuggga

SEQ ID NO: 1279619 - RNA, 19 nt, Artificial Sequence
  Description of Artificial Sequence: Synthetic oligonucleotide
caaggcggccaggccaucc

SEQ ID NO: 1279620 - RNA, 19 nt, Artificial Sequence
  Description of Artificial Sequence: Synthetic oligonucleotide
gacaggacugaggacgccu

SEQ ID NO: 1279621 - RNA, 19 nt, Artificial Sequence
  Description of Artificial Sequence: Synthetic oligonucleotide
gcuugcggaggccgggccg

SEQ ID NO: 1279622 - RNA, 19 nt, Artificial Sequence
  Description of Artificial Sequence: Synthetic oligonucleotide
ccaaaagcagggauggaua

SEQ ID NO: 1279623 - RNA, 19 nt, Artificial Sequence
  Description of Artificial Sequence: Synthetic oligonucleotide
cccuguugaccgaaggauc

SEQ ID NO: 1279624 - RNA, 19 nt, Artificial Sequence
  Description of Artificial Sequence: Synthetic oligonucleotide
guucccggggccuucaguu

SEQ ID NO: 1279625 - RNA, 19 nt, Artificial Sequence
  Description of Artificial Sequence: Synthetic oligonucleotide
ggugcccuacagcaauuuc

SEQ ID NO: 1279626 - RNA, 19 nt, Artificial Sequence
  Description of Artificial Sequence: Synthetic oligonucleotide
gcccguaggugcccagucg

SEQ ID NO: 1279627 - RNA, 19 nt, Artificial Sequence
  Description of Artificial Sequence: Synthetic oligonucleotide
gccauaccacucaacaaga

SEQ ID NO: 1279628 - RNA, 19 nt, Artificial Sequence
  Description of Artificial Sequence: Synthetic oligonucleotide
ccucaaguggaugagaagu

SEQ ID NO: 1279629 - RNA, 19 nt, Artificial Sequence
  Description of Artificial Sequence: Synthetic oligonucleotide
cacucaacaagaaguccau

SEQ ID NO: 1279630 - RNA, 19 nt, Artificial Sequence
  Description of Artificial Sequence: Synthetic oligonucleotide
acgcucugccagcccguag

SEQ ID NO: 1279631 - RNA, 19 nt, Artificial Sequence
  Description of Artificial Sequence: Synthetic oligonucleotide
gguugguuauagagccuug

SEQ ID NO: 1279632 - RNA, 19 nt, Artificial Sequence
  Description of Artificial Sequence: Synthetic oligonucleotide
cgcucugccagcccguagg

SEQ ID NO: 1279633 - RNA, 19 nt, Artificial Sequence
  Description of Artificial Sequence: Synthetic oligonucleotide
uacaggcuagggguauuuu

SEQ ID NO: 1279634 - RNA, 19 nt, Artificial Sequence
  Description of Artificial Sequence: Synthetic oligonucleotide
gcgcugguagguucccggg

SEQ ID NO: 1279635 - RNA, 19 nt, Artificial Sequence
  Description of Artificial Sequence: Synthetic oligonucleotide
acguuucgguaguggcgcu

SEQ ID NO: 1279636 - RNA, 19 nt, Artificial Sequence
  Description of Artificial Sequence: Synthetic oligonucleotide
gaaggcccuguugaccgaa

SEQ ID NO: 1279637 - RNA, 19 nt, Artificial Sequence
  Description of Artificial Sequence: Synthetic oligonucleotide
ggaaaacgcggaguuggga

SEQ ID NO: 1279638 - RNA, 19 nt, Artificial Sequence
  Description of Artificial Sequence: Synthetic oligonucleotide
ccggaggugguuuggcgac

SEQ ID NO: 1279639 - RNA, 19 nt, Artificial Sequence
  Description of Artificial Sequence: Synthetic oligonucleotide
gcgagaaggcccuguugac

SEQ ID NO: 1279640 - RNA, 19 nt, Artificial Sequence
  Description of Artificial Sequence: Synthetic oligonucleotide
caccuauacccuuguacau

SEQ ID NO: 1279641 - RNA, 19 nt, Artificial Sequence
  Description of Artificial Sequence: Synthetic oligonucleotide
ggguagcaaaggccuacca

SEQ ID NO: 1279642 - RNA, 19 nt, Artificial Sequence
  Description of Artificial Sequence: Synthetic oligonucleotide
cgugaguaucaguggguug

SEQ ID NO: 1279643 - RNA, 19 nt, Artificial Sequence
  Description of Artificial Sequence: Synthetic oligonucleotide
guccaucggucaguaguca

SEQ ID NO: 1279644 - RNA, 19 nt, Artificial Sequence
  Description of Artificial Sequence: Synthetic oligonucleotide
ggguuagugccugaaacau

SEQ ID NO: 1279645 - RNA, 19 nt, Artificial Sequence
  Description of Artificial Sequence: Synthetic oligonucleotide
cgccacaaccccacuagac

SEQ ID NO: 1279646 - RNA, 19 nt, Artificial Sequence
  Description of Artificial Sequence: Synthetic oligonucleotide
ggucgcgaaggaaguuaag

SEQ ID NO: 1279647 - RNA, 19 nt, Artificial Sequence
  Description of Artificial Sequence: Synthetic oligonucleotide
cggacaggacugaggacgc

SEQ ID NO: 1279648 - RNA, 19 nt, Artificial Sequence
  Description of Artificial Sequence: Synthetic oligonucleotide
gcaagaggagggucgcgaa

SEQ ID NO: 1279649 - RNA, 19 nt, Artificial Sequence
  Description of Artificial Sequence: Synthetic oligonucleotide
ccccggaggugguuuggcg

SEQ ID NO: 1279650 - RNA, 19 nt, Artificial Sequence
  Description of Artificial Sequence: Synthetic oligonucleotide
acaugcccugauguuuaua

SEQ ID NO: 1279651 - RNA, 19 nt, Artificial Sequence
  Description of Artificial Sequence: Synthetic oligonucleotide
guacuacugccaugccacu

SEQ ID NO: 1279652 - RNA, 19 nt, Artificial Sequence
  Description of Artificial Sequence: Synthetic oligonucleotide
ggcccuugccgugaguauc

SEQ ID NO: 1279653 - RNA, 19 nt, Artificial Sequence
  Description of Artificial Sequence: Synthetic oligonucleotide
gcggaguugggaaacggua

SEQ ID NO: 1279654 - RNA, 19 nt, Artificial Sequence
  Description of Artificial Sequence: Synthetic oligonucleotide
uacgcucugccagcccgua

SEQ ID NO: 1279655 - RNA, 19 nt, Artificial Sequence
  Description of Artificial Sequence: Synthetic oligonucleotide
ggauuacaggcuaggggua

SEQ ID NO: 1279656 - RNA, 19 nt, Artificial Sequence
  Description of Artificial Sequence: Synthetic oligonucleotide
ggcuaaggaugagcuuggc

SEQ ID NO: 1279657 - RNA, 19 nt, Artificial Sequence
  Description of Artificial Sequence: Synthetic oligonucleotide
aggcaccuauacccuugua

SEQ ID NO: 1279658 - RNA, 19 nt, Artificial Sequence
  Description of Artificial Sequence: Synthetic oligonucleotide
cccggaggugguuuggcga

SEQ ID NO: 1279659 - RNA, 19 nt, Artificial Sequence
  Description of Artificial Sequence: Synthetic oligonucleotide
gccuaccaaaagcagggau

SEQ ID NO: 1279660 - RNA, 19 nt, Artificial Sequence
  Description of Artificial Sequence: Synthetic oligonucleotide
agccgccuuccagcucugg

SEQ ID NO: 1279661 - RNA, 19 nt, Artificial Sequence
  Description of Artificial Sequence: Synthetic oligonucleotide
cgaaggaucugaggucaag

SEQ ID NO: 1279662 - RNA, 19 nt, Artificial Sequence
  Description of Artificial Sequence: Synthetic oligonucleotide
ggggauuggugaacacaca

SEQ ID NO: 1279663 - RNA, 19 nt, Artificial Sequence
  Description of Artificial Sequence: Synthetic oligonucleotide
cagucggaugccauucauu

SEQ ID NO: 1279664 - RNA, 19 nt, Artificial Sequence
  Description of Artificial Sequence: Synthetic oligonucleotide
gcccagucggaugccauuc

SEQ ID NO: 1279665 - RNA, 19 nt, Artificial Sequence
  Description of Artificial Sequence: Synthetic oligonucleotide
caaccccacuagaccaugu

SEQ ID NO: 1279666 - RNA, 19 nt, Artificial Sequence
  Description of Artificial Sequence: Synthetic oligonucleotide
gggucgcgaaggaaguuaa

SEQ ID NO: 1279667 - RNA, 19 nt, Artificial Sequence
  Description of Artificial Sequence: Synthetic oligonucleotide
gcccuugccgugaguauca

SEQ ID NO: 1279668 - RNA, 19 nt, Artificial Sequence
  Description of Artificial Sequence: Synthetic oligonucleotide
ggguugguuauagagccuu

SEQ ID NO: 1279669 - RNA, 19 nt, Artificial Sequence
  Description of Artificial Sequence: Synthetic oligonucleotide
ccaucggucaguagucacu

SEQ ID NO: 1279670 - RNA, 19 nt, Artificial Sequence
  Description of Artificial Sequence: Synthetic oligonucleotide
cgccacaucaaaagggugu

SEQ ID NO: 1279671 - RNA, 19 nt, Artificial Sequence
  Description of Artificial Sequence: Synthetic oligonucleotide
gcccuacagcaauuucaga

SEQ ID NO: 1279672 - RNA, 19 nt, Artificial Sequence
  Description of Artificial Sequence: Synthetic oligonucleotide
guguugacuuggguauagu

SEQ ID NO: 1279673 - RNA, 19 nt, Artificial Sequence
  Description of Artificial Sequence: Synthetic oligonucleotide
agaaggcauggaagacguu

SEQ ID NO: 1279674 - RNA, 19 nt, Artificial Sequence
  Description of Artificial Sequence: Synthetic oligonucleotide
gaccauguuucuggccaau

SEQ ID NO: 1279675 - RNA, 19 nt, Artificial Sequence
  Description of Artificial Sequence: Synthetic oligonucleotide
guucucccuguaauugcau

SEQ ID NO: 1279676 - RNA, 19 nt, Artificial Sequence
  Description of Artificial Sequence: Synthetic oligonucleotide
ggccuaccaaaagcaggga

SEQ ID NO: 1279677 - RNA, 19 nt, Artificial Sequence
  Description of Artificial Sequence: Synthetic oligonucleotide
gagccgccuuccagcucug

SEQ ID NO: 1279678 - RNA, 19 nt, Artificial Sequence
  Description of Artificial Sequence: Synthetic oligonucleotide
agguagcuacggagcugga

SEQ ID NO: 1279679 - RNA, 19 nt, Artificial Sequence
  Description of Artificial Sequence: Synthetic oligonucleotide
gaggccgggccgccacucu

SEQ ID NO: 1279680 - RNA, 19 nt, Artificial Sequence
  Description of Artificial Sequence: Synthetic oligonucleotide
ccgagcugucugcagcaga

SEQ ID NO: 1279681 - RNA, 19 nt, Artificial Sequence
  Description of Artificial Sequence: Synthetic oligonucleotide
gucuggcgagaaggcccug

SEQ ID NO: 1279682 - RNA, 19 nt, Artificial Sequence
  Description of Artificial Sequence: Synthetic oligonucleotide
cuggcgagaaggcccuguu

SEQ ID NO: 1279683 - RNA, 19 nt, Artificial Sequence
  Description of Artificial Sequence: Synthetic oligonucleotide
gccuugugcucgccacauc

SEQ ID NO: 1279684 - RNA, 19 nt, Artificial Sequence
  Description of Artificial Sequence: Synthetic oligonucleotide
gccgugaguaucagugggu

SEQ ID NO: 1279685 - RNA, 19 nt, Artificial Sequence
  Description of Artificial Sequence: Synthetic oligonucleotide
ggaggccgggccgccacuc

SEQ ID NO: 1279686 - RNA, 19 nt, Artificial Sequence
  Description of Artificial Sequence: Synthetic oligonucleotide
cggggccuucaguucuccc

SEQ ID NO: 1279687 - RNA, 19 nt, Artificial Sequence
  Description of Artificial Sequence: Synthetic oligonucleotide
cccuugccgugaguaucag

SEQ ID NO: 1279688 - RNA, 19 nt, Artificial Sequence
  Description of Artificial Sequence: Synthetic oligonucleotide
gccacucaccauggcagcu

SEQ ID NO: 1279689 - RNA, 19 nt, Artificial Sequence
  Description of Artificial Sequence: Synthetic oligonucleotide
ccggggccuucaguucucc

SEQ ID NO: 1279690 - RNA, 19 nt, Artificial Sequence
  Description of Artificial Sequence: Synthetic oligonucleotide
gugcccagucggaugccau

SEQ ID NO: 1279691 - RNA, 19 nt, Artificial Sequence
  Description of Artificial Sequence: Synthetic oligonucleotide
cgaaaauaggaggcaccua

SEQ ID NO: 1279692 - RNA, 19 nt, Artificial Sequence
  Description of Artificial Sequence: Synthetic oligonucleotide
ccuugccgugaguaucagu

SEQ ID NO: 1279693 - RNA, 19 nt, Artificial Sequence
  Description of Artificial Sequence: Synthetic oligonucleotide
cgcggaguugggaaacggu

SEQ ID NO: 1279694 - RNA, 19 nt, Artificial Sequence
  Description of Artificial Sequence: Synthetic oligonucleotide
ccgugaguaucaguggguu

SEQ ID NO: 1279695 - RNA, 19 nt, Artificial Sequence
  Description of Artificial Sequence: Synthetic oligonucleotide
cccucuguccgagcugucu

SEQ ID NO: 1279696 - RNA, 19 nt, Artificial Sequence
  Description of Artificial Sequence: Synthetic oligonucleotide
gcgcugcggacaggacuga

SEQ ID NO: 1279697 - RNA, 19 nt, Artificial Sequence
  Description of Artificial Sequence: Synthetic oligonucleotide
ccuuuacccggggaagcuu

SEQ ID NO: 1279698 - RNA, 19 nt, Artificial Sequence
  Description of Artificial Sequence: Synthetic oligonucleotide
cguaggugcccagucggau

SEQ ID NO: 1279699 - RNA, 19 nt, Artificial Sequence
  Description of Artificial Sequence: Synthetic oligonucleotide
cccacgccacaaccccacu

SEQ ID NO: 1279700 - RNA, 19 nt, Artificial Sequence
  Description of Artificial Sequence: Synthetic oligonucleotide
cccgguacaugaggcccuu

SEQ ID NO: 1279701 - RNA, 19 nt, Artificial Sequence
  Description of Artificial Sequence: Synthetic oligonucleotide
agaagagugugcuaaaucc

SEQ ID NO: 1279702 - RNA, 19 nt, Artificial Sequence
  Description of Artificial Sequence: Synthetic oligonucleotide
aaugaucccacucuucugc

SEQ ID NO: 1279703 - RNA, 19 nt, Artificial Sequence
  Description of Artificial Sequence: Synthetic oligonucleotide
aaauagaccuuucuggaac

SEQ ID NO: 1279704 - RNA, 19 nt, Artificial Sequence
  Description of Artificial Sequence: Synthetic oligonucleotide
auauagauagcaccaaccc

SEQ ID NO: 1279705 - RNA, 19 nt, Artificial Sequence
  Description of Artificial Sequence: Synthetic oligonucleotide
ucaguauggaaauagaccu

SEQ ID NO: 1279706 - RNA, 19 nt, Artificial Sequence
  Description of Artificial Sequence: Synthetic oligonucleotide
aguuguagccugcacaucc

SEQ ID NO: 1279707 - RNA, 19 nt, Artificial Sequence
  Description of Artificial Sequence: Synthetic oligonucleotide
agguaagugacucgaaagc

SEQ ID NO: 1279708 - RNA, 19 nt, Artificial Sequence
  Description of Artificial Sequence: Synthetic oligonucleotide
ucugcuaacuuggagaucc

SEQ ID NO: 1279709 - RNA, 19 nt, Artificial Sequence
  Description of Artificial Sequence: Synthetic oligonucleotide
aauaggcugcuuuacacca

SEQ ID NO: 1279710 - RNA, 19 nt, Artificial Sequence
  Description of Artificial Sequence: Synthetic oligonucleotide
uauagauagcaccaacccc

SEQ ID NO: 1279711 - RNA, 19 nt, Artificial Sequence
  Description of Artificial Sequence: Synthetic oligonucleotide
cuaaauagagaagagcccc

SEQ ID NO: 1279712 - RNA, 19 nt, Artificial Sequence
  Description of Artificial Sequence: Synthetic oligonucleotide
uaagccuaguggcagagag

SEQ ID NO: 1279713 - RNA, 19 nt, Artificial Sequence
  Description of Artificial Sequence: Synthetic oligonucleotide
uuucucgaggaucagcucc

SEQ ID NO: 1279714 - RNA, 19 nt, Artificial Sequence
  Description of Artificial Sequence: Synthetic oligonucleotide
gauauagauagcaccaacc

SEQ ID NO: 1279715 - RNA, 19 nt, Artificial Sequence
  Description of Artificial Sequence: Synthetic oligonucleotide
acacuaaauagagaagagc

SEQ ID NO: 1279716 - RNA, 19 nt, Artificial Sequence
  Description of Artificial Sequence: Synthetic oligonucleotide
agaaugaggguucccauag

SEQ ID NO: 1279717 - RNA, 19 nt, Artificial Sequence
  Description of Artificial Sequence: Synthetic oligonucleotide
acuaaauagagaagagccc

SEQ ID NO: 1279718 - RNA, 19 nt, Artificial Sequence
  Description of Artificial Sequence: Synthetic oligonucleotide
auaugcaugaguccgagaa

SEQ ID NO: 1279719 - RNA, 19 nt, Artificial Sequence
  Description of Artificial Sequence: Synthetic oligonucleotide
gagguaagugacucgaaag

SEQ ID NO: 1279720 - RNA, 19 nt, Artificial Sequence
  Description of Artificial Sequence: Synthetic oligonucleotide
ucacagucauaacugauac

SEQ ID NO: 1279721 - RNA, 19 nt, Artificial Sequence
  Description of Artificial Sequence: Synthetic oligonucleotide
cauccauauagagaggucg

SEQ ID NO: 1279722 - RNA, 19 nt, Artificial Sequence
  Description of Artificial Sequence: Synthetic oligonucleotide
auagauagcaccaaccccu

SEQ ID NO: 1279723 - RNA, 19 nt, Artificial Sequence
  Description of Artificial Sequence: Synthetic oligonucleotide
uucucaauuaacagcguuc

SEQ ID NO: 1279724 - RNA, 19 nt, Artificial Sequence
  Description of Artificial Sequence: Synthetic oligonucleotide
accauagaguuugugaccg

SEQ ID NO: 1279725 - RNA, 19 nt, Artificial Sequence
  Description of Artificial Sequence: Synthetic oligonucleotide
cuaaauccucaucagugcc

SEQ ID NO: 1279726 - RNA, 19 nt, Artificial Sequence
  Description of Artificial Sequence: Synthetic oligonucleotide
cuacgccggauauagauag

SEQ ID NO: 1279727 - RNA, 19 nt, Artificial Sequence
  Description of Artificial Sequence: Synthetic oligonucleotide
uaagugacucgaaagcccu

SEQ ID NO: 1279728 - RNA, 19 nt, Artificial Sequence
  Description of Artificial Sequence: Synthetic oligonucleotide
augaguccgagaaugaggg

SEQ ID NO: 1279729 - RNA, 19 nt, Artificial Sequence
  Description of Artificial Sequence: Synthetic oligonucleotide
acagucuuugaaccuagag

SEQ ID NO: 1279730 - RNA, 19 nt, Artificial Sequence
  Description of Artificial Sequence: Synthetic oligonucleotide
cuuauggucauacuccauc

SEQ ID NO: 1279731 - RNA, 19 nt, Artificial Sequence
  Description of Artificial Sequence: Synthetic oligonucleotide
uccgcuuauggucauacuc

SEQ ID NO: 1279732 - RNA, 19 nt, Artificial Sequence
  Description of Artificial Sequence: Synthetic oligonucleotide
ucccuuaauugcuauguug

SEQ ID NO: 1279733 - RNA, 19 nt, Artificial Sequence
  Description of Artificial Sequence: Synthetic oligonucleotide
gacuuguagaaccuggcca

SEQ ID NO: 1279734 - RNA, 19 nt, Artificial Sequence
  Description of Artificial Sequence: Synthetic oligonucleotide
ucucaauuaacagcguucu

SEQ ID NO: 1279735 - RNA, 19 nt, Artificial Sequence
  Description of Artificial Sequence: Synthetic oligonucleotide
ugacuuguagaaccuggcc

SEQ ID NO: 1279736 - RNA, 19 nt, Artificial Sequence
  Description of Artificial Sequence: Synthetic oligonucleotide
uguucauuaucuucuguau

SEQ ID NO: 1279737 - RNA, 19 nt, Artificial Sequence
  Description of Artificial Sequence: Synthetic oligonucleotide
cuuggagauccgcuuaugg

SEQ ID NO: 1279738 - RNA, 19 nt, Artificial Sequence
  Description of Artificial Sequence: Synthetic oligonucleotide
aagguaugggagcauggca

SEQ ID NO: 1279739 - RNA, 19 nt, Artificial Sequence
  Description of Artificial Sequence: Synthetic oligonucleotide
uggagauccgcuuaugguc

SEQ ID NO: 1279740 - RNA, 19 nt, Artificial Sequence
  Description of Artificial Sequence: Synthetic oligonucleotide
caauaggcugcuuuacacc

SEQ ID NO: 1279741 - RNA, 19 nt, Artificial Sequence
  Description of Artificial Sequence: Synthetic oligonucleotide
auauagagaggucgcagca

SEQ ID NO: 1279742 - RNA, 19 nt, Artificial Sequence
  Description of Artificial Sequence: Synthetic oligonucleotide
cacauuuguguucagucug

SEQ ID NO: 1279743 - RNA, 19 nt, Artificial Sequence
  Description of Artificial Sequence: Synthetic oligonucleotide
uagaguuugugaccgcuga

SEQ ID NO: 1279744 - RNA, 19 nt, Artificial Sequence
  Description of Artificial Sequence: Synthetic oligonucleotide
ggaacgucucccuacaaag

SEQ ID NO: 1279745 - RNA, 19 nt, Artificial Sequence
  Description of Artificial Sequence: Synthetic oligonucleotide
gaccauagaguuugugacc

SEQ ID NO: 1279746 - RNA, 19 nt, Artificial Sequence
  Description of Artificial Sequence: Synthetic oligonucleotide
cagaucaauuuucauauca

SEQ ID NO: 1279747 - RNA, 19 nt, Artificial Sequence
  Description of Artificial Sequence: Synthetic oligonucleotide
ugcaauaggcugcuuuaca

SEQ ID NO: 1279748 - RNA, 19 nt, Artificial Sequence
  Description of Artificial Sequence: Synthetic oligonucleotide
ucccuacaaaggcugaggc

SEQ ID NO: 1279749 - RNA, 19 nt, Artificial Sequence
  Description of Artificial Sequence: Synthetic oligonucleotide
gaaaucaacugggcuaugc

SEQ ID NO: 1279750 - RNA, 19 nt, Artificial Sequence
  Description of Artificial Sequence: Synthetic oligonucleotide
ugaccgcugaugcucauca

SEQ ID NO: 1279751 - RNA, 19 nt, Artificial Sequence
  Description of Artificial Sequence: Synthetic oligonucleotide
agaggggacucauuucccg

SEQ ID NO: 1279752 - RNA, 19 nt, Artificial Sequence
  Description of Artificial Sequence: Synthetic oligonucleotide
guucacaagguaugggagc

SEQ ID NO: 1279753 - RNA, 19 nt, Artificial Sequence
  Description of Artificial Sequence: Synthetic oligonucleotide
uuggagauccgcuuauggu

SEQ ID NO: 1279754 - RNA, 19 nt, Artificial Sequence
  Description of Artificial Sequence: Synthetic oligonucleotide
gaaccuagagccgucuucc

SEQ ID NO: 1279755 - RNA, 19 nt, Artificial Sequence
  Description of Artificial Sequence: Synthetic oligonucleotide
uuucucaauuaacagcguu

SEQ ID NO: 1279756 - RNA, 19 nt, Artificial Sequence
  Description of Artificial Sequence: Synthetic oligonucleotide
uucacaagguaugggagca

SEQ ID NO: 1279757 - RNA, 19 nt, Artificial Sequence
  Description of Artificial Sequence: Synthetic oligonucleotide
gauacuaggcuggugucug

SEQ ID NO: 1279758 - RNA, 19 nt, Artificial Sequence
  Description of Artificial Sequence: Synthetic oligonucleotide
gaugccaaaccugauagaa

SEQ ID NO: 1279759 - RNA, 19 nt, Artificial Sequence
  Description of Artificial Sequence: Synthetic oligonucleotide
cuaauguuggguccacuug

SEQ ID NO: 1279760 - RNA, 19 nt, Artificial Sequence
  Description of Artificial Sequence: Synthetic oligonucleotide
guaagugacucgaaagccc

SEQ ID NO: 1279761 - RNA, 19 nt, Artificial Sequence
  Description of Artificial Sequence: Synthetic oligonucleotide
ucuuugaaccuagagccgu

SEQ ID NO: 1279762 - RNA, 19 nt, Artificial Sequence
  Description of Artificial Sequence: Synthetic oligonucleotide
guagugaagcggccgaugc

SEQ ID NO: 1279763 - RNA, 19 nt, Artificial Sequence
  Description of Artificial Sequence: Synthetic oligonucleotide
aggaauccagcacacauuu

SEQ ID NO: 1279764 - RNA, 19 nt, Artificial Sequence
  Description of Artificial Sequence: Synthetic oligonucleotide
gauacacccaggguagugc

SEQ ID NO: 1279765 - RNA, 19 nt, Artificial Sequence
  Description of Artificial Sequence: Synthetic oligonucleotide
agcggcaggaauccagcac

SEQ ID NO: 1279766 - RNA, 19 nt, Artificial Sequence
  Description of Artificial Sequence: Synthetic oligonucleotide
augcaugaguccgagaaug

SEQ ID NO: 1279767 - RNA, 19 nt, Artificial Sequence
  Description of Artificial Sequence: Synthetic oligonucleotide
caucagaucaauuuucaua

SEQ ID NO: 1279768 - RNA, 19 nt, Artificial Sequence
  Description of Artificial Sequence: Synthetic oligonucleotide
agaccgcauaccccgcucc

SEQ ID NO: 1279769 - RNA, 19 nt, Artificial Sequence
  Description of Artificial Sequence: Synthetic oligonucleotide
ggaccauagaguuugugac

SEQ ID NO: 1279770 - RNA, 19 nt, Artificial Sequence
  Description of Artificial Sequence: Synthetic oligonucleotide
aaucugcccuauuucugca

SEQ ID NO: 1279771 - RNA, 19 nt, Artificial Sequence
  Description of Artificial Sequence: Synthetic oligonucleotide
auuucucgaggaucagcuc

SEQ ID NO: 1279772 - RNA, 19 nt, Artificial Sequence
  Description of Artificial Sequence: Synthetic oligonucleotide
gaacgucucccuacaaagg

SEQ ID NO: 1279773 - RNA, 19 nt, Artificial Sequence
  Description of Artificial Sequence: Synthetic oligonucleotide
uggcgagcauguuccaugg

SEQ ID NO: 1279774 - RNA, 19 nt, Artificial Sequence
  Description of Artificial Sequence: Synthetic oligonucleotide
ccauggaccacccagcagg

SEQ ID NO: 1279775 - RNA, 19 nt, Artificial Sequence
  Description of Artificial Sequence: Synthetic oligonucleotide
acguaagagggcuccagug

SEQ ID NO: 1279776 - RNA, 19 nt, Artificial Sequence
  Description of Artificial Sequence: Synthetic oligonucleotide
aggcgcuuagcaaagaaug

SEQ ID NO: 1279777 - RNA, 19 nt, Artificial Sequence
  Description of Artificial Sequence: Synthetic oligonucleotide
cucgaaagcccucagccuc

SEQ ID NO: 1279778 - RNA, 19 nt, Artificial Sequence
  Description of Artificial Sequence: Synthetic oligonucleotide
gggucgguaagccuagugg

SEQ ID NO: 1279779 - RNA, 19 nt, Artificial Sequence
  Description of Artificial Sequence: Synthetic oligonucleotide
gcuaaauccucaucagugc

SEQ ID NO: 1279780 - RNA, 19 nt, Artificial Sequence
  Description of Artificial Sequence: Synthetic oligonucleotide
uuuucauaucauugacauc

SEQ ID NO: 1279781 - RNA, 19 nt, Artificial Sequence
  Description of Artificial Sequence: Synthetic oligonucleotide
aacuuggagauccgcuuau

SEQ ID NO: 1279782 - RNA, 19 nt, Artificial Sequence
  Description of Artificial Sequence: Synthetic oligonucleotide
gguaagugacucgaaagcc

SEQ ID NO: 1279783 - RNA, 19 nt, Artificial Sequence
  Description of Artificial Sequence: Synthetic oligonucleotide
guaucagccgcucugcuaa

SEQ ID NO: 1279784 - RNA, 19 nt, Artificial Sequence
  Description of Artificial Sequence: Synthetic oligonucleotide
ggugaaaucaacugggcua

SEQ ID NO: 1279785 - RNA, 19 nt, Artificial Sequence
  Description of Artificial Sequence: Synthetic oligonucleotide
ucgguaagccuaguggcag

SEQ ID NO: 1279786 - RNA, 19 nt, Artificial Sequence
  Description of Artificial Sequence: Synthetic oligonucleotide
aggaggaacagggaacguc

SEQ ID NO: 1279787 - RNA, 19 nt, Artificial Sequence
  Description of Artificial Sequence: Synthetic oligonucleotide
uaugcaugaguccgagaau

SEQ ID NO: 1279788 - RNA, 19 nt, Artificial Sequence
  Description of Artificial Sequence: Synthetic oligonucleotide
ggucgguaagccuaguggc

SEQ ID NO: 1279789 - RNA, 19 nt, Artificial Sequence
  Description of Artificial Sequence: Synthetic oligonucleotide
uaacuuggagauccgcuua

SEQ ID NO: 1279790 - RNA, 19 nt, Artificial Sequence
  Description of Artificial Sequence: Synthetic oligonucleotide
aauugcucugaggacguaa

SEQ ID NO: 1279791 - RNA, 19 nt, Artificial Sequence
  Description of Artificial Sequence: Synthetic oligonucleotide
gccaauugcucugaggacg

SEQ ID NO: 1279792 - RNA, 19 nt, Artificial Sequence
  Description of Artificial Sequence: Synthetic oligonucleotide
uccccguucaucaccacau

SEQ ID NO: 1279793 - RNA, 19 nt, Artificial Sequence
  Description of Artificial Sequence: Synthetic oligonucleotide
accaaucucauuguucaca

SEQ ID NO: 1279794 - RNA, 19 nt, Artificial Sequence
  Description of Artificial Sequence: Synthetic oligonucleotide
aacagcguucuuuggugaa

SEQ ID NO: 1279795 - RNA, 19 nt, Artificial Sequence
  Description of Artificial Sequence: Synthetic oligonucleotide
gauuucucgaggaucagcu

SEQ ID NO: 1279796 - RNA, 19 nt, Artificial Sequence
  Description of Artificial Sequence: Synthetic oligonucleotide
agugaagcggccgaugcca

SEQ ID NO: 1279797 - RNA, 19 nt, Artificial Sequence
  Description of Artificial Sequence: Synthetic oligonucleotide
gccggauauagauagcacc

SEQ ID NO: 1279798 - RNA, 19 nt, Artificial Sequence
  Description of Artificial Sequence: Synthetic oligonucleotide
uccaaucagagaugcuacu

SEQ ID NO: 1279799 - RNA, 19 nt, Artificial Sequence
  Description of Artificial Sequence: Synthetic oligonucleotide
uagugaagcggccgaugcc

SEQ ID NO: 1279800 - RNA, 19 nt, Artificial Sequence
  Description of Artificial Sequence: Synthetic oligonucleotide
uauagagaggucgcagcac

SEQ ID NO: 1279801 - RNA, 19 nt, Artificial Sequence
  Description of Artificial Sequence: Synthetic oligonucleotide
aggguucccauaguaguuc

SEQ ID NO: 1279802 - RNA, 19 nt, Artificial Sequence
  Description of Artificial Sequence: Synthetic oligonucleotide
uugcuauguuguuggauuc

SEQ ID NO: 1279803 - RNA, 19 nt, Artificial Sequence
  Description of Artificial Sequence: Synthetic oligonucleotide
caagguaugggagcauggc

SEQ ID NO: 1279804 - RNA, 19 nt, Artificial Sequence
  Description of Artificial Sequence: Synthetic oligonucleotide
ugauacuaggcuggugucu

SEQ ID NO: 1279805 - RNA, 19 nt, Artificial Sequence
  Description of Artificial Sequence: Synthetic oligonucleotide
guagaaccuggccacuccc

SEQ ID NO: 1279806 - RNA, 19 nt, Artificial Sequence
  Description of Artificial Sequence: Synthetic oligonucleotide
gaagugcaggcacuuccug

SEQ ID NO: 1279807 - RNA, 19 nt, Artificial Sequence
  Description of Artificial Sequence: Synthetic oligonucleotide
gaggacguaagagggcucc

SEQ ID NO: 1279808 - RNA, 19 nt, Artificial Sequence
  Description of Artificial Sequence: Synthetic oligonucleotide
cacuugaugcucuugaggu

SEQ ID NO: 1279809 - RNA, 19 nt, Artificial Sequence
  Description of Artificial Sequence: Synthetic oligonucleotide
acaagguaugggagcaugg

SEQ ID NO: 1279810 - RNA, 19 nt, Artificial Sequence
  Description of Artificial Sequence: Synthetic oligonucleotide
gcaauaggcugcuuuacac

SEQ ID NO: 1279811 - RNA, 19 nt, Artificial Sequence
  Description of Artificial Sequence: Synthetic oligonucleotide
aguccgagaaugaggguuc

SEQ ID NO: 1279812 - RNA, 19 nt, Artificial Sequence
  Description of Artificial Sequence: Synthetic oligonucleotide
aagccuaguggcagagagg

SEQ ID NO: 1279813 - RNA, 19 nt, Artificial Sequence
  Description of Artificial Sequence: Synthetic oligonucleotide
uccauauagagaggucgca

SEQ ID NO: 1279814 - RNA, 19 nt, Artificial Sequence
  Description of Artificial Sequence: Synthetic oligonucleotide
agaucaauuuucauaucau

SEQ ID NO: 1279815 - RNA, 19 nt, Artificial Sequence
  Description of Artificial Sequence: Synthetic oligonucleotide
uguagugaagcggccgaug

SEQ ID NO: 1279816 - RNA, 19 nt, Artificial Sequence
  Description of Artificial Sequence: Synthetic oligonucleotide
ugauacacccaggguagug

SEQ ID NO: 1279817 - RNA, 19 nt, Artificial Sequence
  Description of Artificial Sequence: Synthetic oligonucleotide
gacucauuucccggaggcg

SEQ ID NO: 1279818 - RNA, 19 nt, Artificial Sequence
  Description of Artificial Sequence: Synthetic oligonucleotide
auacacccaggguagugcu

SEQ ID NO: 1279819 - RNA, 19 nt, Artificial Sequence
  Description of Artificial Sequence: Synthetic oligonucleotide
agugccucuaggcgcuuag

SEQ ID NO: 1279820 - RNA, 19 nt, Artificial Sequence
  Description of Artificial Sequence: Synthetic oligonucleotide
gauccgcuuauggucauac

SEQ ID NO: 1279821 - RNA, 19 nt, Artificial Sequence
  Description of Artificial Sequence: Synthetic oligonucleotide
gucuuugaaccuagagccg

SEQ ID NO: 1279822 - RNA, 19 nt, Artificial Sequence
  Description of Artificial Sequence: Synthetic oligonucleotide
aggcaacauccuugagugc

SEQ ID NO: 1279823 - RNA, 19 nt, Artificial Sequence
  Description of Artificial Sequence: Synthetic oligonucleotide
uuugaaccuagagccgucu

SEQ ID NO: 1279824 - RNA, 19 nt, Artificial Sequence
  Description of Artificial Sequence: Synthetic oligonucleotide
ccgcuuauggucauacucc

SEQ ID NO: 1279825 - RNA, 19 nt, Artificial Sequence
  Description of Artificial Sequence: Synthetic oligonucleotide
auacuaggcuggugucugg

SEQ ID NO: 1279826 - RNA, 19 nt, Artificial Sequence
  Description of Artificial Sequence: Synthetic oligonucleotide
accgucccagaccgcauac

SEQ ID NO: 1279827 - RNA, 19 nt, Artificial Sequence
  Description of Artificial Sequence: Synthetic oligonucleotide
uagaaccuggccacucccu

SEQ ID NO: 1279828 - RNA, 19 nt, Artificial Sequence
  Description of Artificial Sequence: Synthetic oligonucleotide
gcuaugccagcucugguug

SEQ ID NO: 1279829 - RNA, 19 nt, Artificial Sequence
  Description of Artificial Sequence: Synthetic oligonucleotide
ccgaugccaaaccugauag

SEQ ID NO: 1279830 - RNA, 19 nt, Artificial Sequence
  Description of Artificial Sequence: Synthetic oligonucleotide
agcguucuuuggugaaauc

SEQ ID NO: 1279831 - RNA, 19 nt, Artificial Sequence
  Description of Artificial Sequence: Synthetic oligonucleotide
ucucccuacaaaggcugag

SEQ ID NO: 1279832 - RNA, 19 nt, Artificial Sequence
  Description of Artificial Sequence: Synthetic oligonucleotide
cucccuacaaaggcugagg

SEQ ID NO: 1279833 - RNA, 19 nt, Artificial Sequence
  Description of Artificial Sequence: Synthetic oligonucleotide
caagggucgguaagccuag

SEQ ID NO: 1279834 - RNA, 19 nt, Artificial Sequence
  Description of Artificial Sequence: Synthetic oligonucleotide
cuacuugcuggcgagcaug

SEQ ID NO: 1279835 - RNA, 19 nt, Artificial Sequence
  Description of Artificial Sequence: Synthetic oligonucleotide
ccccuuuaggaccauagag

SEQ ID NO: 1279836 - RNA, 19 nt, Artificial Sequence
  Description of Artificial Sequence: Synthetic oligonucleotide
cugauacuaggcugguguc

SEQ ID NO: 1279837 - RNA, 19 nt, Artificial Sequence
  Description of Artificial Sequence: Synthetic oligonucleotide
aggacaaggcaacauccuu

SEQ ID NO: 1279838 - RNA, 19 nt, Artificial Sequence
  Description of Artificial Sequence: Synthetic oligonucleotide
uucacgugauggaugcauu

SEQ ID NO: 1279839 - RNA, 19 nt, Artificial Sequence
  Description of Artificial Sequence: Synthetic oligonucleotide
uaugggagcauggcaucca

SEQ ID NO: 1279840 - RNA, 19 nt, Artificial Sequence
  Description of Artificial Sequence: Synthetic oligonucleotide
aacugauacuaggcuggug

SEQ ID NO: 1279841 - RNA, 19 nt, Artificial Sequence
  Description of Artificial Sequence: Synthetic oligonucleotide
uuuccgugacuuguagaac

SEQ ID NO: 1279842 - RNA, 19 nt, Artificial Sequence
  Description of Artificial Sequence: Synthetic oligonucleotide
aaccuagagccgucuucca

SEQ ID NO: 1279843 - RNA, 19 nt, Artificial Sequence
  Description of Artificial Sequence: Synthetic oligonucleotide
gagaugcuacuugcuggcg

SEQ ID NO: 1279844 - RNA, 19 nt, Artificial Sequence
  Description of Artificial Sequence: Synthetic oligonucleotide
cuuugaaccuagagccguc

SEQ ID NO: 1279845 - RNA, 19 nt, Artificial Sequence
  Description of Artificial Sequence: Synthetic oligonucleotide
ucacgugauggaugcauuu

SEQ ID NO: 1279846 - RNA, 19 nt, Artificial Sequence
  Description of Artificial Sequence: Synthetic oligonucleotide
uacuaggcuggugucuggc

SEQ ID NO: 1279847 - RNA, 19 nt, Artificial Sequence
  Description of Artificial Sequence: Synthetic oligonucleotide
gaagagugugcuaaauccu

SEQ ID NO: 1279848 - RNA, 19 nt, Artificial Sequence
  Description of Artificial Sequence: Synthetic oligonucleotide
auagaguuugugaccgcug

SEQ ID NO: 1279849 - RNA, 19 nt, Artificial Sequence
  Description of Artificial Sequence: Synthetic oligonucleotide
cgugacuuguagaaccugg

SEQ ID NO: 1279850 - RNA, 19 nt, Artificial Sequence
  Description of Artificial Sequence: Synthetic oligonucleotide
aagugacucgaaagcccuc

SEQ ID NO: 1279851 - RNA, 19 nt, Artificial Sequence
  Description of Artificial Sequence: Synthetic oligonucleotide
cacaagguaugggagcaug

SEQ ID NO: 1279852 - RNA, 19 nt, Artificial Sequence
  Description of Artificial Sequence: Synthetic oligonucleotide
agugcuguuuggggucccc

SEQ ID NO: 1279853 - RNA, 19 nt, Artificial Sequence
  Description of Artificial Sequence: Synthetic oligonucleotide
uacgccggauauagauagc

SEQ ID NO: 1279854 - RNA, 19 nt, Artificial Sequence
  Description of Artificial Sequence: Synthetic oligonucleotide
acgccggauauagauagca

SEQ ID NO: 1279855 - RNA, 19 nt, Artificial Sequence
  Description of Artificial Sequence: Synthetic oligonucleotide
uugaugcucuugaggucga

SEQ ID NO: 1279856 - RNA, 19 nt, Artificial Sequence
  Description of Artificial Sequence: Synthetic oligonucleotide
uuugggguccccguucauc

SEQ ID NO: 1279857 - RNA, 19 nt, Artificial Sequence
  Description of Artificial Sequence: Synthetic oligonucleotide
caagugggauuuucccaac

SEQ ID NO: 1279858 - RNA, 19 nt, Artificial Sequence
  Description of Artificial Sequence: Synthetic oligonucleotide
guaugggagcauggcaucc

SEQ ID NO: 1279859 - RNA, 19 nt, Artificial Sequence
  Description of Artificial Sequence: Synthetic oligonucleotide
agaguuugugaccgcugau

SEQ ID NO: 1279860 - RNA, 19 nt, Artificial Sequence
  Description of Artificial Sequence: Synthetic oligonucleotide
aggccggcucuucuaaugu

SEQ ID NO: 1279861 - RNA, 19 nt, Artificial Sequence
  Description of Artificial Sequence: Synthetic oligonucleotide
caggccggcucuucuaaug

SEQ ID NO: 1279862 - RNA, 19 nt, Artificial Sequence
  Description of Artificial Sequence: Synthetic oligonucleotide
gcuauguuguuggauucag

SEQ ID NO: 1279863 - RNA, 19 nt, Artificial Sequence
  Description of Artificial Sequence: Synthetic oligonucleotide
uagauagcaccaaccccuu

SEQ ID NO: 1279864 - RNA, 19 nt, Artificial Sequence
  Description of Artificial Sequence: Synthetic oligonucleotide
acggacccggggccuacgc

SEQ ID NO: 1279865 - RNA, 19 nt, Artificial Sequence
  Description of Artificial Sequence: Synthetic oligonucleotide
cugcuaacuuggagauccg

SEQ ID NO: 1279866 - RNA, 19 nt, Artificial Sequence
  Description of Artificial Sequence: Synthetic oligonucleotide
ugaggacguaagagggcuc

SEQ ID NO: 1279867 - RNA, 19 nt, Artificial Sequence
  Description of Artificial Sequence: Synthetic oligonucleotide
guuggguccacuugaugcu

SEQ ID NO: 1279868 - RNA, 19 nt, Artificial Sequence
  Description of Artificial Sequence: Synthetic oligonucleotide
uugaaccuagagccgucuu

SEQ ID NO: 1279869 - RNA, 19 nt, Artificial Sequence
  Description of Artificial Sequence: Synthetic oligonucleotide
ugaguccgagaaugagggu

SEQ ID NO: 1279870 - RNA, 19 nt, Artificial Sequence
  Description of Artificial Sequence: Synthetic oligonucleotide
augcuacuugcuggcgagc

SEQ ID NO: 1279871 - RNA, 19 nt, Artificial Sequence
  Description of Artificial Sequence: Synthetic oligonucleotide
auaccccgcuccugcccgc

SEQ ID NO: 1279872 - RNA, 19 nt, Artificial Sequence
  Description of Artificial Sequence: Synthetic oligonucleotide
gggccuacgccggauauag

SEQ ID NO: 1279873 - RNA, 19 nt, Artificial Sequence
  Description of Artificial Sequence: Synthetic oligonucleotide
ggagguaagugacucgaaa

SEQ ID NO: 1279874 - RNA, 19 nt, Artificial Sequence
  Description of Artificial Sequence: Synthetic oligonucleotide
aacagucuuugaaccuaga

SEQ ID NO: 1279875 - RNA, 19 nt, Artificial Sequence
  Description of Artificial Sequence: Synthetic oligonucleotide
gcccuauuucugcaauagg

SEQ ID NO: 1279876 - RNA, 19 nt, Artificial Sequence
  Description of Artificial Sequence: Synthetic oligonucleotide
gguaagccuaguggcagag

SEQ ID NO: 1279877 - RNA, 19 nt, Artificial Sequence
  Description of Artificial Sequence: Synthetic oligonucleotide
caccaaucucauuguucac

SEQ ID NO: 1279878 - RNA, 19 nt, Artificial Sequence
  Description of Artificial Sequence: Synthetic oligonucleotide
gggacucauuucccggagg

SEQ ID NO: 1279879 - RNA, 19 nt, Artificial Sequence
  Description of Artificial Sequence: Synthetic oligonucleotide
aggcgcuucacgugaugga

SEQ ID NO: 1279880 - RNA, 19 nt, Artificial Sequence
  Description of Artificial Sequence: Synthetic oligonucleotide
gaccgcugaugcucaucag

SEQ ID NO: 1279881 - RNA, 19 nt, Artificial Sequence
  Description of Artificial Sequence: Synthetic oligonucleotide
gcguucuuuggugaaauca

SEQ ID NO: 1279882 - RNA, 19 nt, Artificial Sequence
  Description of Artificial Sequence: Synthetic oligonucleotide
cuaacuuggagauccgcuu

SEQ ID NO: 1279883 - RNA, 19 nt, Artificial Sequence
  Description of Artificial Sequence: Synthetic oligonucleotide
gacguaagagggcuccagu

SEQ ID NO: 1279884 - RNA, 19 nt, Artificial Sequence
  Description of Artificial Sequence: Synthetic oligonucleotide
ggagauccgcuuaugguca

SEQ ID NO: 1279885 - RNA, 19 nt, Artificial Sequence
  Description of Artificial Sequence: Synthetic oligonucleotide
acuuggagauccgcuuaug

SEQ ID NO: 1279886 - RNA, 19 nt, Artificial Sequence
  Description of Artificial Sequence: Synthetic oligonucleotide
gcggcaggaauccagcaca

SEQ ID NO: 1279887 - RNA, 19 nt, Artificial Sequence
  Description of Artificial Sequence: Synthetic oligonucleotide
ccggcucuucuaauguugg

SEQ ID NO: 1279888 - RNA, 19 nt, Artificial Sequence
  Description of Artificial Sequence: Synthetic oligonucleotide
cccgccuccgcucuguagg

SEQ ID NO: 1279889 - RNA, 19 nt, Artificial Sequence
  Description of Artificial Sequence: Synthetic oligonucleotide
agaggucgcagcacugucu

SEQ ID NO: 1279890 - RNA, 19 nt, Artificial Sequence
  Description of Artificial Sequence: Synthetic oligonucleotide
uccgagaaugaggguuccc

SEQ ID NO: 1279891 - RNA, 19 nt, Artificial Sequence
  Description of Artificial Sequence: Synthetic oligonucleotide
ggucgcagcacugucucug

SEQ ID NO: 1279892 - RNA, 19 nt, Artificial Sequence
  Description of Artificial Sequence: Synthetic oligonucleotide
uugauacacccaggguagu

SEQ ID NO: 1279893 - RNA, 19 nt, Artificial Sequence
  Description of Artificial Sequence: Synthetic oligonucleotide
gucgguaagccuaguggca

SEQ ID NO: 1279894 - RNA, 19 nt, Artificial Sequence
  Description of Artificial Sequence: Synthetic oligonucleotide
ggaguuguagccugcacau

SEQ ID NO: 1279895 - RNA, 19 nt, Artificial Sequence
  Description of Artificial Sequence: Synthetic oligonucleotide
cccuuaauugcuauguugu

SEQ ID NO: 1279896 - RNA, 19 nt, Artificial Sequence
  Description of Artificial Sequence: Synthetic oligonucleotide
cgcuucacgugauggaugc

SEQ ID NO: 1279897 - RNA, 19 nt, Artificial Sequence
  Description of Artificial Sequence: Synthetic oligonucleotide
guagggccuccacacggac

SEQ ID NO: 1279898 - RNA, 19 nt, Artificial Sequence
  Description of Artificial Sequence: Synthetic oligonucleotide
auccgcuuauggucauacu

SEQ ID NO: 1279899 - RNA, 19 nt, Artificial Sequence
  Description of Artificial Sequence: Synthetic oligonucleotide
guagcuccacuggugaaaa

SEQ ID NO: 1279900 - RNA, 19 nt, Artificial Sequence
  Description of Artificial Sequence: Synthetic oligonucleotide
gaacagggaacgucucccu

SEQ ID NO: 1279901 - RNA, 19 nt, Artificial Sequence
  Description of Artificial Sequence: Synthetic oligonucleotide
cauaugcaugaguccgaga

SEQ ID NO: 1279902 - RNA, 19 nt, Artificial Sequence
  Description of Artificial Sequence: Synthetic oligonucleotide
uaucagccgcucugcuaac

SEQ ID NO: 1279903 - RNA, 19 nt, Artificial Sequence
  Description of Artificial Sequence: Synthetic oligonucleotide
gucccagaccgcauacccc

SEQ ID NO: 1279904 - RNA, 19 nt, Artificial Sequence
  Description of Artificial Sequence: Synthetic oligonucleotide
gcaggaauccagcacacau

SEQ ID NO: 1279905 - RNA, 19 nt, Artificial Sequence
  Description of Artificial Sequence: Synthetic oligonucleotide
acagcguucuuuggugaaa

SEQ ID NO: 1279906 - RNA, 19 nt, Artificial Sequence
  Description of Artificial Sequence: Synthetic oligonucleotide
ggacguaagagggcuccag

SEQ ID NO: 1279907 - RNA, 19 nt, Artificial Sequence
  Description of Artificial Sequence: Synthetic oligonucleotide
gaaugaggguucccauagu

SEQ ID NO: 1279908 - RNA, 19 nt, Artificial Sequence
  Description of Artificial Sequence: Synthetic oligonucleotide
cugaggacguaagagggcu

SEQ ID NO: 1279909 - RNA, 19 nt, Artificial Sequence
  Description of Artificial Sequence: Synthetic oligonucleotide
gacccggggccuacgccgg

SEQ ID NO: 1279910 - RNA, 19 nt, Artificial Sequence
  Description of Artificial Sequence: Synthetic oligonucleotide
gccuccgcucuguagggcc

SEQ ID NO: 1279911 - RNA, 19 nt, Artificial Sequence
  Description of Artificial Sequence: Synthetic oligonucleotide
ccaagggucgguaagccua

SEQ ID NO: 1279912 - RNA, 19 nt, Artificial Sequence
  Description of Artificial Sequence: Synthetic oligonucleotide
caccaucucccagagggga

SEQ ID NO: 1279913 - RNA, 19 nt, Artificial Sequence
  Description of Artificial Sequence: Synthetic oligonucleotide
ccauaugcaugaguccgag

SEQ ID NO: 1279914 - RNA, 19 nt, Artificial Sequence
  Description of Artificial Sequence: Synthetic oligonucleotide
cuauguuguuggauucagu

SEQ ID NO: 1279915 - RNA, 19 nt, Artificial Sequence
  Description of Artificial Sequence: Synthetic oligonucleotide
aggcugcuuuacaccaauc

SEQ ID NO: 1279916 - RNA, 19 nt, Artificial Sequence
  Description of Artificial Sequence: Synthetic oligonucleotide
gcgagcauguuccauggcu

SEQ ID NO: 1279917 - RNA, 19 nt, Artificial Sequence
  Description of Artificial Sequence: Synthetic oligonucleotide
ugcuggcgagcauguucca

SEQ ID NO: 1279918 - RNA, 19 nt, Artificial Sequence
  Description of Artificial Sequence: Synthetic oligonucleotide
gccggcucuucuaauguug

SEQ ID NO: 1279919 - RNA, 19 nt, Artificial Sequence
  Description of Artificial Sequence: Synthetic oligonucleotide
acaggccggcucuucuaau

SEQ ID NO: 1279920 - RNA, 19 nt, Artificial Sequence
  Description of Artificial Sequence: Synthetic oligonucleotide
guccgagaaugaggguucc

SEQ ID NO: 1279921 - RNA, 19 nt, Artificial Sequence
  Description of Artificial Sequence: Synthetic oligonucleotide
accgcauaccccgcuccug

SEQ ID NO: 1279922 - RNA, 19 nt, Artificial Sequence
  Description of Artificial Sequence: Synthetic oligonucleotide
ccuuuaggaccauagaguu

SEQ ID NO: 1279923 - RNA, 19 nt, Artificial Sequence
  Description of Artificial Sequence: Synthetic oligonucleotide
cuucacgugauggaugcau

SEQ ID NO: 1279924 - RNA, 19 nt, Artificial Sequence
  Description of Artificial Sequence: Synthetic oligonucleotide
agcagguaacaagguuccu

SEQ ID NO: 1279925 - RNA, 19 nt, Artificial Sequence
  Description of Artificial Sequence: Synthetic oligonucleotide
cuuuaggaccauagaguuu

SEQ ID NO: 1279926 - RNA, 19 nt, Artificial Sequence
  Description of Artificial Sequence: Synthetic oligonucleotide
ccgcauaccccgcuccugc

SEQ ID NO: 1279927 - RNA, 19 nt, Artificial Sequence
  Description of Artificial Sequence: Synthetic oligonucleotide
ggaauccagcacacauuug

SEQ ID NO: 1279928 - RNA, 19 nt, Artificial Sequence
  Description of Artificial Sequence: Synthetic oligonucleotide
cucauuucccggaggcgcu

SEQ ID NO: 1279929 - RNA, 19 nt, Artificial Sequence
  Description of Artificial Sequence: Synthetic oligonucleotide
aggacguaagagggcucca

SEQ ID NO: 1279930 - RNA, 19 nt, Artificial Sequence
  Description of Artificial Sequence: Synthetic oligonucleotide
acacggacccggggccuac

SEQ ID NO: 1279931 - RNA, 19 nt, Artificial Sequence
  Description of Artificial Sequence: Synthetic oligonucleotide
agugagcggcaggaaucca

SEQ ID NO: 1279932 - RNA, 19 nt, Artificial Sequence
  Description of Artificial Sequence: Synthetic oligonucleotide
cacaggccggcucuucuaa

SEQ ID NO: 1279933 - RNA, 19 nt, Artificial Sequence
  Description of Artificial Sequence: Synthetic oligonucleotide
aagggucgguaagccuagu

SEQ ID NO: 1279934 - RNA, 19 nt, Artificial Sequence
  Description of Artificial Sequence: Synthetic oligonucleotide
guaagccuaguggcagaga

SEQ ID NO: 1279935 - RNA, 19 nt, Artificial Sequence
  Description of Artificial Sequence: Synthetic oligonucleotide
ccccuccacauaugcaaag

SEQ ID NO: 1279936 - RNA, 19 nt, Artificial Sequence
  Description of Artificial Sequence: Synthetic oligonucleotide
gguugaccauggaccaccc

SEQ ID NO: 1279937 - RNA, 19 nt, Artificial Sequence
  Description of Artificial Sequence: Synthetic oligonucleotide
caggaauccagcacacauu

SEQ ID NO: 1279938 - RNA, 19 nt, Artificial Sequence
  Description of Artificial Sequence: Synthetic oligonucleotide
ucauuucccggaggcgcuu

SEQ ID NO: 1279939 - RNA, 19 nt, Artificial Sequence
  Description of Artificial Sequence: Synthetic oligonucleotide
gccgaugccaaaccugaua

SEQ ID NO: 1279940 - RNA, 19 nt, Artificial Sequence
  Description of Artificial Sequence: Synthetic oligonucleotide
caguauggaaauagaccuu

SEQ ID NO: 1279941 - RNA, 19 nt, Artificial Sequence
  Description of Artificial Sequence: Synthetic oligonucleotide
caucucccagaggggacuc

SEQ ID NO: 1279942 - RNA, 19 nt, Artificial Sequence
  Description of Artificial Sequence: Synthetic oligonucleotide
ggaggcgcuucacgugaug

SEQ ID NO: 1279943 - RNA, 19 nt, Artificial Sequence
  Description of Artificial Sequence: Synthetic oligonucleotide
cauggaccacccagcaggu

SEQ ID NO: 1279944 - RNA, 19 nt, Artificial Sequence
  Description of Artificial Sequence: Synthetic oligonucleotide
gcuaagaaggaugcuuccu

SEQ ID NO: 1279945 - RNA, 19 nt, Artificial Sequence
  Description of Artificial Sequence: Synthetic oligonucleotide
ggcaccgucccagaccgca

SEQ ID NO: 1279946 - RNA, 19 nt, Artificial Sequence
  Description of Artificial Sequence: Synthetic oligonucleotide
cugcccuauuucugcaaua

SEQ ID NO: 1279947 - RNA, 19 nt, Artificial Sequence
  Description of Artificial Sequence: Synthetic oligonucleotide
ccgagaaugaggguuccca

SEQ ID NO: 1279948 - RNA, 19 nt, Artificial Sequence
  Description of Artificial Sequence: Synthetic oligonucleotide
gaccgcauaccccgcuccu

SEQ ID NO: 1279949 - RNA, 19 nt, Artificial Sequence
  Description of Artificial Sequence: Synthetic oligonucleotide
gucucccuacaaaggcuga

SEQ ID NO: 1279950 - RNA, 19 nt, Artificial Sequence
  Description of Artificial Sequence: Synthetic oligonucleotide
ggcgagcauguuccauggc

SEQ ID NO: 1279951 - RNA, 19 nt, Artificial Sequence
  Description of Artificial Sequence: Synthetic oligonucleotide
cuagagccgucuuccaguu

SEQ ID NO: 1279952 - RNA, 19 nt, Artificial Sequence
  Description of Artificial Sequence: Synthetic oligonucleotide
ggcuaugccagcucugguu

SEQ ID NO: 1279953 - RNA, 19 nt, Artificial Sequence
  Description of Artificial Sequence: Synthetic oligonucleotide
uaccccgcuccugcccgcc

SEQ ID NO: 1279954 - RNA, 19 nt, Artificial Sequence
  Description of Artificial Sequence: Synthetic oligonucleotide
gcgcuucacgugauggaug

SEQ ID NO: 1279955 - RNA, 19 nt, Artificial Sequence
  Description of Artificial Sequence: Synthetic oligonucleotide
ggcgcuuagcaaagaaugu

SEQ ID NO: 1279956 - RNA, 19 nt, Artificial Sequence
  Description of Artificial Sequence: Synthetic oligonucleotide
ccaaaccugauagaagagu

SEQ ID NO: 1279957 - RNA, 19 nt, Artificial Sequence
  Description of Artificial Sequence: Synthetic oligonucleotide
gccauaugcaugaguccga

SEQ ID NO: 1279958 - RNA, 19 nt, Artificial Sequence
  Description of Artificial Sequence: Synthetic oligonucleotide
cgccggauauagauagcac

SEQ ID NO: 1279959 - RNA, 19 nt, Artificial Sequence
  Description of Artificial Sequence: Synthetic oligonucleotide
gagauccgcuuauggucau

SEQ ID NO: 1279960 - RNA, 19 nt, Artificial Sequence
  Description of Artificial Sequence: Synthetic oligonucleotide
cucucccagccauaugcau

SEQ ID NO: 1279961 - RNA, 19 nt, Artificial Sequence
  Description of Artificial Sequence: Synthetic oligonucleotide
cccggaggcgcuucacgug

SEQ ID NO: 1279962 - RNA, 19 nt, Artificial Sequence
  Description of Artificial Sequence: Synthetic oligonucleotide
agauccgcuuauggucaua

SEQ ID NO: 1279963 - RNA, 19 nt, Artificial Sequence
  Description of Artificial Sequence: Synthetic oligonucleotide
cucaauuaacagcguucuu

SEQ ID NO: 1279964 - RNA, 19 nt, Artificial Sequence
  Description of Artificial Sequence: Synthetic oligonucleotide
cacggacccggggccuacg

SEQ ID NO: 1279965 - RNA, 19 nt, Artificial Sequence
  Description of Artificial Sequence: Synthetic oligonucleotide
ccggaggcgcuucacguga

SEQ ID NO: 1279966 - RNA, 19 nt, Artificial Sequence
  Description of Artificial Sequence: Synthetic oligonucleotide
ccagaacccugggauccag

SEQ ID NO: 1279967 - RNA, 19 nt, Artificial Sequence
  Description of Artificial Sequence: Synthetic oligonucleotide
accuccccaagggucggua

SEQ ID NO: 1279968 - RNA, 19 nt, Artificial Sequence
  Description of Artificial Sequence: Synthetic oligonucleotide
cucccuuaauugcuauguu

SEQ ID NO: 1279969 - RNA, 19 nt, Artificial Sequence
  Description of Artificial Sequence: Synthetic oligonucleotide
cccagaccgcauaccccgc

SEQ ID NO: 1279970 - RNA, 19 nt, Artificial Sequence
  Description of Artificial Sequence: Synthetic oligonucleotide
caccgucccagaccgcaua

SEQ ID NO: 1279971 - RNA, 19 nt, Artificial Sequence
  Description of Artificial Sequence: Synthetic oligonucleotide
ccgugacuuguagaaccug

SEQ ID NO: 1279972 - RNA, 19 nt, Artificial Sequence
  Description of Artificial Sequence: Synthetic oligonucleotide
ggcgcuucacgugauggau

SEQ ID NO: 1279973 - RNA, 19 nt, Artificial Sequence
  Description of Artificial Sequence: Synthetic oligonucleotide
ugcccgccuccgcucugua

SEQ ID NO: 1279974 - RNA, 19 nt, Artificial Sequence
  Description of Artificial Sequence: Synthetic oligonucleotide
cccuacaaaggcugaggcu

SEQ ID NO: 1279975 - RNA, 19 nt, Artificial Sequence
  Description of Artificial Sequence: Synthetic oligonucleotide
cggcaggaauccagcacac

SEQ ID NO: 1279976 - RNA, 19 nt, Artificial Sequence
  Description of Artificial Sequence: Synthetic oligonucleotide
ccuuaauugcuauguuguu

SEQ ID NO: 1279977 - RNA, 19 nt, Artificial Sequence
  Description of Artificial Sequence: Synthetic oligonucleotide
gaguggugaccacgugcuu

SEQ ID NO: 1279978 - RNA, 19 nt, Artificial Sequence
  Description of Artificial Sequence: Synthetic oligonucleotide
cgaugccaaaccugauaga

SEQ ID NO: 1279979 - RNA, 19 nt, Artificial Sequence
  Description of Artificial Sequence: Synthetic oligonucleotide
ccgucccagaccgcauacc

SEQ ID NO: 1279980 - RNA, 19 nt, Artificial Sequence
  Description of Artificial Sequence: Synthetic oligonucleotide
ccaaucagagaugcuacuu

SEQ ID NO: 1279981 - RNA, 19 nt, Artificial Sequence
  Description of Artificial Sequence: Synthetic oligonucleotide
guuugggguccccguucau

SEQ ID NO: 1279982 - RNA, 19 nt, Artificial Sequence
  Description of Artificial Sequence: Synthetic oligonucleotide
caauugcucugaggacgua

SEQ ID NO: 1279983 - RNA, 19 nt, Artificial Sequence
  Description of Artificial Sequence: Synthetic oligonucleotide
gcuucacgugauggaugca

SEQ ID NO: 1279984 - RNA, 19 nt, Artificial Sequence
  Description of Artificial Sequence: Synthetic oligonucleotide
cggacccggggccuacgcc

SEQ ID NO: 1279985 - RNA, 19 nt, Artificial Sequence
  Description of Artificial Sequence: Synthetic oligonucleotide
ggccggcucuucuaauguu

SEQ ID NO: 1279986 - RNA, 19 nt, Artificial Sequence
  Description of Artificial Sequence: Synthetic oligonucleotide
ggggccuacgccggauaua

SEQ ID NO: 1279987 - RNA, 19 nt, Artificial Sequence
  Description of Artificial Sequence: Synthetic oligonucleotide
ccaucucccagaggggacu

SEQ ID NO: 1279988 - RNA, 19 nt, Artificial Sequence
  Description of Artificial Sequence: Synthetic oligonucleotide
gagccgucuuccaguucuu

SEQ ID NO: 1279989 - RNA, 19 nt, Artificial Sequence
  Description of Artificial Sequence: Synthetic oligonucleotide
ggccuacgccggauauaga

SEQ ID NO: 1279990 - RNA, 19 nt, Artificial Sequence
  Description of Artificial Sequence: Synthetic oligonucleotide
ccuccgcucuguagggccu

SEQ ID NO: 1279991 - RNA, 19 nt, Artificial Sequence
  Description of Artificial Sequence: Synthetic oligonucleotide
ggccgaugccaaaccugau

SEQ ID NO: 1279992 - RNA, 19 nt, Artificial Sequence
  Description of Artificial Sequence: Synthetic oligonucleotide
caccuccccaagggucggu

SEQ ID NO: 1279993 - RNA, 19 nt, Artificial Sequence
  Description of Artificial Sequence: Synthetic oligonucleotide
ggcuggugucuggcuggau

SEQ ID NO: 1279994 - RNA, 19 nt, Artificial Sequence
  Description of Artificial Sequence: Synthetic oligonucleotide
cggggccuacgccggauau

SEQ ID NO: 1279995 - RNA, 19 nt, Artificial Sequence
  Description of Artificial Sequence: Synthetic oligonucleotide
cccggggccuacgccggau

SEQ ID NO: 1279996 - RNA, 19 nt, Artificial Sequence
  Description of Artificial Sequence: Synthetic oligonucleotide
aaaccaauuagauaaauuc

SEQ ID NO: 1279997 - RNA, 19 nt, Artificial Sequence
  Description of Artificial Sequence: Synthetic oligonucleotide
aauuagauaaauucacuuc

SEQ ID NO: 1279998 - RNA, 19 nt, Artificial Sequence
  Description of Artificial Sequence: Synthetic oligonucleotide
aaacgcaagacguuaaagc

SEQ ID NO: 1279999 - RNA, 19 nt, Artificial Sequence
  Description of Artificial Sequence: Synthetic oligonucleotide
aauuauagagccgaauucc

SEQ ID NO: 1280000 - RNA, 19 nt, Artificial Sequence
  Description of Artificial Sequence: Synthetic oligonucleotide
acaagcaaaauucuaaaac

SEQ ID NO: 1280001 - RNA, 19 nt, Artificial Sequence
  Description of Artificial Sequence: Synthetic oligonucleotide
cuugaaaguacuuucaccc

SEQ ID NO: 1280002 - RNA, 19 nt, Artificial Sequence
  Description of Artificial Sequence: Synthetic oligonucleotide
uuucaaaccgcauacagug

SEQ ID NO: 1280003 - RNA, 19 nt, Artificial Sequence
  Description of Artificial Sequence: Synthetic oligonucleotide
aaagcuaacagacaagcaa

SEQ ID NO: 1280004 - RNA, 19 nt, Artificial Sequence
  Description of Artificial Sequence: Synthetic oligonucleotide
cuuuguaccuauuaggccc

SEQ ID NO: 1280005 - RNA, 19 nt, Artificial Sequence
  Description of Artificial Sequence: Synthetic oligonucleotide
gacguuaaagccuucaccc

SEQ ID NO: 1280006 - RNA, 19 nt, Artificial Sequence
  Description of Artificial Sequence: Synthetic oligonucleotide
ucuccuacagcucauuagg

SEQ ID NO: 1280007 - RNA, 19 nt, Artificial Sequence
  Description of Artificial Sequence: Synthetic oligonucleotide
ucagaaacauuuauuagac

SEQ ID NO: 1280008 - RNA, 19 nt, Artificial Sequence
  Description of Artificial Sequence: Synthetic oligonucleotide
uaugugaauaccaucauua

SEQ ID NO: 1280009 - RNA, 19 nt, Artificial Sequence
  Description of Artificial Sequence: Synthetic oligonucleotide
aaauaauuaaccccauuau

SEQ ID NO: 1280010 - RNA, 19 nt, Artificial Sequence
  Description of Artificial Sequence: Synthetic oligonucleotide
uuuucgagcaacuucugag

SEQ ID NO: 1280011 - RNA, 19 nt, Artificial Sequence
  Description of Artificial Sequence: Synthetic oligonucleotide
agucugaggagcuugaaag

SEQ ID NO: 1280012 - RNA, 19 nt, Artificial Sequence
  Description of Artificial Sequence: Synthetic oligonucleotide
gauugcaugauaaacgcag

SEQ ID NO: 1280013 - RNA, 19 nt, Artificial Sequence
  Description of Artificial Sequence: Synthetic oligonucleotide
agugcuauucggcugcucc

SEQ ID NO: 1280014 - RNA, 19 nt, Artificial Sequence
  Description of Artificial Sequence: Synthetic oligonucleotide
agucuuuguaccuauuagg

SEQ ID NO: 1280015 - RNA, 19 nt, Artificial Sequence
  Description of Artificial Sequence: Synthetic oligonucleotide
aagucuuuguaccuauuag

SEQ ID NO: 1280016 - RNA, 19 nt, Artificial Sequence
  Description of Artificial Sequence: Synthetic oligonucleotide
gucacuaacaagaaugugg

SEQ ID NO: 1280017 - RNA, 19 nt, Artificial Sequence
  Description of Artificial Sequence: Synthetic oligonucleotide
gacauagaugguuaagcgg

SEQ ID NO: 1280018 - RNA, 19 nt, Artificial Sequence
  Description of Artificial Sequence: Synthetic oligonucleotide
uccuauuaaccaaaguaag

SEQ ID NO: 1280019 - RNA, 19 nt, Artificial Sequence
  Description of Artificial Sequence: Synthetic oligonucleotide
agacguuaaagccuucacc

SEQ ID NO: 1280020 - RNA, 19 nt, Artificial Sequence
  Description of Artificial Sequence: Synthetic oligonucleotide
uggcaaauaauuaacccca

SEQ ID NO: 1280021 - RNA, 19 nt, Artificial Sequence
  Description of Artificial Sequence: Synthetic oligonucleotide
uuugguacuggauagaguu

SEQ ID NO: 1280022 - RNA, 19 nt, Artificial Sequence
  Description of Artificial Sequence: Synthetic oligonucleotide
uguggcaaauaauuaaccc

SEQ ID NO: 1280023 - RNA, 19 nt, Artificial Sequence
  Description of Artificial Sequence: Synthetic oligonucleotide
ucacuaacaagaaugugga

SEQ ID NO: 1280024 - RNA, 19 nt, Artificial Sequence
  Description of Artificial Sequence: Synthetic oligonucleotide
gaaagguaaaugcccacgg

SEQ ID NO: 1280025 - RNA, 19 nt, Artificial Sequence
  Description of Artificial Sequence: Synthetic oligonucleotide
ucuaaaaccugauaaggaa

SEQ ID NO: 1280026 - RNA, 19 nt, Artificial Sequence
  Description of Artificial Sequence: Synthetic oligonucleotide
uagacugaacuguacaucc

SEQ ID NO: 1280027 - RNA, 19 nt, Artificial Sequence
  Description of Artificial Sequence: Synthetic oligonucleotide
aagacguuaaagccuucac

SEQ ID NO: 1280028 - RNA, 19 nt, Artificial Sequence
  Description of Artificial Sequence: Synthetic oligonucleotide
ucaggggaauuauagagcc

SEQ ID NO: 1280029 - RNA, 19 nt, Artificial Sequence
  Description of Artificial Sequence: Synthetic oligonucleotide
aaaaggucaggguacauuu

SEQ ID NO: 1280030 - RNA, 19 nt, Artificial Sequence
  Description of Artificial Sequence: Synthetic oligonucleotide
agcuuuaauaagucggcac

SEQ ID NO: 1280031 - RNA, 19 nt, Artificial Sequence
  Description of Artificial Sequence: Synthetic oligonucleotide
acuaaauccuccuuuguca

SEQ ID NO: 1280032 - RNA, 19 nt, Artificial Sequence
  Description of Artificial Sequence: Synthetic oligonucleotide
uucuaaaaccugauaagga

SEQ ID NO: 1280033 - RNA, 19 nt, Artificial Sequence
  Description of Artificial Sequence: Synthetic oligonucleotide
aauguggauaccaguaggg

SEQ ID NO: 1280034 - RNA, 19 nt, Artificial Sequence
  Description of Artificial Sequence: Synthetic oligonucleotide
uugguggaaaggaauaggc

SEQ ID NO: 1280035 - RNA, 19 nt, Artificial Sequence
  Description of Artificial Sequence: Synthetic oligonucleotide
ucagcuuuaauaagucggc

SEQ ID NO: 1280036 - RNA, 19 nt, Artificial Sequence
  Description of Artificial Sequence: Synthetic oligonucleotide
uuuccaaauaagugacugg

SEQ ID NO: 1280037 - RNA, 19 nt, Artificial Sequence
  Description of Artificial Sequence: Synthetic oligonucleotide
auaaggaauucaaaauagc

SEQ ID NO: 1280038 - RNA, 19 nt, Artificial Sequence
  Description of Artificial Sequence: Synthetic oligonucleotide
cauuuauuagacugaacug

SEQ ID NO: 1280039 - RNA, 19 nt, Artificial Sequence
  Description of Artificial Sequence: Synthetic oligonucleotide
agccaaaacaccccaaguc

SEQ ID NO: 1280040 - RNA, 19 nt, Artificial Sequence
  Description of Artificial Sequence: Synthetic oligonucleotide
acaacgaggagauuugucu

SEQ ID NO: 1280041 - RNA, 19 nt, Artificial Sequence
  Description of Artificial Sequence: Synthetic oligonucleotide
caaaauuaugugaauacca

SEQ ID NO: 1280042 - RNA, 19 nt, Artificial Sequence
  Description of Artificial Sequence: Synthetic oligonucleotide
uaauuaaccccauuaugac

SEQ ID NO: 1280043 - RNA, 19 nt, Artificial Sequence
  Description of Artificial Sequence: Synthetic oligonucleotide
gaauuauagagccgaauuc

SEQ ID NO: 1280044 - RNA, 19 nt, Artificial Sequence
  Description of Artificial Sequence: Synthetic oligonucleotide
uauuaggccccaaggagag

SEQ ID NO: 1280045 - RNA, 19 nt, Artificial Sequence
  Description of Artificial Sequence: Synthetic oligonucleotide
uuuucagcuuucacugugg

SEQ ID NO: 1280046 - RNA, 19 nt, Artificial Sequence
  Description of Artificial Sequence: Synthetic oligonucleotide
ugauuguacugaaacucag

SEQ ID NO: 1280047 - RNA, 19 nt, Artificial Sequence
  Description of Artificial Sequence: Synthetic oligonucleotide
uguacauccuauuaaccaa

SEQ ID NO: 1280048 - RNA, 19 nt, Artificial Sequence
  Description of Artificial Sequence: Synthetic oligonucleotide
uuguggcaaauaauuaacc

SEQ ID NO: 1280049 - RNA, 19 nt, Artificial Sequence
  Description of Artificial Sequence: Synthetic oligonucleotide
acauuuuagugucuuguug

SEQ ID NO: 1280050 - RNA, 19 nt, Artificial Sequence
  Description of Artificial Sequence: Synthetic oligonucleotide
auaggcaaguuuucgagca

SEQ ID NO: 1280051 - RNA, 19 nt, Artificial Sequence
  Description of Artificial Sequence: Synthetic oligonucleotide
aaaggaaaccacaugaguu

SEQ ID NO: 1280052 - RNA, 19 nt, Artificial Sequence
  Description of Artificial Sequence: Synthetic oligonucleotide
uuaauuugguggaaaggaa

SEQ ID NO: 1280053 - RNA, 19 nt, Artificial Sequence
  Description of Artificial Sequence: Synthetic oligonucleotide
uuaagcggggccguaaccg

SEQ ID NO: 1280054 - RNA, 19 nt, Artificial Sequence
  Description of Artificial Sequence: Synthetic oligonucleotide
caugauuguacugaaacuc

SEQ ID NO: 1280055 - RNA, 19 nt, Artificial Sequence
  Description of Artificial Sequence: Synthetic oligonucleotide
aagcagucagccaugauug

SEQ ID NO: 1280056 - RNA, 19 nt, Artificial Sequence
  Description of Artificial Sequence: Synthetic oligonucleotide
agagccgaauuccaucggc

SEQ ID NO: 1280057 - RNA, 19 nt, Artificial Sequence
  Description of Artificial Sequence: Synthetic oligonucleotide
accccauuaugacuaaaac

SEQ ID NO: 1280058 - RNA, 19 nt, Artificial Sequence
  Description of Artificial Sequence: Synthetic oligonucleotide
uaaaaccugauaaggaauu

SEQ ID NO: 1280059 - RNA, 19 nt, Artificial Sequence
  Description of Artificial Sequence: Synthetic oligonucleotide
caucuggucacuaacaaga

SEQ ID NO: 1280060 - RNA, 19 nt, Artificial Sequence
  Description of Artificial Sequence: Synthetic oligonucleotide
aauaagucggcaccugaaa

SEQ ID NO: 1280061 - RNA, 19 nt, Artificial Sequence
  Description of Artificial Sequence: Synthetic oligonucleotide
auuaugacuaaaacgcaag

SEQ ID NO: 1280062 - RNA, 19 nt, Artificial Sequence
  Description of Artificial Sequence: Synthetic oligonucleotide
ucagccaugauuguacuga

SEQ ID NO: 1280063 - RNA, 19 nt, Artificial Sequence
  Description of Artificial Sequence: Synthetic oligonucleotide
aaaccugguuaauuuggug

SEQ ID NO: 1280064 - RNA, 19 nt, Artificial Sequence
  Description of Artificial Sequence: Synthetic oligonucleotide
aagguaaaugcccacgguu

SEQ ID NO: 1280065 - RNA, 19 nt, Artificial Sequence
  Description of Artificial Sequence: Synthetic oligonucleotide
cuggauagaguucagucug

SEQ ID NO: 1280066 - RNA, 19 nt, Artificial Sequence
  Description of Artificial Sequence: Synthetic oligonucleotide
uuccaaguagauugcauga

SEQ ID NO: 1280067 - RNA, 19 nt, Artificial Sequence
  Description of Artificial Sequence: Synthetic oligonucleotide
uuaaaaggcaaggagguuu

SEQ ID NO: 1280068 - RNA, 19 nt, Artificial Sequence
  Description of Artificial Sequence: Synthetic oligonucleotide
uacuggauagaguucaguc

SEQ ID NO: 1280069 - RNA, 19 nt, Artificial Sequence
  Description of Artificial Sequence: Synthetic oligonucleotide
uuuguaccuauuaggcccc

SEQ ID NO: 1280070 - RNA, 19 nt, Artificial Sequence
  Description of Artificial Sequence: Synthetic oligonucleotide
ugaacauaccgagacggag

SEQ ID NO: 1280071 - RNA, 19 nt, Artificial Sequence
  Description of Artificial Sequence: Synthetic oligonucleotide
cauccuauuaaccaaagua

SEQ ID NO: 1280072 - RNA, 19 nt, Artificial Sequence
  Description of Artificial Sequence: Synthetic oligonucleotide
uauagagccgaauuccauc

SEQ ID NO: 1280073 - RNA, 19 nt, Artificial Sequence
  Description of Artificial Sequence: Synthetic oligonucleotide
gacgucaggggaauuauag

SEQ ID NO: 1280074 - RNA, 19 nt, Artificial Sequence
  Description of Artificial Sequence: Synthetic oligonucleotide
aguauaagggucaggcaac

SEQ ID NO: 1280075 - RNA, 19 nt, Artificial Sequence
  Description of Artificial Sequence: Synthetic oligonucleotide
uucuaaaaccaauuagaua

SEQ ID NO: 1280076 - RNA, 19 nt, Artificial Sequence
  Description of Artificial Sequence: Synthetic oligonucleotide
uguggucacagaaaagcaa

SEQ ID NO: 1280077 - RNA, 19 nt, Artificial Sequence
  Description of Artificial Sequence: Synthetic oligonucleotide
auuuuagugucuuguugug

SEQ ID NO: 1280078 - RNA, 19 nt, Artificial Sequence
  Description of Artificial Sequence: Synthetic oligonucleotide
aaaccugauaaggaauuca

SEQ ID NO: 1280079 - RNA, 19 nt, Artificial Sequence
  Description of Artificial Sequence: Synthetic oligonucleotide
ugcaugauaaacgcagggc

SEQ ID NO: 1280080 - RNA, 19 nt, Artificial Sequence
  Description of Artificial Sequence: Synthetic oligonucleotide
uaaaccugguuaauuuggu

SEQ ID NO: 1280081 - RNA, 19 nt, Artificial Sequence
  Description of Artificial Sequence: Synthetic oligonucleotide
uccccgagguaguauaagg

SEQ ID NO: 1280082 - RNA, 19 nt, Artificial Sequence
  Description of Artificial Sequence: Synthetic oligonucleotide
agcacacccuaucuccucc

SEQ ID NO: 1280083 - RNA, 19 nt, Artificial Sequence
  Description of Artificial Sequence: Synthetic oligonucleotide
uagaugguuaagcggggcc

SEQ ID NO: 1280084 - RNA, 19 nt, Artificial Sequence
  Description of Artificial Sequence: Synthetic oligonucleotide
aggaauaggcaaguuuucg

SEQ ID NO: 1280085 - RNA, 19 nt, Artificial Sequence
  Description of Artificial Sequence: Synthetic oligonucleotide
gacagacuagcacugugug

SEQ ID NO: 1280086 - RNA, 19 nt, Artificial Sequence
  Description of Artificial Sequence: Synthetic oligonucleotide
caggguacauuuuaguguc

SEQ ID NO: 1280087 - RNA, 19 nt, Artificial Sequence
  Description of Artificial Sequence: Synthetic oligonucleotide
gacugguacagaaagcaug

SEQ ID NO: 1280088 - RNA, 19 nt, Artificial Sequence
  Description of Artificial Sequence: Synthetic oligonucleotide
uaauaagucggcaccugaa

SEQ ID NO: 1280089 - RNA, 19 nt, Artificial Sequence
  Description of Artificial Sequence: Synthetic oligonucleotide
gcuuuaauaagucggcacc

SEQ ID NO: 1280090 - RNA, 19 nt, Artificial Sequence
  Description of Artificial Sequence: Synthetic oligonucleotide
cuguacauccuauuaacca

SEQ ID NO: 1280091 - RNA, 19 nt, Artificial Sequence
  Description of Artificial Sequence: Synthetic oligonucleotide
uggagugugccccucguga

SEQ ID NO: 1280092 - RNA, 19 nt, Artificial Sequence
  Description of Artificial Sequence: Synthetic oligonucleotide
uuaugugaauaccaucauu

SEQ ID NO: 1280093 - RNA, 19 nt, Artificial Sequence
  Description of Artificial Sequence: Synthetic oligonucleotide
aaguagauugcaugauaaa

SEQ ID NO: 1280094 - RNA, 19 nt, Artificial Sequence
  Description of Artificial Sequence: Synthetic oligonucleotide
aacauaccgagacggaguu

SEQ ID NO: 1280095 - RNA, 19 nt, Artificial Sequence
  Description of Artificial Sequence: Synthetic oligonucleotide
ucaccccacuucuaaaacc

SEQ ID NO: 1280096 - RNA, 19 nt, Artificial Sequence
  Description of Artificial Sequence: Synthetic oligonucleotide
uaaaacgcaagacguuaaa

SEQ ID NO: 1280097 - RNA, 19 nt, Artificial Sequence
  Description of Artificial Sequence: Synthetic oligonucleotide
accuauuaggccccaagga

SEQ ID NO: 1280098 - RNA, 19 nt, Artificial Sequence
  Description of Artificial Sequence: Synthetic oligonucleotide
ggaaagcuaacagacaagc

SEQ ID NO: 1280099 - RNA, 19 nt, Artificial Sequence
  Description of Artificial Sequence: Synthetic oligonucleotide
auagaugguuaagcggggc

SEQ ID NO: 1280100 - RNA, 19 nt, Artificial Sequence
  Description of Artificial Sequence: Synthetic oligonucleotide
aauuuguggcaaauaauua

SEQ ID NO: 1280101 - RNA, 19 nt, Artificial Sequence
  Description of Artificial Sequence: Synthetic oligonucleotide
ccuauuaaccaaaguaagc

SEQ ID NO: 1280102 - RNA, 19 nt, Artificial Sequence
  Description of Artificial Sequence: Synthetic oligonucleotide
agaugguuaagcggggccg

SEQ ID NO: 1280103 - RNA, 19 nt, Artificial Sequence
  Description of Artificial Sequence: Synthetic oligonucleotide
accgagacggaguugagaa

SEQ ID NO: 1280104 - RNA, 19 nt, Artificial Sequence
  Description of Artificial Sequence: Synthetic oligonucleotide
uuucaccccacuucuaaaa

SEQ ID NO: 1280105 - RNA, 19 nt, Artificial Sequence
  Description of Artificial Sequence: Synthetic oligonucleotide
uuaggccccaaggagagca

SEQ ID NO: 1280106 - RNA, 19 nt, Artificial Sequence
  Description of Artificial Sequence: Synthetic oligonucleotide
caccccaagucuuuguacc

SEQ ID NO: 1280107 - RNA, 19 nt, Artificial Sequence
  Description of Artificial Sequence: Synthetic oligonucleotide
ccccauuaugacuaaaacg

SEQ ID NO: 1280108 - RNA, 19 nt, Artificial Sequence
  Description of Artificial Sequence: Synthetic oligonucleotide
uuauagagccgaauuccau

SEQ ID NO: 1280109 - RNA, 19 nt, Artificial Sequence
  Description of Artificial Sequence: Synthetic oligonucleotide
auaagucggcaccugaaaa

SEQ ID NO: 1280110 - RNA, 19 nt, Artificial Sequence
  Description of Artificial Sequence: Synthetic oligonucleotide
uuguugugacaucuagugu

SEQ ID NO: 1280111 - RNA, 19 nt, Artificial Sequence
  Description of Artificial Sequence: Synthetic oligonucleotide
uaagugacugguacagaaa

SEQ ID NO: 1280112 - RNA, 19 nt, Artificial Sequence
  Description of Artificial Sequence: Synthetic oligonucleotide
ucuaguguuuccagagaaa

SEQ ID NO: 1280113 - RNA, 19 nt, Artificial Sequence
  Description of Artificial Sequence: Synthetic oligonucleotide
cucuccuacagcucauuag

SEQ ID NO: 1280114 - RNA, 19 nt, Artificial Sequence
  Description of Artificial Sequence: Synthetic oligonucleotide
cagucagccaugauuguac

SEQ ID NO: 1280115 - RNA, 19 nt, Artificial Sequence
  Description of Artificial Sequence: Synthetic oligonucleotide
gccaugauuguacugaaac

SEQ ID NO: 1280116 - RNA, 19 nt, Artificial Sequence
  Description of Artificial Sequence: Synthetic oligonucleotide
caugaguuuuaaaaggcaa

SEQ ID NO: 1280117 - RNA, 19 nt, Artificial Sequence
  Description of Artificial Sequence: Synthetic oligonucleotide
aaaacaccccaagucuuug

SEQ ID NO: 1280118 - RNA, 19 nt, Artificial Sequence
  Description of Artificial Sequence: Synthetic oligonucleotide
cacagugcuauucggcugc

SEQ ID NO: 1280119 - RNA, 19 nt, Artificial Sequence
  Description of Artificial Sequence: Synthetic oligonucleotide
aggggaauuauagagccga

SEQ ID NO: 1280120 - RNA, 19 nt, Artificial Sequence
  Description of Artificial Sequence: Synthetic oligonucleotide
ggagauuugucucuccuac

SEQ ID NO: 1280121 - RNA, 19 nt, Artificial Sequence
  Description of Artificial Sequence: Synthetic oligonucleotide
accugguuaauuuggugga

SEQ ID NO: 1280122 - RNA, 19 nt, Artificial Sequence
  Description of Artificial Sequence: Synthetic oligonucleotide
caaauaagugacugguaca

SEQ ID NO: 1280123 - RNA, 19 nt, Artificial Sequence
  Description of Artificial Sequence: Synthetic oligonucleotide
auugcaugauaaacgcagg

SEQ ID NO: 1280124 - RNA, 19 nt, Artificial Sequence
  Description of Artificial Sequence: Synthetic oligonucleotide
uaaccgaccuugacgucag

SEQ ID NO: 1280125 - RNA, 19 nt, Artificial Sequence
  Description of Artificial Sequence: Synthetic oligonucleotide
gaaaagcaagggaggacag

SEQ ID NO: 1280126 - RNA, 19 nt, Artificial Sequence
  Description of Artificial Sequence: Synthetic oligonucleotide
acuaaaacgcaagacguua

SEQ ID NO: 1280127 - RNA, 19 nt, Artificial Sequence
  Description of Artificial Sequence: Synthetic oligonucleotide
caauuucaagucugaggag

SEQ ID NO: 1280128 - RNA, 19 nt, Artificial Sequence
  Description of Artificial Sequence: Synthetic oligonucleotide
uggcacagaaagguaaaug

SEQ ID NO: 1280129 - RNA, 19 nt, Artificial Sequence
  Description of Artificial Sequence: Synthetic oligonucleotide
uagagccgaauuccaucgg

SEQ ID NO: 1280130 - RNA, 19 nt, Artificial Sequence
  Description of Artificial Sequence: Synthetic oligonucleotide
aaacaccccaagucuuugu

SEQ ID NO: 1280131 - RNA, 19 nt, Artificial Sequence
  Description of Artificial Sequence: Synthetic oligonucleotide
ucgucuuggaaguucugaa

SEQ ID NO: 1280132 - RNA, 19 nt, Artificial Sequence
  Description of Artificial Sequence: Synthetic oligonucleotide
agucuguauaagguaucac

SEQ ID NO: 1280133 - RNA, 19 nt, Artificial Sequence
  Description of Artificial Sequence: Synthetic oligonucleotide
auuauagagccgaauucca

SEQ ID NO: 1280134 - RNA, 19 nt, Artificial Sequence
  Description of Artificial Sequence: Synthetic oligonucleotide
agguaaaugcccacgguug

SEQ ID NO: 1280135 - RNA, 19 nt, Artificial Sequence
  Description of Artificial Sequence: Synthetic oligonucleotide
aaaugcccacgguugaguu

SEQ ID NO: 1280136 - RNA, 19 nt, Artificial Sequence
  Description of Artificial Sequence: Synthetic oligonucleotide
aacaccccaagucuuugua

SEQ ID NO: 1280137 - RNA, 19 nt, Artificial Sequence
  Description of Artificial Sequence: Synthetic oligonucleotide
gaagcagucagccaugauu

SEQ ID NO: 1280138 - RNA, 19 nt, Artificial Sequence
  Description of Artificial Sequence: Synthetic oligonucleotide
gccguaaccgaccuugacg

SEQ ID NO: 1280139 - RNA, 19 nt, Artificial Sequence
  Description of Artificial Sequence: Synthetic oligonucleotide
uucaaaccgcauacagugu

SEQ ID NO: 1280140 - RNA, 19 nt, Artificial Sequence
  Description of Artificial Sequence: Synthetic oligonucleotide
auagcacacagcauuaaau

SEQ ID NO: 1280141 - RNA, 19 nt, Artificial Sequence
  Description of Artificial Sequence: Synthetic oligonucleotide
augauuguacugaaacuca

SEQ ID NO: 1280142 - RNA, 19 nt, Artificial Sequence
  Description of Artificial Sequence: Synthetic oligonucleotide
gucaggggaauuauagagc

SEQ ID NO: 1280143 - RNA, 19 nt, Artificial Sequence
  Description of Artificial Sequence: Synthetic oligonucleotide
agggcgucccaccugccac

SEQ ID NO: 1280144 - RNA, 19 nt, Artificial Sequence
  Description of Artificial Sequence: Synthetic oligonucleotide
agugaaauuuggaaacuaa

SEQ ID NO: 1280145 - RNA, 19 nt, Artificial Sequence
  Description of Artificial Sequence: Synthetic oligonucleotide
accgcauacagugucaaaa

SEQ ID NO: 1280146 - RNA, 19 nt, Artificial Sequence
  Description of Artificial Sequence: Synthetic oligonucleotide
aacgcagggcgucccaccu

SEQ ID NO: 1280147 - RNA, 19 nt, Artificial Sequence
  Description of Artificial Sequence: Synthetic oligonucleotide
cauaccgagacggaguuga

SEQ ID NO: 1280148 - RNA, 19 nt, Artificial Sequence
  Description of Artificial Sequence: Synthetic oligonucleotide
cagcacagugcuauucggc

SEQ ID NO: 1280149 - RNA, 19 nt, Artificial Sequence
  Description of Artificial Sequence: Synthetic oligonucleotide
aacucagcaugugagggua

SEQ ID NO: 1280150 - RNA, 19 nt, Artificial Sequence
  Description of Artificial Sequence: Synthetic oligonucleotide
aaccccauuaugacuaaaa

SEQ ID NO: 1280151 - RNA, 19 nt, Artificial Sequence
  Description of Artificial Sequence: Synthetic oligonucleotide
acacccuaucuccuccccg

SEQ ID NO: 1280152 - RNA, 19 nt, Artificial Sequence
  Description of Artificial Sequence: Synthetic oligonucleotide
acggaguugagaauuugug

SEQ ID NO: 1280153 - RNA, 19 nt, Artificial Sequence
  Description of Artificial Sequence: Synthetic oligonucleotide
ugauaaacgcagggcgucc

SEQ ID NO: 1280154 - RNA, 19 nt, Artificial Sequence
  Description of Artificial Sequence: Synthetic oligonucleotide
gauaaacgcagggcguccc

SEQ ID NO: 1280155 - RNA, 19 nt, Artificial Sequence
  Description of Artificial Sequence: Synthetic oligonucleotide
caugugaggguaggaaaag

SEQ ID NO: 1280156 - RNA, 19 nt, Artificial Sequence
  Description of Artificial Sequence: Synthetic oligonucleotide
agccgaauuccaucggcug

SEQ ID NO: 1280157 - RNA, 19 nt, Artificial Sequence
  Description of Artificial Sequence: Synthetic oligonucleotide
caauuagauaaauucacuu

SEQ ID NO: 1280158 - RNA, 19 nt, Artificial Sequence
  Description of Artificial Sequence: Synthetic oligonucleotide
guuaagcggggccguaacc

SEQ ID NO: 1280159 - RNA, 19 nt, Artificial Sequence
  Description of Artificial Sequence: Synthetic oligonucleotide
cgucaggggaauuauagag

SEQ ID NO: 1280160 - RNA, 19 nt, Artificial Sequence
  Description of Artificial Sequence: Synthetic oligonucleotide
aaugcccacgguugaguuu

SEQ ID NO: 1280161 - RNA, 19 nt, Artificial Sequence
  Description of Artificial Sequence: Synthetic oligonucleotide
ucccaagacuucuuggauu

SEQ ID NO: 1280162 - RNA, 19 nt, Artificial Sequence
  Description of Artificial Sequence: Synthetic oligonucleotide
gacugaacuguacauccua

SEQ ID NO: 1280163 - RNA, 19 nt, Artificial Sequence
  Description of Artificial Sequence: Synthetic oligonucleotide
acgucaggggaauuauaga

SEQ ID NO: 1280164 - RNA, 19 nt, Artificial Sequence
  Description of Artificial Sequence: Synthetic oligonucleotide
guaaccgaccuugacguca

SEQ ID NO: 1280165 - RNA, 19 nt, Artificial Sequence
  Description of Artificial Sequence: Synthetic oligonucleotide
uaagcggggccguaaccga

SEQ ID NO: 1280166 - RNA, 19 nt, Artificial Sequence
  Description of Artificial Sequence: Synthetic oligonucleotide
accgaccuugacgucaggg

SEQ ID NO: 1280167 - RNA, 19 nt, Artificial Sequence
  Description of Artificial Sequence: Synthetic oligonucleotide
cucgcucucgugagggugc

SEQ ID NO: 1280168 - RNA, 19 nt, Artificial Sequence
  Description of Artificial Sequence: Synthetic oligonucleotide
uuuaaaaggcaaggagguu

SEQ ID NO: 1280169 - RNA, 19 nt, Artificial Sequence
  Description of Artificial Sequence: Synthetic oligonucleotide
gugacaacgaggagauuug

SEQ ID NO: 1280170 - RNA, 19 nt, Artificial Sequence
  Description of Artificial Sequence: Synthetic oligonucleotide
gguacauuuuagugucuug

SEQ ID NO: 1280171 - RNA, 19 nt, Artificial Sequence
  Description of Artificial Sequence: Synthetic oligonucleotide
gagguaguauaagggucag

SEQ ID NO: 1280172 - RNA, 19 nt, Artificial Sequence
  Description of Artificial Sequence: Synthetic oligonucleotide
cuaaaacgcaagacguuaa

SEQ ID NO: 1280173 - RNA, 19 nt, Artificial Sequence
  Description of Artificial Sequence: Synthetic oligonucleotide
ugcuauucggcugcuccug

SEQ ID NO: 1280174 - RNA, 19 nt, Artificial Sequence
  Description of Artificial Sequence: Synthetic oligonucleotide
uaacaagaauguggauacc

SEQ ID NO: 1280175 - RNA, 19 nt, Artificial Sequence
  Description of Artificial Sequence: Synthetic oligonucleotide
ggaauuauagagccgaauu

SEQ ID NO: 1280176 - RNA, 19 nt, Artificial Sequence
  Description of Artificial Sequence: Synthetic oligonucleotide
gacagacauagaugguuaa

SEQ ID NO: 1280177 - RNA, 19 nt, Artificial Sequence
  Description of Artificial Sequence: Synthetic oligonucleotide
gacaacgaggagauuuguc

SEQ ID NO: 1280178 - RNA, 19 nt, Artificial Sequence
  Description of Artificial Sequence: Synthetic oligonucleotide
auaaacgcagggcguccca

SEQ ID NO: 1280179 - RNA, 19 nt, Artificial Sequence
  Description of Artificial Sequence: Synthetic oligonucleotide
acgaggagauuugucucuc

SEQ ID NO: 1280180 - RNA, 19 nt, Artificial Sequence
  Description of Artificial Sequence: Synthetic oligonucleotide
uuaaccccauuaugacuaa

SEQ ID NO: 1280181 - RNA, 19 nt, Artificial Sequence
  Description of Artificial Sequence: Synthetic oligonucleotide
uccaucggcugcaccacaa

SEQ ID NO: 1280182 - RNA, 19 nt, Artificial Sequence
  Description of Artificial Sequence: Synthetic oligonucleotide
aacuucugaggcaaccauu

SEQ ID NO: 1280183 - RNA, 19 nt, Artificial Sequence
  Description of Artificial Sequence: Synthetic oligonucleotide
aggagcuugaaaguacuuu

SEQ ID NO: 1280184 - RNA, 19 nt, Artificial Sequence
  Description of Artificial Sequence: Synthetic oligonucleotide
uugacgucaggggaauuau

SEQ ID NO: 1280185 - RNA, 19 nt, Artificial Sequence
  Description of Artificial Sequence: Synthetic oligonucleotide
agcacaauuucaagucuga

SEQ ID NO: 1280186 - RNA, 19 nt, Artificial Sequence
  Description of Artificial Sequence: Synthetic oligonucleotide
acgcaagacguuaaagccu

SEQ ID NO: 1280187 - RNA, 19 nt, Artificial Sequence
  Description of Artificial Sequence: Synthetic oligonucleotide
cagacuagcacugugugcu

SEQ ID NO: 1280188 - RNA, 19 nt, Artificial Sequence
  Description of Artificial Sequence: Synthetic oligonucleotide
caugauaaacgcagggcgu

SEQ ID NO: 1280189 - RNA, 19 nt, Artificial Sequence
  Description of Artificial Sequence: Synthetic oligonucleotide
caaaccgcauacaguguca

SEQ ID NO: 1280190 - RNA, 19 nt, Artificial Sequence
  Description of Artificial Sequence: Synthetic oligonucleotide
ucucgucuuggaaguucug

SEQ ID NO: 1280191 - RNA, 19 nt, Artificial Sequence
  Description of Artificial Sequence: Synthetic oligonucleotide
cacccgcugaagcagucag

SEQ ID NO: 1280192 - RNA, 19 nt, Artificial Sequence
  Description of Artificial Sequence: Synthetic oligonucleotide
agauugcaugauaaacgca

SEQ ID NO: 1280193 - RNA, 19 nt, Artificial Sequence
  Description of Artificial Sequence: Synthetic oligonucleotide
gguaaaugcccacgguuga

SEQ ID NO: 1280194 - RNA, 19 nt, Artificial Sequence
  Description of Artificial Sequence: Synthetic oligonucleotide
gaacauaccgagacggagu

SEQ ID NO: 1280195 - RNA, 19 nt, Artificial Sequence
  Description of Artificial Sequence: Synthetic oligonucleotide
ccccgagguaguauaaggg

SEQ ID NO: 1280196 - RNA, 19 nt, Artificial Sequence
  Description of Artificial Sequence: Synthetic oligonucleotide
ugacaacgaggagauuugu

SEQ ID NO: 1280197 - RNA, 19 nt, Artificial Sequence
  Description of Artificial Sequence: Synthetic oligonucleotide
ccgaccuugacgucagggg

SEQ ID NO: 1280198 - RNA, 19 nt, Artificial Sequence
  Description of Artificial Sequence: Synthetic oligonucleotide
cuauucggcugcuccugac

SEQ ID NO: 1280199 - RNA, 19 nt, Artificial Sequence
  Description of Artificial Sequence: Synthetic oligonucleotide
ugacgucaggggaauuaua

SEQ ID NO: 1280200 - RNA, 19 nt, Artificial Sequence
  Description of Artificial Sequence: Synthetic oligonucleotide
uaccgagacggaguugaga

SEQ ID NO: 1280201 - RNA, 19 nt, Artificial Sequence
  Description of Artificial Sequence: Synthetic oligonucleotide
caucuaguguuuccagaga

SEQ ID NO: 1280202 - RNA, 19 nt, Artificial Sequence
  Description of Artificial Sequence: Synthetic oligonucleotide
uuccaucggcugcaccaca

SEQ ID NO: 1280203 - RNA, 19 nt, Artificial Sequence
  Description of Artificial Sequence: Synthetic oligonucleotide
gccgaauuccaucggcugc

SEQ ID NO: 1280204 - RNA, 19 nt, Artificial Sequence
  Description of Artificial Sequence: Synthetic oligonucleotide
cucucgugagggugcuggg

SEQ ID NO: 1280205 - RNA, 19 nt, Artificial Sequence
  Description of Artificial Sequence: Synthetic oligonucleotide
agacggaguugagaauuug

SEQ ID NO: 1280206 - RNA, 19 nt, Artificial Sequence
  Description of Artificial Sequence: Synthetic oligonucleotide
agcggggccguaaccgacc

SEQ ID NO: 1280207 - RNA, 19 nt, Artificial Sequence
  Description of Artificial Sequence: Synthetic oligonucleotide
gucaucuuguguuuucaau

SEQ ID NO: 1280208 - RNA, 19 nt, Artificial Sequence
  Description of Artificial Sequence: Synthetic oligonucleotide
cacacccuaucuccucccc

SEQ ID NO: 1280209 - RNA, 19 nt, Artificial Sequence
  Description of Artificial Sequence: Synthetic oligonucleotide
guauaagggucaggcaaca

SEQ ID NO: 1280210 - RNA, 19 nt, Artificial Sequence
  Description of Artificial Sequence: Synthetic oligonucleotide
ugcuagggaagugggcacu

SEQ ID NO: 1280211 - RNA, 19 nt, Artificial Sequence
  Description of Artificial Sequence: Synthetic oligonucleotide
aaccgaccuugacgucagg

SEQ ID NO: 1280212 - RNA, 19 nt, Artificial Sequence
  Description of Artificial Sequence: Synthetic oligonucleotide
uucggcugcuccugacaga

SEQ ID NO: 1280213 - RNA, 19 nt, Artificial Sequence
  Description of Artificial Sequence: Synthetic oligonucleotide
augaacauaccgagacgga

SEQ ID NO: 1280214 - RNA, 19 nt, Artificial Sequence
  Description of Artificial Sequence: Synthetic oligonucleotide
cucgucuuggaaguucuga

SEQ ID NO: 1280215 - RNA, 19 nt, Artificial Sequence
  Description of Artificial Sequence: Synthetic oligonucleotide
caccccacuucuaaaaccu

SEQ ID NO: 1280216 - RNA, 19 nt, Artificial Sequence
  Description of Artificial Sequence: Synthetic oligonucleotide
uucacccgcugaagcaguc

SEQ ID NO: 1280217 - RNA, 19 nt, Artificial Sequence
  Description of Artificial Sequence: Synthetic oligonucleotide
ggggccguaaccgaccuug

SEQ ID NO: 1280218 - RNA, 19 nt, Artificial Sequence
  Description of Artificial Sequence: Synthetic oligonucleotide
cagucuguauaagguauca

SEQ ID NO: 1280219 - RNA, 19 nt, Artificial Sequence
  Description of Artificial Sequence: Synthetic oligonucleotide
cacccuaucuccuccccga

SEQ ID NO: 1280220 - RNA, 19 nt, Artificial Sequence
  Description of Artificial Sequence: Synthetic oligonucleotide
agcucauuaggaaggucau

SEQ ID NO: 1280221 - RNA, 19 nt, Artificial Sequence
  Description of Artificial Sequence: Synthetic oligonucleotide
gguuaagcggggccguaac

SEQ ID NO: 1280222 - RNA, 19 nt, Artificial Sequence
  Description of Artificial Sequence: Synthetic oligonucleotide
cuugacgucaggggaauua

SEQ ID NO: 1280223 - RNA, 19 nt, Artificial Sequence
  Description of Artificial Sequence: Synthetic oligonucleotide
gugugccccucgugaaggg

SEQ ID NO: 1280224 - RNA, 19 nt, Artificial Sequence
  Description of Artificial Sequence: Synthetic oligonucleotide
agacugaacuguacauccu

SEQ ID NO: 1280225 - RNA, 19 nt, Artificial Sequence
  Description of Artificial Sequence: Synthetic oligonucleotide
acccgcugaagcagucagc

SEQ ID NO: 1280226 - RNA, 19 nt, Artificial Sequence
  Description of Artificial Sequence: Synthetic oligonucleotide
ugccccucgugaagggccu

SEQ ID NO: 1280227 - RNA, 19 nt, Artificial Sequence
  Description of Artificial Sequence: Synthetic oligonucleotide
cugguuaauuugguggaaa

SEQ ID NO: 1280228 - RNA, 19 nt, Artificial Sequence
  Description of Artificial Sequence: Synthetic oligonucleotide
ucacccgcugaagcaguca

SEQ ID NO: 1280229 - RNA, 19 nt, Artificial Sequence
  Description of Artificial Sequence: Synthetic oligonucleotide
ugguuaagcggggccguaa

SEQ ID NO: 1280230 - RNA, 19 nt, Artificial Sequence
  Description of Artificial Sequence: Synthetic oligonucleotide
gauggagugugccccucgu

SEQ ID NO: 1280231 - RNA, 19 nt, Artificial Sequence
  Description of Artificial Sequence: Synthetic oligonucleotide
cuccccgagguaguauaag

SEQ ID NO: 1280232 - RNA, 19 nt, Artificial Sequence
  Description of Artificial Sequence: Synthetic oligonucleotide
agagacuccugggaacuuu

SEQ ID NO: 1280233 - RNA, 19 nt, Artificial Sequence
  Description of Artificial Sequence: Synthetic oligonucleotide
cugguacagaaagcaugug

SEQ ID NO: 1280234 - RNA, 19 nt, Artificial Sequence
  Description of Artificial Sequence: Synthetic oligonucleotide
aucuggucacuaacaagaa

SEQ ID NO: 1280235 - RNA, 19 nt, Artificial Sequence
  Description of Artificial Sequence: Synthetic oligonucleotide
uguaccuauuaggccccaa

SEQ ID NO: 1280236 - RNA, 19 nt, Artificial Sequence
  Description of Artificial Sequence: Synthetic oligonucleotide
uaaccccauuaugacuaaa

SEQ ID NO: 1280237 - RNA, 19 nt, Artificial Sequence
  Description of Artificial Sequence: Synthetic oligonucleotide
gguaucacuucaaaauuau

SEQ ID NO: 1280238 - RNA, 19 nt, Artificial Sequence
  Description of Artificial Sequence: Synthetic oligonucleotide
gccccugcuagggaagugg

SEQ ID NO: 1280239 - RNA, 19 nt, Artificial Sequence
  Description of Artificial Sequence: Synthetic oligonucleotide
gacuaaaacgcaagacguu

SEQ ID NO: 1280240 - RNA, 19 nt, Artificial Sequence
  Description of Artificial Sequence: Synthetic oligonucleotide
acucagcaugugaggguag

SEQ ID NO: 1280241 - RNA, 19 nt, Artificial Sequence
  Description of Artificial Sequence: Synthetic oligonucleotide
uuguaccuauuaggcccca

SEQ ID NO: 1280242 - RNA, 19 nt, Artificial Sequence
  Description of Artificial Sequence: Synthetic oligonucleotide
cagcaugugaggguaggaa

SEQ ID NO: 1280243 - RNA, 19 nt, Artificial Sequence
  Description of Artificial Sequence: Synthetic oligonucleotide
aacucucgucuuggaaguu

SEQ ID NO: 1280244 - RNA, 19 nt, Artificial Sequence
  Description of Artificial Sequence: Synthetic oligonucleotide
auaccgagacggaguugag

SEQ ID NO: 1280245 - RNA, 19 nt, Artificial Sequence
  Description of Artificial Sequence: Synthetic oligonucleotide
accuugacgucaggggaau

SEQ ID NO: 1280246 - RNA, 19 nt, Artificial Sequence
  Description of Artificial Sequence: Synthetic oligonucleotide
gagccgaauuccaucggcu

SEQ ID NO: 1280247 - RNA, 19 nt, Artificial Sequence
  Description of Artificial Sequence: Synthetic oligonucleotide
ccccugcuagggaaguggg

SEQ ID NO: 1280248 - RNA, 19 nt, Artificial Sequence
  Description of Artificial Sequence: Synthetic oligonucleotide
ccguaaccgaccuugacgu

SEQ ID NO: 1280249 - RNA, 19 nt, Artificial Sequence
  Description of Artificial Sequence: Synthetic oligonucleotide
gugcuauucggcugcuccu

SEQ ID NO: 1280250 - RNA, 19 nt, Artificial Sequence
  Description of Artificial Sequence: Synthetic oligonucleotide
ggagugugccccucgugaa

SEQ ID NO: 1280251 - RNA, 19 nt, Artificial Sequence
  Description of Artificial Sequence: Synthetic oligonucleotide
acgcagggcgucccaccug

SEQ ID NO: 1280252 - RNA, 19 nt, Artificial Sequence
  Description of Artificial Sequence: Synthetic oligonucleotide
gcacacccuaucuccuccc

SEQ ID NO: 1280253 - RNA, 19 nt, Artificial Sequence
  Description of Artificial Sequence: Synthetic oligonucleotide
accucgcucucgugagggu

SEQ ID NO: 1280254 - RNA, 19 nt, Artificial Sequence
  Description of Artificial Sequence: Synthetic oligonucleotide
aggguacauuuuagugucu

SEQ ID NO: 1280255 - RNA, 19 nt, Artificial Sequence
  Description of Artificial Sequence: Synthetic oligonucleotide
gcuagggaagugggcacug

SEQ ID NO: 1280256 - RNA, 19 nt, Artificial Sequence
  Description of Artificial Sequence: Synthetic oligonucleotide
ggggcgugcccuugcagca

SEQ ID NO: 1280257 - RNA, 19 nt, Artificial Sequence
  Description of Artificial Sequence: Synthetic oligonucleotide
ggccguaaccgaccuugac

SEQ ID NO: 1280258 - RNA, 19 nt, Artificial Sequence
  Description of Artificial Sequence: Synthetic oligonucleotide
cccugcuagggaagugggc

SEQ ID NO: 1280259 - RNA, 19 nt, Artificial Sequence
  Description of Artificial Sequence: Synthetic oligonucleotide
ucgcucucgugagggugcu

SEQ ID NO: 1280260 - RNA, 19 nt, Artificial Sequence
  Description of Artificial Sequence: Synthetic oligonucleotide
caucggcugcaccacaaau

SEQ ID NO: 1280261 - RNA, 19 nt, Artificial Sequence
  Description of Artificial Sequence: Synthetic oligonucleotide
cccgagguaguauaagggu

SEQ ID NO: 1280262 - RNA, 19 nt, Artificial Sequence
  Description of Artificial Sequence: Synthetic oligonucleotide
cagauggagugugccccuc

SEQ ID NO: 1280263 - RNA, 19 nt, Artificial Sequence
  Description of Artificial Sequence: Synthetic oligonucleotide
cagggcgucccaccugcca

SEQ ID NO: 1280264 - RNA, 19 nt, Artificial Sequence
  Description of Artificial Sequence: Synthetic oligonucleotide
cacuaacaagaauguggau

SEQ ID NO: 1280265 - RNA, 19 nt, Artificial Sequence
  Description of Artificial Sequence: Synthetic oligonucleotide
gagacggaguugagaauuu

SEQ ID NO: 1280266 - RNA, 19 nt, Artificial Sequence
  Description of Artificial Sequence: Synthetic oligonucleotide
gcagucagccaugauugua

SEQ ID NO: 1280267 - RNA, 19 nt, Artificial Sequence
  Description of Artificial Sequence: Synthetic oligonucleotide
gggaauuauagagccgaau

SEQ ID NO: 1280268 - RNA, 19 nt, Artificial Sequence
  Description of Artificial Sequence: Synthetic oligonucleotide
ccucgcucucgugagggug

SEQ ID NO: 1280269 - RNA, 19 nt, Artificial Sequence
  Description of Artificial Sequence: Synthetic oligonucleotide
augguuaagcggggccgua

SEQ ID NO: 1280270 - RNA, 19 nt, Artificial Sequence
  Description of Artificial Sequence: Synthetic oligonucleotide
ggaaaccacaugaguuuua

SEQ ID NO: 1280271 - RNA, 19 nt, Artificial Sequence
  Description of Artificial Sequence: Synthetic oligonucleotide
ggcgugcccuugcagcaca

SEQ ID NO: 1280272 - RNA, 19 nt, Artificial Sequence
  Description of Artificial Sequence: Synthetic oligonucleotide
caccugccacucucuccuc

SEQ ID NO: 1280273 - RNA, 19 nt, Artificial Sequence
  Description of Artificial Sequence: Synthetic oligonucleotide
cugaaccaucuggucacua

SEQ ID NO: 1280274 - RNA, 19 nt, Artificial Sequence
  Description of Artificial Sequence: Synthetic oligonucleotide
gugcugcucagcacaauuu

SEQ ID NO: 1280275 - RNA, 19 nt, Artificial Sequence
  Description of Artificial Sequence: Synthetic oligonucleotide
ggggaauuauagagccgaa

SEQ ID NO: 1280276 - RNA, 19 nt, Artificial Sequence
  Description of Artificial Sequence: Synthetic oligonucleotide
cuggcacagaaagguaaau

SEQ ID NO: 1280277 - RNA, 19 nt, Artificial Sequence
  Description of Artificial Sequence: Synthetic oligonucleotide
ggguacauuuuagugucuu

SEQ ID NO: 1280278 - RNA, 19 nt, Artificial Sequence
  Description of Artificial Sequence: Synthetic oligonucleotide
caguagggcccugucugua

SEQ ID NO: 1280279 - RNA, 19 nt, Artificial Sequence
  Description of Artificial Sequence: Synthetic oligonucleotide
cguaaccgaccuugacguc

SEQ ID NO: 1280280 - RNA, 19 nt, Artificial Sequence
  Description of Artificial Sequence: Synthetic oligonucleotide
ccugguuaauuugguggaa

SEQ ID NO: 1280281 - RNA, 19 nt, Artificial Sequence
  Description of Artificial Sequence: Synthetic oligonucleotide
cgcaagacguuaaagccuu

SEQ ID NO: 1280282 - RNA, 19 nt, Artificial Sequence
  Description of Artificial Sequence: Synthetic oligonucleotide
cccaagucuuuguaccuau

SEQ ID NO: 1280283 - RNA, 19 nt, Artificial Sequence
  Description of Artificial Sequence: Synthetic oligonucleotide
gcaagacguuaaagccuuc

SEQ ID NO: 1280284 - RNA, 19 nt, Artificial Sequence
  Description of Artificial Sequence: Synthetic oligonucleotide
ccuccccgagguaguauaa

SEQ ID NO: 1280285 - RNA, 19 nt, Artificial Sequence
  Description of Artificial Sequence: Synthetic oligonucleotide
ggcgucccaccugccacuc

SEQ ID NO: 1280286 - RNA, 19 nt, Artificial Sequence
  Description of Artificial Sequence: Synthetic oligonucleotide
gggcgucccaccugccacu

SEQ ID NO: 1280287 - RNA, 19 nt, Artificial Sequence
  Description of Artificial Sequence: Synthetic oligonucleotide
ccaguagggcccugucugu

SEQ ID NO: 1280288 - RNA, 19 nt, Artificial Sequence
  Description of Artificial Sequence: Synthetic oligonucleotide
gggccguaaccgaccuuga

SEQ ID NO: 1280289 - RNA, 19 nt, Artificial Sequence
  Description of Artificial Sequence: Synthetic oligonucleotide
gcagggcgucccaccugcc

SEQ ID NO: 1280290 - RNA, 19 nt, Artificial Sequence
  Description of Artificial Sequence: Synthetic oligonucleotide
gcggggccguaaccgaccu

SEQ ID NO: 1280291 - RNA, 19 nt, Artificial Sequence
  Description of Artificial Sequence: Synthetic oligonucleotide
ccgagacggaguugagaau

SEQ ID NO: 1280292 - RNA, 19 nt, Artificial Sequence
  Description of Artificial Sequence: Synthetic oligonucleotide
gccccucgugaagggccug

SEQ ID NO: 1280293 - RNA, 19 nt, Artificial Sequence
  Description of Artificial Sequence: Synthetic oligonucleotide
gcgucccaccugccacucu

SEQ ID NO: 1280294 - RNA, 19 nt, Artificial Sequence
  Description of Artificial Sequence: Synthetic oligonucleotide
ccuugacgucaggggaauu

SEQ ID NO: 1280295 - RNA, 19 nt, Artificial Sequence
  Description of Artificial Sequence: Synthetic oligonucleotide
aaauuuuaguaguaccugc

SEQ ID NO: 1280296 - RNA, 19 nt, Artificial Sequence
  Description of Artificial Sequence: Synthetic oligonucleotide
  modified_base (4)..(4): a, c, u, g, unknown or other
aagnucuccauccacgucg

SEQ ID NO: 1280297 - RNA, 19 nt, Artificial Sequence
  Description of Artificial Sequence: Synthetic oligonucleotide
aaguugaacaaacagcggg

SEQ ID NO: 1280298 - RNA, 19 nt, Artificial Sequence
  Description of Artificial Sequence: Synthetic oligonucleotide
aaauucagaaaauucgaag

SEQ ID NO: 1280299 - RNA, 19 nt, Artificial Sequence
  Description of Artificial Sequence: Synthetic oligonucleotide
aacucuaaaccccucagcg

SEQ ID NO: 1280300 - RNA, 19 nt, Artificial Sequence
  Description of Artificial Sequence: Synthetic oligonucleotide
ugucacauaauuauggggc

SEQ ID NO: 1280301 - RNA, 19 nt, Artificial Sequence
  Description of Artificial Sequence: Synthetic oligonucleotide
ucuuuugugacauuucccg

SEQ ID NO: 1280302 - RNA, 19 nt, Artificial Sequence
  Description of Artificial Sequence: Synthetic oligonucleotide
uaaacuucguacauuacag

SEQ ID NO: 1280303 - RNA, 19 nt, Artificial Sequence
  Description of Artificial Sequence: Synthetic oligonucleotide
uggucuaaaauuuuaguag

SEQ ID NO: 1280304 - RNA, 19 nt, Artificial Sequence
  Description of Artificial Sequence: Synthetic oligonucleotide
uuuuaguaguaccugcugg

SEQ ID NO: 1280305 - RNA, 19 nt, Artificial Sequence
  Description of Artificial Sequence: Synthetic oligonucleotide
uuaaacuucguacauuaca

SEQ ID NO: 1280306 - RNA, 19 nt, Artificial Sequence
  Description of Artificial Sequence: Synthetic oligonucleotide
uacugucacauaauuaugg

SEQ ID NO: 1280307 - RNA, 19 nt, Artificial Sequence
  Description of Artificial Sequence: Synthetic oligonucleotide
aauuugaagagucuccgga

SEQ ID NO: 1280308 - RNA, 19 nt, Artificial Sequence
  Description of Artificial Sequence: Synthetic oligonucleotide
auuauggggcuauauauuc

SEQ ID NO: 1280309 - RNA, 19 nt, Artificial Sequence
  Description of Artificial Sequence: Synthetic oligonucleotide
cuguuauccgcauaaaucc

SEQ ID NO: 1280310 - RNA, 19 nt, Artificial Sequence
  Description of Artificial Sequence: Synthetic oligonucleotide
uuuugugacauuucccggg

SEQ ID NO: 1280311 - RNA, 19 nt, Artificial Sequence
  Description of Artificial Sequence: Synthetic oligonucleotide
ugguuuaugaacugcgagg

SEQ ID NO: 1280312 - RNA, 19 nt, Artificial Sequence
  Description of Artificial Sequence: Synthetic oligonucleotide
uaaucggugucauucaucc

SEQ ID NO: 1280313 - RNA, 19 nt, Artificial Sequence
  Description of Artificial Sequence: Synthetic oligonucleotide
uaauuauggggcuauauau

SEQ ID NO: 1280314 - RNA, 19 nt, Artificial Sequence
  Description of Artificial Sequence: Synthetic oligonucleotide
gauaauucauguacaacag

SEQ ID NO: 1280315 - RNA, 19 nt, Artificial Sequence
  Description of Artificial Sequence: Synthetic oligonucleotide
ugaacaaacagcgggauac

SEQ ID NO: 1280316 - RNA, 19 nt, Artificial Sequence
  Description of Artificial Sequence: Synthetic oligonucleotide
uuuaugaacugcgagguga

SEQ ID NO: 1280317 - RNA, 19 nt, Artificial Sequence
  Description of Artificial Sequence: Synthetic oligonucleotide
aaccccucagcguucgucc

SEQ ID NO: 1280318 - RNA, 19 nt, Artificial Sequence
  Description of Artificial Sequence: Synthetic oligonucleotide
aacugguacucauccacac

SEQ ID NO: 1280319 - RNA, 19 nt, Artificial Sequence
  Description of Artificial Sequence: Synthetic oligonucleotide
uuucugaucaaugauucug

SEQ ID NO: 1280320 - RNA, 19 nt, Artificial Sequence
  Description of Artificial Sequence: Synthetic oligonucleotide
agcucgcuggucuugaccc

SEQ ID NO: 1280321 - RNA, 19 nt, Artificial Sequence
  Description of Artificial Sequence: Synthetic oligonucleotide
ucuuaaacuucguacauua

SEQ ID NO: 1280322 - RNA, 19 nt, Artificial Sequence
  Description of Artificial Sequence: Synthetic oligonucleotide
auagcuugagcaguaacac

SEQ ID NO: 1280323 - RNA, 19 nt, Artificial Sequence
  Description of Artificial Sequence: Synthetic oligonucleotide
caaacagcgggauacacug

SEQ ID NO: 1280324 - RNA, 19 nt, Artificial Sequence
  Description of Artificial Sequence: Synthetic oligonucleotide
uuuaguaguaccugcugga

SEQ ID NO: 1280325 - RNA, 19 nt, Artificial Sequence
  Description of Artificial Sequence: Synthetic oligonucleotide
uucugaucaaugauucugc

SEQ ID NO: 1280326 - RNA, 19 nt, Artificial Sequence
  Description of Artificial Sequence: Synthetic oligonucleotide
uuggucuaaaauuuuagua

SEQ ID NO: 1280327 - RNA, 19 nt, Artificial Sequence
  Description of Artificial Sequence: Synthetic oligonucleotide
  modified_base (9)..(9): a, c, u, g, unknown or other
uaguaaagngcggcgaucg

SEQ ID NO: 1280328 - RNA, 19 nt, Artificial Sequence
  Description of Artificial Sequence: Synthetic oligonucleotide
uuuaccaguucacggguag

SEQ ID NO: 1280329 - RNA, 19 nt, Artificial Sequence
  Description of Artificial Sequence: Synthetic oligonucleotide
aacuucguacauuacagua

SEQ ID NO: 1280330 - RNA, 19 nt, Artificial Sequence
  Description of Artificial Sequence: Synthetic oligonucleotide
  modified_base (5)..(5): a, c, u, g, unknown or other
aaagnucuccauccacguc

SEQ ID NO: 1280331 - RNA, 19 nt, Artificial Sequence
  Description of Artificial Sequence: Synthetic oligonucleotide
ucacggguagcacagaccu

SEQ ID NO: 1280332 - RNA, 19 nt, Artificial Sequence
  Description of Artificial Sequence: Synthetic oligonucleotide
auuccuacugcauagguuu

SEQ ID NO: 1280333 - RNA, 19 nt, Artificial Sequence
  Description of Artificial Sequence: Synthetic oligonucleotide
aacaagacuucuaagugcu

SEQ ID NO: 1280334 - RNA, 19 nt, Artificial Sequence
  Description of Artificial Sequence: Synthetic oligonucleotide
cuucguacauuacaguagc

SEQ ID NO: 1280335 - RNA, 19 nt, Artificial Sequence
  Description of Artificial Sequence: Synthetic oligonucleotide
acacauugugcgcagcucg

SEQ ID NO: 1280336 - RNA, 19 nt, Artificial Sequence
  Description of Artificial Sequence: Synthetic oligonucleotide
uggauuugacagcaacgcg

SEQ ID NO: 1280337 - RNA, 19 nt, Artificial Sequence
  Description of Artificial Sequence: Synthetic oligonucleotide
caucccgugaaauaugcag

SEQ ID NO: 1280338 - RNA, 19 nt, Artificial Sequence
  Description of Artificial Sequence: Synthetic oligonucleotide
auuggucuaaaauuuuagu

SEQ ID NO: 1280339 - RNA, 19 nt, Artificial Sequence
  Description of Artificial Sequence: Synthetic oligonucleotide
uccuaugauacacaucuuc

SEQ ID NO: 1280340 - RNA, 19 nt, Artificial Sequence
  Description of Artificial Sequence: Synthetic oligonucleotide
acguauuccagguuagaag

SEQ ID NO: 1280341 - RNA, 19 nt, Artificial Sequence
  Description of Artificial Sequence: Synthetic oligonucleotide
auaccgcucaaagagacgg

SEQ ID NO: 1280342 - RNA, 19 nt, Artificial Sequence
  Description of Artificial Sequence: Synthetic oligonucleotide
cuuuugagggaucuccgcg

SEQ ID NO: 1280343 - RNA, 19 nt, Artificial Sequence
  Description of Artificial Sequence: Synthetic oligonucleotide
  modified_base (17)..(17): a, c, u, g, unknown or other
aaugaugguccgaaagnuc

SEQ ID NO: 1280344 - RNA, 19 nt, Artificial Sequence
  Description of Artificial Sequence: Synthetic oligonucleotide
  modified_base (6)..(6): a, c, u, g, unknown or other
uaaagngcggcgaucgcca

SEQ ID NO: 1280345 - RNA, 19 nt, Artificial Sequence
  Description of Artificial Sequence: Synthetic oligonucleotide
uuugugacauuucccgggc

SEQ ID NO: 1280346 - RNA, 19 nt, Artificial Sequence
  Description of Artificial Sequence: Synthetic oligonucleotide
ugaacugcgaggugacagg

SEQ ID NO: 1280347 - RNA, 19 nt, Artificial Sequence
  Description of Artificial Sequence: Synthetic oligonucleotide
aagugcuuuggauuugaca

SEQ ID NO: 1280348 - RNA, 19 nt, Artificial Sequence
  Description of Artificial Sequence: Synthetic oligonucleotide
uuuccgucuguauuggucu

SEQ ID NO: 1280349 - RNA, 19 nt, Artificial Sequence
  Description of Artificial Sequence: Synthetic oligonucleotide
auuuuaguaguaccugcug

SEQ ID NO: 1280350 - RNA, 19 nt, Artificial Sequence
  Description of Artificial Sequence: Synthetic oligonucleotide
  modified_base (17)..(17): a, c, u, g, unknown or other
caggguuguaguaaagngc

SEQ ID NO: 1280351 - RNA, 19 nt, Artificial Sequence
  Description of Artificial Sequence: Synthetic oligonucleotide
aacgcguuggugucuacug

SEQ ID NO: 1280352 - RNA, 19 nt, Artificial Sequence
  Description of Artificial Sequence: Synthetic oligonucleotide
auaauuauggggcuauaua

SEQ ID NO: 1280353 - RNA, 19 nt, Artificial Sequence
  Description of Artificial Sequence: Synthetic oligonucleotide
ucuuacacuuccaccacac

SEQ ID NO: 1280354 - RNA, 19 nt, Artificial Sequence
  Description of Artificial Sequence: Synthetic oligonucleotide
aauacguauuccagguuag

SEQ ID NO: 1280355 - RNA, 19 nt, Artificial Sequence
  Description of Artificial Sequence: Synthetic oligonucleotide
ucgaaguauucuuuuguga

SEQ ID NO: 1280356 - RNA, 19 nt, Artificial Sequence
  Description of Artificial Sequence: Synthetic oligonucleotide
cuuuugugacauuucccgg

SEQ ID NO: 1280357 - RNA, 19 nt, Artificial Sequence
  Description of Artificial Sequence: Synthetic oligonucleotide
aaacuucguacauuacagu

SEQ ID NO: 1280358 - RNA, 19 nt, Artificial Sequence
  Description of Artificial Sequence: Synthetic oligonucleotide
uguuauccgcauaaaucca

SEQ ID NO: 1280359 - RNA, 19 nt, Artificial Sequence
  Description of Artificial Sequence: Synthetic oligonucleotide
ugacugcauagcuugagca

SEQ ID NO: 1280360 - RNA, 19 nt, Artificial Sequence
  Description of Artificial Sequence: Synthetic oligonucleotide
uaacucuaaaccccucagc

SEQ ID NO: 1280361 - RNA, 19 nt, Artificial Sequence
  Description of Artificial Sequence: Synthetic oligonucleotide
  modified_base (4)..(4): a, c, u, g, unknown or other
aagngcggcgaucgccacc

SEQ ID NO: 1280362 - RNA, 19 nt, Artificial Sequence
  Description of Artificial Sequence: Synthetic oligonucleotide
uccgcauaaauccacugau

SEQ ID NO: 1280363 - RNA, 19 nt, Artificial Sequence
  Description of Artificial Sequence: Synthetic oligonucleotide
  modified_base (13)..(13): a, c, u, g, unknown or other
guuguaguaaagngcggcg

SEQ ID NO: 1280364 - RNA, 19 nt, Artificial Sequence
  Description of Artificial Sequence: Synthetic oligonucleotide
auaauucauguacaacaga

SEQ ID NO: 1280365 - RNA, 19 nt, Artificial Sequence
  Description of Artificial Sequence: Synthetic oligonucleotide
  modified_base (16)..(16): a, c, u, g, unknown or other
augaugguccgaaagnucu

SEQ ID NO: 1280366 - RNA, 19 nt, Artificial Sequence
  Description of Artificial Sequence: Synthetic oligonucleotide
cuggauuccuacugcauag

SEQ ID NO: 1280367 - RNA, 19 nt, Artificial Sequence
  Description of Artificial Sequence: Synthetic oligonucleotide
  modified_base (14)..(14): a, c, u, g, unknown or other
gaugguccgaaagnucucc

SEQ ID NO: 1280368 - RNA, 19 nt, Artificial Sequence
  Description of Artificial Sequence: Synthetic oligonucleotide
aaccugagacgcaugcgcc

SEQ ID NO: 1280369 - RNA, 19 nt, Artificial Sequence
  Description of Artificial Sequence: Synthetic oligonucleotide
  modified_base (8)..(8): a, c, u, g, unknown or other
aguaaagngcggcgaucgc

SEQ ID NO: 1280370 - RNA, 19 nt, Artificial Sequence
  Description of Artificial Sequence: Synthetic oligonucleotide
auugugcgcagcucgcugg

SEQ ID NO: 1280371 - RNA, 19 nt, Artificial Sequence
  Description of Artificial Sequence: Synthetic oligonucleotide
gacgcuuuguccuuucuga

SEQ ID NO: 1280372 - RNA, 19 nt, Artificial Sequence
  Description of Artificial Sequence: Synthetic oligonucleotide
guaccuaacucuaaacccc

SEQ ID NO: 1280373 - RNA, 19 nt, Artificial Sequence
  Description of Artificial Sequence: Synthetic oligonucleotide
uuaugaacugcgaggugac

SEQ ID NO: 1280374 - RNA, 19 nt, Artificial Sequence
  Description of Artificial Sequence: Synthetic oligonucleotide
acagcaacgcguugguguc

SEQ ID NO: 1280375 - RNA, 19 nt, Artificial Sequence
  Description of Artificial Sequence: Synthetic oligonucleotide
caauuugaagagucuccgg

SEQ ID NO: 1280376 - RNA, 19 nt, Artificial Sequence
  Description of Artificial Sequence: Synthetic oligonucleotide
augcucaguccuaugauac

SEQ ID NO: 1280377 - RNA, 19 nt, Artificial Sequence
  Description of Artificial Sequence: Synthetic oligonucleotide
aaugugcagagcccauucu

SEQ ID NO: 1280378 - RNA, 19 nt, Artificial Sequence
  Description of Artificial Sequence: Synthetic oligonucleotide
  modified_base (7)..(7): a, c, u, g, unknown or other
guaaagngcggcgaucgcc

SEQ ID NO: 1280379 - RNA, 19 nt, Artificial Sequence
  Description of Artificial Sequence: Synthetic oligonucleotide
uuauccgcauaaauccacu

SEQ ID NO: 1280380 - RNA, 19 nt, Artificial Sequence
  Description of Artificial Sequence: Synthetic oligonucleotide
ccuaugauacacaucuucc

SEQ ID NO: 1280381 - RNA, 19 nt, Artificial Sequence
  Description of Artificial Sequence: Synthetic oligonucleotide
  modified_base (5)..(5): a, c, u, g, unknown or other
aaagngcggcgaucgccac

SEQ ID NO: 1280382 - RNA, 19 nt, Artificial Sequence
  Description of Artificial Sequence: Synthetic oligonucleotide
acuucguacauuacaguag

SEQ ID NO: 1280383 - RNA, 19 nt, Artificial Sequence
  Description of Artificial Sequence: Synthetic oligonucleotide
uguccgucgaugcucugcc

SEQ ID NO: 1280384 - RNA, 19 nt, Artificial Sequence
  Description of Artificial Sequence: Synthetic oligonucleotide
uccgcgguuuaccaguuca

SEQ ID NO: 1280385 - RNA, 19 nt, Artificial Sequence
  Description of Artificial Sequence: Synthetic oligonucleotide
ucaagguccaguggggugc

SEQ ID NO: 1280386 - RNA, 19 nt, Artificial Sequence
  Description of Artificial Sequence: Synthetic oligonucleotide
aaaauacguauuccagguu

SEQ ID NO: 1280387 - RNA, 19 nt, Artificial Sequence
  Description of Artificial Sequence: Synthetic oligonucleotide
aauuauggggcuauauauu

SEQ ID NO: 1280388 - RNA, 19 nt, Artificial Sequence
  Description of Artificial Sequence: Synthetic oligonucleotide
cacauagugaacaagacuu

SEQ ID NO: 1280389 - RNA, 19 nt, Artificial Sequence
  Description of Artificial Sequence: Synthetic oligonucleotide
ugaucaauuccccuuccuu

SEQ ID NO: 1280390 - RNA, 19 nt, Artificial Sequence
  Description of Artificial Sequence: Synthetic oligonucleotide
ucugaucaaugauucugcu

SEQ ID NO: 1280391 - RNA, 19 nt, Artificial Sequence
  Description of Artificial Sequence: Synthetic oligonucleotide
ugaugccgaugacacagcc

SEQ ID NO: 1280392 - RNA, 19 nt, Artificial Sequence
  Description of Artificial Sequence: Synthetic oligonucleotide
uucacggguagcacagacc

SEQ ID NO: 1280393 - RNA, 19 nt, Artificial Sequence
  Description of Artificial Sequence: Synthetic oligonucleotide
uaccuaacucuaaaccccu

SEQ ID NO: 1280394 - RNA, 19 nt, Artificial Sequence
  Description of Artificial Sequence: Synthetic oligonucleotide
uauggggcuauauauucuu

SEQ ID NO: 1280395 - RNA, 19 nt, Artificial Sequence
  Description of Artificial Sequence: Synthetic oligonucleotide
accgcucaaagagacgggc

SEQ ID NO: 1280396 - RNA, 19 nt, Artificial Sequence
  Description of Artificial Sequence: Synthetic oligonucleotide
uauccgcauaaauccacug

SEQ ID NO: 1280397 - RNA, 19 nt, Artificial Sequence
  Description of Artificial Sequence: Synthetic oligonucleotide
  modified_base (9)..(9): a, c, u, g, unknown or other
uccgaaagnucuccaucca

SEQ ID NO: 1280398 - RNA, 19 nt, Artificial Sequence
  Description of Artificial Sequence: Synthetic oligonucleotide
uccauaccgcucaaagaga

SEQ ID NO: 1280399 - RNA, 19 nt, Artificial Sequence
  Description of Artificial Sequence: Synthetic oligonucleotide
ugauggucggugaacgguc

SEQ ID NO: 1280400 - RNA, 19 nt, Artificial Sequence
  Description of Artificial Sequence: Synthetic oligonucleotide
  modified_base (12)..(12): a, c, u, g, unknown or other
uuguaguaaagngcggcga

SEQ ID NO: 1280401 - RNA, 19 nt, Artificial Sequence
  Description of Artificial Sequence: Synthetic oligonucleotide
aagacacauugugcgcagc

SEQ ID NO: 1280402 - RNA, 19 nt, Artificial Sequence
  Description of Artificial Sequence: Synthetic oligonucleotide
  modified_base (7)..(7): a, c, u, g, unknown or other
cgaaagnucuccauccacg

SEQ ID NO: 1280403 - RNA, 19 nt, Artificial Sequence
  Description of Artificial Sequence: Synthetic oligonucleotide
ugccauuguccgucgaugc

SEQ ID NO: 1280404 - RNA, 19 nt, Artificial Sequence
  Description of Artificial Sequence: Synthetic oligonucleotide
gucaaucucuccaagacaa

SEQ ID NO: 1280405 - RNA, 19 nt, Artificial Sequence
  Description of Artificial Sequence: Synthetic oligonucleotide
gguuagaaggaacaaggga

SEQ ID NO: 1280406 - RNA, 19 nt, Artificial Sequence
  Description of Artificial Sequence: Synthetic oligonucleotide
uggggcuauauauucuuuc

SEQ ID NO: 1280407 - RNA, 19 nt, Artificial Sequence
  Description of Artificial Sequence: Synthetic oligonucleotide
cguaccuaacucuaaaccc

SEQ ID NO: 1280408 - RNA, 19 nt, Artificial Sequence
  Description of Artificial Sequence: Synthetic oligonucleotide
gucgugguguccaaggaag

SEQ ID NO: 1280409 - RNA, 19 nt, Artificial Sequence
  Description of Artificial Sequence: Synthetic oligonucleotide
acugauucugcauggcaaa

SEQ ID NO: 1280410 - RNA, 19 nt, Artificial Sequence
  Description of Artificial Sequence: Synthetic oligonucleotide
gggcuauauauucuuuccg

SEQ ID NO: 1280411 - RNA, 19 nt, Artificial Sequence
  Description of Artificial Sequence: Synthetic oligonucleotide
ucggugaacggucugccau

SEQ ID NO: 1280412 - RNA, 19 nt, Artificial Sequence
  Description of Artificial Sequence: Synthetic oligonucleotide
acauagugaacaagacuuc

SEQ ID NO: 1280413 - RNA, 19 nt, Artificial Sequence
  Description of Artificial Sequence: Synthetic oligonucleotide
cauaccgcucaaagagacg

SEQ ID NO: 1280414 - RNA, 19 nt, Artificial Sequence
  Description of Artificial Sequence: Synthetic oligonucleotide
caagggaagggcgagcgag

SEQ ID NO: 1280415 - RNA, 19 nt, Artificial Sequence
  Description of Artificial Sequence: Synthetic oligonucleotide
acucuaaaccccucagcgu

SEQ ID NO: 1280416 - RNA, 19 nt, Artificial Sequence
  Description of Artificial Sequence: Synthetic oligonucleotide
aguugaacaaacagcggga

SEQ ID NO: 1280417 - RNA, 19 nt, Artificial Sequence
  Description of Artificial Sequence: Synthetic oligonucleotide
agggcgagcgaguccacgg

SEQ ID NO: 1280418 - RNA, 19 nt, Artificial Sequence
  Description of Artificial Sequence: Synthetic oligonucleotide
ggggcuauauauucuuucc

SEQ ID NO: 1280419 - RNA, 19 nt, Artificial Sequence
  Description of Artificial Sequence: Synthetic oligonucleotide
uacguauuccagguuagaa

SEQ ID NO: 1280420 - RNA, 19 nt, Artificial Sequence
  Description of Artificial Sequence: Synthetic oligonucleotide
aucuccgcgguuuaccagu

SEQ ID NO: 1280421 - RNA, 19 nt, Artificial Sequence
  Description of Artificial Sequence: Synthetic oligonucleotide
agacacauugugcgcagcu

SEQ ID NO: 1280422 - RNA, 19 nt, Artificial Sequence
  Description of Artificial Sequence: Synthetic oligonucleotide
agacgcuuuguccuuucug

SEQ ID NO: 1280423 - RNA, 19 nt, Artificial Sequence
  Description of Artificial Sequence: Synthetic oligonucleotide
  modified_base (6)..(6): a, c, u, g, unknown or other
gaaagnucuccauccacgu

SEQ ID NO: 1280424 - RNA, 19 nt, Artificial Sequence
  Description of Artificial Sequence: Synthetic oligonucleotide
gaugcucaguccuaugaua

SEQ ID NO: 1280425 - RNA, 19 nt, Artificial Sequence
  Description of Artificial Sequence: Synthetic oligonucleotide
aauaugcagcaacggugau

SEQ ID NO: 1280426 - RNA, 19 nt, Artificial Sequence
  Description of Artificial Sequence: Synthetic oligonucleotide
uaccgcucaaagagacggg

SEQ ID NO: 1280427 - RNA, 19 nt, Artificial Sequence
  Description of Artificial Sequence: Synthetic oligonucleotide
gcgguuuaccaguucacgg

SEQ ID NO: 1280428 - RNA, 19 nt, Artificial Sequence
  Description of Artificial Sequence: Synthetic oligonucleotide
agcuugagcaguaacacuu

SEQ ID NO: 1280429 - RNA, 19 nt, Artificial Sequence
  Description of Artificial Sequence: Synthetic oligonucleotide
gaucuccgcgguuuaccag

SEQ ID NO: 1280430 - RNA, 19 nt, Artificial Sequence
  Description of Artificial Sequence: Synthetic oligonucleotide
ucugccauuguccgucgau

SEQ ID NO: 1280431 - RNA, 19 nt, Artificial Sequence
  Description of Artificial Sequence: Synthetic oligonucleotide
ucuaaaccccucagcguuc

SEQ ID NO: 1280432 - RNA, 19 nt, Artificial Sequence
  Description of Artificial Sequence: Synthetic oligonucleotide
uucguacauuacaguagcu

SEQ ID NO: 1280433 - RNA, 19 nt, Artificial Sequence
  Description of Artificial Sequence: Synthetic oligonucleotide
guuuaugaacugcgaggug

SEQ ID NO: 1280434 - RNA, 19 nt, Artificial Sequence
  Description of Artificial Sequence: Synthetic oligonucleotide
gucuguauuggucuaaaau

SEQ ID NO: 1280435 - RNA, 19 nt, Artificial Sequence
  Description of Artificial Sequence: Synthetic oligonucleotide
gcuauauauucuuuccguc

SEQ ID NO: 1280436 - RNA, 19 nt, Artificial Sequence
  Description of Artificial Sequence: Synthetic oligonucleotide
ggcggcgaagcacucagcg

SEQ ID NO: 1280437 - RNA, 19 nt, Artificial Sequence
  Description of Artificial Sequence: Synthetic oligonucleotide
cuucccucucucucggccc

SEQ ID NO: 1280438 - RNA, 19 nt, Artificial Sequence
  Description of Artificial Sequence: Synthetic oligonucleotide
ccguaccuaacucuaaacc

SEQ ID NO: 1280439 - RNA, 19 nt, Artificial Sequence
  Description of Artificial Sequence: Synthetic oligonucleotide
  modified_base (10)..(10): a, c, u, g, unknown or other
guaguaaagngcggcgauc

SEQ ID NO: 1280440 - RNA, 19 nt, Artificial Sequence
  Description of Artificial Sequence: Synthetic oligonucleotide
guucacggguagcacagac

SEQ ID NO: 1280441 - RNA, 19 nt, Artificial Sequence
  Description of Artificial Sequence: Synthetic oligonucleotide
ugcucaguccuaugauaca

SEQ ID NO: 1280442 - RNA, 19 nt, Artificial Sequence
  Description of Artificial Sequence: Synthetic oligonucleotide
cuaaaccccucagcguucg

SEQ ID NO: 1280443 - RNA, 19 nt, Artificial Sequence
  Description of Artificial Sequence: Synthetic oligonucleotide
uuaguaguaccugcuggau

SEQ ID NO: 1280444 - RNA, 19 nt, Artificial Sequence
  Description of Artificial Sequence: Synthetic oligonucleotide
ucgcaucccgugaaauaug

SEQ ID NO: 1280445 - RNA, 19 nt, Artificial Sequence
  Description of Artificial Sequence: Synthetic oligonucleotide
agagcccauucuuacacuu

SEQ ID NO: 1280446 - RNA, 19 nt, Artificial Sequence
  Description of Artificial Sequence: Synthetic oligonucleotide
ugcgccguaccuaacucua

SEQ ID NO: 1280447 - RNA, 19 nt, Artificial Sequence
  Description of Artificial Sequence: Synthetic oligonucleotide
acaaacagcgggauacacu

SEQ ID NO: 1280448 - RNA, 19 nt, Artificial Sequence
  Description of Artificial Sequence: Synthetic oligonucleotide
gucaagguccaguggggug

SEQ ID NO: 1280449 - RNA, 19 nt, Artificial Sequence
  Description of Artificial Sequence: Synthetic oligonucleotide
gaccccacgggucaaucuc

SEQ ID NO: 1280450 - RNA, 19 nt, Artificial Sequence
  Description of Artificial Sequence: Synthetic oligonucleotide
agacgcaugcgccguaccu

SEQ ID NO: 1280451 - RNA, 19 nt, Artificial Sequence
  Description of Artificial Sequence: Synthetic oligonucleotide
guagcacagaccugcuuca

SEQ ID NO: 1280452 - RNA, 19 nt, Artificial Sequence
  Description of Artificial Sequence: Synthetic oligonucleotide
uuguccgucgaugcucugc

SEQ ID NO: 1280453 - RNA, 19 nt, Artificial Sequence
  Description of Artificial Sequence: Synthetic oligonucleotide
ucucgcaucccgugaaaua

SEQ ID NO: 1280454 - RNA, 19 nt, Artificial Sequence
  Description of Artificial Sequence: Synthetic oligonucleotide
ugcuggauuccuacugcau

SEQ ID NO: 1280455 - RNA, 19 nt, Artificial Sequence
  Description of Artificial Sequence: Synthetic oligonucleotide
cauugugcgcagcucgcug

SEQ ID NO: 1280456 - RNA, 19 nt, Artificial Sequence
  Description of Artificial Sequence: Synthetic oligonucleotide
cucgagggcugucuccucc

SEQ ID NO: 1280457 - RNA, 19 nt, Artificial Sequence
  Description of Artificial Sequence: Synthetic oligonucleotide
ucucggcccucucgcaucc

SEQ ID NO: 1280458 - RNA, 19 nt, Artificial Sequence
  Description of Artificial Sequence: Synthetic oligonucleotide
  modified_base (3)..(3): a, c, u, g, unknown or other
agngcggcgaucgccaccu

SEQ ID NO: 1280459 - RNA, 19 nt, Artificial Sequence
  Description of Artificial Sequence: Synthetic oligonucleotide
aacugcgaggugacagguc

SEQ ID NO: 1280460 - RNA, 19 nt, Artificial Sequence
  Description of Artificial Sequence: Synthetic oligonucleotide
ucgugguguccaaggaagu

SEQ ID NO: 1280461 - RNA, 19 nt, Artificial Sequence
  Description of Artificial Sequence: Synthetic oligonucleotide
ugucaagguccaguggggu

SEQ ID NO: 1280462 - RNA, 19 nt, Artificial Sequence
  Description of Artificial Sequence: Synthetic oligonucleotide
ggcacuguuauccgcauaa

SEQ ID NO: 1280463 - RNA, 19 nt, Artificial Sequence
  Description of Artificial Sequence: Synthetic oligonucleotide
gaucgccaccugaagacac

SEQ ID NO: 1280464 - RNA, 19 nt, Artificial Sequence
  Description of Artificial Sequence: Synthetic oligonucleotide
ucacauaauuauggggcua

SEQ ID NO: 1280465 - RNA, 19 nt, Artificial Sequence
  Description of Artificial Sequence: Synthetic oligonucleotide
ucguccuuccgagcagacg

SEQ ID NO: 1280466 - RNA, 19 nt, Artificial Sequence
  Description of Artificial Sequence: Synthetic oligonucleotide
guauuggucuaaaauuuua

SEQ ID NO: 1280467 - RNA, 19 nt, Artificial Sequence
  Description of Artificial Sequence: Synthetic oligonucleotide
caacggugaugauggucgg

SEQ ID NO: 1280468 - RNA, 19 nt, Artificial Sequence
  Description of Artificial Sequence: Synthetic oligonucleotide
cccgauucugcacagucag

SEQ ID NO: 1280469 - RNA, 19 nt, Artificial Sequence
  Description of Artificial Sequence: Synthetic oligonucleotide
cucagcguucguccuuccg

SEQ ID NO: 1280470 - RNA, 19 nt, Artificial Sequence
  Description of Artificial Sequence: Synthetic oligonucleotide
cguccuuccgagcagacgc

SEQ ID NO: 1280471 - RNA, 19 nt, Artificial Sequence
  Description of Artificial Sequence: Synthetic oligonucleotide
ccauaccgcucaaagagac

SEQ ID NO: 1280472 - RNA, 19 nt, Artificial Sequence
  Description of Artificial Sequence: Synthetic oligonucleotide
uugugacauuucccgggcu

SEQ ID NO: 1280473 - RNA, 19 nt, Artificial Sequence
  Description of Artificial Sequence: Synthetic oligonucleotide
gucacauaauuauggggcu

SEQ ID NO: 1280474 - RNA, 19 nt, Artificial Sequence
  Description of Artificial Sequence: Synthetic oligonucleotide
caugcgccguaccuaacuc

SEQ ID NO: 1280475 - RNA, 19 nt, Artificial Sequence
  Description of Artificial Sequence: Synthetic oligonucleotide
guaaucggugucauucauc

SEQ ID NO: 1280476 - RNA, 19 nt, Artificial Sequence
  Description of Artificial Sequence: Synthetic oligonucleotide
ccgugaaauaugcagcaac

SEQ ID NO: 1280477 - RNA, 19 nt, Artificial Sequence
  Description of Artificial Sequence: Synthetic oligonucleotide
augcgccguaccuaacucu

SEQ ID NO: 1280478 - RNA, 19 nt, Artificial Sequence
  Description of Artificial Sequence: Synthetic oligonucleotide
ugaccccacgggucaaucu

SEQ ID NO: 1280479 - RNA, 19 nt, Artificial Sequence
  Description of Artificial Sequence: Synthetic oligonucleotide
ugcgaggugacagguccug

SEQ ID NO: 1280480 - RNA, 19 nt, Artificial Sequence
  Description of Artificial Sequence: Synthetic oligonucleotide
cacuguguacaccuccuga

SEQ ID NO: 1280481 - RNA, 19 nt, Artificial Sequence
  Description of Artificial Sequence: Synthetic oligonucleotide
gacacauugugcgcagcuc

SEQ ID NO: 1280482 - RNA, 19 nt, Artificial Sequence
  Description of Artificial Sequence: Synthetic oligonucleotide
gcgaucgccaccugaagac

SEQ ID NO: 1280483 - RNA, 19 nt, Artificial Sequence
  Description of Artificial Sequence: Synthetic oligonucleotide
gguuuaugaacugcgaggu

SEQ ID NO: 1280484 - RNA, 19 nt, Artificial Sequence
  Description of Artificial Sequence: Synthetic oligonucleotide
cagcucgcuggucuugacc

SEQ ID NO: 1280485 - RNA, 19 nt, Artificial Sequence
  Description of Artificial Sequence: Synthetic oligonucleotide
cuccggagggaccauccug

SEQ ID NO: 1280486 - RNA, 19 nt, Artificial Sequence
  Description of Artificial Sequence: Synthetic oligonucleotide
ucuccggagggaccauccu

SEQ ID NO: 1280487 - RNA, 19 nt, Artificial Sequence
  Description of Artificial Sequence: Synthetic oligonucleotide
gagacgcaugcgccguacc

SEQ ID NO: 1280488 - RNA, 19 nt, Artificial Sequence
  Description of Artificial Sequence: Synthetic oligonucleotide
ggauuugacagcaacgcgu

SEQ ID NO: 1280489 - RNA, 19 nt, Artificial Sequence
  Description of Artificial Sequence: Synthetic oligonucleotide
uucguccuuccgagcagac

SEQ ID NO: 1280490 - RNA, 19 nt, Artificial Sequence
  Description of Artificial Sequence: Synthetic oligonucleotide
acgcuuuguccuuucugau

SEQ ID NO: 1280491 - RNA, 19 nt, Artificial Sequence
  Description of Artificial Sequence: Synthetic oligonucleotide
auacguauuccagguuaga

SEQ ID NO: 1280492 - RNA, 19 nt, Artificial Sequence
  Description of Artificial Sequence: Synthetic oligonucleotide
acgcguuggugucuacugu

SEQ ID NO: 1280493 - RNA, 19 nt, Artificial Sequence
  Description of Artificial Sequence: Synthetic oligonucleotide
uccuacugcauagguuuuc

SEQ ID NO: 1280494 - RNA, 19 nt, Artificial Sequence
  Description of Artificial Sequence: Synthetic oligonucleotide
aagggaagggcgagcgagu

SEQ ID NO: 1280495 - RNA, 19 nt, Artificial Sequence
  Description of Artificial Sequence: Synthetic oligonucleotide
agcgggauacacugaucaa

SEQ ID NO: 1280496 - RNA, 19 nt, Artificial Sequence
  Description of Artificial Sequence: Synthetic oligonucleotide
aggaaguaaucggugucau

SEQ ID NO: 1280497 - RNA, 19 nt, Artificial Sequence
  Description of Artificial Sequence: Synthetic oligonucleotide
acgcaugcgccguaccuaa

SEQ ID NO: 1280498 - RNA, 19 nt, Artificial Sequence
  Description of Artificial Sequence: Synthetic oligonucleotide
ugagacgcaugcgccguac

SEQ ID NO: 1280499 - RNA, 19 nt, Artificial Sequence
  Description of Artificial Sequence: Synthetic oligonucleotide
guauuccagguuagaagga

SEQ ID NO: 1280500 - RNA, 19 nt, Artificial Sequence
  Description of Artificial Sequence: Synthetic oligonucleotide
agcccucgagggcugucuc

SEQ ID NO: 1280501 - RNA, 19 nt, Artificial Sequence
  Description of Artificial Sequence: Synthetic oligonucleotide
auggucggugaacggucug

SEQ ID NO: 1280502 - RNA, 19 nt, Artificial Sequence
  Description of Artificial Sequence: Synthetic oligonucleotide
aaacagcgggauacacuga

SEQ ID NO: 1280503 - RNA, 19 nt, Artificial Sequence
  Description of Artificial Sequence: Synthetic oligonucleotide
cucuaaaccccucagcguu

SEQ ID NO: 1280504 - RNA, 19 nt, Artificial Sequence
  Description of Artificial Sequence: Synthetic oligonucleotide
gauuugacagcaacgcguu

SEQ ID NO: 1280505 - RNA, 19 nt, Artificial Sequence
  Description of Artificial Sequence: Synthetic oligonucleotide
gcagcugauaccaggcggc

SEQ ID NO: 1280506 - RNA, 19 nt, Artificial Sequence
  Description of Artificial Sequence: Synthetic oligonucleotide
gcauagcuugagcaguaac

SEQ ID NO: 1280507 - RNA, 19 nt, Artificial Sequence
  Description of Artificial Sequence: Synthetic oligonucleotide
  modified_base (3)..(3): a, c, u, g, unknown or other
agnucuccauccacgucgu

SEQ ID NO: 1280508 - RNA, 19 nt, Artificial Sequence
  Description of Artificial Sequence: Synthetic oligonucleotide
ugcauagcuugagcaguaa

SEQ ID NO: 1280509 - RNA, 19 nt, Artificial Sequence
  Description of Artificial Sequence: Synthetic oligonucleotide
ggaguuggcggcgaagcac

SEQ ID NO: 1280510 - RNA, 19 nt, Artificial Sequence
  Description of Artificial Sequence: Synthetic oligonucleotide
accuaacucuaaaccccuc

SEQ ID NO: 1280511 - RNA, 19 nt, Artificial Sequence
  Description of Artificial Sequence: Synthetic oligonucleotide
gccguaccuaacucuaaac

SEQ ID NO: 1280512 - RNA, 19 nt, Artificial Sequence
  Description of Artificial Sequence: Synthetic oligonucleotide
ggaucuccgcgguuuacca

SEQ ID NO: 1280513 - RNA, 19 nt, Artificial Sequence
  Description of Artificial Sequence: Synthetic oligonucleotide
cauaauuauggggcuauau

SEQ ID NO: 1280514 - RNA, 19 nt, Artificial Sequence
  Description of Artificial Sequence: Synthetic oligonucleotide
uuccgucuguauuggucua

SEQ ID NO: 1280515 - RNA, 19 nt, Artificial Sequence
  Description of Artificial Sequence: Synthetic oligonucleotide
ggcgaucgccaccugaaga

SEQ ID NO: 1280516 - RNA, 19 nt, Artificial Sequence
  Description of Artificial Sequence: Synthetic oligonucleotide
gucgucauggucuggugau

SEQ ID NO: 1280517 - RNA, 19 nt, Artificial Sequence
  Description of Artificial Sequence: Synthetic oligonucleotide
ugauaccaggcggcauccc

SEQ ID NO: 1280518 - RNA, 19 nt, Artificial Sequence
  Description of Artificial Sequence: Synthetic oligonucleotide
ccaggcggcaucccgauuc

SEQ ID NO: 1280519 - RNA, 19 nt, Artificial Sequence
  Description of Artificial Sequence: Synthetic oligonucleotide
cacugcguccacagcagga

SEQ ID NO: 1280520 - RNA, 19 nt, Artificial Sequence
  Description of Artificial Sequence: Synthetic oligonucleotide
uccgucuguauuggucuaa

SEQ ID NO: 1280521 - RNA, 19 nt, Artificial Sequence
  Description of Artificial Sequence: Synthetic oligonucleotide
ccggucgugguguccaagg

SEQ ID NO: 1280522 - RNA, 19 nt, Artificial Sequence
  Description of Artificial Sequence: Synthetic oligonucleotide
  modified_base (8)..(8): a, c, u, g, unknown or other
ccgaaagnucuccauccac

SEQ ID NO: 1280523 - RNA, 19 nt, Artificial Sequence
  Description of Artificial Sequence: Synthetic oligonucleotide
  modified_base (18)..(18): a, c, u, g, unknown or other
caaugaugguccgaaagnu

SEQ ID NO: 1280524 - RNA, 19 nt, Artificial Sequence
  Description of Artificial Sequence: Synthetic oligonucleotide
gcuggauuccuacugcaua

SEQ ID NO: 1280525 - RNA, 19 nt, Artificial Sequence
  Description of Artificial Sequence: Synthetic oligonucleotide
uuccgagcagacgcuuugu

SEQ ID NO: 1280526 - RNA, 19 nt, Artificial Sequence
  Description of Artificial Sequence: Synthetic oligonucleotide
cgcaucccgugaaauaugc

SEQ ID NO: 1280527 - RNA, 19 nt, Artificial Sequence
  Description of Artificial Sequence: Synthetic oligonucleotide
uaccaggcggcaucccgau

SEQ ID NO: 1280528 - RNA, 19 nt, Artificial Sequence
  Description of Artificial Sequence: Synthetic oligonucleotide
gaguuggcggcgaagcacu

SEQ ID NO: 1280529 - RNA, 19 nt, Artificial Sequence
  Description of Artificial Sequence: Synthetic oligonucleotide
uccggucgugguguccaag

SEQ ID NO: 1280530 - RNA, 19 nt, Artificial Sequence
  Description of Artificial Sequence: Synthetic oligonucleotide
cacgggucaaucucuccaa

SEQ ID NO: 1280531 - RNA, 19 nt, Artificial Sequence
  Description of Artificial Sequence: Synthetic oligonucleotide
cauuguccgucgaugcucu

SEQ ID NO: 1280532 - RNA, 19 nt, Artificial Sequence
  Description of Artificial Sequence: Synthetic oligonucleotide
cuugagcaguaacacuugu

SEQ ID NO: 1280533 - RNA, 19 nt, Artificial Sequence
  Description of Artificial Sequence: Synthetic oligonucleotide
ucuccgcgguuuaccaguu

SEQ ID NO: 1280534 - RNA, 19 nt, Artificial Sequence
  Description of Artificial Sequence: Synthetic oligonucleotide
gcguucguccuuccgagca

SEQ ID NO: 1280535 - RNA, 19 nt, Artificial Sequence
  Description of Artificial Sequence: Synthetic oligonucleotide
acggucugccauuguccgu

SEQ ID NO: 1280536 - RNA, 19 nt, Artificial Sequence
  Description of Artificial Sequence: Synthetic oligonucleotide
ggugaacggucugccauug

SEQ ID NO: 1280537 - RNA, 19 nt, Artificial Sequence
  Description of Artificial Sequence: Synthetic oligonucleotide
cacggguagcacagaccug

SEQ ID NO: 1280538 - RNA, 19 nt, Artificial Sequence
  Description of Artificial Sequence: Synthetic oligonucleotide
  modified_base (13)..(13): a, c, u, g, unknown or other
augguccgaaagnucucca

SEQ ID NO: 1280539 - RNA, 19 nt, Artificial Sequence
  Description of Artificial Sequence: Synthetic oligonucleotide
uggcggcgaagcacucagc

SEQ ID NO: 1280540 - RNA, 19 nt, Artificial Sequence
  Description of Artificial Sequence: Synthetic oligonucleotide
ggucgugguguccaaggaa

SEQ ID NO: 1280541 - RNA, 19 nt, Artificial Sequence
  Description of Artificial Sequence: Synthetic oligonucleotide
gacgcaugcgccguaccua

SEQ ID NO: 1280542 - RNA, 19 nt, Artificial Sequence
  Description of Artificial Sequence: Synthetic oligonucleotide
gaacugcgaggugacaggu

SEQ ID NO: 1280543 - RNA, 19 nt, Artificial Sequence
  Description of Artificial Sequence: Synthetic oligonucleotide
cugcauagcuugagcagua

SEQ ID NO: 1280544 - RNA, 19 nt, Artificial Sequence
  Description of Artificial Sequence: Synthetic oligonucleotide
cacauaauuauggggcuau

SEQ ID NO: 1280545 - RNA, 19 nt, Artificial Sequence
  Description of Artificial Sequence: Synthetic oligonucleotide
cucgcaucccgugaaauau

SEQ ID NO: 1280546 - RNA, 19 nt, Artificial Sequence
  Description of Artificial Sequence: Synthetic oligonucleotide
cauuucccgggcuuccaua

SEQ ID NO: 1280547 - RNA, 19 nt, Artificial Sequence
  Description of Artificial Sequence: Synthetic oligonucleotide
gcaucccgauucugcacag

SEQ ID NO: 1280548 - RNA, 19 nt, Artificial Sequence
  Description of Artificial Sequence: Synthetic oligonucleotide
aguuggcggcgaagcacuc

SEQ ID NO: 1280549 - RNA, 19 nt, Artificial Sequence
  Description of Artificial Sequence: Synthetic oligonucleotide
caugucggcuuucucugcu

SEQ ID NO: 1280550 - RNA, 19 nt, Artificial Sequence
  Description of Artificial Sequence: Synthetic oligonucleotide
ggucuugaccccacggguc

SEQ ID NO: 1280551 - RNA, 19 nt, Artificial Sequence
  Description of Artificial Sequence: Synthetic oligonucleotide
uggugucuacugucacaua

SEQ ID NO: 1280552 - RNA, 19 nt, Artificial Sequence
  Description of Artificial Sequence: Synthetic oligonucleotide
cugauucugcauggcaaaa

SEQ ID NO: 1280553 - RNA, 19 nt, Artificial Sequence
  Description of Artificial Sequence: Synthetic oligonucleotide
acggcugccugaugccgau

SEQ ID NO: 1280554 - RNA, 19 nt, Artificial Sequence
  Description of Artificial Sequence: Synthetic oligonucleotide
gauggucggugaacggucu

SEQ ID NO: 1280555 - RNA, 19 nt, Artificial Sequence
  Description of Artificial Sequence: Synthetic oligonucleotide
  modified_base (2)..(2): a, c, u, g, unknown or other
gnucuccauccacgucguc

SEQ ID NO: 1280556 - RNA, 19 nt, Artificial Sequence
  Description of Artificial Sequence: Synthetic oligonucleotide
ucuugaccccacgggucaa

SEQ ID NO: 1280557 - RNA, 19 nt, Artificial Sequence
  Description of Artificial Sequence: Synthetic oligonucleotide
aguucacggguagcacaga

SEQ ID NO: 1280558 - RNA, 19 nt, Artificial Sequence
  Description of Artificial Sequence: Synthetic oligonucleotide
agcaacgcguuggugucua

SEQ ID NO: 1280559 - RNA, 19 nt, Artificial Sequence
  Description of Artificial Sequence: Synthetic oligonucleotide
agcaaugugcagagcccau

SEQ ID NO: 1280560 - RNA, 19 nt, Artificial Sequence
  Description of Artificial Sequence: Synthetic oligonucleotide
cugaucaauuccccuuccu

SEQ ID NO: 1280561 - RNA, 19 nt, Artificial Sequence
  Description of Artificial Sequence: Synthetic oligonucleotide
ccaaggaaguaaucggugu

SEQ ID NO: 1280562 - RNA, 19 nt, Artificial Sequence
  Description of Artificial Sequence: Synthetic oligonucleotide
ccacgggucaaucucucca

SEQ ID NO: 1280563 - RNA, 19 nt, Artificial Sequence
  Description of Artificial Sequence: Synthetic oligonucleotide
cucgcuggucuugacccca

SEQ ID NO: 1280564 - RNA, 19 nt, Artificial Sequence
  Description of Artificial Sequence: Synthetic oligonucleotide
agcugauaccaggcggcau

SEQ ID NO: 1280565 - RNA, 19 nt, Artificial Sequence
  Description of Artificial Sequence: Synthetic oligonucleotide
ucgucauggucuggugauu

SEQ ID NO: 1280566 - RNA, 19 nt, Artificial Sequence
  Description of Artificial Sequence: Synthetic oligonucleotide
gugcgcagcucgcuggucu

SEQ ID NO: 1280567 - RNA, 19 nt, Artificial Sequence
  Description of Artificial Sequence: Synthetic oligonucleotide
ucaucccagucguccucuu

SEQ ID NO: 1280568 - RNA, 19 nt, Artificial Sequence
  Description of Artificial Sequence: Synthetic oligonucleotide
ggaccauccugucaaugau

SEQ ID NO: 1280569 - RNA, 19 nt, Artificial Sequence
  Description of Artificial Sequence: Synthetic oligonucleotide
cuggucggucauccucauc

SEQ ID NO: 1280570 - RNA, 19 nt, Artificial Sequence
  Description of Artificial Sequence: Synthetic oligonucleotide
gcucgcuggucuugacccc

SEQ ID NO: 1280571 - RNA, 19 nt, Artificial Sequence
  Description of Artificial Sequence: Synthetic oligonucleotide
acaagacuucuaagugcuu

SEQ ID NO: 1280572 - RNA, 19 nt, Artificial Sequence
  Description of Artificial Sequence: Synthetic oligonucleotide
uuccggucgugguguccaa

SEQ ID NO: 1280573 - RNA, 19 nt, Artificial Sequence
  Description of Artificial Sequence: Synthetic oligonucleotide
cccacgggucaaucucucc

SEQ ID NO: 1280574 - RNA, 19 nt, Artificial Sequence
  Description of Artificial Sequence: Synthetic oligonucleotide
gcaugcgccguaccuaacu

SEQ ID NO: 1280575 - RNA, 19 nt, Artificial Sequence
  Description of Artificial Sequence: Synthetic oligonucleotide
cagagcccauucuuacacu

SEQ ID NO: 1280576 - RNA, 19 nt, Artificial Sequence
  Description of Artificial Sequence: Synthetic oligonucleotide
cacgucgucauggucuggu

SEQ ID NO: 1280577 - RNA, 19 nt, Artificial Sequence
  Description of Artificial Sequence: Synthetic oligonucleotide
ccgcgguuuaccaguucac

SEQ ID NO: 1280578 - RNA, 19 nt, Artificial Sequence
  Description of Artificial Sequence: Synthetic oligonucleotide
cuccgcgguuuaccaguuc

SEQ ID NO: 1280579 - RNA, 19 nt, Artificial Sequence
  Description of Artificial Sequence: Synthetic oligonucleotide
gcagacgcuuuguccuuuc

SEQ ID NO: 1280580 - RNA, 19 nt, Artificial Sequence
  Description of Artificial Sequence: Synthetic oligonucleotide
cagcugauaccaggcggca

SEQ ID NO: 1280581 - RNA, 19 nt, Artificial Sequence
  Description of Artificial Sequence: Synthetic oligonucleotide
gcgagcgaguccacggcug

SEQ ID NO: 1280582 - RNA, 19 nt, Artificial Sequence
  Description of Artificial Sequence: Synthetic oligonucleotide
guccgucgaugcucugcca

SEQ ID NO: 1280583 - RNA, 19 nt, Artificial Sequence
  Description of Artificial Sequence: Synthetic oligonucleotide
cguucguccuuccgagcag

SEQ ID NO: 1280584 - RNA, 19 nt, Artificial Sequence
  Description of Artificial Sequence: Synthetic oligonucleotide
gagcagacgcuuuguccuu

SEQ ID NO: 1280585 - RNA, 19 nt, Artificial Sequence
  Description of Artificial Sequence: Synthetic oligonucleotide
cgagcgaguccacggcugc

SEQ ID NO: 1280586 - RNA, 19 nt, Artificial Sequence
  Description of Artificial Sequence: Synthetic oligonucleotide
ccaagacaaguugaacaaa

SEQ ID NO: 1280587 - RNA, 19 nt, Artificial Sequence
  Description of Artificial Sequence: Synthetic oligonucleotide
gccauuguccgucgaugcu

SEQ ID NO: 1280588 - RNA, 19 nt, Artificial Sequence
  Description of Artificial Sequence: Synthetic oligonucleotide
caacgcguuggugucuacu

SEQ ID NO: 1280589 - RNA, 19 nt, Artificial Sequence
  Description of Artificial Sequence: Synthetic oligonucleotide
accaggcggcaucccgauu

SEQ ID NO: 1280590 - RNA, 19 nt, Artificial Sequence
  Description of Artificial Sequence: Synthetic oligonucleotide
gcaucccgugaaauaugca

SEQ ID NO: 1280591 - RNA, 19 nt, Artificial Sequence
  Description of Artificial Sequence: Synthetic oligonucleotide
cggugucauucauccacug

SEQ ID NO: 1280592 - RNA, 19 nt, Artificial Sequence
  Description of Artificial Sequence: Synthetic oligonucleotide
gucggcuuucucugcuuuu

SEQ ID NO: 1280593 - RNA, 19 nt, Artificial Sequence
  Description of Artificial Sequence: Synthetic oligonucleotide
  modified_base (2)..(2): a, c, u, g, unknown or other
gngcggcgaucgccaccug

SEQ ID NO: 1280594 - RNA, 19 nt, Artificial Sequence
  Description of Artificial Sequence: Synthetic oligonucleotide
cgucgucauggucugguga

SEQ ID NO: 1280595 - RNA, 19 nt, Artificial Sequence
  Description of Artificial Sequence: Synthetic oligonucleotide
gcagcucgcuggucuugac

SEQ ID NO: 1280596 - RNA, 19 nt, Artificial Sequence
  Description of Artificial Sequence: Synthetic oligonucleotide
gcggcgaucgccaccugaa

SEQ ID NO: 1280597 - RNA, 19 nt, Artificial Sequence
  Description of Artificial Sequence: Synthetic oligonucleotide
cagacgcuuuguccuuucu

SEQ ID NO: 1280598 - RNA, 19 nt, Artificial Sequence
  Description of Artificial Sequence: Synthetic oligonucleotide
cgucgaugcucugccacug

SEQ ID NO: 1280599 - RNA, 19 nt, Artificial Sequence
  Description of Artificial Sequence: Synthetic oligonucleotide
cugagacgcaugcgccgua

SEQ ID NO: 1280600 - RNA, 19 nt, Artificial Sequence
  Description of Artificial Sequence: Synthetic oligonucleotide
gcguccacagcaggagguc

SEQ ID NO: 1280601 - RNA, 19 nt, Artificial Sequence
  Description of Artificial Sequence: Synthetic oligonucleotide
cucggcccucucgcauccc

SEQ ID NO: 1280602 - RNA, 19 nt, Artificial Sequence
  Description of Artificial Sequence: Synthetic oligonucleotide
ccucagcguucguccuucc

SEQ ID NO: 1280603 - RNA, 19 nt, Artificial Sequence
  Description of Artificial Sequence: Synthetic oligonucleotide
gcaacgcguuggugucuac

SEQ ID NO: 1280604 - RNA, 19 nt, Artificial Sequence
  Description of Artificial Sequence: Synthetic oligonucleotide
guccuuccgagcagacgcu

SEQ ID NO: 1280605 - RNA, 19 nt, Artificial Sequence
  Description of Artificial Sequence: Synthetic oligonucleotide
gcggcgaagcacucagcgu

SEQ ID NO: 1280606 - RNA, 19 nt, Artificial Sequence
  Description of Artificial Sequence: Synthetic oligonucleotide
caagguccaguggggugcu

SEQ ID NO: 1280607 - RNA, 19 nt, Artificial Sequence
  Description of Artificial Sequence: Synthetic oligonucleotide
guccuaugauacacaucuu

SEQ ID NO: 1280608 - RNA, 19 nt, Artificial Sequence
  Description of Artificial Sequence: Synthetic oligonucleotide
cggcgaucgccaccugaag

SEQ ID NO: 1280609 - RNA, 19 nt, Artificial Sequence
  Description of Artificial Sequence: Synthetic oligonucleotide
caucccgauucugcacagu

SEQ ID NO: 1280610 - RNA, 19 nt, Artificial Sequence
  Description of Artificial Sequence: Synthetic oligonucleotide
cgccguaccuaacucuaaa

SEQ ID NO: 1280611 - RNA, 19 nt, Artificial Sequence
  Description of Artificial Sequence: Synthetic oligonucleotide
cuugaccccacgggucaau

SEQ ID NO: 1280612 - RNA, 19 nt, Artificial Sequence
  Description of Artificial Sequence: Synthetic oligonucleotide
ccgcauaaauccacugauu

SEQ ID NO: 1280613 - RNA, 19 nt, Artificial Sequence
  Description of Artificial Sequence: Synthetic oligonucleotide
gcaaugugcagagcccauu

SEQ ID NO: 1280614 - RNA, 19 nt, Artificial Sequence
  Description of Artificial Sequence: Synthetic oligonucleotide
ccgucuguauuggucuaaa

SEQ ID NO: 1280615 - RNA, 19 nt, Artificial Sequence
  Description of Artificial Sequence: Synthetic oligonucleotide
cggagggaccauccuguca

SEQ ID NO: 1280616 - RNA, 19 nt, Artificial Sequence
  Description of Artificial Sequence: Synthetic oligonucleotide
ccacgucgucauggucugg

SEQ ID NO: 1280617 - RNA, 19 nt, Artificial Sequence
  Description of Artificial Sequence: Synthetic oligonucleotide
caguaccuuccugcacaua

SEQ ID NO: 1280618 - RNA, 19 nt, Artificial Sequence
  Description of Artificial Sequence: Synthetic oligonucleotide
cggucgugguguccaagga

SEQ ID NO: 1280619 - RNA, 19 nt, Artificial Sequence
  Description of Artificial Sequence: Synthetic oligonucleotide
cgaucgccaccugaagaca

SEQ ID NO: 1280620 - RNA, 19 nt, Artificial Sequence
  Description of Artificial Sequence: Synthetic oligonucleotide
ccgucgaugcucugccacu

SEQ ID NO: 1280621 - RNA, 19 nt, Artificial Sequence
  Description of Artificial Sequence: Synthetic oligonucleotide
ccugagacgcaugcgccgu

SEQ ID NO: 1280622 - RNA, 19 nt, Artificial Sequence
  Description of Artificial Sequence: Synthetic oligonucleotide
cgcaugcgccguaccuaac

SEQ ID NO: 1280623 - RNA, 19 nt, Artificial Sequence
  Description of Artificial Sequence: Synthetic oligonucleotide
gcgccguaccuaacucuaa

SEQ ID NO: 1280624 - RNA, 19 nt, Artificial Sequence
  Description of Artificial Sequence: Synthetic oligonucleotide
  modified_base (1)..(1): a, c, u, g, unknown or other
ngcggcgaucgccaccuga

SEQ ID NO: 1280625 - RNA, 19 nt, Artificial Sequence
  Description of Artificial Sequence: Synthetic oligonucleotide
auugaaaggguacagaaac

SEQ ID NO: 1280626 - RNA, 19 nt, Artificial Sequence
  Description of Artificial Sequence: Synthetic oligonucleotide
cuaguuaccaacuacagcc

SEQ ID NO: 1280627 - RNA, 19 nt, Artificial Sequence
  Description of Artificial Sequence: Synthetic oligonucleotide
uuuauuugugcccauaacc

SEQ ID NO: 1280628 - RNA, 19 nt, Artificial Sequence
  Description of Artificial Sequence: Synthetic oligonucleotide
aaacacacuuguuuuagac

SEQ ID NO: 1280629 - RNA, 19 nt, Artificial Sequence
  Description of Artificial Sequence: Synthetic oligonucleotide
agugacauggcugagacac

SEQ ID NO: 1280630 - RNA, 19 nt, Artificial Sequence
  Description of Artificial Sequence: Synthetic oligonucleotide
cugacuaaaccaaauaacc

SEQ ID NO: 1280631 - RNA, 19 nt, Artificial Sequence
  Description of Artificial Sequence: Synthetic oligonucleotide
ugggagauuguucagcugg

SEQ ID NO: 1280632 - RNA, 19 nt, Artificial Sequence
  Description of Artificial Sequence: Synthetic oligonucleotide
acacacuuguuuuagacuc

SEQ ID NO: 1280633 - RNA, 19 nt, Artificial Sequence
  Description of Artificial Sequence: Synthetic oligonucleotide
aacugacuaaaccaaauaa

SEQ ID NO: 1280634 - RNA, 19 nt, Artificial Sequence
  Description of Artificial Sequence: Synthetic oligonucleotide
aaaggguacagaaacugac

SEQ ID NO: 1280635 - RNA, 19 nt, Artificial Sequence
  Description of Artificial Sequence: Synthetic oligonucleotide
uguauucucaaauucccug

SEQ ID NO: 1280636 - RNA, 19 nt, Artificial Sequence
  Description of Artificial Sequence: Synthetic oligonucleotide
gaaaccaggguucaggcug

SEQ ID NO: 1280637 - RNA, 19 nt, Artificial Sequence
  Description of Artificial Sequence: Synthetic oligonucleotide
uagucuacgagccagccca

SEQ ID NO: 1280638 - RNA, 19 nt, Artificial Sequence
  Description of Artificial Sequence: Synthetic oligonucleotide
ugacuaaaccaaauaacca

SEQ ID NO: 1280639 - RNA, 19 nt, Artificial Sequence
  Description of Artificial Sequence: Synthetic oligonucleotide
uaaaccaaauaaccauagg

SEQ ID NO: 1280640 - RNA, 19 nt, Artificial Sequence
  Description of Artificial Sequence: Synthetic oligonucleotide
cuaaauggccccuaguuac

SEQ ID NO: 1280641 - RNA, 19 nt, Artificial Sequence
  Description of Artificial Sequence: Synthetic oligonucleotide
acugacuaaaccaaauaac

SEQ ID NO: 1280642 - RNA, 19 nt, Artificial Sequence
  Description of Artificial Sequence: Synthetic oligonucleotide
cuaaaccaaauaaccauag

SEQ ID NO: 1280643 - RNA, 19 nt, Artificial Sequence
  Description of Artificial Sequence: Synthetic oligonucleotide
cucucccaaagcuaaaugg

SEQ ID NO: 1280644 - RNA, 19 nt, Artificial Sequence
  Description of Artificial Sequence: Synthetic oligonucleotide
ugaaaggguacagaaacug

SEQ ID NO: 1280645 - RNA, 19 nt, Artificial Sequence
  Description of Artificial Sequence: Synthetic oligonucleotide
aaagcuaaauggccccuag

SEQ ID NO: 1280646 - RNA, 19 nt, Artificial Sequence
  Description of Artificial Sequence: Synthetic oligonucleotide
cugcauguacccuaggugc

SEQ ID NO: 1280647 - RNA, 19 nt, Artificial Sequence
  Description of Artificial Sequence: Synthetic oligonucleotide
uuuuagacuccagaaacca

SEQ ID NO: 1280648 - RNA, 19 nt, Artificial Sequence
  Description of Artificial Sequence: Synthetic oligonucleotide
uuguacaccucgauuagca

SEQ ID NO: 1280649 - RNA, 19 nt, Artificial Sequence
  Description of Artificial Sequence: Synthetic oligonucleotide
uauucucaaauucccugag

SEQ ID NO: 1280650 - RNA, 19 nt, Artificial Sequence
  Description of Artificial Sequence: Synthetic oligonucleotide
uucggcaguagacagccag

SEQ ID NO: 1280651 - RNA, 19 nt, Artificial Sequence
  Description of Artificial Sequence: Synthetic oligonucleotide
uuuagacuccagaaaccag

SEQ ID NO: 1280652 - RNA, 19 nt, Artificial Sequence
  Description of Artificial Sequence: Synthetic oligonucleotide
caaacacugauucucuccc

SEQ ID NO: 1280653 - RNA, 19 nt, Artificial Sequence
  Description of Artificial Sequence: Synthetic oligonucleotide
agauuguucagcuggguga

SEQ ID NO: 1280654 - RNA, 19 nt, Artificial Sequence
  Description of Artificial Sequence: Synthetic oligonucleotide
uuuuauuugugcccauaac

SEQ ID NO: 1280655 - RNA, 19 nt, Artificial Sequence
  Description of Artificial Sequence: Synthetic oligonucleotide
uauuugugcccauaacccc

SEQ ID NO: 1280656 - RNA, 19 nt, Artificial Sequence
  Description of Artificial Sequence: Synthetic oligonucleotide
ucugcuugcggucaccucu

SEQ ID NO: 1280657 - RNA, 19 nt, Artificial Sequence
  Description of Artificial Sequence: Synthetic oligonucleotide
guacaccucgauuagcagg

SEQ ID NO: 1280658 - RNA, 19 nt, Artificial Sequence
  Description of Artificial Sequence: Synthetic oligonucleotide
auguccccuccuuaaagcc

SEQ ID NO: 1280659 - RNA, 19 nt, Artificial Sequence
  Description of Artificial Sequence: Synthetic oligonucleotide
uuauucugaucucucuucu

SEQ ID NO: 1280660 - RNA, 19 nt, Artificial Sequence
  Description of Artificial Sequence: Synthetic oligonucleotide
ugagauagaagagugggau

SEQ ID NO: 1280661 - RNA, 19 nt, Artificial Sequence
  Description of Artificial Sequence: Synthetic oligonucleotide
auagucuacgagccagccc

SEQ ID NO: 1280662 - RNA, 19 nt, Artificial Sequence
  Description of Artificial Sequence: Synthetic oligonucleotide
ugcccauaaccccuggagg

SEQ ID NO: 1280663 - RNA, 19 nt, Artificial Sequence
  Description of Artificial Sequence: Synthetic oligonucleotide
ucccaaagcuaaauggccc

SEQ ID NO: 1280664 - RNA, 19 nt, Artificial Sequence
  Description of Artificial Sequence: Synthetic oligonucleotide
gucgccaggagugacaugg

SEQ ID NO: 1280665 - RNA, 19 nt, Artificial Sequence
  Description of Artificial Sequence: Synthetic oligonucleotide
aguuaccaacuacagccac

SEQ ID NO: 1280666 - RNA, 19 nt, Artificial Sequence
  Description of Artificial Sequence: Synthetic oligonucleotide
uuaccaacuacagccaccc

SEQ ID NO: 1280667 - RNA, 19 nt, Artificial Sequence
  Description of Artificial Sequence: Synthetic oligonucleotide
aaaacacacuuguuuuaga

SEQ ID NO: 1280668 - RNA, 19 nt, Artificial Sequence
  Description of Artificial Sequence: Synthetic oligonucleotide
ugcauuuuauuugugccca

SEQ ID NO: 1280669 - RNA, 19 nt, Artificial Sequence
  Description of Artificial Sequence: Synthetic oligonucleotide
cuucaccaaacacugauuc

SEQ ID NO: 1280670 - RNA, 19 nt, Artificial Sequence
  Description of Artificial Sequence: Synthetic oligonucleotide
uuaccuccaugccagaccu

SEQ ID NO: 1280671 - RNA, 19 nt, Artificial Sequence
  Description of Artificial Sequence: Synthetic oligonucleotide
ucaggcuguauucucaaau

SEQ ID NO: 1280672 - RNA, 19 nt, Artificial Sequence
  Description of Artificial Sequence: Synthetic oligonucleotide
acuagguucucaucagcag

SEQ ID NO: 1280673 - RNA, 19 nt, Artificial Sequence
  Description of Artificial Sequence: Synthetic oligonucleotide
gagauuguucagcugggug

SEQ ID NO: 1280674 - RNA, 19 nt, Artificial Sequence
  Description of Artificial Sequence: Synthetic oligonucleotide
aaggaccucauaggggccc

SEQ ID NO: 1280675 - RNA, 19 nt, Artificial Sequence
  Description of Artificial Sequence: Synthetic oligonucleotide
uacgagccagcccagcccg

SEQ ID NO: 1280676 - RNA, 19 nt, Artificial Sequence
  Description of Artificial Sequence: Synthetic oligonucleotide
auaguggggaggcagcuug

SEQ ID NO: 1280677 - RNA, 19 nt, Artificial Sequence
  Description of Artificial Sequence: Synthetic oligonucleotide
gaugcaaucccucccuaac

SEQ ID NO: 1280678 - RNA, 19 nt, Artificial Sequence
  Description of Artificial Sequence: Synthetic oligonucleotide
ugucauccaaucagagaag

SEQ ID NO: 1280679 - RNA, 19 nt, Artificial Sequence
  Description of Artificial Sequence: Synthetic oligonucleotide
ugcaaucccucccuaacac

SEQ ID NO: 1280680 - RNA, 19 nt, Artificial Sequence
  Description of Artificial Sequence: Synthetic oligonucleotide
ugcaccaauaguggggagg

SEQ ID NO: 1280681 - RNA, 19 nt, Artificial Sequence
  Description of Artificial Sequence: Synthetic oligonucleotide
ccagacauggaugagauag

SEQ ID NO: 1280682 - RNA, 19 nt, Artificial Sequence
  Description of Artificial Sequence: Synthetic oligonucleotide
uagguagggaaauccagac

SEQ ID NO: 1280683 - RNA, 19 nt, Artificial Sequence
  Description of Artificial Sequence: Synthetic oligonucleotide
ucuacgagccagcccagcc

SEQ ID NO: 1280684 - RNA, 19 nt, Artificial Sequence
  Description of Artificial Sequence: Synthetic oligonucleotide
cuugacucccuuccguugg

SEQ ID NO: 1280685 - RNA, 19 nt, Artificial Sequence
  Description of Artificial Sequence: Synthetic oligonucleotide
ucacuucggcaguagacag

SEQ ID NO: 1280686 - RNA, 19 nt, Artificial Sequence
  Description of Artificial Sequence: Synthetic oligonucleotide
cuuaccuccaugccagacc

SEQ ID NO: 1280687 - RNA, 19 nt, Artificial Sequence
  Description of Artificial Sequence: Synthetic oligonucleotide
cuugcggucaccucuggug

SEQ ID NO: 1280688 - RNA, 19 nt, Artificial Sequence
  Description of Artificial Sequence: Synthetic oligonucleotide
uugaaaggguacagaaacu

SEQ ID NO: 1280689 - RNA, 19 nt, Artificial Sequence
  Description of Artificial Sequence: Synthetic oligonucleotide
aacacugauucucucccaa

SEQ ID NO: 1280690 - RNA, 19 nt, Artificial Sequence
  Description of Artificial Sequence: Synthetic oligonucleotide
uaacaucucuccuguacug

SEQ ID NO: 1280691 - RNA, 19 nt, Artificial Sequence
  Description of Artificial Sequence: Synthetic oligonucleotide
uaaauggccccuaguuacc

SEQ ID NO: 1280692 - RNA, 19 nt, Artificial Sequence
  Description of Artificial Sequence: Synthetic oligonucleotide
ucacguacuggaucucccg

SEQ ID NO: 1280693 - RNA, 19 nt, Artificial Sequence
  Description of Artificial Sequence: Synthetic oligonucleotide
gacuaaaccaaauaaccau

SEQ ID NO: 1280694 - RNA, 19 nt, Artificial Sequence
  Description of Artificial Sequence: Synthetic oligonucleotide
gagauagaagagugggaug

SEQ ID NO: 1280695 - RNA, 19 nt, Artificial Sequence
  Description of Artificial Sequence: Synthetic oligonucleotide
uaacaccuucaccaaacac

SEQ ID NO: 1280696 - RNA, 19 nt, Artificial Sequence
  Description of Artificial Sequence: Synthetic oligonucleotide
aacuaggacuaccugcaaa

SEQ ID NO: 1280697 - RNA, 19 nt, Artificial Sequence
  Description of Artificial Sequence: Synthetic oligonucleotide
ugccagaccugacaguccc

SEQ ID NO: 1280698 - RNA, 19 nt, Artificial Sequence
  Description of Artificial Sequence: Synthetic oligonucleotide
uguacaccucgauuagcag

SEQ ID NO: 1280699 - RNA, 19 nt, Artificial Sequence
  Description of Artificial Sequence: Synthetic oligonucleotide
uccuuaaagcccucccucc

SEQ ID NO: 1280700 - RNA, 19 nt, Artificial Sequence
  Description of Artificial Sequence: Synthetic oligonucleotide
agggccgugaagucaacuc

SEQ ID NO: 1280701 - RNA, 19 nt, Artificial Sequence
  Description of Artificial Sequence: Synthetic oligonucleotide
agcuaaauggccccuaguu

SEQ ID NO: 1280702 - RNA, 19 nt, Artificial Sequence
  Description of Artificial Sequence: Synthetic oligonucleotide
guacugaggacuugacucc

SEQ ID NO: 1280703 - RNA, 19 nt, Artificial Sequence
  Description of Artificial Sequence: Synthetic oligonucleotide
ugacuagguucucaucagc

SEQ ID NO: 1280704 - RNA, 19 nt, Artificial Sequence
  Description of Artificial Sequence: Synthetic oligonucleotide
aagucuuccaucuguucua

SEQ ID NO: 1280705 - RNA, 19 nt, Artificial Sequence
  Description of Artificial Sequence: Synthetic oligonucleotide
ugguuccucaguugcauug

SEQ ID NO: 1280706 - RNA, 19 nt, Artificial Sequence
  Description of Artificial Sequence: Synthetic oligonucleotide
uucacguacuggaucuccc

SEQ ID NO: 1280707 - RNA, 19 nt, Artificial Sequence
  Description of Artificial Sequence: Synthetic oligonucleotide
guauucucaaauucccuga

SEQ ID NO: 1280708 - RNA, 19 nt, Artificial Sequence
  Description of Artificial Sequence: Synthetic oligonucleotide
uaguuaccaacuacagcca

SEQ ID NO: 1280709 - RNA, 19 nt, Artificial Sequence
  Description of Artificial Sequence: Synthetic oligonucleotide
auggccccuaguuaccaac

SEQ ID NO: 1280710 - RNA, 19 nt, Artificial Sequence
  Description of Artificial Sequence: Synthetic oligonucleotide
cacugauucucucccaaag

SEQ ID NO: 1280711 - RNA, 19 nt, Artificial Sequence
  Description of Artificial Sequence: Synthetic oligonucleotide
cuauguccccuccuuaaag

SEQ ID NO: 1280712 - RNA, 19 nt, Artificial Sequence
  Description of Artificial Sequence: Synthetic oligonucleotide
uucaccaaacacugauucu

SEQ ID NO: 1280713 - RNA, 19 nt, Artificial Sequence
  Description of Artificial Sequence: Synthetic oligonucleotide
cacuagaugcaaucccucc

SEQ ID NO: 1280714 - RNA, 19 nt, Artificial Sequence
  Description of Artificial Sequence: Synthetic oligonucleotide
aguagguagggaaauccag

SEQ ID NO: 1280715 - RNA, 19 nt, Artificial Sequence
  Description of Artificial Sequence: Synthetic oligonucleotide
ugggauggaggguaggagu

SEQ ID NO: 1280716 - RNA, 19 nt, Artificial Sequence
  Description of Artificial Sequence: Synthetic oligonucleotide
uguccccuccuuaaagccc

SEQ ID NO: 1280717 - RNA, 19 nt, Artificial Sequence
  Description of Artificial Sequence: Synthetic oligonucleotide
accaauaguggggaggcag

SEQ ID NO: 1280718 - RNA, 19 nt, Artificial Sequence
  Description of Artificial Sequence: Synthetic oligonucleotide
uggcuaacaucucuccugu

SEQ ID NO: 1280719 - RNA, 19 nt, Artificial Sequence
  Description of Artificial Sequence: Synthetic oligonucleotide
ccaaggaccucauaggggc

SEQ ID NO: 1280720 - RNA, 19 nt, Artificial Sequence
  Description of Artificial Sequence: Synthetic oligonucleotide
acuuauucugaucucucuu

SEQ ID NO: 1280721 - RNA, 19 nt, Artificial Sequence
  Description of Artificial Sequence: Synthetic oligonucleotide
ugauucucucccaaagcua

SEQ ID NO: 1280722 - RNA, 19 nt, Artificial Sequence
  Description of Artificial Sequence: Synthetic oligonucleotide
uggaagcccgcccuccagg

SEQ ID NO: 1280723 - RNA, 19 nt, Artificial Sequence
  Description of Artificial Sequence: Synthetic oligonucleotide
aauucccugagggccuugg

SEQ ID NO: 1280724 - RNA, 19 nt, Artificial Sequence
  Description of Artificial Sequence: Synthetic oligonucleotide
cauccaaucagagaagcca

SEQ ID NO: 1280725 - RNA, 19 nt, Artificial Sequence
  Description of Artificial Sequence: Synthetic oligonucleotide
aaggguacagaaacugacu

SEQ ID NO: 1280726 - RNA, 19 nt, Artificial Sequence
  Description of Artificial Sequence: Synthetic oligonucleotide
gaagucaacucgcucuguc

SEQ ID NO: 1280727 - RNA, 19 nt, Artificial Sequence
  Description of Artificial Sequence: Synthetic oligonucleotide
ugcauguacccuaggugcu

SEQ ID NO: 1280728 - RNA, 19 nt, Artificial Sequence
  Description of Artificial Sequence: Synthetic oligonucleotide
aggacuugacucccuuccg

SEQ ID NO: 1280729 - RNA, 19 nt, Artificial Sequence
  Description of Artificial Sequence: Synthetic oligonucleotide
gugcccauaaccccuggag

SEQ ID NO: 1280730 - RNA, 19 nt, Artificial Sequence
  Description of Artificial Sequence: Synthetic oligonucleotide
aaggagaggcggcgacggc

SEQ ID NO: 1280731 - RNA, 19 nt, Artificial Sequence
  Description of Artificial Sequence: Synthetic oligonucleotide
gaaaggagaggcggcgacg

SEQ ID NO: 1280732 - RNA, 19 nt, Artificial Sequence
  Description of Artificial Sequence: Synthetic oligonucleotide
aacaucucuccuguacuga

SEQ ID NO: 1280733 - RNA, 19 nt, Artificial Sequence
  Description of Artificial Sequence: Synthetic oligonucleotide
aagcuaaauggccccuagu

SEQ ID NO: 1280734 - RNA, 19 nt, Artificial Sequence
  Description of Artificial Sequence: Synthetic oligonucleotide
agucaacucgcucugucau

SEQ ID NO: 1280735 - RNA, 19 nt, Artificial Sequence
  Description of Artificial Sequence: Synthetic oligonucleotide
accaacuacagccacccuu

SEQ ID NO: 1280736 - RNA, 19 nt, Artificial Sequence
  Description of Artificial Sequence: Synthetic oligonucleotide
ugcggaaaggagaggcggc

SEQ ID NO: 1280737 - RNA, 19 nt, Artificial Sequence
  Description of Artificial Sequence: Synthetic oligonucleotide
cacacuuguuuuagacucc

SEQ ID NO: 1280738 - RNA, 19 nt, Artificial Sequence
  Description of Artificial Sequence: Synthetic oligonucleotide
gugaagucaacucgcucug

SEQ ID NO: 1280739 - RNA, 19 nt, Artificial Sequence
  Description of Artificial Sequence: Synthetic oligonucleotide
gcuaacaucucuccuguac

SEQ ID NO: 1280740 - RNA, 19 nt, Artificial Sequence
  Description of Artificial Sequence: Synthetic oligonucleotide
ucuggcgguaccugagagc

SEQ ID NO: 1280741 - RNA, 19 nt, Artificial Sequence
  Description of Artificial Sequence: Synthetic oligonucleotide
guacccuaggugcuucggg

SEQ ID NO: 1280742 - RNA, 19 nt, Artificial Sequence
  Description of Artificial Sequence: Synthetic oligonucleotide
acuugacucccuuccguug

SEQ ID NO: 1280743 - RNA, 19 nt, Artificial Sequence
  Description of Artificial Sequence: Synthetic oligonucleotide
uacccuaggugcuucgggu

SEQ ID NO: 1280744 - RNA, 19 nt, Artificial Sequence
  Description of Artificial Sequence: Synthetic oligonucleotide
cagaccucccucuuccagc

SEQ ID NO: 1280745 - RNA, 19 nt, Artificial Sequence
  Description of Artificial Sequence: Synthetic oligonucleotide
guugcauugaaaggguaca

SEQ ID NO: 1280746 - RNA, 19 nt, Artificial Sequence
  Description of Artificial Sequence: Synthetic oligonucleotide
uccuauguccccuccuuaa

SEQ ID NO: 1280747 - RNA, 19 nt, Artificial Sequence
  Description of Artificial Sequence: Synthetic oligonucleotide
cacggauggaggcugcacc

SEQ ID NO: 1280748 - RNA, 19 nt, Artificial Sequence
  Description of Artificial Sequence: Synthetic oligonucleotide
gacuagguucucaucagca

SEQ ID NO: 1280749 - RNA, 19 nt, Artificial Sequence
  Description of Artificial Sequence: Synthetic oligonucleotide
acuaaaccaaauaaccaua

SEQ ID NO: 1280750 - RNA, 19 nt, Artificial Sequence
  Description of Artificial Sequence: Synthetic oligonucleotide
accugcauguacccuaggu

SEQ ID NO: 1280751 - RNA, 19 nt, Artificial Sequence
  Description of Artificial Sequence: Synthetic oligonucleotide
uguguccuauguccccucc

SEQ ID NO: 1280752 - RNA, 19 nt, Artificial Sequence
  Description of Artificial Sequence: Synthetic oligonucleotide
ccaaacacugauucucucc

SEQ ID NO: 1280753 - RNA, 19 nt, Artificial Sequence
  Description of Artificial Sequence: Synthetic oligonucleotide
auggcugcggaaaggagag

SEQ ID NO: 1280754 - RNA, 19 nt, Artificial Sequence
  Description of Artificial Sequence: Synthetic oligonucleotide
guuaccaacuacagccacc

SEQ ID NO: 1280755 - RNA, 19 nt, Artificial Sequence
  Description of Artificial Sequence: Synthetic oligonucleotide
ggugcuucggguccucugg

SEQ ID NO: 1280756 - RNA, 19 nt, Artificial Sequence
  Description of Artificial Sequence: Synthetic oligonucleotide
ggagugacauggcugagac

SEQ ID NO: 1280757 - RNA, 19 nt, Artificial Sequence
  Description of Artificial Sequence: Synthetic oligonucleotide
ggaguagguagggaaaucc

SEQ ID NO: 1280758 - RNA, 19 nt, Artificial Sequence
  Description of Artificial Sequence: Synthetic oligonucleotide
uguacccuaggugcuucgg

SEQ ID NO: 1280759 - RNA, 19 nt, Artificial Sequence
  Description of Artificial Sequence: Synthetic oligonucleotide
cccaacuaggacuaccugc

SEQ ID NO: 1280760 - RNA, 19 nt, Artificial Sequence
  Description of Artificial Sequence: Synthetic oligonucleotide
acgguuccgugccucuagc

SEQ ID NO: 1280761 - RNA, 19 nt, Artificial Sequence
  Description of Artificial Sequence: Synthetic oligonucleotide
ggcuguauucucaaauucc

SEQ ID NO: 1280762 - RNA, 19 nt, Artificial Sequence
  Description of Artificial Sequence: Synthetic oligonucleotide
aggcugcaccaauaguggg
